United States Patent Application Publication US 2025/0074962 A1 - sequence listing, part 9

SEQ ID NO: 14236 - DNA, 4842 bp, synthetic construct
  misc_feature 1..4842: note = Description of Artificial Sequence: Synthetic coding sequence
  source 1..4842: mol_type = other DNA
atggttgacgcatcaggtagagctgccgccgagggatggcgcaagatggaggcaccccctgacggcgctgccgacctcgtccccttggataggtatgatgcagcccgagcaaagatcgccgcaaatctacagtggatctgcgcaaaagcgtacggcagggataacatacccgaggacctgagggacccattttacgtggaccagtatgaacaggaacatatcaaaccacccgtgattaaactcctgttaagcagcgagttgtactgcagggtatgttccctcattctcaagggcgaccaggtggccgccctccagggccaccaaagcgtgattcaggcgctttctaggaaagggatttatgtcatggagtctgacgatacaccagttaccgagtccgacctctcccgagcaccgataaagatgtctgcccacatggccatggtcgatgccttgatgatggcctatactgtggagatgatttccatagagaaggtcgtggcttctgtgaagaggttctccaccttctctgcgagcaaagagctcccctacgatcttgaggacgccatggtgttctggatcaataaagtgaatctcaagatgagggagatcaccgaaaaggaggtgaagcttaaacagcagttgctggagtccccggcacaccagaaatccccgagcaagtggtattggaaactggtccctgtgcgctacagacgagaacacctctccgccaggcagagcccatattttccgttgttggaggacctgatgcgggacggatccgacggagccgctcttttagcagtgatccactactattgcccagaacaaatgaagttagacgacatctgcctgaaagaagtaacttccatggccgatagcctgtataacatccgcctgctgcgtgaattttctaatgaatatttgaacaaatgtttctacctcacccttgaagacatgctttacgctcctttagtattgaagcctaatgtgatggtgttcatcgctgagcttttttggtggtttgagaacgtgaagccggatttcgtccaaccgagagacgtccaggagcttaaagatgccaaaactgtccttcaccagaaaagctctcggcctccagttccgatcagtaacgccacaaaaagatcgttcctcggatcgccggccgccggcacactggcagaactgcagcccccagtacagctgcctgcggagggttgtcacaggcattatctgcaccccgaagagccggagtacttaggcaagggtaccgcagcattctctcccagccaccctctgcttccactcaggcagaagcagcaaaaatctatccagggtgaagatatcccagaccagcgccatcggagcaatagtctgacccgggtggatggtcagccaaggggggcggccatcgcctggccagagaagaaaactcgcccggcttcccagcctacaccgttcgctctgcatcacgcagcgtcatgcgaggtggacccatcgagcggcgactccatctctctcgctagaagcatttcaaaggattctcttgccagcaatattgtgaacttgaccccgcagaaccaaccccatcccaccgccaccaaaagtcacggcaaaagtctcctgagcaatgtgtcaatcgaggacgaggaagaagagctcgtggcaattgtgagggcagacgtggttccccaacaagcagacccagaatttcctagagccagcccccgcgccttagggttaactgccaacgcccggtccccccagggccagctggatacaagtgagtcaaaaccagacagcttcttccttgagcccctcatgccagcagtgctcaaacctgccaaagaaaaacaagtgatcacaaaggaagacgagcgaggggaaggcagacccaggtcaatcgtgagtaggagaccgtctgaaggaccacaacccctagtccgtcgaaaaatgactggctctagggatctgaaccgcacttttacacccatcccctgcagcgaattccctatgggaatcgatcctaccgagactggaccactctccgttgagaccgctggggaagtgtgcgggggtcccctagcactgggagggttcgacccctttcctcaaggccctagcaccgacggattcttcctccatgtgggacgggctgacgaagatactgaaggacgactgtatgtttcctgttcgaagtctcctaatagccacgacagcgaaccatggactctcctcagacaggattccgactccgacgtggttgacattgaagaggcagagcacgactttatgggcgaggctcaccccgtggttttttccagatacatcggagaggaggagtctgccaaactccaggaggacatgaaggtcaaggaacacgaggataaggacgatgcctctgggagaagctctccatgtttgtccacagcctcccagatgagttcggtgtctatggccagcggctctgtaaagatgaccagcttcgccgagaggaagctgcaacggctcaactcatgtgagaccaaaagcagtacctccagttcacagaagacgacccccgacgcaagtgagtcttgccctgctcccctcacaacatggaggcagaagcgcgaacagagtccttcccagcatggtaaggatcctgcctcattactggctagtgaacttgttcagctacacatgcagctggaggagaagcggcgggctatcgaagcccagaaaaaaaaaatggaggccctgtccgcacggcagcgcctgaagctcggtaaggccgcgttcctgcatgtggtgaagaagggaaaagctgaggcggcccccccgctcaggccagagcacttcgctaaagaatacagccagcacaatggagaggattgcggcgatgccgtgagcaagacagaggatttcctggttaaggaggaacaaagggaggagctcctacatgaaccacaggatgtggacaaggaatcactcgccttcgcccaacagcacaaggccaaagatcccgtggcactccatgagcttgagagaaataaagtcatatccgcagctctcctcgaggatacagtaggcgaggtcgttgacgtaaatgagtgcgacctctcaatcgagaagctgaacgagacaatctccacacttcaacaggcaatcttgaagatcagccaacagcaggaacaacttctgatgaagtcccctaccgtgcccgtgcccggttcaaagaataatagtcaggatcataaggtgaaggcccccgtgcactttgtcgagcccctgagtccaactggggtggctggacaccggaaagcccctcgcttgggccaggggagaaatagcaggtctggtcggcccgccgagctgaaggtccccaaagataggccccagggctcttctagatcaaagacccccactccctcggtggagacactgcctcatctgaggccttttcccgcatcctctcatccaagaacaccaacagaccctggtctggacagcgcgctggaacccagtggcgacccccacggcaagtgtctgtttgattcgtacagactgcacgacgaaagcaaccagcggactttgactctcagctcctccaaagacgctaatatcctgagcgaacagatgtccctgaaagaggtgctggacgcttctgtgaaggaggtgggatcctcttcttccgatgtcagcgggaaggagtccgtgccagtggaagaacccctcagatcacgcgccagtctgatcgaggtggacttgagtgatctcaaagccccagacgaggacggtgagttagtgagcctcgacggctccgctgatctggtgagcgagggagaccagaaaccaggggtggggttcttcttcaaggatgagcagaaagctgaggacgagctggcaaagaagcgcgcggccttcctcctgaaacaacagagaaaagctgaggaagcaagagtgagaaagcagcagctggaggcagaggtggagcttaagagggatgaagctcgacgtaaggccgaagaggacagggtgaggaaagaagaggagaaagccagacgcgaactgattaagcaggagtatctcaggcggaaacagcaacagattttggaggaacagggcctcgggaaaccgaaatcgaaaccaaagaaacctcggcctaaatccgtgcatcgagaagagagttgttcagactcaggtaccaaatgttcaagcacacccgacaacctgtctcgcacgcaatccgggtctagcctgagcttggcctctgcggctacaaccgagcccgaatcagtccacagcggcggcacaccctcacaacgtgttgagagcatggaagccttgccgatcctctccagaaatccaagtagatccacagaccgggactgggagactgcatccgcagcttcaagtctcgctagtgttgccgagtataccggtcccaagctcttcaaagaaccctccagtaaatcaaacaagcccattattcacaacgctatttcccactgctgtttggctggaaaggtgaacgagccgcacaaaaactctatcctggaagagcttgagaagtgcgacgccaaccattatattatcctgtttcgcgatgcaggatgccagtttagggcactgtattgttattaccccgacaccgaagaaatctacaaactcactggaacaggaccaaagaatatcacgaagaaaatgattgacaagctctataagtattcctcggaccgcaaacagttcaacctgatacccgcaaagacaatgagtgtgagtgttgacgcgctgacgattcacaatcacctgtggcagcccaagcgccccgccgttcccaagaaagcccaaactagaaaatag

SEQ ID NO: 14237 - DNA, 1983 bp, synthetic construct
  misc_feature 1..1983: note = Description of Artificial Sequence: Synthetic coding sequence
  source 1..1983: mol_type = other DNA
atgagaatgccatcctccacctgggctcgcatcatgtcatcgtgcgggtgtgatgcatgtagggtcggtcctagcagcgtaatgagaccaagtcctcggtatcctcgcgcctgggtaacacgaacttgggtgccgattcctcctcgtccaatggcatcgagcggctcagtaccaagagactgttggctgctagcagccatcgcaagtttaacactgaatgacaccctgctgcaccgagtagtgccccatggccagagctttcagaacggctacgcaggcatctttcacttccagctctggcagttcggggaatgggtagatgtcgtcgtagatgacctcttgcctatcaaggatgggaagctggtttttgtacattccgccgagggaaatgagttttggagcgcccttctcgaaaaagcgtatgccaaggtcaatggatcttacgaggccttgagcggtggctccactagtgagggcttcgaagacttcacagggggagttacagaatggtatgagttgagaaaggccccttcagacttataccaaatcattctgaaagccctggagcgaggcagtctgctcggttgcagcatcgacattagctcggttcttgacatggaggccattacctttaagaagctggttaaaggccatgcttactctgtaaccggcgctaagcaagtaaactacaggggccaggtcgtcagtctgatccggatgagaaatccatggggagaagtggagtggacaggcgcctggtctgattcgtcctcagagtggaacaacgtggatccctatgagcgggaccagctgagggttaagatggaggacggcgaattttggatgagcttccgcgacttcatgagggagtttacccggttggaaatatgtaacctgacacctgacgccctaaaatccagaacgattcggaaatggaacacaaccctgtacgaagggacatggcgccgtggctcaacggctggcggttgtcgcaactacccagcaactttctgggttaatcctcagtttaaaattcgcctggacgagacggacgatcccgatgactatggggacagagagtcaggttgctcttttgtgcttgccctgatgcaaaagcaccgccgtagagagcgacggtttggaagggatatggagacaattggttttgccgtttacgaagttccaccagagctggtgggccagccagcggtgcatttaaaacgcgattttttcttggccaatgctagcagagctcggtccgagcagttcataaacctgcgcgaggtgagcactcggtttaggctcccaccaggagaatacgtggtggtgccatctacgttcgagcctaacaaggaaggagatttcgtgctccgattcttcagcgagaaaagcgctggaactgtcgagctggacgatcagattcaggctaacctcccagacgaacaagtccttagtgaggaggagatcgacgagaatttcaaggccttgttcagacagctcgcgggagaggacatggagatctcggtgaaagagctaaggactatcctgaatcgcattatttctaagcacaaggatcttcgcactaaggggttctcgttggagtcttgtcgtagtatggtgaacctgatggacagagacggaaatggaaaactggggttggtcgagtttaacatactctggaatcggatccgcaactacctctcaatcttccggaagttcgatcttgacaagagtggttccatgagtgcttacgaaatgcgaatggctattgagtctgccggctttaaattgaacaaaaagctttacgagctgatcataactaggtattcagaacccgaccttgctgtcgattttgataatttcgtgtgctgtctcgttcggcttgaaaccatgtttaggtttttcaagactctggacacagacttagatggggtcgtcacctttgacctctttaagtggctgcagctcaccatgttcgcatag

SEQ ID NO: 14238 - DNA, 2145 bp, synthetic construct
  misc_feature 1..2145: note = Description of Artificial Sequence: Synthetic coding sequence
  source 1..2145: mol_type = other DNA
atgtctgaggagattatcacgcctgtttactgcaccggtgtttcagcacaagtccagaaacagagggcgcgagaactagggctcggacgtcacgaaaacgccattaagtacctgggacaagactatgagcagctgagagtgagatgcctacagtcaggaaccctgtttcgtgatgaagctttccctcctgtgcctcagagcctgggctacaaagatctgggtcccaatagctccaagacatacgggatcaaatggaagcggcccacagagctcctctccaatccgcagttcatcgtggacggcgctaccagaaccgatatctgtcagggcgccttgggagactgctggttactcgccgctatagcctcccttactttgaacgatacattactacatcgtgtggtaccccatggtcagagttttcagaatgggtacgctggaattttccactttcaactgtggcagtttggcgagtgggtcgacgtggttgtcgatgacctgctcccaataaaggatggtaagcttgtctttgtgcattccgccgaggggaacgagttctggtctgccctcctggagaaagcatatgctaaggtgaacgggagctacgaagccttatccggaggtagtacctctgaaggattcgaggactttactggcggtgtaacagaatggtacgagttgcgtaaggccccaagcgatctgtaccagattattcttaaagctctagagagaggatccttgttgggctgcagtattgatatatcttccgtgctcgacatggaggctatcacatttaaaaaactcgtgaaaggccatgcatattctgtgactggcgcgaagcaggtcaactatcgcggacaggtggtttcccttatccgtatgcgcaacccctggggggaggtagagtggactggagcttggtccgactcttcgtccgagtggaacaacgtggacccatacgagcgggatcagctccgagtaaaaatggaagacggagagttctggatgagcttcagagattttatgcgcgagttcacgcgtctggagatttgcaacctgacccctgatgcattgaagtctcgcaccatacgcaagtggaataccaccctctacgagggaacatggaggagggggtccaccgccggaggctgtagaaattaccccgctaccttctgggtcaacccccagttcaagatccggttggacgagaccgatgacccagatgattacggcgatcgagagtcgggatgttctttcgttttggcactcatgcagaaacataggcggagggaacggcgctttggacgcgacatggagaccatcggcttcgcggtttatgaggtcccgcccgagttagtgggccagcctgcggttcacctgaaacgtgatttcttcctggccaacgcatctagagctaggtctgagcagtttatcaacctccgtgaggtatcgacccgattccgcctgccaccgggggagtatgtcgtggtgccttctaccttcgagcctaataaggaaggggactttgtgttaagattcttttccgaaaaaagcgctgggaccgtggaactagacgatcagattcaggctaaccttcccgatgaacaagttttgagcgaagaagagatagatgagaatttcaaagcactcttccgacagcttgccggggaggacatggagatctctgtaaaagaattgcggaccattcttaatagaatcatcagtaagcacaaagatttgcggacaaaggggttcagtctcgagtcttgcaggtccatggtgaacctcatggatagagacgggaacgggaaactcgggctggtcgaattcaacatattatggaatagaattcggaattacctttctattttcaggaaattcgaccttgataaatccggatctatgagtgcttatgagatgagaatggccatcgagtcagcggggttcaagttaaacaaaaagttatacgaactgatcatcacaaggtactcagaacctgatctggccgttgatttcgacaattttgtgtgttgccttgtgagactggagactatgtttagattcttcaagactttagatacagacctagatggggtggtgacttttgatctcttcaaatggctacagctgaccatgtttgcctag

SEQ ID NO: 14239 - DNA, 2145 bp, synthetic construct
  misc_feature 1..2145: note = Description of Artificial Sequence: Synthetic coding sequence
  source 1..2145: mol_type = other DNA
atgtccgaggaaatcatcacccccgtctactgtaccggcgtgtcagctcaggttcagaaacaaagagcaagggagctgggcttgggacggcatgagaacgctataaagtatctggggcaggattatgagcagctgcgcgtccgatgcctgcagtccggcaccctgttccgggatgaggcatttccccccgtgccccagagcctgggctataaagacctgggccccaactcttcaaagacatacggaataaaatggaaaagaccaaccgagttactaagcaacccccaattcatcgtggacggggccacacgcacagatatctgccagggcgccctgggagactgttggcttttggctgcaatcgcctcccttacgctgaatgataccttgctgcatcgggtggtcccccacgggcagtctttccaaaacgggtacgcgggaatctttcacttccaattatggcaattcggggagtgggtggatgtagttgttgatgatctgctgcccatcaaagacgggaaactcgtctttgtgcactcggcggaagggaatgagttctggtccgctcttcttgagaaggcgtacgcaaaggtcaatgggtcttatgaagccttaagtggcggctccacgagcgagggtttcgaagattttactggaggtgtcactgagtggtatgagcttcgcaaagcccctagtgatttgtaccagattatcttaaaagccctcgagaggggaagcctacttggctgtagcatagacatctcctccgtccttgacatggaagccattaccttcaaaaaactggtcaaaggacacgcgtattcagtcaccggagcaaaacaggttaattatagggggcaggtggtatctttaatacgaatgcgcaatccctggggtgaggtcgagtggacaggggcatggagcgattcttccagtgaatggaataacgttgacccttatgaacgggaccagttgcgggtcaaaatggaggacggcgaattctggatgagctttagggacttcatgagggagttcacaaggctggaaatttgcaatcttaccccggacgctctcaaaagcagaacaatccgtaaatggaacacaaccctgtatgagggaacttggaggagaggaagcaccgccggcggttgtaggaactacccagccacattctgggtcaacccacaattcaaaattcgcttagatgagacagacgacccggacgattacggagatagagagagcggctgctccttcgtacttgctctgatgcagaagcacaggcgtcgtgagcgtcggtttggcagagatatggagaccatcggttttgccgtgtatgaggtcccaccagagctagtggggcagccagccgtccatttgaaacgggatttctttcttgcaaacgcttctcgggcccgctcagagcaatttattaatttgcgcgaagtctcaacccggtttcgcctcccccctggggaatacgtggtggtgcctagtacgttcgagcccaataaggagggggattttgtacttaggttcttcagcgagaaatcagctggcacagtcgagctggatgaccaaatccaggctaacttgccagacgaacaagtgctgtccgaggaagaaattgacgagaactttaaagcgcttttccgccagctggcaggggaggacatggaaatttccgtgaaggagctgagaacaatactcaacaggatcataagtaagcataaagatcttcggaccaaagggttttcacttgagtcttgtagaagcatggtcaatctgatggatagggatggaaatgggaagctcggccttgtagaattcaatatcctgtggaatcgcatcagaaattacctgtcgatctttaggaagttcgaccttgataagtccggatccatgagtgcatatgaaatgaggatggccatcgagagcgctggtttcaaactgaacaagaagctgtacgagctgattatcactagatactctgaacctgatctcgctgtagatttcgacaactttgtgtgctgcctggttaggctggaaacaatgtttcggttcttcaaaacccttgatacggatcttgatggggtggttacgtttgacctcttcaaatggctgcagctaaccatgtttgcctag

SEQ ID NO: 14240 - DNA, 489 bp, synthetic construct
  misc_feature 1..489: note = Description of Artificial Sequence: Synthetic coding sequence
  source 1..489: mol_type = other DNA
atgagtgaggagattatcacacccgtgtactgtaccggggtgagcgcccaagtacagaaacaaagagcacgcgagctagggctagggcgccatgaaaacgcaattaaatatcttgggcaggactacgaacagttgagagtaaggtgcctgcaatcaggtacactctttagggatgaagctttcccaccagttccccagtccctgggatacaaagacctgggaccgaactcctccaagacatacggcatcaagtggaaaaggcctactgagctgctgagcaatccccagttcatagtggacggcgcaacaagaaccgatatctgtcagggcgcacttggggactgctggctccttgccgccattgcttccctaactctgaatgatacccttctgcaccgcgtcgtcccgcacgggcaaagcttccagaacggttacgcagggatctttcacttccagctgtggcaatttggtgaatgggtggatgtatag

SEQ ID NO: 14241 - DNA, 2145 bp, synthetic construct
  misc_feature 1..2145: note = Description of Artificial Sequence: Synthetic coding sequence
  source 1..2145: mol_type = other DNA
atgagcgaggaaatcattacaccagtatactgtacaggggtatcagcccaggtgcagaaacagcgagctagggagctagggctgggaagacatgaaaacgccataaagtatcttggccaggactatgaacaattgcgagtccggtgcttgcagagcggaaccctcttccgcgatgaagctttcccacccgttcctcaatccctgggctacaaagatctcgggcctaactcctctaagacgtatggaataaagtggaagcggcccaccgaactactgtccaacccccagtttatcgtcgacggcgccactagaaccgacatttgccaaggagctctgggcgactgttggttgcttgctgctattgcctcactgactctgaatgacaccctgctccacagagtagtgcctcatgggcaaagcttccagaatggctatgcgggaattttccatttccagctgtggcagttcggggagtgggtggatgtggttgtcgacgatctcctgccaattaaggacggcaagctggtgttcgtacactccgccgaaggaaatgaattctggagtgccctcctggaaaaggcatatgcgaaggtgaatggctcatacgaagctctgagcggcggctcaaccagtgagggctttgaggattttacgggcggggtgactgagtggtatgaactccgaaaggcccctagtgacctataccagataattttaaaggccctggaacgcggctctcttctgggatgttcgatagacatctctagcgtccttgatatggaggcgatcacatttaagaagcttgtgaaaggtcacgcgtatagtgtcactggtgctaagcaggtgaattatcggggccaggtcgttagtctcattagaatgcgcaatccttggggcgaggttgaatggactggagcttggtccgattcatcctccgaatggaataatgtcgacccgtacgaacgggatcaattaagagtaaagatggaggatggggagttctggatgagttttcgcgactttatgagagagttcacccgccttgagatttgtaatctgacaccagatgctcttaaaagcagaaccatcaggaaatggaatactacgctctacgaaggaacttggagaagaggaagcacagctgggggatgcagaaattatcctgcgaccttttgggtgaatccccagtttaagatccgtttagatgagacagacgaccccgacgattatggggatcgggaatcgggttgcagcttcgtgctggccttgatgcagaagcaccgaagacgagagagaagattcggcagggacatggaaacaatcgggtttgcagtgtacgaagtgccccctgagctggttgggcaacctgctgttcacctcaaacgcgatttctttctcgctaatgcctcccgggcgcgcagtgagcagtttattaatttaagagaggtttctactaggtttcgcctgccccccggggagtatgtcgtcgtaccaagcacgttcgaaccaaacaaagagggagacttcgtccttagattcttctcagaaaagagtgcaggaacggttgagctcgatgaccaaatccaggcgaaccttcccgatgagcaggttctcagcgaggaagagatcgatgagaactttaaggctttatttcgccagctagcgggggaggacatggagatatctgtgaaggaactgaggaccattcttaatcgaattatctcaaagcacaaggacctgagaaccaaaggcttttcgctcgaatcctgccgctccatggtgaacctcatggaccgggatggcaatggcaagttgggccttgtcgagttcaatattctgtggaaccggatacgaaactacttaagcatttttcgaaagttcgatcttgacaaaagcgggagtatgagtgcatatgaaatgaggatggccattgagagtgctggctttaagctgaacaagaaactatatgaattgattattactcgatactcagaacctgatctggcagtcgatttcgacaattttgtctgctgtctggtgcgcctcgagacgatgtttcgtttcttcaagaccttggataccgaccttgatggcgttgtgacctttgatctttttaagtggcttcagctaacaatgttcgcttag

SEQ ID NO: 14242 - DNA, 459 bp, synthetic construct
  misc_feature 1..459: note = Description of Artificial Sequence: Synthetic coding sequence
  source 1..459: mol_type = other DNA
atgagcgaggaaattattacaccggtgtactgtactggtgtcagcgcacaagtgcagaagcagagagcccgcgaactggggctgggacggcatgagaacgcgattaagtacttggggcaggactatgagcagctccgcgtgagatgccttcaaagtggcactttgtttcgggatgaggcattcccacccgtgccccagtccttgggctacaaggatctgggccccaactcaagtaaaacatatggaatcaaatggaagaggcctaccgagcttctatcaaacccccagtttatagtcgatggtgcgaccaggactgacatttgccaaggcgccctgggcgattgttggctcctcgctgccatcgccagcctgactttaaatgacaccctgctccaccgcgtagttcctcatgggcagtcattccagaatggttatgccggtatcttccattttcagtag

SEQ ID NO: 14243 - DNA, 489 bp, synthetic construct
  misc_feature 1..489: note = Description of Artificial Sequence: Synthetic coding sequence
  source 1..489: mol_type = other DNA
atgtccgaggaaattattaccccagtttattgcaccggcgtgagtgcccaggtgcagaaacagagagctcgggaattgggacttgggcggcacgaaaatgccataaagtatctcggacaggactacgaacaactaagagtgagatgtttgcagagtggcaccctttttcgagatgaagcattcccccctgttccccagagtctgggctacaaagatctcggacctaattccagcaagacatacggtatcaagtggaagaggcctactgagctgctctctaacccccaatttattgtggatggtgctacccgcaccgatatttgccagggcgccctcggcgactgctggctgcttgctgctatcgcctccctgactcttaatgataccctactgcaccgggtcgtcccacatggacagagttttcagaacggctacgcagggattttccattttcagctctggcagttcggggaatgggtggatgtgtag

SEQ ID NO: 14244 - DNA, 492 bp, synthetic construct
  misc_feature 1..492: note = Description of Artificial Sequence: Synthetic coding sequence
  source 1..492: mol_type = other DNA
atgagcgaggagatcataacccctgtttactgcactggcgtctccgctcaagtgcagaagcagcgggctcgtgagctgggactgggccggcatgagaacgctattaaatatctcggacaggactacgaacaacttagagtccgttgcctccagtctgggacactctttagagatgaagcatttcctccagtccctcagtcattgggatacaaagatttagggcctaatagttctaagacgtatggaattaagtggaagagacctaccgagttgcttagcaacccacagttcatcgtagacggagcaactcgaacggacatctgtcagggcgccctaggcgactgctggttgctagccgctattgcaagcttaaccctgaacgacaccttgctgcacagagtggtgccccacggccaatccttccagaacgggtatgctggcattttccattttcaactctggcagttcggcgagtgggtcgacgtggtgtag

SEQ ID NO: 14245 - DNA, 576 bp, synthetic construct
  misc_feature 1..576: note = Description of Artificial Sequence: Synthetic coding sequence
  source 1..576: mol_type = other DNA
atgtccgaagagattatcacccccgtgtattgtactggggtgagcgctcaggtccagaagcagcgcgctcgggaacttggccttggccgacacgagaatgcaataaagtatctgggacaggattacgagcaactacgagtgcggtgtctgcagtcaggcacactgttcagagatgaggccttccctccagttcctcagtcactgggttacaaagacctgggcccgaacagctcgaaaacttatggtatcaaatggaagcggcccactgaactgttatcaaatcctcagtttatcgtagatggcgcaacgagaaccgatatctgccagggagcattaggggactgctggctcctggccgccatagcatctttgaccctgaacgatactttgctacatcgggttgtcccccacggccagagtttccagaatggctatgccggcatattccatttccagctgtggcaattcggggagtgggtggatgtagtggtggacgacctgcttccgatcaaagatggcaagttggtttttgtacactcggcagagggcaacgaattctggtctgccctgctttag

SEQ ID NO: 14246 - DNA, 513 bp, synthetic construct
  misc_feature 1..513: note = Description of Artificial Sequence: Synthetic coding sequence
  source 1..513: mol_type = other DNA
atgtcagaagagattataactccagtttactgcaccggggtctctgctcaggtgcagaagcagcgcgcgagagagctggggcttggcagacacgaaaatgccattaagtacctaggacaggactatgaacagcttcgggtccggtgtctccagtctggaacattattccgggatgaagccttcccacccgtcccccaatcccttggatataaggacctggggccaaactccagcaagacttatggcatcaaatggaagcggcctaccgagttgctctccaacccccaattcatagtggatggcgctaccaggacagatatttgccagggcgcactgggtgattgttggctgctggcagcgatcgcctcactgaccctaaacgatacattgctgcacagagtcgtacctcacggccagtcgttccaaaatggctatgccggcatatttcattttcaactgtggcagttcggcgaatgggttgatgtcgtcgttgacgatctgctgcccatctag

SEQ ID NO: 14247 - DNA, 369 bp, synthetic construct
  misc_feature 1..369: note = Description of Artificial Sequence: Synthetic coding sequence
  source 1..369: mol_type = other DNA
atgtcggaagagattattacccccgtttactgtaccggcgtttccgcccaggttcagaagcagagagctcgggagctgggccttgggaggcacgaaaacgctattaagtatctgggacaggattacgagcaacttcgggtgagatgcctgcagagcggaacactcttccgtgacgaggctttccctcctgtcccccagtctttaggctacaaggacttgggccccaatagctcaaaaacctatggcattaagtggaaacgcccgacagaactgctgtcgaaccctcagtttatcgttgacggggctacaagaacggatatctgccagggagcgctcggtgactgttggctgcttgctgccatcgcttag

SEQ ID NO: 14248 - DNA, 192 bp, synthetic construct
  misc_feature 1..192: note = Description of Artificial Sequence: Synthetic coding sequence
  source 1..192: mol_type = other DNA
atgagtgaagaaattattacacctgtctactgtactggcgtctctgcacaggtgcaaaagcagcgtgctagagagctggggctgggacgacatgagaacgctataaagtatctggggcaggactacgaacagctgcgtgtccgctgcctgcagtcaggcaccctgtttcgcgatgaagccttcccgccctag

SEQ ID NO: 14249 - DNA, 2145 bp, synthetic construct
  misc_feature 1..2145: note = Description of Artificial Sequence: Synthetic coding sequence
  source 1..2145: mol_type = other DNA
atgagcgaggaaattatcactccagtgtactgtactggggttagtgctcaggtgcagaagcagagagcgagagagctgggactgggaagacacgagaacgcaattaagtatttgggtcaggactacgagcaactgagagtccggtgcctgcaatctggcacgctcttccgcgacgaagcttttccaccagtccctcagtccctgggctataaggacctgggaccaaattccagcaaaacgtacggaatcaagtggaagcggccgactgaactgctgagcaaccctcaattcatcgtagacggcgcgaccaggaccgatatctgccaaggagcgctgggcgattgctggctgctggccgctatagccagcctgaccttgaacgatacactcctgcatcgggtggtgccgcatggtcagtcattccaaaatggttatgccgggatctttcactttcaactgtggcagtttggcgaatgggtcgatgttgttgtagacgatttactgccaatcaaggatggtaaactggtgtttgttcacagcgctgagggaaatgaattctggtccgccttgctcgaaaaggcatacgctaaggttaacgggtcctacgaagccttgagtggggggtcaacttcagaaggcttcgaggattttacgggcggagtgactgagtggtatgaattacggaaagcccccagcgatctgtatcagatcattctgaaagccctcgaacggggaagcctccttggctgttcaattgacatcagctccgtgctggacatggaggccattaccttcaaaaaacttgtgaaggggcacgcttactccgttacaggtgccaaacaagtcaattacaggggacaggttgtaagcctgataagaatgcgtaatccatggggagaggttgaatggaccggcgcttggtcagactcctcgtctgaatggaacaacgtagacccatacgaacgggatcagttgcgcgtgaagatggaagatggggagttttggatgtcatttagggactttatgcgggagttcactagactggaaatctgcaacctgacacccgacgccctgaagagccgcaccataaggaagtggaataccacactctacgaagggacatggagacgcggctccacagccggcggctgcaggaactaccctgctaccttctgggttaatccacagttcaaaatcaggttagatgaaacagacgatccagatgactatggcgacagggagtcaggatgtagcttcgtgcttgccctgatgcagaaacataggaggagggagaggcggttcggtagggatatggagacaatcggctttgccgtctatgaggtaccgcctgagctggtcggccagcccgccgtgcacctgaagcgggatttttttttggccaatgcctcccgagcacgaagtgagcaatttatcaacttacgggaggtgtcaacaaggttcagactaccacctggagaatatgtcgttgtgccatcaacctttgaacctaacaaggagggggactttgtgttgaggtttttttctgaaaagtctgcaggtactgtcgagctggatgaccaaatccaggccaatctgcccgatgagcaagtcctgtctgaggaggaaatcgacgagaactttaaggccctctttagacagttagccggggaagatatggaaattagtgtgaaggagctgagaaccatacttaatagaattatctccaaacacaaagatctgcgcacgaaaggcttcagtctagagtcttgccgatccatggtgaatctgatggaccgagacggcaatggaaagctggggctggtggagttcaacatcctgtggaatcgtattcgcaattacctttctatctttcgcaagtttgatctggacaagtcggggtccatgagtgcctacgagatgcgcatggccattgagtcagccggtttcaagctgaacaaaaagctgtatgaattgataataacacggtatagtgaaccagatctagcagtcgatttcgacaactttgtctgttgtttagtccggcttgagaccatgtttaggttttttaaaactctggacaccgacttagacggcgtggttacattcgatctttttaagtggcttcagctgaccatgtttgcttag

SEQ ID NO: 14250 - DNA, 2145 bp, synthetic construct
  misc_feature 1..2145: note = Description of Artificial Sequence: Synthetic coding sequence
  source 1..2145: mol_type = other DNA
atgtccgaggagattattactccagtctattgcaccggcgtatctgcccaggtacagaaacagcgggctcgcgagctagggctgggccgccacgagaacgcaataaaatatcttggccaggattatgagcagctgcgcgtgcgctgcctgcaatctggcacattgtttcgggatgaagcatttcccccggtgcctcaatcgctcggctacaaggacttaggacccaactcgagcaaaacttatggtatcaagtggaaacggcccacggagctgcttagcaacccacaatttatcgtcgatggggccacacgcaccgacatatgccaaggagcgttgggggattgctggcttttagcagcgatcgcatcacttacactgaacgataccctgctgcaccgagttgtaccacatgggcagtccttccagaacggctacgccggcatctttcattttcagttgtggcagttcggcgaatgggtagacgttgtggtggacgacctactgcccatcaaggacggtaaactggtgtttgtccatagtgctgaggggaacgagttctggagcgccttattagaaaaggcctacgcgaaggtgaacgggagctacgaagcccttagcgggggaagcacgagcgaaggatttgaagactttacagggggggtgacagagtggtacgagcttcggaaggcaccaagcgatctctatcagataatcctcaaggcattagagagaggatctttgctcggttgcagtatcgatatttccagcgttctcgacatggaggctattacttttaagaagcttgtgaagggccacgcctactcggtcaccggagcaaagcaggtgaactatcgggggcaggtcgtcagtctgatcagaatgcgcaacccctggggcgaggtcgaatggaccggagcctggtctgattcatcttccgaatggaataacgtggatccctatgagcgggatcagctccgagtcaagatggaggatggcgaattctggatgagcttcagagacttcatgcgagaattcactcgactggagatatgtaacctgacgcccgatgccctgaaatcgcgaacgattagaaagtggaatactaccctctacgagggcacatggaggcgcgggtcaactgccggcgggtgtagaaactatccagccactttctgggttaatcctcagtttaagattcgcctggacgagacagacgacccagacgactacggcgaccgcgagtccggatgtagctttgtattagccttgatgcagaagcacagaagaagagagcgccggttcgggagggacatggagacgattggatttgctgtatacgaggtcccacctgagctggtcggccagcctgcggtccacctgaagcgagacttcttcttagctaacgcctccagagcacgatccgagcagtttatcaacctccgcgaagtgtccacccggtttcgccttccgccgggcgagtacgtggtagttccgagcaccttcgagccgaacaaagagggcgatttcgttttgagattttttagtgagaagagcgcgggaacagtggaactagatgatcagatccaggccaacctgccagacgaacaggtgcttagtgaagaggagatcgatgagaactttaaagcactgttcaggcagcttgctggcgaagatatggagatcagcgtgaaagagctgagaacaatcctcaacagaatcataagcaagcacaaagacctccgcactaaggggtttagcctcgaatcctgtaggtccatggtgaacttgatggaccgggatggtaatggcaaattagggctggtggagtttaatattctgtggaacagaataaggaattatctgagcatatttcgcaagttcgacctggacaaatccggctccatgtctgcatatgagatgcgtatggctattgaatctgcggggttcaagctaaataagaagctgtatgagctgattataacgcggtacagcgaacccgatttggctgtggatttcgacaactttgtgtgctgcttagttcgcttagagactatgttccgatttttcaaaacactcgacacagatctggacggagtggtcacatttgacctcttcaaatggcttcaactaactatgttcgcctag

SEQ ID NO: 14251 - DNA, 447 bp, synthetic construct
  misc_feature 1..447: note = Description of Artificial Sequence: Synthetic coding sequence
  source 1..447: mol_type = other DNA
atgtccgaggaaatcattacaccagtttactgcacaggcgttagcgcacaggtgcagaagcagagggctcgggaactgggactcgggcggcacgagaacgccataaagtatctcggccaggattatgaacagctaagggtgcgctgcttgcagtcgggtacgctctttcgcgacgaagcctttccccctgtcccacaatctctgggttataaggacctggggccaaactcaagtaaaacctacggaatcaaatggaaaagacctaccgagctcctaagtaatccacaattcatcgtggatggtgctacgaggaccgatatttgccagggtgctttaggcgattgctggttgttagccgctatcgctagcctcacattgaacgatactctgctacatcgagtggtgccacacggacaatcttttcagaacggatatgccggaatatag

SEQ ID NO: 14252 - DNA, 411 bp, synthetic construct
  misc_feature 1..411: note = Description of Artificial Sequence: Synthetic coding sequence
  source 1..411: mol_type = other DNA
atgtccgaggagattataacccccgtctattgcaccggcgtaagcgcacaggtgcaaaaacagcgggcacgtgagcttgggctgggccgccacgaaaacgctatcaaatatttgggccaagactacgagcagctcagagtccggtgccttcagagcggtaccctgttccgggatgaggcatttcctcccgtgccccagagcctgggatataaagacctcgggcctaactcctccaaaacgtacggcatcaaatggaaaaggcctacagagttgctgtctaacccacagttcatcgtcgacggagctactcgcactgacatttgccagggggccctcggcgactgctggctgttggccgccatagcgtcgctcaccttaaatgataccctcctgcaccgggtcgtcccatag

SEQ ID NO: 14253 - DNA, 2103 bp, synthetic construct
  misc_feature 1..2103: note = Description of Artificial Sequence: Synthetic coding sequence
  source 1..2103: mol_type = other DNA
atggctggcattgcagccaaactggctaaagatcgggaagccgccgaaggcctggggtctcacgacagagccattaaatacctgaaccaagactacgaggcattgagaaatgaatgtctcgaagccggaactcttttccaggacccatcttttcccgccattccctctgcattgggattcaaggagctggggccgtactcttcaaaaactagaggtatcgagtggaaacgccccactgagatttgtgctgacccccagtttatcatcggaggtgccacaaggactgatatatgtcagggcgccttaggggattgttggctgctcgcagccattgccagcctgaccctcaatgaagagatccttgcacgagtggtgcctctcaatcagagttttcaggaaaattacgcaggcatttttcactttcaattctggcagtatggagagtgggttgaagtggttgttgatgatcgactgccgactaaagatggcgagcttctgttcgtacattctgccgaaggatccgaattttggagtgccctgctggagaaggcttatgcaaagattaatggttgctatgaagccctcagtggcggtgcgacgactgaaggatttgaagatttcaccggaggcatcgccgagtggtacgagctgaaaaaaccacccccaaacttgttcaagatcatacaaaaggctctccagaaaggcagcctgttaggctgttccatagatattacttcagcagctgattcagaagccattacatttcagaagctggtcaagggccatgcctatagcgtaaccggtgcagaggaggtggagagtaacggctccctacagaagcttatcaggatccggaatccatggggtgaggttgaatggactggcagatggaatgataactgccccagctggaataccatcgatccagaggaacgcgagcgcctaacccggaggcacgaggatggggagttctggatgagcttcagcgacttcttacgccactattctcggctagagatctgcaatcttacacctgataccctcacgtctgacacatacaagaagtggaaactcaccaagatggacggtaattggcgacgtgggagcaccgcagggggctgcagaaactatcccaacacgttttggatgaaccctcagtatctcattaaattagaggaagaggacgaagatgaagaggacggggagagtggatgtacctttctggtcggcttgatccaaaagcacagaagacgccaacgcaagatgggggaggatatgcacacaatcgggtttgggatctatgaagtccctgaggagttgtcaggacagaccaatatccatttatctaaaaacttctttcttaccaaccgagccagggagcggtccgatacttttatcaacctccgggaggtgctcaacaggttcaagctgcctcctggcgagtacatcctggtcccttccacattcgagccaaataaggacggtgacttttgcatcagagtgttctctgaaaaaaaggcagactatcaggcagtcgacgatgagattgaggccaacctggaagaatttgacatatccgaagatgatatcgacgacgggtttagaagactgtttgcccagctggctggcgaagatgccgagataagcgcctttgaactacagactatactgcggcgggtactggccaaaaggcaagacatcaagtccgacgggttttctatagagacctgcaaaatcatggtggacatgctcgattccgatggatcgggcaaactcggcctgaaagagttctatatcctgtggacaaagatccagaagtaccagaagatctacagagaaattgatgtagaccgcagcggaaccatgaactcttatgaaatgcgcaaagcattggaggaggccgggttcaaaatgccttgtcagttacatcaggtgattgtggctcgttttgctgatgaccaactaattatcgattttgacaatttcgtcaggtgcctagtgagactggagaccctgtttaagattttcaaacagctcgacccggaaaacacaggaactattgaactcgaccttatctcttggttgtgcttcagcgtcttgtag

SEQ ID NO: 14254 - DNA, 2190 bp, synthetic construct
  misc_feature 1..2190: note = Description of Artificial Sequence: Synthetic coding sequence
  source 1..2190: mol_type = other DNA
gccccaggcccaggcagagccccagccgagcgcagtgcagaatccccaaggcccttctcagctcagtatggcagaagggacagatccatggcgggaattgcggccaagctggctaaagatcgcgaagccgcagagggcctggggtctcacgatagggccatcaagtacctgaaccaggattacgaagcattgagaaacgagtgcctagaggcaggaacactgttccaagacccctctttcccagctatcccatcggctctgggctttaaagaacttggcccttacagttctaagactcgcggcatcgaatggaagaggccaaccgagatttgtgccgatcctcagtttatcatcggcggagccacaagaacagatatttgtcaaggcgctctgggggattgttggttattggccgctattgcttcgcttaccttaaatgaagaaattctggctcgtgtggtaccactgaaccaaagctttcaagaaaattatgcaggcattttccactttcaattctggcagtatggagaatgggtggaggttgttgtggatgatcgtctcccaacaaaggacggagaactcttatttgttcattctgctgagggcagcgagttttggtcagccctgcttgaaaaggcgtatgcgaagataaacgggtgttacgaggccctgtccggtggcgctactacggagggttttgaggacttcaccggtgggatcgccgagtggtatgaattgaagaagcctccccccaacctattcaagattatccaaaaggctctgcagaagggttctttgctcggatgtagtatagacattacaagcgccgccgacagcgaggccattacattccagaagctcgtaaaagggcatgcgtactccgtgaccggggccgaggaagtggagtctaacggttcccttcagaagctgatccggattcggaacccatggggagaagtggaatggacagggagatggaacgacaattgcccgtcttggaatacaatcgacccggaagagcgagagaggctcactcgtcgacacgaggatggcgaattttggatgtcctttagtgatttcctgcggcactatagtagactcgagatctgcaatctgaccccagacaccttgacaagtgacacttataagaaatggaagctcacgaaaatggatgggaattggcggcgcggaagtacagctggcgggtgccgtaattaccctaacaccttctggatgaatccgcaatatctgatcaaactggaggaagaggatgaagacgaggaagacggcgagtctggctgtacatttttggttggactcattcagaaacaccgcagaaggcagcggaagatgggcgaggacatgcacacaatcggctttggcatctacgaagttcatccacagctttcagggcagacaaatatccacttgtcaaagaacttcttcctgaccaacagggcgcgtgagagaagtgatacctttattaacctgagggaagtgcttaaccgcttcaaactgcctcctggagagtacattcttgtaccaagcacattcgagcctaacaaggatggcgatttctgcatcagggttttcagcgagaaaaaggccgactatcaagctgtggacgacgagatcgaggccaatctcgaagaatttgacatcagcgaagatgacattgatgacggttttcgccgattgttcgctcagcttgccggtgaggacgccgaaatttcagccttcgaacttcaaacaatcctgagacgagtgctagctaagaggcaggacatcaaatcagacggttttagcatcgagacctgcaagatcatggtagacatgctggactctgatggctcggggaagctcggacttaaagagttttatatactttggactaagattcaaaaataccagaaaatataccgcgaaattgatgtggatcgtagcgggaccatgaactcttatgaaatgaggaaagccctggaagaggcaggattcaaaatgccatgtcaacttcaccaggttatagtggcaaggtttgcagatgatcaactaatcatcgatttcgacaatttcgtgaggtgtctggtgcggttagaaacattgttcaagatattcaagcaactggacccagagaatactggaacgatcgagctggatctaatttcctggctatgctttagcgttctgtag

SEQ ID NO: 14255 - DNA, 1869 bp, synthetic construct
  misc_feature 1..1869: note = Description of Artificial Sequence: Synthetic coding sequence
  source 1..1869: mol_type = other DNA
atggaaatctgcgccgacccccagtttatcatcgggggggccactagaacagacatttgccagggcgccctgggtgactgctggctgcttgcagcgatcgccagcctgaccctgaacgaggagatcctcgcaagagtcgtcccgctaaaccagtctttccaggaaaactatgccgggatcttccatttccagttctggcagtacggcgagtgggttgaggtggtagtggacgaccgactgcccaccaaagacggggaactgctgttcgttcacagcgcggaaggctctgaattctggagcgcgctgctggaaaaagcatatgccaaaatcaatgggtgttatgaggcactgagcgggggcgctacaaccgaaggcttcgaagacttcacggggggcatcgccgaatggtacgaactgaagaagccacctcccaatctcttcaagatcatccagaaggccctgcagaaggggtccctgttaggctgttcaattgatataaccagtgccgcggactcggaggccataacatttcaaaaactggtcaaaggacacgcatattcggtgactggcgctgaggaggtggagtctaacggaagcctccagaagcttattagaatcaggaatccctggggggaagtagagtggaccggccgttggaacgataattgtccatcatggaacaccatagaccccgaggaacgcgaacggctcactcggaggcacgaggacggcgagttttggatgtctttctcggacttcctgcggcattactcaaggctggagatctgtaaccttacccctgacaccctcaccagtgatacctacaagaaatggaaattaacaaagatggacggcaactggaggcggggttcaactgccggagggtgcaggaactacccaaatacattttggatgaatccccagtatctgataaagctcgaggaggaagacgaggatgaagaagacggcgagtccggctgcacatttctggtgggattaatccagaagcatcgaaggcgtcagaggaaaatgggggaggatatgcatactattggcttcggaatttacgaggtcccagaagagctttctggacagaccaatatacatcttagcaaaaactttttcctgaccaaccgagctagggaaaggtcagacacgtttatcaacttgcgcgaagtgttgaatcgtttcaagttgcccccaggggaatatatcctggtccccagcacatttgagcctaacaaggatggcgacttttgcattagagtgttctccgagaaaaaggcggactaccaggcagtggatgatgagatcgaagccaacttggaggaatttgatataagcgaagacgacatagatgatgggttcagacggttgtttgctcagctggcaggagaggacgcagagatctctgccttcgagctgcagacaatcctccgtagagtcttagcgaagagacaggatatcaagagcgatggcttctctatcgaaacctgcaaaataatggtggacatgctagattccgatggtagcgggaaattaggactgaaggaattctacatactgtggaccaagattcagaaataccagaagatctacagagagatcgatgtcgatcggtctgggaccatgaacagctacgagatgcgaaaggccctggaggaggcaggtttcaagatgccttgccagttgcatcaggtgatcgtcgctcgcttcgccgacgatcaactgattatagattttgataatttcgtgaggtgcttggtccgactggagacactcttcaagattttcaagcagctggaccccgagaatactgggacaattgaattagacctcatatcatggctgtgctttagtgtcttgtag

SEQ ID NO: 14256 - DNA, 396 bp, synthetic construct
  misc_feature 1..396: note = Description of Artificial Sequence: Synthetic coding sequence
  source 1..396: mol_type = other DNA
atggagatatgtgctgatccccagttcattataggcggagctacccgtacggacatctgtcagggagcactgggagactgctggcttttagctgccatcgccagtctcacactgaacgaagagattctggcccgcgtagtccctctgaaccagagctttcaggagaattatgctgggatcttccacttccagttctggcaatatggcgagtgggttgaagtcgtcgtcgatgataggctgccaacaaaggatggcgaactgctgttcgttcactcggcagaaggaagtgaattttggagcgcactcttagaaaaggcctacgctaaaatcaacgggtgctacgaggcactgtctggcggagccaccacagaaggctttgaggatttcacaggatag

SEQ ID NO: 14257 - DNA, 156 bp, synthetic construct
  misc_feature 1..156: note = Description of Artificial Sequence: Synthetic coding sequence
  source 1..156: mol_type = other DNA
atgaaaaatcgtgaggccgctagggaatgccgcagaaagaaaaaggaatatgtgaagtgcctggagaacagggtcgcggttctcgaaaaccagaataaaactctaattgaggaattgaaagccctgaaagacttatactgccacaagagcgattag

SEQ ID NO: 14258 - DNA, 984 bp, synthetic construct
  misc_feature 1..984: note = Description of Artificial Sequence: Synthetic coding sequence
  source 1..984: mol_type = other DNA
atgactatggagtcgggagctgagaaccagcagtctggcgatgctgctgttacagaggccgagaatcaacagatgacagtccaggcccaaccgcaaatagccacccttgctcaggtaagcatgccagcagcccacgccacatcctcagcccctaccgtgaccttggtgcagttgcctaacggacaaacggtacaggtacatggggtgattcaggctgctcagccgtctgtgattcaatccccgcaggtacagactgttcaaatctccactatagctgagagcgaagactcgcaggaaagcgtggactctgtaaccgattctcaaaaacgccgggaaatactaagcaggcgtccaagctacagaaaaatactcaacgacctttcctcagatgctcccggagttcccaggatcgaggaggaaaaaagcgaggaagagacaagtgcccccgctatcacaaccgtcactgtgcccactcctatttatcagaccagttccggacagtacattgccatcacgcaaggcggagcaattcagctagccaataatggcacggatggagtacagggcctccagaccctaactatgaccaatgcagcagctacacagcccgggaccaccattctgcagtacgcccagacgacagacggccagcagattcttgtgccttctaaccaggttgttgtacaggccgcctccggagatgttcagacctatcagatacgcaccgcacctacgagcactattgcaccaggtgtggtgatggcttcatccccagccctgcccacccagccggccgaagaggctgcccggaaaagggaggtccgactgatgaagaatcgggaggcggcaagagagtgcagaagaaagaaaaaagagtatgtaaagtgcctggagaatagggtggcagtccttgaaaaccagaacaaaaccctgatcgaggagttgaaagctttgaaagacctgtattgccacaagagcgactag

SEQ ID NO: 14259 - DNA, 693 bp, synthetic construct
  misc_feature 1..693: note = Description of Artificial Sequence: Synthetic coding sequence
  source 1..693: mol_type = other DNA
atgaccatggagtcaggggctgagaaccaacaaagtggggacgcggccgtcacagaagccgaaaaccaacaaatgacagtccaagctcaaccccagattgccacattggcccaggtgtctatgcctgcagcccatgccacaagctccgctcccactgtgaccctcgtccagttgcccaacggccaaacagttcaagtccatggagtcatccaagccgcccagccctccgttatccagagcccccaggtacaaactgtgcagtccagctgcaaagacttaaaacgtttatttagcgggactcaaatctcaaccatcgccgagtcggaggattcacaggagtcagtggactctgtgactgacagccaaaagaggagagaaattctctccaggcgcccatcttatcgcaagatattgaacgacctgtcctctgacgcacccggcgtgcctaggatcgaagaagaaaaatctgaagaagagacctccgcactgcccacccagccagctgaggaggccgctaggaagagggaagtgcgtctgatgaagaacagggaggctgccagagagtgtcggcggaagaaaaaggagtatgttaagtgtttggagaaccgcgtggcggtgctcgaaaatcagaacaagacgctcatagaagagctaaaagctctgaaagacttatattgccataaatcagattag

SEQ ID NO: 14260 - DNA, 240 bp, synthetic construct
  misc_feature 1..240: note = Description of Artificial Sequence: Synthetic coding sequence
  source 1..240: mol_type = other DNA
atgacgatggagagcggagccgagaaccaacaaagcggggatgccgctgtaacagaagcggagaaccagcagatgactgtgcaagcccagccccagatcgctactctggcacaagtatctatgcccgctgctcacgccacttccagcgcccccacggtcacattggttcagcttcctaacggacagactgtgcaagtgcatggggtgattcaggccgcacagccttccgtgatccaatag

SEQ ID NO: 14261 - DNA, 984 bp, synthetic construct
  misc_feature 1..984: note = Description of Artificial Sequence: Synthetic coding sequence
  source 1..984: mol_type = other DNA
atgactatggagtctggagcggagaatcaacagtcgggcgatgccgcagtgacagaggccgagaaccagcaaatgaccgtgcaggcgcaaccgcaaatcgctacattggcccaggtctcgatgccggctgctcacgccacaagttcagcccctacggtcaccttagtgcaactgcctaatggacagactgtgcaggtgcacggggttatccaggcagcacaaccttccgtgattcagtcgccccaggtacagactgttcagatctctaccattgctgagtcggaagactctcaggaaagtgtggacagtgtaacggatagtcagaaaagaagggaaatcctgtcacgtaggccttcttatcgaaaaatcctgaatgatctgtcttctgacgcgcccggggtgcctaggatcgaggaggaaaaaagcgaagaggagacctctgctccagctattaccacagtgactgtgcccacacctatctatcaaacaagttccggtcaatacattgcaatcacacaggggggcgctatacagctggcgaacaacggaacagacggggtccagggcctgcagactctgacgatgacgaatgccgccgcaacacagcctggtaccaccatcctccagtacgcacaaacaactgacggtcagcagatcttggtgccaagtaaccaggtcgtggtgcaagctgcctcaggtgacgtacagacgtaccagatacgaactgctccgacgagcacaattgcccccggggtggttatggctagtagccccgctcttcctactcagccggcagaagaagctgcccggaaacgggaagtgaggctcatgaagaatagggaagccgctagagaatgcaggaggaagaaaaaagagtacgtcaagtgtcttgagaatagggttgctgtgctcgaaaatcagaataaaaccctgattgaggaactcaaggccctcaaagacctgtactgtcacaaatctgactag

SEQ ID NO: 14262 - DNA, 1026 bp, synthetic construct
  misc_feature 1..1026: note = Description of Artificial Sequence: Synthetic coding sequence
  source 1..1026: mol_type = other DNA
atgaccatggagagtggagccgaaaaccagcagtcaggagacgccgccgtcactgaagccgaaaatcagcagatgaccgttcaggcgcagccccagatcgccacactagcccaagtctcaatgcccgcagcgcatgcaacttcgagtgccccaacagttaccctggtgcagttgccaaatggccagaccgtccaggtgcatggggtgattcaagctgctcagccttctgtgatccaatctcctcaggtccagactgtgcaatcaagctgcaaggatctgaagaggctcttctccggtactcaaatttcaacaatagcagagagcgaggattcccaggaatcagttgactcagtcaccgattcacagaagcgtcgagagatactttcccggcggcccagttaccgaaagattctaaacgatctgagttccgacgctcctggtgtgccgcgaatagaggaagagaaatccgaggaagaaacatctgcacctgccatcactactgtgaccgttcccacccctatttatcagacgtcatctggacagtacattgcgattacacagggcggcgcaattcaactggcaaataacggcacagatggcgtccagggtctgcagacccttacaatgactaatgcagccgcgactcagcctggaactactattttgcagtatgcccagaccacagacggtcagcagattctcgttccttcaaatcaggtcgtggtgcaggcagccagcggcgatgtgcagacttaccagatcaggaccgcccccacctccactatagcccctggggtggtcatggctagctcccccgccctgcccactcaacccgcagaggaggcggccagaaaaagagaagtcagacttatgaaaaatagagaagctgcccgtgagtgccggcgaaagaaaaaagagtatgtcaaatgcctggagaaccgagtggcagttctggagaaccagaacaagactctaatcgaggaattaaaagctcttaaagacctatactgccataagtccgactag

SEQ ID NO: 14263 - DNA, 549 bp, synthetic construct
  misc_feature 1..549: note = Description of Artificial Sequence: Synthetic coding sequence
  source 1..549: mol_type = other DNA
atgaccatggagagcggtgccgaaaaccagcagagtggcgacgccgcagttacagaggccgaaaatcagcaaatgactgtccaggcacagcctcagatcgctacgctagctcaggtttccatgcctgcagcccatgccacgtcatctgcccccacggtgacactcgtccagctgcccaatggccagacagtgcaggttcacggcgtgatccaagcggctcagccgtccgtcatacaatcccctcaggtgcagaccgtacagtcctcttgcaaggacttaaaacgactattcagtggcactcagatttccaccattgctgaatccgaggattcccaagagtcagtggatagtgtgactgactcccagaaacgacgcgaaatcctctccagacggccctcttacaggaaaattttgaacgatctaagttcagacgctccgggagtaccgagaattgaggaggagaaatccgaagaggagacctcagctcctgctatcactactgtgacggtccccacccccatttatcaaactagcagcggccagtactag

SEQ ID NO: 14264 - DNA, 399 bp, synthetic construct
  misc_feature 1..399: note = Description of Artificial Sequence: Synthetic coding sequence
  source 1..399: mol_type = other DNA
atgacaatggaatcaggtgccgaaaaccagcagtctggggatgccgctgttacagaagccgagaaccagcagatgaccgtacaggcgcaaccccaaattgccactttggcccaggtgagcatgcctgctgcacacgctacgagctccgctcccaccgtgaccttagtccagttgcccaacggccagactgtacaggtccatggggtcattcaggcggcgcaaccatctgtgatccagagtcctcaagtccagacagtgcagtcatcatgtaaggatctgaagaggttgtttagtggcacacagatcagcactatagcagaaagtgaagattcccaggagtcggtggactccgtgacggacagccaaaaacgccgcgagatcttgtcaaggaggccttag

SEQ ID NO: 14265 - DNA, 705 bp, synthetic construct
  misc_feature 1..705: note = Description of Artificial Sequence: Synthetic coding sequence
  source 1..705: mol_type = other DNA
atgactatggagtctggagccgaaaaccagcaaagcggggatgccgcagtgacagaagccgaaaaccagcagatgacagtgcaggcccagcctcagattgctacccttgcccaggtgtcaatgccagccgctcatgccaccagtagcgcccccacagtgacgctcgtgcagctcccaaacggccagaccgtgcaagtgcacggagtgattcaggctgcgcaacctagtgtgattcagagtccccaggttcaaactgttcagatttcgactatagccgaatccgaggactcacaggagagtgttgattccgtgactgacagccagaagaggcgtgagatcttatcccgtcggccatcttatcggaagatactgaacgatctctcgtcagatgctcctggcgttccacgcatcgaagaagagaaaagcgaagaggaaacatcagcacctgccattaccaccgtgactgtgccaactcctatctatcagacttcctctgggcaatacatagcgattacccaaggtggggccatccagctggcaaacaatggtacagatggggtgcaggggctgcagactttgaccatgaccaacgcagctgccacacaacctggcaccacgatccttcaatatgcccagaccacggacggccaacagattctagtgccctccaatcaagtggtagtgcaagggacccagaaattatag

SEQ ID NO: 14266 - DNA, 462 bp, synthetic construct
  misc_feature 1..462: note = Description of Artificial Sequence: Synthetic coding sequence
  source 1..462: mol_type = other DNA
atgccagctgcccacgccaccagcagcgcccccactgtgacgctagtgcagttgccaaacggccagacagtgcaggtccacggtgtgattcaggccgcacagccaagcgtgattcagagcccccaagtgcagactgtacagagctcatgtaaagatttgaaacgcctgttctccgggacgcagatctccacgatcgccgagtcagaggatagccaggagagcgttgattcagttactgacagtcagaagaggcgggaaattttgagtcggaggccttcttatcgcaaaatcctcaatgatctcagtagcgatgctccaggagttccccgtatagaagaggagaagtccgaagaagagacttcggcccccgcaattacaacagtgacggttcccaccccaatctatcaaactagttccggacagtatacctatctccgagataccacctacagttgccagtag

SEQ ID NO: 14267 - DNA, 1998 bp, synthetic construct
  misc_feature 1..1998: note = Description of Artificial Sequence: Synthetic coding sequence
  source 1..1998: mol_type = other DNA
atggcccacgagatgatcgggacccagatcgtgacagagagactcgtggcccttctggagtccggaacagaaaaagtgctgttaattgactctcggccctttgtggagtacaatactagtcatatccttgaggcaatcaacataaattgttccaagctgatgaagcgtagacttcagcaggacaaagtcctcatcactgagctgatccagcatagcgcaaaacacaaagtagacatagattgctcccaaaaggttgtcgtctacgaccaatcatcccaagatgtggcttctctctcttcagactgctttctaacagtcctgctgggaaaactcgagaaatcgtttaactctgtgcatttgctagctggagggtttgcggagttttcccggtgcttcccaggcctctgcgagggcaagagcacactggtgcccacgtgcattagccagccttgcctcccagttgccaatatcgggcccacaaggatcttgcctaatctctaccttggttgccaacgcgatgtgttaaacaaggagttgatgcagcaaaatggtattgggtacgtcctgaatgcctctaatacctgccccaagcccgactttattcccgagtcccatttcctgcgcgtgcccgtcaatgattcattttgcgagaagatcctcccttggctggataagagcgtcgattttattgagaaagccaaagcctccaatggctgcgtgctggtccactgcctagctggcatctctagatctgccaccattgcaatagcatatatcatgaagagaatggacatgtcattggatgaagcttacaggtttgtgaaggaaaagcgacctaccatctcccctaattttaactttctgggccaactgctagactacgaaaaaaagatcaagaatcagacgggtgccagcgggcccaaaagtaagttgaaactgctgcacctggaaaagccaaatgaaccagtcccagctgtgagtgagggcggccaaaaaagtgaaacacccctgtctccaccatgtgcggactccgctactagcgaagctgctggtcaaagacccgtgcatccagcatccgtcccctcagtgccttcagtgcaaccctccctccttgaggattcccccctggtgcaagctctcagcggccttcacttgtcggccgatagactagaagatagcaacaagctgaagcgatccttttccttagatatcaagagcgtctcctactcagccagcatggcggcctccctacatggattctcgtcatcagaggacgccctggaatactacaagcctagcacgactctcgatggcacaaacaagctctgccagtttagtcctgtgcaagagctctcagaacagacgccagagacttctcctgataaagaggaggcttcgatcccaaagaagttacagacagcgaggcccagcgactcacagtccaagcggttgcattctgtccgtactagttcaagcggaaccgcgcagcggagcttgttatcccctctgcataggagcgggtctgttgaagacaattatcacacttcattcttatttggcttgtcaaccagccaacaacacctgaccaagtccgccggactgggtttaaagggatggcacagtgacattttagctcctcagacgagtacaccttccctaacctcctcttggtactttgccacggagagctcgcacttttactccgcctctgccatatacgggggtagcgcatcttactctgcctattcatgctctcaactccccacgtgtggggaccaagtgtatagcgtgaggaggagacagaaacctagcgatcgggctgactctcgccgatcctggcacgaagagagcccatttgagaagcagtttaagcggcggtcttgccagatggagtttggtgagtctatcatgtcggaaaaccgctctcgggaggagctcggcaaagtaggatcccaatcctcattcagcggctccatggaaatcatcgaggtgagttag

SEQ ID NO: 14268 - DNA, 939 bp, synthetic construct
  misc_feature 1..939: note = Description of Artificial Sequence: Synthetic coding sequence
  source 1..939: mol_type = other DNA
atgcgcatgctgctcgccctgctggccctcagcgcagcccggcccagcgcttccgccgagtctcactggtgttatgaggtacaggctgagtcatctaattacccatgcctggtgccagtcaagtggggcggcaattgtcagaaagatagacagtctcccatcaacattgtgaccaccaaggccaaagtagataagaagttaggacggttcttcttttccggttacgacaagaaacaaacctggacggtgcagaacaatggccactctgtgatgatgttactggaaaacaaggcatcaatatcaggtggaggactcccagcgccttaccaagcaaaacagctgcacttgcactggagtgacttaccctacaaggggtcagagcattcacttgacggggagcatttcgctatggaaatgcatattgtccacgagaaagaaaagggaacttcacggaacgtgaaagaggctcaagatcctgaagatgaaatagccgtcctggcctttttggttgaagccggcacccaggtgaatgaaggcttccagcctttggtggaagccctgtccaatatccctaagccagagatgagcaccaccatggcagaatcttccttgctggatctgttacccaaggaggaaaagcttcgtcactattttaggtacctggggtcgctgactacacccacttgcgacgagaaagtggtgtggacagtcttccgtgaacccattcagctccaccgggaacaaatcctggcattttcacagaagttgtactacgacaaggagcagactgtgagcatgaaagacaacgtgcgacccttgcagcaactgggacagaggactgtcattaagtcaggggcgccaggccggcccctaccttgggcactgcccgcccttctcggacctatgctcgcctgtctgctcgcaggcttcctgcggtag

SEQ ID NO: 14269 - DNA, 1380 bp, synthetic construct
  misc_feature 1..1380: note = Description of Artificial Sequence: Synthetic coding sequence
  source 1..1380: mol_type = other DNA
atggccccgttatgccctagcccatggcttcccctgttaatccctgctcccgctccgggccttactgtccaattgctccttagcctccttcttctggtgcccgtccatccccagcgactgccccgcatgcaggaggactctccccttgggggtgggtcgtctggcgaagacgaccccctcggcgaagaggacctgccatctgaagaggacagtcctagggaggaggaccccccaggggaagaagatctgcctggagaggaggacctgcccggagaggaggacctgccagaagtgaaaccgaagtctgaggaggaggggagcctcaagctggaagacctcccgaccgtggaggcccccggagatccacaggagcctcagaataatgctcacagagacaaagagggcgacgatcagtcacactggcggtacggaggcgaccctccgtggccacgagtgtcccccgcctgtgcaggccgattccagagtcccgtcgatatccggcctcaactggccgcattctgcccagctctgaggccgcttgagcttctgggctttcaactccctcctctccctgagttgcgcttgcgtaataatggacacagtgtccagctgaccctccctccagggctggagatggccctggggcctggccgtgagtatagggccttacaactgcacttgcattggggcgcagctggcaggcctgggagtgagcatacggtggagggacaccggttccctgcagagattcacgtggttcacctttcaaccgccttcgccagggtggacgaagcactcggaagaccaggaggcctcgccgtgcttgccgctttcttggaagagggacccgaagagaattcagcgtacgaacagttgctgtctagacttgaagagatcgccgaagagggtagcgagacccaggtgcccggcctggacatatcggctctgctgccgtccgactttagcaggtactttcagtatgaaggatcactgaccacccctccttgcgcgcaaggagtgatctggacagtcttcaaccagacagtaatgctcagcgcaaaacagctgcacacattaagcgacaccctctggggcccaggcgacagtcgcctgcagctcaattttcgagcaacacagcctctcaacggccgtgttattgaggcaagcttccctgcaggtgttgattcgtctccacgtgcagccgaaccagtgcagctgaattcttgcctcgctgctggagacatcctagcccttgtgttcggacttctgttcgccgtaacttctgtggcttttctggtacaaatgcgcaggcagcataggagaggaacgaaaggcggcgttagttacaggcccgcagaagtggccgagactggggcatag

SEQ ID NO: 14270 - DNA, 1071 bp, synthetic construct
  misc_feature 1..1071: note = Description of Artificial Sequence: Synthetic coding sequence
  source 1..1071: mol_type = other DNA
atggctccattatgtcccagtccctggcttccgctgttgatccctgcccctgcccccggactgacagtgcagttgctcttatcccttctgttgctggtgcccgtgcacccccagcggctgccaaggatgcaggaggactcaccactaggcggcggctcgtctggggaggatgacccgttgggtgaagaggacttgccttctgaggaggacagccctcgagaggaagatccccctggcgaagaggacttgcctggagaggaagacctgccgggggaggaggaccttcctgaggtcaaaccaaagagcgaagaagaagggagtcttaaactggaggacttgcccaccgttgaggctcccggcgaccctcaggaacctcagaacaatgctcaccgtgacaaggaaggagacgaccagtcacattggcgatacgggggcgatccgccatggcctcgtgtcagtcctgcctgtgcggggaggttccagtctcccgtggatattcgtcctcaattggccgccttctgcccggcgctgcggccactggaattactcgggtttcaactcccacccctgccagaactgcgcttaaggaacaacggccatagcgtacagttgaccttgcctcccgggctcgaaatggcactcggtccaggaagagaataccgtgccttgcagctgcatttacactggggtgccgcaggcaggcctgggagcgaacataccgtggaaggacaccggttccctgccgagattcatgtggtccacctgagcaccgcttttgccagagtagatgaggctttgggacggccaggcgggttagctgtgctggctgcatttctggaagaaggccccgaggagaattctgcttacgagcagttgctatcccgccttgaggaaatcgctgaggagggttcagagacccaagtacctggtctggatatctccgctctccttccatccgacttctctagatactttcaatacgagggctctctgaccacgcccccatgcgcacagggtgtgatatggactgtcttcaatcagaccgtgatgctgtccgcaaagcagtcctag

SEQ ID NO: 14271 - DNA, 2775 bp, synthetic construct
  misc_feature 1..2775: note = Description of Artificial Sequence: Synthetic coding sequence
  source 1..2775: mol_type = other DNA
atgcccggcccctcgccaggactgaggcgggccctgctcgggctctgggcagcactgggccttggactctttggactatccgccgtctctcaggagcccttttgggcggatctgcagcctcgtgtggcttttgtggagcggggaggcagcttgtggcttaattgcagcactaactgtcccagaccagaacgtggtggcctcgaaacgtctttgagacgcaacggaacccaacgaggcttaagatggttggcacggcagctggtggacatccgcgaaccggagactcagcctgtgtgttttttcagatgtgccaggaggactctccaagccaggggcttaatcaggactttccagagaccagaccgggtggagctgatgccccttcccccatggcaaccggtcggtgaaaatttcactctgtcatgtagagtacctggtgctgggccacgagcttctctgaccttaacacttctgaggggggcacaagaactcatcagacgctcatttgcgggcgagccgccacgggcacggggagctgtgctgactgccaccgtcttagcgcgcagggaagatcacggcgcaaacttcagttgcagagccgagctggatttaagaccacatggcctcggactgttcgagaacagctcagccccccgggagctcaggacgttttccttgtccccggacgccccgaggctcgccgctcctaggctgcttgaagtgggcagtgagagacctgtgagctgcacactggacggcctatttcctgcgagtgaggcccgggtttatttagcactcggggatcagaacctgtcccccgatgtcacactggagggggacgcctttgttgcaacggcaacagctactgcaagtgctgagcaggagggtgcaagacaactggtctgcaatgtgactctgggaggcgagaacagggagactcgtgagaacgttacgatatacagttttcctgccccactgttaaccctaagcgagccatctgtgtccgagggtcagatggtgacggtaacatgtgctgctggagctcaagccctagtgactttagagggagttccagctgcggtgccagggcagcccgctcagcttcaactcaatgcaaccgagaacgatgatcggcggtcctttttttgcgatgcgactttagacgtggatggagagactctgattaaaaacaggtcagccgaactgcgggttctgtatgccccgaggctggatgacagtgactgcccgcggagttggacttggcctgagggccccgagcagacgcttaggtgcgaagccagaggaaaccccgaaccttctgttcactgtgcaaggtctgacgggggagcagtcctggcgctcgggcttttggggccggtgactcgtgcactgagcggaacgtatcggtgcaaagctgccaacgaccagggcgaggctgtcaaggatgtgaccctgacggtggaatacgccccagccttggactccgtgggatgccccgaacgaattacctggctcgagggaaccgaggcgtcattatcttgtgtggcccacggggtgcctcccccagacgtcatctgtgtgcggtccggtgaactgggggctgtgatcgaaggtttactaagagtggcccgggagcacgccggcacctaccggtgcgaggccacaaatccccgggggtctgcagccaaaaacgtggcagtgaccgtagagtacgggccacgatttgaagaaccaagctgtccatcaaactggacttgggtggagggaagcgggcgcctcttcagctgcgaggttgacggcaaaccgcagccatcagtaaagtgcgtgggcagtgggggcgcgacagagggagtgttactccccctcgctcccccggatccctccccccgggccccccgcatcccacgagtgctggcccctggtatctacgtctgcaatgccactaacagacacggcagcgtggccaagactgtagttgtcagcgccgagtcaccacccgaaatggatgagtctacctgcccatcccaccagacctggttggagggagccgaagctagcgccctggcctgtgccgcgcggggcagaccctcccccggagtgagatgctccagggaagggatcccttggcccgagcagcagcgcgtgagtcgtgaggacgcaggcacataccattgcgtagcgactaacgctcatggtaccgacagtagaactgtaaccgttggagtagagtaccggcctgtcgtggccgaactggcagcttctccgcccgggggggtgagaccaggaggaaattttaccctgacttgcagggctgaagcatggcctccagcccagatctcgtggcgggccccacccggagcactaaatattggtctgtcttccaataactcgaccctctccgttgccggggccatgggatcgcacgggggcgagtatgaatgtgcagccaccaatgcccacgggcggcacgcgcgacgcatcactgtgagggttgctggaccctggctatgggttgctgtcggcggcgccgccggtggagccgctttgctcgcagccggcgctggtcttgccttctacgtccagtctacagcatgcaagaagggggagtacaacgtgcaagaagctgagtcgagcggagaagccgtttgcctgaatggcgcaggcggcggcgccggaggcgcagcgggggccgaaggaggtcccgaggcagccggcggcgccgcggagtctcccgccgagggggaggtgttcgctatccaattgactagcgcttag

SEQ ID NO: 14272 - DNA, 1263 bp, synthetic construct
  misc_feature 1..1263: note = Description of Artificial Sequence: Synthetic coding sequence
  source 1..1263: mol_type = other DNA
atggaatccccgtcagcacctccccacaggtggtgcatcccttggcagcgcctgttactaacagctagcctgttaaccttctggaacccacccacaactgccaagctcacgatcgaatctacacctttcaacgtggcggagggtaaagaagtgctgttgctggttcacaatctcccgcagcaccttttcgggtactcttggtataagggagagagagtcgatggcaaccggcagattatcggatacgtgatcgggactcagcaggctaccccagggccagcttacagcgggagggagattatatatcctaatgccagtctgctgatccagaacatcatccagaacaagctgtccgtcgatcacagcgaccctgtaatcctgaatgttctgtatggccccgacgacccgactatctccccttcttacacctattatcggcctggcgttaacttgtcgctgtcttgccatgccgccagcaatccccccgctcagtatagctggcttatagatggcaatatccagcaacacactcaagaactgttcattagcaacattaccgagaaaaattctggtctgtatacctgccaggcaaacaacagtgcatcgggccatagccggaccactgttaagacgattaccgtcagtgcagaactgcctaagccgagcatatcttccaacaatagcaagcctgttgaggataaagatgctgtcgcatttacgtgtgaacctgaggcccagaacaccacttacttgtggtgggtgaacggccagtccctacccgtcagtccaaggttgcaactcagtaatggcaatcgcacgctgacattattcaacgtgactaggaatgatgcacgagcttacgtgtgtgggattcagaactccgtgagcgcaaatcgcagcgacccagtcaccctggacgttctctacggccccgacaccccgattattagcccaccggattcaagttatctatctggtgccaatctgaacctgtcttgccattctgcatcaaacccctctcctcagtactcttggcggattaatggaatcccccagcagcacacccaagtgttgttcatcgctaagattactcctaacaacaacggtacgtacgcttgtttcgtctccaacttggcaacaggcaggaataacagcatcgttaaatctattacagtatcagctagcggaaccagtcccggattatcggccggagctacagttggtatcatgatcggagtcctcgtcggggtggctctgatctag

SEQ ID NO: 14273 - DNA, 2109 bp, synthetic construct
  misc_feature 1..2109: note = Description of Artificial Sequence: Synthetic coding sequence
  source 1..2109: mol_type = other DNA
atggaatccccaagcgcacctcctcataggtggtgcatcccctggcagagactattgctgaccgcatctcttctgacattctggaatccgcccacaacagcaaagctcactatcgagtcgaccccctttaacgtcgccgaggggaaggaagtcctgctgctcgtccacaacttaccacagcatctcttcggctacagctggtacaaaggcgaacgcgttgatggcaatcggcagatcataggatatgtcattggcacacagcaagcgacccccggccccgcctactccgggagagagataatctacccaaatgcctctctcctgatccagaacataattcagaatgacacgggattttacacgctgcacgtgataaagagtgatctcgtaaatgaggaagctactggtcagttcagggtgtaccctgaactgcctaaaccttccatttcaagcaataacagcaaaccggtcgaggacaaggatgccgtggcctttacttgcgaacctgaaacacaggacgctacctatctatggtgggtgaacaaccagagcctgcctgtctcaccacggttgcagctgtccaatggtaaccgaacacttactctgtttaacgttacgcgaaacgataccgcctcttataaatgtgagactcagaacccagtgagtgctagaagatcagacagcgtgatactcaacgtgttgtatggccccgatgcccccacaatttcccccctcaatacctcctacagatcgggtgaaaaccttaatctatcatgtcatgctgcatctaaccccccggcccagtacagctggttcgtcaatggcacctttcaacaaagtacacaggaattgttcatccctaatatcacagttaacaattcagggtcctatacctgtcaggcccacaattccgacaccggccttaatcgcaccacagtgacaaccattactgtgtatgcagagccacccaaaccattcataacctcaaacaactccaatccggtcgaagacgaggatgcggtggccttaacatgtgaaccggagattcagaataccacttatttgtggtgggtaaataatcaatctctgcctgtgagcccaagattacagctgtccaatgataaccggacactgacactgctcagcgttactcgcaatgacgtggggccgtatgaatgtggcattcagaacaagctgtccgtggatcactccgatcctgttatactgaatgtactgtacggacctgatgatccaactatcagtcctagctacacctactaccgcccaggggtgaatcttagcctttcctgtcacgccgcatccaatcctcccgcccagtactcctggttgatcgacggcaatattcaacagcacacgcaagagctgttcatctccaatataaccgaaaaaaattctgggctgtacacttgccaggccaacaatagcgccagtggccattcccgtaccactgtaaagactataaccgtgtcggcagagctgccaaagccaagcatctcatcaaacaattctaagcccgtggaagacaaggacgctgtagccttcacatgtgagccagaggcccagaataccacatacttgtggtgggtcaatgggcagagcctcccagtgtccccccgactgcagttatctaacgggaaccgcactctcaccctcttcaacgtgactcggaacgatgctagggcttatgtgtgtggaattcaaaactccgtgtccgctaaccgatcggatcccgtgactttggatgtgctgtacgggccagatactccaatcatctcaccaccagatagttcatacctttcgggcgccaacctgaacctctcttgtcacagtgcttcaaacccctccccgcagtactcttggcggataaacggaattccacagcaacacacgcaggtgctatttattgcgaagatcactcctaacaacaacggcacatatgcctgcttcgtgtctaatttggctacaggcagaaataattccatcgtcaaaagcattaccgtctctgcaagcggaacaagccccggcctgtctgcaggggccaccgtgggcataatgataggggtgcttgttggcgtggcactaatctag

SEQ ID NO: 14274 - DNA, 1035 bp, synthetic construct
  misc_feature 1..1035: note = Description of Artificial Sequence: Synthetic coding sequence
  source 1..1035: mol_type = other DNA
atgggaccacccagcgcgcccccatgcagactgcatgtgccatggaaagaggtgttgctgactgcttcactgttgaccttctggaacccccccactaccgcgaagctgactatcgaatccaccccatttaacgtggccgaaggaaaggaggtgttgctgcttgctcacaacttaccacagaaccgcattggctatagttggtacaaaggcgagagggtggatgggaactcacttatagtgggttacgttatcggtacacagcaggcaacccctggacctgcttacagtggaagagaaactatttatcctaacgccagcctcctaattcaaaacgtcactcagaacgacactggtttttacacattgcaggtcattaagtccgacctggtgaatgaagaggccacagggcaatttcacgtataccccgaattgcccaagcctagcattagcagcaacaactctaaccctgtggaagataaggatgccgtcgcttttacttgtgagcccgaagtccagaatactacctacctatggtgggtaaacgggcagagccttccagtctctccccgcctccagctgagcaacggtaatatgactctcaccctactgtctgtcaagagaaacgatgcaggtagttacgaatgtgaaattcagaaccctgcctcagcgaaccggtccgacccggtcacactcaacgtcttatacggccccgacggccccacaataagtcctagcaaagcaaattacagaccgggcgagaatttaaacttgagttgtcatgcagcctcaaaccctccggcccagtatagttggtttattaatgggacctttcagcagtcgacgcaggagctgtttataccgaatatcactgtcaataacagcggctcttacatgtgccaggctcataatagtgcaaccggtttaaacaggacaactgtcaccatgattactgtcagtggcagcgcacctgtgctctctgccgtggccacagttggcattaccatcggggtgctagcacgcgtggctctcatatag

SEQ ID NO: 14275 - DNA, 1977 bp, synthetic construct
  misc_feature 1..1977: note = Description of Artificial Sequence: Synthetic coding sequence
  source 1..1977: mol_type = other DNA
atggtcccccgcctgctcctgagagcatggccacgcgggcctgccgtggggcccggcgcacccagccgcccactgtccgccgggtccgggcccggccagtaccttcagaggagcatcgtccccacaatgcactaccaagattccctcccacggctgcctattccaaagctggaggatacaatcaggcggtacctcagtgctcaaaagccattactgaacgatggacagtttcgcaaaacagaacagttttgtaagagctttgaaaatggcatcggcaaagagttgcacgagcagcttgtggctctggacaaacagaacaagcacacatcctacatctcagggccatggtttgatatgtatcttagtgcccgagacagcgtagtcctgaattttaatccatttatggcattcaaccctgacccaaaatcagagtataatgaccagctcacacgggccacaaatatgactgtgagcgccatccgcttcctgaaaactttgagggccggactgctcgagcccgaagtctttcacctgaatcctgctaagtctgacacaattactttcaagaggttaattcgcttcgtgccgagctccttgagctggtatggtgcctacctggtgaacgcctatccgctagatatgagccagtactttcgccttttcaactctactcggctccccaaaccctctagggatgagctgttcacggatgacaaagcgcgacacctgttggtgctgcggaaggggaatttttacatcttcgacgttctggaccaggatgggaacattgtttcgccatcagagattcaagctcatctgaaatacatcctgtccgattccagcccagcaccagaatttccattagcatatctaactagcgagaacagggatatatgggccgaactgaggcaaaagctcatgtcatccggcaatgaggaaagcttgcgcaaggtggactccgcagtgttctgcttgtgtctggacgactttcccataaaggacctagtccacctgagccataatatgctgcatggagatggaactaatcgctggttcgataagagtttcaacttaattattgctaaggacggttctacagcagttcatttcgagcacagttggggagatggagtcgctgtgttgcgcttttttaatgaagtcttcaaagattcaacgcaaacaccagccgtgacaccacagagtcagcctgccacaacagactccaccgtcaccgtacagaaacttaattttgaacttaccgatgcgctgaagacgggaatcactgccgccaaggaaaagtttgatgctacaatgaaaaccctgaccatcgactgtgtgcaattccaacgaggtgggaaggagttcctgaagaagcagaagctgagcccagacgcagtcgcgcagctggcgttccaaatggcattcttgcggcaatacgggcagaccgttgccacatatgaaagctgttcaacagcagcctttaagcacggccggactgaaaccattagacctgcttcagtgtacactaaacgatgctccgaagccttcgtgcgcgaaccctcaagacatagcgcaggggaactgcagcagatgatggtggaatgctccaagtatcacggccagctgaccaaagaggccgctatgggccagggctttgacagacacctgttcgctctccgtcacctcgccgccgctaaaggtattatcctgcctgaactgtatctggatccagcctacgggcaaatcaatcataatgtactcagtacttctacactgtcctcgcccgctgtgaatctgggtggcttcgcaccagtggtttccgatggatttggggttggatatgccgtgcatgacaattggatcggctgcaacgtgagcagttatcctggaagaaacgccagagagttccttcaatgtgtggaaaaggcactggaagatatgtttgacgccctggagggcaaatccattaaaagttag

SEQ ID NO: 14276 - DNA, 1077 bp, synthetic construct
  misc_feature 1..1077: note = Description of Artificial Sequence: Synthetic coding sequence
  source 1..1077: mol_type = other DNA
atgcgcgctacacccttggcggccccagcagggtcactctcaaggaaaaagagattggaattagacgacaatcttgatacagaacggcccgtgcagaagcgggctaggagcgggccacagcctagacttcccccttgtctgctgcctttgtccccacccacggcccctgaccgggcaaccgccgttgctaccgcctccaggctgggaccttacgtacttttagaaccagaggaagggggccgcgcatatcaggctctgcattgccctaccggcaccgaatacacttgcaaggtgtaccctgtccaggaggcactggcggttcttgaaccatacgcacgacttcccccgcataagcatgtagcacgccctacggaggtgttagctggtacacaactgttgtatgccttttttacacgtacacacggggacatgcattctctcgtgcggtctaggcacaggattccagagccagaagctgccgtgctgttcagacagatggccaccgccctcgcccattgtcatcagcacgggctggtcctacgcgacctgaaactgtgcagatttgtattcgccgacagagagcgcaagaagctcgtactagaaaatttagaagattcctgtgtgctgacgggccctgacgactctttgtgggataagcatgcttgccccgcctacgtgggaccagaaatactgagcagccgggcatcatactcaggtaaggcggcagacgtatggtccttaggggtggccctgttcaccatgctcgcgggccactacccttttcaggactcggagccagttctgctgttcggaaaaattaggaggggtgcctatgctctgcctgccggcctctccgcgcccgcgagatgcctggtgcggtgcctgttacggagagaacctgccgagcgcttgacggctaccggaatcctgctccacccctggttacgccaggaccccatgcccctcgcccctacacgctcccatctgtgggaggcagctcaggtcgtgcccgatggtctcggactcgacgaggcgcgggaggaggagggtgatcgagaggtagtcctctatgggtag

SEQ ID NO: 14277 - DNA, 1176 bp, synthetic construct
  misc_feature 1..1176: note = Description of Artificial Sequence: Synthetic coding sequence
  source 1..1176: mol_type = other DNA
atgtccggacctgtgcctagtagggctagggtttacactgacgtgaatacacaccgtccgagggaatattgggattacgaatctcatgtggtggagtgggggaatcaggacgactatcagttagttagaaagctcggcaggggcaaatacagcgaggtgttcgaggcgattaacatcactaataatgagaaagtggttgtcaaaattctcaagcccgttaaaaaaaagaagatcaagcgggagatcaaaatactcgagaacctgcgcgggggcccaaacattattacccttgcagatatagttaaagatcctgtctccaggactcctgcgttggtcttcgaacacgttaacaacaccgattttaagcaattgtaccaaacattgactgactatgatatccgtttttatatgtatgagatcctcaaggctctcgattactgccatagtatgggcatcatgcacagggacgtgaagccacacaacgtgatgattgaccatgaacataggaaattacgcctgattgattggggattagcagaattttaccacccgggccaggaatacaatgtccgcgtcgcaagtcgctacttcaagggccctgaacttctcgtcgactaccagatgtatgattattccctggacatgtggagcctgggttgcatgctagcctccatgatctttaggaaggaaccgtttttccacggacacgacaattacgatcagctggtgagaattgctaaagtattggggacggaagacctctacgattatatagacaagtataatatagagcttgatcctcgatttaatgacattctgggccgccatagtcgtaagagatgggagcgttttgtgcactccgagaatcagcacctggtttctcctgaagccctggacttcctcgacaaattgctgagatacgaccaccaaagcaggctgaccgcccgagaagcaatggagcacccttacttctacactgtcgtgaaggaccaggctcgcatggggagctcatcaatgcccggcgggtcaaccccagtgtcctctgctaatatgatgtctggaatctctagtgtccctaccccttcgccactcggacccctggcaggctctcccgtgatcgctgctgccaacccactgggtatgccagtcccagccgccgccggggctcagcagtag

SEQ ID NO: 14278 - DNA, 1194 bp, synthetic construct
  misc_feature 1..1194: note = Description of Artificial Sequence: Synthetic coding sequence
  source 1..1194: mol_type = other DNA
atgagtgggccagttccaagccgagcaagggtctataccgatgtcaatactcatcgacctcgcgaatactgggattatgagtcacatgtagtcgaatgggggaatcaggatgattaccaactagtgcgcaagctcggaagaggcaagtattccgaggttttcgaggctataaacatcacaaacaacgagaaagtcgtcgttaaaattctgaaaccggtgaaaaagaaaaaaatcaagagggagatcaagatattggaaaacctccggggaggccccaacatcattacactggccgatatagttaaggaccccgtttccagaacacccgctctcgtgttcgagcatgtaaataatacggactttaagcagctctaccagactttgactgactatgatatcagattctacatgtacgaaatattgaaagctctggactattgccattccatgggtataatgcacagagacgtaaaacctcataatgttatgatcgatcacgagcatcgcaagctacgcctcatcgactggggactagcagagttttaccatccgggccaggaatataatgttcgagttgcatcgaggtattttaagggacccgagctgctcgtagactatcaaatgtacgattactcattggacatgtggtcccttgggtgcatgctggcatcaatgatcttcaggaaggagcctttctttcatggccacgacaattatgaccagctagtccggattgccaaagtgttaggaaccgaggacctttacgattatatagacaaatataacatcgaactggatccccgatttaacgacattctagggagacattcgagaaagagatgggagagattcgtgcactcagagaatcagcatctcgtgtctccagaggctctggattttctggataagctgctgcgctatgaccatcagagtcgtctgaccgcgcgcgaggctatggagcatccatatttctacactgtcgtgaaggatcaggcccggatgggctcctcctccatgcctgggggctctactcccgttagctccgcaaacatgatgtcaggcatttcaagcgtacccaccccctcccctttagggccactggcaggttcacctgtgatcgccgccgccaatccactgggctgcttgttccagctgcctctgcgcagtgccgttaccgccctgagtgtgtcttag

SEQ ID NO: 14279 - DNA, 768 bp, synthetic construct
  misc_feature 1..768: note = Description of Artificial Sequence: Synthetic coding sequence
  source 1..768: mol_type = other DNA
atgtatgagatcctcaaggcactggattattgtcacagcatggggattatgcaccgagacgtgaaaccccataatgtcatgatagatcacgagcacaggaagctgcgcctcattgactggggcttggccgagttctatcaccccggccaggagtacaacgtcagagttgccagccgatatttcaaagggccggagctgcttgtggattaccagatgtatgactactccctggatatgtggtccctgggttgtatgctggcttccatgatctttcgcaaggagccattctttcatgggcacgataattatgaccagctggtccgcatcgccaaagtactgggaactgaggatctgtacgattacatcgacaagtataacattgagcttgatcctaggtttaacgacatcctgggacgccactcgaggaaacgatgggagcgcttcgtgcactccgagaatcaacacctggtatctccagaagctctggactttctggacaaactgcttagatacgaccaccagagtcgtctcacagcccgtgaggctatggaacacccatacttctataccgtcgtgaaggatcaggcacggatgggctcatcgtcaatgccgggagggtcaacaccagtttcttcagcaaacatgatgtccggtatttcatccgttcctactccatccccattggggccattggctgggagccctgttatcgccgccgcaaatcccctcggaatgccagtccccgcagcagccggagcccagcagtag

SEQ ID NO: 14280 - DNA, 1158 bp, synthetic construct
  misc_feature 1..1158: note = Description of Artificial Sequence: Synthetic coding sequence
  source 1..1158: mol_type = other DNA
atgtctgggccggtgccttcacgggcacgtgtatatacggacgttaacacgcaccgcccccgtgaatactgggactatgaaagccatgtagtggaatggggcaatcaggacgactatcaattggttaggaagctgggacggggaaaatattcagaagtgttcgaggccattaacattaccaataatgaaaaggttgtggtaaagatcctgaagcctgtgaagaaaaagaaaatcaagcgcgagatcaagattttggaaaacttacgaggcgggcctaatattataacattggctgatattgtgaaagatcccgtttctcggacgcccgctctcgtgttcgaacatgtaaacaacacagacttcaaacagctctatcagacactcaccgactacgatattaggttctatatgtacgagatcctaaaagcgctcgattattgccactcgatgggaattatgcatagagacgttaagccccacaacgttatgatcgatcacgagcatcgcaaactgagactgatcgactggggactagctgaattctatcatcctgggcaggagtataatgtgcgggtcgcatcccgatacttcaagggacctgaactgttggtcgactaccaaatgtatgactacagtctggacatgtggagcctgggttgtatgcttgcatcgatgatcttccggaaggagccattttttcacgggcacgacaattatgaccagctggtccgcattgccaaggttctcggcaccgaggatttgtatgactatatcgataagtacaatatcgagttagatccaagattcaatgatattttaggtcgtcatagtaggaaacgatgggaaaggttcgtgcattccgaaaatcagcatttggtttctcctgaggctttggatttcctggataagctcctccgctacgaccaccagtccagactcacagcgagggaggccatggaacacccatatttttacactgttgtgaaggaccaagcacggatggggtcatcgagtatgccaggagggtctacacctgtgagctctgcaaatatgatgtcagaaatgaagttctgtagagtcgctcaggcaggccttgagctgctgagttcaaccgtatatccaccctggccccccaaggttttgagacttgaagcctag

SEQ ID NO: 14281 - DNA, 1053 bp, synthetic construct
  misc_feature 1..1053: note = Description of Artificial Sequence: Synthetic coding sequence
  source 1..1053: mol_type = other DNA
atgcctggtcctgcagcgggatcacgggcccgtgtgtacgctgaggtaaactccctcaggagtcgagagtattgggactacgaggctcacgtcccatcctggggaaaccaggatgattatcaactggttagaaaactgggccgcggcaagtacagtgaagtgtttgaagccattaacataaccaacaacgaaagagtggtggtgaaaatcctgaaaccggtaaagaaaaaaaagataaagcgggaagtgaagatccttgagaacctgaggggaggcactaatatcatcaagcttattgatacagtcaaggaccctgtgtcaaagacgcctgctctggtattcgagtacataaacaataccgactttaagcagctgtaccagatcctcactgacttcgatattcggttctatatgtatgagttgttgaaggcactcgactactgtcacagtaaaggcatcatgcaccgagatgttaagccacataatgtcatgatcgaccatcagcaaaagaagctacggctgatcgactgggggttggcagagttctaccaccccgcccaagagtacaatgttagagtggcgagccgttattttaaaggccctgagctactcgtagactaccagatgtacgactactcattagacatgtggtcactcggctgtatgcttgcctctatgatctttagaagggaaccattcttccacggtcaggataattatgatcagctggtgagaatagcaaaggtgctggggaccgaagagctctatggctacctgaagaagtatcacattgatctagatccccactttaacgacatcctaggacagcactctcgcaaaaggtgggagaatttcatccattctgaaaatcgacatttggtgtcgcccgaagccttagacctattagacaagctgctgcgctacgatcaccagcagagattgaccgcgaaagaggccatggaacacccatatttctacccggtggtgaaggagcaaagtcagccatgcgctgacaatgcagtgctgagttcaggtctcaccgccgctagatag

SEQ ID NO: 14282 - DNA, 600 bp, synthetic construct
  misc_feature 1..600: note = Description of Artificial Sequence: Synthetic coding sequence
  source 1..600: mol_type = other DNA
atggaagctagagacaaacaggtgctaaggagtctgaggctcgaacttggcgccgaagtgcttgtggagggcttagtactgcagtatctgtatcaagaggggatcctaacagagaatcatattcaggaaatcaatgcccagaccacaggccttcgcaagactatgctgttgctggacatattaccaagcaggggtcccaaggctttcgacacattcctagatagtctgcaggaattcccatgggtgagggagaaacttaaaaaggcacgcgaggaggccatgaccgacctccccgctggcgacagattaaccggaattccgagccacatcctgaactccagtccgtctgaccgccagattaatcagctggcacagaggctggggccagagtgggagcctatggtgctgtcgttgggcctgagccagaccgacatctacaggtgtaaggccaaccatcctcataatgttcaatcccaggtggtcgaggctttcatccggtggcggcaaagattcggtaaacaggctactttccagagcctccacaatggtcttcgtgccgtggaggtcgatccatcgctgctgttgcacatgctggagtag

SEQ ID NO: 14283 - DNA, 366 bp, synthetic construct
  misc_feature 1..366: note = Description of Artificial Sequence: Synthetic coding sequence
  source 1..366: mol_type = other DNA
atggaggcgcgcgacaagcaggtgcttcggtccctgcgtctggagcttggagcagaggtgctggtcgaaggccttgtcctgcagtacctctaccaggaggggatcctgactgaaaaccacatccaggagattaatgcacaaaccacgggcctgaggaaaactatgctgctgctggacattctccctagtcgaggtcccaaggcttttgacactttcctcgattctctccaggaattcccatgggtaagggaaaaattaaaaaaagctagggaagaagctatgactgatctgcccgccgagatgcgtaagcttcggccaaaggactccgtcacatgcctggcttcccaattgacctggaggttctag

SEQ ID NO: 14284 - DNA, 600 bp, synthetic construct
  misc_feature 1..600: note = Description of Artificial Sequence: Synthetic coding sequence
  source 1..600: mol_type = other DNA
atggaagctagggacaagcaggtcctcagaagtcttcgactggagctgggcgccgaggtgctcgtggaaggactcgtgctgcagtatttataccaagagggaatattgacagagaatcatattcaagaaatcaacgcccagactacaggtctccgtaagacaatgctgttgttggatatcctccctagccggggacccaaggcgtttgacacttttctcgatagccttcaggagtttccctgggtcagggaaaagctgaagaaggctcgggaggaagccatgaccgatctacccgcaggggatcgcttgaccggtataccctcccatattctcaactcatccccatctgatagacagattaaccagttggcccaaagattagggccagagtgggagcccatggtacttagccttggcctgtcgcagacggacatatatcggtgtaaagccaaccacccccacaatgtgcagtcccaggtcgtagaggcatttatacggtggagacagagatttgggaaacaggcaactttccagtctcttcacaatggattgcgcgctgttgaggtggacccctcactgctgctccacatgctcgaatag

SEQ ID NO: 14285 - DNA, 312 bp, synthetic construct
  misc_feature 1..312: note = Description of Artificial Sequence: Synthetic coding sequence
  source 1..312: mol_type = other DNA
atggaagcccgggataagcaggtgctccgttcactgcgcttggagcttggcgcagaagttcttgtagaaggtttagtcctgcaatatctttatcaggagggaatcttgaccgagaaccatatccaggagataaatgcccagaccacaggactgaggaagactatgctgttgttggatattctgccctcaagaggaccaaaagcgttcgacactttcttggactcactgcaggagtttccctgggtgagggaaaagttaaagaaggctcgagaagaggccatgacagacctgcccgctggttgttggccctag

SEQ ID NO: 14286 - DNA, 1443 bp, synthetic construct
  misc_feature 1..1443: note = Description of Artificial Sequence: Synthetic coding sequence
  source 1..1443: mol_type = other DNA
atgtccgcagaagtgatacaccaggttgaggaagctctggatacagacgaaaaggagatgctgcttttcttgtgccgcgacgttgcaattgacgtcgtgccacctaacgtgagagatctgctggacattctcagagagaggggtaaactgagcgttggcgatctagccgagttgctgtatagggtgaggcggtttgacttgctcaagcgaatcctgaagatggaccgaaaggctgttgaaacccacttgctgcggaacccacatcttgtgtcagactacagggtgcttatggccgagatcggagaggatctggacaaatctgacgtgtcttctttaatctttctgatgaaagattatatggggcgagggaaaatctccaaagagaaatcatttctcgacctagtggtggaactcgaaaagttgaacttggtcgctccggaccaacttgacctgctcgaaaaatgtctaaagaatatccatcgaattgacctaaagactaagatccaaaagtataaacagtcagtgcagggagcaggcaccagctatagaaacgttctgcaggccgctatacaaaagtctttaaaagatccaagcaataactttcggttgcacaatgggcgctccaaggagcagcggctcaaagagcaactgggcgcacagcaggagcctgtgaagaagagtatccaggagtccgaagcttttctgccccagtctatccccgaggaacgctacaagatgaaatctaagcccctcggtatatgtttaattatcgattgcataggaaatgaaacagagttgcttcgcgatacttttaccagcctgggctatgaagtccaaaagttcctacatctgtccatgcatggcatttctcagattctcgggcagttcgcgtgtatgcccgagcacagggattacgattcatttgtttgtgttctggtgagccgcggggggtcccaatccgtgtacggagtcgaccagacgcatagcggcctgcctctgcaccacatcagacgcatgttcatgggggactcctgcccctaccttgcaggaaaacccaagatgttcttcatccagaattatgtcgtttctgaaggacaactggaggactctagcctcctcgaggtagacggaccagcgatgaagaacgtcgaattcaaagcccagaagagagggctgtgcacggtgcacagagaggccgattttttctggagcctgtgcacagcagatatgtccctgctcgaacaatctcatagttccccaagtttatatctgcaatgcctctctcagaaacttagacaggagagaaagagaccgctattggacctgcatattgagctgaatggatacatgtatgattggaactcaagggtgtccgcaaaagagaagtactacgtgtggcttcagcacacccttcggaagaaactcatcctctcttacacttag

SEQ ID NO: 14287 - DNA, 1389 bp, synthetic construct
  misc_feature 1..1389: note = Description of Artificial Sequence: Synthetic coding sequence
  source 1..1389: mol_type = other DNA
atgagtgccgaggtgatccaccaggtggaggaagcccttgatacggacgagaaagaaatgcttctgtttctttgtagagacgtcgcaattgatgtggtcccacctaacgttagagatctgttggatattttgcgggaaagggggaagctcagcgtgggggatctggccgagctgctgtaccgagtcaggagattcgacctcctgaaaagaattttgaagatggaccgtaaggccgtcgagactcatctgctgagaaatcctcacctggtgagcgattaccgggttctgatggctgagatcggggaagacctagataagagcgacgtcagttccctgatctttctaatgaaggattacatgggccgggggaaaatcagcaaggagaaatcatttctagacctggtggttgagttggagaagctgaatctcgtcgcccccgaccagctcgacttgctggaaaaatgtctcaaaaatattcacaggatcgatctgaagactaagattcaaaagtataagcagtcggttcagggggcgggcacatcctacagaaatgtactgcaggccgctatccagaagtctctcaaggaccctagcaataacttcagattgcataacggaagaagtaaggagcaaaggttaaaggagcaactgggggcacagcaggaaccagtgaaaaaatcaatacaggaatcagaggccttcctgccacaatccatccccgaagagcgatataagatgaaaagcaagcctctgggcatttgcctgatcattgattgtatagggaacgaaactgaactgttgcgcgatactttcacatctttgggttacgaagttcagaaattccttcatttatctatgcatggaatctcacaaatactgggtcagtttgcctgcatgcccgaacacagggattatgattccttcgtgtgcgtgttagtgagcaggggtggtagtcaatcggtgtatggagttgaccagacccactcgggcctccccctacaccacatccgccgaatgttcatgggagacagctgcccttacctggctggcaagccgaagatgttcttcattcagaattatgtcgtcagtgagggtcagcttgaggactcctctctgctggaggttgacggccccgcaatgaagaatgtggaattcaaggcacagaagagaggcctgtgcacagtgcatcgggaagcagacttcttctggagtctttgcacagcggatatgtctcttttggaacagagtcattcgagcccatccctctacctccagtgcctctcacagaagctgcgccaggaaaggggtacaatccccgggtctggaatcaccgaaagcaaggatatgcacttcagctctctggggtgtatccttctcgacgttctgtag

SEQ ID NO: 14288 - DNA, 1047 bp, synthetic construct
  misc_feature 1..1047: note = Description of Artificial Sequence: Synthetic coding sequence
  source 1..1047: mol_type = other DNA
atggctgagattggagaagaccttgacaagtccgatgtgtccagcctcatattcctgatgaaagactacatgggacgtggaaagattagcaaggagaagtcatttctagaccttgtcgtcgagcttgaaaaactcaatctggtcgcacccgatcaactcgacctgctcgagaagtgtctgaaaaatatacacaggatcgatttaaaaacaaagattcagaagtataaacagtccgtgcagggagctgggacttcttacaggaacgtccttcaggcagcgatccagaaatccctgaaggacccctcgaataacttccgcgaagagccagttaagaagtcaattcaggaatccgaggcattcctcccccagtcgatccccgaggagcgctacaagatgaagagcaagccactcgggatttgtctgataatcgactgtatcggcaatgaaactgagctgctgagggacacttttacaagcctaggatacgaggtacagaaatttcttcatctgtcgatgcacggcatcagtcagatactcggccaattcgcctgcatgccggaacaccgtgattacgattccttcgtctgcgtgctggtgtcacggggaggcagccaatccgtctacggcgtcgatcaaactcactccggcctcccactgcatcacatacggagaatgtttatgggggattcctgcccctacttagccggcaagcccaagatgtttttcatacaaaattatgttgtgagcgagggccagctggaggactccagtctgttagaagtggacgggcccgccatgaagaacgttgagttcaaggcacagaagcgaggattgtgcacagtacatcgcgaagcagacttcttctggtctctctgcaccgccgacatgtcactgcttgaacagtcccactcatctccctcactctatctgcagtgtctgtctcagaagttgcggcaggagaggggcacaattcccgggtccggcatcactgaaagtaaggatatgcacttctctagccttggatgtatcctgctagacgtgctgtag

SEQ ID NO: 14289 - DNA, 903 bp, synthetic construct
  misc_feature 1..903: note = Description of Artificial Sequence: Synthetic coding sequence
  source 1..903: mol_type = other DNA
atgagtgcggaggtgatccatcaggtggaagaggcactggacacagacgagaaagagatgctcttgttcctatgtcgggacgtagcaatcgatgtcgtaccgcctaacgtaagggacctgcttgacatactcagagaaagaggcaaactctctgttggtgacctggcagaacttttgtaccgggtccggcggttcgatctcctgaaacggatcctgaagatggaccggaaggccgttgaaacccatctcctgcgcaatccacatcttgtcagcgattacagggtgctcatggctgaaattggagaggatctagataaaagtgatgtgtcttcccttatcttcctgatgaaggattacatgggccgcggaaagatcagcaaggaaaagtcttttctggacctcgttgtggaacttgaaaagcttaacttggtcgcccctgatcaactggaccttctagaaaagtgtttgaaaaacattcatcggatcgatcttaagactaaaatccagaagtacaagcagagtgtccagggagcaggcacctcttacaggaacgtgttgcaggcagccatccagaaaagcctgaaagaccctagcaacaactttagactgcataacgggcgctccaaggagcagcggttgaaagaacagctcggcgcgcagcaagagcctgttaaaaagtctattcaggagtccgaagccttcttaccccagtcgattcccgaggagcgctacaaaatgaaaagcaagcctttgggcatttgtcttattatcgattgtattggaaacgagacggaaaatgcccactcgtggatctttacccttaatagcatggccacatgtatgatcggcacagcggagtttctgccacgaagaaacataatgtccggttgctccactctctag

SEQ ID NO: 14290 - DNA, 753 bp, synthetic construct
  misc_feature 1..753: note = Description of Artificial Sequence: Synthetic coding sequence
  source 1..753: mol_type = other DNA
atgtcagccgaagtgattcaccaggtcgaggaggcccttgacactgatgaaaaagagatgctgctgtttctgtgtagagatgttgccatagacgtggttcctcccaacgttcgcgacttgctagacatacttcgagaacgaggcaaactgtcggtaggggatctagctgagctcctatatcgggtgcgtcgctttgacctgctgaagagaattctgaaaatggatagaaaggctgtcgagacccatctgctgcgtaatccgcacctcgtatccgattaccgcgtattgatggctgaaatcggggaagacctggacaaatcggatgtgagctcactgatcttcctgatgaaggattatatggggcggggcaagatctccaaggaaaagtcattcctcgatctggtggtggagctggaaaaactgaacttagttgcccccgatcaactggacttactcgagaaatgtctgaagaacatccatagaatcgacctcaagacaaagattcagaagtataagcagagcggcggctggaatggaacgtggatgactaaagcaagcttctcactgtggctggaaatagccagcctttatattctgcacattccggacctgccgactcccctgccttgcatttttatgatcagcgctaagtgctgtcaggcagtgctgaacatcagtgttttcaaaaaggagagtgggatttgtacaggctggcaatcatacggacactcaggcgtgctccacgtatgctag

SEQ ID NO: 14291 - DNA, 357 bp, synthetic construct
  misc_feature 1..357: note = Description of Artificial Sequence: Synthetic coding sequence
  source 1..357: mol_type = other DNA
atgtccgccgaagttatccatcaagtggaagaggcgctggatacagacgagaaagagatgttactctttttatgcagggacgtggccatagacgtggtacctcccaacgttcgggacctcctcgatatactcagagagagagggaagctgtccgtgggtgatctggcagagctcctgtaccgcgtgagacgttttgacctgttaaagcgcatcctgaaaatggacagaaaagcggtggagactcatttgctgaggaaccctcatctggtgtctgactacagagtcctcatggcagaaatcggggaggacttggataaaagtgacgtgtcatctcttatcttcctcatgaaggactag

SEQ ID NO: 14292 - DNA, 1443 bp, synthetic construct
  misc_feature 1..1443: note = Description of Artificial Sequence: Synthetic coding sequence
  source 1..1443: mol_type = other DNA
atgtcagccgaggttatccatcaggttgaagaagcactggacaccgacgaaaaagagatgctgctcttcctgtgccgggacgtcgcaatcgacgtggtcccgcctaacgtgagagacttgctcgacatcctgcgcgagcgcgggaagctgagcgtgggcgatctggctgaattgctataccgggtacgcaggtttgatctactcaaacggatactgaaaatggatcggaaagcggtcgagacccatctccttagaaacccacacctcgtaagtgactaccgcgtcttaatggcagaaatcggagaggacctggacaagagcgacgtgtcttccctgattttcctcatgaaagattacatgggacgcggcaaaattagcaaggaaaaaagtttcttggacttggtggtcgagctcgagaagctcaatttagttgcgccggatcagttagacctcctggagaagtgcctgaaaaacatacatcgaattgatctgaagaccaagattcaaaagtacaagcagagcgttcaaggagctggaacttcctaccggaatgtactgcaggcagcgattcagaagagtcttaaggacccaagtaacaattttcgcctgcacaacggcagatccaaggagcaaaggctaaaagagcagcttggtgcacaacaggagcccgtcaaaaagagcatccaggagtcagaagcattcctcccccagagcattccagaagagcgctacaagatgaagagcaaaccactggggatatgtctgattatcgactgtattggcaatgaaaccgaactactgcgagacacctttacttctctgggttacgaagtccagaagtttctccatctgagcatgcatggcatctcacagatcctgggccagttcgcttgcatgccggagcatcgggactatgatagctttgtgtgtgtgttggtcagcaggggcgggagtcaatcagtgtacggtgtcgaccaaactcacagtggactgcctctacaccatatccgtagaatgttcatgggtgacagttgcccttacctcgccggaaagccaaagatgttttttattcagaattatgtggtctcggagggacagcttgaggatagctccctgctggaagtcgacggaccagctatgaagaacgtggaattcaaggcccaaaaacgcgggctctgcacagtgcatagggaagctgattttttttggagtttatgcactgcggatatgagcctgcttgagcagagtcatagctccccaagtctatacctacagtgtctgagccagaagctgagacaggaacggaagaggcctctgctcgacctgcacattgaactgaacggctatatgtacgactggaatagcagggtgagtgcaaaagagaaatactacgtttggttgcagcatacgctccgcaaaaaactgatactgagttacacctag

SEQ ID NO: 14293 - DNA, 189 bp, synthetic construct
  misc_feature 1..189: note = Description of Artificial Sequence: Synthetic coding sequence
  source 1..189: mol_type = other DNA
atgtcagccgaagtcattcaccaggtggaggaggcccttgacactgatgagaaggagatgttgctttttctttgccgagacgtggctatcgatgtagtcccacccaacgtacgagacctgcttgacatcctccgagaacggggcaagctctccgttggcgacttggcagaactgctgtatcgcgtatag

SEQ ID NO: 14294 - DNA, 195 bp, synthetic construct
  misc_feature 1..195: note = Description of Artificial Sequence: Synthetic coding sequence
  source 1..195: mol_type = other DNA
atgagtgccgaagtgatccaccaggtggaggaggctctcgacaccgatgagaaagagatgctactattcctgtgtcgagatgttgccatagatgtggtgcctcctaatgttagagatctactggatatcttgagagagcgaggcaaattgtccgtgggcgacttggcagagttgctctatagagtgaggcgttag

SEQ ID NO: 14295 - DNA, 390 bp, synthetic construct
  misc_feature 1..390: note = Description of Artificial Sequence: Synthetic coding sequence
  source 1..390: mol_type = other DNA
atgtccgcagaagttattcaccaggtggaggaggcgttggatacagacgagaaggaaatgctgctctttctttgcagggacgtggcaatcgatgtggtacctcccaacgtccgggatctattggacatactgcgtgagcgtggcaaacttagtgtgggagatttagcggagcttttatatcgcgttagacgtttcgacctcttaaagcggatattgaagatggataggaaagccgttgagactcacctgctgagaaatcctcatctggtgtcagattatcgggtgcttatggccgagatcggggaagatttggataagtcagatgtttcaagtctgatttttctgatgaaagactacatgggtcggggcaaaatttcgaaagagaagtag

SEQ ID NO: 14296 - DNA, 1155 bp, synthetic construct
  misc_feature 1..1155: note = Description of Artificial Sequence: Synthetic coding sequence
  source 1..1155: mol_type = other DNA
atggctgaaattggcgaagatctggacaagagcgacgtctcatctttgatatttctgatgaaagactatatgggacgcggtaagattagtaaagagaaatctttcctggacctcgtggtggaactcgagaaactcaacttagttgcacctgaccagctggatctactggagaagtgccttaagaacattcacaggattgacctcaagaccaaaatccaaaagtacaaacagtccgtacaaggggccggtacatcctaccggaacgttctgcaagcagctattcagaaatccttgaaagaccccagtaacaactttcgtttgcacaacggtagatccaaggagcagagactcaaagaacagcttggtgcgcagcaagagccagttaagaagtctatacaggagtctgaagcctttcttccccagtccattcccgaagagagatataagatgaagtcgaaaccgcttggcatctgtcttatcattgattgcataggaaacgaaaccgagttacttcgggacacattcacaagcctggggtatgaagtgcagaagtttcttcacctgagtatgcatggtatttcacagatactgggtcagttcgcatgtatgccagagcaccgggattacgattccttcgtttgcgtgcttgtgtctcgcggcggaagccagtcggtatatggcgtggaccagacacattcaggactccccttgcaccacattcggagaatgtttatgggtgactcatgcccctatctcgctgggaaacccaagatgtttttcattcagaattacgttgtgagcgagggccagctggaggatagttccttgctggaagtggatgggcctgcaatgaagaatgtggaattcaaagcccagaaaaggggcttgtgcaccgtgcatcgggaagctgactttttttggtcgctgtgtaccgccgatatgagcctgttggagcagtcacacagtagtccatcactgtatcttcagtgtctgtcccaaaagttgcggcaagagcgcaagcgccccctgttggatctgcacatagaacttaatggatacatgtacgactggaactcacgggtgtctgcgaaggagaagtactatgtgtggctgcaacataccctgcgcaagaaactgatactgtcgtatacctag

SEQ ID NO: 14297 - DNA, 666 bp, synthetic construct
  misc_feature 1..666: note = Description of Artificial Sequence: Synthetic coding sequence
  source 1..666: mol_type = other DNA
atgtcagcagaggtgatccaccaagtcgaggaagcgttggatactgatgagaaagagatgctcctgttcctgtgccgggatgtggctatcgatgtggtgcctcccaacgtgagggatctactggacattttgagagaaagaggaaaactgtctgtaggtgacctagccgagctgctttacagggtgcggagatttgatctgctcaaacggattctgaagatggacagaaaagccgtggagacccaccttctgaggaacccgcacctggttagcgactacagagtgttaatggccgagataggcgaggacctggataagagcgacgttagcagcctgatcttcctgatgaaggattatatggggcgcggtaagattagcaaagaaaaatccttcctcgatctcgttgttgaactggaaaaactcaatttagtggcccccgatcaactggacctattggagaagtgcctgaaaaacattcaccggatcgacttgaagacaaagatccagaaatacaagcagtccgtacagggcgccgggaccagctataggaacgtactccaagctgctattcaaaaatctctaaaggatccgtcaaataatttccgaatgatcacaccttacgcacactgcccagacttaaaaatcctgggcaactgtagcatgtag

SEQ ID NO: 14298 - DNA, 1338 bp, synthetic construct
  misc_feature 1..1338: note = Description of Artificial Sequence: Synthetic coding sequence
  source 1..1338: mol_type = other DNA
atgtcagctgaggtgattcaccaggtagaagaggccctagacaccgatgagaaagaaatgctgctgttcctgtgtcgagacgtcgccattgatgttgtgcccccgaacgtcagagacctgttggatatcttgcgcgagcgtggtaagctaagcgtgggggatctggcggaactgttgtatagagtacggaggtttgacctcttgaaaaggatcctgaaaatggatcgcaaggccgtcgagactcacctcctaaggaacccccatcttgtttccgattatagagttctcatggcagaaatcggagaggatctggacaagtcagatgtgagttctctgatttttttaatgaaggattatatgggccgaggcaagatctcaaaagagaaatcgttcctggacttggttgttgaactggagaaactgaatctggtggccccggatcagcttgatctgttggagaaatgcctgaagaacatccatagaatagatctcaaaactaagatccagaagtacaaacaatccgtacagggggctgggactagctaccggaatgtactgcaggccgccatacagaagtctctcaaagacccctcgaataattttaggagcatccctgaggaacgttataaaatgaaatctaagccacttggcatctgtctaattattgactgtatagggaatgagactgagcttttgagagatacctttacctcattgggctatgaggtgcagaaattcctgcatctctctatgcacggaatttctcagattctgggtcagtttgcgtgcatgccggaacatagagattacgactcatttgtgtgcgtgttggtgagtagaggcggatctcaaagcgtctacggtgtggatcagactcatagcggattgccacttcaccatattagaaggatgttcatgggcgactcttgtccgtacctggccgggaaacctaaaatgtttttcatccaaaattacgtcgtgtcagaagggcagttggaagacagctcactgctcgaggttgatggtcctgccatgaaaaatgttgaatttaaagcccaaaagcgtgggctgtgcacagtgcatagagaggctgattttttctggtccttatgcacggccgatatgtccctattagaacagtcacacagctcgcctagcctctatctgcaatgcctgagccaaaagctaagacaggagagaaaacgccctctcctggatcttcacatagagcttaacgggtatatgtatgattggaactctcgggtgtcagccaaggaaaaatattatgtgtggctgcagcacaccctgcgcaaaaaactgattctgtcttacacctag

SEQ ID NO: 14299 - DNA, 1152 bp, synthetic construct
  misc_feature 1..1152: note = Description of Artificial Sequence: Synthetic coding sequence
  source 1..1152: mol_type = other DNA
atggccgataaggtactcaaggaaaagcgcaaactgtttattagaagcatgggcgaagggaccattaacgggctgctggacgagctgcttcagacacgtgtgttgaacaaggaggagatggagaaggttaaacgggagaatgccactgtcatggataaaacccgagcactcattgattccgtaatccccaaaggtgcgcaggcttgtcagatctgcatcacctacatttgtgaggaagactcatatctggcaggcacgctggggcttagtgccgctccgcaggctgtgcaagacaaccccgctatgcctacctcttctggttctgaggggaatgtcaaattatgctcccttgaagaggctcaacgcatctggaagcagaagtccgctgaaatttaccctatcatggacaagagctcgagaacccggctggctctgatcatttgtaacgaagagttcgattcaatccccagacgcactggagctgaggtcgacatcacaggcatgacgatgttgctgcagaatttaggctactctgtggacgtcaagaaaaatctaactgcaagtgatatgacaactgaactcgaggcattcgcccatagacccgaacacaaaacctctgattccacctttttggtctttatgtcacacggcatccgggagggcatctgtgggaagaagcatagtgaacaggtacctgacattctgcaactgaatgctatcttcaacatgctgaatacaaaaaattgcccttcactgaaagataagcccaaggtcatcatcattcaggcttgtaggggggactcccctggggtcgtatggtttaaagactcggtgggagtttccggtaatctgtctttgcccaccacagaggagtttgaagacgatgccattaaaaaggcgcatatcgagaaggatttcatcgctttctgctcatccactccggacaatgtgagctggcggcatcctacaatggggtctgtgttcatcgggcgacttatcgagcacatgcaggaatatgcttgttcatgtgacgtggaagagatcttccgcaaggtgcgctttagctttgaacaacccgacggcagagctcaaatgcccacgaccgagagagtaaccctgacccggtgcttctacctgtttcctggacactag

SEQ ID NO: 14300 - DNA, 792 bp, synthetic construct
  misc_feature 1..792: note = Description of Artificial Sequence: Synthetic coding sequence
  source 1..792: mol_type = other DNA
atggccgataaagtgttaaaagaaaagagaaaactctttattaggagcatgggggaggctccccaggctgtgcaggacaaccccgccatgccaaccagctcgggaagtgaaggtaacgttaagctgtgtagcttagaggaagcacagcgaatctggaagcagaaatcggcggagatctatcccattatggacaagagttcacgcacacgactcgcccttattatctgcaatgaagagtttgactctatcccaagacgcacgggggccgaagttgacatcacaggaatgacgatgctactgcagaacctggggtattccgtcgacgtgaagaagaaccttacagcctcggacatgacaactgaactggaggcttttgcccatagacccgagcacaagacctccgactccacttttctagtgtttatgagccatggcattagagaagggatctgtgggaaaaaacatagtgagcaggtgccagacatcctgcagctgaatgcgattttcaacatgctgaatactaagaattgcccaagcctgaaagacaagccaaaggtgatcatcatacaggcgtgtcgtggcgacaatgtgtcttggagacaccctaccatgggttcagtgttcatcgggaggttgatcgaacatatgcaagagtacgcatgttcctgtgatgtcgaggaaatcttcagaaaggtgcgcttcagcttcgaacagcccgacggccgcgcacagatgccgactacagagagagttacactgacgagatgtttctaccttttccccgggcactag

SEQ ID NO: 14301 - DNA, 267 bp, synthetic construct
  misc_feature 1..267: note = Description of Artificial Sequence: Synthetic coding sequence
  source 1..267: mol_type = other DNA
atggctgacaaagtcttgaaagagaaaaggaagctctttatcagaagcatgggagaagacaacgtcagctggaggcacccaaccatgggcagcgtctttatcggcagacttattgagcatatgcaagaatatgcctgctcatgtgacgtcgaagagatcttccggaaagtcaggttctcgtttgaacagccggacggccgggcccagatgccaaccaccgagcgggtgacactgactagatgtttttacctgttccccggccattag

SEQ ID NO: 14302 - DNA, 1152 bp, synthetic construct
  misc_feature 1..1152: note = Description of Artificial Sequence: Synthetic coding sequence
  source 1..1152: mol_type = other DNA
atggccgacaaagttttgaaagagaagcgcaaactctttattaggagcatgggggaggggaccatcaatggcctactggatgagctgctgcagaccagggtgctgaataaagaggagatggagaaagtcaaacgggagaatgccactgtcatggacaagacccgcgccctcattgatagcgttatacccaagggcgcccaggcatgccagatttgtattacttatatctgtgaagaggactcatatctagccggtaccctggggctgtcggctgctccgcaggctgtgcaggacaatcccgctatgcctactagctctggtagcgagggcaacgtgaagctgtgctcactggaggaggctcagcgaatatggaaacagaagtcagctgaaatctacccgattatggacaagagctcccgaacaaggctagcgctgatcatatgcaacgaagaattcgactcaattccacgtcggacgggcgcagaggtggatatcactgggatgacaatgctcttacagaacctcggctacagcgttgatgttaagaagaatctgaccgctagtgacatgacgacagagctggaggcgttcgcacaccggcccgaacacaagactagcgatagcacctttctggtttttatgtctcatggaatccgcgaaggaatctgtggaaagaagcactcagagcaggtgccagacatcctacagttaaacgccatttttaatatgctgaacaccaaaaactgtccgagtcttaaggataagcccaaagttattattatccaggcctgcaggggagatagtccaggagtggtctggtttaaagatagtgtcggtgtttcaggaaatctcagcctgcccacaacagaagagttcgaagacgatgcaataaaaaaggcccatatcgagaaggattttatagcgttctgctccagcactcctgacaatgttagttggcgccacccaactatgggcagcgtgtttattggccgcctgattgagcacatgcaggagtatgcctgtagctgtgatgtggaggaaatttttcggaaggttcgcttttccttcgagcaacctgacgggcgggcccagatgcccaccactgagcgcgtaacattgactaggtgtttttatctcttccccggccactag

SEQ ID NO: 14303 - DNA, 267 bp, synthetic construct
  misc_feature 1..267: note = Description of Artificial Sequence: Synthetic coding sequence
  source 1..267: mol_type = other DNA
atggctgacaaggtactgaaggaaaaacggaaactgttcattcgcagtatgggcgaggacaacgtctcctggaggcacccgacgatggggtccgtcttcatcgggcgcctcatcgagcacatgcaagagtacgcctgtagctgtgacgtggaggagatctttcggaaggttcgctttagttttgaacagcctgacgggcgagcacagatgcccactactgaacgagtgactctgacaagatgcttctacctgttccctgggcattag

SEQ ID NO: 14304 - DNA, 1215 bp, synthetic construct
  misc_feature 1..1215: note = Description of Artificial Sequence: Synthetic coding sequence
  source 1..1215: mol_type = other DNA
atggcggataaagtactcaaagagaaaaggaagctgttcataagaagcatgggggagggcactattaacggtcttctggatgagctgttacaaactcgcgtgctgaacaaagaggagatggaaaaagtcaagagagaaaatgccacggtgatggataaaacccgggctctcatagactcagtgatcccgaagggcgcccaggcttgccagatttgcataacttatatctgtgaggaggatagctatctggccggcaccctaggcctgtcagcagatcagacatccgggaactacctcaacatgcaggacagccagggcgtgctgagcagtttccctgcccctcaggctgtgcaggacaaccctgccatgcccacgagcagtggcagtgaggggaacgtaaagctgtgcagtttggaggaagctcagaggatctggaagcaaaagtctgccgaaatttaccccatcatggataagtcttcacgcacccgcctggctttaattatttgcaatgaagagttcgatagcattcccaggaggactggcgccgaagtggatattaccggtatgacgatgctccttcagaatctgggctattcagtggacgtaaagaagaatttgaccgcatcggatatgacgaccgagctggaagccttcgcacacagacctgaacataagacaagcgattctacttttctcgtgtttatgtcccacggaattcgtgaagggatttgcggaaagaagcacagcgagcaggtccctgatattctccaacttaacgcaatctttaatatgctgaacacaaaaaactgcccgtcactcaaagataaaccgaaagtgatcattatccaggcttgtcggggtgacagcccaggagtggtgtggttcaaagatagtgtcggcgtgtctggaaacctaagcctgcctaccacagaagagtttgaggatgacgccataaagaaggcgcatatagaaaaagacttcatcgccttttgttccagcacaccggataacgttagctggcgccatcctactatgggaagtgtgttcatcgggaggctcatagagcatatgcaggagtatgcatgcagttgtgacgtcgaggagattttcagaaaggttaggttctccttcgagcaaccggacgggcgtgcccagatgcccacaactgagagagtcaccctcacgagatgcttttatttattcccagggcattag

SEQ ID NO: 14305 - DNA, 792 bp, synthetic construct
  misc_feature 1..792: note = Description of Artificial Sequence: Synthetic coding sequence
  source 1..792: mol_type = other DNA
atggctgacaaagtgcttaaggaaaaacgcaagttattcattcggtcaatgggcgaagcccctcaagcagtgcaggataacccagccatgcctaccagttcggggtctgagggtaatgtgaaattgtgctcactggaggaagcccagcggatatggaagcagaaaagcgccgagatctaccctattatggataaaagctctcgaactcgtttggccctgattatctgcaatgaagaatttgattctatacctaggcggacgggtgcggaagttgacattaccgggatgacaatgttgctgcaaaatttgggctatagcgtagacgtgaaaaaaaacttgacggccagtgacatgaccactgagctggaggcctttgctcatcgacctgagcacaagacaagtgattctaccttcctggtttttatgagtcatggaattcgagaaggtatttgcggaaaaaaacacagtgaacaagtgcccgacatactccagttgaacgctatcttcaacatgctgaacacaaaaaattgccctagcttaaaggacaaacctaaggtaattataatacaggcctgtcgtggagataatgtatcttggcgccaccccactatgggcagcgtgttcatcggtaggttaattgaacatatgcaggaatacgcttgctcatgcgacgtggaggaaatatttagaaaagttcgcttttcctttgagcagcccgacgggcgagctcagatgcctactaccgagagggtcactttgacaaggtgcttttacttgtttccaggacactag

SEQ ID NO: 14306 - DNA, 1152 bp, synthetic construct
  misc_feature 1..1152: note = Description of Artificial Sequence: Synthetic coding sequence
  source 1..1152: mol_type = other DNA
atggctgacaaagtgctgaaggagaaacggaagcttttcatcagaagtatgggcgagggcacaataaatggcctactcgatgagctcctccagaccagagtcctgaataaggaggagatggagaaggtgaaacgcgagaacgctaccgtgatggacaaaactagagctctgatcgactctgtgatcccaaagggcgctcaagcctgccagatttgcattacctatatttgtgaggaggactcctacctggctgggactctggggcttagtgccgcacctcaagccgttcaagacaacccagcaatgcccacaagcagtgggagtgaaggcaatgtaaagctctgttcactggaggaagcacagcggatctggaagcagaagtctgctgagatctatcctattatggataaatcctctagaaccaggctggccctgatcatatgtaacgaagagttcgactcaatacctcggcgaaccggtgctgaagtggatatcacaggtatgacaatgttattgcagaacctcggttatagcgtcgacgtgaaaaaaaacctaaccgctagcgatatgaccaccgagcttgaagcttttgctcacaggcccgaacataaaacttccgactccactttcctcgtttttatgtcccatgggattagggaaggtatctgtggcaagaagcacagtgaacaggtaccagatatactgcagctgaatgcaatctttaacatgttgaacacaaaaaactgccctagtttgaaagataagcccaaagttataatcatccaggcatgccgcggtgattctcctggcgttgtctggtttaaggactcagtgggtgtctccgggaacctgtccttacccactacagaggaattcgaagatgatgcgatcaagaaggctcacattgagaaggatttcattgctttctgttcctccacccctgacaacgtctcatggcgtcatccaaccatggggtctgtgttcatcggacggttgatcgagcacatgcaagagtacgcctgttcatgcgatgtagaggagatattcagaaaagtgcggttctcctttgagcagcctgatggacgggcccaaatgcctaccacagagagggttaccctcactcgttgtttttatctctttccaggccattag

SEQ ID NO: 14307 - DNA, 936 bp, synthetic construct
  misc_feature 1..936: note = Description of Artificial Sequence: Synthetic coding sequence
  source 1..936: mol_type = other DNA
atggctgacaaagtgctcaaagagaagcggaagctgtttattcggtcaatgggggaggcccctcaggcagtgcaggacaaccccgcgatgccgaccagctctgggagcgaggggaacgtgaagctatgttcactggaagaggctcaaagaatttggaagcagaagagtgccgagatctatccaatcatggataagagcagtagaactcgactcgccttaatcatctgcaacgaagagttcgactctatcccccggcgtaccggggccgaagtcgatatcactggtatgactatgctcctgcagaatctgggctatagcgtcgatgtgaaaaaaaatctgaccgcaagcgatatgactacggagcttgaggctttcgcccatcggcctgagcacaaaacctccgacagtacatttctagtgtttatgtcccacgggatccgcgaaggcatctgtgggaagaagcattctgagcaggttcctgacatccttcagttaaatgctatttttaacatgctgaacaccaagaattgtccttcactgaaagacaagcccaaggtgatcattatccaggcctgcagaggagactctccaggagtcgtatggttcaaagactccgtgggagtctccggcaacttaagcttaccgacaaccgaggagtttgaggacgatgcaatcaagaaggcgcacatagaaaaggacttcatagctttctgctcatctaccccagataacgttagctggcgtcaccccaccatggggtccgtatttattggacgattgattgaacacatgcaggagtacgcctgcagctgcgacgttgaagagatatttaggaaggttcggtttagcttcgaacagcccgacggccgtgcacagatgccaacgactgagcgtgtgactcttactcgctgcttctacctgttcccgggccactag

SEQ ID NO: 14308 - DNA, 906 bp, synthetic construct
  misc_feature 1..906: note = Description of Artificial Sequence: Synthetic coding sequence
  source 1..906: mol_type = other DNA
atggagaaggtaaaacgggaaaatgccacagtcatggacaaaactcgggcactgatcgactctgtgatccctaaaggtgcacaggcttgccagatatgtatcacctacatctgcgaggaagacagctacctggcaggaactcttggtctcagcgccgaccagaccagcggaaattatctgaacatgcaggatagtcagggagtgctgagctccttccccgccccacaggcagtgcaagataatccagcgatgcctacaagcagcggaagcgaaggtaatgtgaagctttgctccctggaggaagcacaaagaatatggaagcaaaagtctgctgaaatttaccccattatggataagagcagccgcacacggctggctttgatcatatgcaacgaggagtttgactcaatacctcggcgaaccggggctgaggtggatataacaggaatgaccatgttacttcagaacctgggatattcagtggatgtgaaaaaaaatctgaccgcaagcgacatgaccacagaattggaggcgttcgctcaccggcccgagcacaaaacttcagactctacatttctagtcttcatgtcacatggcatccgcgaagggatttgtggtaagaaacactcagaacaggtccctgacatactgcaactcaatgcgatctttaacatgcttaacactaaaaactgtccatctcttaaggacaagcccaaagttataataatacaggcttgcagaggggattcaccaggggttgtgtggttcaaagactccgtgggcgtctcagggaacctgtcactcccaactactgaggagtttgaggatgacgctatcaaaaaggctcacatagagaaagactttatcgccttctgctcctctacacccggcaaaagtcagagttag

SEQ ID NO: 14309 - DNA, 333 bp, synthetic construct
  misc_feature 1..333: note = Description of Artificial Sequence: Synthetic coding sequence
  source 1..333: mol_type = other DNA
atggcagataaggtgttgaaggagaagaggaaactctttattcggagcatgggggaagggacgattaacggcttactcgacgaactcttgcaaactcgcgtgttgaacaaggaggagatggaaaaggtcaaaagagagaatgctaccgttatggataaaactcgagctctgattgatagcgttatcccaaagggcgcgcaggcctgccagatttgcattacctatatatgcgaagaagactcatatttagccggtaccctaggactctcagctgacctctccaacaatggccaggtgaagccacacacaagctgtagccactatctccaatag

SEQ ID NO: 14310 - DNA, 267 bp, synthetic construct
  misc_feature 1..267: note = Description of Artificial Sequence: Synthetic coding sequence
  source 1..267: mol_type = other DNA
atggcagacaaggtgctgaaggaaaaaaggaagctctttatccgaagtatgggggaagataatgtctcttggaggcacccaacaatgggaagcgtttttatcggccggttgatcgaacatatgcaggagtatgcatgcagctgcgacgttgaagaaattttccgcaaagtgagattcagctttgagcagcctgatgggcgcgcccagatgcctaccaccgaacgagttaccctgaccagatgtttctacctgttccccggtcactag

SEQ ID NO: 14311 - DNA, 1215 bp, synthetic construct
  misc_feature 1..1215: note = Description of Artificial Sequence: Synthetic coding sequence
  source 1..1215: mol_type = other DNA
atggcagacaaagtactcaaggaaaaacggaagctgttcatcaggagcatgggtgagggaaccattaacggcctgcttgatgagttgttgcagacaagggtgctaaacaaagaggaaatggagaaggtgaaacgggagaatgctaccgtcatggacaaaacccgggccctgatcgactctgtgatccccaagggggcccaagcctgtcagatttgtatcacctatatctgtgaggaagatagttacctggccggtacacttggattaagcgccgatcagactagtggcaactacctgaatatgcaggactcccagggagtgctctcctctttccccgccccgcaagctgtccaagataacccggccatgcctacgtcctccggttccgagggtaacgttaaattgtgctcattggaggaggcccagcggatttggaaacagaagtccgccgagatctatcccatcatggacaaaagcagcagaaccagacttgccctgattatctgcaacgaagaattcgactccattcctcggcgcacaggcgctgaggtggacatcactggcatgactatgttgctccagaacctggggtacagtgtggatgtaaagaagaatttaacagcgtctgacatgacaactgagcttgaggcttttgcccaccggcccgagcataagacttcagattcaacattcctggttttcatgtcccacggcattcgcgagggcatttgcgggaagaaacactctgagcaagtccccgatatcctgcagctgaacgccattttcaacatgcttaatacaaagaactgtcccagtctcaaggataaacccaaggtgatcatcatccaggcttgccggggcgatagccctggggtcgtgtggttcaaggattctgtgggggtctcagggaacctgtccttgcccacaacagaggaatttgaggacgatgctatcaaaaaagcacacatcgagaaggatttcatcgcattctgttccagcacaccagacaatgtgagctggcgtcatcccaccatgggctccgtttttattggccgccttattgagcatatgcaggaatacgcctgttcatgtgatgtcgaggagattttccgcaaggttcgcttcagcttcgaacagcctgatggacgagcccagatgcccaccacagaacgggtgaccctgacccggtgcttttacctgtttccgggacactag

SEQ ID NO: 14312 - DNA, 792 bp, synthetic construct
  misc_feature 1..792: note = Description of Artificial Sequence: Synthetic coding sequence
  source 1..792: mol_type = other DNA
atggcagataaagtgcttaaggagaaacggaagttattcatacgttccatgggagaagcccctcaggctgtccaggacaatcccgccatgcctacatcttctggatctgagggcaacgtcaagttgtgctctctcgaagaggctcaacggatctggaagcagaaatctgctgagatatatccgatcatggataaatcctcaagaactaggctggcacttatcatttgtaacgaggaatttgattctatacccaggaggaccggcgccgaggtagatatcacaggtatgaccatgttgttgcagaatctcgggtattctgtggatgtgaagaaaaatttgacggcctcagacatgacaacagagttagaagcattcgctcaccgccctgagcataagacaagtgatagcacattcctggttttcatgtctcacggcatcagagaggggatttgtggcaagaagcatagtgagcaagttcctgatattctgcaactgaacgctatatttaacatgctgaacaccaaaaactgtcctagcctcaaggataagcctaaggttatcatcatccaggcctgccgaggagataatgtttcatggcggcatcctaccatgggaagtgtcttcatcggacgattaattgaacacatgcaggagtacgcatgcagctgcgacgtggaagaaatcttccgaaaggtgcggtttagctttgaacagcccgatggcagggcgcagatgcccactacggagagggtgactctgacccgttgtttctacctcttccctggccactag

SEQ ID NO: 14313 - DNA, 1368 bp, synthetic construct
  misc_feature 1..1368: note = Description of Artificial Sequence: Synthetic coding sequence
  source 1..1368: mol_type = other DNA
atgaagagccagggccagcactggtatagttcttccgacaaaaactgcaaagtttcatttcgcgagaaactgttgatcatagactccaacttaggagtgcaggatgttgaaaatttgaagtttttgtgtattgggttggtgcctaataaaaaacttgaaaaatccagttccgcttcagacgtctttgagcacctccttgcagaggacctgcttagcgaggaggatcctttctttttggccgagttgctctacattatccgacagaaaaaactgctccaacacctaaattgcacaaaggaggaggtggagcggctgctgccaacaagacagagagtgtccctattccgaaacctgctatacgagctctcagagggaatagattccgagaacctgaaagacatgatattcctcctcaaggatagcctcccgaagaccgagatgacgtcactttcgttcctggctttcctggaaaaacagggaaagatcgatgaagataacctgacctgtctggaggacctgtgcaaaacagtggtacccaagctattgcggaacattgagaaatataagcgagaaaaggctattcagatcgttaccccacccgtggataaagaagctgagagttatcaaggtgaggaggagctggtcagtcaaactgacgtcaaaacatttctagaggccctgccccaggaaagctggcaaaataaacacgccggcagcaatgaaattttgtctcacgtctttcagtggctcggattcactgtccacattcacaacaatgtaactaaggtcgagatggaaatggttttacagaagcagaaatgcaaccccgctcacgcagatggggattgtttcgtgttctgtattcttacccacggcaggttcggtgctgtctacagctccgatgaggccctgatcccaatccgagaaataatgtcccacttcaccgctctgcagtgccctcgcctggccgagaagccaaagctgttttttatccaggcttgccaaggcgaagaaatccagcctagcgtgtccattgaggctgatgctttgaatcctgagcaagcacccacttctctgcaggatagcatcccagccgaggccgacttcttgcttggcctagccactgtcccagggtacgtgtctttcaggcacgtcgaagaggggtcctggtacatccagagtctgtgtaaccacctgaagaagcttgtgccccgccacgaagacatactgtccatcctcacggccgtcaatgatgacgttagtcgacgtgtcgataagcaggggacaaaaaaacagatgccgcagcctgcattcaccctgcgaaagaaactggtgttccctgtgccgctggatgctctgagtctgtag

SEQ ID NO: 14314 - DNA, 1437 bp, synthetic construct
  misc_feature 1..1437: note = Description of Artificial Sequence: Synthetic coding sequence
  source 1..1437: mol_type = other DNA
atgaagtctcagggccaacactggtattcttcatcagacaagaactgcaaggtgagctttcgagagaaactgctgattatagatagtaacctgggcgtgcaggatgtcgagaatctgaaatttctatgtatcggactggtgccaaataagaagcttgagaaatccagcagcgcatccgacgtgttcgagcacttgctggctgaagatcttctgtccgaagaagatcccttcttcctggccgagctcctttacatcatcagacaaaagaagctgctccaacatctgaattgtacaaaagaagaggtggagcgtttactccccacgcgccaacgtgtcagcttatttagaaacctgctatatgaactctcggaggggattgattcggagaatcttaaagacatgatttttctcctgaaggacagtttgcctaaaactgaaatgacttctctgagcttccttgccttcctggagaagcagggcaaaatagacgaagataatctgacctgcctggaggacctgtgcaagacggtggtgcccaagctgctgagaaacattgagaaatataagcgagagaaggccattcaaattgtgactccccccgtagataaagaggccgaaagttatcagggagaagaagagctggtgtcacaaactgacgtaaagaccttcctcgaggcacttccgagagccgctgtctataggatgaatagaaatcaccggggtttgtgcgtaattgtgaacaatcatagcttcacgagcctcaaggatcgacagggaactcacaaggacgctgagatcctgtcacatgtgtttcagtggctgggcttcaccgtgcatatccacaataatgtgactaaagtcgagatggagatggtgttgcagaaacagaagtgcaaccccgcccacgctgatggggactgtttcgtgttctgcatcctgacacatggcagattcggagctgtgtattcgtcagatgaggccctcatccccattcgggagataatgtctcactttactgcactgcagtgcccaaggctggccgagaagcctaagctgttcttcattcaagcctgtcagggcgaggagatacagccaagcgtgagcatagaagcggacgccctgaaccccgaacaagcaccgaccagcctgcaggactctatcccagccgaggccgactttctgctcggcctggccactgtacctgggtacgtctcctttcggcatgtcgaagagggatcatggtacattcaatcactgtgcaatcacctgaaaaagttggtcccgcgaatgcttaagttcctggagaagaccatggagatacgcggccgaaagagaactgtgtggggcgccaagcagatctccgcaacttccctcccaacggccatcagtgcccagacacctaggccgcctatgcggcggtggagcagcgtttcttag

SEQ ID NO: 14315 - DNA, 1566 bp, synthetic construct
  misc_feature 1..1566: note = Description of Artificial Sequence: Synthetic coding sequence
  source 1..1566: mol_type = other DNA
atgaaatctcaagggcaacattggtattcttcaagcgataaaaattgtaaagtttctttccgagaaaagcttctgatcatagatagcaatctgggggtgcaggatgtcgagaacctgaagtttctgtgcattggcctcgtcccaaacaagaaactcgagaagtcttcctcggccagcgacgtctttgaacacttgctggccgaagacctcttgagtgaagaggacccgttttttctggccgagctactttatattatacgccaaaaaaagctgttgcagcacctcaactgcactaaggaggaggtggagcggctgttacctacacgtcagagggtgagccttttcaggaatcttttgtacgagctttctgaggggatcgacagtgagaatctgaaggacatgatctttctactcaaagattcactgcccaagaccgagatgacctccttaagcttcctcgcctttctggaaaagcaaggcaagattgatgaggataacctgacatgtctggaagatttgtgtaaaactgtggtgcctaaattactgcgcaacatcgagaagtacaagcgcgagaaggctatccaaattgtgactccgccagttgacaaggaagctgaaagctatcaaggtgaagaagagctagtaagtcagaccgatgtgaaaacgttcctggaggctttgccacaggagtcgtggcaaaacaagcatgcaggatctaacggcaatagagcaaccaatggtgccccatccctggtcagtcgagggatgcagggcgcttctgccaacacgctgaattccgagacatccaccaagagagctgcagtttacagaatgaacaggaatcatcgcgggctgtgtgtaatagtgaacaaccactcattcactagccttaaggatcggcagggcacgcataaagacgcggagatcctcagtcatgtgttccagtggttgggctttactgtgcacattcataacaacgtgactaaggttgagatggaaatggtcctgcagaagcagaaatgcaatcccgcgcatgctgacggggattgcttcgtgttctgtattctgacgcacgggcgctttggcgcagtgtattcaagtgacgaggcactgatccccatccgggaaatcatgtcccactttacagccctacagtgccctaggttagccgagaagcctaaactcttcttcatacaagcgtgtcagggagaggagattcagccgtccgtgagtatcgaagctgatgcactcaatccagaacaggccccgacaagtctccaggacagtattcctgcagaagcagatttcctgctgggcttggccaccgtacctggatatgtctccttccgccacgtggaggagggcagttggtacattcagtcactatgcaatcacttgaagaaactggttccgcggatgctgaagtttctcgagaagactatggagatccgcgggagaaagcgtacagtttggggggcgaagcagataagcgccacatctctgcctacagccatatcggcacaaacccctcggccaccgatgaggcggtggtcatcggtgtcctag

SEQ ID NO: 14316 - DNA, 1569 bp, synthetic construct
  misc_feature 1..1569: note = Description of Artificial Sequence: Synthetic coding sequence
  source 1..1569: mol_type = other DNA
atgaagtcccagggtcagcattggtacagttcttcagataagaattgtaaagtgagctttcgtgaaaaactgttgataatcgactctaacctgggggtccaggacgtagaaaacctgaagtttctctgcattggactggtccctaataaaaaactcgaaaagagttcttctgcgtcagacgtgttcgaacatttgctggctgaggatctcctctctgaagaagatcctttcttccttgctgagctcctgtacataattcgacaaaagaagctcctgcagcatctgaattgtacaaaagaggaggtggaacggcttctccccacacgccaacgggttagcctgttccgtaacctactgtatgagctttctgaaggtatcgattcagaaaatctaaaagacatgatattcctcctcaaagattcactcccaaaaaccgagatgactagccttagctttctcgcatttctcgaaaagcaggggaagatcgacgaagataatctgacctgcttggaggatctatgcaaaactgttgtgcctaagcttcttaggaatattgaaaaatataaaagagagaaggctattcagattgtgacgccaccagtggacaaggaggccgagagctatcaaggggaagaagaattggtgtctcagacggatgtgaagacatttctggaggcactgcctcaggagagctggcagaataaacatgccggcagtaatggtaatagggccaccaacggtgccccatccctagtatcgcgaggcatgcaaggggcaagtgccaacactcttaactccgagacaagcaccaagcgggctgccgtctacaggatgaaccgaaaccatcgaggcctgtgtgtgattgtaaataaccattctttcacaagtctgaaagacagacaaggtacccataaagatgctgagatcctttctcacgtgttccagtggcttggcttcacagtccacattcacaataatgttaccaaagttgagatggagatggtcctgcagaagcagaagtgcaaccccgcacacgctgacggggactgctttgtgttctgcattctgacccacggccggtttggagcagtttactccagtgacgaggcgctgatccctatccgcgagatcatgtcccacttcactgcccttcagtgccccaggctggcagagaaaccaaaattattcttcattcaagcatgccagggggaggagattcaaccctcagttagtattgaggcagacgccctgaatcccgaacaggccccaacttccctccaggactcaatcccggcagaagctgattttctgctgggactggctactgtgccaggctatgtgtcctttcgccatgtcgaggaggggagctggtacatccaatctctgtgtaaccatcttaaaaagctggtcccccgccatgaggacattctcagtatcctcaccgccgtgaacgacgatgtcagcaggcgcgtggacaagcagggcactaaaaaacagatgccacagcctgcgttcacgctgcgcaaaaagctggtgtttccggtgccgctggacgctctgtccttgtag

SEQ ID NO: 14317 - DNA, 1440 bp, synthetic construct
  misc_feature 1..1440: note = Description of Artificial Sequence: Synthetic coding sequence
  source 1..1440: mol_type = other DNA
atgaagtctcagggccagcattggtactcatcgtcggacaaaaactgcaaagtctcttttcgagagaaactgcttattattgactccaatttgggcgttcaggacgtcgagaatctcaaatttttatgcatcggcctcgtgcctaacaaaaaacttgagaaaagttcttccgcatccgatgtttttgagcatcttctggccgaggacttgttaagcgaggaagatcccttctttctcgctgaactactgtacataatacgtcagaaaaagcttttgcagcacctgaattgcactaaggaggaggtcgagagacttctcccaacccgccagagagtcagtctatttcggaacctgctctatgaactgagcgaaggtatagatagtgaaaacttgaaagatatgatctttctcctgaaggatagccttcccaaaacggaaatgacgagcctgtcgttccttgccttccttgagaaacaaggcaagatagatgaagacaacctcacgtgcctggaagatctgtgtaaaaccgtggtgccaaaactgctgaggaacatagagaaatacaagagagaaaaagctattcagattgtcactcccccagtggacaaggaggcagaatcttaccagggcgaagaggagttggtaagccagacggacgtaaaaacatttttggaagcgctccctagagcagccgtctatcggatgaatcggaaccaccgggggctgtgcgtaatagtcaataatcactcatttacatccctcaaggataggcagggtacacacaaggatgcagaaattctgtctcatgtttttcaatggctggggtttacggtccacattcacaataacgtgaccaaggtggagatggaaatggtactgcagaagcagaagtgtaatcctgcacacgccgatggcgactgtttcgttttttgcatcctgacccatggcagattcggcgccgtgtattcttccgatgaagcactaatccctattcgggagatcatgtctcacttcacagctctccaatgccctcgcctggccgaaaagcccaaacttttcttcatacaggcttgccagggcgaggagatccaaccttctgtatccatagaggccgatgccctcaaccctgagcaagctccaaccagcctgcaggactctatacctgctgaggcagacttcctgctgggactggctacagtacctggatatgtcagtttccgacacgtggaagaaggatcatggtacatccagagcctctgtaatcacttaaaaaagctggttcctagacacgaggacatccttagtatcctgaccgccgttaacgacgatgtctccagaagggtagataaacaaggaacaaagaaacaaatgcctcaacccgcattcacccttcgcaagaagctggtattccccgtccccttggacgccctgagcttgtag

SEQ ID NO: 14318 - DNA, 822 bp, synthetic construct
  misc_feature 1..822: note = Description of Artificial Sequence: Synthetic coding sequence
  source 1..822: mol_type = other DNA
atgaagtctcaaggccagcactggtattcttcttctgacaagaactgcaaggttagcttccgcgaaaagctgctgatcatagacagcaacctgggcgtacaagatgtggaaaacctgaaattcctgtgtattgggcttgtgcctaacaagaagcttgagaagtcctctagtgcttcagatgtgtttgaacacctgctagccgaggaccttctcagtgaggaagatccattcttcctcgctgagctgctatatataatccggcaaaagaagctgctccaacacctgaattgtaccaaagaggaagtggagcgcctcctgcctacaagacaaagagtctccctgttccgaaatcttctgtacgaactctccgagggcatcgatagtgaaaatctgaaagatatgatctttctgctgaaagactcgctgcctaaaacagaaatgacctcgctttctttcctggccttccttgagaagcaaggcaaaatcgacgaagacaacctcacatgcctggaagacctatgtaagacggtggtgcctaagctgttacggaacatagaaaagtacaagagagaaaaggccatccagatagtcactccccccgtggacaaggaggccgaatcgtatcagggggaggaggagctcgtatcacagacggacgttaaaacattcttggaagccctgccacaggagtcatggcaaaacaagcatgccgggtctaatgagggaagttgtgttcaggacgaatcagagcctcaaaggccgttgtgccattgtcagcaacctcagctctatttaccagaggggcagacaagaaatccctag

SEQ ID NO: 14319 - DNA, 1533 bp, synthetic construct
  misc_feature 1..1533: note = Description of Artificial Sequence: Synthetic coding sequence
  source 1..1533: mol_type = other DNA
atggctgcagccgcgctaagagaccctgcacaggtgcctgttgctgcagatctccttaccgatcatgaagaaggttacgtcaccttcgaggacgtggccgtctatttctcccaggaggagtggcggctgttggatgatgcacagcgcctgctgtatcgcaacgtgatgttggaaaactttacgctgctggcgagtctaggcctagcaagcagcaagactcatgagatcacacagctagaaagctgggaggagcccttcatgcctgcctgggaagtggtgacatctgctattccaaggggctgctggcacggtgcggaagcagaggaggccccagaacaaatagcctctgtcggactgctgtcctcaaatatccaacagcaccagaaacagcattgcggcgaaaagcctctcaagcgccaggaaggacgtgtcccagtcctccgttcatgcaaggtgcacctgtccgagaaatctctgcaaagtcgggaggtcggcaaggcccttctgattagttctggagtgctaaagcaccaggttactcacacaggagagaaatcgcatcgcagtagcaaatctcgtgaggcatttcacgccggaaaaagacactacaaatgttccgagtgtgggaaagcctttggccagaaatatctgctggttcagcaccagcggttacatgccggcaagaagacctacgagtgctccgagtgtggcaagctatttagggatatgtcaaatctgtttatccaccaaatcgtgcataccggggagcgcccttatggctgctctaactgcgggaaatctttcagccggaatgctcacttgatcgagcatcagcgggttcacaccggcgagaaacccttcacctgctctgaatgtgggaaggcctttagacataattctacattggtgcagcaccacaaaattcacactggcgtgcgtccctacgagtgctctgaatgcggtaagctgttttcctttaatagttctctaatgaagcatcaacggatccataccggagaacgaccctacaaatgctctgagtgcggaaagttctattcccacaagagcaacctaatcaaacattggcgagtccataccggcgagagaccctataagtgctctgattgcgggaaattcttcacacagtgctcctctctgatgcaacatcagaaggtacatacaggagaaaagccgttcaaatgcaacgagtgcggacgtttcttccgggagaactctactttagtgcgacaccagcgcgtacatacaggggccaagccttacgagtgtagagagtgcgggaagtttttcagtcaatctagcaccttaatgcagcatcggaaagtacatattggagagaaaccatttaagtgtaatgaatgcggccggctcttcagagagaattcatcactcgtaaagcaccagcgggttcataccggagccaagccctacgagtgtagggaatgcggaaagttttttaggcataactcctcactatttaagcacaggagaattcataccggggagatgcaatag

SEQ ID NO: 14320 - DNA, 729 bp, synthetic construct
  misc_feature 1..729: note = Description of Artificial Sequence: Synthetic coding sequence
  source 1..729: mol_type = other DNA
atgtcaaatcctcgatctctggaagaggagaagtatgacatgagcggcgctagactggcactaatcctgtgtgttactaaagcaagggaggggagcgaggaggaccttgacgctctagagcacatgttccggcagctgaggtttgaatcgaccatgaaacgcgatccgactgccgagcagttccaagaggaactcgagaagttccagcaggcgattgatagtagggaggacccagtgagttgtgcctttgtggtgttgatggcacacggacgggaaggattccttaaaggagaagacggagagatggttaaactggaaaacctgtttgaggccctgaacaacaagaattgtcaagccttgcgagccaagcccaaggtgtacataatacaggcctgccgcggggaacagcgggatcctggcgaaacggtcgggggggatgaaatcgtgatggtgattaaagattccccgcagactatcccaacctacaccgatgcactgcatgtttactcaacagttgagggatatattgcctaccgtcacgaccagaagggatcttgtttcattcaaaccctggtggacgttttcacaaaaagaaaaggccatattctggagttgctaaccgaagtgacgcgtagaatggcagaggcagagcttgtgcaagaggggaaggcacggaaaacaaatccagagatccagagcacactgcgaaagaggctttatctccaatag

SEQ ID NO: 14321 - DNA, 1359 bp, synthetic construct
  misc_feature 1..1359: note = Description of Artificial Sequence: Synthetic coding sequence
  source 1..1359: mol_type = other DNA
atggccgcaccatctgccggcagttggtcaacgttccaacacaaagagctcatggcggcagatcgcggccgaaggatcctgggcgtgtgtggaatgcatccacatcatcaagagaccctgaagaagaatcgcgtggtgctcgccaaacaattgttgttatccgaactcctagagcacctgctggagaaagatattataactctggaaatgagagaacttatccaggcgaaggtgggctccttttcacagaatgtcgaactccttaacctgttacctaagcgaggtccacaggcgtttgatgccttctgcgaagctctcagagaaactaagcaggggcacctggaggacatgctcctcacaaccctctcgggccttcaacatgtactgccccctctgtcatgcgactacgacctgtccctgccctttccggtgtgtgagagttgtccactatataagaagctccgcctgagcacagatacggtcgagcacagtctcgacaacaaggatggtcccgtgtgcctgcaagtgaaaccttgtacacctgaattttatcagacacactttcagctcgcttatagactgcagagcaggcccagggggctggcccttgtcctgtccaacgtgcatttcacaggcgagaaggaactggaattcaggtctggaggcgatgtagaccatagtacgctggtgacattgttcaaactgttaggctatgatgtgcacgtcctgtgcgaccaaactgctcaagagatgcaagaaaagctgcagaattttgcgcaactccctgcccaccgtgtaaccgattcgtgtatcgtggctctgctgtcccacggtgttgaaggcgctatttatggcgtggacggaaagctcctgcaactacaagaggtctttcagttgtttgacaacgctaattgcccatccctccagaacaagccaaagatgttcttcatccaggcttgccgcggggatgagaccgaccgtggagtggaccagcaggatgggaagaaccatgcagggagcccagggtgtgaagaaagtgacgccggaaaggagaagctcccgaaaatgagattaccaacgaggtctgacatgatatgtgggtacgcatgtctcaaaggcaccgcggcaatgagaaacacaaagcggggcagttggtacatcgaggccctggctcaggtattcagcgaaagagcatgtgacatgcatgtggccgacatgctggtaaaagttaacgctctcattaaagatagagagggatatgccccaggtacagagttccatcggtgtaaagagatgagcgagtattgttctactctctgcaggcatttatatctcttccctggacatccaccaacctag

SEQ ID NO: 14322 - DNA, 327 bp, synthetic construct
  misc_feature 1..327: note = Description of Artificial Sequence: Synthetic coding sequence
  source 1..327: mol_type = other DNA
atggctgcaccatccgccggatcatggagtactttccagcacaaggaactcatggcagcagacaggggacgtcgaatcctgggcgtgtgcggtatgcatcctcaccatcaagaaactctgaagaaaaaccgagtcgtcctggcaaaacaactgttgctgagcgagctgttggagcacctgttggagaaggacatcatcacactcgagatgcgagagctcattcaggccaaggtgggcagcttctctcagaatgtggagctccttaacctgcttccaaagcgtgggccccaggcttttgacgctttttgcgaagctttgcatagttag

SEQ ID NO: 14323 - DNA, 942 bp, synthetic construct
  misc_feature 1..942: note = Description of Artificial Sequence: Synthetic coding sequence
  source 1..942: mol_type = other DNA
atgcacccacatcatcaggaaactctgaagaagaatcgagtcgtgctggccaaacagcttctcctgagcgagttactagagcacctcctcgagaaagacatcatcacgcttgagatgcgagagttaattcaggctaaagttggctcattctcccaaaatgtagaactccttaacctgctacccaaaagaggcccccaagcctttgacgcgttttgtgaagcccttagggagaccaaacaagggcatttagaagacatgctcctgaccaccctgtccggactccagcacgttctgcctccactctcatgtgactacgacttatccctcccattccctgtgtgtgagtcctgtccactttacaaaaaattgcgcctcagtacagatacagtggaacattctcttgataacaaggacggtcctgtctgcctgcaagttaagccttgtacaccagaattctatcagacccactttcagctagcctatagactgcaaagccgacccagggggctcgctctcgtactgtctaacgtgcactttacaggggagaaggagctcgaattccgcagcgggggtgatgttgaccactcaacgctggtgaccctgtttaaactcctggggtacgatgttcacgttctgtgcgatcagactgcccaggaaatgcaggaaaaacttcagaacttcgctcagctccccgctcacagagtaacagacagctgtatagtcgctctgttgtcccacggagttgagggtgccatctatggtgtagatgggaagctgctacaactccaggaagtcttccagctcttcgataacgcgaactgcccttcgttacagaacaaacccaagatgttcttcatacaagcctgccgtggcgctggggcaatcggttccctcggccatttgctgctcttcaccgctgctacagctagtctggccttatag

SEQ ID NO: 14324 - DNA, 993 bp, synthetic construct
  misc_feature 1..993: note = Description of Artificial Sequence: Synthetic coding sequence
  source 1..993: mol_type = other DNA
atgctgaagctgaagacaaagtttgggtcctggcagacactctgcaagcgctccaatgtttggcaagataaatgcttctttaagcctttcaacatcgatcagatttcacctaataagaaagctcatccaaacatggaggccggtcctcccgaatcgggtgaatctactgacgccctgaagctgtgtccccatgaggagttcctccgcctttgtaaagagcgcgctgaagaaatctaccccataaaagaacgcaacaaccggactagactggccttgatcatttgtaacacagagtttgaccatctgccacctcgcaacggcgctgatttcgatataaccggtatgaaagagctcctggaggggttggattatagcgtggatgtcgaggagaatctgaccgcacgggatatggaatctgccttgcgagcgtttgctacaaggccagagcataagtcttctgactctacctttctagtgctgatgtcgcacgggattctcgagggcatctgtggcactgttcacgatgaaaaaaagcctgacgtgctcttgtacgacaccatatttcagatctttaataacagaaactgcctaagtctgaaggataagcccaaggtaatcattgtacaggcctgccggggcgccaaccggggcgaactttgggtccgggactcccctgcttcactggaggtcgcaagctcgcagagctccgagaacctcgaggaagacgccgtttataagacccatgtagagaaagatttcattgccttttgctctagtaccccgcataatgtttcttggcgagattccacgatgggaagcatcttcattactcagctgataacctgcttccagaaatattcatggtgctgtcacttggaagaagtatttaggaaagtgcagcagtctttcgagaccccccgggcaaaggcccaaatgccaaccatagagaggctgagcatgaccagatatttttatctattccccgggaattag

SEQ ID NO: 14325 - DNA, 444 bp, synthetic construct
  misc_feature 1..444: note = Description of Artificial Sequence: Synthetic coding sequence
  source 1..444: mol_type = other DNA
atggcagaaggtaatcacagaaagaagccccttaaagtactggaatctctgggcaaagatttcctaacgggagtgttggataatttggtagaacagaatgttttgaactggaaagaggaggagaagaaaaaatactatgatgcgaagactgaagacaaagttcgtgttatggctgatagcatgcaggagaaacagcggatggcggggcagatgctcctgcagacattttttaacatcgatcagattagtccaaataaaaaggctcaccccaatatggaggctggcccccctgaaagcggggaaagcaccgatgccctgaaactctgcccacatgaggaatttctgcgcttatgcaaggaacgcgctgaagagatatacccaattaaagagagaaacaatagaacacgcctggccttgattatctgcaacaccgagttcgactag

SEQ ID NO: 14326 - DNA, 1134 bp, synthetic construct
  misc_feature 1..1134: note = Description of Artificial Sequence: Synthetic coding sequence
  source 1..1134: mol_type = other DNA
atggcagaggggaatcacaggaaaaaacccctcaaagtcctggagagcctcggaaaggattttttgactggcgttctggataatctcgtcgaacaaaacgtgttgaactggaaagaagaggaaaaaaagaaatactatgacgccaagaccgaagacaaagtcagggtcatggctgattcgatgcaggagaagcagaggatggcgggtcagatgttactccagacattcttcaatattgatcagatcagccctaataaaaaagcccacccaaatatggaagcaggcccaccagagtctggtgagagcactgacgctctgaagctgtgccctcacgaggagtttctacggttatgtaaagaacgcgccgaggagatctacccgattaaagagcgcaataacagaaccagacttgcccttatcatttgtaacaccgagtttgatcacctcccaccgcgaaacggagctgattttgacataacggggatgaaagagctgttggagggacttgattattcagtggatgtggaggaaaatctgaccgcgagagacatggaatctgccctcagagcctttgctactaggcccgagcataagagctccgatagcacttttctcgtccttatgagtcacggcatcctggagggcatatgtggaacagtgcacgacgagaaaaaacccgacgtgctgctgtatgacactatcttccagatctttaataaccgcaactgcctttcattgaaggacaaacccaaggtgattatcgttcaggcttgtagaggggctaatcggggcgagctctgggttagggacagccccgccagcctggaggtggccagcagccagtctagtgaaaacctggaggaggacgctgtgtacaagactcatgtagagaaggactttatcgctttttgctctagcacacctcacaatgtcagctggagagatagcaccatgggctcaatctttatcacccagctgatcacttgtttccagaagtactcctggtgttgccacctggaggaagtctttcgcaaagtccagcagtccttcgaaacgcctcgtgccaaagcccagatgccgacaatcgagagactaagcatgactagatacttttacctgttccccggtaactag

SEQ ID NO: 14327 - DNA, 1305 bp, synthetic construct
  misc_feature 1..1305: note = Description of Artificial Sequence: Synthetic coding sequence
  source 1..1305: mol_type = other DNA
atggccgaggactctggcaagaagaagcggaggaagaatttcgaggccatgttcaaaggaatcctacagtcagggctcgataacttcgtaattaaccacatgctcaaaaacaatgtcgccggacaaaccagtattcagacactggtgcctaatactgaccagaaatctacaagcgtaaagaaagataaccataaaaagaagacggtgaaaatgctcgaatacctggggaaggatgtgctacatggagtattcaactacctggccaaacatgacgtcctcaccttgaaagaggaagaaaagaaaaagtactacgatacaaaaatcgaggataaggctctgattctggttgattctttacggaagaatcgggtagcgcaccagatgttcacgcagaccctgttgaatatggaccagaagatcaccagcgttaagcctttgctgcagatagaggcaggcccccctgagtccgcagagtctactaacatcctaaaactatgtcctcgtgaagagttcctgcggctgtgcaaaaagaatcatgacgagatttacccgatcaagaaacgagaagaccggaggcggttggcccttataatctgcaataccaagtttgatcacttgcccgcgcggaacggcgcccactacgacattgtcggcatgaaaagactcttacagggtcttgggtacacagtggttgatgagaaaaacctcactgcccgcgacatggaatcagtgttgagagctttcgccgcccggcccgagcataagagttcagactccaccttcctcgttctgatgagccacggaattctcgaaggtatttgcggcactgcacacaaaaaaaaaaagccggatgtgctcctgtacgacaccatttttcagattttcaataaccgaaattgcctgtccttgaaggacaagccaaaagtgattatcgtgcaagcttgtaggggcgagaagcacggagagctttgggtgagagactcccctgccagcctcgctctaatcagttcacaaagcagtgaaaacctggaggccgatagcgtgtgtaagatccacgaagaaaaagattttatcgccttttgttccagtactccccataacgtgtcttggagggatcgaactcgtggatctatcttcataaccgagctgatcacgtgtttccaaaagtattcctgttgttgtcatctgatggagattttcagaaaagtgcagaaaagctttgaagtcccacaggccaaagcccagatgccgactatcgagagggccactcttacaagagatttctacctgttccctggtaattag

SEQ ID NO: 14328 - DNA, 402 bp, synthetic construct
  misc_feature 1..402: note = Description of Artificial Sequence: Synthetic coding sequence
  source 1..402: mol_type = other DNA
atgctgaagaataacgtcgcagggcagacttcaattcagacactagtcccaaacacagatcaaaagagcactagcgtcaagaaggacaatcacaaaaagaagactgtgaagatgctggaatacctcgggaaggatgtgttgcacggggtctttaactatctagcgaagcacgacgtgctgaccttaaaggaagaggagaagaagaagtactatgatacgaagattgaagacaaagccctgattctggtcgactccctgcgtaagaatagggtggctcatcagatgtttacccagacattgctgaacatggaccagaagatcacctccgttaagcaccttagtaacaagaaagaacgtggcccccagacccctgggtctcatcatatgcagtataaagtgtag

SEQ ID NO: 14329 - DNA, 1344 bp, synthetic construct
  misc_feature 1..1344: note = Description of Artificial Sequence: Synthetic coding sequence
  source 1..1344: mol_type = other DNA
atggcagcagtgccaagagtggaaggagtgttcattttcctgattgaagatagcggcaagaagaagaggagaaaaaattttgaagccatgttcaaggggattcttcagtctggcctggataatttcgtgattaatcacatgctcaaaaataacgtggccggccagacctctattcagacactcgtgccaaatacagaccagaagagtacaagcgtgaaaaaggataaccacaagaaaaaaacagtgaagatgctcgagtatctaggcaaggacgtgttacacggagtgttcaattacctcgcgaaacacgacgttctgacattaaaggaggaggagaaaaagaagtactacgatactaaaatagaagataaagctttgatcctggtggacagtttgcgcaaaaatcgggtggcacaccaaatgtttacacagacccttctgaatatggatcaaaagatcacttcggttaagcctctgctccagatcgaggccggaccacctgagtccgccgaatcaactaacattcttaagctctgccccagagaggaattcttaaggttgtgcaagaaaaaccacgatgagatatacccgatcaagaagcgagaggataggagacggctcgccctgatcatctgtaataccaaatttgaccaccttcccgcacggaacggcgcgcactacgatatcgtagggatgaagagactgcttcagggcttgggctacaccgtggtcgatgaaaagaatctgactgctagggacatggaatctgtgctgcgagccttcgctgcacgtcctgagcacaagtctagcgactcaacctttctggtgttaatgtcccacggtatcctcgagggaatctgtggaacagcccacaagaaaaaaaagccagatgtactgttgtacgacactatttttcagatcttcaataatcgcaattgtttaagtctcaaagacaaacctaaagtgatcatagtgcaggcctgtcgcggggaaaagcacggggagttgtgggtgcgcgattcgccagcgtctctggcactcattagttcacagtcctcggagaacctggaggccgatagcgtctgtaaaattcacgaagaaaaggatttcatcgccttctgttcttcgacaccacacaacgtgagctggcgggatcgaaccaggggatcgatcttcatcaccgagttaatcacatgctttcagaagtacagctgctgttgccacctgatggaaattttcaggaaagtgcagaaaagcttcgaagtgccgcaggcaaaagctcagatgcctacaattgagagagccaccctgaccagagacttctacctgtttcctggaaactag

SEQ ID NO: 14330 - DNA, 879 bp, synthetic construct
  misc_feature 1..879: note = Description of Artificial Sequence: Synthetic coding sequence
  source 1..879: mol_type = other DNA
atggccgcgttgctccagatcgaagcgggcccccctgagtccgcggaaagcactaatatcctgaagctgtgccctagagaggagttcctgagattgtgtaaaaagaatcatgacgaaatatatccaattaagaaaagggaggatcgccgccgcctggctctgattatctgtaacaccaagttcgaccacctgcccgcccggaatggcgcacactatgacatcgtgggaatgaaacgactgctgcaggggcttgggtacaccgttgtggatgaaaagaaccttacagcccgagatatggaatccgtcctgcgggcttttgcagcacggccggagcataaatccagcgatagtacctttctcgtacttatgagtcacggcattctggagggaatctgcggcacagcacacaagaagaagaagccggacgtgctgttgtacgacaccatcttccagatatttaacaataggaattgtctgagcttgaaagataaaccaaaggtcattattgttcaggcctgtaggggagaaaagcatggcgaactttgggtccgtgactcgcctgcctccctggccctgatttcatctcaatcttctgaaaatctggaggccgacagcgtgtgtaagatccatgaagaaaaagactttatcgctttctgctcctctacgccccacaacgtctcgtggagggacaggacacgaggaagtatttttatcaccgaactgattacatgcttccagaagtactcgtgttgctgtcaccttatggaaattttccggaaggtgcaaaagtcctttgaagtgccacaggctaaagctcagatgcccaccatcgagcgtgccacactaacacgggatttttatctttttccaggaaactag

SEQ ID NO: 14331 - DNA, 1131 bp, synthetic construct
  misc_feature 1..1131: note = Description of Artificial Sequence: Synthetic coding sequence
  source 1..1131: mol_type = other DNA
atggcagaggataatcataaaaagaagaccgtgaaaatgttggagtacctcggaaaggacgtgctgcatggcgtgtttaactatctcgccaaacacgatgtgcttactttgaaggaggaggagaaaaagaagtactacgacaccaaaatcgaggataaggcactgatccttgtagactctcttcggaagaatcgcgtggcacaccagatgtttactcaaacgctgctcaacatggaccagaagatcacctccgtgaagccccttctccagattgaagctggccctcccgagagcgcggagtccacgaacattctcaagttgtgcccccgcgaagaattcttgcggctgtgtaagaagaatcatgacgagatatatcctatcaaaaagagggaagacaggcggcgactggccttgataatctgtaacacaaagtttgaccaccttcctgctagaaacggcgcccactacgatatagtggggatgaaacgtcttctgcaaggcttaggatacaccgtggtggacgagaagaatctgactgcccgggatatggagtctgttctgcgtgcctttgccgctcggcctgagcataaatctagtgactcaacattcctcgttctgatgtcccacggcatcctggagggcatctgcggaactgcacataagaaaaaaaagcccgacgtcctcctgtacgatacaatcttccaaatctttaataacagaaattgtctgtctctcaaggataaaccgaaggtcatcattgtgcaggcatgtagaggagagaaacatggagagctttgggtgcgcgacagcccggcgagcttggcactgataagctctcagtccagtgagaatctggaggccgactctgtttgcaagatccacgaagaaaaggactttattgcattttgcagctcaacgccacacaatgtgagctggagagatcggaccagaggaagtattttcattacggagcttatcacttgctttcagaagtatagctgctgctgccatctaatggagatctttagaaaagttcagaaatccttcgaggttcctcaggcaaaggcgcaaatgccaaccatcgagagagccacacttacccgggatttttatcttttccctggaaattag

SEQ ID NO: 14332 - DNA, 1344 bp, synthetic construct
  misc_feature 1..1344: note = Description of Artificial Sequence: Synthetic coding sequence
  source 1..1344: mol_type = other DNA
atggcagcagttccccgggtggaaggggtctttatcttcctgattgaggactctggcaaaaagaaaaggaggaagaattttgaggcgatgttcaagggaatcctgcagagcggactggacaacttcgttattaatcatatgctaaaaaacaatgttgccggtcagacttctatccagactctagttccgaacaccgaccaaaagtcgactagcgtcaaaaaagacaaccataagaagaagaccgtgaagatgctggagtacttaggcaaagatgtactgcacggtgtgtttaattacctcgctaagcatgatgtgctaacccttaaggaggaggagaagaaaaagtattatgatacgaagatcgaagacaaggccctgattctggttgattccctgaggaaaaatcgcgtggcccatcagatgtttactcagactctcttaaatatggatcagaaaataacatcggttaagccacttttgcaaatcgaagccggacctcccgagagtgccgaaagtactaatattttaaagctgtgcccacgggaggagttcctgaggctgtgtaaaaagaatcacgacgaaatttacccaatcaagaaaagggaggaccggaggaggctagctctcattatttgcaataccaaatttgatcacctgccagcccgcaatggagctcattatgacattgtcgggatgaaacgcctgttgcagggactggggtatacagtcgttgacgaaaaaaatctaactgcacgggacatggaatctgtgttgagagcattcgctgcgaggcccgaacacaagtccagcgactcaactttccttgttttaatgtcacatggcatattggagggcatctgcggtactgcacataagaagaagaaaccagatgttctgctgtacgacacaatctttcaaatcttcaacaatagaaattgcttgtcgcttaaagataaacccaaggtgattattgtgcaggcttgtcgcggcgagaaacatggggagttatgggtgcgggactcccccgcatccctggctttgattagtagccagtccagtgaaaacctagaggccgatagtgtctgcaaaattcacgaagagaaagacttcattgcgttctgtagttcgactcctcataacgtatcttggagagatcgcactcggggctcaattttcatcactgagctaataacctgtttccaaaagtattcgtgctgctgtcacctgatggagattttcagaaaagtgcaaaagagtttcgaggtcccacaggccaaggctcaaatgcccaccatagagagagccaccctcactcgggacttttacctgttccctgggaattag

SEQ ID NO: 14333 - DNA, 879 bp, synthetic construct
  misc_feature 1..879: note = Description of Artificial Sequence: Synthetic coding sequence
  source 1..879: mol_type = other DNA
atggccgccctgcttcaaatagaagcagggcctccagagtcagctgaatccacgaatattctaaaattgtgtcccagggaggagttcttgcggctgtgtaagaagaatcacgatgagatatatccaatcaaaaaaagagaagaccggcgccggctagccctaatcatttgtaatacaaagttcgaccaccttcctgctcgcaacggcgcacactacgatatcgtaggcatgaaaaggctgctgcagggcctgggctacacagtcgtagatgagaaaaatctgaccgcgcgggacatggagtctgtgctcagagcatttgccgcaagacccgagcataagtcatccgattctacattcctggtcctaatgtcccatggcatcttagaggggatatgcggcactgcccacaagaagaaaaagcccgatgtcttactgtatgacaccatttttcagatatttaataatcgaaattgtctatctttaaaggataaaccaaaggtcatcatcgtgcaggcctgccggggcgagaagcacggggagttatgggtaagggacagtcctgcttccctcgccctcatttcgagccaaagtagcgaaaatttagaggcggacagtgtctgcaagatccacgaggagaaggattttatcgctttctgtagtagtaccccacataatgtgtcctggcgcgacaggaccagaggtagcatattcattacagaactgattacatgctttcagaaatactcttgctgttgtcatctaatggagatctttcgcaaggttcaaaaaagcttcgaggtcccacaggccaaagcccagatgcccaccatagagcgggctactcttactagggatttttacctcttccccggtaattag

SEQ ID NO: 14334 - DNA, 882 bp, synthetic construct
  misc_feature 1..882: note = Description of Artificial Sequence: Synthetic coding sequence
  source 1..882: mol_type = other DNA
atgagctctgctagcgggctgcggcgaggccatcccgccggaggagaagaaaacatgaccgagacggacgccttctacaagagagagatgttcgaccccgccgaaaagtacaagatggaccatagaaggcggggcattgccctgatatttaaccatgaacggtttttctggcacttgactctccctgaaagacgagggacatgcgctgatcgggataacctaacaaggcgattttctgacctggggtttgaggtcaaatgtttcaacgacctcaaggcggaggaactgttattgaagatacacgaggtttcaaccgtctctcacgccgatgccgactgttttgtttgtgtttttctgagtcatggggaagggaatcatatctatgcctatgatgctaagattgagatccaaactcttaccggcctcttcaaaggagataaatgccactctctggtcgggaagccaaagatttttataattcaggcctgccggggcaatcagcatgatgttcccgtcattcctctggacgtcgtggacaatcagacggaaaaactcgacaccaatattacagaggtggacgctgcgtccgtgtacacacttccagccggagccgatttcttgatgtgctactcggtagccgagggttactactctcatcgagaaaccgtcaacgggtcttggtatatacaagacttgtgcgaaatgctgggcaaatatggtagctctttagagttcacggagttgcttacactggtcaatcggaaagtcagtcagcgacgggttgatttttgtaaggacccatcggccattggcaagaaacaggtgccctgcttcgcatccatgctcactaagaagcttcacttttttcccaagtccaactag

SEQ ID NO: 14335 - DNA, 615 bp, synthetic construct
  misc_feature 1..615: note = Description of Artificial Sequence: Synthetic coding sequence
  source 1..615: mol_type = other DNA
atgtccagcgcatctgggctgagacggggccaccctgcggtgtccactgttagtcacgcagatgctgattgcttcgtttgcgtatttctctcacacggagaaggcaatcacatctacgcatacgatgctaaaattgagattcagacactgaccggactttttaaaggagataaatgccattccctagtcggaaaacctaagatcttcatcatccaagcttgtcgcggcaatcagcatgatgtgcccgtgatccccctggatgtggtggacaaccagaccgagaaactggatactaacatcaccgaagtggatgcagcaagcgtgtatacactgcctgccggtgcagactttctgatgtgctattctgtagccgaaggatactatagccatcgtgagaccgtgaacggaagctggtacatacaagatctttgtgagatgctcggtaaatacgggtcatccctagagtttaccgaattactcacattagttaataggaaagtgtcccaacgtcgggtggatttctgtaaagacccctccgctattgggaagaaacaagtgccttgttttgcttctatgttaactaaaaagctgcatttttttccaaaatcaaattag

SEQ ID NO: 14336 - DNA, 912 bp, synthetic construct
  misc_feature 1..912: note = Description of Artificial Sequence: Synthetic coding sequence
  source 1..912: mol_type = other DNA
atggcagatgatcaaggatgcattgaagaacagggagtcgaggatagcgccaacgaagattcagtggacgccaaacctgataggtcatctttcgtgccctccttatttagcaagaagaaaaaaaacgtcaccatgaggagcatcaagacgaccagggaccgcgtgcccacctaccagtacaacatgaactttgaaaagctcgggaaatgcatcatcatcaataataaaaactttgataaggtcacaggaatgggggtcaggaacggcactgacaaggatgcggaggcactcttcaagtgtttcagatcccttggtttcgacgtcatagtatataacgactgcagctgtgcaaaaatgcaggacctgctgaagaaggccagtgaggaagaccacaccaatgcggcatgcttcgcctgcatcctcctgtcccacggggaggaaaacgtcatttacggaaaagatggggtgactccaatcaaagatctgaccgctcacttccggggagacaggtgcaaaaccttactagaaaagcccaagctgttcttcatccaggcatgcaggggcacagaactggatgacgggattcaagccgatagcggccccataaatgacaccgacgctaacccacgttacaaaatccctgttgaagccgatttcctgtttgcctatagtactgtgccaggttactatagctggcgtagtccgggacggggatcctggtttgtccaggccttgtgctccattttggaggagcatggcaaggacctggaaatcatgcagatcctaacacgggtgaatgatcgagtggcgagacactttgagagccagtcagacgatccccatttccacgaaaaaaaacagattccctgcgtggtgtccatgctgacaaaagagctttacttttcccagtag

SEQ ID NO: 14337 - DNA, 912 bp, synthetic construct
  misc_feature 1..912: note = Description of Artificial Sequence: Synthetic coding sequence
  source 1..912: mol_type = other DNA
atggctgatgatcagggttgtatcgaggagcagggagtagaggactctgccaacgaagactctgtggacgcgaaacctgaccggtccagcttcgttccatcacttttttctaaaaaaaaaaaaaatgtgacaatgcgtagcataaaaacaacccgcgatagagtgcctacctaccagtacaatatgaatttcgagaaattgggtaagtgcatcatcattaacaacaaaaattttgataaagtgaccgggatgggagtgcggaatgggactgataaggacgcagaggccctttttaagtgcttccggtctcttggcttcgacgtgatagtgtacaacgactgctcttgcgccaaaatgcaggacttgctgaagaaagcaagtgaggaggatcataccaacgccgcctgtttcgcctgcatcctactgagtcatggagaagaaaatgttatctatggaaaggatggagtgaccccgatcaaagatctcactgcccatttccgaggtgatcgatgtaagaccctgctggagaagccgaagctgttcttcattcaggcatgtaggggcacagaactggatgatggcattcaagcggacagtgggcccatcaacgatactgatgccaatcctcggtataaaatccctgtggaagctgacttcttatttgcctactccacggtccctggctactacagctggcggagccctggtcgtgggagctggttcgtgcaggctctgtgttcaattttggaagaacacgggaaagacctcgagatcatgcagattctcacaagagtgaatgaccgggtcgcccggcactttgaatcccagtcggacgacccacacttccacgaaaagaaacagattccatgcgttgttagtatgctgaccaaggagctttacttttctcagtag

SEQ ID NO: 14338 - DNA, 663 bp, synthetic construct
  misc_feature 1..663: note = Description of Artificial Sequence: Synthetic coding sequence
  source 1..663: mol_type = other DNA
atggccgacgatcaaggatgcattgaggaacagggggttgaggacagcgccaacgaggactccgtcgatgcaaagcccgaccgttcctctttcgtgccaagcctgttttcaaaaaaaaagaagaacgttacgatgcggtctattaagacaacacgagaccgggtacctacatatcaatataacatgaacttcgagaagttgggcaaatgcatcatcattaataataaaaatttcgataaggtgacagggatgggcgtgcggaatgggaccgataaggatgccgaggctttgttcaagtgctttagatccctggggtttgatgttatcgtgtacaatgattgtagtgtcacgcaggccggtgtgcagcggagagacctggggaggttacagcccccaccccctcgttttaaacaatactcgtgcctctctctcctctcatcttgggattataggcatgctcctcctagactggccaacttctgtatttttaggcgggagggattccgccacgttgggcaagctggcctgaagcttctggcctcgtctgaccccccaaccagcggatcgcagagcgcgggaatcactggggtctctctccacacccaaccacaaatcatgaaagtctcattgcgtcactgcaatactttcatttgcttcgcctag

SEQ ID NO: 14339 - DNA, 912 bp, synthetic construct
  misc_feature 1..912: note = Description of Artificial Sequence: Synthetic coding sequence
  source 1..912: mol_type = other DNA
atggccgatgatcagggatgtattgaggagcaaggagtcgaagactccgcaaacgaggacagcgtcgacgctaagcctgacagatccagcttcgtgccctccctgttctcaaaaaaaaagaagaatgttaccatgcgaagtatcaaaacaacacgggatcgtgttcctacttaccaatacaatatgaattttgagaaactgggaaaatgcatcattattaataacaaaaacttcgataaagttacaggcatgggagtcagaaatgggaccgacaaagacgctgaagcgctctttaagtgcttccggtcactaggcttcgacgtcatagtgtataacgactgcagctgtgccaaaatgcaggacctgcttaagaaggcaagcgaggaagaccacacgaatgccgcctgctttgcctgcatactccttagccatggggaggagaacgtgatctacggaaaggacggcgtgactcctatcaaagacctgacagcccactttcgtggggatagatgcaagactttactggagaagcccaaactgttttttatccaggcttgcagaggcactgagttggacgacgggatccaagcagatagcggaccaattaatgatactgacgccaatcctaggtataagatcccagttgaggcggacttcttgtttgcatacagcacagtgcccggctactactcatggaggtcacctggccgtggatcctggttcgtccaggctttgtgctctatccttgaggagcatggtaaggatctggagattatgcagattctgactcgtgtcaatgatcgtgtcgctcgccattttgaatctcagtccgacgatccccacttccatgaaaagaagcagattccctgtgtcgtatccatgttgacaaaagaactttacttctcccagtag

SEQ ID NO: 14340 - DNA, 663 bp, synthetic construct
  misc_feature 1..663: note = Description of Artificial Sequence: Synthetic coding sequence
  source 1..663: mol_type = other DNA
atggcagacgaccagggctgcatcgaagagcaaggagttgaggactcagccaacgaggatagcgttgacgccaagccagaccggtcctccttcgtgcctagcctcttttcaaagaaaaagaaaaatgtcactatgcgtagcattaagaccaccagagatcgcgtacctacgtaccagtacaacatgaattttgagaaattgggaaaatgtatcatcattaataacaagaactttgataaggtcacaggaatgggcgtccggaatggcaccgacaaggacgcagaggccttgtttaagtgcttcaggtccctggggtttgacgtgatcgtctataatgattgttcttttacccaggcaggggtgcagcggcgagatttagggaggctgcagcccccacctcctcgctttaaacaatacagctgcctgagtctgctaagctcttgggattaccggcacgcccctccacgcctggccaatttctgtatcttccggcgggagggatttcgtcatgtgggacaggccggactcaagctgcttgcgtcaagcgaccctcctacttccgggtctcagtcagccggtataactggagtctctctgcacacccagccacagatcatgaaggtcagcctgagacactgtaatactttcatctgtttcgcttag

SEQ ID NO: 14341 - DNA, 1011 bp, synthetic construct
  misc_feature 1..1011: note = Description of Artificial Sequence: Synthetic coding sequence
  source 1..1011: mol_type = other DNA
atggattgcgtgggctggcccccagggagaaaatggcacctcgagaagaacacctcttgtggcgggtcctctggaatatgtgcatcttatgttacacagatggcagacgaccaagggtgcatcgaagagcaaggagtggaggacagtgccaacgaggacagcgtcgatgccaagccagaccgctcatcattcgtacctagcctgttttctaagaagaagaagaacgtcacaatgagatctatcaaaacaacccgagaccgcgtccccacataccagtataatatgaattttgaaaagcttggcaaatgcataattattaacaacaaaaatttcgataaagtgactgggatgggagtacgaaatggaactgacaaagatgcagaggctttgttcaaatgtttccgaagcctgggcttcgacgtgattgtctataacgattgcagttgcgcaaaaatgcaggacttgctaaaaaaagctagcgaggaggaccacaccaacgctgcctgcttcgcctgcatcctgctcagccatggtgaagagaacgtgatctacggcaaagatggggtgactcctatcaaggacctcaccgcccattttagaggagatcgctgcaaaactctgttggagaagccaaaactgttctttattcaagcctgtaggggcaccgagctcgacgacggcatccaagcagactcggggcctatcaatgatacagacgctaatcccagatataagattccggtggaggcggatttcctattcgcctacagcaccgtgcccggatattattcttggaggtcccccggtcgaggcagctggttcgttcaggctttgtgtagcattcttgaggaacatggcaaggaccttgaaatcatgcagattcttacccgggtgaacgatcgcgtggcccgtcacttcgaatctcagtcggacgatccccactttcatgaaaagaagcagatcccctgtgttgtgtcgatgctgactaaagaactctatttcagtcagtag

SEQ ID NO: 14342 - DNA, 762 bp, synthetic construct
  misc_feature 1..762: note = Description of Artificial Sequence: Synthetic coding sequence
  source 1..762: mol_type = other DNA
atggctgacgatcagggatgtattgaggaacagggagttgaagacagcgctaacgaagatagtgttgatgcaaagcctgacaggtcatctttcgtgccctccctgttctctaagaagaagaagaatgtcactatgaggagtataaaaactacacgcgacagggttccaacgtaccaatacaacatgaactttgagaagctgggaaagtgcattatcattaataacaagaatttcgacaaggtcaccggaatgggcgtgcgcaatggaacagataaggatgctgaagctctgttcaaatgttttagaagtctggggtttgacgtcattgtttataatgactgctcatgcgcaaagatgcaggatctgttaaagaaggcgtccgaggaggaccatacgaacgccgcatgctttgcatgcatcctgctgtcacatggagaagagaatatggaaagttgctccgtgacccaggctggggtgcagcggcgagatctgggacgcctacaacctccacccccccgcctggccgagggccctagcctgatgatggcatctagaccaacgagggggccctccatgacacagatgctcatactcgacacaagaagccagtggaagctgacctctagctctcctataccccgcttccaagctatcacccgaggcggtgcccaggaagaggcaccagggctctgtaagccatcagcaccatcctggaggtctactgaaaagacatggaagtcctgtaggtcttctcccggttag

SEQ ID NO: 14343 - DNA, 669 bp, synthetic construct
  misc_feature 1..669: note = Description of Artificial Sequence: Synthetic coding sequence
  source 1..669: mol_type = other DNA
atggctgatgatcagggttgcatcgaggaacagggcgtagaagactcagccaatgaggattcagttgacgctaagcctgatcgttccagttttgtgcctagccttttctcgaagaaaaaaaaaaacgtcactatgcggtctattaaaactacccgcgaccgcgtacccacataccagtataacatgaatttcgagaaactcggaaagtgcattatcatcaataacaagaattttgataaagtaaccggcatgggagtcaggaatgggactgataaagatgcggaagccctgtttaaatgttttcggtctctcggatttgacgtgatcgtttacaatgactgttcatgtgccaaaatgcaggatctcctgaaaaaggcatcagaagaggatcataccaatgccgcctgctttgcttgtattctgttgtctcacggagaagaaaatgtgatctacggaaaagacggcgtaaccccaatcaaggacctgactgcccatttccgtggggatagatgtaaaaccctgttagagaagccaaaattatttttcattcaggcttgtcggggcacggaactggatgacgggatacaagcagacagtggacctatcaatgatacggacgcaaatccgaggtataaaattcctgtggaagccgacttcctgttcgcctag

SEQ ID NO: 14344 - DNA, 795 bp, synthetic construct
  misc_feature 1..795: note = Description of Artificial Sequence: Synthetic coding sequence
  source 1..795: mol_type = other DNA
atggctgatgatcaggggtgtatcgaagaacaaggtgtcgaagattccgcgaacgaggattccgtggacgctaagcctgatcgcagctcttttgtgccttcgttatttagcaagaaaaagaagaatgtgactatgaggtccataaaaactacccgagacagagtccctacctaccaatataacatgaatttcgaaaaactgggcaaatgcataatcattaacaacaagaattttgataaagtgacaggtatgggagtgagaaacggcactgataaagatgctgaagccctgtttaaatgttttagaagccttggatttgacgtgatcgtctacaacgactgctcctgcgccaaaatgcaggatctgctcaaaaaagcgtcagaagaagatcatacaaatgctgcatgcttcgcttgcatcttattcttcatacaggcatgccggggcacggaactggacgacggtattcaggcagactccggtccaatcaacgacaccgatgcaaaccctcgatataagatccccgtggaagccgattttctgttcgcttactccacagtcccaggctattactcatggaggtcccctggcaggggaagctggttcgtgcaggccctgtgcagcatactagaggagcacggtaaagatctagagatcatgcaaatcctgaccagagttaacgatagagttgcccgccactttgaatcacagagtgatgacccgcatttccacgagaaaaagcagattccttgcgttgtatctatgctgaccaaggagttatatttctcacagtag

SEQ ID NO: 14345 - DNA, 837 bp, synthetic construct
  misc_feature 1..837: note = Description of Artificial Sequence: Synthetic coding sequence
  source 1..837: mol_type = other DNA
atgcaaagaggactgtttagtgatggagacacctctaagaagaaaaaaaatgtcacaatgaggtctatcaaaacaacgcgggatcgcgtgcccacctaccagtacaatatgaacttcgagaagttggggaagtgcatcatcattaataataagaatttcgataaagtcactggcatgggggtccgcaacggcacagataaggacgccgaggccttgtttaagtgcttccgcagcctgggatttgacgtcatcgtgtacaacgattgctcctgtgccaaaatgcaagacctgcttaagaaggcctctgaggaagaccacactaatgctgcttgttttgcttgcatcctgctgagtcacggggaggaaaacgtaatctatggcaaagacggcgtgactcctattaaggacttaacagcacacttccggggcgaccgctgcaagacactgctggagaaacccaagctttttttcattcaggcctgcagaggtactgagttggacgatggtattcaggccgacagtggcccaattaacgatacagacgctaacccccgctacaaaatacctgttgaagcagattttttattcgcatattcaaccgttcccgggtactacagctggcgcagtccaggcagaggaagttggtttgtccaggccctatgttcaatcttggaggagcacggaaaagaccttgagatcatgcagatcttgactcgggtaaacgacagagtagctcggcactttgaatcccaatctgatgaccctcacttccatgaaaagaagcagattccatgcgtggtttccatgcttacaaaggaactctacttcagccagtag

SEQ ID NO: 14346 - DNA, 1188 bp, synthetic construct
  misc_feature 1..1188: note = Description of Artificial Sequence: Synthetic coding sequence
  source 1..1188: mol_type = other DNA
atggacttctccaggaacctgtatgatatcggagaacaactggatagcgaggatcttgccagcttaaaatttctaagcctggattacattcctcagcgcaagcaagaacctatcaaggatgctctaatgttatttcagcggctgcaagagaagagaatgctcgaggagtccaatctgtccttccttaaggagctcctgtttcgaatcaatagattggatttgctaattacgtatttgaacacaagaaaggaagagatggagcgcgagcttcagacacctggtagagctcagattagcgcatacagggtgatgctttaccagatttccgaggaagtctcgcggtccgagctgagatcctttaaatttctcttgcaagaggaaatctccaagtgtaagttggacgacgacatgaatctcctggacatttttattgagatggagaagcgggtgattttaggagagggtaagctcgacattctgaagagggtctgcgcccagatcaataagagcctattgaagatcattaacgattacgaggagttctccaagggcgccctcaccacaacttttgaggaactgcacttcgagatcaaaccgcacgatgattgtactgtagagcagatctacgagattctcaagatatatcagttgatggatcactccaacatggattgtttcatctgctgcatcttgtcccacggcgacaagggaatcatttatggaacagacggtcaagaagctcctatttatgaactcacctcccagtttacaggtctcaagtgtccttcactcgcgggaaagcctaaggtgttcttcattcaggcttgccagggggataactaccaaaaaggcataccagtagagaccgattccgaggagcagccctatctggagatggacctgtcctccccgcagaccagatacatacccgacgaggctgacttcctgttgggcatggcaaccgtgaacaactgcgtctcgtatcgcaatcccgcagaggggacatggtacattcagtctctttgtcaatcactgcgtgagaggtgccctcgcggggatgacatcttgacaatcttgaccgaagtcaattacgaggtgtcaaacaaggacgacaagaaaaacatgggaaaacagatgccccagcccacctttacccttaggaaaaaacttgtgttcccatccgattag

SEQ ID NO: 14347 - DNA, 1491 bp, synthetic construct
  misc_feature 1..1491: note = Description of Artificial Sequence: Synthetic coding sequence
  source 1..1491: mol_type = other DNA
atggatttcagcaggaatctgtatgacattggcgagcagctggactcagaagatttggcgtcactcaagttcctgagtctggattatatcccacagcggaagcaggagcctatcaaagatgccctgatgttgtttcagcggttacaagaaaagcggatgctggaggagtctaatttatctttcctcaaggagctgttgttccgaattaacaggctggatttactgattacttatctcaacacacggaaggaagagatggagcgtgaactgcaaacaccaggacgcgcccagatctctgcttatcgctttcacttctgccgtatgtcctgggccgaggcgaattctcagtgtcagacacagagcgtgcccttttggagaagggtggatcacttactgatccgggtcatgttgtatcagatatccgaggaggtgtcacgatctgaattgcgatcatttaagtttttgctgcaagaggaaattagcaagtgtaagttggacgacgatatgaacctgttagatatttttatcgaaatggaaaagagggtgattctgggtgagggaaaactggatatcctcaagcgcgtgtgtgcgcagattaacaagtccctgctaaagatcattaacgattacgaagaatttagcaagggtgaggaattatgcggagtaatgaccatctcagactcccctcgagagcaagattccgagagccagaccctggacaaggtctatcaaatgaagtcgaagcccaggggctattgtctcattatcaacaatcataacttcgctaaagccagagagaaggtccctaaactacactccattcgggatcggaacggcacacacctggatgccggcgccctaaccaccacatttgaggaactgcacttcgaaattaagcctcacgacgactgtacagtggagcagatctacgaaatccttaagatataccagctgatggatcactctaatatggactgctttatctgttgcattctgtcccacggtgacaaggggatcatttacggcacagatggccaggaagcccctatttatgagctgacttcccagtttacagggctgaaatgtccaagtctggcagggaagcctaaagttttcttcatacaggcttgccagggggataattaccaaaaaggcattcccgtggagaccgattcagaagagcaaccatacttggagatggatttaagctccccgcagacaagatacattccagacgaggcagactttctattaggcatggctaccgtgaacaactgtgtaagttacagaaatccagccgaaggaacttggtacatacagtccctgtgtcagtcacttagggaaagatgccctcgaggggatgacatcctgaccattcttaccgaagtcaattatgaggtaagcaataaggatgataagaaaaatatgggaaagcagatgccccagcccacatttacccttcggaaaaaactggtgttcccatccgactag

SEQ ID NO: 14348 - DNA, 1395 bp, synthetic construct
  misc_feature 1..1395: note = Description of Artificial Sequence: Synthetic coding sequence
  source 1..1395: mol_type = other DNA
atggacttttcaagaaacctctatgatatcggagaacaactcgattctgaggacttggctagtcttaaatttctcagcctcgactatatcccacaacgcaaacaggagccgatcaaggatgctttgatgctctttcagaggttacaagagaagcgcatgctcgaagaatcgaacctgagcttcttgaaggagttgctcttccgtattaaccgtctggatctgctcattacttatctgaacactcgcaaagaggagatggaaagggaacttcaaacacctggcagagcacagatctctgcatacagagtaatgctgtatcagatctctgaagaggtctcccggagtgaactgagaagcttcaagttccttctgcaagaggagattagtaagtgcaagctcgatgatgacatgaacctgttggatatcttcatcgagatggagaagagggtgattctcggggaagggaaattagacatcctcaaacgcgtgtgtgctcagatcaacaaatcactcctgaaaatcatcaacgactatgaggagttttccaagggtgaagagctctgtggtgtaatgacaatttcagattctcctcgtgaacaggactcagagtctcagactctcgacaaagtctatcaaatgaagtccaagcccagaggctactgtctgatcattaataaccacaatttcgccaaggcccgcgaaaaggtccccaaactccacagcatccgtgataggaatggtacacatctcgatgccggcgctctcacgacaaccttcgaggagttacatttcgaaataaagccgcacgatgactgcaccgtggaacaaatttatgaaatcctcaagatctatcagctgatggatcattcgaatatggactgtttcatctgctgcatacttagccacggagacaaaggcataatttacgggaccgacgggcaagaggctcctatttacgagctcaccagccagttcaccggtttgaaatgccctagcctcgcagggaagccgaaggtcttcttcatacaggcttgccagggggataattaccagaaaggtatccctgttgaaactgactccgaagaacaaccctatctggaaatggatctcagctcaccacagacgagatacatcccagatgaggcagacttccttctgggtatggcgaccgttaacaactgcgtcagttacaggaaccccgctgagggtacgtggtacattcagtctctgtgccagagcctccgggaaaggtgtcctcgaggggatgacattctgacaattttaactgaagtaaactacgaggtgagcaataaggatgacaaaaaaaatatgggaaagcagatgcctcagcctaccttcaccctaagaaagaaactcgtgttcccgtctgactag

SEQ ID NO: 14349 - DNA, 1617 bp, synthetic construct
  misc_feature 1..1617: note = Description of Artificial Sequence: Synthetic coding sequence
  source 1..1617: mol_type = other DNA
atggagggggggagacgggctagagtggtcatcgagagcaagcgaaatttttttttgggagcctttccaaccccgtttcccgccgagcacgtggagctcggccgactgggtgactctgaaacagccatggtacctgggaagggtggggctgactacatactgctgccatttaagaagatggatttcagccgaaatctgtacgacatcggggaacagcttgatagcgaagatctggcctccctcaaatttctgtccctggattacatccctcagagaaaacaggaacctatcaaagacgcgctgatgttgttccagcgacttcaagaaaagcggatgttagaggagtcgaacctttccttcttgaaggagttgctcttccgcatcaatcgactggatctactcatcacctacctgaatacgagaaaggaggagatggagagagagttgcagacaccaggccgggcccagatctccgcatacagggtgatgctgtaccagatttctgaagaggtgagcaggtctgaacttcgaagctttaaattcctcctgcaggaggagatttcgaagtgtaaactggacgacgacatgaacttattggacatcttcatcgaaatggagaagagagtgatcctgggtgagggtaaactggatattttaaagagggtttgcgctcaaatcaataagagcctgctgaagatcattaatgactatgaagagttttctaaggagcgttcctcatcactcgagggctcacccgacgaattctcaaatggcgaagagctgtgcggtgttatgacaatcagcgactctcctcgggagcaggatagtgagtcccagactctggacaaagtttatcagatgaaaagcaagccgcggggctattgtctgattataaataatcacaactttgctaaggctcgtgaaaaggtgccaaaactgcactccattcgggaccgcaacggtacacacctggatgccggggctctgaccactacgttcgaagaactgcacttcgagattaagccacatgacgattgcacagtggagcaaatctacgagatcctgaaaatctatcaactgatggatcactctaacatggattgtttcatctgctgtattctgtctcacggcgataaaggtataatctacggcacagacggccaggaagccccaatttatgagctcaccagtcaatttacggggctaaagtgtccctcactggccggaaaaccaaaagtgtttttcatccaggcttgccagggcgacaactaccagaaaggtattcccgtcgaaaccgacagcgaagaacaaccgtatctggaaatggatctatcaagtccccagacccgatatatccccgacgaggccgactttttactcggcatggctactgtcaacaattgcgtatcctaccgcaatccggcggaaggcacctggtatatccagagtctgtgtcagtcgctacgagagcgctgcccaaggggtgatgacatcttgacaatcctaactgaggtaaattacgaagtctccaacaaggatgataaaaagaatatggggaagcagatgccgcagcccacgtttacactgcgaaaaaagttagtgttcccatctgattag

SEQ ID NO: 14350 - DNA, 708 bp, synthetic construct
  misc_feature 1..708: note = Description of Artificial Sequence: Synthetic coding sequence
  source 1..708: mol_type = other DNA
atggatttctcccgaaacctctacgacataggcgagcaactggactctgaggacttggcctcgctcaagtttctgtccctggactatatcccgcaacggaagcaggagccaattaaggatgctctcatgcttttccaaaggctacaggagaagagaatgctggaagagagtaacctgtcattcctgaaggagttgctatttcggattaaccgcctggacttgcttatcacctatttaaatacccggaaggaagaaatggaaagagagcttcagactcccggacgggctcagatttccgcctacagggtgatgctctatcagatttccgaggaggtcagtaggtctgaattacggtcttttaagtttctgctgcaggaagagatcagcaagtgcaaattggatgatgatatgaacttgcttgacatcttcatagaaatggagaagagagttatcctcggggagggaaaacttgacattctaaaaagagtgtgtgcccagattaataagagcctgctcaagatcataaatgattatgaagaattctcaaaagagcggtcatcctcactagagggctctcctgatgagttctcgaacgactttggccagtcccttcctaatgaaaaacagacctcaggcatcctatcggaccaccagcagagtcaattctgtaaaagcacaggcgaatccgcccagacctctcagcactag

SEQ ID NO: 14351 - DNA, 708 bp, synthetic construct
  misc_feature 1..708: note = Description of Artificial Sequence: Synthetic coding sequence
  source 1..708: mol_type = other DNA
atggacttctcccgcaacctctacgacataggtgagcaactcgattccgaagatctggcgagtcttaaatttttgtcactggattatattccacagcgaaagcaggagcctattaaggatgctctcatgttgttccagcgtctccaagagaagaggatgctggaggagtctaatttgagctttctgaaagagttgctgttccgcatcaatagactagatctgctgattacatacctcaatacccggaaggaggagatggaacgagagctgcaaactccaggacgcgcacaaatatctgcttatagagtgatgctgtatcagatttcagaggaggtctctaggtctgagcttcggtcatttaagtttttactacaggaggagattagcaagtgtaagctcgacgacgacatgaacttgctggatatattcatcgaaatggagaagcgagttattcttggcgaaggtaagctggacatacttaagagggtgtgtgcacagatcaacaagagtttgcttaagatcatcaatgattacgaagagttttctaaagagaggtcctcttctctagagggatctccggatgagttctccaacgactttggccagtctctgccgaacgagaagcagacttctggtattttgagcgatcaccagcaaagtcaattttgcaaatccaccggcgaatcggcccagacctctcagcactag

SEQ ID NO: 14352 - DNA, 837 bp, synthetic construct
  misc_feature 1..837: note = Description of Artificial Sequence: Synthetic coding sequence
  source 1..837: mol_type = other DNA
atggatttttcgcgaaacttgtacgacattggcgagcagcttgactccgaggacctggcttctttgaaattcctgagtcttgactatatcccccagcgaaaacaagagccaatcaaagacgccctaatgctgtttcaacgtttgcaagagaagagaatgcttgaagagtcaaatttgagcttcctgaaggaattacttttccgcattaacaggctggacctcttgataacttatctgaacaccaggaaggaagagatggaacgagagctccagacccctggccgggctcagatcagcgcgtatagggtcatgttataccagattagcgaggaggtttcccggtcagaacttcgctcatttaagtttttgcttcaggaagagattagcaagtgtaaactggatgatgacatgaacctgctggatatttttatagagatggagaagcgcgttatcctgggagagggaaaactagacattctaaaaagagtatgcgcacaaattaacaagagcctcctgaagatcataaatgactatgaggaatttagtaagggagaggaattgtgcggtgtcatgacaatctccgatagtccacgcgagcaggacagcgaatcgcagacccttgataaagtctatcagatgaagagtaagccccgaggttactgcctcatcattaacaaccataatttcgccaaggcacgtgagaaggttccaaagctgcatagtatcagggacaggaatggaactcatctggatgccggctcccatagtgtggcccaggccggggttcagtggtgtgacctttcttcgctgcagccaccacccccgtggttcaaatag

SEQ ID NO: 14353 - DNA, 1395 bp, synthetic construct
  misc_feature 1..1395: note = Description of Artificial Sequence: Synthetic coding sequence
  source 1..1395: mol_type = other DNA
atggactttagtcggaacctttacgacatcggcgagcagctcgattctgaggacttggcctctctgaaattcctgagtttggactatatcccacaacgtaaacaggagccaatcaaagacgcgttgatgctgttccagcgcttgcaggagaagaggatgctggaagaatcgaatctgagtttcctgaaggaacttctgttccggattaacaggcttgacctgctaattacatacctaaacacgaggaaagaggaaatggagcgagaactgcaaaccccgggcagagcccagatttctgcgtatagggtcatgctttaccaaattagtgaggaggtgagcagatcagaactgcgatcattcaagtttctgttacaggaagagatcagtaaatgcaagctggatgacgatatgaatctgttggacatttttatagagatggaaaaaagagtgatactgggggaggggaagttggatattctcaagcgagtatgtgcccagataaacaaatcactcctgaagatcatcaatgactatgaggagttttcaaagggcgaggagctgtgcggcgtcatgactattagtgactctccacgggagcaggattccgaatctcaaacactggacaaggtatatcagatgaaatccaagccccgaggatactgtctaatcatcaacaaccataacttcgcaaaagctcgggaaaaggtgccgaaactccactctattagggatcgtaatgggacccacttggatgccggagccctcaccacgacctttgaggagctacactttgagattaagcctcatgacgactgcacagtcgagcaaatctatgagatacttaagatctaccaactgatggatcacagcaatatggactgctttatctgctgcatcctctcgcacggcgacaagggcattatctacgggacagacggtcaggaggctcccatttatgagctgacgtctcagtttaccggactaaaatgcccaagtctcgccgggaaacccaaggtattctttattcaggcctgccagggggataattaccagaaagggatcccagtggaaaccgatagcgaggaacagccatatctcgagatggatttgagctcacctcagacacggtatatacccgatgaggcggattttctgctagggatggccaccgtcaataactgtgtgagctatagaaatccagccgaagggacctggtatattcagagtctgtgtcagagtctaagagagcgctgtcctcgcggagatgacatactgaccatacttacggaggtgaactatgaggtttccaacaaggatgataaaaagaatatgggcaaacagatgccccagcccaccttcactcttcggaaaaagctagtgtttccctctgactag

SEQ ID NO: 14354 - DNA, 663 bp, synthetic construct
  misc_feature 1..663: note = Description of Artificial Sequence: Synthetic coding sequence
  source 1..663: mol_type = other DNA
atggatttttcacgcaatctctacgacatcggggaacaactagactcagaggatcttgcctcgctgaaatttctgtccctggactacatccctcagaggaaacaggagcctattaaggacgctttgatgctgtttcagcgcttacaagaaaagcgtatgctggaagaaagtaatttaagcttcctcaaggaacttctctttagaatcaaccggcttgatctattgatcacctatttgaatacccgcaaagaggagatggagcgcgaactgcaaactcctgggagagctcagattagcgcttatagagtgatgctgtatcagatctccgaggaggtgtcaagaagcgagctaagatccttcaaattcctgctgcaggaggagatatccaagtgtaagcttgacgacgatatgaacctactcgatatctttatcgaaatggagaaaagggtgattctaggcgaaggcaagctggatatcttaaagagggtgtgtgctcagattaataagagtctgctcaagattataaatgactacgaggagttctccaaggatttcgggcaatccctgccgaacgagaaacaaacaagcggcattcttagcgatcatcagcagtcccagttttgcaagtctacaggtgagtctgcacagacatctcagcactag

SEQ ID NO: 14355 - DNA, 597 bp, synthetic construct
  misc_feature 1..597: note = Description of Artificial Sequence: Synthetic coding sequence
  source 1..597: mol_type = other DNA
atggacttttcccgtaacctatacgatatcggcgaacagttggattctgaggacctggcgtctctgaagttcctgtccctggattatatcccacaaaggaagcaggagccaatcaaagacgccttaatgctgtttcagaggctgcaggaaaaacggatgctggaggaaagcaacctgtcattcctgaaggaattactgttcagaatcaatcgactcgacctactgatcacctacctgaacacccgtaaagaagaaatggagcgtgagctccagacccctggtcgggcccagatatcagcctatagggtgatgttgtatcagatctccgaagaggtatcccgcagtgagctgagaagtttcaagttcctgcttcaggaggaaatcagtaagtgcaagctggatgacgatatgaaccttctggatatttttatcgaaatggagaaacgcgtgattctgggcgaaggtaaactagatatcctcaagagagtgtgcgcccaaattaataagagtctgctgaaaataatcaatgactatgaggagttctcgaaggaacgatcttctagcctggagggctctcctgacgagttttccaattag

SEQ ID NO: 14356 - DNA, 351 bp, synthetic construct
  misc_feature 1..351: note = Description of Artificial Sequence: Synthetic coding sequence
  source 1..351: mol_type = other DNA
atggatttctctcgtaacctttatgacattggagagcaactggatagtgaggatctagcctcccttaaatttctctctctggattacatcccccagagaaaacaggaaccaattaaggacgccctcatgctgtttcagaggctgcaagaaaaacgtatgttggaggagagtaacctgtcatttttgaaagaactgcttttccgaataaacagactcgacttgctaatcacctacctgaacactagaaaggaggagatggaaagagaactgcagacccccggacgggcccagatcagcgcttacagagtcatgctctatcaaatcagcgaggaagtgtcccgttccgaatag

SEQ ID NO: 14357 - DNA, 1440 bp, synthetic construct
  misc_feature 1..1440: note = Description of Artificial Sequence: Synthetic coding sequence
  source 1..1440: mol_type = other DNA
atggatttcagcagaaatctgtatgatattggtgagcagttagactcagaggatttagccagccttaagttcctctcactggattatattccccagcggaaacaggagcccatcaaggatgccctgatgctgttccaacgcctgcaagaaaaacggatgctggaggaatcaaacctctcgttcttgaaggagttgctttttcgcatcaatcgactagacctgctcataacatatctgaacacgcgcaaggaggaaatggaacgagagctgcagacccctgggagggcccagatctccgcgtatcgcgttatgctgtatcagattagcgaggaagtatctagatccgaactccggtcgttcaagtttttgctgcaggaagagatttccaagtgtaagctagacgacgacatgaacttgctggacatctttattgagatggagaagagagtgatcctgggcgagggcaaacttgacatcctgaaacgcgtttgtgcccaaattaacaaatccctcttaaagatcatcaacgattatgaggagttctcaaaagagcgctcctcttccctggaaggatccccagatgagtttagtaatggtgaggaactgtgtggagtaatgactatttctgactcacctagggagcaggacagtgagagccagactctggacaaggtgtatcagatgaagtctaagcctcgcgggtactgtttgatcataaataaccacaactttgcaaaagcgcgcgagaaagttcctaagctgcattccattcgggacagaaacgggactcatctagatgctggagcactcaccacaactttcgaggaactccactttgagatcaaacctcacgatgattgcacagttgagcaaatttacgagatcctaaagatctaccagctcatggatcactccaacatggactgcttcatttgctgtattttgagccatggcgacaaagggattatctatggcacagatggccaagaggctccaatctacgaattgactagccagtttacagggctcaaatgtccctcactcgccggcaagcctaaagtcttttttatccaagcttgtcagggggataactatcagaaaggtatccccgtagagaccgattctgaggaacagccgtacctggagatggatctatcaagcccgcaaacgcgctacatccctgatgaagccgattttctgctagggatggctaccgttaacaactgcgtaagctaccgcaatccggccgaggggacatggtacattcagtctctgtgccagtccctgagagaaagatgtcccagaggcgacgacatcctcaccatcctaactgaggtaaactatgaggtgagcaacaaggacgataagaaaaacatgggcaagcagatgccacagcccacattcacattgcgcaagaagctcgtctttccatctgactag

SEQ ID NO: 14358 - DNA, 375 bp, synthetic construct
  misc_feature 1..375: note = Description of Artificial Sequence: Synthetic coding sequence
  source 1..375: mol_type = other DNA
atggacttctccagaaatctgtacgacataggtgagcagctcgacagcgaggacctggcgtcattgaagtttttatcccttgactatattccccagcggaaacaggagcctataaaggacgcactgatgctgttccagcgactccaggagaagcgcatgctggaagagtccaatctgagctttctgaaggagctactgtttcgcatcaacagactggatctgctcattacttacttgaacacacgaaaggaggaaatggagcgggagctgcagaccccagggcgggcccagatcagcgcctatcgggtgatgctctaccagatctcagaggaggtgagcagatcagagctccggagttttaagttcttgctgtag

SEQ ID NO: 14359 - DNA, 630 bp, synthetic construct
  misc_feature 1..630: note = Description of Artificial Sequence: Synthetic coding sequence
  source 1..630: mol_type = other DNA
atggatttttccaggaacctttacgacataggcgaacaactggactctgaagacctggcttcactgaagtttctgagtctagactacattccccaaaggaaacaggaacctattaaagatgcactgatgttgtttcagcgactgcaggaaaagcgtatgctagaggagagtaatctgagcttcctgaaggagctgctttttaggattaaccgcctggatttgctgataacgtatctgaatactcgaaaagaagagatggaacgagaactgcagactcccggacgagctcagattagcgcctaccgcgtcatgctctaccagattagtgaagaagtatcccgttcagagctaagaagtttcaaatttctcctccaggaggaaatctctaaatgcaaactggatgatgatatgaacctgctggacatcttcatcgaaatggaaaagagggtgatccttggtgaaggaaaattagacatcctgaaacgtgtctgtgcgcaaatcaataaatccctactgaagatcattaatgattacgaagaattttccaaagatttcggccaatcactgcccaacgaaaagcaaacatccgggatcttgtcggaccaccagcagagccagttttgcaaatag

SEQ ID NO: 14360 - DNA, 1251 bp, synthetic construct
  misc_feature 1..1251: note = Description of Artificial Sequence: Synthetic coding sequence
  source 1..1251: mol_type = other DNA
atggatgaagcagatcggcgcctgctcaggcggtgcaggctgcgcctcgtcgaggagctccaggtggatcaactttgggatgctctcttgtctcgggagctcttccggccacacatgatagaggatatccagagggccgggtccggaagcagacgcgatcaggcaagacaactaatcatcgacctcgaaacgagaggcagccaggccctccctctgtttatcagttgcctcgaggacacagggcaggatatgctggcctcctttctgcgcactaatagacaggccgctaaactcagtaagccaaccctggagaatctgacccccgttgtactgaggcccgaaatccggaaaccggaggtcctgagacccgagacccccagaccagttgacattggatctggcgggttcggcgatgtgggcgccctggagtcccttcgcgggaacgctgatcttgcctatatcctgagtatggagccatgcggacactgcctaattattaataacgtcaacttttgtcgggagagtggtctccgcacacggacgggtagtaacattgactgcgagaagcttcgacggaggttcagctcgctccacttcatggtggaggtcaagggcgacctaacagccaagaagatggtactcgcactgctggaactggcacagcaggaccacggggcactggactgttgtgtcgtcgtgatcctgtctcacgggtgccaagcctcccacctccagttccctggcgccgtatatggcaccgacgggtgtccagtcagcgtcgaaaaaattgtgaatatttttaacggcacctcatgccccagcctggggggaaaaccgaaactgtttttcattcaggcttgcggcggggaacagaaagaccatgggttcgaagtcgcatccacttctccggaagatgagtcacccggcagtaacccagaaccagacgcgactccgttccaggagggcctgcgcactttcgaccagttggacgccatcagctccctcccaacaccgtccgacatcttcgtaagttactcaacattccccggcttcgtgtcgtggcgggacccgaagtcaggcagttggtacgtcgagacccttgacgatattttcgagcaatgggcacatagtgaggacctgcagtctctgttgttgagggtcgccaatgcagtgtccgtgaaggggatttacaaacagatgcccgggtgttttaacttcctcaggaagaaactgttcttcaaaacaagttag

SEQ ID NO: 14361 - DNA, 801 bp, synthetic construct
  misc_feature 1..801: note = Description of Artificial Sequence: Synthetic coding sequence
  source 1..801: mol_type = other DNA
atggacgaggccgataggagattgctgcgtcgatgtcgcctccgcctcgtagaagagcttcaggtggaccagctgtgggacgctcttctgtctagggaattgtttcgtccccacatgattgaagatatccaacgagccgggagcggatcgagaagagatcaggcaagacagctgattatagaccttgagaccagaggctcccaagctctcccgctctttattagttgccttgaggacactggccaggatatgctggctagcttcttacgaacaaatcggcaggccgcaaaattatctaagcccacgctagaaaatcttacccccgtggtattgcggcccgaaatccgcaaacctgaagtgctgcgtcccgagactcctcgccctgttgatattgggtctggcgggtttggggacgtggaacagaaggaccatggttttgaagttgcctcgacctcgcctgaggatgagtctcctggatctaatcctgaaccagacgccaccccatttcaagaagggctccgtacctttgaccaattggacgcaatctccagcctccctaccccttcagacatctttgtgtcctattcaaccttcccaggcttcgtttcctggagggaccccaagtcagggagctggtacgtggaaacattggacgacattttcgagcagtgggctcattccgaggacctgcagagtctgctgctgcgggtcgccaatgccgtcagtgtcaaggggatttataagcaaatgcctgggtgctttaactttctgcggaaaaagctcttttttaagacgtcctag

SEQ ID NO: 14362 - DNA, 603 bp, synthetic construct
  misc_feature 1..603: note = Description of Artificial Sequence: Synthetic coding sequence
  source 1..603: mol_type = other DNA
atggagccctgtggacactgcctcatcatcaataacgtaaatttctgcagggaatcgggcctgaggacaaggaccggcagtaatatcgattgtgaaaagcttcgccgcagattctcctccctacattttatggtggaggtgaagggcgatctgactgcaaagaagatggtactggcactgctcgaactggcccagcaggaccatggagctctcgactgctgcgtggtggtcatactctcccacggctgccaggccagccacctgcagtttccgggagccgtgtatggcacggacggctgtccagtttctgtcgagaaaatcgtaaacatattcaacggaacttcgtgtccgtctttaggggggaaacctaagctctttttcatccaggcgtgtgggggtggctttgtgtcatggcgtgatcctaagtccgggagttggtacgttgagaccttggacgatatcttcgaacaatgggcacattcagaggatctccagagtctgctgttaagggtggccaacgccgtttctgtcaaaggaatctacaaacagatgccaggttgctttaactttctccgaaaaaagttgtttttcaaaacttcctag

SEQ ID NO: 14363 - DNA, 1002 bp, synthetic construct
  misc_feature 1..1002: note = Description of Artificial Sequence: Synthetic coding sequence
  source 1..1002: mol_type = other DNA
atgttggcctcatttctgcgaacaaacagacaggccgcaaagctgagcaaacccacactcgagaatctgaccccagtcgtcctgagaccggaaatacgcaaacccgaggtgttgaggccggagacaccgagacccgtggacattggcagtggggggttcggggatgtcggcgccctggagtccctgcgggggaatgcagacctcgcatacattttaagcatggagccctgtggccactgtcttatcatcaataacgtaaatttttgccgagagtctgggctgcgaactagaacgggtagcaacattgactgcgaaaaattgaggcgtcggtttagtagtctgcactttatggtggaggtcaagggagatctgaccgccaaaaaaatggtgctcgcgttgttagagctcgcccagcaggaccatggggcactagactgttgtgtggtcgtgattctgtcccatggttgccaggcaagtcacttgcagtttccaggtgcggtgtacggaaccgatggatgccctgtaagtgtagagaagattgtaaatatattcaacgggacatcatgcccttcactagggggcaaacccaaactctttttcatacaggcctgtggcggagagcagaaagaccatggctttgaggtggccagtacttcacctgaggacgaatccccaggatctaatcctgagcctgatgcgaccccgttccaggagggtctacggactttcgatcagctggacgcgatttcatccctgcccacccctagcgacatctttgtcagttattctacttttccaggcttcgtatcctggagagaccctaagtctgggagctggtacgtggaaacattggacgacatctttgagcagtgggcgcactctgaagacctccagagccttctcctacgggtggccaatgccgtatcagtgaagggtatatataagcaaatgcctgggtgctttaacttcctgaggaagaagctgttctttaagactagctag

SEQ ID NO: 14364 - DNA, 765 bp, synthetic construct
  misc_feature 1..765: note = Description of Artificial Sequence: Synthetic coding sequence
  source 1..765: mol_type = other DNA
atggacgaggcagatcgcagactgcttagaagatgtcggctgagactggtcgaagagttgcaggtggaccagctgtgggacgccctattgagccgagaactgttcaggccacacatgatcgaagacatccagagagctgggagcggatcgagaagggaccaggcaaggcagctcatcatcgatctggagactaggggatctcaagcactgccactatttataagttgtctggaggataccggtcaagatatgctcgcaagttttttgagaacaaatcggcaggcggcaaaactgagcaagccaacacttgagaatttaacacctgtggtgcttaggccagagatccgaaaacccgaagtactgagacccgaaactcctcggccagtcgatattggatctgggggcttcggcgacgtgggtgccctggagtcacttcgtggaaacgccgacctcgcatatatcctgagcatggagccgtgtggccactgcctcattatcaacaacgtcaatttttgccgggagagcggtctgagaacaagaaccggctccaacatcgactgtgagaagttaaggagaagattctctagtctgcacttcatggtcgaagttaaaggtgatttaactgcaaaagccagtcatttgcaattccccggcgcggtgtacggcacggacgggtgcccagtgtcagtggaaaaaatcgtaaacatttttaacggcacttcatgtccttccctgggcgggaagcccaagctcttttttatttag

SEQ ID NO: 14365 - DNA, 801 bp, synthetic construct
  misc_feature 1..801: note = Description of Artificial Sequence: Synthetic coding sequence
  source 1..801: mol_type = other DNA
atgctggcgtcttttttgaggaccaaccgccaagccgcaaaattatctaaaccgaccttagaaaacttgaccccagtggttctgcggccagagataaggaaacccgaagtgctccggcctgagacgccacgcccagtcgacataggaagtggcggcttcggggatgtgggcgcactggagagcctccgcggcaatgcagacctcgcttacattctgtccatggagccatgtggtcactgtttgatcattaataatgtcaatttttgcagggagtcagggttgcggacccggacggggagcaacatcgactgtgagaagttgcggcggcgattttcgagcctgcactttatggtggaagtcaaaggcgacctcacagccaaaaaaatggtgttggccctcctagaactcgcgcagcaggaccatggtgccctggactgttgtgtcgtcgtgattctttcccatggctgccaggcttctcatctgcagttcccaggcgctgtgtatggaacagacggctgcccagtgagcgtagagaaaattgtgaacatctttaacggcacttcctgtccttccctgggcggcaagcccaagctctttttcatccaggcctgcggaggagaacagaaggaccacggcttcgaggtggcctctacttcacctgaagacgagtcccctgggtctaaccccgaaccagacgcgactccattccaggaagggctgcggacttttgaccagctggatgccatatcgagcctgcctacacccagcgatatttttgtctcctattctactttcccatag

SEQ ID NO: 14366 - DNA, 1266 bp, synthetic construct
  misc_feature 1..1266: note = Description of Artificial Sequence: Synthetic coding sequence
  source 1..1266: mol_type = other DNA
atggatgaagccgaccgccgcctcttgcgcaggtgccgcctcaggttggtggaggagctacaggtcgaccagctctgggacgccctcctctcgcgtgagctcttcagaccgcatatgattgaggacattcaacgggctggcagcggcagccggagagatcaagctaggcagctgattattgacttggaaactagaggctcacaggcactccccctgttcatcagttgcctcgaagacacaggccaggatatgttagcttcctttctgcggacaaatcggcaggctgcaaagctgtcaaagccaacgttggaaaatcttacccccgtggtgctgcggccagagatcagaaagcccgaagtcctacggcccgaaacgcccaggcctgtggatattgggtccggaggatttggagatgtgggcgccctggaaagccttagaggaaacgccgacctggcatatattctttccatggagccctgcggccactgtctcattatcaacaatgtcaatttctgcagggagtctggcctacgaacaaggaccggcagtaacatcgattgtgagaaattacgccgcagattctcctcactacacttcatggtagaagtgaagggcgacctgacagcaaaaaaaatggtgctcgctctgctggaattagcacagcaagaccacggggctcttgattgctgcgtagttgtgattctgagccatggttgccaggcctctcacctgcagtttcctggagctgtttatgggactgacgggtgccctgtaagcgtagaaaagatagtgaatatcttcaacggtaccagctgtcccagccttggaggcaagcctaagcttttttttatccaggcatgtggcggtgagcagaaagaccatggattcgaagtcgccagcacttctcccgaagacgagagtcccggatcaaaccctgagcccgatgctactcctttccaggagggcttgcgaaccttcgaccaactagacgccatttcttctctacctacaccctccgacatattcgtgagctactcaactttcccaggcttcgtcagttggagggatccgaagtctggctcatggtatgtggagactctggacgatatcttcgagcagtgggcccactcggaagacctgcaatcgctgctccttcgtgtgagtgccgccttcctctgtaaaggcgaaggacgtctattaagggggtcagtctctagctggggctggggcttcggtgttagcagagccgggcccaatcagggatag

SEQ ID NO: 14367 - DNA, 2721 bp, synthetic construct
  misc_feature 1..2721: note = Description of Artificial Sequence: Synthetic coding sequence
  source 1..2721: mol_type = other DNA
atgactgccgtgcacgctgggaacattaacttcaaatgggatccaaagtctcttgagattcgcacactcgcagttgaacgtttgttggagccgctggtgactcaggtgactactctggtaaataccaactctaagggaccatcaaataaaaaaaggggccggtccaagaaggcacatgtgctggccgcgagtgtggagcaggccactgagaacttcttagagaagggcgacaaaattgccaaagagagtcagttcctgaaagaggagctggtcgccgccgtggaagacgtccgcaaacagggagacctcatgaaggccgcggcgggcgaattcgccgacgatccttgtagttccgtaaagcgggggaatatggtgcgggccgcaagggcacttctctctgccgtcacacggttgttaatcctggctgatatggcggacgtgtacaagttactggtccagttaaaagtggtcgaggatgggatcttgaaacttcggaacgctggcaatgagcaagaccttggtattcaatataaggctctcaagccagaagtagacaaattaaacatcatggccgcgaaaaggcagcaggagctgaaggacgttggacatcgcgatcaaatggctgcagctcgcggtattttgcaaaagaatgtacctatattgtacactgcttcccaggcctgcttacagcatccggatgtcgcagcctataaggctaaccgcgatttaatctacaagcaactacagcaggccgtcacgggaatcagtaacgcagcacaggccacggctagtgacgacgcctcgcaacaccagggagggggaggcggtgagttggcctacgctctgaacaactttgataagcagatcatcgtcgacccactgtccttttcagaggagcgcttccggccatctctggaagagcgtctggagagcatcatttctggggctgccctgatggcggactccagttgcactagggatgataggcgggagaggattgtggccgaatgcaacgctgtcaggcaagccctccaggacttgctttcggagtacatgggaaatgcaggacgcaaagaacggtctgacgcacttaacagtgccattgataaaatgaccaaaaaaaccagagacttgagacggcagttaagaaaggcagttatggaccacgtgtccgatagttttcttgaaacaaatgtgcctctgcttgtacttattgaggcagccaaaaacggaaacgaaaaagaagttaaggagtatgctcaggtgttccgggagcacgccaataaacttatcgaggtggccaaccttgcctgtagcatctccaacaatgaagagggagtgaagctagttaggatgtctgcctcgcagcttgaagcactatgccctcaagtcatcaatgctgccctggctctcgccgccaagccacagtccaagctggctcaagagaatatggacttgttcaaggagcagtgggaaaagcaggtccgtgtcctgaccgatgccgtggacgacattacaagtatagacgatttcctggctgttagcgagaatcatattctcgaggatgtgaataaatgtgtcatcgccctccaggagaaagatgtggacggcctggataggacggccggcgccataagggggagagccgcgcgggtaatccacgtagtgacttccgagatggacaactacgaacctggggtgtataccgagaaagtccttgaagcgacgaaactgttgagtaatactgtcatgcctaggtttactgagcaggtggaggctgccgtggaagccctgtcttctgatcccgcgcagccaatggatgagaatgagtttatcgacgctagccggcttgtctatgacggcatacgagacatacgcaaggctgttctgatgatccgaactcccgaggaactagatgattccgactttgaaacagaggacttcgatgttagatctcggacgtctgttcagaccgaagatgaccagttgatagctggccagtccgccagggcaattatggcccagctgcctcaggagcaaaaggccaagattgccgaacaagtggcatcattccaggaggagaagagtaaactagatgcagaggtcagtaagtgggacgactcagggaacgatatcattgtgctcgcaaaacaaatgtgcatgattatgatggaaatgacagatttcactagaggcaagggccctctgaagaataccagcgatgtgatatctgccgctaagaaaatcgccgaagctggcagtaggatggataagctggggcgaacaatcgctgatcactgccctgactccgcctgcaaacaggatctcctggcttatcttcaaaggatcgctctgtattgccaccagctgaatatttgcagcaaggtgaaagccgaagtgcagaatctcggcggcgagctggttgtgtccggcgtagactctgcgatgtctctcattcaagccgctaagaacttaatgaatgccgtggtgcaaacagtcaaggcctcatatgtcgcaagcaccaagtatcagaagtcacagggaatggcttccctcaatctccccgctgtgtcgtggaagatgaaggcccccgaaaagaaaccattggtgaaaagggagaaacaggatgaaacgcagacaaagatcaagagagccagccaaaaaaagcacgtcaatcctgtccaggcactgtctgaatttaaggcaatggatagcatctag

SEQ ID NO: 14368 - DNA, 2412 bp, synthetic construct
  misc_feature 1..2412: note = Description of Artificial Sequence: Synthetic coding sequence
  source 1..2412: mol_type = other DNA
atgaaggccgcagcaggtgaatttgcagacgacccctgttcttccgtgaagaggggcaatatggtgcgagcagcaagggctctgctttcagccgtcacacgactgctgatcctggccgatatggctgacgtgtataagctcttagtgcaactcaaagtggttgaagacggtatactgaaattaagaaatgccgggaacgagcaagacttgggcatccaatacaaagcactgaaacctgaagttgataaactgaacattatggccgccaaacgacagcaagagctgaaagacgtgggacacagggaccagatggcagccgcaagaggcattctgcaaaaaaatgttccaatcctgtacaccgcctcccaggcgtgtttgcagcaccccgatgttgctgcttacaaggccaacagggatttgatctataaacaactgcagcaagccgtgaccgggatttctaatgcagctcaagcaaccgccagcgacgatgcgtcgcagcaccagggtggtggggggggcgaactggcgtatgcactcaataacttcgacaagcaaatcatagtcgatccactgagcttcagcgaggagagattccgcccatccctcgaagagcggctggagtcgattatttcaggggcagctctgatggccgattctagctgtacaagggacgaccgccgtgagcggattgttgcagagtgcaacgcagtgcgccaggctctgcaggatctcctgtctgagtatatgggaaacgctggtaggaaagagcgctccgacgccctgaactcggccatagacaagatgaccaaaaagacacgcgatttacggcggcagcttcgcaaggcggtaatggaccacgtaagcgatagcttcctggagaccaatgtgcctctgctggtcctgattgaagcggctaaaaatggcaatgaaaaggaggttaaggaatatgcgcaggtgtttcgcgaacatgctaacaagctcatcgaggtggcgaacttggcttgttccatttccaacaatgaagagggggttaagctggtgagaatgtctgctagtcagctcgaggccctgtgtcctcaggtcattaacgctgcacttgctctcgccgccaagccacagtctaaactcgcccaggaaaatatggatctcttcaaggagcagtgggagaagcaggtgcgagtgctcacagacgccgtggatgatattacttccatcgatgatttcttggctgtatccgagaaccatatcctggaggatgtaaataagtgcgttatagcactgcaagagaaggacgttgacggtctggaccggacagccggagcaattaggggccgagccgccagggtgatacacgtcgttacttctgagatggacaactatgagccaggggtctacactgagaaggtgctagaggccacgaaacttctgagtaatactgtaatgccccgattcacagagcaggtcgaagcggctgtagaggccctcagttctgatcccgcacagcccatggatgaaaatgagtttatcgacgcaagtagactggtgtacgatggcatccgagatatccgtaaagcagtattgatgatccgaactcctgaggaactggatgattccgattttgaaacggaagactttgatgtccggtccagaaccagtgtgcagactgaagatgaccagctgattgcgggacagagcgcaagagcaatcatggcccagctcccacaggagcaaaaggctaagattgcagagcaagttgcctcatttcaggaagaaaagagtaaactcgacgcagaagtctccaaatgggatgactcgggaaacgatatcatcgtccttgccaaacaaatgtgcatgattatgatggaaatgactgattttacccgaggcaagggtcctctcaaaaacacctcagatgtaatttctgctgctaagaagatcgcagaggctggaagtagaatggataaacttggacgcaccatcgcagaccactgccctgacagtgcttgcaaacaggatttattggcctacctgcagcgcatagcactgtattgtcaccagctgaacatttgcagcaaggtcaaggcagaagtgcaaaacctcggaggagaattggtagtctccggcgttgatagcgccatgagtctgatacaagccgccaagaacctgatgaatgctgtcgtccagactgtgaaggcgagctacgtcgcctccactaaataccagaaatctcaggggatggcttcactgaacctcccagcagttagctggaaaatgaaggcccccgaaaagaaacccctcgtgaaacgcgagaaacaggacgagactcagacgaagatcaagcgcgcctctcagaagaaacacgtaaatccagtccaggcactctctgagttcaaggctatggatagcatctag

SEQ ID NO: 14369 - DNA, 357 bp, synthetic construct
  misc_feature 1..357: note = Description of Artificial Sequence: Synthetic coding sequence
  source 1..357: mol_type = other DNA
atgacagcggtccatgcaggtaacattaattttaaatgggaccctaagtcattagagatcaggaccctagctgtggagagactcctggagcccctggtgacccaagtgacaaccttggtcaacactaactcaaaaggtccgtctaataagaaacgagggcgctccaagaaggcacacgttctagccgccagtgtggagcaggccacggagaacttcctggagaaaggggacaaaatagcaaaggaaagccaattcttgaaagaagagctagtcgccgccgtggaggacgtccgaaaacagggggatttgatgaaagctgccgcgggggagttcgccgatgacccatgctctagttag

SEQ ID NO: 14370 - DNA, 420 bp, synthetic construct
  misc_feature 1..420: note = Description of Artificial Sequence: Synthetic coding sequence
  source 1..420: mol_type = other DNA
atgactgcggttcatgcaggaaatataaatttcaagtgggaccctaaatccttggaaatccggacacttgctgtcgaaagactgttggaaccactcgtcacacaggttacaactttagtaaataccaactccaaaggaccctccaataaaaaaagaggtcgatcaaaaaaggcacacgtgctggctgccagcgtagaacaggctaccgaaaatttcctagaaaagggtgataagatcgctaaggagtcccagtttctaaaagaagaacttgtggctgccgtggaagacgtacggaagcagggagatttaatgaaggccgctgctggagagtttgcggatgacccctgctcctctgttaagcgtggaaatatggtaagagccgccagagcgctgctgtctgccgtgactcgactattgtag

SEQ ID NO: 14371 - DNA, 648 bp, synthetic construct
  misc_feature 1..648: note = Description of Artificial Sequence: Synthetic coding sequence
  source 1..648: mol_type = other DNA
atgacagcagtgcacgccggtaatatcaactttaagtgggacccaaaaagcttggaaatcaggacccttgctgttgaaagattactggagcctctcgtcactcaggtcacgacactagtgaatacaaatagcaagggccccagcaacaagaaacgtggaagaagtaaaaaagcccacgtactagcagccagcgtggagcaggccacggaaaatttcctggaaaaaggagacaagatcgccaaagaatctcagttcctgaaggaagagttagtggcagctgtggaggacgtgcgcaagcagggcgacttgatgaaggcggcagcaggtgaattcgccgacgacccttgttcttccgtaaagcggggcaatatggttcgcgccgcaagagccctcctatccgcagttaccagactgctcatactggccgacatggccgatgtgtataagttgctggtacagctgaaggtggtggaagatggaattctgaagctgaggaacgcagggaacgagcaagacctcggcattcagtataaagctctcaaacctgaggtggataaactcaatattatggctgctaaaaggcagcaggagctcaaggacgtgggacatcgggatcagatggccgctgcccgaggaatactgcagtag

SEQ ID NO: 14372 - DNA, 306 bp, synthetic construct
  misc_feature 1..306: note = Description of Artificial Sequence: Synthetic coding sequence
  source 1..306: mol_type = other DNA
atgaccgcagtccacgcagggaacattaattttaaatgggatccaaagagcctggagatacggacgctcgcagtggagagactgctggaaccccttgttacccaggtgactacactcgtaaacactaatagcaaaggaccttccaataagaagcgaggcagatccaagaaggcccacgtcctcgccgcatcagtggaacaagcaacggaaaactttctggagaaaggcgataagatagccaaagagagtcagttcctgaaagaagaactggtcgccgccgtcgaagacgttcgaaagcaggggtag

SEQ ID NO: 14373 - DNA, 372 bp, synthetic construct
  misc_feature 1..372: note = Description of Artificial Sequence: Synthetic coding sequence
  source 1..372: mol_type = other DNA
atgaccgctgtccacgccggaaacatcaacttcaaatgggatccgaaaagtctggagatcagaacacttgctgtagaacgtctcctggagccactagttacccaggtaacaactcttgtcaatacaaactctaaaggtcctagtaacaaaaagagaggaaggtccaagaaagcacacgtcttggccgctagtgtggagcaggcaaccgagaattttctggaaaagggggacaaaattgcaaaagaatcacaattcctgaaagaggagttggtcgccgccgtcgaagacgtacgcaagcagggagacctgatgaaggcagcggccggggagtttgccgatgacccttgcagtagcgtcaagcgaggcaattag

SEQ ID NO: 14374 - DNA, 471 bp, synthetic construct
  misc_feature 1..471: note = Description of Artificial Sequence: Synthetic coding sequence
  source 1..471: mol_type = other DNA
atgacagccgtgcacgcaggtaatatcaacttcaagtgggatccgaaatctctagagatccggaccttggcggtggagagactgttagaaccacttgtgacacaagtcacgaccctagtaaataccaactctaagggcccttcaaataagaagagagggcggagcaaaaaagcccacgtcctagctgcctccgtggagcaggccacggagaacttcctggaaaaaggcgataagattgcaaaggagtcacagttcctgaaggaagagctggtcgctgcagtcgaggacgtaagaaagcagggagatctcatgaaagctgctgccggcgagttcgctgatgacccgtgcagttccgtaaagaggggaaatatggtgcgggccgccagggcactcctcagtgcagttacacgcctgctcatcttggcagacatggctgacgtctacaagttgctcgtgcagctgaaggtttag

SEQ ID NO: 14375 - DNA, 285 bp, synthetic construct
  misc_feature 1..285: note = Description of Artificial Sequence: Synthetic coding sequence
  source 1..285: mol_type = other DNA
atgacggccgtccacgctggcaatattaatttcaaatgggatcccaagagtcttgagatccggaccctcgcagtggagagactgctggaaccattggtgacccaagtcacaaccctcgttaacactaatagcaaggggccaagtaacaagaagagaggacgctcaaagaaagcacacgtgctagccgcatccgtggagcaagccacagaaaatttcttggagaaaggcgataagattgccaaagagtcccaattccttaaagaagagctggtggctgcagtgtag

SEQ ID NO: 14376 - DNA, 2790 bp, synthetic construct
  misc_feature 1..2790: note = Description of Artificial Sequence: Synthetic coding sequence
  source 1..2790: mol_type = other DNA
atgaccgcagtgcacgctggaaacatcaactttaaatgggacccaaagtcccttgagatccggacactggcggtagaacgtcttttggagcccctggttacccaggtgacgaccctggtcaataccaacagtaaaggaccgtccaataaaaaaagaggacgaagtaaaaaggctcacgtcttggccgcttctgtggagcaggctacagagaactttctggagaagggggacaagatagctaaggagagtcagttcctgaaagaagagctggtggcagctgtggaggatgtcaggaagcagggcgacttgatgaaggcagcagcaggcgagttcgctgacgatccttgttcttccgtcaagaggggaaacatggtgagggccgctagagccctcttatctgccgtaaccagacttcttatcctggcagatatggcagatgtgtacaagttgcttgtacagctcaaggtggtcgaggatggcatcctgaaactgaggaacgccggtaatgagcaggacttgggtattcaatacaaagctttaaagcccgaggttgacaagttaaacatcatggcagcaaaaaggcaacaggagcttaaggacgtgggtcaccgcgaccagatggcagcagccaggggtattctccagaagaacgtacccatattgtacaccgccagtcaggcttgtcttcagcatcccgacgtcgccgcgtacaaggctaatcgagatctgatatataagcagctccagcaggcagtgacaggaatatccaatgctgcccaggcaaccgcgagtgacgatgcatcccagcatcaaggcggtgggggaggtgagttagcctacgccttgaataacttcgacaaacaaataattgtagatcccctatcattctccgaagagcggtttcgaccatcattagaagaaagactggagagcattattagcggagccgcacttatggctgactcaagttgcacaagggacgaccgtcgggaacggatcgttgctgagtgtaatgccgtaaggcaggccctacaggatctgcttagtgaatatatgggaaatgcgggccgcaaggaaagatctgacgccctgaattctgcaatcgataagatgactaaaaagacacgtgacctaaggaggcagctgaggaaggccgtgatggaccacgtttcagattccttcttggagactaatgtgcccctgctcgtgttaatcgaggccgcaaagaacggcaacgaaaaagaagtcaaggaatacgctcaagtttttagggagcatgcaaataaactcatagaagttgccaatctggcctgttccatctcaaacaatgaagaaggggtaaaactggtgagaatgtcagcaagccagctggaagctctctgcccccaggttatcaacgcagcactggcccttgcagcaaagccccagagtaagttggcacaggagaacatggacctgttcaaggagcagtgggaaaaacaagtgagggtcttgactgatgctgtggacgacattaccagcattgacgatttcctggccgtgagtgagaatcatatcctggaagatgttaataaatgtgttattgcactgcaggagaaagacgtggatgggctggacaggacagcaggagccattagaggacgtgccgcccgggtaattcacgtcgtcactagcgagatggataactacgagcctggcgtatacaccgagaaagttctggaggccaccaagcttcttagcaatacagtgatgcccaggtttacagagcaagtggaggctgcagtggaggcgcttagctcagatcctgcccagccaatggatgaaaacgagtttatcgacgcttcccggcttgtgtacgacgggatacgggatattcgcaaggctgtgcttatgataagaaccccggaggagttagatgatagcgatttcgaaaccgaggacttcgacgtcaggagcaggacttcagtgcagacagaagatgaccagcttatagcaggccagagcgccagggcgataatggcacagctgcctcaggaacagaaagcaaaaatcgctgagcaggttgccagctttcaggaagagaaaagtaagctggacgccgaagtgtccaagtgggacgactcaggtaacgatattatcgtcctagccaaacagatgtgtatgatcatgatggaaatgaccgatttcacccgaggaaaggggccccttaagaatacttcagacgttattagcgcagcaaagaagattgctgaggccgggtcccgaatggataagctgggccggacaatcgcagatcactgtcccgactcagcttgtaagcaagatctgctggcatacttacagagaattgcgttgtattgtcaccagttaaatatttgtagtaaggtgaaggcagaggtccagaatcttgggggggaactggtggtaagcggtaactgcgacacatgcggagctcttcaagggctgaaaggctggcctcctcctctttgcgctactcactgggtcgattctgccatgtccttaatccaggcagccaaaaacctaatgaacgccgtggtgcagacagtcaaggcatcctacgttgcaagcacaaagtaccagaagtcacaagggatggcatctctgaatctccctgccgtgtcctggaagatgaaggctcccgaaaagaaacctctggtcaaacgcgagaagcaagacgagacacagaccaagatcaagcgggctagtcaaaagaagcacgtgaacccagtccaagccctatctgaatttaaggccatggattccatctag

SEQ ID NO: 14377 - DNA, 1611 bp, synthetic construct
  misc_feature 1..1611: note = Description of Artificial Sequence: Synthetic coding sequence
  source 1..1611: mol_type = other DNA
atgaccaagaaaacaagggatctgcgaaggcagctgcgtaaagccgttatggaccacgtgagcgattcattcctggagacaaatgtgccccttctggtactaatcgaggctgctaaaaacggcaacgaaaaggaagttaaagaatatgcccaggtgtttagggagcacgccaataaattgatcgaagtcgctaacctagcctgctccatctcaaacaatgaggagggggtgaagctggtgcgcatgtctgcatctcaactcgaggccctatgcccccaggtgataaacgcagcactggcattagcagccaagccacaaagcaagctggctcaggagaacatggacctgtttaaggaacagtgggaaaagcaggtgcgcgtcctgaccgacgcggtagacgacatcacctcaatcgatgactttttggcggtgagtgaaaatcatatcttggaggacgttaacaagtgtgtcatcgccctgcaagagaaggatgtcgacggtctggaccgcacggcaggcgctatcagaggaagggcggccagggtgatccacgtggtgacttccgagatggataactatgaaccaggagtctatacagagaaggttctggaagcaaccaagctgttgtccaataccgtcatgccaaggtttaccgagcaggtagaggccgctgtggaggctctcagtagtgaccctgcccagcctatggatgagaatgagtttatagatgctagcagactggtctatgatggtatcagggatatccggaaagcagtcctcatgatacgtactccagaagagctggacgacagcgatttcgagacagaggattttgacgtgcgatcgcgaacgtctgtccagacagaggatgatcagctgattgctgggcagagtgctcgggctatcatggcccagctgccacaggagcaaaaggcaaaaatcgctgaacaggtcgcatcattccaggaggagaagtccaaacttgatgcggaggtaagcaaatgggatgatagtggcaatgatattatagtgctggcaaaacagatgtgcatgattatgatggaaatgacggattttacccggggaaaaggacccctgaaaaacactagtgacgtaatttcggcagctaagaagatcgccgaagcaggtagccggatggacaaacttggtagaaccattgcggaccattgtccggacagcgcctgtaagcaagacttactggcttaccttcaaaggatcgctctctattgtcaccagctcaacatctgttccaaagtgaaagccgaggtgcagaacctaggcggagagctggtcgtcagtggcgtcgacagcgcaatgagcttgatccaagccgccaaaaacttgatgaatgctgtggtgcagacagtgaaggcctcatacgtcgccagcactaagtatcagaaaagccaaggcatggcctctctgaacctgccagctgtttcctggaaaatgaaagccccggagaagaagccgttagtgaaaagagagaagcaagacgaaactcaaactaagattaaacgcgccagtcaaaagaagcatgtgaaccccgtgcaggcccttagtgaatttaaggcaatggattccatttag

SEQ ID NO: 14378 - DNA, 2676 bp, synthetic construct
  misc_feature 1..2676: note = Description of Artificial Sequence: Synthetic coding sequence
  source 1..2676: mol_type = other DNA
atgacagccgtccacgccggtaatattaacttcaaatgggacccaaagtctctcgagatccggactctggccgtggagcgcctgttagagccactggtcacacaggtgaccactctggttaatactaactccaagggcccctccaacaagaagagaggccgaagtaagaaggcccacgtgctggctgctagtgtagaacaagccactgaaaattttctagagaagggtgataagatcgcaaaagagagtcaatttctgaaggaagagctcgtggccgcagtggaagatgtccgaaaacagggggacttgatgaaagcagccgcaggggaatttgctgacgatccatgttccagcgtcaagagaggaaacatggtgcgtgccgcgcgcgccctcctcagcgcggttacgaggctgctgaaagtggtggaggatgggatccttaagctgcgcaatgcaggcaatgaacaggacctgggcattcagtacaaggccctcaagccagaggtagataagcttaatattatggccgctaagcgccagcaggaactgaaggatgttgggcatagagaccaaatggcagctgccagagggatcctccagaagaacgtgccgatcctgtacactgccagccaggcctgtctgcagcacccggatgttgccgcctacaaagcaaatcgagacctgatctacaaacaactgcagcaggctgtcactggaatctctaatgccgctcaagcaacagcttctgatgatgcgtctcagcatcaaggaggaggcggcggcgaactggcctatgccctcaacaattttgataagcagattattgttgatcctctgtctttttctgaggagaggttcaggcctagcctggaggagagactcgagagcatcatctcaggagccgccttaatggccgactcctcttgcactagagacgacagaagagaaaggatagtggcagaatgcaatgcagtccgtcaggcgctccaggatctgctctcagagtatatgggcaatgcaggccggaaggaaagatcagatgccctgaactcagccatcgataaaatgaccaaaaagactagggacctccggcgtcaactgagaaaggcagtgatggaccatgtgagcgattcatttttggaaactaacgtgcccctgctggtactcattgaagcggccaagaatggcaacgagaaagaggtaaaggagtacgcccaagtcttccgggagcacgccaacaaactgattgaagtggcaaacctggcatgcagtatctcaaacaacgaagagggggttaagctcgttcggatgtccgcgtcacaacttgaagccctgtgtccacaggtaatcaacgctgcactggctctggctgctaagccgcagtctaaactcgctcaggagaatatggatctgttcaaagaacaatgggagaagcaggtccgagttcttactgatgccgttgatgacatcacctccattgatgacttcttagccgtatcagaaaatcacatactcgaggacgtgaataagtgtgtcattgccctgcaggaaaaagatgtggacggcttggacaggacggcaggtgccattagggggcgcgctgcccgggtgattcacgtcgtgacctcagaaatggacaactatgagccaggagtctataccgagaaggtgttagaagcaaccaaattactttccaacacagttatgccccggtttaccgaacaggtggaggctgctgtggaggctctgtctagtgatcctgcccagccaatggatgagaacgaatttattgacgccagtcgtttggtgtacgatggcatcagggatattcgcaaagccgtgctcatgataagaacacctgaagagcttgatgattccgactttgagacagaggattttgatgtgagaagtcgaacctcagtgcaaacagaggatgatcaattgatcgcaggccagtccgcacgcgcgatcatggcccagctgcctcaggaacagaaagcgaaaatcgccgagcaggtggcgagcttccaggaagaaaagtctaagcttgacgccgaagtatccaagtgggatgactccggaaacgacatcattgttctggcaaaacagatgtgcatgatcatgatggagatgaccgattttacaagagggaaaggccctctgaagaatactagcgacgttatctctgccgcaaaaaagatcgctgaggctgggagccgcatggataagctggggcgtaccattgctgatcactgcccggattctgcatgtaagcaagatctgcttgcttaccttcaaaggatcgctctttactgccatcaactgaatatttgttccaaggtcaaggccgaggtgcagaaccttggcggagaacttgtggtttctggtgttgactctgctatgagtctaatccaggcagctaaaaatctgatgaatgcggtagtgcagactgtaaaggcctcttacgtggcgtccaccaagtaccagaaatctcagggcatggcaagtctgaacctgccagctgtgtcgtggaagatgaaggcaccagagaaaaaaccactggttaagagggagaagcaagatgaaacccagacaaagatcaaacgagcttcacagaagaaacacgtgaatccagtgcaagcgctgtctgaattcaaagccatggactctatttag

SEQ ID NO: 14379 - DNA, 2346 bp, synthetic construct
  misc_feature 1..2346: note = Description of Artificial Sequence: Synthetic coding sequence
  source 1..2346: mol_type = other DNA
atggctacacaggctgatctcatggaactggatatggccatggaacctgaccggaaggctgctgtgagccactggcagcagcagagctatctcgacagcggaatccactcaggggctaccacaacagctccatctctgtctggaaaagggaatcccgaggaagaggatgttgatacatctcaggtgctgtatgagtgggagcagggcttcagtcaatcgtttactcaggagcaggtcgcagacattgatgggcagtatgcaatgactagggcacagagggtgcgagctgcgatgtttcctgagacgctcgatgaagggatgcagatcccgagtacccagttcgacgctgcccaccctacaaacgttcagcgacttgccgaacccagtcagatgctcaagcacgccgtagttaacctcattaattaccaggacgacgcagaactcgccaccagagcaatacctgagttgacgaagctgttgaatgatgaagatcaagttgttgttaataaggccgctgttatggttcaccagctctcaaagaaagaggcctcacgacatgctataatgcgttccccccaaatggtgtccgccatagtacgtacaatgcaaaacaccaacgacgtggagacagcccggtgtaccgccggaacactccacaacctctcccatcacagagaggggcttctcgccatttttaagtctgggggcattcctgccttggttaaaatgctgggctcacccgtggactctgtgctgttttatgcaataacaacactgcacaacctcttgctgcaccaggagggcgccaagatggccgttcggctggctggaggacttcaaaagatggtggccttgctgaataagactaatgtcaagtttctcgcaataacaaccgattgcctccagatcttagcctatggaaatcaggaatccaagttaatcatcctggcaagcggagggccacaagcgctggtaaatattatgaggacatatacatatgagaaattgctatggacaacctcccgtgtcctcaaggtgctctcagtgtgtagctctaataagcctgccatcgtcgaggccggaggcatgcaggctctcgggcttcaccttacggacccctcacagaggctagtgcaaaattgtctttggactctgagaaatttgagtgacgccgctaccaagcaggagggtatggagggactgctaggaacactggtacagctgcttgggtctgatgacataaacgtggtcacatgtgctgcgggaatcctgtcaaacctgacctgtaacaactataagaacaaaatgatggtctgccaagtgggtggaatcgaagcactggtacggaccgttctacgggccggagatcgggaggacatcactgaaccagcgatttgtgccctgcgccatctgacaagccggcatcaggaggccgagatggcacagaatgccgtacggctgcactacggactgcccgttgtggtgaagctgctgcatcccccatcccattggcccttaatcaaagccaccgttggattgatcagaaacctggccttatgtccagcgaaccatgctccccttcgagaacaaggtgcgataccccgcctggtccagttgttggtaagggcccatcaggacactcaaaggcggacatctatgggaggtacacagcagcagtttgtcgagggggttaggatggaggagattgtggaaggttgtactggggcacttcatatcctagcccgggacgtgcacaacagaattgttatcagaggcctcaatactattccattgtttgtgcagctgctatattcgcccatcgaaaatatccaaagggttgcagccggggtcctgtgtgagttggctcaggacaaagaagcggcagaggctatcgaagcagagggcgctaccgctcccttgactgagctgttgcactccaggaacgagggggtggccacttacgcagctgctgtgctttttcgaatgtccgaggacaaacctcaggattataaaaagaggctgagcgtggagcttacttcctccttatttaggacggagcccatggcttggaatgagaccgctgaccttgggctcgacatcggggcacaaggcgaaccccttggctacagacaggatgacccttcatacagatctttccattctggaggatacggccaagacgccctcggaatggaccctatgatggagcacgagatgggggggcaccacccaggggccgactaccccgtagacggtttacctgatctaggtcatgcccaggacctcatggatggcctaccacccggggactcaaaccaactggcgtggtttgacaccgacctgtag

SEQ ID NO: 14380 - DNA, 2346 bp, synthetic construct
  misc_feature 1..2346: note = Description of Artificial Sequence: Synthetic coding sequence
  source 1..2346: mol_type = other DNA
atggctactcaggcagacctgatggaacttgatatggccatggagcccgaccgtaaagccgccgtgtcacactggcagcagcaaagctaccttgattccggaattcactccggcgccaccacaactgctccctccctttccgggaaggggaatcctgaggaagaggacgtggatacgtctcaggtgctttatgagtgggagcagggcttcagccagtctttcacgcaggagcaagtcgccgatatagacggacagtacgctatgactcgagcccaaagagtccgggctgctatgttcccagagactcttgacgagggaatgcagatcccttctacccagttcgatgccgcacacccaaccaacgttcaaaggttagctgagcccagtcagatgctcaagcacgcagtcgtgaacttgatcaattatcaagatgacgctgagctggccacacgagcgataccggagctgactaaactgctgaatgatgaagaccaggtcgtggtgaataaggcggccgtgatggttcaccagctgtcaaaaaaagaagccagccgccacgctataatgcgcagcccccagatggtcagtgcaatagttagaactatgcagaatactaacgacgtggagaccgctcgctgtaccgctggaaccctgcataacttatcccaccacagggaaggccttctggctattttcaaatctggtggcattccagcccttgtcaagatgctgggttcgcccgtcgactccgttctgttctacgcgattaccacattacacaatttgttgcttcaccaggaaggcgctaagatggcagtcaggcttgctgggggtcttcaaaagatggtggctttgctgaataagactaatgtgaagttcttggctattaccacggactgtctgcagattctggcttacggtaatcaggagtccaagctcattatactggcaagtggaggcccccaagcgcttgtaaatatcatgcggacttatacttatgaaaaactactgtggacaactagtagggttcttaaagttctgtcagtgtgcagtagcaacaagccagccatcgtggaagcgggaggtatgcaggcccttggattgcacctaactgatcctagtcagcgtctggtgcagaattgcttgtggactctgcggaatctgtccgatgctgccaccaagcaggagggtatggagggccttttgggaacgctagtgcagcttcttggctctgacgacatcaacgtggttacgtgcgcggcagggatcctctccaacctcacttgtaacaactataaaaataaaatgatggtttgccaggtgggaggtattgaggccttggtgagaaccgtgttgcgggctggcgatcgcgaagacattacagagccagctatctgtgccctgaggcatctcacttctaggcaccaggaggcagaaatggcacagaacgccgtgagactgcattacggactgccggtagtcgtcaaactgctgcatcccccttcgcactggcctctgataaaagctaccgtgggcctcatcaggaacctggcattgtgtcccgccaatcacgctcctctaagggaacaaggcgccatcccgagattggtgcaactcctcgtgcgcgcgcaccaagatacgcagcggagaacctccatgggcggcacacaacagcagttcgtggagggggtgagaatggaggagatagtagaagggtgcaccggggctctgcatatcctagccagggacgtgcacaataggatcgtgatccgtggtctcaacaccattcctctgttcgttcagctgctctatagccccatcgagaacatccagagggtcgcagccggggtgctttgcgagcttgcacaggataaggaagccgctgaagccatagaggctgaaggtgcgactgctcccctgacagaattgttgcactcccgcaacgaaggcgttgctacgtacgctgcagctgtgctcttcaggatgagtgaagataaacctcaggattataaaaaaagactgtctgttgagctgactagctcactgttcagaacagagccgatggcctggaacgagacagccgatttaggcctggacattggggcacagggggagcctctgggatatcgccaggacgacccttcatatcgtagtttccattctggtggctatggccaggatgccctgggtatggatccaatgatggagcacgaaatgggaggtcatcatcccggggccgattatcccgtggatgggctccccgatctcggtcatgcccaggatctgatggatgggctcccgcccggtgactctaatcagctggcttggtttgataccgacctctag

SEQ ID NO: 14381 - DNA, 2346 bp, synthetic construct
  misc_feature 1..2346: note = Description of Artificial Sequence: Synthetic coding sequence
  source 1..2346: mol_type = other DNA
atggctactcaggcagatctgatggaactggatatggctatggaacctgataggaaagcggctgtctcccactggcaacaacaatcttatcttgactccgggatccattcgggtgccactactacagctcccagtctttctggcaagggaaaccccgaggaggaggacgtagacacctctcaggtgctttacgagtgggaacaggggtttagtcagagttttacccaggaacaggtcgccgacatcgatggccagtacgcgatgactcgggcccagagagtgcgagctgccatgttccctgagacccttgatgagggaatgcagattcccagtacccagttcgacgccgcccatcctacaaatgtgcaacgcctggccgagccatctcagatgctcaaacacgcagtggtaaacctcatcaattatcaggatgatgcagagctcgccacccgggccatacctgaattgacaaaattgttgaacgacgaagatcaagtcgtcgttaataaagcggctgtgatggtgcaccagctgtccaaaaaagaggccagcaggcatgcgatcatgcgaagcccacagatggtatcagcgatcgtacgtactatgcagaacacaaacgatgtggagactgccaggtgtaccgccggcaccctgcacaatctgagccaccaccgcgaaggactcctggccatcttcaagagtgggggtatcccggctctggtgaaaatgctcggctcccctgtggattctgtgctcttctacgctatcaccactctgcacaatctgcttctccatcaagaaggggcgaagatggcagtgcgacttgccggcgggctgcaaaaaatggtcgctctacttaataaaacgaatgtcaagtttctggccattacaactgactgccttcagatcttagcatatggaaatcaggaatccaaactgataattcttgcttcgggcggaccgcaggcgcttgtaaatatcatgcgcacctatacttacgagaaactactttggactaccagtagagtgctcaaggtgttgtccgtttgttcttcaaataagcctgcaatcgtcgaggccggaggcatgcaggcacttggactgcaccttacggacccctcacagagactggtccagaattgcttatggacacttcgaaatctgagcgatgccgcaactaaacaggaggggatggagggcctgttgggaacactggtgcagctgcttggatccgatgatatcaatgtcgtaacctgtgccgccggaatcctaagcaaccttacatgcaacaactacaagaataagatgatggtttgccaggtgggcggcatagaggccttggttcgcacagtgctcagagccggcgaccgcgaagatatcaccgaacccgccatctgcgcacttcggcaccttaccagcaggcaccaggaagcagaaatggcccaaaacgctgtgcggctgcactatggcctgcccgtcgttgtcaaacttctgcatccgccttcccactggcccctgatcaaagctaccgtcgggttgatccgcaatctggctctgtgtccagccaatcatgcccctctgagagagcaaggagctataccccggctggtgcaactgctggtgagagcccatcaggacacccagcggcggacatccatgggagggacccagcagcaatttgtcgaaggtgtgagaatggaggagatcgtcgaaggttgtactggcgcccttcacattttagcaagggacgtacataacagaatcgtgattaggggtctgaatactattcccctcttcgtgcagctcctgtatagccctatagaaaacatccagagagtggcagcaggggtgttgtgtgagttggcgcaggataaagaagctgcggaggccatcgaggctgagggcgctaccgctcccctgactgagctgctgcattccagaaatgaaggcgttgccacctacgctgccgcggtgctctttcggatgtcagaagacaagcctcaggattacaaaaagcggctcagtgtggaacttacgtcgagcttatttcgcactgaacctatggcttggaacgagacagctgacctaggattggatatcggcgctcagggggagcccctgggttataggcaggacgatcctagctaccgaagctttcatagcggcgggtacggacaggacgccttaggaatggacccaatgatggaacatgagatgggtggacaccaccccggagcagactatccagtggatggcttgccggacctgggacacgctcaagacctaatggacggcctacccccaggcgactccaatcaattggcttggtttgacacggacttgtag

SEQ ID NO: 14382 - DNA, 2346 bp, synthetic construct
  misc_feature 1..2346: note = Description of Artificial Sequence: Synthetic coding sequence
  source 1..2346: mol_type = other DNA
atggctactcaggcagatcttatggaattggatatggcgatggaaccagaccggaaggctgcagtgtcccactggcaacagcagtcatacctggattccggcattcactctggcgccactacgacggcccccagtctgagtggcaaaggaaacccagaagaggaggatgttgacacctcacaggttctgtacgagtgggagcaggggttttcacaatccttcactcaagagcaagtggctgacatagatgggcaatatgcaatgacacgcgcacagcgggtccgcgctgctatgtttcctgagactttggatgagggcatgcaaatccccagtacccaatttgacgccgcccatcccacgaatgtccaaaggctggcagagccttcacagatgctgaagcacgcagtggtgaatcttataaactaccaggacgacgctgagctggccacaagagctattcccgagctgaccaaactcctcaacgacgaggaccaggtggtcgtcaacaaggcagctgtcatggtgcaccaactaagcaaaaaggaggctagccgtcacgctataatgagatcgccacaaatggtctcggcaattgtaagaacgatgcagaatacaaacgacgtggagactgcaagatgcaccgcgggcaccctccataacttatcacaccaccgggagggactccttgctatatttaaatcaggtggcatccctgcgctagtgaagatgctcggcagtcctgttgacagtgtccttttctacgcaataactaccctccacaaccttttgctgcatcaggagggggctaaaatggccgtccgtctcgccggcggcctgcagaagatggtagccttgctcaacaagaccaatgttaaatttctggctatcaccaccgactgcctgcagattctcgcttacggaaatcaggagtccaagctcataattttggcaagcggcggaccacaggcactcgtcaatataatgaggacctatacctacgagaagctgctctggactacctctagggtgctgaaggtactcagcgtctgcagcagtaacaaacccgctatcgtggaagctgggggcatgcaggcacttggactgcatttaacagacccgagtcaacgcttggttcaaaattgcctctggaccctcagaaatctgagcgacgcagcaactaaacaggagggcatggagggcttgctcggtactctggttcagcttctgggcagcgatgatataaacgtagtcacttgcgcagctgggattcttagcaatctaacttgcaataattacaaaaataagatgatggtatgccaagtgggaggtattgaagccctcgtacgtacagtcctccgggcaggggatcgtgaggatatcaccgagccagcaatttgcgccctcaggcacctaactagtcgccatcaagaggccgagatggcccagaatgcggtcagactgcattacggtctgccagtggttgtgaagcttctccacccaccttctcattggcctttaatcaaggccaccgtcggacttatcaggaacctcgccctctgcccggctaatcatgctcccctgcgagaacagggggcgatcccccgactggtgcagctgctcgttagagctcaccaggacacccagaggcgaacctccatgggcggtacccagcagcagtttgtggaaggtgttaggatggaggagatagtagaggggtgcaccggcgccctccatatactcgccagagatgtgcataatcgtatcgtgattagagggctgaatacgattccactgtttgtgcagctcttgtattcacccatagagaacatacaaagagtggctgcgggagtgctgtgtgagctcgcccaggataaggaagctgctgaggcaattgaggcagagggagctaccgctcctctgactgagctgctccacagccgtaacgaaggcgtggctacctatgccgccgccgtcctgtttcgcatgtcagaagacaaaccacaagactacaagaaacggctttcagtcgagttgacctcctctctctttaggactgagcccatggcttggaatgaaacagccgatcttggtcttgacattggtgcgcagggggagccgctgggttacagacaagacgaccctagctaccggtcttttcattccggcggatacggacaagacgctttaggtatggatcccatgatggagcatgagatgggggggcaccaccctggtgcggattacccagtggatggactccccgacttgggacacgcccaggaccttatggatggacttcctcccggagactccaaccagctcgcatggttcgacacagacctgtag

SEQ ID NO: 14383 - DNA, 453 bp, synthetic construct
  misc_feature 1..453: note = Description of Artificial Sequence: Synthetic coding sequence
  source 1..453: mol_type = other DNA
atggccacacaggcagacttgatggaactggacatggctatggagccagacagaaaggctgccgtgtcacactggcagcagcagagctatctggactcagggatacacagtggagccactacaaccgctcctagccttagcggaaagggaaaccccgaggaggaagatgtcgatacttctcaggtgttatacgaatgggaacaggggttctcacagtcgtttacccaggaacaagtcgcagatattgatgggcagtatgctatgactagagcgcagagagtgcgggcagccatgttcccagagaccctcgacgaaggtatgcaaattccaagcacccagtttgatgcggcacatcccacaaatgtccaacgattggctgagccaagtcagatgctgaaacatgctgtggtaaacttgatcaattatcaggatgacgcagagctcgcgacttag

SEQ ID NO: 14384 - DNA, 42 bp, synthetic construct
  misc_feature 1..42: note = Description of Artificial Sequence: Synthetic coding sequence
  source 1..42: mol_type = other DNA
atggctacccaggccgacctgatggagctagacatggcgtag

SEQ ID NO: 14385 - DNA, 303 bp, synthetic construct
  misc_feature 1..303: note = Description of Artificial Sequence: Synthetic coding sequence
  source 1..303: mol_type = other DNA
atggccacacaggcagacctgatggagctcgacatggccatggaacccgacaggaaagccgctgtgagtcattggcagcagcagtcttatttggattcgggaatacactctggagcaaccacgactgctccttccctgtcagggaagggcaacccagaggaagaggacgtcgacaccagccaggtactctacgaatgggagcagggattttcacagtcatttactcaagagcaggtggccgacatagacgggcagtacgcgatgaccagagcccagcgagtgcgagcagcgatgtttccctag

SEQ ID NO: 14386 - DNA, 327 bp, synthetic construct
  misc_feature 1..327: note = Description of Artificial Sequence: Synthetic coding sequence
  source 1..327: mol_type = other DNA
atggcgacacaggcagacctcatggagctggatatggctatggagcccgaccgcaaggccgcagtgagccactggcaacagcagagctacctggacagcggtatccatagcggagccaccactaccgctccttccctgagtggaaaagggaaccccgaagaagaggacgtggatactagtcaagtactctacgagtgggaacaaggcttctcacagagttttacgcaggaacaggtggccgatatcgatggacaatatgccatgacccgcgcacagagggtgcgggcggccatgtttcctgaaacacttgacgaagggatgcagtag

SEQ ID NO: 14387 - DNA, 2325 bp, synthetic construct
  misc_feature 1..2325: note = Description of Artificial Sequence: Synthetic coding sequence
  source 1..2325: mol_type = other DNA
atggaattggacatggccatggaaccagatcgcaaagccgccgtttcccattggcagcaacagtcctatctggacagtggcattcacagcggtgccacgacaactgcgccttcgctgtcagggaagggcaatcccgaggaggaagacgtggacacctcccaggtattgtacgaatgggagcagggattctctcagtcttttacacaggaacaagtggcagatatcgacggccaatacgcgatgacacgggcgcaaagggtgcgggccgctatgttcccagagacactcgacgaaggtatgcaaattcccagtacacagttcgatgcagctcacccaacaaacgttcagagactcgccgagccctctcaaatgcttaagcacgcagtggtcaaccttatcaactatcaggacgatgcggagctagcaactcgggcgatcccagaactgaccaagctcttgaacgatgaggaccaagtggttgtcaataaggccgcagtgatggtgcatcaactttcaaaaaaggaagcctctcgccacgccatcatgcgttccccccagatggttagcgccatcgtacgcaccatgcagaacactaatgatgtggagactgcaagatgcaccgccggaaccctccacaacctgtcccaccacagggaggggctgctagccatatttaagtctgggggtattcctgcccttgttaagatgctcggaagtcccgttgactcagttctcttctatgccataactactcttcacaatcttcttctgcatcaagagggagccaaaatggcagtgcgtctcgcaggagggttgcagaagatggtcgccctgttaaacaaaactaacgttaagttcctcgcaatcactaccgattgcctgcagatattagcctacgggaatcaagaaagcaagctaatcattctcgcttcgggcgggcctcaggcactagtcaacatcatgcggacatatacctatgagaagctcctgtggactacgtccagagtactgaaagtgctgagcgtttgctcctctaataaacctgctatcgtggaagctggcggcatgcaagcactcggcctccacttgactgatccttcccagaggcttgtgcagaactgcctttggacactgcgtaatctgtccgatgccgccaccaagcaggaagggatggaagggcttcttggcactttagtgcagttgctcgggagtgacgatatcaacgtggtgacgtgtgctgctgggattctctccaacttgacgtgcaataactacaaaaataagatgatggtttgtcaggttggcggcatcgaggctctcgtgaggaccgtgctccgcgcaggcgacagggaggatatcaccgagcctgctatctgtgcactgcgtcacctcacctccagacatcaggaggcagaaatggcccaaaacgctgtcaggcttcattatggactgcccgtcgttgtgaaactgctccacccacctagtcactggcccctgattaaagccactgtagggctcatccgaaaccttgctctgtgcccagcaaaccacgcgccactgagagagcagggggccattcctagactagtccagttgctggtcagggcacatcaagatactcaaagacggacctctatgggcggcacacagcagcagtttgtggagggcgtaagaatggaggagattgtggaggggtgcacgggcgctttgcacattttggcacgtgacgtgcataacagaattgtgattcggggcctgaacacgatcccccttttcgtgcagctgctttactcgcctatcgaaaacatccagagggtagccgccggcgttctgtgcgaactggcacaggacaaagaggccgctgaggccatagaggcagagggggccaccgctcctttgacagaactcctccactcacgaaacgaaggcgtggcaacctatgccgccgctgtcctgttccgcatgtcagaggacaagccccaggactacaagaagagactcagcgtagaactgacatcctccctgttccgtaccgaacccatggcatggaatgagacggcagatctcggtctggacataggggcccagggcgaaccactggggtatcgacaggatgacccatcttaccgaagcttccatagcgggggctacggtcaggatgcgctcggcatggatccgatgatggagcacgagatggggggccatcatccgggagccgactaccccgttgacgggttacctgatctgggtcacgcccaggacctaatggatggactgccccccggggattccaaccagctcgcctggtttgacacagacctgtag

SEQ ID NO: 14388 - DNA, 1020 bp, synthetic construct
  misc_feature 1..1020: note = Description of Artificial Sequence: Synthetic coding sequence
  source 1..1020: mol_type = other DNA
atgtggcagctgtgggcctccctgtgctgtctgctcgtccttgccaatgctcgcagcagaccaagctttcaccccctctcggacgagctggtcaactacgtaaataagcggaatacaacttggcaggctggccacaacttttacaacgtggacatgagctaccttaagcgactgtgtggcacattccttggaggacctaagccaccccagcgggtgatgttcaccgaagatctcaagctgcccgcctcttttgacgctcgcgaacagtggccccagtgtccaactattaaggagatccgggatcaagggagctgtggcagctgttgggctttcggcgcagtcgaagccatctctgatcgcatctgtattcatactaatgcacatgtgagcgtggaagtgtcagcggaggatctcctgacctgctgcggcagcatgtgtggcgatggttgtaacgggggctacccagccgaggcttggaacttttggacacggaagggtcttgtgtccggaggactgtatgagtcacacgtggggtgccgcccttattcaatacccccatgtgaacaccatgtgaacggcagccgccctccatgtacaggagagggcgacacccctaaatgcagcaagatttgtgagcccggttattccccaacttacaagcaggacaagcactatggatataattcatactccgtgtccaattctgaaaaggacatcatggcagaaatctacaaaaatggtcccgtggagggggcattcagtgtctactccgatttcctgctgtacaagtctggtgtctaccagcatgtgaccggagaaatgatgggcggccacgcaatcaggatcctgggatggggagtggaaaacggcacgccgtattggctggtggcgaactcctggaacacagactggggtgacaatggcttttttaaaatcctgagaggtcaagatcattgcggcatcgaaagcgaagtagtggccggcatccctcgtaccgaccagtactgggagaaaatctag

SEQ ID NO: 14389 - DNA, 1020 bp, synthetic construct
  misc_feature 1..1020: note = Description of Artificial Sequence: Synthetic coding sequence
  source 1..1020: mol_type = other DNA
atgtggcagctatgggcatctttgtgttgtcttctggtgctagccaatgcccgttcgcgacctagtttccatcccctgagcgacgagctggtaaactatgtgaataagagaaacaccacgtggcaggctgggcataatttctacaacgttgacatgtcttatttgaagcggctttgcggtacattcctggggggcccaaagcccccccagcgggtgatgttcactgaagatctgaaactgcccgcttcttttgacgcccgtgagcagtggccgcaatgccccacgatcaaagaaatcagggatcagggttcatgtgggagctgctgggcttttggcgctgtggaggctatttctgaccggatttgcatccatactaatgcccatgtctctgtggaagttagtgcagaggacctacttacgtgctgcggttcaatgtgcggcgatggttgcaatggaggctatcccgcagaagcttggaacttctggacccgcaaagggcttgtgagtggcggcctctacgaatcgcatgtaggatgccgcccatacagcatcccgccttgtgagcaccacgtaaacgggagtcggcccccttgcaccggcgagggtgatacccccaaatgcagtaaaatctgtgaacctggctacagtccaacctacaaacaggacaagcactatggatacaattcttactcagtgtctaactccgagaaggatatcatggccgaaatctataagaatggcccggtggagggggcttttagcgtgtattcggactttctgctctacaagagcggcgtgtaccaacacgtgactggggagatgatgggagggcacgcaattcggattttgggatggggagtggagaacgggaccccctactggcttgtcgccaattcatggaataccgactggggggataatggcttctttaaaatacttcgcggccaggaccactgcgggatcgagtctgaggttgtggcaggtatcccaagaacagaccaatactgggagaagatttag

SEQ ID NO: 14390 - DNA, 333 bp, synthetic construct
  misc_feature 1..333: note = Description of Artificial Sequence: Synthetic coding sequence
  source 1..333: mol_type = other DNA
atgtggcagctgtgggcttcactgtgctgcctactcgttctagctaacgccagaagcaggcccagctttcaccctttaagcgacgagcttgtcaactacgtgaataaaaggaacaccacctggcaggccggccataacttctataatgtggatatgtcctaccttaaaaggctgtgtggtacttttctcggtggacccaaacccccccagcgcgtcatgttcacagaggacctgaaactaccggcaagttttgacgctagagagcagtggccacagtgtcctacaattaaagagatccgagatcagggatcctgcgggagctgttggctctag

SEQ ID NO: 14391 - DNA, 1020 bp, synthetic construct
  misc_feature 1..1020: note = Description of Artificial Sequence: Synthetic coding sequence
  source 1..1020: mol_type = other DNA
atgtggcagctgtgggccagtctgtgctgccttctggtgcttgcgaatgctagatcccgcccatcatttcaccctctttctgatgagctcgtcaattacgtcaacaagagaaacacaacatggcaggcaggacacaacttctataatgtggatatgtcatatctcaagcgcctctgcggcacgtttttaggaggaccaaagcctccgcaacgcgtcatgtttactgaagacctcaagctcccggcttctttcgacgcacgcgagcagtggccacagtgtcctacaattaaagaaatccgcgatcaaggctcctgtgggagctgctgggccttcggcgcagtcgaagctattagcgacaggatctgcatccatacaaacgcacacgtgtcagtggaagtctctgccgaggatttgctgacatgctgtggctcaatgtgcggagatggctgtaatggagggtacccagctgaggcctggaacttttggacccgaaaaggcctagtaagtggcggactatatgaaagccatgtgggttgcagaccttattctatccctccctgtgagcatcatgttaatggaagtcggccgccttgcacgggagagggtgatactcccaagtgttccaaaatttgtgaacctggctactccccaacttataaacaggataagcattatggctacaacagttacagcgtttctaactctgaaaaagatattatggccgaaatttataagaatggacctgtggaaggcgctttttctgtgtactccgattttctgctctacaaaagcggagtgtaccagcacgtcaccggagagatgatgggcggacacgctatcagaattttgggctggggagtagaaaacggtacgccttactggctggtcgcgaacagttggaatacagactggggggataatggcttctttaagatcctgagaggtcaagatcattgcgggattgagtctgaagtcgtcgccggaataccgcgaaccgaccagtattgggagaagatctag

SEQ ID NO: 14392 - DNA, 1020 bp, synthetic construct
  misc_feature 1..1020: note = Description of Artificial Sequence: Synthetic coding sequence
  source 1..1020: mol_type = other DNA
atgtggcagctttgggcctccttgtgctgcctcctggtcctggcaaatgctcgctcccgtccgagttttcacccgctgtccgatgagctggttaattatgttaacaagagaaatacaacttggcaggctggccataacttctacaatgtagacatgagctatttgaaacggctttgtgggacatttctgggaggccccaagcccccacaaagggtcatgttcactgaggatctcaaattaccagctagcttcgatgcaagagagcaatggcctcagtgccctactatcaaagagattagggatcaagggtcatgcggctcatgctgggccttcggcgctgtggaagctatctctgatagaatctgcattcacactaacgcccacgtctctgtcgaagtgagtgccgaggacctgctcacttgttgtggaagcatgtgtggagatggttgcaatggggggtaccctgctgaggcgtggaatttctggactcgcaagggtttggtatctgggggcctttatgagtctcacgtcggttgtcgaccctattccatccctccctgcgaacaccatgtgaacggatcacgtcctccctgcactggcgaaggcgatacacctaagtgcagcaagatttgcgaaccggggtattcacctacttataaacaagataaacattatggttataacagttatagcgtgtcaaattctgagaaggacatcatggcagagatctacaaaaatggacccgtggaaggcgcctttagtgtgtactctgatttcttactgtataaaagtggcgtgtaccagcatgtcaccggcgaaatgatgggagggcacgcaattagaatcctgggctggggcgttgaaaacggtaccccgtactggttagtcgcaaactcctggaatactgattggggcgacaatggtttctttaaaatccttcggggacaagaccattgtgggatcgagtccgaagtcgtcgcaggtattccccggactgatcaatactgggagaaaatctag

SEQ ID NO: 14393 - DNA, 1020 bp, synthetic construct
  misc_feature 1..1020: note = Description of Artificial Sequence: Synthetic coding sequence
  source 1..1020: mol_type = other DNA
atgtggcaactctgggcctccctgtgttgcctgctggtcctcgccaacgccaggtctaggcccagctttcaccccctcagcgacgaactcgtaaactacgttaataaaaggaatactacctggcaggctgggcataacttctataatgtggatatgtcatatctgaaacggctctgtggtacctttctggggggcccaaaaccaccacaacgcgtgatgtttaccgaggacctgaaattaccggcctcttttgatgcccgggagcagtggccacagtgcccgactatcaaagaaatccgggatcaaggatcatgcggctcatgctgggccttcggggccgtcgaagctatctctgaccggatctgtatccacactaacgctcatgtgagcgtcgaagtgagcgccgaggatctactaacctgctgtgggagtatgtgcggggatgggtgcaatggaggttatccagcggaagcttggaatttctggacccgaaagggtctggtcagtggcggactgtacgagtctcatgtgggatgccgcccatacagcattcctccatgtgagcatcacgtaaacggtagccgcccaccctgcactggagagggagacactccaaaatgcagcaagatctgcgagcctggctacagccctacctataaacaggacaagcattatgggtataactcatattcagtcagtaactcagagaaagatataatggctgagatttacaagaacggaccggtggagggggccttctctgtgtactctgacttcctcctgtacaaatctggggtttatcaacatgtcacgggggaaatgatgggaggccatgcaatcaggattctcggatggggcgtggaaaacggcactccctactggctagtcgctaatagctggaatacagactggggagacaacgggttctttaaaatcctgagggggcaagatcactgcgggattgaatccgaagtagtcgccggaataccacggaccgatcagtattgggagaaaatctag

SEQ ID NO: 14394 - DNA, 1020 bp, synthetic construct
  misc_feature 1..1020: note = Description of Artificial Sequence: Synthetic coding sequence
  source 1..1020: mol_type = other DNA
atgtggcaactctgggcatctctttgttgtctgcttgtactagctaatgctcggagtcggcccagctttcaccccttatcagacgagttagtcaattatgttaataagagaaatacaacctggcaggctggccacaatttctacaacgtcgatatgtcatatctaaagcgcttgtgcgggacattcctaggaggccctaaaccccctcagcgggtgatgtttacggaggatctcaagctgcccgccagtttcgatgcccgtgagcagtggccacagtgccctacgataaaggagataagagatcagggatcctgtggaagttgttgggcatttggggctgtggaagccatctcggatagaatatgcatccacaccaacgcccacgtttctgtggaggtctcggccgaagaccttctgacttgctgcggctcaatgtgtggcgacggatgtaacggtgggtaccccgccgaggcttggaacttttggactagaaagggacttgtctccggcggcttgtacgaaagccacgtgggctgccggccttactctattcctccttgcgagcatcatgtaaatggctcccgccccccctgtactggcgagggggacacaccaaagtgctctaaaatctgcgagcccggttacagccccacatacaaacaggataaacattatggatacaacagctactccgtctccaacagcgagaaggacatcatggccgagatctacaagaatgggccggtggaaggcgcattctccgtgtatagcgatttccttttgtataagtcaggtgtgtatcagcacgtaaccggagagatgatgggaggtcatgcaataaggatcctcggctggggcgtcgaaaacggcactccctattggcttgtcgccaatagctggaatactgattggggagacaatggatttttcaaaattctccgcgggcaggaccactgcggaatcgagagtgaggtggtggcgggaattcctcgaaccgatcagtactgggagaagatttag

SEQ ID NO: 14395 - DNA, 1020 bp, synthetic construct
  misc_feature 1..1020: note = Description of Artificial Sequence: Synthetic coding sequence
  source 1..1020: mol_type = other DNA
atgtggcaactgtgggcatcactctgttgccttctggtactcgccaatgcacgctccagacctagctttcacccgctgtcagatgagctggtgaattatgtaaacaagagaaatacaacatggcaggctgggcataacttctataacgtggatatgtcctaccttaagcggttgtgtggaacctttttgggcgggcccaaaccacctcagcgtgttatgttcaccgaggatctaaagctgcccgcatcattcgatgctagggagcaatggcctcagtgcccgacaattaaggaaatcagagatcaaggctcgtgcggatcctgctgggcattcggcgccgtggaggctattagcgaccggatctgtattcacacaaatgctcacgtctccgttgaggttagcgccgaggacttgttaacttgttgcgggtcgatgtgcggagatggatgtaacgggggttaccccgcggaggcctggaacttctggacccggaagggccttgtgtcagggggattgtacgaaagccatgtgggatgccggccctattccatccctccctgcgagcaccatgtgaatggcagccggcccccatgcacaggcgaaggtgacaccccaaaatgttccaagatctgtgagcctgggtatagtcctacatacaagcaggacaagcactacggctataatagctacagtgttagcaacagcgaaaaggacattatggccgaaatctataagaacgggcctgtggaaggggcattttccgtttattccgattttttactctacaagagcggagtgtaccagcatgtgaccggcgaaatgatggggggccatgcaataaggatcttaggatggggcgtggagaacgggaccccctattggcttgttgctaacagctggaacacagactggggggacaatggcttctttaaaatcctcaggggacaggatcattgtggaatcgagtcagaggtcgtggcaggaattcctcgaactgatcagtactgggagaagatttag

SEQ ID NO: 14396 - DNA, 1020 bp, synthetic construct
  misc_feature 1..1020: note = Description of Artificial Sequence: Synthetic coding sequence
  source 1..1020: mol_type = other DNA
atgtggcagctttgggctagtctttgctgtctgctcgttctggctaacgctagatccaggccttcctttcatcccctctctgatgagttggtgaattacgtaaataaaagaaacactacatggcaggcaggacataacttctataacgtggatatgagttacctgaaacgactgtgcggcacgttcctcggcgggccaaaacccccacaaagagtaatgttcactgaggatcttaaactgcccgcgtccttcgacgctagggagcaatggccccagtgcccaaccatcaaggaaatccgtgatcagggctcatgcggtagctgctgggccttcggcgccgtcgaggccatttccgacagaatttgtattcacacgaacgctcacgtgagcgtggaagtatccgctgaggatttgctgacttgttgtggttccatgtgcggagacggctgtaacggaggttacccagcagaggcttggaacttctggacaaggaagggcctagtctcaggaggattgtacgagagccatgtaggatgcaggccctacagcatacccccttgcgaacaccatgttaacgggtccagacctccctgtacgggggagggagatacaccgaagtgctcaaaaatttgcgagccggggtactcccccacctacaaacaggacaaacactacggctacaacagttactctgtgagcaattccgagaaagatatcatggctgaaatatataagaacggcccggtagagggtgccttcagtgtgtatagcgacttcctgctgtacaagagtggtgtttaccagcacgtcaccggagagatgatggggggtcatgccattagaatccttggttggggagtggaaaatgggacaccttattggctcgttgcaaactcgtggaacaccgattggggtgacaatggattcttcaaaattctaaggggccaggaccactgtggcatcgagtctgaagtcgtcgccggcatcccacggaccgaccaatattgggaaaagatttag

SEQ ID NO: 14397 - DNA, 831 bp, synthetic construct
  misc_feature 1..831: note = Description of Artificial Sequence: Synthetic coding sequence
  source 1..831: mol_type = other DNA
atggacatgaataggcgagctagctgcctactcccagatctgtgtggtcagggatggggctggcgcctgttcccagcctcttgcgcctatttgggcagtgtgccctggagagtttggggcctgggtggcctgctagccccgctggccgccgcaggaggcggctctacatctgggcttggtcatctggggtccacacagtggtcaggcgagctggtggtgcttctgagtgaagtttttatccggggatgtctgttcagctgtaacggagggtacccagcagaggcctggaacttttggacgcggaaggggctggtgtctggagggctttacgagtcccacgtgggttgtaggccatactccataccaccatgcgagcaccacgtaaatggtagtaggcctccatgcaccggtgagggcgataccccgaaatgctctaagatctgcgaaccaggatatagccccacatacaagcaggacaagcattatgggtacaatagttattccgtaagcaacagtgagaaagacatcatggcagagatttataaaaacggacccgtggaaggtgcatttagcgtttacagtgatttcctcctgtataaaagtggcgtgtaccaacatgtgactggcgagatgatgggtggtcatgctattcgcattctgggatggggcgttgagaatggtacaccttattggcttgtggcgaactcctggaacacagactggggcgataacgggttctttaaaatacttcgcggtcaagaccattgcgggatagagagtgaggtggttgccgggatccccaggacagatcagtattgggagaagatctag

SEQ ID NO: 14398 - DNA, 738 bp, synthetic construct
  misc_feature 1..738: note = Description of Artificial Sequence: Synthetic coding sequence
  source 1..738: mol_type = other DNA
atgcccggcgcaggccccttgtctatcccgtgtagaatgagctgggcatttggcgcagtggaagcaattagcgatcgcatctgtatccataccaatgcacatgtctcagtagaggtctctgccgaggatcttcttacatgttgtggcagcatgtgtggcgacgggtgcaacggagggtacccagcagaggcttggaatttctggacccgaaaggggttggtaagtggcggtctatatgaatcccacgttggctgtcgaccgtatagcattccaccgtgcgaacaccacgtgaacggttcccgcccaccctgcaccggagaaggagatacgcctaaatgtagtaagatatgcgagcccgggtactcccccacgtataagcaggataaacactatgggtacaattcatattcagtgtctaactccgagaaggacatcatggccgagatttacaagaacgggcccgtggagggagccttcagtgtgtactctgacttcctgctttataagtccggcgtgtaccaacatgtgaccggggagatgatgggcggtcatgcaattcggattctcggctggggcgtcgagaacggaacaccttactggctcgtcgccaattcctggaataccgattggggcgacaatggtttcttcaagatccttcgggggcaggaccactgcgggatcgagtcggaagtggtcgccgggattccacgaacagaccagtattgggagaagatctag

SEQ ID NO: 14399 - DNA, 1239 bp, synthetic construct
  misc_feature 1..1239: note = Description of Artificial Sequence: Synthetic coding sequence
  source 1..1239: mol_type = other DNA
atgcagccatctagtctgctccctctagcattatgcctcctggcagcacctgcctcagctcttgtgcgcattccgctgcacaagttcacaagcatcagacgaactatgtcagaagtggggggatcagtagaagacctgatcgcgaaggggccagtttccaagtattctcaggccgtgccagccgtcactgaaggacccatccctgaggtcttaaaaaactatatggacgcacagtactacggcgagatcggaatcgggactcctccacagtgcttcacagtggtctttgataccggatcttcaaacctttgggtccctagcatccattgcaagctgttagacattgcttgttggattcaccataaatataactccgataagagcagtacttacgtgaagaacggtactagcttcgatatacactatggcagcggatctctatccggatatctcagccaggacaccgtatctgtgccctgtcagtcagctagctccgccagcgccctgggaggcgtgaaagtcgagaggcaggtgtttggcgaagctaccaaacaaccaggcatcactttcattgcagccaaattcgacggcatacttgggatggcttatcccagaatctcagtcaacaatgttctccccgtcttcgataatctgatgcagcaaaagctcgtggaccaaaatatcttctcattttacttaagtagagatcctgacgcccagcctggcggagagctgatgctgggggggaccgacagcaagtattacaagggctccctgtcctacctgaacgttacacggaaggcttattggcaggtgcacttggatcaagttgaggtggctagtggtctgactctttgtaaggagggatgcgaggccattgtcgacaccggcacaagtcttatggtgggtcccgtagatgaagttcgggagttgcagaaggcgatcggtgcggtgccacttatccagggtgagtacatgattccttgtgagaaggtctctacactgcccgccatcacactcaaactgggaggcaaaggctataaactgtcacctgaagactataccctgaaggtctcacaggctgggaaaactttgtgtctgtcagggttcatgggcatggatatccccccccccagcggcccactgtggatcctaggggacgtgttcatcgggcgatattacacagtgtttgacagagataacaatcgagtgggctttgcagaagccgcccgattatag

SEQ ID NO: 14400 - DNA, 1002 bp, synthetic construct
  misc_feature 1..1002: note = Description of Artificial Sequence: Synthetic coding sequence
  source 1..1002: mol_type = other DNA
atgaacccaactctgattctggccgctttttgtctgggcatcgcttcggcaactttaacctttgaccatagtttggaagctcagtggacaaagtggaaggccatgcataacaggctgtatggaatgaacgaagagggatggcggcgtgccgtttgggagaaaaatatgaagatgatagaactgcacaatcaggaatatagagagggtaaacactctttcaccatggcaatgaacgctttcggggatatgacctccgaagaattccgacaggtgatgaacggttttcagaatcggaaaccaagaaaaggcaaggtctttcaggaacctctgttctacgaggccccccgaagtgtggattggcgagagaagggctacgtcaccccagttaaaaaccaaggtcagtgtggcagctgttgggcctttagcgcgacaggagcccttgaaggccagatgtttaggaaaaccgggagactaatctctctgtccgagcagaacttggttgattgttctgggccccagggaaacgagggatgtaacggcgggttaatggactatgcattccagtatgtgcaagacaacggcggcctggactctgaagagtcatatccatatgaggctacagaagaaagttgtaaatacaaccccaaatactctgtggctaacgataccggctttgtcgacatccctaagcaagagaaggcgctgatgaaggcggtagctacagttgggccaattagtgtcgccatcgacgccgggcatgagagcttcttattctacaaagaggggatttattttgaacccgactgttctagcgaggatatggaccacggggtgttggtcgtcggatacgggttcgaatccacggaatctgacaataataaatactggctggtcaagaatagttggggcgaagagtggggtatggggggttatgtcaaaatggcaaaagaccggagaaatcattgcggaattgccagtgcggcttcttaccccacggtttag

SEQ ID NO: 14401 - DNA, 678 bp, synthetic construct
  misc_feature 1..678: note = Description of Artificial Sequence: Synthetic coding sequence
  source 1..678: mol_type = other DNA
atgaacccgacactgatattggccgctttctgtctgggtatcgcctccgccaccctgaccttcgatcacagcctagaggcacagtggacaaagtggaaggctatgcataaccgcctatatggcatgaatgaagaggggtggaggagggccgtgtgggagaaaaatatgaagatgatcgaattgcacaaccaggagtatcgagagggtaaacatagtttcacaatggcgatgaacgcctttggtgacatgacaagtgaggagttcaggcaggtgatgaacggcttccagaatcgcaaaccaagaaaaggcaaggtatttcaggagccactgttctatgaagcccctaggtcggttgactggcgcgagaagggttacgttactcctgtcaaaaaccagggtcagtgcggcagctgctgggcctttagcgcgacaggggcgctggaaggccagatgttcaggaagaccggtcgcctgattagtttgtccgagcaaaacctcgtcgactgcagtggaccccagggcaatgagggctgtaacggaggcctcatggactatgctttccagtatgtccaggataacggaggactggattcagaggagagctacccctacgaggccacagtttctggcgccccatgccatcatagttcgtccgcctttggccgttggaccctgtag

SEQ ID NO: 14402 - DNA, 1002 bp, synthetic construct
  misc_feature 1..1002: note = Description of Artificial Sequence: Synthetic coding sequence
  source 1..1002: mol_type = other DNA
atgaaccctaccctcattttggccgccttctgcctgggcatcgcctccgctacactcacttttgaccatagtctggaggcacagtggaccaagtggaaggcgatgcacaataggttatatggcatgaacgaggaaggatggagacgggccgtatgggagaaaaatatgaagatgatagagctccacaaccaggagtaccgagaaggcaagcattcattcaccatggctatgaatgcttttggggacatgacatctgaggaattcagacaggtaatgaatggcttccagaaccgtaaaccgaggaaaggcaaggtatttcaagagcccctgttctatgaggccccaagatccgtggactggagagagaagggttatgttacaccggtcaaaaaccaagggcagtgcggaagttgctgggccttttcggctaccggtgccctggagggccagatgttccggaaaacggggcggctgatctcactctcagagcagaatctcgtggactgctcaggcccacagggcaacgagggatgcaacggcgggctaatggattacgctttccaatacgttcaagataacggaggtttggattctgaagaatcttatccatatgaggcaacggaggaaagctgtaaatataaccccaaatacagtgtcgccaacgacacaggtttcgtcgatatcccaaaacaggaaaaggccctcatgaaggccgtggcgaccgtcggaccgatcagcgtggcaatcgacgcaggacacgagtccttcctgttctacaaggagggaatctacttcgaaccagattgtagctcagaagatatggaccatggtgttctggtggtaggttacgggtttgagtctaccgaatcggacaacaataagtactggctcgtgaagaattcctggggagaggaatggggcatggggggctacgtaaagatggctaaggaccgacggaaccattgtggaattgcgagcgcagcttcttaccctacagtctag

SEQ ID NO: 14403 - DNA, 120 bp, synthetic construct
  misc_feature 1..120: note = Description of Artificial Sequence: Synthetic coding sequence
  source 1..120: mol_type = other DNA
atgaatccaaccttaatcctggctgccttctgtcttggaatcgcctcagctactctgacctttgatcactcccttgaagcccagtggacaaaatggaaagccatgcacaataggctgtag

SEQ ID NO: 14404 - DNA, 444 bp, synthetic construct
  misc_feature 1..444: note = Description of Artificial Sequence: Synthetic coding sequence
  source 1..444: mol_type = other DNA
atggctgatgaactttctgagaagcaggtttatgacgctcacaccaaggaaattgatctcgtgaatcgcgaccccaagcacctcaatgacgacgttgttaaaatcgactttgaggatgtgatagccgaaccagagggcacccacagtttcgatggcatatggaaagcttcgtttaccacatttaccgtaaccaaatactggttctatcgattactgtccgcactgtttggaattccgatggcattaatctgggggatatattttgccattctcagctttcttcacatatgggctgtcgtcccttgcatcaagagtttccttatagagatccagtgcatttcccgtgtgtactcaatttacgtccatactgtgtgtgaccccctgttcgaggccgtggggaaaatcttctccaacgtcagaatcaatctgcagaaggaaatttag

SEQ ID NO: 14405 - DNA, 444 bp, synthetic construct
  misc_feature 1..444: note = Description of Artificial Sequence: Synthetic coding sequence
  source 1..444: mol_type = other DNA
atggcggacgaactctccgaaaagcaggtttacgatgcccacaccaaggagattgacctagtcaatcgcgatcctaaacatcttaacgatgacgtcgtcaaaatcgacttcgaggatgttattgccgagccagagggaacacacagcttcgacggcatatggaaggcaagtttcacaactttcacagtcactaagtactggttctatagactgctgtcagccctgtttggcatcccaatggcccttatttggggcatttatttcgcaatcctgagctttcttcacatctgggccgtcgtgccatgtatcaagtctttcttaatcgagatacagtgtatctcccgcgtgtattctatctacgttcatacggtgtgcgatcccctcttcgaggcagtcggcaaaattttttcaaacgtaaggattaatctgcagaaagagatctag

SEQ ID NO: 14406 - DNA, 537 bp, synthetic construct
  misc_feature 1..537: note = Description of Artificial Sequence: Synthetic coding sequence
  source 1..537: mol_type = other DNA
atgtctgggggaaagtatgtcgacagtgagggtcacctttataccgtgcccattcgagagcagggcaacatctacaaacccaacaacaaggcgatggctgacgagttgagcgagaaacaggtgtacgacgcccacacaaaggagatagaccttgtgaatagggatcccaagcatcttaatgatgatgtcgtaaagatcgactttgaagatgtcatcgccgaaccagaaggcacacattctttcgatgggatttggaaggcaagtttcaccacattcacagtcaccaaatattggttttacaggctgctgagtgccctgttcggcatccctatggccctgatctggggcatctattttgccattctgtcctttctgcatatctgggctgtagttccttgcattaagtctttcctcatcgaaattcagtgcatcagtcgcgtgtactcaatatatgtccatactgtatgtgatcctctcttcgaggctgtgggtaagattttcagcaacgtaaggattaatctgcagaaagagatatag

SEQ ID NO: 14407 - DNA, 345 bp, synthetic construct
  misc_feature 1..345: note = Description of Artificial Sequence: Synthetic coding sequence
  source 1..345: mol_type = other DNA
atggccggtgggaaagccggtaaggactctggcaaggcaaaggccaaagccgtatccaggtcacaacgggccggactccaatttcctgtgggaagaattcaccgccatctcaagactagaacaacatcacacggacgggtcggtgccactgccgctgtttatagtgccgcaattcttgagtacctgaccgctgaagttctggagctagcagggaatgcatctaaggatttgaaagtcaagcggattacccccagacatcttcagctggccatccgcggagacgaagagctggactctctgattaaggctaccattgctggcggcgagaagagacgttgtagctag

SEQ ID NO: 14408 - DNA, 339 bp, synthetic construct
  misc_feature 1..339: note = Description of Artificial Sequence: Synthetic coding sequence
  source 1..339: mol_type = other DNA
atgggcctcgaaaccgagaaagctgacgtgcaactgttcatggacgacgattcttacagtcaccactctgggctggagtacgccgaccccgaaaaatttgcggactcggaccaagatagagacccgcaccgcctgaattctcatctcaaagattttaatgcattttgcaaagatctccctaatggcagtgcattttctgccgataacatggaagaatgcgatcggtgctatcactgcagcattgtgtatgagagacggaccatgttgctcttttgtcagcctgccacagaacctggacttaacacctggacgcctggactagaaattggcattctttag

SEQ ID NO: 14409 - DNA, 342 bp, synthetic construct
  misc_feature 1..342: note = Description of Artificial Sequence: Synthetic coding sequence
  source 1..342: mol_type = other DNA
atgggtttagagacagaaaaagccgatgtgcaattgttcatggatgacgattcctattctcatcactcgggcctcgagtacgcagatccagagaaattcgcggactccgaccaagaccgagacccacaccgactgaatagccacttgaagctgggatttgaagatgtgatcgctgagccagtgacaactcatagctttgacaaagtgtggatctgctctcatgctctgtttgaaatctccaagtatgttatgtacaaattcttaactgtctttctggcaatccctctggccttcatcgcaggcattttgtttgccacactgtcttgtttacacatctggtag

SEQ ID NO: 14410 - DNA, 1038 bp, synthetic construct
  misc_feature 1..1038: note = Description of Artificial Sequence: Synthetic coding sequence
  source 1..1038: mol_type = other DNA
atgcaacggctcgtcgcctgggatcctgcctgcttgcccttacccccccccccgcctgctttcaagtcaatggaggtagccaatttctactacgaggccgattgtctcgccgctgcttacggagggaaggccgcccctgctgcaccccctgccgcccgtcctgggccgagacctcctgccggagagctggggtctatcggagatcatgaaagagctatcgattttagtccttacctggagcccctcggagccccccaggcaccggcacctgccactgccactgatacttttgaagcggcacctcccgcaccggcccccgcacccgcctccagcggccagcatcatgactttttaagtgatctgttttcagatgactacggcggaaagaattgcaaaaaaccagctgaatatggatacgtgagcctggggcggctaggggccgcgaaaggcgcgctccatcccggctgtttcgctccactgcacccgcctcctcctcccccacccccacctgcggagctgaaggccgagcctggcttcgaacccgccgattgtaagagaaaggaagaggcaggagcgcctggagggggggccgggatggcagcgggattcccttacgccctgcgcgcttatctcggataccaggcagtgccaagcggttcgtccgggtcactgtcaacgagctctagctccagtccaccgggaacacctagccctgctgatgcgaaggcaccacccaccgcctgttacgctggcgctgcaccggccccttcacaagtgaagtcaaaagccaagaaaactgtagacaagcacagtgatgaatacaagatccgcagggaacggaacaacatcgcggtgcggaaatcacgagacaaggccaaaatgagaaatttggagacccagcacaaggtgcttgaactcactgccgagaatgagaggcttcagaagaaggtcgagcaactgagtcgggaacttagcactttaaggaatctattcaagcagctccccgaacccttgctcgcatcgtcagggcactgttag

SEQ ID NO: 14411 - DNA, 2184 bp, synthetic construct
  misc_feature 1..2184: note = Description of Artificial Sequence: Synthetic coding sequence
  source 1..2184: mol_type = other DNA
atggaaggcgatgcggtagaagcaatagttgaggagagtgaaacgtttataaagggcaaggagaggaagacgtaccagaggcgtcgcgaggggggacaggaggaagatgcttgccacctgccccagaaccagaccgacggtggcgaagttgttcaggatgtcaattctagcgtgcagatggtaatgatggagcaattagatccaaccctgctccagatgaagaccgaagtcatggaaggtacagttgcaccggaagccgaggccgcagtcgacgatacccaaattataacactgcaggtggtgaacatggaagagcagcctattaacatcggagaactgcaactggtccaagtgcctgtgcccgtgacagttcccgtggctaccacttctgtggaagagttacagggggcatatgagaatgaagtctccaaggagggcctggcagaatctgagcctatgatctgccatacactgccgctccctgaggggttccaggtggtgaaagtcggcgccaatggagaggtcgagaccctcgaacagggagagcttcctccgcaggaggacccatcttggcaaaaggacccagactaccagcccccagcgaagaagaccaagaagacaaagaaaagcaagcttagatacaccgaggaaggaaaggatgtggatgtatccgtctatgacttcgaggaggaacagcaggagggcttactgtctgaggtgaatgcggaaaaagttgtggggaatatgaaaccgcctaaacccacaaagattaaaaaaaagggagttaagaaaacatttcagtgcgagctatgctcttacacctgccccagacgatccaacctggataggcatatgaagtcacataccgacgagcggccccacaagtgtcatctgtgcggtcgagcattccggaccgtcaccttactgcgcaatcatcttaacacgcatactgggactcgacctcacaagtgtcccgactgtgacatggccttcgtcacatctggcgagctggttaggcacaggaggtataagcacacgcatgagaagccattcaagtgcagtatgtgcgattacgcctctgtggaagtgagtaagctgaagcgccacatccgttcccacacaggggagaggcccttccagtgctccctgtgtagctatgcaagcagagacacatacaaactcaagcggcatatgcgcacacattcaggagagaagccatacgaatgctatatttgccatgctaggtttacccagtccgggactatgaaaatgcacattctacagaagcataccgagaacgtggctaagttccactgcccacactgtgacacagtcatcgccaggaaatcagaccttggtgtgcatctgcggaagcaacattcttacatcgagcaaggtaagaagtgccgttattgtgatgcagtgttccacgagcgttacgccctcatccaacaccaaaaatcccacaagaatgaaaaacggttcaagtgtgaccagtgcgattacgcatgtaggcaggaaagacatatgatcatgcacaaacggacacacaccggcgaaaagccatatgcttgttctcactgcgacaagacctttcggcagaagcaactgttagatatgcatttcaagcgttatcacgatcctaactttgtgccagccgcatttgtttgtagtaaatgtggcaagacctttacgagacggaacacaatggcacgccacgctgacaactgcgccggacctgatggggtcgaaggtgaaaacggcggggagaccaagaaaagcaagaggggtcggaagagaaagatgaggtcaaagaaggaggatagcagtgactctgagaatgccgagcctgatctcgatgataacgaggatgaggaagagccagccgtggaaatagagcccgaacccgagccacaacccgtcactccagccccgccaccagctaaaaagagaaggggaagaccaccaggtaggactaatcagccaaaacagaaccagcccacggctatcatacaagtggaggaccagaataccggagccatcgagaatatcatagtggaggtcaaaaaggagccagatgccgagcctgcagaaggcgaggaagaagaggcacagcccgctgctacagacgcaccgaacggcgacctcacacccgaaatgatcttaagcatgatggaccgctag

SEQ ID NO: 14412 - DNA, 1200 bp, synthetic construct
  misc_feature 1..1200: note = Description of Artificial Sequence: Synthetic coding sequence
  source 1..1200: mol_type = other DNA
atggccttcgtcacctcaggggaactcgttaggcatagacggtacaagcacactcatgagaaaccattcaaatgttccatgtgtgattatgcatccgtcgaggtttctaaactcaaaaggcatatcagatcccacactggagaaaggccatttcagtgctctctgtgttcttacgcttccagagacacctacaaactcaaacgtcacatgaggactcatagtggggaaaaaccctatgaatgttatatctgccatgcacgctttactcagagcggtacaatgaagatgcacatcctccagaaacacacagaaaacgtcgccaaatttcattgcccacactgcgacactgttattgcaaggaaatctgatttgggtgtccatctgcggaagcagcatagctatatagagcaggggaagaagtgcagatattgtgacgcggtctttcacgagcgatatgcgctcattcagcatcagaagagtcacaaaaacgagaaacgctttaagtgtgatcagtgtgactacgcctgcaggcaggaaaggcatatgatcatgcacaaaaggacacacacaggcgaaaaaccatacgcttgctcccactgtgacaagacctttaggcagaaacagctgctggatatgcatttcaaacgatatcatgaccctaactttgtgcctgcagccttcgtgtgctctaaatgcggtaagacatttacccgaaggaacaccatggctcgtcatgctgacaactgtgcagggcccgacggggttgaaggcgagaacggaggtgaaacgaagaagtcaaagaggggcagaaaaaggaagatgcgctccaaaaaagaagatagcagcgactccgagaacgcagaaccggacctggacgacaacgaggacgaggaggaacctgccgtggagattgaaccagaaccggagcctcagccagtgacgccagcccctccaccagcaaagaagcggcggggccgtccccctgggcgcactaaccaacctaaacagaaccagcctactgcaatcatacaagtcgaagaccagaatacaggcgcaattgagaacatcattgtcgaggttaaaaaagagcctgatgccgagcctgcggaaggcgaagaagaggaagcgcagccagcagcaaccgacgccccgaacggtgatctcactcccgaaatgatcctcagcatgatggataggtag

SEQ ID NO: 14413 - DNA, 1128 bp, synthetic construct
  misc_feature 1..1128: note = Description of Artificial Sequence: Synthetic coding sequence
  source 1..1128: mol_type = other DNA
atggagcgcgcttcttgccttttgctgttgctgctgcctctcgtgcacgtcagcgcaaccacaccagagccctgcgaacttgatgacgaagattttaggtgcgtgtgcaacttttcggagcctcagccggattggagcgaggcctttcaatgcgtcagcgccgtagaagtcgagatacacgctggaggcctgaacctggaaccatttcttaagcgtgtagacgccgacgcagatccccggcagtacgccgacacagtgaaagctttaagagtgagacgtttgactgttggagccgcccaagtccctgctcagctgctggttggcgctcttagagttctcgcatattctcgcctgaaggaactgacattggaagatctcaagatcaccggcactatgccacctctgcccctagaggctactggacttgctttgtcctctcttcgactgcgaaacgtgtcttgggccaccgggagatcatggcttgctgagctgcagcagtggctgaaacctgggctcaaggtgctctcaattgcgcaagcacacagccccgccttctcttgtgaacaggtgagggccttccccgcactgaccagcctggacctgagtgacaacccgggactcggcgaacgaggattaatggctgccttatgtccccacaaatttccggctatacagaaccttgcactcagaaacactgggatggaaacccctacaggggtgtgcgccgctttggccgctgcaggagtccagccccactctttggaccttagtcataattccttacgggctacggttaatccttcagctccccgatgcatgtggtcttcagctctgaatagtttgaacttgtcttttgcaggcctcgagcaggtccccaaagggctcccggcaaagctacgtgtgctcgatctttcctgcaacagactcaatagagctccgcagcctgacgagctccctgaagtcgataatctcaccttggatggcaatccgttcttagtgcccggaactgctctgccacatgagggtagcatgaattccggggtggtccccgcctgtgcaaggtcgacactgtccgttggcgtttccggcacgctggttctgctccagggcgctcggggatttgcctag

SEQ ID NO: 14414 - DNA, 1128 bp, synthetic construct
  misc_feature 1..1128: note = Description of Artificial Sequence: Synthetic coding sequence
  source 1..1128: mol_type = other DNA
atggaacgagcaagttgcctcctactgctccttctcccattggtgcatgtgagtgctactacacccgagccctgcgaactagacgacgaggattttaggtgcgtgtgcaatttcagtgaacctcaaccagactggtccgaggctttccaatgtgtctccgccgtagaggtggagatccatgcgggcgggctgaatcttgaaccattcctgaaacgggttgacgccgacgccgatcctcggcagtatgccgatactgtgaaggctctgagggtgagaaggctgacagtgggcgctgcacaggtccccgcccagctgctggtgggcgcactgagggtacttgcctactcacggctgaaagaacttacgcttgaggatctgaaaatcacaggaaccatgcctccactccctctggaggccaccggtctggccctgtccagcttgcgacttaggaatgtgtcttgggcaactggtaggtcctggctcgccgagctgcagcagtggctgaaacctgggttaaaagttttaagcatcgctcaggcgcattctcccgcattttcatgcgagcaagtgagggccttccctgctctgaccagtctggatctctctgacaatcctggactgggcgagcgagggctcatggccgctctttgccctcataagttccccgcaattcaaaatctcgctttaagaaacacaggtatggaaacacccacgggagtgtgcgccgcccttgcggccgcaggggttcagccacatagtctggacctctcacataattcattacgcgccacagtcaatcctagcgcccccagatgcatgtggtcctcagcgctcaacagcctgaatctgagtttcgcgggactggagcaggtgcccaagggcctgccggctaagctgcgggtgttggacctgtcttgcaaccgactgaaccgcgccccacaacctgacgagctaccagaagttgataatctgactctggatggtaacccttttctcgtcccggggacggccctgccccacgaggggtcaatgaacagcggtgtggttccggcgtgcgcacggtcaactctgtctgtgggcgtcagtggaactctcgtacttctgcagggtgcccgagggtttgcctag

SEQ ID NO: 14415 - DNA, 402 bp, synthetic construct
  misc_feature 1..402: note = Description of Artificial Sequence: Synthetic coding sequence
  source 1..402: mol_type = other DNA
atgagtttcccttgcaagtttgttgcatcgttcctattgattttcaatgtgtcttccaagggcgctgtgagcaaagagatcaccaatgcactggaaacctggggcgcgctcggccaggacattaacctggacataccctcgttccagatgtcagacgacatcgacgatatcaagtgggaaaagacctctgataagaagaagatcgctcagtttcgaaaggagaaggaaaccttcaaggaaaaggacacatacaaactattcaagaacggcaccctaaaaattaaacatctgaaaacggatgaccaggacatttataaagtaagtatatacgatactaaaggaaagaatgttctggagaagattttcgatctgaaaattcaagggaagtgctcttttccgtag

SEQ ID NO: 14416 - DNA, 1056 bp, synthetic construct
  misc_feature 1..1056: note = Description of Artificial Sequence: Synthetic coding sequence
  source 1..1056: mol_type = other DNA
atgagcttcccatgcaaatttgtagcctctttcctgcttatcttcaacgtgtcttctaaaggggccgtcagcaaagaaattaccaatgccctggaaacatggggcgccctgggtcaagatatcaatctggacatcccatcatttcagatgtcagatgatatcgacgacattaaatgggagaagacatcggacaagaagaaaatagctcagttccggaaggagaaggagacgtttaaagaaaaagacacatataagctgtttaagaacggaacactgaaaatcaagcacctcaagacagatgatcaagatatttataaagtgtccatctatgacaccaagggcaaaaacgtgctggagaaaatattcgaccttaaaatccaggaacgggtcagcaagcctaagattagttggacctgtatcaataccacacttacgtgtgaggtgatgaatgggactgacccagagttgaacctgtatcaggacggaaaacatctgaagctctcacagcgggtgatcactcataagtggaccacgagtctgtcggcaaagtttaaatgcacagctggaaataaggtcagcaaagaatcgagcgtggagcccgtgtcctgtccagagaaaggcctggatatctacttgatcatcggcatctgcggcggtggcagcctccttatggtttttgtggccttgctggtattttatatcacaaagaggaaaaaacaaagatcgagacgaaatgacgaggagctagaaacccgtgctcacagagtcgctacagaagaacggggacgtaaaccccatcagatccccgcctcgacgccacagaatcccgccacatctcagcacccgccacctccacccggtcacagaagccaggctcccagccaccgacctcccccacccggacatagagtgcagcatcagccccagaaacgcccgccggcaccttcaggaacgcaggttcatcagcagaagggtcccccgttgccccgaccaagagtacagccaaaacccccccatggcgccgccgagaactctctgagccctagtagtaactag

SEQ ID NO: 14417 - DNA, 2544 bp, synthetic construct
  misc_feature 1..2544: note = Description of Artificial Sequence: Synthetic coding sequence
  source 1..2544: mol_type = other DNA
atgcatctgttgggcccctggctgctgcttctggtacttgagtacctggccttttccgacagctccaagtgggttttcgagcaccctgaaacattgtatgcgtgggagggcgcatgcgtgtggataccctgtacttacagagccttagatggcgatctggaaagctttatcctttttcacaacccggaatataacaagaatacctccaaatttgatggtacgagattgtatgagtctacaaaagacgggaaggttccttctgagcaaaaacgggtccaattcttaggtgataagaacaagaactgcacgctctccatccaccctgttcatctgaacgatagtgggcagctcggcttaaggatggagagcaagacagagaagtggatggagaggatccacctaaacgtgagcgagcgtccctttccccctcacatccagctgccccccgaaatacaagaaagccaagaagtcacgctcacatgtcttctcaattttagttgctatgggtaccctattcaactccagtggctgctggagggagtccctatgcggcaagccgctgtgacctcaacctccctcaccatcaagtccgtttttacacgttcagagctcaagttctcccctcagtggtctcaccacgggaagattgtcacatgccagctgcaggacgccgacggcaagttcctgtccaacgacacggtgcaattaaacgtgaagcacactccgaagcttgagattaaggtgaccccgtcggacgctatcgtccgagagggggattcagttacaatgacctgcgaggtttcatccagtaaccccgagtataccacggtgagttggttaaaggatggcacttctctgaagaaacagaatacttttactcttaacctgagagaagtaacaaaggatcagagcggaaagtattgctgccaggtgtcaaacgacgtaggacccggccgctccgaggaagtatttctccaggtccaatacgcccccgagccctccacagttcagattttgcacagcccagcagtagaggggagccaagtggaattcttgtgtatgagtctggctaaccccctgccgacgaattacacttggtaccacaatggaaaggagatgcagggcaggactgaggaaaaggtgcatattccaaaaattcttccatggcacgccggaacttattcctgtgtagctgagaacatcctgggcacaggtcagagaggcccaggcgcagaactagatgtgcagtacccaccaaaaaaagttacaaccgtcatccagaatcctatgccaattagggagggtgataccgtgacactctcatgtaactacaatagcagcaatcctagtgtcacccgatacgaatggaagccacacggggcatgggaggagccgagcctgggcgtgctgaagatccagaacgtggggtgggacaacacgactatcgcttgcgccgcgtgcaacagttggtgttcctgggcgagtccagtggcccttaacgtgcaatacgccccgcgagatgtcagggtaaggaagataaagccactttcggagatccactccggcaacagcgtcagtctccaatgtgatttttcttccagtcaccccaaagaggtgcagttcttctgggagaagaacggcagactgctcgggaaagagtcacagttgaattttgactccatttcgcccgaggatgctggctcctacagttgttgggtgaacaactcaattgggcagactgcctccaaggcctggaccctggaggtgctttacgctccccggagactgagggtgagcatgtccccgggtgaccaggtgatggaaggtaagagcgccaccctcacatgcgaatcagatgccaatcctcctgtaagccattatacgtggttcgattggaataatcagagtttgccttatcactcccagaaattgaggttagagcccgtgaaggtccagcattctggagcatactggtgccagggcaccaattccgtgggaaagggacggagccctctgtcaaccctcactgtgtattatagccctgaaaccataggaagaagggtagccgttgggctagggagctgcctagccatactcatccttgccatctgcggcctaaaattgcagagaagatggaagcggacacaatcccagcagggtctgcaggaaaacagttccggtcaatccttcttcgtccgcaataaaaaggttagacgcgcacctctgtccgagggtccccactccttgggatgttacaatcccatgatggaggatggaatctcatacaccacgctgcgattccccgaaatgaacatccccaggactggagatgcagaatcctccgaaatgcaacggcccccccccgattgcgacgacaccgtgacctacagcgctcttcacaagagacaggtaggcgactacgagaatgtgatcccagactttcctgaagacgagggcattcactactcagaactaatccagttcggggtcggagaaaggccccaagcccaagaaaacgtggactacgttattttgaaacactag

SEQ ID NO: 14418 - DNA, 1989 bp, synthetic construct
  misc_feature 1..1989: note = Description of Artificial Sequence: Synthetic coding sequence
  source 1..1989: mol_type = other DNA
atggagtccaagaccgagaaatggatggaacgcatccatcttaatgttagtgaaaggccttttccccctcacatccaattaccgcccgaaatccaggagtctcaggaagtaacactgacatgcctgttgaacttcagttgctacggttatcccattcagctgcagtggttgctggagggggtgccaatgagacaggctgcagtcacaagtacctccctgacaataaagtcagtgtttactcgatctgaactcaagttttctccccagtggagccaccacgggaagattgtcacctgtcagcttcaggatgccgacggaaagttcctatcgaatgataccgtccagctcaatgtgaagcacactccaaaactggagatcaaagttacaccaagcgatgcaattgtgagagaaggggactcagtaactatgacttgcgaagtctcttccagcaatcctgagtacaccacagtgagttggctgaaggacgggacatcactcaagaagcagaataccttcactttgaatctgcgggaggtaactaaagatcagagcgggaaatactgctgtcaagtctccaacgacgtggggcccggacggagcgaagaggtgttcttacaagtgcaatacgcgccagagccatctactgtgcagatcctgcactccccagccgtagaggggtcacaagtggaatttctgtgcatgagtctagctaacccattacctaccaactacacctggtaccataacggcaaagaaatgcaggggcgtaccgaagagaaggtacatatcccaaaaatcttgccctggcacgctggaacatatagctgcgtggccgagaatatattgggaactggacagagaggtcctggggccgagcttgatgtccagtatccccctaagaaagtgaccactgtcattcaaaaccctatgcctattcgtgagggagacactgtgacactgagctgcaattataatagctcaaacccctccgtgactcggtatgagtggaaaccacatggagcttgggaagaaccttcccttggcgtcctcaaaatccagaacgtgggatgggataataccaccatcgcctgcgctgcttgcaactcctggtgtagctgggcctcaccggtggcgctcaatgtacagtatgctcccagagacgtgagagtgcgaaagatcaaacccctgtctgaaatacactcaggaaactccgtgagcttacaatgtgacttctcctcaagccatcccaaagaagtgcaatttttctgggagaagaatgggcgcctgcttggcaaggagagccagttaaacttcgattccatctctcccgaggacgcgggctcatatagctgttgggtcaataactctattggacagacagcctctaaggcatggacgttagaagtcctttacgccccccggcgcctgcgcgtttccatgagtcccggggatcaggttatggaaggaaagagcgcaacgttgacatgcgagtccgacgctaatcctccagtctcccactacacatggtttgactggaacaatcagtcattgccttatcatagtcagaagttacgacttgagcctgtgaaggttcaacactctggggcttactggtgccaggggacaaattcagtaggaaaaggcagatcgccgcttagtaccttaacagtttactattctcccgagacaattggcagaagagtggccgtaggtctgggatcttgtctggctatcttaatcctcgcaatctgcggcctcaaactccagagacgtgacgccgaatccagcgaaatgcagcggccaccacctgactgtgatgataccgtcacctacagcgctcttcacaagagacaggtgggagactacgaaaacgttatcccggacttccccgaggacgagggaatacactactctgagcttatccagttcggcgtcggagagcggccacaggctcaggagaacgttgattacgtaatccttaaacactag

SEQ ID NO: 14419 - DNA, 2013 bp, synthetic construct
  misc_feature 1..2013: note = Description of Artificial Sequence: Synthetic coding sequence
  source 1..2013: mol_type = other DNA
atgcacctcctcggcccatggctgctgctgttggtgttggaatatctggccttctccgattcgtccaagtgggtgtttgagcatccagagactctctacgcatgggaaggcgcttgtgtgtggatcccgtgcacttacagagctctcgatggcgatctggagtctttcatcctcttccacaatcctgagtacaataaaaacaccagtaagttcgacggaacaagactgtacgagtccaccaaagatggcaaggtgccatcagaacagaaacgcgtgcagtttctcggcgataagaataagaattgcacactgagcatccatccagtgcacctcaatgacagcggtcagctgggcctgcgcatggaaagcaagaccgaaaagtggatggaaagaatccatctgaacgtgagcgaaagaccattccccccccacattcagcttccaccagaaatccaggagtcacaggaggtgaccctcacctgtctgttgaactttagctgttacgggtatcccatccagctgcaatggctgctagagggcgtccccatgcggcaagccgccgttacgagcacatctctgaccatcaaaagcgtgttcacccgctccgagctgaagttcagcccacagtggtcacatcatggcaaaatagttacgtgccagctccaggacgctgacgggaagttcctgagtaacgacacagttcagttgaatgtcaaacacccccctaaaaaagtgactaccgtgattcagaatcccatgcccattcgcgaaggcgacaccgtgaccctctcatgcaactataactctagtaatcccagcgtgactcggtacgaatggaaaccacatggggcgtgggaagagccctctctgggcgtattgaagatccagaacgtgggatgggacaatactactatcgcctgtgctgcctgtaactcctggtgcagctgggctagccccgtcgccctcaatgtgcaatatgcccccagggacgtcagagtgcgcaagataaaacctctgtccgagatacacagtgggaatagtgtgtcattacagtgtgacttcagctcatcccaccctaaggaagttcagtttttctgggagaaaaacggacggcttctgggaaaggaatctcaactcaatttcgattcaatttcacccgaggacgccggatcttatagctgctgggtcaacaatagtatcggacaaacggctagcaaggcctggaccctggaggttctttacgctccgcgaagactgagggtctcaatgtcacctggtgatcaggttatggaaggcaagagtgccacactgacttgtgaatccgacgcaaatccacccgtatctcactatacttggttcgattggaataatcagagcttgccctatcattcccaaaagctccgcttggaacctgtgaaagtccagcactccggcgcatattggtgtcaggggaccaatagtgttggaaagggacgaagtcccctcagcactctcaccgtgtattatagccccgagactatcggccgccgggttgcagtaggcctgggctcatgcctggccatccttattctcgccatctgtgggttgaagcttcagagacggtggaaaaggactcagtcccagcaagggctgcaggaaaatagcagcggccagagcttctttgtgcgcaataagaaagtgagacgagccccgctttcagaaggacctcactctcttgggtgttataatcctatgatggaggacggtatctcctatacgactctcaggtttcccgagatgaatattccgcgaacaggggacgctgaatcttctgagatgcagcgtcccccacccgattgcgacgacacagttacatattccgctctacataaaaggcaggtaggagattacgagaacgtcatacctgatttccccgaggacgaaggcatccactattcagagctcatccagttcggcgttggcgaacggccccaggcccaggagaacgtggactacgtaatactaaaacactag

SEQ ID NO: 14420 - DNA, 2028 bp, synthetic construct
  misc_feature 1..2028: note = Description of Artificial Sequence: Synthetic coding sequence
  source 1..2028: mol_type = other DNA
atgagcttgtggctgctagagggcgtgcccatgaggcaggccgcagtgacaagcacatccttgacaattaagagtgtcttcacaaggtcagaactgaaattctctccccaatggtctcatcatggaaaaatcgtgacttgccagctccaagacgccgacgggaaattcctttcaaacgatactgtgcagcttaatgttaagcatactccaaaactggagatcaaggtgaccccgtccgacgcaattgtgagggaaggcgatagcgtgacaatgacgtgcgaggtatcatcttccaaccccgaatacacaaccgtatcctggcttaaagatggcacaagcttgaaaaaacagaacacttttactcttaatctgcgagaagtaacaaaggaccagagtggcaagtactgctgccaggtatccaacgacgtgggacccgggcggtcggaggaagtatttctgcaagtgcagtatgccccagagccgtcaactgtgcagatcctacactcaccagcagtagagggctcacaggtggagtttctgtgtatgagtctggccaatcccctgcccaccaactacacctggtatcacaacggaaaggagatgcagggaaggaccgaggagaaggtacacatacccaagatcctgccgtggcatgctggaacatatagctgtgtggccgaaaacatacttgggacgggacagcgcgggcccggggccgagctggatgtgcagtatcctcctaaaaaggtgactacagtaattcagaatcccatgcccatacgggagggcgatacagtgacactgtcctgtaactataactcttctaatccctctgtgactagatacgagtggaagcctcacggcgcctgggaagagccttctttgggcgtattgaagattcagaacgtgggctgggataacacaaccatagcctgcgccgcctgtaactcttggtgttcttgggcgagcccggtggctttgaatgtgcagtacgcacccagggacgtgagagttcgcaaaattaagccactgtcagagatccactccggcaacagtgtctctttgcagtgtgatttctccagcagccatcctaaggaggtacaatttttttgggaaaagaatggtcgtttgctcgggaaggagagtcagctgaattttgattcaatttcaccagaagatgccggcagctattcctgctgggtgaataactcaatcggacaaacagcctccaaagcttggaccctggaggttttatatgcccctcggcgactgagggtgtctatgtccccaggcgaccaggtgatggagggcaagagtgctactctcacttgtgaaagtgacgccaatccacccgtgtcacactacacttggtttgactggaataatcagtccctcccctaccactctcaaaagctgaggctcgagccagttaaggtccagcactcaggagcatactggtgtcaagggacaaatagcgtaggcaagggacgcagccccctctcaactctcactgtctattatagtcctgaaacaattggccgaagggtggccgtcggacttggcagttgcctggcaatcctgatcctggcaatttgcggcctcaaattacagcggaggtggaaacggacccagagccagcagggtcttcaagaaaactcatctgggcagtccttttttgtgcgcaacaaaaaagtgcgacgggcccccctaagcgaagggccccactcattgggctgctataatcccatgatggaggacggtattagctataccactttgaggtttcctgagatgaacatacctaggacaggtgatgccgaatcatctgaaatgcaacgaccacctccggattgcgacgacacggtgacctactccgcccttcacaagcgtcaagtgggtgactacgagaatgttatcccggacttcccggaagacgagggaatacactatagtgaactgattcagttcggggtcggtgaacgtcctcaggcccaggaaaacgttgactacgttatcctcaagcattag

SEQ ID NO: 14421 - DNA, 2280 bp, synthetic construct
  misc_feature 1..2280: note = Description of Artificial Sequence: Synthetic coding sequence
  source 1..2280: mol_type = other DNA
atgcacctactggggccatggttgctcctgttagttttggagtacctggcattttcggattccagcaagtgggtttttgaacaccctgagacactgtacgcctgggagggagcatgcgtctggattccctgtacatacagagccttggatggcgatctcgagagtttcattctgttccataacccagagtataataaaaacacctccaaatttgacggcacacgcctctacgaaagtacgaaagacggcaaagtgccaagcgaacagaagcgcgttcagtttttaggtgataagaacaagaactgcacgctgtcaattcatcctgtgcatttaaatgactctggccagttgggactgcggatggagagcaaaactgaaaagtggatggaaagaatccacctgaacgtgtcagaaagaccattcccacctcatatacaattgccccctgagattcaggagtcccaggaagtaacacttacctgcttactaaacttttcatgctacggatatccgatacaactccaatggctgctcgaaggagttcctatgaggcaagctgcagtaactagtactagccttactattaaatcagtatttacccggagcgagctgaaattttctcctcagtggagccaccatggaaagatcgtaacctgccagctccaggatgctgacggcaagtttttgtctaatgatacggtacagctgaacgttaagcacactccaaagcttgaaatcaaggtcactcctagcgacgcaatcgtgcgggaaggggactccgtaactatgacctgcgaagtgtctagctccaaccctgagtatactactgtcagttggctgaaggatggtacttcgctgaagaagcagaatacatttactctgaacctgcgagaagttacgaaagatcaaagcggcaagtactgttgccaggtgagtaacgacgttggacctggacgatcagaagaagtattcctccaagtacagtacccgccaaagaaagttactaccgtcattcaaaatccaatgccaatcagagagggggacaccgttaccctgagttgcaactataacagttctaaccctagtgttacccgctatgagtggaagcctcacggagcgtgggaggaacccagcctcggcgtcttgaaaatacagaacgtcggctgggataatactactattgcttgcgcagcctgcaacagctggtgctcatgggcctctccagtagctctcaatgtgcagtatgccccacgggatgttagagtgcgaaagattaagcctctttctgaaattcattctgggaactctgtgtccctgcagtgtgatttttccagcagtcatccaaaagaggtccagtttttttgggagaaaaatgggcggctgttgggcaaggaaagtcaactcaattttgactccatcagtccagaagatgcaggctcctattcatgttgggtcaataacagtattgggcagactgcctctaaagcatggactttggaggtcctctacgccccaagaaggctccgtgtctcaatgtcccccggagatcaggttatggagggaaaatccgccacattaacatgcgaaagcgatgctaacccgcctgtgtcacattacacctggtttgactggaacaaccagtctctgccatatcacagccagaagctacgcctcgagcctgtgaaagtgcaacacagcggagcgtactggtgccagggaaccaatagcgtggggaaggggcgctctcctctctctaccctgaccgtgtactacagccccgagacaattgggcggcgggttgcggtggggctaggaagctgcctggccattcttatcctagctatctgtggacttaaactacagcgccgctggaagaggacccagtctcagcaaggattgcaggaaaactccagcggacagtcttttttcgtacgtaataaaaaagttaggcgggctcctcttagcgaaggccctcatagcttagggtgttataaccctatgatggaagatgggatatcttataccacgctgcgatttcccgagatgaacataccccgtacaggggatgctgagagtagcgagatgcagcggccccctccggactgcgatgatactgtaacttactccgctctccacaagcgccaagtcggggactatgagaatgtcatccccgattttcccgaagacgaaggaatccactacagcgagctgatccagttcggggttggcgaacgcccacaagcacaagagaatgtggactatgtgatcttgaagcactag

SEQ ID NO: 14422 - DNA, 2256 bp, synthetic construct
  misc_feature 1..2256: note = Description of Artificial Sequence: Synthetic coding sequence
  source 1..2256: mol_type = other DNA
atgcatctcctcggcccctggcttcttctgctggttctggaatacttggctttttcagacagcagtaagtgggttttcgaacatccggaaacgctgtacgcttgggaaggagcctgcgtttggatcccctgtacttatcgtgcgctcgatggcgatctcgagtcgttcatcttgttccataatccagaatacaacaagaacacatcgaagttcgacggaacccggctttatgaaagtactaaggatgggaaggtcccaagcgagcagaaacgcgtacaatttctgggcgataagaacaagaattgtaccttgtcgatccacccggttcaccttaacgatagtggccagcttggccttcgaatggagtccaaaaccgagaaatggatggaaagaattcacttaaacgtgtcagaaagacccttcccgccccacattcagcttccccctgagatccaggaaagtcaggaagtgaccctcacctgtctcctcaatttcagttgttatgggtatcccatccagcttcagtggctgctggaaggcgttccaatgagacaagcagcagtgacaagcacctctcttacaatcaagtctgtctttacccgcagtgagcttaaattttcgcctcagtggagccatcatgggaaaattgttacctgtcagctgcaggacgctgacggcaaatttctttccaacgacactgtacagcttaacgtgaaacatacgccaaagctggaaataaaagtgaccccttccgacgccatagtccgggagggagatagtgtgacaatgacttgcgaagtgagctctagtaatccagagtacacaactgttagctggttgaaggatggaacctcacttaagaagcagaacacctttactcttaacctcagggaggtgaccaaggatcagtccgggaaatactgctgccaggtgtccaacgatgtcggtcctggaagatctgaggaggttttcctgcaggtgcagtatgcccctgaaccaagtacagtccagatcctgcatagtcctgccgttgagggatctcaggtcgaattcctctgtatgtccttagcaaatccactcccaactaactatacttggtaccacaacggtaaggagatgcagggcaggaccgaggaaaaggtacatatccccaagatcctgccttggcacgccggaacctattcctgcgtggctgagaatatcctcggtaccggacagcggggacctggagccgaactggatgtccagtacccccccaaaaaggtgacaaccgtgattcagaaccccatgcctattcgtgaaggggacacagtaacactgtcatgcaattataactcaagcaacccctctgtgacacggtacgagtggaagcctcacggggcctgggaggaaccaagtctcggcgtattaaagattcagaatgttggctgggacaacaccacaatcgcgtgcgcagcctgtaactcttggtgcagttgggcgagtccggtggccctgaacgtgcagtacgccccccgtgatgttcgtgtgcgcaaaattaaacctttgtcagagattcactctggtaactcggtctccttgcagtgcgactttagcagctctcaccctaaagaggtgcaatttttttgggagaagaatggtagactgcttggcaaggaatcacaattgaacttcgacagcatcagtcccgaggatgcgggaagttatagttgttgggtcaataattctatcggacaaactgcttctaaagcctggaccctcgaggtgctgtatgctcccagaagacttcgggtctctatgagccctggtgaccaggtgatggaagggaaaagtgcgacattgacttgcgagagcgacgcaaacccacctgtgagtcactacacctggtttgactggaataatcaaagtttgccatatcattcccaaaagctcagactggaaccagtcaaggtccaacacagcggcgcgtactggtgtcaaggcacaaatagcgtcggtaaagggcgctcaccactatctacgcttactgtctactattctcccgaaaccatcggccgtcgtgttgcagtgggcctgggttcctgcctggcaattctgattctcgctatctgtggtctgaaactgcagagaaggtggaagagaactcagagccagcagggcttgcaggaaaattcgagcggtcagtcctttttcgttcgcaataagaaacgctgcagggtcctgcgggatgctgaaactagcccagggctgcgttag

SEQ ID NO: 14423 - DNA, 783 bp, synthetic construct
  misc_feature 1..783: note = Description of Artificial Sequence: Synthetic coding sequence
  source 1..783: mol_type = other DNA
atggcacggccccatccctggtggctctgcgttctgggtactctagtaggcttgtctgccactccagcacccaaatcttgtccagagcggcactactgggcccagggaaaactgtgttgccagatgtgcgagcccgggacatttctggtcaaggactgcgatcagcatagaaaggcggcccaatgtgacccctgcatccctggggtgtcgttcagtcccgatcaccatacccgcccacattgtgaatcttgccggcattgcaatagtggtcttttagtgaggaattgcaccataaccgccaacgctgaatgtgcatgtcgcaacggttggcaatgccgggataaagagtgtaccgaatgtgacccgctacctaacccctccctgaccgctagaagttcacaggctctttctccccatccccaacccacacacctgccatacgtgtcagagatgctggaggcgcgtactgctggtcacatgcaaacactggccgatttccggcagctgcctgccaggaccctgtctacgcattggcccccacagagatcgctgtgctccagcgacttcatacggatacttgtaatcttctctgggatgtttctagtctttacattggcgggagctttattccttcatcagcggcgaaagtatcgtagtaataaaggtgagtccccagtggaacctgccgagccgtgccactacagttgtccacgcgaagaagaaggctccacaatccccatccaggaagattataggaaaccagaacccgcgtgttcgccgtag

SEQ ID NO: 14424 - DNA, 1158 bp, synthetic construct
  misc_feature 1..1158: note = Description of Artificial Sequence: Synthetic coding sequence
  source 1..1158: mol_type = other DNA
atgctagtgcggcgtggggccagagccggcccacgaatgccaaggggctggacggctttatgtctacttagtttattgccttctggattcatgtccctcgacaacaatgggaccgcgacacccgaactcccaactcagggcaccttttctaatgtctctacaaatgtttcttatcaggaaacaacaacaccgagcacactgggctcaacaagcttacatccggtgtcccaacacggtaatgaagcgacaactaatattacggaaaccacggttaagtttacctcgacttccgtcattacttcggtgtatggtaacaccaactcaagcgtccagtcccaaacatcggtcattagcacagtgtttaccacgccggctaatgtcagtactccggagaccacccttaaaccctcgttgtcaccagggaatgttagtgacctgtctaccacctcaaccagcctagccacaagtcccacaaagccctacacgtcctcttcccctatactcagcgacattaaagctgaaataaagtgtagcgggattcgtgaggtcaaactgactcaggggatctgtctggagcagaataagacatcaagctgtgccgaattcaagaaggatcgcggcgagggcttggctagagtactctgtggcgaggaacaagccgatgccgacgccggcgcccaggtgtgctcactgctcctcgcacagtctgaagtgcgtccacagtgccttttactggtactggctaatagaactgaaatctcctcaaagctgcagcttatgaagaagcatcagtctgacttgaagaagctgggaatcctcgactttactgaacaagacgtcgctagtcatcagtcttatagccagaagactcttattgcgcttgtgaccagcggcgccctccttgcggtactgggcatcacaggatattttctcatgaatcgccgttcgtggtctcctactggcgaaagattgggtgaggacccctactatacagaaaatggcggagggcaagggtacagtagcggccccggtacgagtccagaggcccagggtaaggctagtgtaaatagaggggcccaagagaacgggacgggtcaggccacctccaggaatggacactccgcacgacagcatgtggtcgccgataccgagctgtag

SEQ ID NO: 14425 - DNA, 987 bp, synthetic construct
  misc_feature 1..987: note = Description of Artificial Sequence: Synthetic coding sequence
  source 1..987: mol_type = other DNA
atgctcgtgaggcggggcgctcgtgcgggccccaggatgccaaggggatggaccgctctttgcctgctgagtctgctgccatcaggattcatgtctctggacaacaatggcaccgccacaccggagctccccacccaaggtaccttcagtaatgtaagcacaaacgtcagttatcaggaaacaaccactccttcaaccttggggtccacatcgttgcaccccgtgagtcagcacggaaatgaggccacaactaatataactgagacaacggtgaagttcacctctacttccgtaatcactagcgtgtatggcaatacaaattcttcggtccagtcccagaccagcgtgatctccaccgtttttacgaccccagcaaatgtttcaactccggagactaccctgaagccttcactgtccccaggaaatgtgagtgacttatctacgacttccacgtctctcgccactagcccaaccaaaccttatacctctagctctcccattcttagcgacatcaaggcggagataaagtgctcaggaataagggaagttaagcttacgcaagggatatgcctcgaacagaataaaacctccagctgcgcagagttcaagaaggatagaggggagggactcgcacgtgtcctctgtggcgaggagcaggcggacgccgacgctggtgcgcaagtgtgctctctgctgctggcccaatcggaagtcaggccccagtgcttactcttggtattggccaataggactgaaatctcttccaagcttcagttaatgaagaaacaccagagcgacctcaagaaattgggaatcttagattttacggagcaagacgtcgcttcacatcaatcatatagtcagaagactctcatagccttagtgacgtccggcgccttgctcgcggttttgggtatcaccgggtattttcttatgaaccgcaggagttggtccccgaccggggagagactagagttggagccttag

SEQ ID NO: 14426 - DNA, 684 bp, synthetic construct
  misc_feature 1..684: note = Description of Artificial Sequence: Synthetic coding sequence
  source 1..684: mol_type = other DNA
atggacttcggacctggaaggctatttcggtttttctcatactgcgtagtggcccatattcagttagcagtgttctttttctctgtcggcattcttgaaacaagaatcctgctcgcagacggcgccgagttcaagaaggataggggggaaggcctcgcgagggtgctttgcggagaggagcaggcagacgcagatgctggcgcacaggtgtgttcactgctcctagcgcagtccgaggtacgaccccagtgtcttctcctggtattggcaaatcgcacggagataagctctaaactccagttgatgaagaaacaccagagtgatctaaagaagttggggatccttgactttacagaacaggacgtggcttcacatcaatcctattcccagaagacacttatagccctggtaacgtccggcgcactgctcgctgtcttgggcatcacaggttatttcctaatgaaccggcgctcatggtctccaacaggggaaaggctcggtgaagatccctactacaccgagaatgggggaggccagggctatagttctggccccggtacatccccagaggcccagggaaaggcatccgtcaacagaggggcccaagaaaatgggactggacaagcaacctctagaaacgggcatagcgcacgacagcatgtagtagcagataccgagttatag

SEQ ID NO: 14427 - DNA, 1068 bp, synthetic construct
  misc_feature 1..1068: note = Description of Artificial Sequence: Synthetic coding sequence
  source 1..1068: mol_type = other DNA
atgtctttggacaacaatggcaccgctacacctgagctgccaacacaaggaacgttttccaacgtcagcactaatgtgtcttaccaggagaccacaacacctagtacattagggagcacctccctgcaccctgtgagtcagcatggtaatgaggccactacaaatataacggagactactgttaaatttactagcacaagcgtgataacatccgtgtacgggaatacgaactcctccgtgcagagccagacttccgtgatttcaacagtctttacaacccctgctaatgtatcaacccctgagaccactctaaagccatcactctctccaggcaatgtgtctgacttatcaaccacatctacttctctggcgactagccccaccaagccgtataccagttcttcacccattctgtctgacatcaaggctgaaatcaagtgcagcggcattcgggaggtcaagctcacgcaggggatatgtctggagcagaacaaaactagctcctgtgcagaattcaaaaaagaccgaggggaaggcctggcccgggtgctgtgcggggaggagcaggcggatgccgacgccggggcgcaggtctgctcgctgctcctagcccaatccgaggtccgcccccagtgtctgctgctcgtgcttgccaataggaccgagatttcaagcaagctgcagctcatgaagaaacaccagagcgacctgaagaagcttggcatccttgatttcaccgaacaggatgttgcgtcgcatcagagctactcccaaaaaactctcatcgcccttgtaacctccggtgccttacttgcagtccttggcattacaggctactttctgatgaaccggcggagctggtcacctaccggcgaaaggttaggagaggacccctactacacagagaatggcggtgggcagggctatagctctggtcccgggacctcgccagaagcccagggcaaggcctccgtgaatcgtggtgcacaggaaaatggcacaggccaggccacgagccggaacggccactccgccaggcaacacgtggtggcggacacagagctgtag

SEQ ID NO: 14428 - DNA, 753 bp, synthetic construct
  misc_feature 1..753: note = Description of Artificial Sequence: Synthetic coding sequence
  source 1..753: mol_type = other DNA
atgtttttgcagatgtatccaaccaagaagcttcaacatctcgtccccctggaggtacccgcgtgcactttgtgtcttaatatggctatgaggccccagcagacgagccaagccgagataaagtgctccgggattagggaagtgaagctcacacagggcatatgtttggaacaaaacaagacctccagctgcgccgaatttaagaaagatcggggcgaaggcctcgcgcgcgtgctgtgcggcgaggagcaagcggatgctgatgcaggcgcccaggtttgctctctgttattagcccaaagcgaggttaggccacaatgcctcctgctcgtgctagcaaatcggacagagatcagcagcaagttgcagttaatgaagaagcaccaatctgacctgaagaagcttgggatacttgatttcaccgagcaggatgtggcctcccatcagagttactctcagaagaccctgatcgcattagtcaccagtggcgccctactagcagtgcttggaatcacagggtatttcctcatgaaccggcgatcctggtcccccactggcgagcgactgggcgaagacccttactatacggagaatggcgggggacagggatactcctctgggccaggaacatcccctgaggctcagggcaaagcgagcgtcaaccgcggcgcacaagagaacggaactggacaggctacttctagaaatggccatagcgcccggcagcacgtggttgcggatacggagttatag

SEQ ID NO: 14429 - DNA, 516 bp, synthetic construct
  misc_feature 1..516: note = Description of Artificial Sequence: Synthetic coding sequence
  source 1..516: mol_type = other DNA
atggagcatagcacgtttttgtcgggccttgtcttagctaccctgttgagccaagtgagcccctttaagatacccatcgaagagctcgaggaccgagtctttgttaactgtaatacaagtattacttgggttgaaggcactgttgggaccctgctgtcggatatcaccagactggatctcgggaaacgcattttagatccaaggggaatctatcgctgcaatggcaccgacatttacaaagacaaagagagcaccgtgcaggtgcactacagaatgtgccagtcgtgtgtcgaacttgatcccgccacagtcgccggcattattgtgactgatgtgatcgccactttattactggccctcggagtattttgtttcgccggacatgagactggacggctcagcggcgccgccgacacacaggcactgctgagaaacgatcaggtgtatcagccattgcgcgaccgcgatgacgcacagtacagtcacctaggaggcaattgggcaagaaacaaatag

SEQ ID NO: 14430 - DNA, 384 bp, synthetic construct
  misc_feature 1..384: note = Description of Artificial Sequence: Synthetic coding sequence
  source 1..384: mol_type = other DNA
atggaacatagcacctttttgtctggccttgtgttggccactttgctctcccaagtgagtccctttaagataccaatcgaggaactggaagacagagttttcgtcaactgcaacacatctattacctgggtggaggggacggtgggcactctcctgtcagacatcacaaggcttgatttaggaaagcggatcttggacccgagggggatctaccggtgtaatggcacggacatctacaaagataaggagtcaaccgtgcaagttcactacaggacggccgacactcaggccctgctgagaaatgatcaagtttaccaaccattgcgggatcgagacgacgctcagtacagtcacttgggcggaaattgggccagaaacaagtag

SEQ ID NO: 14431 - DNA, 1377 bp, synthetic construct
  misc_feature 1..1377: note = Description of Artificial Sequence: Synthetic coding sequence
  source 1..1377: mol_type = other DNA
atgaatcgaggagtccccttcaggcatctgctgctagtcttacagctcgctttgctaccagcggccactcaggggaagaaggtggttctgggcaaaaaaggcgacaccgttgaactaacgtgcaccgcatcacagaagaagtcaatacagtttcactggaagaatagcaaccagatcaagatccttggaaaccaagggtcttttttgacaaaagggccatccaagctaaatgatcgggcagactcccgcagaagcctgtgggatcagggaaactttccactgatcattaagaatctgaaaattgaggatagcgatacctacatttgcgaggttgaagatcagaaggaggaggttcaattgctcgtttttgggctaaccgcgaactctgatactcatctcctgcagggacagtctctcacgctgacgctcgaatccccaccaggctcttctcctagcgtacagtgcaggtcgccccgtggaaagaatatccaggggggcaagactctcagtgtgtctcagttggaattgcaggattccggaacatggacatgtacagttttacagaaccagaaaaaagtggagtttaagatagacattgtggttctggcgttccagaaagccagttccatcgtctacaagaaagaaggcgaacaggtggagttctccttcccactcgcttttaccgtcgaaaagctgactggctctggcgaactctggtggcaggctgagagagcatcttctagtaaatcgtggattacatttgacctgaagaacaaggaagtctctgtgaaaagggtcacccaggatcctaagcttcagatgggtaagaagctccctctccacttaaccctgccacaagcgctcccccagtatgcgggatcaggcaatttgaccctggccctcgaagcgaaaaccgggaagctccaccaagaggtgaacctggtggtgatgcgcgccactcaactccagaagaaccttacttgtgaagtctggggccctacgtctcccaagttgatgctctcactgaagttagaaaataaggaagctaaagtgagcaaacgggagaaagcagtctgggtgttaaacccggaggccggcatgtggcagtgcttgctctctgacagcgggcaagtgctgctggagagcaatatcaaggtactgcctacatggtctactccagtccagccgatggcccttattgtcttagggggagtggctggcctcctgctgtttataggcctgggtatttttttttgtgtgcgttgccgtcataggagaagacaggccgagcgcatgtcacagatcaagaggctgttgtctgagaagaaaacatgccagtgtccgcatcggttccagaagacttgctctccaatttag

SEQ ID NO: 14432 - DNA, 723 bp, synthetic construct
  misc_feature 1..723: note = Description of Artificial Sequence: Synthetic coding sequence
  source 1..723: mol_type = other DNA
atgatcgagacttacaaccagaccagccctcggagcgccgctaccggtctaccgatcagcatgaagatcttcatgtatctcctaacagtgttcctgattacacagatgattggctcggccctcttcgcggtctacctgcaccgccgcctagacaagattgaggatgagagaaatcttcacgaggattttgtgttcatgaagaccattcagcggtgtaacacaggggagagatcactttcactgctgaattgtgaagaaatcaagagccagtttgaaggattcgtgaaggacattatgttaaacaaggaagaaacaaaaaaagagaacagcttcgaaatgcaaaaggtgttacagtgggccgagaaagggtattacacaatgtcaaacaacttggtgacacttgagaacggtaaacagctgacagtcaaacggcagggtctgtattatatctatgcccaggtcacattttgctctaacagggaggcctcgtcacaggccccattcatcgccagcctatgtctgaaaagcccgggccgcttcgagaggatactgttgagggctgctaatacacatagttctgctaaaccctgcggtcagcagtccatccacctgggcggcgtgtttgaacttcaaccgggcgcatccgtatttgtcaacgtgacggatccatcccaagtttcacacggaactgggttcacaagttttggcctgctcaaactctag

SEQ ID NO: 14433 - DNA, 786 bp, synthetic construct
  misc_feature 1..786: note = Description of Artificial Sequence: Synthetic coding sequence
  source 1..786: mol_type = other DNA
atgatcgagacatataaccagacctccccaagatccgcagctaccgggctgcctatcagcatgaaaatctttatgtacttgttaacggtgtttttgatcacgcagatgatcggaagcgccctctttgcagtgtatctgcatagaaggcttgacaaaattgaagatgagagaaatctgcacgaagacttcgtgtttatgaaaaccatccaacggtgtaacaccggggagcggtctcttagcctgctgaattgcgaagagattaagagccaatttgagggttttgtgaaagacatcatgctgaacaaagaggaaaccaagaaagaaaactctttcgagatgcagaaaggtgaccagaaccctcagatcgccgcccacgtgatctctgaggccagttccaagactacatctgtgctccaatgggccgaaaaaggctactacactatgtccaataacttggtgaccctagagaacggaaagcaactgaccgtgaaacggcagggactgtactacatttacgcccaggtgacgttctgctccaaccgcgaagccagttctcaggctccttttatcgccagtctttgcctcaaaagccccgggcgattcgaaagaatcctgttgagggcagcaaacacacactcatccgctaaaccttgcgggcagcaatcgatccatcttggcggagtctttgaactgcagcccggcgcctctgtattcgtgaacgtcacggacccaagccaggtgagccatggaacagggtttacatcatttggactgctaaagctgtag

SEQ ID NO: 14434 - DNA, 612 bp, synthetic construct
  misc_feature 1..612: note = Description of Artificial Sequence: Synthetic coding sequence
  source 1..612: mol_type = other DNA
atggtacggctgcccctacagtgtgtcctctggggttgcctgctgacagcagtgcacccagagccgcccaccgcatgccgggaaaagcaataccttatcaactcgcaatgctgctccttgtgccagcccggtcagaaacttgtatcagactgcactgagttcaccgaaaccgagtgcttaccatgcggggaatctgaattcctcgatacatggaaccgagagacacattgtcatcagcataagtactgtgacccaaacctaggattacgcgtccagcagaaaggaacctcagaaacggacactatctgtacatgcgaagagggatggcactgtacctcagaagcatgcgagagttgtgtgctccaccgtagttgttctcccggctttggcgtgaagcaaatcgcgactggggtatctgacaccatttgtgaaccatgtccagtcggtttctttagcaatgtttcttctgcgttcgagaaatgtcacccctggacgcgatcccccggctctgcggaaagccctggcggcgatcctcatcaccttcgagatccagtgtgccatccactgggcgcgggtctttatcaaaaaggcggacaggaggccaaccagtag

SEQ ID NO: 14435 - DNA, 786 bp, synthetic construct
  misc_feature 1..786: note = Description of Artificial Sequence: Synthetic coding sequence
  source 1..786: mol_type = other DNA
ggccgctcaccccttagaacacgcgatcgggttctgacaaattgggaggatgggttgaccgtcgcttatggggcagtgaagctgattcagagcctgtctttgcaacccgtcgggtggcagcagaactggggactgtcaagccctcccacaatgctgctgccctccagagctcagtcccccactgagctgcccctggcccctttagcagaacctaacaccggctgttcttcgctgctgtcttggcacagcacccgaggcgaactgcatctatgggctttgggcctggggcagatgggtggctccaagtgtgggagtccactcagtcccttagcccctacgttggaggcactgcgacgaccctggtgcggccagcaaggtgctggcggcactcggggcatttcgaccgatccaccaagcggtaagggagggagagcatggggccgcgatccccttccacgggaaggactactgagaggtaccgccgccccagctgctgggggagatctaacaccttgcctgtctagaccacccacacctagtagaaatcctcgccggagtatattcccgacaatctttctggctccaacactgctactacagtgccggcgtctgtatatggacgccaatagaagtccacgcagaatggcgaagagggtcgcctctcaatgccgtagggattcagaggccgcccccacacaggagtgcggccatgtgggtaagcaggctgtcggacagcgtgcctggtgctgctgttgctgcggagttagggtgaggggatggcactag

SEQ ID NO: 14436 - DNA, 834 bp, synthetic construct
  misc_feature 1..834: note = Description of Artificial Sequence: Synthetic coding sequence
  source 1..834: mol_type = other DNA
atggtaagattaccactgcagtgtgttctgtggggctgcttgcttacagccgtgcatccagagccccctacagcgtgcagagaaaagcagtatctcattaattcacagtgctgctcactctgccagccggggcagaagcttgtgtctgattgtacggaatttaccgaaacagaatgcctcccttgcggggaatcggagtttctggacacctggaacagagagacacattgccaccagcataaatactgtgatccaaacttgggcctgcgtgtgcagcaaaaaggcacctcagaaaccgacacaatttgtacatgtgaagaaggctggcactgcacatctgaggcgtgtgagtcctgtgtgctgcaccgtagctgttctcctgggttcggagtcaagcagattgccaccggcgtaagtgatactatctgcgagccatgccccgtgggtttctttagcaacgtgtcttccgctttcgaaaagtgtcatccttggacaagttgtgagactaaggatttggtggttcagcaagcaggcacaaacaaaactgatgtggtgtgcgggcctcaggatcgcctgagggccttggtggttatcccaattattttcgggattctgttcgcgatcctccttgtgcttgttttcatcaaaaaggttgccaaaaaaccaactaataaagcgccccacccaaagcaagaacctcaggaaatcaacttcccagacgacctgcctggctccaatacagcagcgccagtgcaggagactcttcacgggtgtcaaccagtgacccaggaagacggcaaggagagcagaattagtgttcaggaaaggcagtag

SEQ ID NO: 14437 - DNA, 1086 bp, synthetic construct
  misc_feature 1..1086: note = Description of Artificial Sequence: Synthetic coding sequence
  source 1..1086: mol_type = other DNA
atggataaattttggtggcacgctgcctgggggctctgcctggtccctttgtctttggcccaaattgacctgaatattacgtgcaggtttgcgggggtgtttcacgtcgaaaaaaacggccggtatagtatcagtcggacggaggcggccgatctgtgcaaggcctttaattctacattgccgactatggcgcagatggaaaaggctctgtcgatcgggttcgagacttgtcgctacggatttatcgaaggccatgtggttatcccaaggattcacccaaactctatctgcgctgccaacaacaccggagtctacatattgactagtaatacctctcagtacgatacatactgttttaatgcaagtgctcctcccgaagaggactgcaccagtgtgacagatctgccaaacgccttcgacggacccatcacaataactatagtcaaccgggacggcacaagatatgtccagaaaggggagtacagaacgaatcccgaagacatctacccttcaaaccccactgacgacgatgtctcttccgggagttcttctgagcggtcctccacaagcgggggttacatcttttataccttttcaacagtccatcctatccccgacgaggatagcccctggatcacagactctacagaccgcatcccagctactcgtgatcaagataccttccatcccagcgggggcagtcacacaacccacggtagtgaaagtgacggccactcccatgggtcccaagagggaggcgcaaacacaacgtccggccctattcgcacaccacagatccctgagtggctcatcattctcgcatctttgctggcgcttgctctgattctggccgtctgtatcgcggtcaactctcgcagaaggtgcgggcaaaagaagaagctcgtgatcaactccggtaatggagctgtcgaagatcgaaagcctagcggtctcaatggggaagctagtaagtcacaggaaatggtccacctcgtgaacaaggaatcaagcgagacaccagaccagttcatgacggctgatgaaactcgcaacctgcagaatgtcgatatgaagattggcgtttag

SEQ ID NO: 14438 - DNA, 420 bp, synthetic construct
  misc_feature 1..420: note = Description of Artificial Sequence: Synthetic coding sequence
  source 1..420: mol_type = other DNA
atggacaagttctggtggcatgcagcttggggactgtgcctagtgcccctatctctggcccagatcgatctgaacatcacctgccggttcgcgggagtgttccacgtcgagaagaacggaagatattcaatctcaagaacagaagccgccgatctgtgtaaggcattcaatagtaccttaccaacgatggcgcagatggaaaaggcactttccatcggctttgagacatgctctttgcactgtagtcagcagtccaagaaagtatgggcggaagagaaagcgagcgatcaacagtggcaatggtcttgcggtggtcagaaagcaaagtggacacaaaggcgggggcagcaggtcagcggcaatggcgctttcggagaacagggggtggtgaggaacagtcgcccagtctatgatagctag

SEQ ID NO: 14439 - DNA, 1023 bp, synthetic construct
  misc_feature 1..1023: note = Description of Artificial Sequence: Synthetic coding sequence
  source 1..1023: mol_type = other DNA
atggacaaattttggtggcacgccgcttggggcctgtgcttggtgcccctgtctctagcacagatcgatctgaacatcacctgccggtttgcaggcgtgtttcacgtagagaagaatggccggtattctatttccagaaccgaagccgctgacctgtgtaaggcctttaattccacgctcccaacgatggcccaaatggaaaaggcactgtctatcggcttcgagacatgtcgctatggtttcattgaagggcatgtggtgatcccacgaatccacccaaattcgatttgtgccgctaataatacaggcgtttatatactcacctctaacacgagtcagtatgatacttattgtttcaatgccagcgccccacctgaagaagactgtacttcagtgacagatctgcctaacgcattcgacggcccaatcaccatcaccatagtcaatagggatggtacgcggtacgtccaaaaaggggagtatagaacaaatcccgaggacatctacccttccaatccgacagacgacgatgtcagctctggaagcagctccgaacggtcttcaaccagtggcggctatattttttataccttcagcactgtacacccgatccccgacgaggacagcccgtggattacagatagtacagaccggatcccagcaacaaggcatagtcacggttcccaggagggcggggccaacaccaccagcggccccatcaggaccccacagatacccgagtggctgatcatcctggcttccctgcttgctctggccctgatattagccgtgtgtattgccgtgaattctcgtcgcagatgtgggcagaagaagaagctggtgatcaacagtggaaatggtgctgtcgaggaccggaagccttcaggactcaacggggaggcgagtaaatcccaagagatggtgcaccttgtcaacaaggagtcatctgaaacccctgatcagtttatgactgccgatgagacacgcaacctccagaacgtagatatgaaaataggggtttag

SEQ ID NO: 14440 - DNA, 1191 bp, synthetic construct
  misc_feature 1..1191: note = Description of Artificial Sequence: Synthetic coding sequence
  source 1..1191: mol_type = other DNA
atggataaattctggtggcacgcagcctggggtctgtgtcttgtccctttgtcccttgcccagattgacctgaatattacctgcagattcgccggagttttccatgtggaaaaaaacggacgatatagtatcagccgtaccgaggctgctgatctttgtaaggcctttaacagtactcttcccactatggcacagatggaaaaggccctgtctataggtttcgagacctgccgctatggcttcatagagggccacgtggtgattcccagaattcacccaaactctatttgtgcagccaataacacaggagtgtacattctcacaagtaacacttcacagtatgacacatattgcttcaacgccagtgcacctcccgaggaggactgcactagtgtcaccgatttgcccaatgctttcgatggtcccattacaattaccatcgtgaaccgggacggcacaagatacgtgcagaagggggaataccggacgaatcccgaggacatatacccaagtaacccaactgatgacgatgtgagttcagggtcgtcctctgaacgctccagcacatccgggggctatatcttttacacatttagcaccgtacatcccatcccggacgaagattcgccatggatcaccgatagcaccgaccgaattcccgcgactaatatggattctagccattccattactctgcagcctacagctaacccaaataccgggctggtcgaggatcttgacagaacgggccctctctcgatgaccacccggagggaccaggataccttccatccttctggaggctcacataccacacacggtagcgagtccgacggccattctcatggctcgcaggaaggcggcgccaacacaacctcaggtcccatcaggactcctcaaataccagaatggctgatcattcttgcttctcttttggccttggctctcatattggctgtgtgcatcgctgtgaactcgcgaagaaggtgcgggcagaagaaaaagctagtcatcaattcaggcaacggtgctgtggaggacaggaagcctagtgggctcaatggtgaagctagcaagagccaggagatggtacacctagtcaataaagagtcctcagagacccctgaccaattcatgacagccgacgaaacccgaaacctgcaaaatgttgacatgaaaatcggggtgtag

SEQ ID NO: 14441 - DNA, 2100 bp, synthetic construct
  misc_feature 1..2100: note = Description of Artificial Sequence: Synthetic coding sequence
  source 1..2100: mol_type = other DNA
atggacaagttttggtggcatgccgcctggggcctttgcctcgttccactgagcctcgcacagatagatctgaacatcacttgtcgctttgccggcgtgtttcacgtcgagaaaaacggtagatactctatctccaggacagaggctgccgacctgtgcaaggcattcaacagcaccctccccacgatggcacagatggaaaaagccctttccattggcttcgagacctgccgctatgggtttatagaaggtcacgttgtcatcccacggatccatccaaactctatctgtgccgcaaacaacacaggggtctacattttaaccagtaacacctcccagtacgatacgtattgttttaatgcgagcgcccccccagaggaggactgcacaagcgtgacggatctgccgaacgctttcgacggacctatcacgattactattgtgaacagggacggaactaggtacgtgcagaagggagaatatcgcaccaaccctgaggatatttatccaagcaacccaaccgatgatgacgtctcaagtgggtcaagctctgagcgctccagcacttccggtggatatattttttatacattttcaactgtccacccaatcccagatgaggacagcccatggatcactgactcaacggatcggatacccgctactagcacgtcatcgaataccatctccgcaggatgggagcctaacgaggagaatgaagacgaacgcgatcggcatctcagctttagtggatctgggattgacgacgatgaagacttcatctcgagcaccatcagtacaaccccaagggcctttgatcacaccaagcaaaatcaggactggacacagtggaatccaagccactctaatcctgaggtgctgctccaaacaaccactcggatgactgatgtggaccggaacggcactacagcatacgagggaaactggaatcctgaagcacacccccccctcattcatcatgagcatcacgaagaggaagaaacccctcatagcacctcaaccatccaggcgactcctagctcaaccaccgaggaaaccgcaacccagaaagaacagtggttcggcaacaggtggcacgagggttacaggcagacgccgaaagaggattcacattcaactactggtacagctgccgccagtgcgcacaccagtcatcctatgcaggggagaactaccccttccccggaagactctagctggacagatttctttaatcctatcagccacccgatgggaaggggacaccaggccgggagaaggatggatatggacagtagtcactctatcactctgcagcctactgctaatccgaacaccggcctggtagaggacctcgatcgcacaggtccgctctctatgactacacagcaatcaaactctcagtcgtttagtacttcacatgagggattggaagaggacaaagaccatcctaccacatccactcttaccagcagcaatagaaatgacgtgacgggggggagacgggaccctaaccacagcgagggcagcacaacactgttggaagggtacacttctcactacccccacacgaaggagtccagaacgttcattcctgttactagtgccaagacaggatccttcggcgtgaccgctgtgactgtgggagacagcaattcgaacgttaacagatccctgagcggggaccaggatacatttcatccatctggcggatcccacacgacacacgggtcagaaagtgacgggcactctcacggctcacaagaggggggagctaacaccaccagtgggccgatccgaacccctcagattcccgaatggctgattattctggcatccctacttgcactggccttgattttggcagtgtgtatagccgttaattctcggcgtagatgcggacaaaagaagaagctggttatcaactccggaaatggtgcagtggaggaccgaaagccaagcgggctcaacggagaggccagcaaatcccaggagatggtgcatctcgtcaataaggagtcttcagagaccccagatcaattcatgacggctgatgagacccgtaacctgcaaaacgtggacatgaagattggagtgtag

SEQ ID NO: 14442 - DNA, 243 bp, synthetic construct
  misc_feature 1..243: note = Description of Artificial Sequence: Synthetic coding sequence
  source 1..243: mol_type = other DNA
atggacaagttctggtggcatgctgcgtggggactgtgcttagtgcccctttcactggcacagatcgacctgaacatcacatgccggtttgctggcgtcttccacgttgaaaaaaacgggagatactcaatcagcaggaccgaggccgccgacttgtgtaaggcctttaacagtacactccccaccatggcacagatggagaaggctctgtccatcggctttgagacatgctcatccacttag

SEQ ID NO: 14443 - DNA, 2229 bp, synthetic construct
  misc_feature 1..2229: note = Description of Artificial Sequence: Synthetic coding sequence
  source 1..2229: mol_type = other DNA
atggataagttttggtggcatgccgcgtggggactctgtctggtacccctgagtctcgcccagattgatttaaatattacatgtcggtttgccggcgtctttcatgttgaaaaaaatgggcgttattctatcagtcgtacagaggccgcagatctctgtaaagcttttaactctacgctcccaactatggcacagatggagaaggcgttgtccatcgggttcgaaacctgtagatacggcttcatcgaggggcacgtcgtgatccctcggattcaccctaactcaatatgtgctgcaaacaacacaggagtctatattctcacttcaaataccagccaatatgacacctattgttttaacgctagcgctcctcctgaagaggactgtacttccgtgaccgatcttcctaatgcttttgacggcccaatcacaattacaatagtgaatagagacggaacgcgctacgttcagaaaggtgaataccggaccaacccggaggacatatacccttctaatcctaccgacgacgacgttagcagcggttcttcaagtgaacgttcatcgacgtctggtggttatatcttctatacattctcgacagttcacccaattccagacgaggatagtccatggatcacagacagcacagaccgcatccccgctactacattaatgtcaacttccgcaactgccaccgagaccgccacgaaaagacaggagacatgggactggttctcatggctgtttctgccctccgaaagcaagaatcatctgcacacaaccacccaaatggccgggacctcctctaatacaatctccgcaggctgggaacccaacgaagaaaacgaggacgagcgggatagacaccttagcttctcaggtagtgggatagatgacgacgaagatttcatttcatctacaatctctaccacacctagagcgtttgaccatacaaaacagaaccaggattggactcagtggaatccttctcacagcaatcctgaagtcctgcttcagactacaacccgcatgaccgatgtggataggaacgggacaaccgcttatgaaggcaattggaatcctgaggcacatcccccactcatccaccacgaacaccatgaagaagaagaaactccgcacagtacttctaccattcaggcgaccccaagttcaacaacagaagaaacagcaacgcagaaggagcagtggtttggcaaccgatggcacgaggggtatcgccaaacgccaaaagaggattcccacagcacgacgggcaccgctgctgccagtgctcacacatctcaccccatgcaaggaaggacaactccgtcccctgaggactccagctggacagatttcttcaatcccatcagccaccccatgggcaggggacaccaggcaggaagacgtatggatatggactcttcccacagcattacgttgcagcctacggccaacccaaatactggattggtggaagacctggaccgtactgggcccttatccatgaccactcagcagtcaaatagtcagtccttttctaccagccacgaaggcctggaagaagacaaagatcacccaacaacaagtaccctcacttccagtaatcgcaatgatgtcaccggaggtaggcgagatcctaaccactcagagggctccaccacactgttggaagggtatacaagccactatccccacacgaaagagtcgcgcacctttatccccgtgacctccgccaaaacaggttcctttggtgtgactgccgtgacagttggagacagcaactctaacgtgaataggagcctctccggggatcaggatacattccacccgagcggaggcagccacaccactcatggatccgagagcgacggtcatagccacggctcacaggaaggcggtgctaataccacctcgggccccatacggacccctcaaattcctgaatggctaattattctggcttcactcttagccctagccctgatcctggccgtgtgcattgccgtcaattctcggaggaggtgtgggcagaagaagaagctggtgatcaactccggaaatggggccgtggaggacagaaagccttccggtctgaatggcgaagcctctaaatctcaggaaatggtccacttggtgaacaaagagtcttctgagacacccgatcagttcatgaccgcagatgagacccgcaacctccagaacgtcgacatgaagatcggagtgtag

SEQ ID NO: 14444 - DNA, 2145 bp, synthetic construct
  misc_feature 1..2145: note = Description of Artificial Sequence: Synthetic coding sequence
  source 1..2145: mol_type = other DNA
atggacaaattctggtggcacgccgcatggggcctctgtttggtgcccctgagtcttgcccagattgatttaaatatcacttgcaggttcgcaggtgtgtttcatgtcgaaaagaacggacgttattccataagtagaaccgaggccgcagacctctgtaaagctttcaactccacccttccaacaatggctcaaatggaaaaggcactctccattggcttcgagacatgtcggtacggatttatagaggggcatgtcgttattcctaggatccatcccaattctatttgtgccgctaataataccggggtgtacatcctcaccagtaataccagccaatatgacacctactgcttcaacgcttctgccccccctgaggaagactgtactagtgtcactgatctcccaaatgcattcgatggaccaattacaatcacgatcgtgaaccgcgatggcacaaggtacgtccaaaaaggggagtatcgcacaaatcccgaggacatctacccaagtaaccccacggacgacgacgtgagtagcggaagctcaagtgagagatcctccacttctgggggatatatcttttacactttctctaccgtgcatcccattccggacgaggactccccctggatcaccgactcaactgatagaatcccagccaccacgctgatgtctacctctgctaccgcgactgaaaccgccaccaagcggcaggaaacgtgggattggtttagttggttgttcctgccctcggagagcaagaatcacttgcacactacaactcagatggcgggcacgtcttcaaataccatatccgccgggtgggagcccaatgaggagaatgaagacgaacgggacaggcacttgtcctttagtggctctgggattgacgatgacgaggattttatttcaagcacaattagtacaacaccacgagcctttgaccataccaaacagaatcaggactggacgcaatggaatccatcccatagcaacccggaggtgctgctgcagaccacgacaagaatgaccgctgacgtggatagaaatggcaccacagcatacgaaggtaactggaatccagaggcccatcctcctctgattcaccacgagcaccacgaggaagaggaaacaccgcatagcacttcaaccatccaggccacaccatcatccaccacggaggagaccgcaacacagaaggagcagtggttcggcaacagatggcatgaaggctacaggcagacgcctaaggaggactcccacagcactactggtacagcagctgcctccgctcacacctcccacccaatgcagggccggactactccgagcccggaggactccagctggactgatttttttaatccaattagccacccaatgggacgcgggcaccaggccgggcgacgcatggatatggatagcagccattcgatcaccctacagccgacagccaaccctaatacaggcctcgtcgaggatctggacaggactggtcctctctccatgacaacccgtaatagaaatgatgttaccggtgggcgccgagatccaaaccactccgagggatccacgacactgctggagggctatacaagccactatcctcacacaaaggagtcacggacctttattccagtcacatccgcaaagactggttcctttggtgtcaccgcagtaacagtaggcgactccaactcaaatgtcaatcgatcgctgtctggagaccaggacacatttcatccatccgggggctcccacaccactcacggctccgagagtgatggccatagtcatggtagtcaggaaggaggggctaacacaacgtcaggcccaatcaggactccccagattccagagtggctcatcattctggcttccttactggcactggctctcattctcgccgtttgcattgccgtaaatagcagaaggaggtgcgggcagaaaaagaagcttgtcataaacagcgggaacggggcagttgaagatcgaaaacccagcggcctgaatggtgaagccagtaagtcccaggagatggttcatctggtcaataaggagagttctgaaacccccgatcagtttatgacagcagacgaaacccgcaatctgcagaacgtggatatgaagatcggcgtctag

SEQ ID NO: 14445 - DNA, 1482 bp, synthetic construct
  misc_feature 1..1482: note = Description of Artificial Sequence: Synthetic coding sequence
  source 1..1482: mol_type = other DNA
atggataagttttggtggcatgcagcctgggggttgtgcctggtacccctgtctttggcccagattgacctcaacatcacttgtcgcttcgccggagtgttccatgtggagaaaaatggaagatattccatatcgagaacggaggcggccgacttgtgcaaggccttcaactcaaccttgccgacaatggcacagatggagaaggccctatccattggattcgaaacatgccgatatggctttatcgaggggcacgtggtcatcccccgcattcaccctaattccatatgtgctgccaataacaccggcgtgtacattcttaccagcaacacgagtcagtatgacacatattgttttaatgcaagcgcacccccagaggaggattgcaccagcgtaacagatcttcctaacgctttcgatgggccaattacaattacaattgtgaacagggatgggaccagatatgtccagaaaggagagtaccgcaccaatcctgaggatatttaccccagtaatcctacggacgacgatgtgtcaagtggctccagctctgagcgtagtagcacttccgggggttacatcttttacacattctctactgtccacccaattcccgacgaggactcaccctggattaccgactccacagaccgcattcccgcaacgaacatggactcatcccactcaattaccctccagcctaccgccaatcctaatactgggctggtcgaggatttggaccgtactggccccttaagtatgacaacccagcagagcaattcccagtctttttcaacttcccacgaaggtctggaggaagacaaagaccaccctacaacctcaacccttacttcatctaatcggaacgacgtcaccggaggcaggcgggatcctaatcattccgaaggcagcactactctgctggagggctatacctcgcactatccccatacgaaagagagccgaaccttcatccccgtgacctcagcaaaaaccggctctttcggcgtgactgcagtgaccgtgggggacagtaattcaaacgtaaatagaagtctttccggagatcaggacacatttcacccttccggggggagccatacaacacacggctctgagagcgatggccactcacatgggtctcaggagggcggggctaacacgaccagtggaccaatcaggactccccagattccagaatggctaatcatcctggcgagcctgctggcactggctttgattctggccgtgtgtattgccgttaatagcaggagaaggtgtggacaaaagaagaagcttgtaataaattcagggaatggggctgtagaggaccggaaacctagcggtctgaacggcgaagcttcgaagagccaggagatggtacatctggtaaacaaagaaagcagcgagaccccagatcaattcatgaccgccgatgagactcgtaacctccagaatgtggatatgaaaattggcgtctag

SEQ ID NO: 14446 - DNA, 1290 bp, synthetic construct
  misc_feature 1..1290: note = Description of Artificial Sequence: Synthetic coding sequence
  source 1..1290: mol_type = other DNA
atggacaagttttggtggcacgccgcctggggtctgtgtctggtccctctttcactggcacagatcgatctgaacataacttgccggttcgcaggagtgtttcacgtagaaaagaacggaaggtattccataagtaggacggaggccgctgatctgtgtaaggccttcaactctaccctacctacgatggcgcagatggagaaggcactgagcatcggcttcgagacatgtcgttacgggtttatcgaggggcacgtcgtgattccgcgaatccaccccaactcaatctgcgccgctaataataccggtgtgtatatattgacaagcaataccagccagtacgacacatactgttttaatgcctcagctcctcccgaagaggactgcacttcagtgactgatttgccaaatgcttttgacggccccatcactattaccatcgtcaaccgcgacggaactaggtacgtccagaaaggcgagtatcgcacgaaccccgaagacatctacccctcgaaccccaccgacgacgatgttagctccgggtcatcgtccgagcggtcttccaccagcggcggatatatcttttacacattttccacagtgcatcccattcctgacgaagactccccatggattactgactcgaccgataggattccggctacgaacagaaatgacgtgaccggaggaaggagggatccgaaccattccgaaggttcgaccactctgctcgagggttatactagccactacccccacacaaaggaatcaaggaccttcatcccggtgaccagcgccaagactggcagtttcggcgttaccgcagttacagtcggcgactctaacagcaatgtaaataggtcattgtcgggggatcaggacacattccatccttcaggcggcagtcacactacacacggaagtgagagcgacgggcattcccacgggtcccaggaaggtggggctaacactacaagtggacccattcgaacaccacagatccctgaatggctaatcattttggccagtttactcgccctcgcactgatcttggcagtgtgtatcgcagtgaattcccgcagaaggtgcggacagaaaaagaaattggtgattaatagcggtaacggggctgttgaggacagaaaacctagcgggctgaacggggaggcttcaaagtctcaggagatggtacatctggtcaataaagaatccagcgagactccagatcagttcatgaccgccgatgaaactcgaaatctgcagaatgttgatatgaagattggcgtttag

SEQ ID NO: 14447 - DNA, 2025 bp, synthetic construct
  misc_feature 1..2025: note = Description of Artificial Sequence: Synthetic coding sequence
  source 1..2025: mol_type = other DNA
atggataagttttggtggcacgccgcctgggggctgtgccttgtccctttgtcactcgcgcagatcgatttgaacatcacctgtcggtttgccggagtgttccacgtggagaaaaacggacgctactctatttcacggacagaggccgctgatctgtgcaaggcatttaattctacgttgcccactatggcccagatggaaaaagccttatctataggttttgagacttgccgttatggtttcatcgaaggacatgtagtcataccccgcatacacccgaactccatctgtgctgcaaacaatacaggggtgtatattctaacgagcaacacttcccagtacgatacatactgctttaacgcaagcgccccccccgaagaggactgcacatcagtgactgacctccccaacgcctttgatgggcccatcactatcaccattgttaaccgcgatggaacccgatacgtgcaaaaaggtgagtacagaactaaccctgaagatatctaccctagcaacccaaccgatgacgacgtttctagcggcagctcctccgaacgttcaagcacttctggaggctacatcttttacacattcagcactgtccaccccattcctgatgaagactccccctggatcacggactctaccgatcgaatccccgccaccaccctgatgtcaaccagcgcaacggccaccgaaaccgctacaaagcggcaggaaacgtgggattggttcagctggctgtttttgccttctgagagcaaaaatcacctgcataccaccacccagatggcgggtacaagctccaacacaatctcagccggatgggagcccaatgaagagaatgaagacgagcgcgataggcacctctccttttctgggagcggcattgacgacgacgaagactttatatcatctacaattagcaccacgccaagagccttcgaccatactaaacaaaaccaggactggactcagtggaacccttcccactcaaatccagaagtcttgctgcagacaactacccgaatgacagacgtggatagaaacggcacaaccgcatacgaagggaactggaatccagaagctcaccctcccctaatccatcacgagcatcacgaggaggaagaaactccccacagtacttcgacaatccaggcgacaccgagctctacaaccgaagaaacggcaactcagaaggagcaatggttcggtaacaggtggcacgaggggtatcggcagacccccaaagaagactctcattccaccacgggtactgctgccgcatccgcccatacgtcgcatccaatgcaaggccgaacaaccccctccccagaggacagtagctggacagacttcttcaatccaattagccacccgatgggtcggggccatcaagcaggccggcgcatggacatggattcatctcacagtatcaccctgcaaccaacagcgaaccctaacacaggtctggtggaggacttagacagaaccggccccctttccatgaccacacagcagtcgaattcccagtctttctccaccagccacgaagggctggaagaagacaaggaccatccaacgacctcaacactcaccagtagtagagaccaagacacattccaccccagcggcggctcacacacgactcacggaagcgagtccgacggtcatagtcacggctctcaggaaggaggcgccaacactacttcagggcctatacggactccacagatccctgagtggcttatcatccttgcaagcctattggccctggctctgatattagccgtgtgtattgctgttaacagtcgacgtcgatgcggtcagaagaagaaactcgtcataaattctggaaacggcgccgtcgaggataggaaaccatctgggcttaatggagaggcctcgaaaagccaagagatggtgcatctagtgaacaaggagagctctgaaacccccgatcagttcatgacagccgacgaaacacgtaatttgcagaacgtggacatgaagatcggcgtatag

SEQ ID NO: 14448 - DNA, 2100 bp, synthetic construct
  misc_feature 1..2100: note = Description of Artificial Sequence: Synthetic coding sequence
  source 1..2100: mol_type = other DNA
atggataaattttggtggcacgcggcctggggactttgtttggtgcccctaagcctggctcagatcgatttgaacattacttgccgtttcgctggcgtgtttcacgtcgagaagaacggaagatattcaattagtagaacggaggcagccgacctctgtaaggctttcaactctacactgccaaccatggcccaaatggaaaaagccctgtcgataggttttgaaacctgccggtacggctttatcgaaggtcacgttgttataccacggatccacccaaactccatctgtgctgcaaataataccggcgtgtacatcttgaccagcaacacaagtcagtacgatacatactgcttcaacgccagcgccccgccagaagaggattgtacgtcagtaactgacctgccaaacgcctttgacgggcctattaccatcaccattgtcaaccgagatggtactagatatgttcaaaagggcgaatatcgcacaaatcctgaggatatctaccccagtaaccctactgatgatgacgtgagttctggctcaagcagtgaaagatcctccaccagcggcggctatatcttttataccttctctaccgtccatccaatcccagatgaggactctccctggatcacagactcaacagatagaatcccggctaccaccctcatgtccacttcggcaaccgcgacagaaacagccacaaagcgccaagagacgtgggactggttttcctggctgtttctaccaagtgaatccaagaatcacctgcacacaaccactcaaatggcgggaacttcctccaataccatctccgccggatgggaacctaatgaagagaatgaagacgagagagatagacacttatcctttagtggtagtggaatcgatgacgatgaagatttcatctcatccacaatcagcactacacctcgcgcctttgaccatacaaagcagaaccaggattggacacaatggaatccctctcactcgaatcccgaggtgcttcttcagactacgacacgaatgacagatgtggaccggaacggcaccacagcatatgaaggcaactggaaccccgaggcgcatccacctcttattcaccatgaacatcatgaagaggaggagactccccactcaactagcactacagctagtgctcacactagccacccaatgcagggacgcaccaccccatcacccgaagattcctcatggacagacttcttcaatccgatcagccaccccatggggagggggcaccaggccggcagacgcatggatatggattcctcacattcaattactctgcaacccacagcaaacccgaataccgggctggtcgaggatctcgacaggacgggcccactcagtatgactacccaacaatccaactcccaaagcttctctactagccacgagggactggaagaggataaagaccatcctacaacttctaccctgacctcatccaaccggaacgacgtaactggagggaggcgagaccccaatcatagcgagggtagtacaaccctgctcgagggatatacttcccactatcctcacacaaaggagtccaggacattcattcccgtcacatcggctaaaaccgggagttttggcgtgacagcagtgacagttggagattccaactccaacgttaatcgatccctctctggagatcaggacacctttcatcctagcggcggctcccacacaacacacggaagcgaatcagacggtcacagccacggtagtcaggagggcggggccaatacaaccagcggccccatccggacacctcagattcccgagtggctgataatactggctagtttgctggctcttgcccttatcctggcggtctgcatcgccgtcaactcacgaaggaggtgcgggcaaaaaaaaaaactcgtgatcaatagcgggaacggcgcggtggaagaccgcaagccctccggcctgaacggggaggcttccaagagccaggaaatggttcatctggtgaacaaagagtctagtgaaacccccgatcagtttatgactgcagacgaaacacgtaatttgcagaacgtagatatgaagatcggcgtttag

SEQ ID NO: 14449 - DNA, 237 bp, synthetic construct
  misc_feature 1..237: note = Description of Artificial Sequence: Synthetic coding sequence
  source 1..237: mol_type = other DNA
atggataaattttggtggcatgcggcctggggcctgtgccttgtccccctctcgcttgcacaaattgatcttaatattacctgcagattcgcgggggtcttccatgtcgagaaaaacggtcgatactctatatccaggactgaggctgctgacttatgtaaagctttcaactctaccctgcctacgatggctcagatggaaaaggctttgtccattggtttcgagacatgccggtag

SEQ ID NO: 14450 - DNA, 885 bp, synthetic construct
  misc_feature 1..885: note = Description of Artificial Sequence: Synthetic coding sequence
  source 1..885: mol_type = other DNA
taggacaaattttggtggcacgcggcctggggactatgtctcgtcccgctcagtctagcccagatcgatttgaacattacctgccgctttgccggagtcttccatgtggagaaaaacggacgctattctatatccaggacagaggctgcagacctgtgtaaggcattcaactctaccctccccaccatggctcagatggaaaaagctctctctattggctttgaaacctgtcgttatggcttcatcgaaggacatgtcgttattccgaggatccatccaaactcaatttgtgccgccaataatacaggcgtttacattctgactagcaatacgagccagtacgatacctactgtttcaacgcatcggcgcccccagaagaagactgcacatccgtgaccgatctgcctaacgcattcgatggccccatcactatcactattgtgaatcgggatggaacacgatacgtacagaagggtgaatacaggacaaatcccgaggacatttacccatccaatcccacagatgacgacgtatcttctggctcctccagcgaacgtagctctacaagtggcggctacattttctacaccttctctaccgtgcatccaattcctgacgaggacagcccatggattactgacagcaccgatcggattcctgcaacacgagatcaggacacatttcacccttctgggggcagccacacaactcacggctcagaatccgatgggcatagccatgggtcccaagagggtggggcaaacacaactagcggacccattcgcacgccacagataccagagtggcttattattcttgcctcactcctggctctcgccctgatcctagcggtgtgtattgctgtgaacagtaggcggtcttag

SEQ ID NO: 14451 - DNA, 918 bp, synthetic construct
  misc_feature 1..918: note = Description of Artificial Sequence: Synthetic coding sequence
  source 1..918: mol_type = other DNA
atgtggccattggtcgcggccctcctgcttggaagcgcctgttgcgggtccgctcagttactttttaacaaaactaaatccgtggaatttaccttttgtaacgatactgtcgtgatcccttgcttcgtgaccaacatggaagcccagaacacaacagaggtctacgtcaagtggaagtttaaaggcagagatatttacacattcgacggcgcgctcaacaagagtactgtgccaactgatttctcctctgctaagatagaagtgtcccagctattgaaaggggacgcctccctgaaaatggataagagcgacgcagtaagccacactggaaactatacctgcgaagtgacagaactcactcgtgaaggggaaacgataatcgagttgaagtatcgcgtggtgagctggttctcgccaaacgagaatatcttgatcgtgatctttccaatctttgcgatcttgctgttctggggccaattcgggatcaagacactaaaataccggtctggaggaatggacgagaagacaatcgctttattagttgctgggttggttatcacagtcatcgtgattgtgggtgcaattctgtttgtgcctggagaatactcactcaagaacgccacaggccttggcctgatcgtgacaagcactggcatactgatactgcttcattattacgtgtttagtaccgcaattggattgacaagttttgtaatcgccatcctcgttattcaggtgatcgcctacattcttgcggtagtaggactgagcttgtgcattgcagcttgtatccccatgcatggaccgctgcttatttcagggctatccattctagcgctggcccagctgcttgggctcgtttatatgaagtttgttgctagtaatcaaaagactatccagcctccccggaacaattag

SEQ ID NO: 14452 - DNA, 972 bp, synthetic construct
  misc_feature 1..972: note = Description of Artificial Sequence: Synthetic coding sequence
  source 1..972: mol_type = other DNA
atgtggccgcttgtagcggcgctgcttttgggaagcgcttgctgcgggagcgcacaactgttattcaacaagacaaaaagcgtggagtttactttctgcaacgacacagttgtgattccctgctttgtgacgaacatggaggcccagaataccacggaggtctacgttaagtggaagttcaaaggtagagatatttatacattcgacggcgccctcaacaaatctacagtgccaaccgatttctcctccgcgaaaattgaagtatcacaattactaaagggcgatgcaagtctgaaaatggataaatccgacgcggtgtctcacacggggaattatacatgcgaggttacggagctgacgcgggaaggagagactatcattgaattaaagtatcgggtagtctcatggttctcaccgaacgagaatatactgatcgtgattttcccaatcttcgccatacttttgttttggggccagtttggaatcaagactcttaaatataggtctggcgggatggacgagaagaccattgcccttctggtggcgggcttggtgatcacagtcatcgtaattgtaggggcaatccttttcgttcctggcgaatactccttgaaaaacgctaccggccttggactgatagtcaccagcactggtatactgattctgctacactattatgtcttttccacagccatcggtttaactagctttgttatcgctatcctggttatccaggtcatcgcttacatccttgccgtcgttggcctgtccttgtgtatagctgcatgcatacccatgcatgggcctttgctcatctccggattgtctattctggctctcgcgcagttgctgggactggtttacatgaaattcgtcgcatccaaccagaaaacaatccagccacctaggaaagcggtggaggagcccttgaacgctttcaaggagtccaaggggatgatgaacgatgagtag

SEQ ID NO: 14453 - DNA, 1488 bp, synthetic construct
  misc_feature 1..1488: note = Description of Artificial Sequence: Synthetic coding sequence
  source 1..1488: mol_type = other DNA
atgccaatgggcagtctgcagccacttgctactctgtaccttctcggaatgctcgtcgctagttgtctaggtcgcctgtcatggtacgatcccgatttccaggcccgcctgacgcggtctaacagcaaatgccagggccaactcgaagtgtatctgaaggatggatggcacatggtatgcagccagagttggggtcggagttctaagcaatgggaagacccgtcacaggcttccaaggtctgccagcggttgaactgcggcgttccgctctctttaggccccttcttagtgacgtacacccctcagtcaagtatcatctgctacgggcagctaggcagtttcagcaattgttctcacagcaggaacgatatgtgtcattctctgggactgacttgccttgagcctcagaaaaccactcctcctactacacgaccccctcctactaccactcccgaaccgaccgccccccctagattgcagcttgtggctcaatcaggcgggcagcattgtgcgggggttgtcgagttctatagcggaagtctcggaggtacaatttcctacgaggcccaggataagacccaggatttggagaatttcttgtgcaataacttacagtgcggaagtttcctgaaacaccttccggagaccgaagccgggagggcccaagacccgggcgaacccagagaacaccagccgcttcccatccagtggaagatacagaattcctcctgcactagcctcgaacactgctttaggaagatcaagccccaaaaatctggaagagtgctagccctactgtgctcaggattccaacccaaagttcagtccagattggtgggcggttcttccatatgcgagggaaccgttgaggtccgacaaggcgcccagtgggctgccctctgtgattcatcctcggcacgctcatctcttcgctgggaggaggtctgccgagaacagcaatgtggatctgtcaactcttatagggtgttggatgctggcgacccaactagccgcggactgttctgtccacaccagaagttatcgcagtgtcacgagttgtgggaacggaactcatactgcaaaaaggtgttcgtgacctgtcaggatcccaatcccgctggactggccgcagggacagtggctagcatcattctggctctggtgctgttggtcgttctgctggtcgtgtgtgggccgctggcgtataaaaaactagttaaaaagttccgacagaaaaagcagaggcagtggatcggccccaccggcatgaaccaaaacatgagcttccatcgaaaccacactgccaccgttcggtctcatgcagaaaaccctacagcatcgcatgttgacaacgaatactcacaacccccgaggaatagtcacctatcggcatacccagcactggagggcgctctgcatcgctcaagtatgcagcctgacaacagttccgacagcgattacgacctgcatggcgcacagagactgtag

SEQ ID NO: 14454 - DNA, 582 bp, synthetic construct
  misc_feature 1..582: note = Description of Artificial Sequence: Synthetic coding sequence
  source 1..582: mol_type = other DNA
atgcccgaggaaggatccgggtgtagcgtgaggcgccggccctatgggtgcgtactgcgcgcggccctggtaccactggtcgccgggctggttatctgccttgtggtgtgcatccagaggttcgcccaagcacagcaacagctcccactggaatctctcgggtgggacgtcgccgaattgcagcttaaccatactggcccacagcaggatcctcggctgtactggcagggaggacctgccctcggcaggagctttctgcacggaccagaactggacaagggacagctcaggatccaccgagacggaatttacatggtccacattcaggtgacccttgcaatctgcagtagtacaacagcctctcggcatcatcccacgactctggcagttggcatctgctccccagctagccgctctattagcctccttcgcctgtcatttcatcagggatgtacaattgccagtcagcggttaacaccactggcccggggcgataccctatgcacgaacctcactggaaccctgttgccctcccgcaacacagacgagactttcttcggcgtgcaatgggtgagaccttag

SEQ ID NO: 14455 - DNA, 627 bp, synthetic construct
  misc_feature 1..627: note = Description of Artificial Sequence: Synthetic coding sequence
  source 1..627: mol_type = other DNA
atgcccgaagaagggtccggatgttctgttagacgccgaccgtacggatgcgtcctccgtgctgccctggtgcccctagtcgctggtctggtgatttgcctggtcgtgtgtattcagcgcttcgctcaggcccagcagcagctgcctctggagtcactcgggtgggatgtagccgagttacaattgaaccacaccggaccccagcaggacccccgattgtattggcagggtgggccggctctcggccggtcttttcttcatggtcctgagcttgataaaggccagctccggatccacagagatggcatctatatggtccacatccaagtcactttagccatctgtagttctacgacggctagccggcatcatccaaccaccctggccgtagggatttgctctcctgcatcccgaagcatttcactgctgcggctgagcttccatcaaggactgtttggcttctggaattggggcctgaaagtcaagtgcttcctgcgccacctcatttggaccgcccactgcttcatacctttgacccagctggtgtttatgcaggcgctgcagtcctggaggaaccaccactgttctcacttcacagacgaagaaaatagaggcgtcaatagatag

SEQ ID NO: 14456 - DNA, 1305 bp, synthetic construct
  misc_feature 1..1305: note = Description of Artificial Sequence: Synthetic coding sequence
  source 1..1305: mol_type = other DNA
atgagtgccgacggggccgaggccgatggatcaactcaggttacagtcgaagaacccgtgcagcagccatcagtggtagatcgtgtcgcctctatgcctctcataagctctacctgcgacatggtcagtgccgcctatgcctcaaccaaagagagttaccctcacataaaaaccgtgtgcgacgctgccgagaaaggtgtaagaaccttgactgcagcggctgtttccggggcccagccgatactgagcaagctggaaccgcagattgctagtgcctcggagtatgctcacagaggcctggacaaacttgaggaaaacctgccaatattgcaacagcccacagagaaggtccttgcagataccaaagagttggtctcctctaaagtctccggagcccaagaaatggtgagttctgcaaaggacactgtggccacccagctgagtgaagctgtcgatgctacacgcggagcagttcagtccggcgtagacaagaccaaaagtgtggtaaccgggggggtgcagagcgtgatgggatccagactgggccagatggttctaagcggagtcgatactgtgctaggcaagtctgaggagtgggctgacaatcacctgccactcaccgatgctgaactggccaggatcgccactagcctggatggcttcgacgttgctagcgtgcagcagcagcgtcaggagcagtcatactttgtgcgacttgggtccctctctgaaagactccggcagcacgcctacgaacactctctgggcaagctgagggcgacaaagcagcgtgcccaagaagcgcttttgcaactgagccaggtcctaagcctgatggagactgtaaagcagggagtcgatcagaaattggtggagggtcaggagaaactgcaccaaatgtggctaagctggaaccagaagcagcttcagggacctgagaaggagccccccaagccagaacaggttgagtccagggcactcaccatgttccgcgatatcgcccagcaactgcaggctacgtgcaccagcctcggaagtagcattcagggcctgcctacgaacgttaaggatcaagtgcagcaggcaagacgacaggtcgaggatctacaagccactttcagttcgattcacagtttccaggaccttagctcaagcattctcgctcaatctagggaacgggttgcgtcagcccgggaggcccttgaccatatggtggaatacgtagctcagaacacacccgtgacctggctggtggggccttttgcccctgggattaccgagaaggctcccgaggagaaaaaatag

SEQ ID NO: 14457 - DNA, 567 bp, synthetic construct
  misc_feature 1..567: note = Description of Artificial Sequence: Synthetic coding sequence
  source 1..567: mol_type = other DNA
atgcccggcggccccggagtgttgcaagctctgcccgcaactatatttttgctgtttcttctgtcggcggtctaccttggaccaggttgccaggcactgtggatgcataaggttcctgcatccctgatggtctccttgggggaagatgcccattttcaatgcccccacaatagttcaaacaacgcaaatgtgacttggtggagagtactgcacggaaactacacatggcctcccgagttcttgggtccaggagaggacccaaacgagcccccgccacggcccttcctggacatgggagaaggtaccaagaacagaatcatcacggccgaaggtataattttactgttctgtgccgttgtccctggcacactgctgctttttagaaagcggtggcagaatgagaagttggggctggacgccggcgacgaatatgaggatgagaatctctatgagggtctcaacctggacgattgttcgatgtacgaagacatctcccgcggattgcaggggacgtaccaggacgtgggctctcttaatataggcgatgtgcaactcgagaagccctag

SEQ ID NO: 14458 - DNA, 867 bp, synthetic construct
  misc_feature 1..867: note = Description of Artificial Sequence: Synthetic coding sequence
  source 1..867: mol_type = other DNA
atgggtcacacgcggaggcagggcactagtccatcaaaatgcccctatctgaatttcttccagctgttggtcctggccggcctctcacacttttgcagcggcgtgatccatgtcaccaaggaagtcaaggaagtcgcaaccctgtcttgcgggcataatgttagcgtggaggagctggcccagactcgaatttactggcaaaaagagaagaagatggttctcacaatgatgtcaggcgatatgaacatttggcccgaatacaaaaaccggacgatctttgacattaccaacaatctttccattgtcatattagctctgaggcccagcgacgaagggacatacgagtgcgtcgtgcttaaatatgagaaggatgcatttaaaagggagcaccttgcagaagtgacgctcagtgtcaaggcagactttccgacccccagcatcagtgatttcgaaattccaacatccaatatacgtagaatcatttgttcgacgtccggaggctttcccgagccacatctctcctggctggaaaacggcgaggagcttaatgccatcaacaccacagtgtcacaggatcctgaaaccgagctttacgccgttagctctaagctggatttcaatatgaccacaaaccacagttttatgtgtttaattaagtacgggcacctgagagtgaatcagaccttcaattggaataccaccaagcaagagcacttccctgataacttgctcccgtcctgggcaattactctcatttcagtgaacggcatatttgtcatctgttgtcttacctactgtttcgcaccgaggtgcagagaacgcagaaggaacgaaagactccggcgggaaagcgtcagacctgtttag

SEQ ID NO: 14459 - DNA, 489 bp, synthetic construct
  misc_feature 1..489: note = Description of Artificial Sequence: Synthetic coding sequence
  source 1..489: mol_type = other DNA
atgggacatactcgtcgacaagggacatccccatcaaagtgcccttaccttaacttttttcagttgctggtcctcgccgggctgagccatttttgttcaggtgttatccacgttacgaaagaagtgaaagaagtggctactctgtcatgtgggcataacgtttccgtggaagaactggcccagacccggatctactggcaaaaggaaaaaaagatggtgcttaccatgatgagcggggatatgaacatctggccagaatataaaaatcgaactatctttgatataaccaacaatctgtctatcgtgattctggcattacggcctagtgacgagggtacatacgaatgcgtagtgctgaaatacgagaaggacgctttcaaacgggaacatttggccgaagtcactctgtccgttaaaggattcgctcctcgatgtcgggagaggcggagaaatgaacgccttcggagagagagcgtgaggcctgtctag

SEQ ID NO: 14460 - DNA, 771 bp, synthetic construct
  misc_feature 1..771: note = Description of Artificial Sequence: Synthetic coding sequence
  source 1..771: mol_type = other DNA
atggggcacacaaggagacaggggactagtccgagcaagtgtccttatctgaatttcttccagctgctggtgctggccggcctcagtcacttttgtagcggggtgatccatgtcactaaagaggtgaaggaggtagccacgctttcttgtggacacaacgtgtctgtggaagagctagcccagacccggatttactggcaaaaagagaagaagatggtgctgacaatgatgtcaggggacatgaacatttggccagaatacaagaacagaaccatatttgacatcaccaataacctaagcattgtgatccttgccctgagaccatcagacgagggcacatacgaatgcgtggtcttaaagtacgagaaggacgcatttaagagagaacatctggctgaggtgaccctgtccgtgaaggcagatttcccaaccccttccatctccgactttgagattccaacaagtaacatcaggcggattatctgtagtacaagcggaggatttcccgaaccccatttaagctggcttgagaacggagaggaactgaatgccatcaatacgacagtgtcccaggatccagagacagagctgtatgctgtatctagcaagttggatttcaacatgactactaaccacagttttatgtgcctgataaagtatggccacctaagagtgaatcagacatttaactggaatacctctttcgcccctcggtgcagggaaagacggaggaatgagaggcttcgccgcgaaagcgtcaggccagtctag

SEQ ID NO: 14461 - DNA, 867 bp, synthetic construct
  misc_feature 1..867: note = Description of Artificial Sequence: Synthetic coding sequence
  source 1..867: mol_type = other DNA
atgggccacacccgccgacaaggcacaagcccaagcaaatgtccttacctcaattttttccagctacttgttctcgcaggactctcgcacttctgctctggggtgattcatgtgactaaagaggtcaaagaagttgcaaccctgtcatgtggccacaacgtgtctgtggaagaactggcacagacccgaatttattggcagaaggagaagaaaatggttctcacaatgatgagtggggacatgaacatctggcctgagtacaagaacaggactatctttgacatcacaaacaacctttcaatcgtcatactggctctcagaccatccgacgaggggacatatgaatgcgtggtgctgaaatatgaaaaagatgcctttaaacgtgaacaccttgcagaagtgaccctctctgtgaaagccgactttcccacacccagcatcagcgattttgaaatcccaaccagcaacatccgccgcattatatgtagtacaagcggtggattccccgaaccacacctgtcttggctggaaaatggagaggaactcaacgccatcaacacgactgtgtctcaggaccccgagacggagctttacgcggtgagctccaaactggattttaatatgacaacaaaccactccttcatgtgcctcatcaagtatggtcatctgcgggtgaatcagacattcaattggaacaccaccaaacaagagcactttccggacaatctactcccgtcctgggctataactctgattagcgtgaatggtattttcgtgatttgttgtctaacctactgttttgcgccaaggtgtcgtgaaagacgccgcaatgaacggctgagaagggaatccgtgcggcccgtctag

SEQ ID NO: 14462 - DNA, 456 bp, synthetic construct
  misc_feature 1..456: note = Description of Artificial Sequence: Synthetic coding sequence
  source 1..456: mol_type = other DNA
atgtctataccattctcaaatacacactacaggattccacagggcttcggcaatcttctggaaggactgaccagggagattctccgggaacagcctgacaatattcccgcgtttgcggcagcctacttcgagagcctcctcgaaaaacgcgaaaagacgaattttgatccggcagaatggggctcaaaggtcgaggatcgcttttacaataaccacgccttcgaggaacaggagccaccggagaaaagtgaccctaagcaagaggaaagccagatttccggaaaagaagaggaaacatctgtaacaattctcgactcatcagaggaagataaagagaaggaggaggtcgcagcggtgaagattcaggctgctttccgcgggcatatagcccgagaggaagctaagaaaatgaagactaatagcctccaaaacgaggaaaaggaagaaaacaaatag

SEQ ID NO: 14463 - DNA, 729 bp, synthetic construct
  misc_feature 1..729: note = Description of Artificial Sequence: Synthetic coding sequence
  source 1..729: mol_type = other DNA
atgggaagtgcatgtatcaaagttacaaagtatttcctgtttttatttaatctgatcttctttatcctgggcgcagtgatcctggggtttggggtctggatcttagcggataagagctccttcatttcagtcctgcagacaagttcaagctcccttaggatgggcgcctatgtctttatcggggtcggagcagtgacaatgctcatggggttcctgggctgcatcggagctgtaaatgaggtgcgatgcctccttggcctgctgaaacaggaaatgggaggaatagtcactgagctgatacgagattacaactccagccgagaagactccctgcaggacgcctgggactacgtccaggcgcaagtcaaatgctgtgggtgggtttcgttctacaattggacagacaacgcagagcttatgaacaggcctgaggtaacgtacccttgcagctgtgaggtgaagggagaagaagacaactctctgtccgtgcgcaagggcttttgcgaggcccctggaaaccgtacccagagtggaaaccatccagaagactggcccgtgtatcaggagggatgtatggagaaagttcaagcttggctccaagagaacctggggatcatcctgggggtgggcgtcggggtcgcaatcattgaactcctagggatggttttgtcaatttgcctatgccgccacgtgcattcagaagactactcgaaagtgcctaagtactag

SEQ ID NO: 14464 - DNA, 207 bp, synthetic construct
  misc_feature 1..207: note = Description of Artificial Sequence: Synthetic coding sequence
  source 1..207: mol_type = other DNA
atgggctctgcttgcatcaaggtgacaaagtatttcctgttcttgtttaatctcatatttttcattctgggcgccgtgatactgggcttcggagtatggatcctggccgataagtcatccttcatttccgttctccagacgtcttccagttctctcaggatgggcgcctatgttttcatcggtgttggggccgtcaccatgctctag

SEQ ID NO: 14465 - DNA, 117 bp, synthetic construct
  misc_feature 1..117: note = Description of Artificial Sequence: Synthetic coding sequence
  source 1..117: mol_type = other DNA
atgggcagtgcctgcataaaagttacaaagtatttcctttttctctttaatctcatctttttcattcttggggcagttatcctcggattcggagtgtggattttagccgacaagtag

SEQ ID NO: 14466 - DNA, 318 bp, synthetic construct
  misc_feature 1..318: note = Description of Artificial Sequence: Synthetic coding sequence
  source 1..318: mol_type = other DNA
atggggtccgcatgcatcaaagtcacaaaatactttctgtttctctttaatctgattttttttatcctgggagccgtcatcctgggctttggggtgtggattctggcagacaagtcttcttttattagtgtcctgcaaacaagctcttccagtttgcggatgggtgcatacgtattcattggcgtcggggcagtcaccatgctcatgggatttctggggtgcattggagctgttaatgaggttaggtgtctgttggggctctactttgcctttttgctgctgatcctgattgcccaggtcaccgccggtgctctctag

SEQ ID NO: 14467 - DNA, 327 bp, synthetic construct
  misc_feature 1..327: note = Description of Artificial Sequence: Synthetic coding sequence
  source 1..327: mol_type = other DNA
atgggctccgcatgtatcaaggtgactaagtattttctgttcctgttcaacttgatatttttcatccttggtgcggttattctggggttcggggtgtggatcctggccgacaaatcgagtttcataagcgtcctccagacgagttccagcagtctacgaatgggagcgtatgtgttcatcggggtcggtgcagtcacaatgctgatgggcttcctgggttgtatcggtgccgtcaacgaggtgcgatgcttgctcggattgtactttgccttccttttgctgattctgatcgcccaggtgacggctggcgcccttttctacttctag

SEQ ID NO: 14468 - DNA, 708 bp, synthetic construct
  misc_feature 1..708: note = Description of Artificial Sequence: Synthetic coding sequence
  source 1..708: mol_type = other DNA
atggccctgcctgtcactgcactgctcctaccccttgcccttcttttacatgcagctagaccttcccagttccgcgtgtcccccttggaccgcacctggaatctcggagagacggtcgagctgaagtgccaggtgctcctgagtaacccaacgtcaggatgttcatggctttttcagccccgtggcgccgccgcctccccaaccttcctgctgtacctgagccagaataaacctaaggccgcagagggcctggacacacagagattcagcgggaagcgcttaggtgatacttttgtccttacactctctgatttcagacgcgagaatgagggatactacttctgtagcgcactgtccaacagcatcatgtacttctcgcatttcgttccagtgttcttgcctgctaaacccacaacaactcccgctcctcgccctccaactcccgccccaactatcgcatcacagcccctgagcctcagacccgaagcgtgtcgcccagctgccggcggcgctgtgcatacaagggggcttgactttgcttgcgacatttacatttgggctcctctggccggcacctgtggggtgctcctgcttagcctggtgattacactctattgtaatcataggaatcgccgtcgtgtatgcaaatgcccgagacctgtcgtgaaaagtggagacaagcctagcctgagcgccaggtatgtctag

SEQ ID NO: 14469 - DNA, 597 bp, synthetic construct
  misc_feature 1..597: note = Description of Artificial Sequence: Synthetic coding sequence
  source 1..597: mol_type = other DNA
atggctttgccagttacagccctgttgctgcctctggcactactgctccatgccgcgagaccatcccaattccgggttagtccccttgaccggacctggaatctcggtgagaccgtggagctgaaatgtcaggtactgctgagcaacccaaccagtggctgttcatggctattccagccccgcggggccgcagcctctccgacttttctgctatacctttcccagaataaacccaaagccgccgaaggcctcgacacacagcgttttagtggcaaacgtctgggcgacacattcgttttgacactgtccgatttccgaagagaaaatgagggatattacttctgcagcgcactcagtaactccatcatgtacttctcacacttcgtgcctgtgttcctcccggctaagcctaccacaacacctgcccctcgccccccgacaccggcccccacaatcgcttcccaacctctgtccctccggcctgaggcttgcaggcccgctgccggcggcgcaggtaacaggaggcgcgtgtgcaagtgtccgaggcccgtggtcaaatccggagacaaaccaagtctgtctgctcggtacgtctag

SEQ ID NO: 14470 - DNA, 708 bp, synthetic construct
  misc_feature 1..708: note = Description of Artificial Sequence: Synthetic coding sequence
  source 1..708: mol_type = other DNA
atggcgttgccagtcactgccctgttgctgccattggctctactgcttcacgcagcccgaccgtcacagttccgagtctccccccttgaccgtacatggaatctcggagagaccgttgagctgaagtgtcaggtgcttttaagcaatcccaccagtggttgtagttggctattccagcctaggggggccgctgcttccccgacgtttcttttatacctctctcaaaacaaacctaaagccgcagaagggttagatacacagagatttagtggaaagaggctgggtgataccttcgtcctgacactgagtgacttcaggcgtgagaatgaaggttattacttctgctctgctcttagcaattccattatgtactttagccacttcgtgccagtcttcctccccgcaaaacctacaaccaccccagcccctagacccccaacccccgcaccgaccatagccagccagcctctgtctttgagaccagaagcatgccgcccagccgctgggggggccgtgcacacaaggggactcgacttcgcttgtgatatctatatttgggcacccctggcagggacctgtggagtgctgctgctgtctctcgtgattaccctctactgcaaccataggaaccggaggcgagtgtgtaagtgtccacgccccgtagtgaagtcaggcgataagccctctcttagcgctcgctatgtctag

SEQ ID NO: 14471 - DNA, 597 bp, synthetic construct
  misc_feature 1..597: note = Description of Artificial Sequence: Synthetic coding sequence
  source 1..597: mol_type = other DNA
atggccctccctgtaaccgcactgctactgcctcttgccctcctcctgcacgccgctaggccctcacaatttagagtttctccgttagacaggacctggaatctgggggagacagtggagctaaaatgccaggtgctcctgtctaacccaactagtggctgctcatggttattccagccacgaggtgcagctgcctcccccacctttctgctctatctgagtcaaaacaagccaaaggcggccgaaggtctggatacacagaggttttccggtaaacggttaggcgatacctttgttcttaccttgagcgacttcagaagagagaatgaaggatattacttctgctccgcattgtccaactcaatcatgtacttttcccattttgttccggtcttcctgcccgtgcacacacgcgggctggacttcgcctgcgacatctacatctgggctcctctagctgggacctgtggagtcctgcttttgtcccttgttattaccctttactgcaaccaccgcaatcggaggagggtttgcaaatgtccgcggccagtggtgaagtcaggagacaaacccagccttagcgcacggtacgtctag

SEQ ID NO: 14472 - DNA, 663 bp, synthetic construct
  misc_feature 1..663: note = Description of Artificial Sequence: Synthetic coding sequence
  source 1..663: mol_type = other DNA
atggcactgcccgtgaccgctttgctgcttccattggcactacttttacatgccgcccgccccagtcagtttagagtgtcccctttagatagaacttggaatctcggtgaaactgtggagttaaagtgtcaggtgctactctccaaccctactagtggttgctcctggttgttccagccacgcggcgccgcagcctctcccacctttctcctgtacctgagccaaaacaaaccaaaagcggcagagggcctggacactctgagcgatttccgcagagaaaacgaaggatactacttttgttctgcacttagtaattcgatcatgtatttttcacactttgtccctgtgtttcttcccgcaaagccaaccacgactccagctccccgcccgccaacccctgccccaacaatagccagtcagcccttgtccctgcgaccagaggcctgcagacctgctgctggcggggcagtgcacacaaggggactggacttcgcttgtgatatttacatctgggcgccactcgcaggtacatgtggtgtcctgctgctttccctggtgataaccctgtactgcaatcatcggaacaggaggagagtgtgcaagtgccctagaccagtggtgaagtcaggagacaagccctccctgagcgcccgatacgtctag

SEQ ID NO: 14473 - DNA, 597 bp, synthetic construct
  misc_feature 1..597: note = Description of Artificial Sequence: Synthetic coding sequence
  source 1..597: mol_type = other DNA
atggccctgcctgtcaccgcactcctgctgccattggccctactgctccatgcagcccggccctcacagtttcgcgtgagccccctggaccggacgtggaatctaggcgagactgtggagctgaagtgtcaggtgctgttgtccaatcccacaagcgggtgctcgtggctcttccagccgcgtggagccgccgcttccccaactttcctgctgtacctgtcgcagaataaacctaaggccgcagaggggctggatactcaaaggttctccgggaaacggctcggcgatacattcgtactgaccctgagtgattttcgccgcgagaacgagggatattacttctgtagcgccctttccaactcaattatgtacttctcccattttgttccggtgtttctccccgcaaaacccactactacacccgcccccagaccccctacccccgccccaactattgcttctcagcctctgagtctgcgaccagaagcttgtaggccagcggctggcggcgccgggaacagaaggagggtgtgtaaatgccctagaccggtagtcaagtctggagacaaaccctccctcagcgccaggtacgtttag

SEQ ID NO: 14474 - DNA, 831 bp, synthetic construct
  misc_feature 1..831: note = Description of Artificial Sequence: Synthetic coding sequence
  source 1..831: mol_type = other DNA
atgcgaaatcaggcccctggcagacctaagggagccacattcccccccaggcgcccaacaggcagtagggctcccccgctggctcctgagctgagggccaagcaacggcccggagagagggtcatggccctccctgtaactgccctgctgcttccactcgcacttcttctccacgccgcacgtccgagccagttcagagtctcgcctctggatcgcacatggaacctcggcgaaacggtggaactgaaatgccaggtgctgctcagtaaccctacgagcggttgctcttggctctttcaaccccggggtgctgcagcttcccccacatttttgctttatctttcccagaataaaccgaaggcagcggaagggttggacactcaacggtttagcggaaaacgcctcggggacacgttcgtgctcacactatccgattttcgcagggagaatgagggctactacttttgctcggccctgagtaacagtattatgtacttctctcacttcgttccagtttttctgcccgctaagcctactactactcccgcacctcgcccccctacaccggcacccacaatagccagtcagccactctcactgcgcccggaggcgtgccgccctgcagccggaggagctgttcatacccgggggctggatttcgcgtgcgacatatacatctgggcccccttggcagggacctgtggcgttcttctcttgtcactggtcatcaccctatactgcaatcaccgcaaccggcggcgggtttgtaagtgtccaaggcctgttgtcaagtctggcgacaaaccctcgctttccgcacgctatgtctag

SEQ ID NO: 14475 - DNA, 240 bp, synthetic construct
  misc_feature 1..240: note = Description of Artificial Sequence: Synthetic coding sequence
  source 1..240: mol_type = other DNA
atgtcccacaaacagatatactactccgacaagtatgacgatgaggaatttgaataccgtcatgtcatgttgcctaaagatattgccaagctagtgccaaagactcacctcatgtccgaatcagagtggcgtaacctcggagtccagcagtcccaaggatgggttcactatatgattcacgagcctgagccccacatcctgcttttcaggagacctctccccaagaagcccaaaaagtag

SEQ ID NO: 14476 - DNA, 204 bp, synthetic construct
  misc_feature 1..204: note = Description of Artificial Sequence: Synthetic coding sequence
  source 1..204: mol_type = other DNA
atgtcacacaagcaaatctattactcagacaagtatgatgatgaggaattcgagtacaggcacgtaatgctccctaaggacattgccaaattagtgccaaaaacacacctaatgtccgagagcgagtggagaaatctgggagtacagcagtcacagggctgggtgcactatatgatccacgagcctggtcagtgtacgggctag

SEQ ID NO: 14477 - DNA, 192 bp, synthetic construct
  misc_feature 1..192: note = Description of Artificial Sequence: Synthetic coding sequence
  source 1..192: mol_type = other DNA
atgaggacgcgccacgtcatgctgcccaaagacatagccaaactcgtgcccaaaacccacctgatgtctgagtctgagtggagaaacctgggtgtccagcagtcgcagggatgggtgcactatatgattcacgaacccgaaccccacattttgttgttccggaggcctcttcctaagaaacctaagaagtag

SEQ ID NO: 14478 - DNA, 240 bp, synthetic construct
  misc_feature 1..240: note = Description of Artificial Sequence: Synthetic coding sequence
  source 1..240: mol_type = other DNA
atggcacacaagcagatctactactcagataagtacttcgatgagcattacgagtatcgacatgtaatgcttccgcgggagctatccaagcaggtccccaaaacccaccttatgtccgaagaagagtggcggcgtctgggggtgcagcagtcactcggttgggtgcattacatgatacacgaacctgagccccacatcctgctcttccggcgtccgctccctaaggaccagcaaaagtag

SEQ ID NO: 14479 - DNA, 1533 bp, synthetic construct
  misc_feature 1..1533: note = Description of Artificial Sequence: Synthetic coding sequence
  source 1..1533: mol_type = other DNA
atgcatcctcttcaatgtgtgctgcaggtccagcgctccctgggatggggcccgctagcatcagtttcctggctgtccctgcgaatgtgccgcgcgcattcaagcctgtcttccaccatgtgcccctctcccgagcgccaggaggatggcgcccgcaaggatttctcctccagactggcagccggtccaacatttcaacactttctgaaatctgcttcggcaccccaggagaagctgagttccgaagtcgaggatcctcccccttatctgatgatggatgagctgctcggccgtcaaaggaaggtttatctcgagacatacggatgtcagatgaacgttaacgatacagaaatcgcttggagtatcctacagaagagtgggtatctgaggacgtccaatctccaggaggccgatgtgatcctgctcgtgacctgttccatcagagagaaggccgaacagaccatttggaatcggctgcaccagctgaaggctctgaaaacccgcaggcctagaagcagagtgcctttgaggattggcattctaggttgtatggcagaacggctgaaagaggagatcctcaatcgagaaaaaatggtcgacatactcgcaggacccgatgcttaccgcgacctcccacggctcctggcggtcgcagagtctgggcagcaggcggcaaacgtgctcttaagtctggacgagacttacgccgatgttatgcccgtccagacatctgcatctgcaacaagtgcgttcgtgagtatcatgcgggggtgcgataatatgtgctcctattgcattgttccttttaccagggggcgtgagcggagtaggcccatcgccagtatcttggaagaagtgaagaaacttagtgagcaggtgctccagctgatacacgagcgcgacaacatttgcaagcagatccatcttccagcacagagcggttccagtcgtgtgttagaagccatgaggcgcggttattctagggaggcttatgtggagctggtgcaccatatcagggaaagtatccccggagtgtccttgtcttcggattttattgcgggattctgtggggagactgaggaggatcacgtgcagacagtgtctttgcttcgagaggttcagtataacatgggttttctattcgcctacagcatgcgtcagaaaacgagggcgtaccacaggctcaaggacgacgtcccagaggaagtgaaattgaggagactggaggaactgatcacaatctttcgggaagaagccacaaaagccaatcaaacatcagtgggatgcacacaactggtcctcgtagagggactgagcaagaggtccgccaccgacctgtgcggccgaaacgatgggaacctgaaggtgattttccccgacgccgagatggaagacgtcaacaaccctgggttgagggtgagagcccaacccggagactacgtgctcgttaaaatcacgagcgcatcgtcacaaacactgagagggcacgtgctgtgtcggacaactctcagagacagcagcgcctattgctag

SEQ ID NO: 14480 - DNA, 1764 bp, synthetic construct
  misc_feature 1..1764: note = Description of Artificial Sequence: Synthetic coding sequence
  source 1..1764: mol_type = other DNA
atgcacccactgcagtgcgtgctacaggtgcagaggagcctaggctggggacccttagccagcgttagctggctctctctgaggatgtgtcgcgcccactcttctctttcctcgactatgtgcccaagccctgagcgccaggaggatggtgctagaaaggacttttcctcccgcctcgccgcagggccgacttttcagcacttcctgaagtccgccagtgccccccaggaaaagttgtccagcgaggtagaagacccacccccatacctgatgatggacgaactgctgggcaggcaacggaaggtctatctggaaacttatgggtgccaaatgaatgttaatgacaccgaaatcgcctggtccatcctgcaaaagtccggttacctgaggacctctaacctgcaagaggctgatgttatcctcttagtgacatgcagtatccgtgaaaaggctgaacaaaccatatggaaccgacttcaccagctgaaggcattgaaaacacgccgacccagaagcagagtgccactccgaatagggatcctcgggtgcatggcggagaggttaaaggaagagatcctcaatcgggaaaagatggtggatatccttgcaggcccagacgcataccgggatctcccaaggctgttggctgtggctgagagtggacagcaagctgccaacgtcctcttatccctcgatgaaacatacgcggacgtgatgccagtccaaacctctgcttccgccaccagcgccttcgtgtctatcatgcgtggctgcgacaatatgtgtagctactgcatagtaccatttactagaggacgagagcgctcaaggcccatcgcaagcatacttgaggaagtcaaaaagctcagtgagcagggcctgaaggaagtcaccctgttggggcagaacgtgaatagctttagggataacagcgaagtccagtttaactctgctgtcccgactaacctgagcagaggattcacgaccaactataaaactaagcaaggtgggctacgttttgctcacttgcttgaccaagtcagtagagtggaccccgagatgcgcattagatttacgtcaccccacccaaaggactttccagacgaagtgctgcaacttatccacgaacgggacaacatttgtaagcagatccacctccccgcccagtcaggcagcagccgcgtcttggaggcaatgcgtagagggtatagtcgtgaggcctacgtagagctagtgcatcatattcgtgagtcaatcccgggcgtgtcattgagtagtgatttcatagccggattctgcggagagaccgaggaagatcacgtccagacagtgagcttgcttagggaagtgcaatataacatgggatttctcttcgcatattcaatgcggcaaaagacaagggcctaccataggctcaaggatgatgtacctgaagaggtcaagctcaggaggctcgaggagttaatcaccatcttcagggaggaggctacaaaagcaaaccagaccagcgtaggctgtactcaattagtgttagtcgaaggattatctaagagatctgccactgacttgtgtggacggaatgacgggaaccttaaagtaatattccctgacgctgagatggaggacgtgaataatcccggactccgggttcgagcccaaccgggggattacgtcctggtcaaaatcaccagcgccagctctcaaaccctgaggggccatgtgctttgtcggacaaccctgcgggactcctctgcctactgctag

SEQ ID NO: 14481 - DNA, 1806 bp, synthetic construct
  misc_feature 1..1806: note = Description of Artificial Sequence: Synthetic coding sequence
  source 1..1806: mol_type = other DNA
atgcatccactgcagtgcgtgctgcaagtgcagcgaagcttaggttggggacctttagcttccgtcagttggctgagtcttagaatgtgccgggcccatagcagcctcagctcaactatgtgcccttcgcctgaacggcaggaggatggggcccggaaggacttttcatcaaggctggccgcaggccccaccttccagcattttctgaaatctgcgtctgcacctcaggagaagctaagtagcgaagtcgaagacccccctccatacctcatgatggacgagctcctgggccgtcagcgaaaggtttatctggaaacctacggatgtcagatgaacgtaaatgacaccgaaatcgcatggagcattttgcagaaaagcgggtacttgagaaccagcaacctgcaggaagctgacgtcatccttttggtaacatgttccattagagaaaaggccgagcaaaccatatggaatcggctgcaccagcttaaagccctgaagaccaggcgacctcggtcaagggttccgctgcggatcggcatcctggggtgcatggccgagagattaaaagaggaaatcctgaaccgtgaaaaaatggtggatatcctggcaggtcctgatgcgtatcgcgatctgcccagacttctggctgtggcagagtccggccagcaagctgcgaatgtacttctctccctggatgagacgtatgccgatgtaatgccagtgcagacgtccgcatcagcaacatccgccttcgtgtcaatcatgcgggggtgcgataacatgtgttcctactgtattgttccctttacccgtggaagagaaagatctcgtcctattgcgagcattctagaggaggtcaagaagctgagcgagcaggtgtttctcccccctcggcccccaaaagtcttgggcctccaaggcctcaaagaggtcaccctccttggccagaacgttaactcttttcgtgataatagcgaggtgcagttcaactcagcagtacctaccaatctttcccgtggcttcaccaccaattataaaaccaagcagggggggctgcgatttgcccacctcctggaccaggtaagcagggtcgacccagagatgaggatcaggtttacatcacctcatccgaaagattttcctgatgaagtgctgcagctgattcacgaaagagacaacatctgtaaacagatacatcttccagcccagtcggggtctagccgtgtgttagaagccatgcgccggggctacagtagagaagcatatgttgaacttgttcaccatatccgtgagtccatcccaggagtttcactgagctctgattttatagccggtttctgtggagagaccgaggaagaccacgtgcagacggtctcacttcttcgagaggtgcagtacaacatgggcttcctcttcgcgtacagcatgagacaaaagaccagggcttatcatcggctgaaggacgatgtgccagaggaggtgaaattgaggagactagaggagctgatcacaatcttccgggaggaagccacaaaagccaatcagacgtccgttgggtgtacccagctcgtgcttgtggaaggactgagtaagcgatcagctactgatctctgcggtcggaatgatgggaacttgaaggtgatcttccccgacgctgaaatggaggacgtcaacaatcctggcctgagggtgcgggcgcaacctggggactatgtactcgtgaagattacctccgccagctctcagacccttagggggcacgttttgtgtcgaactaccctgcgcgattcttccgcctattgttag

SEQ ID NO: 14482 - DNA, 984 bp, synthetic construct
  misc_feature 1..984: note = Description of Artificial Sequence: Synthetic coding sequence
  source 1..984: mol_type = other DNA
atgaacgtgaacgacacagaaatagcatggtcaatcctacagaagtcgggctatttaaggacctcgaacttgcaagaggccgacgttattttactggtgacctgttcaattcgggaaaaagctgagcagaccatttggaatagattacatcagctgaaggcacttaaaaccagaaggcctaggtccagggtgccactgcggataggaatactgggttgtatggctgaacgtctgaaggaggagattctaaaccgagaaaaaatggtggatatccttgccgggccggatgcttaccgagatttgccgagactgctcgctgtggcagaatctggacagcaggccgcgaatgtgctgcttagtttagatgagacttatgccgatgttatgcctgtgcaaacctcagcaagcgcgacatcagcatttgtgtatagccgggaagcttacgtcgaactcgtacaccacattcgggaatcaatccccggcgtgagccttagttcagacttcatcgcagggttctgtggagaaactgaggaggaccacgttcaaacggtgtccttacttcgggaagtgcaatataacatgggattcctgttcgcctatagcatgaggcagaagacacgggcctaccaccggttgaaagacgacgtgcctgaggaggttaaacttcggcgcttggaggaactcatcacaatttttagggaagaggctacaaaagccaatcagacttccgtcggctgtacgcagcttgttcttgtagagggcctctcaaaacgctctgccaccgacctctgtggaagaaatgacggcaacttaaaggtgattttcccagacgcggaaatggaggatgtcaataaccccggtttacgtgtcagggctcagccgggagactatgtactagtgaaaatcactagtgcatcttcacagacactgagggggcacgtgctctgtcggaccacactgcgggactctagtgcttactgctag

SEQ ID NO: 14483 - DNA, 1494 bp, synthetic construct
  misc_feature 1..1494: note = Description of Artificial Sequence: Synthetic coding sequence
  source 1..1494: mol_type = other DNA
atgatggatgagctgctgggccggcagcgcaaagtttacttggaaacgtacggctgccagatgaacgttaacgataccgaaattgcctggtcgatattacagaaatcagggtacttacgcacctcaaaccttcaggaggctgatgttattctgctagtgacgtgtagcattagagaaaaggctgaacagaccatctggaaccgcctgcaccaactcaaagccctgaagactagaagaccgcgaagccgggtgcccttacggatcgggatcctaggttgcatggcggaaagactgaaggaagagattctgaaccgtgagaagatggtggatatcctcgccggcccagatgcctaccgcgaccttccacgtctgctggctgtggccgaaagcggtcaacaggctgctaacgtgctgttgtctctggacgaaacctatgccgacgttatgcccgttcagacaagtgcctctgccacctctgcatttgtttccataatgcgaggctgcgataatatgtgctcatactgtattgtgccattcactaggggccgggaaaggagccggccaatcgcatctatcctggaggaggtcaaaaagctgagcgagcagggattgaaagaggttacactcttggggcagaacgtcaactccttccgcgacaacagtgaggttcaattcaattccgctgtgcctacaaacttatccagaggcttcactactaactataagactaaacaaggtgggctccgctttgctcatcttctggaccaggtaagcagagtggacccagagatgaggataagatttacaagcccgcaccctaaagacttcccagacgaggtgctgcaactcatacatgagcgggacaatatctgcaaacagattcatctgcccgcgcagtcaggaagcagtcgggttctcgaggccatgcgacggggttatagccgggaagcttacgtcgagcttgtccatcacatacgggagtctatccctggggtgagtcttagttcagatttcatcgccggcttctgcggcgagactgaggaggatcacgtgcagaccgtgtcactgctgcgcgaagtccagtacaacatgggattcctcttcgcctactcaatgagacagaaaaccagagcatatcatcgtctcaaggacgatgtgcctgaggaggtgaaactgagacggctggaggaattaatcactatctttcgggaggaggcgacgaaggccaaccagacttccgtgggatgcacacaactagtgctggtggaaggtctgagcaagaggtctgctaccgacctgtgcggtcgcaatgacgggaacctgaaagtgatcttccccgatgccgaaatggaggatgtgaacaatcctggccttagagtgcgcgcccaaccaggcgactatgtgctggtgaagattaccagcgcaagctctcagaccctcagagggcacgttctctgtaggacaacactgcgtgactccagcgcttattgctag

SEQ ID NO: 14484 - DNA, 1281 bp, synthetic construct
  misc_feature 1..1281: note = Description of Artificial Sequence: Synthetic coding sequence
  source 1..1281: mol_type = other DNA
atgcacccactacagtgtgttctgcaagtgcagcggtctcttggctggggccctttagccagcgtgagctggctcagcttgcgcatgtgcagggcccactcaagcctgtcgtcgacaatgtgtccatcccccgagcgccaggaggatggtgcaaggaaggatttttcatctcgtttggctgctggccctactttccaacactttttaaaatccgcctctgccccccaggagaaactgagtagtgaagtggaggacccccctccatacctgatgatggatgagttactcgggagacagagaaaggtttatctggaaacatatgggtgtcagatgaacgtgaacgataccgagatcgcctggtccatcctgcagaagagtgggtacctgagaacatcaaatctacaggaagccgatgtgattctgctggtcacatgttctattagagagaaggcagagcagactatctggaatcgcctccaccaactgaaggcactgaagaccaggagacctcgctcaagggtgcccctcaggatcggcattctgggctgtatggccgaacgcctgaaagaagaaatcctgaatagagagaagatggtagacatccttgctgggcccgacgcctatagagacttgcctagactgttggcagttgctgaatctggacagcaagccgcaaatgtgttgcttagtctggatgagacatacgccgatgtcatgccggtccaaacttccgcctcagccacatcagctttcgtcagcatcatgcggggttgcgacaatatgtgttcatattgcatcgttccatttacccgcgggcgggagaggagtcggccaattgctagtatactcgaagaagtgaagaagttgagtgagcagggcctgaaggaggtcactctattgggccaaaatgtgaattccttcagggacaattctgaagtgcagtttaattcagcggtgccgacaaacttgtctaggggctttacgactaattacaaaaccaaacagggcggacttagattcgcacacctgctggaccaggtcagccgggtggatcccgaaatgcggattcggttcactagcccgcacccaaaggattttcccgacgaggtgctgcaactgatccatgagcgggataatatttgtaaacagatccatctgcccgcccagagcggatcgagccgcgtactggaggccatgaggcgtggatattcgcgagaggcctatgttgagttagttcaccacatcagagaatcaattcctgaggacactggtatatcttag

SEQ ID NO: 14485 - DNA, 1122 bp, synthetic construct
  misc_feature 1..1122: note = Description of Artificial Sequence: Synthetic coding sequence
  source 1..1122: mol_type = other DNA
ggtgatggacagaatctcttcaccaaggatgtgacagtgatcgagggcgaggtggctactatatcctgtcaagtcaacaagagcgatgacagcgtgatccaattactgaaccccaaccgtcagacaatctattttcgggattttcggcctttgaaggactccaggtttcaactactcaatttttcttcatcagaactgaaagtgagtctcacaaatgtgtccattagcgacgaggggcgctatttttgccagctatataccgatccaccacaggagtcttatacgaccattaccgttctagtgccgcccaggaacctcatgatcgatattcagaaagacacagccgttgagggagaagagatagaggtgaactgtaccgccatggcctctaagccggccacgacaatcaggtggtttaagggtaacaccgaactgaaaggcaagagcgaagttgaagagtggtcagacatgtacacagtgacctctcagcttatgctgaaggtgcataaggaggacgatggtgtaccagtgatttgccaggttgaacacccagcagtcacgggcaacctgcagactcagaggtacctcgaagtgcagtacaaaccccaggtccatatccaaatgacataccctctgcagggattaactcgtgaaggcgatgcactggagctaacatgcgaggccattggaaaaccccagccggtaatggtgacttgggtgagagtagacgacgagatgccacagcatgcagtcctgagtggtcctaatctgttcatcaacaacctcaataaaacggataatggaacgtacagatgcgaggctagcaacatcgttggaaaagcacatagtgattatatgctatatgtctacgatagccgggccggcgaggaaggctcaatccgggccgtagaccacgcggtgataggcggcgtagtggctgtggtagtgtttgccatgctctgcctcctcatcattcttggccggtacttcgcaagacataagggcacatattttacccacgaagctaagggagccgatgatgccgcagatgcagacacagctataatcaatgcggaaggcgggcagaacaacagcgaggaaaagaaagagtattttatttag

SEQ ID NO: 14486 - DNA, 1329 bp, synthetic construct
  misc_feature 1..1329: note = Description of Artificial Sequence: Synthetic coding sequence
  source 1..1329: mol_type = other DNA
atggcaagcgtcgtgttaccgtccggctcccagtgcgccgccgccgccgcggcagcagctccaccggggctgcggctcagattattgctcctcctgtttagcgctgcagcgctaatcccaaccggagacggacagaatctgttcactaaagacgttaccgtcatcgaaggtgaggtagccaccataagctgccaggtcaacaagtctgacgatagcgttattcaactcctgaaccccaaccgccagacaatttactttcgggactttcgcccactgaaggactctcgattccagctcttgaacttttcatcgtcagagttgaaagtgagcttaaccaatgtcagcattagcgacgaaggccggtacttctgccagttgtatactgatcccccccaagaatcctacaccacaatcactgtgttggtgcccccgcggaaccttatgatagatatccagaaagacacagccgtggaaggggaagagatcgaagtgaactgtaccgccatggcatccaagcccgccacaacaatccggtggtttaaggggaacacagagctgaaagggaagagcgaggtggaagaatggagtgacatgtacacagtgacttcccagcttatgctgaaggtgcataaggaagacgatggggtccccgttatttgccaagtagaacaccccgccgtgaccggcaatttacagacgcagaggtatctggaggtacagtataagcctcaggtgcatatccaaatgacctaccctctgcaaggccttacacgagagggcgatgctctagagctaacttgcgaggcaatcggcaaaccacagcccgtgatggtaacgtgggttcgggtggatgacgaaatgccccaacacgcagttctctctggccctaatctgtttatcaacaatttaaacaagactgacaatgggacttaccgttgcgaggctagtaacatcgtgggtaaagctcattcagactatatgctgtatgtgtatgaccccccaacgacgattccccctcctaccaccactacaacgactaccaccactacaactactacaatactgacaataatcacggattcgagggccggagaggagggctcaatcagagccgtcgatcacgctgtgatcggtggggtcgtggcagttgtcgttttcgcgatgctgtgtctcctcatcatcctcggaagatattttgcacgccacaagggcacatattttactcatgaagcgaagggggcagacgacgcagcggacgcggacactgcaattattaatgccgagggagggcagaataactcggaggaaaagaaggaatattttatttag

SEQ ID NO: 14487 - DNA, 384 bp, synthetic construct
  misc_feature 1..384: note = Description of Artificial Sequence: Synthetic coding sequence
  source 1..384: mol_type = other DNA
atgttatacgtgtacgatcccccaacaactattcccccccccacaaccacgactacaactactacgaccacaaccacgactattctgactatcatcactgatacaaccgccacaacagaacctgccgtgcatgatagcagagccggcgaggagggcagtatccgagcagtcgaccacgccgtgattggaggtgtcgtagcagtggtagtgttcgctatgctgtgcttattaataattctggggcgctatttcgcaagacacaaagggacctactttacccacgaggccaagggcgcagacgacgccgcggatgccgatactgccatcatcaacgcagagggaggccagaacaactctgaggagaagaaggagtactttatctag

SEQ ID NO: 14488 - DNA, 1245 bp, synthetic construct
  misc_feature 1..1245: note = Description of Artificial Sequence: Synthetic coding sequence
  source 1..1245: mol_type = other DNA
atggcttctgtggttcttccaagcgggagccagtgtgccgccgctgccgctgcggctgcaccccccggccttcgtttaagactgcttctgctgcttttcagtgccgccgctcttattcccactggggacgggcaaaacctgttcacaaaggatgtgaccgtgattgaaggcgaggtagctaccatcagctgccaggttaataagtctgatgattcagtaattcagttgctgaaccccaatcgccaaaccatctattttcgagactttagacccttaaaggattcacgcttccaactgctaaactttagcagcagcgagcttaaggtcagccttactaatgtaagcatttcagatgagggacgatatttttgtcaactgtacacagatccgccacaggagtcctacacgactataaccgtccttgttccccctaggaacttgatgatcgacatccagaaggacacagcagtagaaggggaggagatcgaagtcaactgcacagcaatggcttcgaaacctgcaaccacaatcagatggttcaaaggaaacaccgaactgaaaggcaagagtgaggtcgaagagtggtctgatatgtatactgtaacgagccagctgatgctgaaagtccacaaggaagatgatggcgtgcccgtcatatgccaagtggagcatcccgcagtgaccggcaatctgcagacgcagcggtatttggaggtgcagtacaagcctcaggttcacattcagatgacttatccgctgcagggcctgacccgagagggtgacgctctggagctgacgtgtgaggcaatcggcaagccccaacctgttatggtgacttgggtgcgggtagacgatgaaatgccacagcacgcagttctctcaggtcctaacttgtttatcaataacctcaataagaccgacaacggtacatataggtgtgaagcaagcaatatagtgggcaaggcccacagcgattacatgctctacgtatacgacagtagagccggggaagagggcagtatcagggccgtcgaccacgccgttataggcggagtcgtggccgttgtagtattcgccatgctctgcttactcataatcttgggacgctacttcgccagacataaagggacatactttactcacgaagcaaaaggagctgacgacgcagccgatgccgataccgccatcatcaatgctgagggtggacagaataattcagaggaaaaaaaagaatatttcatttag

SEQ ID NO: 14489 - DNA, 5346 bp, synthetic construct
  misc_feature 1..5346: note = Description of Artificial Sequence: Synthetic coding sequence
  source 1..5346: mol_type = other DNA
atgaccacctatcgcgcaatcccatcggatggggtcgatctggctgcatcttgtggagctcgggttggggacgttttacccggacctcacacaggcgactacgcacccctgggattttgggcccagaacggctctatgtctcagcccttgggcgaaagcccagccaccgccacagcaactgcaactgccaccaccaggccgtctcccacgactcctgcaatgccgaagatgggcgtgcgggcgagagtggccgattggccgccaaagagagaggccctgcgtgagcactctaatccttcgccaagtcaggatactgacggtacgaaagctacgaaaatggcccactcaatgaggtctatccagaatggacagccccccaccagcacacctgccagtagcggatccaaagcattccatagattgagcaggaggcgatccaaggacgtcgagtttcaggacggctggccaaggtcacctggtagggcctttctgcctctgcggcatagaagtagttccgagataacactgtctgagtgcgacgcggaggacgctggggagccacgcggagctaggcacacaggggccctacccttattcagggagtacgggtcaacgtcttccatcgacgtgcagggaatgcccgaacagtcattttttgacatcctaaacgagttccgtagcgagcaacctgacgcgcgtggttgtcaggctctaaccgaactgctgcgggccgatcctggcccacacctgatggggggagggggcggcgcaaaaggagattcccacaacgggcaacctgccaaggatagcctcttgccgctgcaacccaccaaggagaaagagaaggccagaaaaaagcctgcacggggcctgggaggcggcgatacggtagacagtagtatcttccggaaattgcgcagttccaaaccggaaggagaggccggccgcagcccgggcgaggcggacgagggcaggagcccacccgaagccagtcgaccctgggtatgtcagaagtcatttgcccactttgacgtccagtccatgctattcgacttgaacgaggccgctgccaatcgagtgtcagtgtcacagaggaggaacaccaccacaggcgcctccgccgcaagcgccgcgtcagcaatggcgagtctgaccgctagtagggcccactctctggggggcttagatccagcctttacaagtaccgaagatctcaactgtaaggaaaatttggaacaagatctgggggatgataactccaacgatctgttattatcctgtccacatttccgaaatgagattgggggcgagtgcgaaaggaacgtgtctttttctagagcttctgtgggcagtccatcatctggggagggacacctggccgagccagcactgagcgcctaccgtaccaatgcatcgatcagcgtgctggaggtaccaaaggaacagcaacggacccaaagccgtcccagacagtatagcatagaacatgttgacctgggcgcgcggtactaccaagattactttgtcggcaaggagcacgcaaactattttggtgttgacgaaaagttaggacccgtcgcggttagtattaaacgggaaaaactggaggatcacaaggagcatggcccccaatatcagtacagaatcatatttcggacccgggagttaataaccctgagaggaagcatactcgaggacgccactcccactgccaccaaacacggcacaggtcgcggactcccactcaaagacgctctcgaatacgtaatccccgaactgaatatccattgcctccgactggccctcaacacccccaaagtcaccgagcagcttttaaagttagatgagcagggactgtgtcgaaaacacaaggtggggattctgtactgcaaagctgggcagagttccgaggaagagatgtataacaatgaggaagcgggacctgcatttgaggaattcctctcactgattggcgagaaggtctgcctgaaaggtttcacaaaatacgctgctcaactggatgtgaagacagactctaccggaacacattcactgtatactatgtaccaggattatgagatcatgtttcatgtgtccaccctgctgccctatactcctaacaaccgtcaacagctgctccgcaaacgtcacatcggcaatgatatagtcaccatcatcttccaggagccaggggcgctgccctttaccccaaagaacatcagatcccattttcagcatgtcttcattatcgtccgcgtgcataacccatgcacagataatgtctgctactccatggctgtcaccaggtcgaaagacgcccccccattcggacctcccatcccctctgggacaactttccggaagtctgacgtttttagagattttctgttggccaaggtgataaatgcggaaaatgcggcccataagtccgacaaatttcacacaatggccacacgcactcggcaagaatacctgaaagacttagccgaaaattgtgtctccaatactcccatcgactccactggtaaatttaatctgatctcactgaccagcaaaaaaaaggaaaaaacaaaggcacgagcaggggcggagcagcactccgcgggcgcaattgcctggcgagtcgttgcccaggactacgcccagggagtggagatcgactgtatactaggtatttctaatgagttcgtggtgctgctcgacctccgtaccaaggaagtcgtgttcaactgttattgtggtgacgtgatcggttggactccagattcttccacactgaaaattttttatggccgcggggaccacattttcttgcaggcaaccgagggcagcgtggaagatatccgcgaaattgtccagcggctcaaggtgatgaccagcggctgggaaactgtcgatatgaccctgagaaggaatggtctcggacaactgggcttccacgttaagtacgacggcactgttgctgaggttgaggattatggttttgcctggcaggctggccttcggcagggcagccggcttgtcgagatctgcaaggtggccgtggttaccctgacacacgatcagatgatcgacctgctcaggactagtgtgacagtgaaagtagttattatacccccattcgaggatgggacccctcgccgcggctggccagagacatacgacatgaatacaagcgaacccaaaactgagcaggaatctatcactcccggaggacgacccccctacaggtctaatgccccgtggcagtggtcaggccccgcaagccataatagcctgcctgcttcaaaatgggccacccctacaacaccgggacacgcgcagagtctcagccgcccactcaagcagacacccattgtgcccttccgtgagtcccagccactacactccaagcgccccgtgtccttcccagaaactccatacaccgtgtctcctgcaggggctgatagggtccccccctatagacaacccagcggaagtttctctaccccaggtagcgccacctacgtgcggtacaaaccctctcccgagcgctacacagccgcgccccatcccctgctgagtctggaccctcacttctcccatgatggtacttcaagtggtgactcatcctccggcggactgacgagccaagaatcaactatggagcgacagaaacctgaaccactgtggcacgtgcccgcgcaagcccgcctcagcgccattgccggctcttcggggaataaacatccatccagacaggacgcggctggcaaggacagccctaataggcactctaagggagagcctcagtactctagccactcttcttcgaataccttatcatctaacgcctccagctcccattcagacgatcgatggttcgaccctctcgatccactggaacctgagcaggatcccctctcaaaaggcggctcgagcgactcaggaattgacactaccctgtacacttcttcaccctcatgtatgtccctggctaaagccccaagacccgccaagccacacaaaccccctgggagcatggggctttgtggaggaggtagagaagcggcagggcgaagtcatcacgctgacaggcgacgggaagttagtcccgccccagccgttgccggccaatctaagggctatcgccccaagctttatagtagcgggagtagtactccaactggtcttgcaggcggcagcagagatcctcctaggcaaccctctgacatgggatctcgtgtgggctatccggctcaggtgtataaaaccgcttctgccgagacaccccgcccaagtcagttggcccagccatctccatttcagctttccgcttccgtgccaaagtcatttttctcaaaacaaccagtgcggaataaacacccaacaggatggaaacggacggaggaaccgcctcctcggccactgcccttcagtgatccgaagaaacaggtcgacactaatacaaaaaatgtttttggtcagcccagactcagagcttcacttagggatctgcggtccccaaggaaaaactataagtctacgattgaagacgacctgaagaagctgatcattatggataaccttgggcctgaacaagagcgggataccgggcaaagtcctcaaaagggcctgcagagaaccttgtctgacgagagcttgtgttccggcaggagagagccctctttcgcatctccggcaggtctcgagcccggccttccatcagacgtgctgttcacatcaacatgcgcgttcccaagctcgactctgcccgcgagacgccaacatcagcatccccacccgcccgtagggccaggcgctaccccagccgccggcagtggatttccagagaagaagagcaccatctctgctagcgagctctcactggcggacggtcgggacaggccactgaggcgcttagaccccgggcttatgcccctgcccgacaccgccgcagggctggagtggtcctccctggtgaatgcagcgaaggcatacgaagttcagcgcgctgtttccctgttttcactcaacgacccggccctctccccagatatacccccagcccattctcctgtgcactctcatctgtcgcttgagcgcggtcctcctacccccaggactaccccaaccatgagcgaagagccccccctggacctgaccgggaaggtgtaccagttggaagtcatgctaaagcaactgcataccgatctgcagaaggagaagcaggataaggtggttctacaaagcgaagtggctagccttcgtcagaataaccagcggctgcaggaggagtctcaagccgcatccgagcagcttcgaaagtttgccgagatcttctgtagagagaaaaaagaactgtag

SEQ ID NO: 14490 - DNA, 660 bp, synthetic construct
  misc_feature 1..660: note = Description of Artificial Sequence: Synthetic coding sequence
  source 1..660: mol_type = other DNA
atggaagcggcaagagactatgccggagccttgattaggccacttactttcatgggatctcagacgaaacgcgtactgtttacgccactgatgcacccagcccgaccgtttcgggtgtctaatcatgaccgatcaagtcgccgcggcgtgatggcgtcttcacttcaggagctcatctcaaaaacgctcgatgcgctggttattgctacaggcctggtgaccctagtattagaggaggacgggaccgtggtcgacaccgaagagttttttcagactctgggggataatacgcacttcatgattctggagaagggacagaaatggatgcctggctcccagcatgtgcctacatgttcaccaccgaagcgatccgggattgctcgtgtcaccttcgacctctataggctgaatccaaaggattttattggttgcctgaatgtcaaagcaactatgtatgagatgtattcagtgtcctatgatatcaggtgcaccggcctcaagggtctgctgagaagcttactgagatttctctcttacagtgcccaagtgactggccagtttctgatatacctgggcacatatatgctacgcgtcctggacgataaggaggaacgaccaagtctgaggagccaggctaagggccgcttcacttgcggatag

SEQ ID NO: 14491 - DNA, 660 bp, synthetic construct
  misc_feature 1..660: note = Description of Artificial Sequence: Synthetic coding sequence
  source 1..660: mol_type = other DNA
atggagtatctctccgcccttaatcccagtgacctgttaagaagtgtgagcaacatcagttccgagttcggcaggagggtgtggacttctgccccccccccccagcggccctttcgagtctgtgaccacaagcggaccattcgcaaaggactcacagctgccacacggcaggaattgctggcaaaagctttggagactctgctgctcaacggagtgctgacgctggtgttagaggaggatggaacagcggtggactctgaggattttttccagctcctcgaggacgacacgtgcctgatggttctccagagcggtcagagttggtctcccacacgctccggtgttctcagctacggacttggacgcgagaggccaaaacatagtaaagacatcgccagatttacattcgatgtgtacaagcagaacccccgtgacctgttcggctcactgaatgttaaagcgactttttacggactctacagcatgagttgcgatttccagggccttggtcctaagaaggttctccgcgagctcctgcgttggaccagcactctactgcagggcctaggccacatgctgctcggcatctcaagcaccctgaggcatgctgtggaaggcgcggaacaatggcagcaaaagggacgcctgcattcgtattag

SEQ ID NO: 14492 - DNA, 660 bp, synthetic construct
  misc_feature 1..660: note = Description of Artificial Sequence: Synthetic coding sequence
  source 1..660: mol_type = other DNA
atggaatacctttctgcgctaaatccttctgatcttctccggtcagtttccaacatttctagcgagttcgggaggcgcgtgtggaccagtgcgcccccgccacaaaggcccttccgtgtgtgtgatcacaaaaggactattcgaaaaggcctcaccgcagctacacgccaggaattactagctaaagccttggagacattgctcctcaatggggttctcactctcgtgctcgaagaggatgggactgccgtcgatagtgaggacttttttcaactgcttgaggacgatacttgcttgatggtacttcagtccggtcagagctggagtccaaccaggtccggagttttgtcctacggcctggggcgcgagcggcccaagcactcgaaggatatcgcaaggtttaccttcgatgtttataaacaaaatccccgggatctctttgggagcctaaatgttaaggctactttctatggactttacagcatgagctgcgactttcaagggctgggccccaagaaggtattgagggaattactccggtggacttcaacgttgttgcaggggctgggccatatgctgttaggaatttcgtccaccctgagacatgcagtggagggtgctgagcagtggcagcagaagggtcggcttcatagttactag

SEQ ID NO: 14493 - DNA, 660 bp, synthetic construct
  misc_feature 1..660: note = Description of Artificial Sequence: Synthetic coding sequence
  source 1..660: mol_type = other DNA
atggaatacctgagcgctctgaatccgtccgatttgctccggtctgtctctaatatctcttcagagttcggccgacgtgtctggacttctgctcccccaccacagaggccttttagagtctgcgatcacaagcggaccatccgaaaagggctaacagcagccacaaggcaggagctgctggctaaggctctagagacacttctgctgaatggagttctcaccttggtgcttgaggaagatggaacagcagtcgacagcgaagacttctttcagttgctagaggatgacacctgtctcatggttctgcagtccgggcagtcctggagccccacaagatccggagttctgtcatacggactgggccgtgaacggcccaaacattctaaggacatcgccaggttcacatttgacgtgtacaagcagaatcccagggatctctttggatctctaaacgtcaaggccacgttttacggactgtactcgatgagttgtgacttccaaggtctcggcccgaagaaggtattgcgcgagctcctgaggtggacatccactcttttgcagggacttggacatatgctactggggataagctctacgctcagacatgccgtggaaggagcggagcagtggcagcaaaaaggccgacttcacagttattag

SEQ ID NO: 14494 - DNA, 660 bp, synthetic construct
  misc_feature 1..660: note = Description of Artificial Sequence: Synthetic coding sequence
  source 1..660: mol_type = other DNA
atggagtatctgtctgcactgaacccctctgatctgctgaggtcggtctccaacattagctcagaatttggcaggcgggtctggacgtccgctcccccgccccaaagaccatttagagtgtgtgaccataagagaacaattcggaaaggcctaaccgcggcaacccgccaggagctgctcgctaaagccctggaaacactactcttaaatggcgtgttaaccctggtgttagaggaggacggaaccgcagttgacagcgaggacttcttccaactactggaagatgatacctgcctgatggtcctgcagtcaggccagtcatggtctcccactaggagcggcgtcctgagctatggtttgggtcgagagcgtccaaagcattctaaggacatcgccagatttacttttgacgtctacaaacagaatcctagggacctgtttggttccctaaatgtgaaagctaccttttacggcctgtacagcatgagttgcgacttccaggggctggggcctaaaaaagtattgcgggagttgttgaggtggacctctaccctgttacagggcctcggtcacatgttgcttggcatttcctccactctccggcacgccgttgaaggagcagagcagtggcagcagaagggcagactacacagttactag

SEQ ID NO: 14495 - DNA, 1860 bp, synthetic construct
  misc_feature 1..1860: note = Description of Artificial Sequence: Synthetic coding sequence
  source 1..1860: mol_type = other DNA
atgaacctggagaggttaaggaaacgtgtgcgacagtatttagatcagcaacaataccaatcggccctgttctgggccgacaaggtcgcctctctcagtcgcgaaccacaggacatctactggctggcacagtgcttgtacctgacagcgcagtatcaccgtgccgcccacgctcttcgatcccgtaagctggacaaattgtacgaagcctgtagatacctcgcagctaggtgccattatgccgccaaggaacatcagcaggcgctcgacgtcctggatatggaagagccaattaataaaagactgttcgagaaatacctcaaggacgaaagtggctttaaagatccgtctagtgattgggagatgtctcagtcttctattaagagttctatttgcttattgaggggtaagatctacgatgctctagacaatcgcaccctcgcaacttattcctacaaagaggctctgaaacttgacgtctattgctttgaggcattcgacttgctgactagccaccacatgttgacagctcaggaagagaaagagttgttggaatcacttccgctgtctaaactctgcaacgaggagcaggagctgttgcgcttcctgttcgagaacaaactaaagaagtataataagccaagcgagacagtgatccctgagagcgtggatgggttgcaagagaatcttgacgtcgtcgtgtcactggccgaacgccactactacaactgtgacttcaaaatgtgttacaagctgacgagcgtcgtgatggaaaaggatccattccatgcaagctgcttacccgtccatattggtacattagtagagttgaataaagccaacgaactgttctatctgtcccataaactggtggacctgtatcctagcaatcctgtcagttggttcgctgtgggatgctactacctcatggtggggcacaagaacgaacacgcccgaaggtacctgtccaaggcaactaccctggagaaaacctatgggcccgcctggatcgcgtatggacactcatttgctgtcgagagcgaacacgaccaggcgatggctgcttattttacggctgcacagctgatgaagggctgtcatctcccaatgctgtacataggcttggaatacggactgacaaataattctaagctggctgaaagattctttagccaggctctcagtattgccccagaagatccattcgtgatgcacgaggtgggcgtagttgctttccagaacggtgaatggaaaactgccgagaagtggtttctagacgcactcgagaaaatcaaagctattggtaacgaggtcactgtcgacaaatgggagcccttgctgaacaaccttgggcatgtgtgtagaaaactcaaaaagtatgcagaggccttggattatcacagacaagctctggtgttgattccacagaatgcctccacatacagtgctattggctacatccactcactcatgggcaacttcgagaacgcggtggattattttcacaccgcgctgggcctccgtcgcgatgacacattctccgtgactatgctcggtcactgcattgagatgtatattggagactcggaggcttacattggagcagacataaaagacaagctgaaatgctatgattttgatgtgcatactatgaaaaccttgaagaacatcatctcgcccccttgggattttcgcgagttcgaggtggagaaacagaccgcagaggagaccggtttgactcccttggagactagcaggaagacccccgattccagaccgtctctggaggagacattcgagatagaaatgaacgagagtgacatgatgttagaaacttccatgtccgatcactctacatag

SEQ ID NO: 14496 - DNA, 1428 bp, synthetic construct
  misc_feature 1..1428: note = Description of Artificial Sequence: Synthetic coding sequence
  source 1..1428: mol_type = other DNA
atggaggagcctatcaacaagaggctgttcgaaaaatacctaaaagacgagtcaggttttaaggatccctcatctgattgggagatgtcgcagtcctccatcaagtcttctatctgcctcttgaggggcaaaatctacgatgcgctcgataaccggaccctggccacctattcatacaaagaggccctgaagctggatgtgtactgctttgaggcctttgacctgcttaccagccaccatatgttaacagcacaggaagagaaagagctgctggagtctctgcccctgtccaaactgtgtaacgaggaacaagagctcctgcgcttcctgtttgagaataaattaaagaaatataacaagccatcagagaccgtcatccccgagtctgtggatggactgcaggagaatcttgacgttgttgtgagcctggccgagcgtcactattacaactgcgacttcaagatgtgctataaattaacgtccgtcgtgatggaaaaggatcccttccatgcgtcatgtttacctgtgcacatcgggactctcgtagagctaaacaaggccaatgagttattttacctatcccataagctggtggatctgtatcccagtaacccagtgtcatggtttgcggtaggatgttactatctgatggtcggacacaagaacgagcacgcaagaaggtacctgtccaaggcgaccactcttgagaagacctatgggcctgcctggattgcctatggacattcctttgccgtcgagtccgagcatgatcaggccatggcagcatattttacggccgctcagctgatgaagggctggaagacagcagagaaatggtttctggacgcccttgagaagattaaggcaatcgggaatgaggttactgtggataagtgggagcctctattgaataacctcgggcatgtgtgcaggaagttgaagaaatacgccgaagccctggattatcatcggcaggctctggtgctcattccccaaaatgcctcgacctactctgccatcggctatattcactcactgatggggaacttcgagaacgcagttgattattttcacaccgctttggggttgagacgtgacgacactttttcggtgacgatgctgggccactgcatcgagatgtacattggtgactctgaggcctatatcggagcagacatcaaggataagctcaaatgctatgatttcgatgtacacacgatgaagacactcaaaaatattatttctcccccctgggacttccgcgagtttgaggtggagaagcagactgctgaggaaacaggccttacccctttagaaacttcaagaaaaacacccgactcacggccgtctctggaagaaacctttgaaatcgaaatgaacgagtctgacatgatgcttgagacctccatgagtgaccactccacgtag

SEQ ID NO: 14497 - DNA, 1863 bp, synthetic construct
  misc_feature 1..1863: note = Description of Artificial Sequence: Synthetic coding sequence
  source 1..1863: mol_type = other DNA
atgaatttggagaggctgcgcaagcgcgttcgccagtatctagaccagcagcagtaccaatcagctcttttctgggctgataaggtagccagcctgtctcgggaggagcctcaagatatctactggcttgctcagtgcctttatttgaccgcccagtatcatagagctgcgcatgctctgagatctagaaagctggacaagctctacgaagcctgtcgctatctggcagcccggtgtcattatgcagccaaagagcatcagcaggctctggatgttctggatatggaggaacccatcaataaacggctgttcgaaaaatatctcaaagatgagtccggctttaaggacccatcttcagattgggaaatgagtcagtcctctattaaatctagtatttgtttactacgcggcaagatttatgatgcgttagataacaggactttggccacttacagctacaaggaggcattgaagctcgatgtctactgctttgaagccttcgatctgctgacctcgcatcacatgttgaccgcccaggaggagaaagaattactggagagcttaccgctctctaagttgtgcaatgaagaacaggagctgttgcgtttcttatttgaaaacaagctgaagaaatataataagccctcggagacggttatcccagaatctgtcgacggcctacaggaaaatttggatgttgtggtttctctggccgaacggcactactacaattgtgatttcaagatgtgctacaaattgaccagcgtggtgatggagaaggacccattccacgcaagctgcctaccagtgcatatcggcacccttgtagaacttaacaaagcaaatgaactgttctatctcagccataaactggtggatctgtaccccagtaatcccgtgagctggttcgctgtgggatgttattacttgatggtgggccacaagaacgaacacgctcggcgctacctttcaaaggccacgaccctagagaagacatatggaccggcgtggatcgcgtatggacacagcttcgccgttgaatctgaacacgaccaggctatggctgcatacttcacggcggctcaactcatgaagggttgtcatctgccaatgctgtacattgggttagagtacggcctcacgaataattctaagctcgcagagagattttttagccaagcactcagcatcgcccctgaggaccctttcgtgatgcatgaagttggcgtggtcgcatttcagaacggcgaatggaaaaccgccgaaaaatggtttttggatgcccttgaaaaaattaaagccatagggaacgaggtgaccgtagacaaatgggagccactgctgaataatctggggcatgtatgcagaaaactgaagaaatacgccgaggccctggattaccacaggcaggccctcgtgcttattcctcaaaacgccagtacgtactccgccattggctatattcattcattgatggggaacttcgagaatgcggttgactattttcacacagcattggggctgcgccgggatgataccttttccgtgaccatgctgggacactgtatagaaatgtatatcggggattcagaggcttatattggagctgatattaaagataagttgaagtgctacgacttcgacgtccacaccatgaagacccttaagaacatcatttctcctccctgggacttcagagagttcgaagtggaaaagcagacggctgaagagactgggctcacacccttggaaacgtctcgcaagacaccagactccagaccctctctggaagaaacttttgagatcgaaatgaacgagtccgacatgatgcttgagacaagtatgtccgatcattctacatag

SEQ ID NO: 14498 - DNA, 1863 bp, synthetic construct
  misc_feature 1..1863: note = Description of Artificial Sequence: Synthetic coding sequence
  source 1..1863: mol_type = other DNA
atgaatcttgaaagactgcgcaagagggtacgtcagtatctcgatcagcagcagtaccagagcgctctgttttgggcagataaggtggccagcctaagcagggaggaacctcaggatatttattggttggcccagtgtctctatcttacagctcagtatcatagagctgctcatgccctgcgcagccgtaaactggacaagctctatgaggcctgtcgatacttagctgcgcgctgccattacgctgctaaggaacaccaacaggccctggacgtactcgatatggaagagcctatcaacaagaggctgttcgaaaaataccttaaggatgagtccggcttcaaggatccctcatctgactgggagatgtcacaaagctcgatcaaatctagtatttgcttactaagagggaaaatttatgatgccttggacaaccggacactggctacatacagttacaaggaagcattgaaacttgatgtatattgctttgaggcgttcgatctgcttacatcacatcacatgttgaccgcacaggaggagaaagagctcttggagagtttacctctgtccaaactgtgcaacgaggagcaagagctgctgcgattcctgttcgaaaataagctcaagaagtacaacaagcctagtgagacagttatccctgagtcagtggatgggctacaggaaaatcttgacgtggtggtttctctggctgaaaggcactactacaattgcgattttaaaatgtgttacaagctgacgagcgtagttatggagaaagacccatttcatgcgagctgcctccccgtgcatatcggtactctcgtagagctgaacaaggccaatgaactgttctatctgagccacaaattggtcgacttgtacccatctaatcccgtgagttggttcgcggtgggttgttactacttgatggtgggccacaaaaacgagcatgctcgcaggtatctctctaaggcaacaaccttagaaaaaacatacggccccgcctggattgcgtacgggcatagttttgcagtagagagcgagcacgatcaggccatggccgcctattttacagcagcacagctcatgaaggggtgtcatttgcctatgttatacatcggacttgagtatggtctcacaaataactccaagcttgctgagcggtttttcagtcaggctcttagcattgcacctgaagacccctttgtgatgcacgaggtgggggtcgtcgcattccagaatggcgaatggaagactgcagagaagtggttcttggacgcactcgagaagataaaggcgatcggcaacgaggtgactgtggacaaatgggagcctttgcttaacaacctcggccatgtgtgtcgaaaactgaagaaatacgccgaggcgttagattaccaccgtcaagctctggtgttaatcccgcagaatgcatctacatattcggctataggctatattcactccctgatgggcaactttgagaatgccgtcgactactttcacactgccctcggcctgcggcgcgacgacacttttagcgtaaccatgttggggcactgcattgagatgtacatcggcgatagcgaggcctatattggcgctgacattaaggacaagctgaagtgttacgacttcgatgttcataccatgaagaccctgaaaaacatcattagccctccatgggacttccgtgaatttgaagtcgagaagcagacagcggaggagactggcttgacaccattggaaacttcacgaaagacaccggattctagaccgtccctcgaggaaaccttcgaaattgaaatgaacgagtcggatatgatgctggaaacctccatgtctgatcacagcacatag

SEQ ID NO: 14499 - DNA, 1581 bp, synthetic construct
  misc_feature 1..1581: note = Description of Artificial Sequence: Synthetic coding sequence
  source 1..1581: mol_type = other DNA
atggaagaaccaattaataagaggctgtttgaaaagtatcttaaggacgaatccggcttcaaagatccatcatcagactgggaaatgtctcagtcctctattaaaagtagtatatgtctgctaaggggcaagatctacgacgccctggataatcgcaccctcgcaacctacagttacaaggaggcactgaaactcgatgtttattgttttgaagccttcgatctgctgaccagccatcacatgcttacagcccaggaggagaaggaactactggagagcttgccattatctaagctctgtaacgaggaacaggagctgctccggttcctgtttgaaaataagctgaaaaagtataataaaccttccgagacagtgattccagagtcagtggacggcctccaggagaatcttgatgtggtcgtgagtctcgccgagaggcactactacaattgcgacttcaagatgtgctacaagttaacgtccgtcgtgatggaaaaagacccttttcatgcatcatgcctgccagttcacatagggactttggtggaactaaataaggctaacgagcttttctacctgtcgcacaaactcgtggatttataccctagtaacccggtgtcatggttcgcagtcgggtgctactatctcatggtgggccacaagaacgaacacgcgagacggtatctctccaaggcgacgactctggagaaaacttatggacccgcgtggatcgcttacgggcatagtttcgccgtggagtcagagcacgaccaagctatggctgcatattttacagcagcccagcttatgaagggctgtcacttgcccatgttgtatattggacttgaatacggcctcaccaacaactctaaacttgccgagcgctttttttctcaggccctgagcatcgcccccgaggacccttttgtgatgcacgaggtgggagtggtggctttccaaaacggcgagtggaagacagctgagaaatggtttctggacgcccttgagaaaatcaaggccatcggaaacgaggttactgtcgataagtgggaacccttactcaacaatcttggccacgtttgcagaaagctgaaaaagtatgctgaggctctggactaccacaggcaggcactggtcttgattccccaaaatgctagcacatactccgcaatcggctacattcatagcctaatgggtaattttgagaatgccgtagactacttccataccgccctgggccttcgccgcgacgacaccttcagcgtaaccatgctcggtcactgtatcgagatgtacattggagatagcgaagcgtacattggtgccgacataaaagacaagctgaagtgctatgatttcgatgtgcataccatgaaaaccttgaaaaatattatctcgccaccgtgggactttcgggagtttgaagtggagaaacagaccgccgaggagacaggccttaccccccttgagacctccagaaaaacccccgacagccggccatctttggaggaaacttttgagatcgaaatgaacgaatccgacatgatgcttgaaactagcatgagcgatcattcaacctag

SEQ ID NO: 14500 - DNA, 1581 bp, synthetic construct
  misc_feature 1..1581: note = Description of Artificial Sequence: Synthetic coding sequence
  source 1..1581: mol_type = other DNA
atggaggagcctatcaataagcggctgtttgagaaatatttgaaggatgagtctggttttaaagatcctagctcggattgggagatgtcacagagctccataaagtcctccatctgcttgttacgggggaaaatttatgatgcgctcgacaatcgaacccttgcaacttactcttacaaagaggccttgaagctcgatgtgtactgtttcgaggcgtttgacctgctcacaagccatcacatgttgaccgcccaagaggagaaggagttacttgaatcactgcctctcagtaaactctgcaacgaagaacaggagctgttgagatttctattcgagaataagcttaaaaaatataacaagccttcagagaccgtaattccagaatccgtcgatggcttacaagagaatttggatgtggtggtcagcttggctgagcggcactactataattgtgacttcaaaatgtgctacaaactgacaagtgttgtaatggagaaggacccattccacgcctcttgtcttcccgttcacattgggacactcgtggagctgaacaaagctaatgagttattctatctgtcccacaaactggtcgatctgtatcccagtaaccccgtttcatggttcgccgtaggatgttattatctgatggtgggtcataagaacgaacatgcccggcggtacctgagtaaggccacaactcttgaaaaaacctatggacctgcttggatcgcctatggacactcatttgccgttgagagcgagcatgatcaggctatggccgcctactttacagctgcacaactcatgaaaggctgtcatttgcctatgctatacattgggctggaatatggactcaccaataacagcaaactggcagagcgcttttttagtcaggcattgtcaatcgccccagaggaccccttcgtgatgcacgaagtaggcgttgtggcctttcagaatggtgagtggaagaccgctgaaaaatggtttctggacgcactagaaaaaatcaaggctatcggaaacgaagtcactgttgacaagtgggagccactgcttaacaacctaggccatgtttgtaggaagctcaaaaaatacgccgaagccctcgattaccaccggcaagccctcgttctgattcctcagaacgctagcacgtacagtgccatcggctatatccactctctgatgggcaattttgagaatgcggtcgattacttccataccgccctggggttacgacgcgacgacacgttttccgttaccatgctgggacattgtatcgagatgtatataggagactccgaagcctatataggagccgatatcaaggacaagctgaagtgttacgacttcgacgtgcatacaatgaagaccttgaagaacatcatttccccaccttgggacttcagggaattcgaggtggaaaagcagactgccgaggagaccggcctgactcccctggagactagtcgcaaaacaccagatagtaggccgtccctcgaggaaaccttcgagatcgagatgaacgagtccgacatgatgttggagacatccatgtctgaccactcaacgtag

SEQ ID NO: 14501 - DNA, 1428 bp, synthetic construct
  misc_feature 1..1428: note = Description of Artificial Sequence: Synthetic coding sequence
  source 1..1428: mol_type = other DNA
atggaagaacctataaataagaggctgtttgaaaagtatttaaaggatgagtcagggtttaaggacccttctagcgattgggagatgtcccagtccagtataaagagctctatctgcctactgcgaggaaagatctacgacgccctggataaccggaccttggctacgtacagttataaagaagccttgaagctggacgtgtattgctttgaagccttcgacttgttgacatcacaccacatgcttacagcccaagaggaaaaagaattactagaaagtctgcctctgtcaaaactgtgtaatgaggagcaggagctgctgcgcttcctcttcgagaacaaactcaagaagtataacaaaccatccgagacggtgattcctgaatcagttgacggcctccaggagaacctggacgttgtcgtgtctctcgctgaaaggcattactacaactgcgatttcaaaatgtgttataagctcacctcagtggtgatggagaaggaccctttccacgcctcatgtctgcctgtacatatcggcacactggtcgagttaaataaagccaatgaacttttctatctttctcataagttggttgatctgtatcccagcaatcccgtcagctggttcgcggtcgggtgctattatctcatggtaggccacaaaaatgagcacgctagaaggtatctttctaaagctacaactttggaaaaaacttacgggccggcctggatagcttacggacacagcttcgcggttgagtcagaacatgaccaggccatggcagcctattttacagcggcacagttgatgaagggatggaaaaccgctgagaagtggtttctcgatgcgcttgaaaaaataaaggctatcggaaatgaggtcaccgtggacaagtgggagccactgctgaacaacctcggccatgtttgtaggaagctgaaaaaatatgctgaagctcttgactatcaccgacaagctctggtcctcatcccgcagaacgcttccacctattccgctattgggtacatccattccctgatgggtaacttcgaaaatgctgttgattacttccacaccgcccttggccttaggagagacgataccttctccgtcaccatgctcggccactgtattgagatgtatattggagacagcgaggcatatatcggcgccgatatcaaggacaaactcaagtgttacgactttgacgtgcatacaatgaagacgctcaaaaatatcatatctccaccctgggatttccgggaattcgaggtggaaaagcagaccgccgaggaaaccggcctcacaccgctggagacttccaggaaaacaccagacagtaggccaagcctggaagagacctttgagatagagatgaacgaatctgatatgatgcttgagacgtcaatgtcagaccattctacgtag

SEQ ID NO: 14502 - DNA, 1500 bp, synthetic construct
  misc_feature 1..1500: note = Description of Artificial Sequence: Synthetic coding sequence
  source 1..1500: mol_type = other DNA
atggcccagttcgctttcgaatccgacctccattcgttgctgcaactcgatgcacctattcccaacgccccacccgcgaggtggcaacggaaggccaaggaagcggctgggcccgcaccttcccccatgagggccgccaacaggtctcatagcgccggcagaaccccaggccggactccagggaaatctagtagcaaagtccagactaccccaagtaaaccaggaggggataggtatatccctcacagatctgctgcacagatggaggtggccagttttctgctcagtaaggagaaccaacccgagaactcacaaacacccacaaaaaaagagcatcagaaggcatgggcgctgaatctgaacggatttgatgtagaggaggcgaagattttgcgcctatctggaaagccacaaaatgcccctgagggatatcagaaccgcctgaaggtcttatacagccagaaagccaccccaggtagctctcggaaaacctgtcgatacataccatccctgcccgatcgcatactggacgcccccgagatcagaaacgactattacttaaatctcgttgactggtccagcggcaacgtcctggcagtggctctcgacaactccgtgtacctgtggtctgctagttccggtgacatcctacagttgcttcagatggagcagccaggcgaatatatttccagcgtagcctggatcaaagaaggaaactacctcgccgtcgggacctcaagcgccgaggttcagctgtgggacgtgcaacagcagaaacgcctgaggaacatgacctcacatagcgcacgggtgggctctctttcatggaacagttacattttaagcagcggcagcaggagcgggcacatccatcatcatgatgtccgtgtcgctgaacatcacgtcgccaccctttctgggcactctcaggaagtttgcgggctcaggtgggctcctgatggccgacacttggcaagcggcggcaatgacaacttggtaaacgtatggccatcggcaccaggagaaggcggttgggtcccacttcagactttcactcaacaccagggagctgttaaggcagtcgcatggtgcccatggcagtccaacgtgctggccacaggcggagggacatctgaccggcacattcgtatttggaacgtttgctccggcgcctgtctgtctgctgtggatgcacattctcaggtgtgtagcattctctggagcccccactacaaagaattaatcagcggacacgggtttgctcagaatcaattagtaatctggaaatacccgacaatggcgaaagtcgccgagctcaagggtcatacctcgcgtgtgctgagtctgacaatgagtcctgatggggccaccgtggcatccgccgcggccgatgaaaccctccggctatggagatgttttgaacttgatccagctcggcggcgggagagagaaaaagccagtgctgctaaaagttcactcatacatcagggcattcgctag

SEQ ID NO: 14503 - DNA, 1500 bp, synthetic construct
  misc_feature 1..1500: note = Description of Artificial Sequence: Synthetic coding sequence
  source 1..1500: mol_type = other DNA
atggctcagtttgcttttgaatctgatctccactcccttctgcagctggatgctcccattccaaatgcacctccagcccggtggcaacgcaaggcgaaggaggccgccggacccgcccctagtccgatgagggccgctaatagaagccacagcgcgggccggacgcccggccggacaccagggaaatcgagttctaaggttcagacaacaccttcaaaacctggcggcgatcgatatatacctcaccgtagcgccgctcaaatggaagttgcctcctttcttctgtcaaaggagaatcagcctgaaaacagccagacccctaccaagaaggagcaccagaaggcttgggccctgaatttgaatggctttgacgtcgaggaagccaagattttaagattgtctgggaagccacagaacgccccggaagggtatcagaataggctaaaagtcctgtattcacagaaagcaacgccaggaagttctcgaaaaacctgtaggtatataccttccttacctgataggatcctggatgctcctgagataaggaacgactattatctaaacttggtagattggagttcaggtaacgttttggcagtggccctcgataattctgtatacctgtggtccgcttccagcggcgatattctccagttactgcagatggagcagcctggggaatatatctcaagtgtcgcatggattaaggaggggaattacttggcggtgggcacaagtagcgccgaggtacaattatgggacgttcagcaacaaaagaggctccgcaatatgacatctcatagcgcccgcgtgggttccctatcctggaatagctacatactttcgtcagggtctaggtctgggcacatccatcatcatgatgttcgtgtcgcggagcaccacgtggccacgctgtccggccacagccaggaagtgtgcggcctgagatgggctcccgacgggcgtcacttggcttctggagggaatgacaatcttgtaaacgtttggccttccgcccccggcgagggagggtgggtccctctgcagacatttacccagcatcaaggtgctgtcaaggctgtggcatggtgtccatggcagtccaatgtcctcgccaccggaggggggactagcgacaggcacatcagaatttggaacgtgtgttcaggggcttgcctgtcagcagtggatgcacactcgcaggtgtgcagtattctttggtctccgcattacaaagaactgatttccggacacggattcgctcagaatcagttggtgatctggaagtaccctactatggccaaggtcgccgaactaaaaggccatacttctcgggtccttagcctgaccatgtctcccgatggcgcaacagttgccagtgcagccgcggacgagaccctgcgactctggcgctgctttgaactggaccctgcgagacggcgagaacgggagaaggcctctgctgcaaaatcctccctaatacaccaagggatacgctag

SEQ ID NO: 14504 - DNA, 1428 bp, synthetic construct
  misc_feature 1..1428: note = Description of Artificial Sequence: Synthetic coding sequence
  source 1..1428: mol_type = other DNA
atggcccagttcgccttcgaatccgatcttcactctcttctgcagctagacgcgcccattccaaacgctcctccagctcggtggcaaagaaaggccaaagaagccgcagggccagcaccatcccctatgagagcggctaatcgctcccatagcgctggaagaactcccggccgcactcctgggaaatcctctagcaaggttcaaacaacaccctctaaagagaaccagcccgagaactctcagactcctaccaaaaaggagcaccagaaagcatgggccctcaatctgaatggcttcgacgtggaggaggccaagattctccgcctgagcgggaagcctcagaacgctccagagggataccagaaccggttaaaggtgctttactctcaaaaagccaccccaggatcctctcgtaaaacttgccggtatattccaagtttgccagaccgcattctcgacgctcccgagatcaggaacgattactacctcaacctcgttgactggtctagcggaaatgtcctggccgtcgccctcgataacagcgtatatctctggtccgcctcctcaggggatatcttacagttacttcagatggagcagccaggcgaatacatctcctcagtagcatggatcaaggagggtaactatctcgccgtcggaacttcttccgcagaggtccagctctgggacgtgcaacagcaaaagaggcttaggaatatgacctcccattctgcccgcgtcgggagcctgtcctggaacagctatattctctcttccgggagccggagcggccatatacaccaccacgatgtgcgcgtggcagagcatcacgtcgctacgctctccggacactctcaggaggtctgcggtctgcgctgggcacctgatggccgtcacctagcgtcagggggcaacgacaatctggttaatgtttggccatccgctcctggggaaggtggttgggttcctttgcagacctttactcagcaccagggtgctgtgaaggccgtcgcctggtgcccgtggcaatccaatgtgcttgcaacgggaggtggaacttcagacagacacattaggatctggaacgtgtgtagcggtgcatgcctatcagcggtagacgcccactcccaggtgtgcagcatcctgtggtcgccacactacaaggaattgatttcaggacacgggtttgctcagaaccaactagtgatctggaaatacccgacaatggctaaagtggcggaattgaagggacatacctcacgagtgctgtcgctgacaatgtcgcccgacggcgccaccgtggcatcagcggccgcagatgagacattacgcctctggcgctgtttcgaactggatccggcccgccggcgtgagcgggaaaaggcttccgcagcgaagtcctctctgattcaccaaggtatccggtag

SEQ ID NO: 14505 - DNA, 1422 bp, synthetic construct
  misc_feature 1..1422: note = Description of Artificial Sequence: Synthetic coding sequence
  source 1..1422: mol_type = other DNA
atgagcactgaactgtttagcagtactcgggaggaagggagttccgggagcggacctagtttcaggtcgaatcagcgcaagatgctgaatctcctgctcgaacgcgatacctcatttaccgtttgccctgacgtccctaggacgcccgtggggaagttcctgggcgacagtgcaaatctgagtattctttccgggggtactcctaaacggtgtcttgacctcagtaacctatccagcggggagattactgcgactcagctaacaacctccgctgacctcgacgagaccgggcacctcgactcgtcaggtctgcaggaggtgcatctcgccggaatgaatcatgatcagcatctgatgaagtgttctccagcacagctgctgtgctccactcctaatggattggatcgcggtcaccggaagagggatgctatgtgtagctcttccgccaataaagagaacgataatggaaaccttgttgacagcgaaatgaagtacctgggatctcctatcaccacagtgccaaagttagacaaaaaccctaacctgggcgaggatcaggcagaggagatttccgatgagctgatggagttttccctcaaggaccaggaggccaaggtatcgcggtcaggcctctaccgaagtccatctatgccagagaacctgaatcgtccacggttgaaacaggtagagaagttcaaggataacaccattccagacaaggtcaagaagaaatattttagcggacaagggaaattgagaaaagggctgtgtctgaaaaaaacagtcagtctgtgtgacatcaccatcacacagatgctagaggaagactccaatcaaggacacttgataggcgactttagcaaggtgtgcgcactgccaaccgtgagtgggaaacatcaggatctgaagtatgtgaatcctgagaccgtcgccgccctgctctccggaaagttccagggcctgatcgaaaaattctatgtgattgattgtcgatatccgtacgaatacctgggtgggcacattcagggtgccctgaacctttactcccaggaagagctctttaatttctttttgaagaagccaatcgtgcctttggacacacagaagaggattatcatcgtgttccattgcgagttttcatccgagcgcgggcctagaatgtgtagatgcctgagagaggaggacagaagcctgaaccagtatccagccttgtactacccagagctctacattcttaaggggggctacagagatttcttccccgaatacatggagctgtgtgagcctcagagttactgccccatgcaccatcaagaccataagacagagctgctgcgctgtcggtctcaaagtaaggtccaagagggcgaacgccagctccgggaacagattgccctgttggtaaaagacatgtctccgtag

SEQ ID NO: 14506 - DNA, 1203 bp, synthetic construct
  misc_feature 1..1203: note = Description of Artificial Sequence: Synthetic coding sequence
  source 1..1203: mol_type = other DNA
atgtccaccgagctgttctcgtcaacgagagaggagggcagctctgggagtggaccttcattccggagtaaccagcgcaaaatgctcaatctgttactggagcgggacacctcgttcacagtatgtcccgacgtgccaagaactcccgtgggtaaattccttggggatagcgccaatctctctattttatctggctcccccggtttctttcgcacttcagggtccgcgtttagctgggatgataacggtaatctagtggattcagaaatgaagtaccttgggtcacccatcaccacagtcccaaagcttgacaagaacccgaatctgggagaagatcaagcggaggaaataagtgatgagcttatggaattctcgctgaaggaccaggaggctaaggtcagccgatctggattatacagatctccaagtatgcccgaaaatctaaatcgacctcgccttaaacaggtggagaagttcaaagataatacaattccggacaaggttaagaaaaagtacttttcaggccagggaaaactgcgcaaaggattgtgcctcaagaaaaccgtgtcactctgcgacatcaccatcacacaaatgttagaggaggactccaaccagggccacctcattggagatttctccaaagtctgtgcccttccaactgtaagcggcaagcatcaggacctgaagtatgtaaatccggagaccgttgcagcactgctttcggggaaattccaaggcctgattgagaagttctatgttatagactgtcggtacccatatgaataccttggtggacacattcaaggagctcttaatctatactcacaggaggagctgtttaattttttccttaagaagcctattgtacccctcgatactcagaagagaatcataatcgtgttccactgcgagttctcctccgaacgaggcccaagaatgtgcaggtgccttcgggaggaagacaggtctctgaatcagtacccagctctgtattaccctgagctttatatcctcaaggggggttatcgcgatttttttcctgaatacatggaactgtgtgaaccgcagagctactgtcctatgcatcatcaggatcacaagaccgaacttctgcgctgtaggagccagtccaaggtgcaggagggagaaagacaactaagagagcagatcgcgttgctggtcaaagatatgtctccttag

SEQ ID NO: 14507 - DNA, 1332 bp, synthetic construct
  misc_feature 1..1332: note = Description of Artificial Sequence: Synthetic coding sequence
  source 1..1332: mol_type = other DNA
atgtctactgaactcttctcctctacccgggaagaggggtcctctggtagtggtccctctttccggagcaaccagcggaaaatgctcaatctgcttctggagcgggacaccagcttcactgtgtgtcccgacgtgccacggaccccagtcggcaagttccttggcgactctgccaatcttagtatactgtctggcgggactccaaaacgttgtctcgatcttagcaatctgagctccggagagatcactgccacccaattgactacgagtgccgatcttgatgagactgggcacctggactccagtggattgcaggaagtgcacctcgccggcatgaatcatgatcagcatctgatgaagtgcagccctgataatggcaatctggttgattcggagatgaagtatttaggctcacccattaccacagtccccaagctggacaagaaccctaacctgggtgaggaccaggccgaggaaatcagcgacgagctaatggaatttagcctgaaagaccaggaagccaaggtgtcacgtagcggcttgtatcggagtcctagtatgcccgaaaacttgaatcgccctcggctcaaacaggtggaaaagtttaaagataatacgatacccgacaaagtcaaaaagaagtacttcagtggacagggaaaactgcggaagggcctctgccttaagaagacagtgtctctgtgcgacatcaccattacccagatgctggaagaggactcaaaccagggccacctcattggagatttttccaaagtgtgcgccttaccaaccgtgtccggcaaacaccaagaccttaagtacgtgaacccagaaactgtggcagcactcctgagtggtaaattccagggtcttattgaaaagttttacgtgatcgactgcagatacccgtatgagtaccttggaggccacattcaaggcgctttaaatctgtatagccaagaagagttattcaatttcttcttgaaaaagcccatcgtcccattagatacccagaagaggattatcattgtatttcattgcgaattctctagcgaacgagggccccggatgtgccgctgtcttagagaggaagacaggagcttgaaccaataccccgcactctattatcccgagttatatatcctgaagggcgggtaccgagatttcttcccagagtacatggagctgtgtgagccgcaatcctactgcccaatgcatcatcaggaccataagaccgaactgctccgctgcagaagtcaatctaaagttcaggagggtgaacgtcaacttagagagcagatagcgcttcttgtgaaagacatgagtccatag

SEQ ID NO: 14508 - DNA, 1293 bp, synthetic construct
  misc_feature 1..1293: note = Description of Artificial Sequence: Synthetic coding sequence
  source 1..1293: mol_type = other DNA
atgtccaccgagctcttctcctcgactcgggaagaaggatctagtggatccggaccatccttccgttccaatcagagaaagatgctcaacctcctactggagagggacaccagtttcaccgtgtgccccgatgtgccccgtacccctgtgggcaaatttttaggggattcagccaatctgtccatactgagcggcagccccgggttcttcaggacctccggcagcgcattctcttgggacgctcagttgctttgttctactccaaatgggttagaccgcgggcatagaaaacgggacgcaatgtgctcctcctctgctaataaggagaatgacaacggaaacctggtcgatagcgagatgaaataccttggctcccctatcaccaccgtgccgaagctagacaagaatccgaacctcggagaggatcaggcagaggagatcagcgacgagctgatggaattcagcctgaaagatcaggaggcaaaagtttcacgcagcggtctatacagaagcccaagtatgccagagaacttgaatcgaccccggctgaagcaggtggagaagtttaaagataacacaattcccgataaggtcaaaaaaaaatatttttctgggcaggggaagctgcgaaagggactgtgcctgaagaaaacggtgtctctctgtgacatcacgattacccagatgctggaagaagactctaatcaaggacatcttatcggagatttctctaaggtgtgcgcgcttcccactgtttccggcaagcatcaggatctgaagtacgtcaaccctgaaaccgtggcggcactgcttagcggtaagtttcaggggctgattgaaaaattctatgtcatagattgtcgctatccatatgagtatttgggcgggcatatccaaggcgctctaaacctctatagtcaggaggagcttttcaacttcttcttgaaaaagcccatcgttccactcgatacccagaagcgcataatcatagtgtttcactgcgaattttcatctgagcgcggccccagaatgtgccgctgcctacgcgaggaagaccgttctctgaatcagtatcccgctctctactaccctgagctgtatatcctcaaaggtggctatagggatttcttccctgaatatatggagctgtgtgaaccgcaatcttactgccccatgcatcaccaagatcacaagacagaactgctgcgctgccgctctcagtctaaggtccaggaaggggagaggcagttacgagaacagatagccctcttggtgaaggacatgtctccttag

SEQ ID NO: 14509 - DNA, 1203 bp, synthetic construct
  misc_feature 1..1203: note = Description of Artificial Sequence: Synthetic coding sequence
  source 1..1203: mol_type = other DNA
atgtctacggagctgttcagctctaccagggaagaggggtcatctgggagtggcccctcgttccggtctaatcagcggaagatgctgaatctcctgttggagcgtgatacctcgtttactgtgtgccccgatgtccccagaactcccgtcgggaaattcctcggtgatagtgccaacctctccattctatcgggttctcccggctttttcaggacctccggtagcgcattctcttgggacgacaatggaaatttagtggattcagaaatgaagtacctaggatctcctatcaccaccgtgcctaaactggataaaaatcctaatctgggagaggaccaagctgaagagatttcggacgaactgatggagttctctcttaaggaccaagaagcaaaagtcagcagatccggcctgtatagaagcccttccatgcccgaaaatctgaataggccacgtctgaaacaggtagaaaaattcaaagataatactattccagataaggtcaaaaagaaatactttagcgggcaggggaagctccggaaagggctttgcttgaaaaagaccgtctcattgtgtgacattaccataacacaaatgctagaggaggacagtaatcaaggtcatttaatcggcgacttctccaaagtgtgtgcgcttcccactgtgtctgggaaacatcaggacctaaaatatgtgaaccctgagacagtggcggccctgctatcaggtaaatttcagggactcatcgaaaagttttacgttattgattgcagatacccatacgaatatctgggcggccacatacagggagcactgaatttatactcccaagaagagctcttcaatttttttttgaagaaaccaatcgttccccttgatacacagaaacgcatcataattgtgttccattgcgagttttcttcagaacggggaccgcgaatgtgtcggtgtctcagggaggaagatcgttctctcaatcagtaccccgccctgtactaccctgagctgtatattcttaaaggagggtatagagacttttttccagaatacatggaactgtgtgaacctcaatcatactgcccaatgcaccaccaagaccacaaaacagagctccttaggtgcaggagccagagtaaggtccaggaaggggaacggcagctgcgggaacagatcgcgctgttggttaaggatatgagtccgtag

SEQ ID NO: 14510 - DNA, 750 bp, synthetic construct
  misc_feature 1..750: note = Description of Artificial Sequence: Synthetic coding sequence
  source 1..750: mol_type = other DNA
atgtctacagaacttttctcctcaacacgagaggagggatcaagcggatccggcccatcgtttcgttccaatcaacgaaaaatgcttaatctactcctagaacgtgatactagcttcactgtgtgccccgacgtgccaaggacacctgtgggaaagtttctcggcgattcagctaacttatcgatcctgtccggaggaaccccaaaaagatgcctcgacctgtctaacctgtctagtggtgaaataaccgccacccagctcacgacgagcgcggacttagacgagaccggacacttggattctagtggccttcaagaagttcacttagccggtatgaatcacgaccagcatttaatgaagtgctctccagctcaactactttgttcaaccccaaatggactcgatagggggcaccggaaacgtgatgctatgtgctcttccagcgccaataaggaaaacgataacggtaatctggtagattcggagatgaagtacctggggagccccatcactacagttccaaaattggacaaaaacccaaatctaggggaagaccaggctgaggagatcagtgacgagcttatggaattcagccttaaagaccaggaagcgaaagtttcaaggtcaggactgtacagatctccaagtatgcctgaaaaccttaatcgtccccgcctgaaacaggtggagaagtttaaggacaacaccatccctgacaaggtgaaaaagaagtacttctccgggcagtag

SEQ ID NO: 14511 - DNA, 1422 bp, synthetic construct
  misc_feature 1..1422: note = Description of Artificial Sequence: Synthetic coding sequence
  source 1..1422: mol_type = other DNA
atgtcaaccgaactcttttcgtctacccgcgaagagggttcttctgggtccggtccttcttttaggtcaaatcagaggaaaatgctgaatctgctcttggagcgagatacaagcttcaccgtttgtccagacgtgccacggactccagttgggaagttcctaggagattctgctaatctgtcaatcctctcagggggaacaccgaagaggtgcctggacctgagtaatctgtccagcggagagatcacagctacacagctgacgactagcgccgacctcgatgagaccggccatctcgatagctcaggcctgcaagaagtccacctggccggcatgaatcacgatcagcatttgatgaaatgctcccctgcacagctgctgtgtagcactccaaatggcttagaccgggggcaccgcaaacgtgacgccatgtgctcttccagcgcaaataaagagaacgacaacggaaatcttgtagactccgagatgaaatatttggggtcccccatcacgacagttcctaaattagacaaaaaccccaacctcggcgaggatcaagccgaagaaatcagtgacgaacttatggaattcagtctgaaggaccaggaagccaaagtatcccgcagcggcctctaccgcagcccctctatgcccgaaaatctgaacagaccaagacttaagcaggtagagaaattcaaagacaacacgatccccgataaggtcaagaaaaagtacttcagcgggcaaggtaaactccgcaaagggctatgcctgaagaagaccgtgagcctgtgtgacatcaccattacacagatgctggaagaagattccaaccagggccacctcattggtgacttctccaaggtatgcgcccttcccaccgtttcaggcaagcaccaagacctgaaatacgtgaaccccgagactgtggccgcccttttgagcgggaagtttcagggactcatcgaaaaattttatgtgatcgattgtcggtatccttatgaataccttggcggccatatccagggcgcattaaacctgtacagccaggaagaattatttaatttcttccttaagaaacccatcgttcccttggacactcagaaacggatcattatagtctttcactgcgagttcagcagtgaaagaggcccaaggatgtgtcggtgcctcagagaagaggatcggagcctaaaccagtaccccgccttgtactatccggaactgtatatcctgaagggcgggtatcgtgacttcttcccagagtacatggagctctgcgaaccccagtcctactgtcctatgcaccatcaggaccacaaaaccgagcttctgcgctgccgatctcagagcaaggtgcaggagggcgaacggcagttgagagagcagattgccctgcttgtcaaggacatgtccccctag

SEQ ID NO: 14512 - DNA, 1473 bp, synthetic construct
  misc_feature 1..1473: note = Description of Artificial Sequence: Synthetic coding sequence
  source 1..1473: mol_type = other DNA
atgtcagaagaggccaggttttgtttctccccaggggagaatagtaagaccatgtccacggagctgtttagtagtacaagagaggagggtagctcgggttctggcccatctttcaggtccaaccagcggaagatgctgaatctactcctcgagagggacacttcctttacggtgtgcccagacgttccccgcaccccagtaggaaaatttctgggcgatagcgcaaacctaagcatcctgagtgggggaacacccaaacgatgcctcgatctatccaatcttagtagcggagaaataacggccactcagcttaccacttcagccgacctcgatgagactggccacctggattcttcaggactgcaggaagtgcacctagccggaatgaaccacgatcaacacctgatgaaatgttcccctgctcagctactatgttcaactccaaatggcctggacaggggtcaccggaagcgggatgccatgtgtagcagttctgccaacaaagaaaatgataacggtaatctggtggattccgaaatgaagtacctcggcagtccaatcacaacagtgccaaagcttgataaaaacccaaacctgggcgaggaccaggctgaggagattagcgacgaattaatggagttctctctgaaggatcaagaggcgaaggtaagtagatcaggattgtatagatctccttctatgcctgaaaaccttaaccggccccgcctaaagcaggttgaaaagtttaaggataacacgatcccagacaaagtgaaaaagaagtacttctccggtcaaggcaaactgcggaagggtctctgtctcaaaaaaaccgtgtcactgtgcgatattacaataacacaaatgctcgaggaggatagcaatcagggtcatctcattggagacttcagcaaggtgtgcgcactgccaacagtatccggcaaacaccaggaccttaagtacgtgaatccagagaccgtcgctgccctcctctcaggtaaatttcagggcctgattgaaaaattctacgttattgattgccggtatccatacgagtaccttggaggccacattcagggagccctgaatttatactcacaagaggaattgttcaacttctttcttaaaaaacccatagttccacttgatacccaaaagcgcatcatcatcgtcttccactgtgaattcagcagtgagcgagggccccgtatgtgcagatgcctgagagaagaggatagatcactcaaccagtatcccgccttgtactatccagagttgtatatcctcaaaggtggatatcgggatttttttcccgagtatatggagttatgcgagcctcagagctattgccctatgcaccatcaggaccataagaccgagctcctgcggtgtaggtcacagtccaaggtacaagagggagagcggcaactgagggagcagatcgccctgctggtgaaggacatgagcccttag

SEQ ID NO: 14513 - DNA, 288 bp, synthetic construct
  misc_feature 1..288: note = Description of Artificial Sequence: Synthetic coding sequence
  source 1..288: mol_type = other DNA
atggaggggggcttcggcagtgacttcggcggatctggcagtggtaaactcgatcccggccttataatggaacaggtgaaagtccaaatcgccgtagcaaacgcgcaagagctcctccaacgcatgactgataagtgcttcaggaagtgtataggcaaacccgggggctcactcgacaacagtgagcagaagtgcatcgcaatgtgtatggatagatatatggacgcctggaacacagtttcccgcgcctataactccaggttgcagcgcgagcgggctaatatgtag

SEQ ID NO: 14514 - DNA, 576 bp, synthetic construct
  misc_feature 1..576: note = Description of Artificial Sequence: Synthetic coding sequence
  source 1..576: mol_type = other DNA
atgcagacaattaagtgcgtagtggtgggagacggcgccgtgggcaaaacgtgcttgcttatctcttacactaccaataagttcccatccgagtatgtgcccacagttttcgataactacgccgtgactgtgatgattgggggcgagccctacaccttagggctgttcgacactgcaggccaggaggactacgatcgactccgcccactgtcctacccccagaccgacgtgttcctggtgtgtttcagcgtggtcagtccaagcagcttcgagaacgttaaagagaaatgggttccagaaatcacccaccattgcccaaaaacacccttcctgcttgtgggtacccagatagatctgagggacgatccaagcaccatcgagaagctggctaaaaacaaacaaaaacctatcacacctgaaaccgccgaaaagctcgcaagggacctcaaggctgtgaagtatgtggaatgctctgcccttacacagcgaggactgaagaacgtgttcgacgaagctatcctggctgccctggaacctccagagacccagcccaaacgtaaatgctgcatcttctag

SEQ ID NO: 14515 - DNA, 576 bp, synthetic construct
  misc_feature 1..576: note = Description of Artificial Sequence: Synthetic coding sequence
  source 1..576: mol_type = other DNA
atgcaaactattaaatgtgttgtggtgggcgatggagctgttggcaaaacgtgcctgctgattagctatactacgaacaagttcccgagtgagtacgtgccaactgtgtttgacaactacgccgtcactgtgatgattggaggcgagccctacactctcggccttttcgacaccgccgggcaagaggactatgaccggctgaggcccctgtcttacccccaaactgacgtattccttgtttgttttagcgtcgtgtccccatcgagtttcgagaacgtgaaggagaagtgggtgcccgaaatcacgcaccactgtcctaaaaccccttttctgctggttgggacacagatagacctacgagatgatccctcgacaatagagaagctggctaaaaacaagcagaaacctattacgcccgagacagctgagaagttggctcgcgacctgaaggcggtcaaatatgtggagtgtagtgccctgacccagaaaggcttgaagaatgtgttcgacgaggccatattggctgcacttgagcctccagagcctaagaaatcccggcgctgtgtccttctctag

SEQ ID NO: 14516 - DNA, 576 bp, synthetic construct
  misc_feature 1..576: note = Description of Artificial Sequence: Synthetic coding sequence
  source 1..576: mol_type = other DNA
atgcagacgattaagtgcgtggttgtcggagacggtgcagtgggcaagacttgcctacttataagttacacaacaaataagtttccatcggaatacgtcccaactgtgtttgacaactatgccgtaacagtgatgatcgggggagagccttatactcttgggctattcgacacggccgggcaggaagattatgacaggctgaggcctctgtcctatcctcagaccgatgtgttcctggtatgcttctcagttgtttctcctagttccttcgagaatgtaaaagaaaagtgggtgcctgagataacccaccactgcccaaagaccccctttctgctggtcggcacacagatagaccttcgcgacgacccctctactatagaaaagctcgcaaagaacaagcagaaaccaattactcctgagactgccgagaagcttgcccgagacctaaaggcagtgaaatatgtggagtgttcagctctaacccagaagggcctcaagaatgtgtttgatgaagcgatcttggccgccctcgagcctccggagcccaagaagtcacgtaggtgcgttctgttgtag

SEQ ID NO: 14517 - DNA, 411 bp, synthetic construct
  misc_feature 1..411: note = Description of Artificial Sequence: Synthetic coding sequence
  source 1..411: mol_type = other DNA
atgcaaacaatcaagtgcgtggtggtcggcgacggagcagtgggcaagacctgtctgctgatctcttatacaacgaacaaatttccttccgaatacgtcccaaccgtgtttgataactacgcagtcaccgtaatgatcgggggggagccctatacactgggcctcttcgataccgcgggccaggaagattacgaccgcctgcgtcccttgtcttaccctcagaccgatgtgtttctggtgtgcttcagcgtcgtgtcccccagttcattcgaaaatgtgaaagaaaaatgggtgcctgaaatcactcaccattgcccgaagacacctttcctactggttggtactcagatcgatcttcgagatgatccttccactatcgagaagctagcaaagaacaaacagaaaccttag

SEQ ID NO: 14518 - DNA, 702 bp, synthetic construct
  misc_feature 1..702: note = Description of Artificial Sequence: Synthetic coding sequence
  source 1..702: mol_type = other DNA
atgtcaccagatatcctgcacaacaagcagatatctataggtatttgcaccgattacttggatttttcgtgggtgaattacatacactttaagcaactgaaaaatcagtggaaggttcgcaggggcgacacaggcttcgcgagaagcgccggacggcagaactcaagtcggcaggactctaacgagtggtggagccagtttggcgaagtttgccctacgtcttggaacgaagtcttcgacaactacgccgtaaccgtgatgattggaggtgaaccctatacactggggctgtttgacaccgctgggcaggaggattatgaccgcctccgcccactttcttatccccaaaccgacgtcttcctcgtgtgtttcagtgtggtcagtcccagtagcttcgagaacgtaaaggaaaaatgggttccggaaattacgcaccattgccctaaaacaccatttctgctagttggcacccagatcgatcttcgcgacgacccatctaccatcgaaaaattagcaaaaaataagcagaaacctataacacctgaaacggccgagaagctggctcgagatctaaaagcagttaagtacgtagaatgcagtgcactgactcagaagggcttaaaaaatgtgttcgacgaagcgatcctcgcagccttagaaccaccggaacctaagaaatccagacggtgcgtcttgctttag

SEQ ID NO: 14519 - DNA, 1269 bp, synthetic construct
  misc_feature 1..1269: note = Description of Artificial Sequence: Synthetic coding sequence
  source 1..1269: mol_type = other DNA
atgaattctggacatagttttagccagacgccttcggcttcttttcacggagccggagggggctggggtaggcctaggtcttttccacgagctcctaccgtgcacggtggtgccggtggagccagaatatcgctgagttttaccactcgatcgtgccccccacccgggggcagctgggggtccgggcggtctagtcctctcctgggaggcaatggtaaagccactatgcaaaatcttaacgacagactagcatcttatctagaaaaggttagggccctggaggaagctaatatgaaactggagtcgaggatcctgaagtggcaccagcaacgtgaccccgggtctaagaaagactattcccagtatgaggagaatatcacccatcttcaggaacaaatcgtggacggcaagatgacaaacgcacagataatcttgctgatagacaacgcaaggatggcggttgacgacttcaacctgaagtatgagaacgagcactcctttaagaaggacctcgaaatcgaggttgaaggcctgcgaagaacactggacaacctgacaattgtcactaccgatctggagcaggaagtcgagggtatgcgaaaagagttgatacttatgaaaaagcaccatgagcaagagatggagaaacaccatgtcccctccgattttaatgtcaatgtaaaagtggacactgggcctagagaagatctgattaaagtgctggaagacatgcgccaggagtacgaattgattataaaaaagaagcatcgggatctggatacatggtataaagaacagagcgcggctatgtcccaggaggcagcaagccctgcaaccgtgcaatcgcggcagggagacatccatgaattgaagcgcacctttcaggccctagaaatcgatttgcagacccagtatagtaccaaatctgcactggagaacatgctgtcagaaactcagtcgcgatatagctgtaaattgcaggacatgcaggagatcatatcccactacgaggaggagctgacacagcttcggcacgagctagagaggcagaataacgagtatcaggtgttactggggatcaaaacacaccttgaaaaggagattacaacataccgcagacttctggaaggggagtcggaggggacaagggaagagtcaaagtctagcatgaaggtctcggccacccctaagatcaaggcaatcacgcaggagactatcaatggccggctggtcctgtgtcaggtgaatgagatccagaaacatgcttag

SEQ ID NO: 14520 - DNA, 1596 bp, synthetic construct
  misc_feature 1..1596: note = Description of Artificial Sequence: Synthetic coding sequence
  source 1..1596: mol_type = other DNA
atggcagacgtcctcagtgtcctgaggcagtataacatccagaaaaaggaaattgtggttaagggagacgaggtcatatttggcgagttctcctggcctaagaatgtgaaaactaactatgtggtatgggggacgggcaaagagggccagcctagagagtattataccctggatagtatcctcttccttcttaacaatgtgcaccttagccaccccgtttacgtgcggagagcggccacagaaaatattccagtggtgcgccgcccagaccggaaggacttactgggttatcttaacggggaggcatccaccagcgcttcaatagatcggtccgcacccctcgaaatcgggttgcagcgcagcacccaagttaagcgcgccgctgacgaagtgttagcagaggccaaaaaacctcgcatcgaggacgaggagtgtgtgcgtctcgataaagagcgtctagccgctagattggagggtcataaggagggaatcgtgcagacggagcagattaggtccctgtctgaagcaatgagtgtagaaaagatcgccgctattaaggccaagatcatggccaagaaacggtcaaccataaaaactgatctcgacgacgatattactgcactgaaacagaggagctttgtcgatgccgaggtcgatgtgactcgggacattgtgtctcgggagagagtgtggcggacgagaacaactatcttgcagtcgactggcaagaacttctcgaagaacattttcgcaatactgcaaagcgtaaaagccagggaagaaggaagggcccctgagcaacgaccagcacccaatgccgcccccgtcgatcctacactccggacgaaacaacccattcccgctgcctataacaggtatgatcaggagagatttaaaggtaaagaagagaccgagggctttaaaatagatactatgggtacctatcatggaatgacactcaagagcgttactgagggcgcttccgccaggaaaacccagacccccgcggctcaacccgttcctcgcccagtcagccaggccagaccccctccaaaccaaaaaaaaggctcacgaacgccgatcattatcatacccgcggccaccacctccctgatcaccatgctcaacgccaaggatctgctccaggacctcaagtttgttccctccgacgaaaagaaaaaacaaggctgtcagcgggaaaatgaaactttaattcaacgccggaaagatcagatgcagccgggcgggaccgccatcagcgtgaccgtcccatacagagtggtcgatcagccactcaaacttatgccccaggattgggatcgcgttgtcgccgtattcgtgcagggaccagcctggcagtttaagggctggccttggctgctgccggatggttcccccgtggatatatttgccaaaatcaaggcttttcacctcaagtacgatgaagttagattggatccgaatgtccagaagtgggacgtaacagtgcttgagttgagttaccataagcgtcatttagaccgacccgtttttctgaggttctgggagacgctggacaggtatatggtcaagcacaagtcccatctccggttctag

SEQ ID NO: 14521 - DNA, 951 bp, synthetic construct
  misc_feature 1..951: note = Description of Artificial Sequence: Synthetic coding sequence
  source 1..951: mol_type = other DNA
atggccgatgtcttgtctgtactcagacaatataatatccagaagaaagagattgtcgtgaaaggggatgaggtgatcttcggcgagttctcttggccaaaaaatgttaaaaccaactatgtggtgtggggtacaggcaaggagggccaaccaagagaatactatactctcgactccattctatttcttttgaacaacgtccacctctctcatccggtgtacgtcagacgggcggccacagaaaatatcccggttgtgagaaggcccgatcgcaaagatctcctgggatatctaaatggtgaggcttctactagcgcctccatcgacagatcagccccattggagataggactccagagatccactcaggttaaaagggctgctgacgaagtgctggctgaggcaaagaaacctagaatcgaagacgaagaatgcgtaagactagataaagagcgcctggcagccagactcgagggtcacaaagaaggtatagtgcagaccgagcagataaggagcctatccgaggcaatgagcgtagaaaagatagcagccatcaaggctaagatcatggctaaaaagaggtctaccatcaaaacagacctcgacgacgatatcactgccctcaagcagcggtctttcgtggatgccgaggtggacgtcaccagagatatcgtgagtcgcgaacgcgtgtggcgcactcgcacgacaatcttacagagcaccgggaagaattttagtaaaaatatcttcgcaatcctgcagagtgtgaaggctagggaagaaggacgggctccagaacagcgaccagcaccaaacgcagcgcctgttgaccccacactccgcactaagcaaccaatccctgccgcttataacagatacgatcaggagcgcatcagtaatacccattatcacaattcttgcagctaccacctctttaataatcatgcctag

SEQ ID NO: 14522 - DNA, 1317 bp, synthetic construct
  misc_feature 1..1317: note = Description of Artificial Sequence: Synthetic coding sequence
  source 1..1317: mol_type = other DNA
atgggaggttgtgccggatccaggaggcgatttagcgattcagaaggcgaggagacagtacccgagcctcggttgcctctacttgaccatcaaggagcccattggaaaaatgccgtgggtttttggctcttgggtctctgcaataacttctcctacgtggtcatgctgagcgctgcacacgacatcttgtctcacaaacgcacatccggaaaccagagtcacgtggaccctggaccaacgccaatcccacacaattcatcgtcacgctttgattgtaactcagtgtctacagccgctgttttattagcagatatactgcccacactggttataaagctcttggcacccctcgggcttcacttactgccatacagtccgagagttctggtgtctggaatctgcgcagcaggatcttttgttctggtggctttttcccatagcgtcgggacctcattatgtggtgtcgtcttcgccagcatttcatcagggctgggggaagtgacatttctcagcctgaccgccttctatccgagagccgtgatcagttggtggtcgtctgggactgggggagcaggactgctcggggcactgtcctatctcggtcttacacaggccgggctttctccccaacagacattactcagcatgctcggcatacccgcccttttgctggcctcttactttctgctgctgacttccccagaagctcaggatcctggtggggaagaggaagcagaatccgctgctcggcaacccttgatcagaactgaggcgccagagtctaaaccaggatcctcatctagcttgagcttgcgagaacgctggaccgtgttcaaggggttactctggtatatcgttcctctggtcgtggtttattttgccgaatacttcattaatcaggggttgtttgagctgctcttcttttggaacacatcgctgtcccatgcccagcagtaccgatggtaccagatgctctaccaggccggagtcttcgccagtcgatcatcactaaggtgttgtcgtatccgcttcacctgggccttggcgctgctccagtgtcttaacttggtcttcctgctggccgatgtatggtttggtttcctcccttctatctacctcgttttccttattattctgtatgagggtctgctaggaggggctgcatatgtgaatactttccataatattgctctagaaacctctgatgagcacagggaatttgcaatggccgcaacatgcatctctgacaccctaggcatctccctctcaggcttgctggccttgcctctccatgacttcctgtgccagcttagttag

SEQ ID NO: 14523 - DNA, 504 bp, synthetic construct
  misc_feature 1..504: note = Description of Artificial Sequence: Synthetic coding sequence
  source 1..504: mol_type = other DNA
atggggggctgtgccgggtctcgaaggagattcagcgactctgagggggaggagactgtccccgagccacgattacccctcctcgaccatcagggggcccactggaaaaatgcggttggcttttggctgctgggcctctgcaataacttcagttatgtcgttatgctctcagccgcgcatgatattttatcccataagcgtaccagtgggaatcaatctcacccccccggctccaggcaatgggatctgtgctgttggaagctccgtcctggctgtctcttctcattttgtggggaccagcccgtgtgttattttctgctgctgaccagtccagaggctcaagaccccggaggcgaagaggaggctgaaagcgcggctagacagccgcttattagaaccgaggcccctgagagcaagcctggctcttcctcatctcttagtctccgcgagagatggaccgtcttcaaaggattattatggtacatcgtcccccttgtcgtctag

SEQ ID NO: 14524 - DNA, 1266 bp, synthetic construct
  misc_feature 1..1266: note = Description of Artificial Sequence: Synthetic coding sequence
  source 1..1266: mol_type = other DNA
atgggaggttgcgcagggtcccgccgtcgattttcagattccgaaggcgaggagaccgtgcccgaaccgagactgccacttctggaccatcagggtgctcattggaaaaacgccgttggtttttggctgctggggctatgcaacaatttttcatacgtggtcatgttatcagcggcacatgacattctctcccataaacgaacttcaggaaatcagtcccatgtggaccctgggccaacgcccatcccgcacaactcctcctcacgattcgactgcaacagcgtgtctacggctgcagttctcttagccgacattctgcccaccctcgtaattaagctgctggcccctctgggacttcacctgctaccgtattccccgcgcgttctggtcagcggaatttgcgccgctggtagtttcgtgttggtagctttcagccactccgtgggcacttcactgtgcggcgtggtctttgctagcatttcctcaggtttaggagaagtcacttttctgtccctcaccgctttttatccccgggccgtgataagttggtggagtagtggcacaggtggtgctgggctgctgggggccttatcatacctggggttgacacaggcaggcctatctccccagcagacgctgctgagcatgttaggcattcccgccctcctcctcgcttcctactttctgctgttaacatcacccgaggcacaggacccaggcggcgaggaggaggccgagagcgctgcccggcagcctctcatcaggactgaggcacctgaaagcaagccagggtctagctcttcattgagtctgcgcgagcggtggaccgtgtttaaagtcagaatgatggccggattcgaacttctcttcttttggaatactagcttgagccatgctcaacaatatcgatggtaccagatgttgtaccaggcaggagttttcgcttccaggtctagcctacgatgctgtagaattcgcttcacctgggcactcgctctcctgcagtgtctcaatctcgtgtttcttctggctgatgtgtggttcggcttcctgccgtccatctacctggtgttccttattattctgtacgagggacttctcgggggtgccgcctatgtgaacaccttccataatatcgccctcgaaacatccgacgaacatcgtgagtttgccatggccgcgacttgcatcagtgacaccctgggaatctccctttctggactgttagctcttccattgcacgatttcttatgtcagctctcctag

SEQ ID NO: 14525 - DNA, 1173 bp, synthetic construct
  misc_feature 1..1173: note = Description of Artificial Sequence: Synthetic coding sequence
  source 1..1173: mol_type = other DNA
atgggcggctgtgccgggtcacgacgacggtttagcgactctgaaggggaggaaactgtgccggagcctcggctgccactattggaccatcagggtgcccattggaaaaatgccgtaggattttggttgctgggtttgtgtaataacttttcatacgtcgtgatgctgtctgccgcacatgacattttgagtcataaaaggactagcggaaatcagtcccacgtcgatcctgggcccacacccattccacataactcatcttctagatttgattgcaatagcgtgtccaccgctgcagtgctgctcgcagatattttacctactttggtgattaaactgctcgcccctcttggcctgcacctactcccctattcaccaagggtgctggtaagtggcatctgtgctgccgggagctttgtcttagttgccttttcccactcggttggaaccagtctgtgcggcgttgtgttcgcttcaattagtagtggactgggggaggtaacattcctttcactcactgcgttttatcccagctattttctgctattaaccagtccagaggctcaagaccctggcggcgaggaggaggcggagagcgccgccagacaaccactcatccgaacagaggctccagagagcaagcctgggtcgtcctcttctctttccctacgagaaaggtggacagttttcaagggtctgctatggtatatagtgcctcttgtcgtcgtatacttcgcagaatatttcatcaaccaagggctcttcgagttgctgttcttttggaacacatcattatctcacgcccagcaatataggtggtatcagatgctttatcaggcaggagtgttcgcttctcgatcttcactgcggtgctgtaggatcaggtttacgtgggcactcgccctactccaatgcctgaatctcgtgttcctcctggcagatgtttggtttgggtttttgccttccatctacctggtgttcttgataattttgtatgaaggcctcctgggaggggcggcgtacgtgaatactttccataacattgccctcgaaacatccgacgaacacagggaatttgcgatggccgctacttgcatatcagacacactgggcatatcactgagcggcctcctggccttgccgctgcatgatttcttgtgccagctgtcttag

SEQ ID NO: 14526 - DNA, 762 bp, synthetic construct
  misc_feature 1..762: note = Description of Artificial Sequence: Synthetic coding sequence
  source 1..762: mol_type = other DNA
atgggcggttgtgccgggagtcgtcggcgtttctcggatagtgagggtgaggaaaccgttcctgaacctaggttacccctgctggaccaccagggcgcccactggaagaatgccgtgggtttttggctgttgggcctgtgtaacaatttctcttatgtcgtaatgctgtccgccgctcatgatatactcagtcataaacggacttccgggaatcagtcacacgtggatccagggccaactcctattccacacaactcctccagtaggtttgactgcaatagtgttagtactgcggcagtcctgcttgctgacatcctgcctacactagtcattaaactgctagccccacttggactgcaccttctgccttatagtcctagagtcctcgtaagcgggatttgtgctgccgggagcttcgtcttggttgccttttcccactcagtgggtacgagtctgtgcggaagctcttctagcctgtcgctcagggagcggtggaccgtgttcaagggactgctgtggtacatagtgcccttggttgtggtctacttcgccgaatactttatcaaccagggcctcttcgaactactattcttttggaacacctccctgagccacgcacagcagtacaggtggtaccagatgctctatcaggccggagtctttgcaagtcggtcatccctgaggtgttgccgaatccggtttacatgggctctggctctgctgcagatggaatcgagaagcgtggctcaggcaggtatgtag

SEQ ID NO: 14527 - DNA, 1020 bp, synthetic construct
  misc_feature 1..1020: note = Description of Artificial Sequence: Synthetic coding sequence
  source 1..1020: mol_type = other DNA
atgggtgggtgtgcaggtagcaggcgacgtttttctgattccgaaggggaggagaccgttcccgaaccgaggctcccccttctcgatcaccagggggcacactggaagaacgcagtgggcttttggctgctgggcttatgcaacaacttttcctacgtggtgatgctgagcgcagcacacgacatactatctcacaagaggacaagtggaaaccagtcacatgtggatcccgggcctaccccgattccccataacagctcctctcgattcgattgcaatagcgtgtcaacggccccccctggaagcaggcaatgggatctctgttgttggaaactgaggccaggatgcctgttttctttttgcggtgatcagccggtctgttacttcctgttgctgacctcgcctgaagcacaggatccaggcggcgaggaggaggctgaaagtgccgcccgacagccattgattcggactgaggcccctgaaagcaaaccaggctcaagctcctctcttagcctgcgcgaacgctggaccgtgttcaagggcctgctctggtatattgtacccctggttgtagtgtatttcgcagagtatttcattaatcaggggcttttcgagctgctgtttttctggaacaccagccttagtcatgctcagcaataccgctggtaccagatgttgtaccaggcaggcgtcttcgcgtctagaagcagcttacgctgttgtcggatccgctttacctgggcactcgcactcctgcagtgcctaaatctggtgttcctcctggcagatgtgtggtttggctttctgccatcaatctatctggtctttctgattatactctacgaagggctgctaggaggcgccgcttatgtaaacacctttcacaacatcgccctggagacttccgacgagcaccgagaattcgccatggccgctacatgcatttccgacactcttgggatatctctctcagggctcctcgcactcccactccacgattttctctgccagttgagttag

SEQ ID NO: 14528 - DNA, 1155 bp, synthetic construct
  misc_feature 1..1155: note = Description of Artificial Sequence: Synthetic coding sequence
  source 1..1155: mol_type = other DNA
atgctatccgcagcacacgacattttgagtcataagcgtacatctggcaaccagtcccacgtcgatccaggacctacccccatccctcataacagctcgtctagatttgactgtaactccgtgtctacggccgctgtattactggcagacattctgcctacccttgtcattaagctgctggcccctttggggcttcacctgctgccctattcccccagagtactggtcagcggcatatgcgccgcaggctcgttcgtgctggtcgcatttagtcacagcgtcggcacctcgctttgtggagttgtttttgcctcaatttccagcggcctcggtgaggttacgtttctaagcctcaccgccttttacccccgggctgtgatctcttggtggtcatcgggcacgggaggagcaggcctgcttggcgctctgtcttacctagggctgactcaggctgggctcagcccccagcagacactcctcagtatgctggggatcccagccttactgctggcctcttacttccttttactgaccagtccagaggcacaggacccggggggtgaggaggaggcagagtcggccgccagacaaccattgatacgcactgaggcaccggagagcaagcccggctctagttccagtctgtctttgcgcgaaagatggactgttttcaagggtcttctctggtacattgttcccctagtggtggtgtattttgcagagtattttatcaatcaaggcctgttcgaactgttatttttttggaacacaagcttatctcacgcacagcaatacagatggtaccagatgctttaccaagcaggcgttttcgcttcccgatcatctttacgatgttgccgcatccggttcacctgggccctagccctgttgcagtgtctgaatctggtgttcctgttggccgacgtgtggtttggctttctgcctagcatctatttggtgttcctgattattctgtacgaaggacttcttggcggagctgcatacgtgaacaccttccacaatatcgcccttgagacctccgacgagcaccgagaattcgccatggccgccacctgtatttcagacaccctgggaatcagcctttctggacttctcgctttgcccctgcacgactttctgtgtcaattgtcttag

SEQ ID NO: 14529 - DNA, 1317 bp, synthetic construct
  misc_feature 1..1317: note = Description of Artificial Sequence: Synthetic coding sequence
  source 1..1317: mol_type = other DNA
atgggggggtgtgctggcagccggcgccgcttttccgacagcgaaggggaagaaacggttcccgagccaaggctgcctctgctggaccatcagggtgctcactggaagaatgcagtgggtttctggcttctgggactttgcaacaatttcagttatgttgtaatgttaagtgctgcacacgacattctatcccacaagcggacctccgggaaccagtcccacgtcgatcccgggccaacacccatccctcacaactctagctcgcgctttgactgtaactccgtgagcactgcagctgtgctgttggcagacatactgccaacactcgttatcaaactgctggctccactcggtttacacttgctaccttactctcctagagtgcttgtgtccggaatttgcgctgcaggcagtttcgtgctagtcgccttcagccatagtgtaggaacatcattgtgcggggttgttttcgctagtatttcttccggtctgggcgaggtcacctttctatccttaactgccttctatccgcgcgccgtaatttcctggtggagctcaggtaccggaggcgctggtctgttgggtgccctgtcgtacttaggattgactcaggcaggactctcaccccaacagactttgctgtctatgctgggcattcccgccttgcttctggcctcctactttctgctgctgacctcaccagaggctcaggaccccggcggggaggaggaggctgagtctgccgcccgtcagcctctcatcaggaccgaggctccagagtctaagcccggttcctcttccagtcttagcttaagggaacggtggacagtgtttaaagggctcctgtggtacatcgtgcccttggtcgtcgtgtacttcgccgagtattttatcaatcaggggctgtttgaactgctgttcttctggaatacttcactttcgcacgctcagcaataccgctggtatcaaatgctttaccaggccggtgtctttgcttctcgttcctcattgcggtgttgcagaattcgattcacctgggccctcgctctgctccagtgtctgaacctggtctttctgctcgcagatgtttggttcggattcttgccaagcatatacctggtgtttcttatcattctgtatgaggggctgcttggaggcgctgcatacgtcaatacattccataatatcgccctcgagacctccgatgaacacagggagttcgccatggccgccacctgcatttctgacaccctggggatcagtcttagcgggttgctggcactccctttacacgattttctgtgccagctgtcctag

SEQ ID NO: 14530 - DNA, 1317 bp, synthetic construct
  misc_feature 1..1317: note = Description of Artificial Sequence: Synthetic coding sequence
  source 1..1317: mol_type = other DNA
atgggcgggtgcgccggatctcgaaggagattcagtgactctgagggggaggagaccgtgccagaaccgcgcttacctcttctcgatcatcaaggcgcccattggaagaatgctgttggtttttggcttctgggtctctgcaataacttttcctacgtggtcatgctctcagccgcacacgacatactttctcataagcgtacttcgggcaaccaatcccacgttgacccaggtccgacgcctataccccataattcttcttcacggttcgactgcaatagtgttagcactgctgctgtgctcctggccgacatcctgcctacactcgtgattaagcttttagcgcctctgggattgcacctcctcccctattctccacgggttcttgtcagtggcatatgtgccgctggtagtttcgtactcgttgcgttttcccactcggtaggtacaagtctttgtggagttgtatttgcctctatatcaagtggactaggagaagtcacgttcctgtccctgaccgccttttaccctcgggctgtgatttcatggtggtcttccggaacggggggagcaggcctgctgggggcactctcatacctggggctgactcaggctggtcttagtccccagcagacactactctctatgctggggattccggccctactgcttgctagctacttcctgcttttgacatcccccgaggcccaggatcccggcggcgaagaagaggccgagtccgcagccagacagccattaattaggactgaggcacctgaaagcaagccaggtagctccagttcactctctctgcgcgagcgatggacagtgtttaagggtctgctttggtacatagtcccgctcgtggtggtgtattttgccgagtatttcattaatcaggggcttttcgagctgctatttttttggaatactagcctgtcccacgcccaacagtatcgctggtaccagatgctttaccaggccggcgtgttcgccagtcggtcctctcttcggtgctgtagaattcgctttacatgggccctagcactcctgcaatgcctgaatctcgtgtttcttcttgcagatgtgtggttcggctttctgccatccatttacctggtatttttaattatcctttatgaaggcttgctgggaggggctgcctacgtgaacactttccacaacattgccttggaaacctctgatgaacaccgggagtttgcaatggccgccacctgcatcagcgatacgctgggcattagcctaagcggattgcttgcccttcctctccacgatttcctgtgccagctcagttag

SEQ ID NO: 14531 - DNA, 1017 bp, synthetic construct
  misc_feature 1..1017: note = Description of Artificial Sequence: Synthetic coding sequence
  source 1..1017: mol_type = other DNA
atgtggacacaagctcagaggcgcagccccactacagcccaccatgacttaactgccaccctaagcctccgattaccgagggtattagtctccggcatatgcgcggctggttcttttgtactggttgcttttagtcattctgtggggacgagcctttgcggcgtggtgtttgctagcatctccagtggtctgggggaggttacgttcctgtccttgaccgccttttatccaagagcggtcattagctggtggtcctcaggaacaggcggcgcaggcctgctcggcgccctgtcttatctaggattaactcaggctgggctgtcgccgcaacagactctgttaagtatgttaggtattcccgctctgctgctcgcgtcgtacttcctattgcttacctctcctgaggctcaggatccggggggagaagaagaggctgaatctgctgccagacagcccctgattcggacagaggcccctgagagcaagcccgggagctctagtagcctctccttgagagagcgttggaccgtcttcaagggattgctttggtatatagtccctttggtcgtggtatatttcgcagaatattttattaatcagggattgttcgagctgctgttcttttggaatacatctctgtctcacgcacaacagtacaggtggtatcaaatgctctaccaggctggcgtgttcgcttctagaagcagtctcaggtgttgcagaattaggttcacttgggccctggcactgctgcagtgtctgaacctggtctttctcctggctgatgtgtggtttggcttcctacccagtatatacctagtgtttttgatcattctgtacgaagggttactcggcggggcggcctacgttaatacattccataacatcgccctggagactagcgacgagcatcgggagtttgccatggcagcaacctgcatctctgatacgcttggcatttcactgagcggtctgctggccttacccctacatgactttctgtgtcagctcagctag

SEQ ID NO: 14532 - DNA, 1083 bp, synthetic construct
  misc_feature 1..1083: note = Description of Artificial Sequence: Synthetic coding sequence
  source 1..1083: mol_type = other DNA
atgttatcagcggcccacgatattctttcccacaagaggacaagtgggaaccagtcccacgccgtactgcttgccgacattcttcctactctggtcatcaaactgctcgccccactcgggctgcatctgttgccatactcccccagggtcttggtcagcggcatctgtgctgccgggtcctttgtcctagtggcgttctcacatagtgttggaacctccctctgcggcgtggttttcgccagcatttcgtccggcttgggcgaagtgacctttctctctcttaccgcgttttatccacgagccgtaattagctggtggtcttcaggtactggcggggccggcctgttaggtgccttaagctacctcggactgacacaagcaggactatcgccgcagcaaaccctgctgagcatgctgggcattcccgctcttttgcttgccagctattttttactactgacctccccggaggcacaggacccaggcggagaggaggaggcagaaagtgccgccaggcagcctctgataagaaccgaagcgcctgagtccaaacccgggagctcttcctctctgtccctgcgcgaacgatggacagtgttcaagggccttctgtggtacattgtgccacttgtggtggtgtatttcgcagagtacttcatcaatcagggcctgtttgaactgttgtttttctggaatacctcattgtcacacgcacagcaatacaggtggtatcagatgctttaccaggcaggagtgttcgcttcccgaagcagtctgaggtgctgccggattcggttcacttgggccctggctttgctgcaatgcctgaacctcgtattccttttagcggacgtgtggtttgggtttctcccctctatctatctcgttttcctgatcattctctatgagggcctgctgggaggcgcagcctatgtgaatacattccacaacatcgcattagagaccagcgacgagcaccgggagttcgcaatggcagctacctgcatatcagatacgctgggtataagcctttccggcttgttggctctaccactccatgactttctctgccaattgtcttag

SEQ ID NO: 14533 - DNA, 1299 bp, synthetic construct
  misc_feature 1..1299: note = Description of Artificial Sequence: Synthetic coding sequence
  source 1..1299: mol_type = other DNA
atggccgtgccattcgtggaggactgggatctggtgcaaaccctaggtgagggagcgtacggggaagtccagttggctgtgaaccgcgtgacagaagaggctgtagctgtaaaaattgttgacatgaagagggctgtggattgccctgagaatattaagaaagagatttgcattaacaaaatgctgaatcatgagaacgtcgtcaagttttatggacatagaagggagggcaatatccagtatctgtttctggagtattgcagcggtggcgagttatttgatcggattgagcctgatataggcatgcctgagcctgacgcacaacgattttttcaccagctcatggccggcgtggtgtatctccatggtattggaatcacccacagggacatcaaaccagagaatctccttcttgatgagcgggataacttgaaaatttccgacttcggtctcgcgaccgtattcagatacaacaatcgagaacgccttttgaataaaatgtgcggaacccttccctatgtcgccccggagctgctgaaaagaagggaatttcacgcagagcccgtcgacgtgtggtcctgcgggatcgtgctgaccgccatgctcgcaggtgaacttccttgggatcagccttctgactcctgccaggagtactccgactggaaggagaagaagacctatctgaacccttggaagaaaattgacagcgcacctctcgctctcctgcataagatactagttgagaacccttccgcacgcattaccattcctgacatcaagaaagaccgatggtataacaagccgctgaagaagggcgccaagaggccacgcgtgacatccggcggagtctctgagtcaccttctggcttctctaagcacattcagtctaacctggattttagccctgtaaacagtgcgagtagcgaggaaaatgttaaatattcgagctcgcaaccagaacctagaacagggttatcattatgggacaccagcccatcctacattgataagcttgttcaggggatatccttctcccagcccacatgcccagaccatatgctgctgaacagtcagttactgggaactccaggcagctcccaggttacaatatctaccaccgaccggcgcaataacaagttgatctttaaagtgaacctgttggagatggatgataagatcctcgtggattttaggttgtccaagggtgatggactagaatttaagcgccactttcttaaaattaaaggcaagctgatcgatattgtgtcttcccagaagatttggctgccagcaacctag

SEQ ID NO: 14534 - DNA, 1431 bp, synthetic construct
  misc_feature 1..1431: note = Description of Artificial Sequence: Synthetic coding sequence
  source 1..1431: mol_type = other DNA
atggctgtgccattcgtggaggactgggatctcgtccaaacgttgggagaaggcgcatatggagaggtccaactggccgtcaacagagtgacggaagaagcagtggccgtgaagatcgtagatatgaaacgcgctgtcgattgccccgagaacattaaaaaggaaatatgtatcaacaagatgcttaaccacgaaaacgtggtcaagttctacgggcatagacgcgagggaaatattcagtacttattcctagaatattgctcaggcggcgaactgtttgacaggattgagcctgacatcgggatgccggagcctgacgctcagaggtttttccaccagcttatggcgggggtggtctatctgcacgggattggcatcacccacagagacataaagcccgaaaacctgctgctggatgagagagacaatctaaagatttccgacttcggtcttgccacagttttccgttacaataatagggagcggctgcttaataagatgtgcggtaccttgccttatgtggcaccagaactcctaaagcgccgcgaatttcacgccgagcctgtggatgtgtggtcttgcgggatcgttttgaccgctatgttagcgggggagctgccatgggatcagccaagcgattcatgtcaggagtactccgactggaaagagaagaagacctacctcaacccgtggaaaaaaatagatagtgcgccgcttgccttacttcacaagatattagtggagaacccatccgcacggataaccatccccgatatcaagaaagatcgctggtataataagcccctgaagaagggcgcaaaacggccccgagttactagtgggggtgtttccgagtccccctcgggcttcagtaaacatatccagtccaacctcgatttttccccagtcaacagcgcctcctcagaggaaaacgttaagtactcttcttctcagccagagcccagaacagggttgagcctctgggacacgagtccaagttatatagataaactggtgcaggggatatcatttagtcagcctacctgcccggaccatatgctgctgaattcccagcttctcggcacgcccggctcttctcagaacccatggcaacgtctggtgaaacgtatgaccagattctttacaaaactggatgcggacaagtcctaccagtgcctcaaggaaacctgcgaaaagttggggtatcagtggaaaaagtcttgtatgaaccaggtaactattagcacaacagatcgacgcaacaataaactgatttttaaggttaatttgctcgaaatggatgacaagattctcgtggacttccgactctccaaaggtgacggactggaattcaaacggcatttcctgaaaatcaagggaaaactgatcgatatcgtgtccagccaaaaaatctggctacccgcaacctag

SEQ ID NO: 14535 - DNA, 1431 bp, synthetic construct
  misc_feature 1..1431: note = Description of Artificial Sequence: Synthetic coding sequence
  source 1..1431: mol_type = other DNA
atggccgtgccatttgtagaagactgggatctggtgcagactctgggtgagggcgcatatggggaggtgcagttggctgtcaaccgagtaacagaagaagccgtggctgtaaagatagtcgatatgaagcgggctgtggattgtccagagaatattaaaaaggagatttgtattaacaaaatgctgaatcacgagaacgtcgtgaagttttatggccacaggcgcgagggaaacatccagtacctgttcctggaatattgctcgggcggcgaactcttcgatcgtattgaacccgacattgggatgcccgagcctgatgcacagcgcttcttccaccaactgatggctggggtggtttacttacacggcatcggaataacccacagagacatcaaacccgaaaacctgcttctggatgagcgggacaatctgaaaatcagcgacttcggccttgctaccgtcttcagatacaacaaccgtgagaggctactgaacaagatgtgtggcactctgccctatgtcgcccccgagctcctgaagcgcagagaattccatgccgaacccgtggatgtgtggtcctgcggcatcgtgctgacagctatgctcgcaggcgagctgccctgggatcagccgagcgattcttgtcaggagtactcagactggaaggagaagaagacttacctgaacccttggaaaaaaattgatagcgcacctttggcactgctgcataagattctggttgaaaacccctcagcaaggatcacgatccctgacattaagaaggatagatggtataataagcctctcaaaaaaggcgccaaacggcccagagtgacgagcgggggagtatccgagagcccctcaggcttcagcaagcacatacagagtaaccttgactttagcccagtcaatagtgccagcagtgaggagaatgtgaagtacagcagcagtcagcctgagccccggacaggcctctcgctgtgggatacttcacctagttacatcgacaaactggtacagggcatcagctttagccagcccacctgcccggatcatatgttactcaactcacagctgttgggtaccccaggcagcagccagaacccctggcagcgtctcgtgaagagaatgacaagattcttcactaagttggacgcagataagagctaccagtgcttaaaggagacctgcgagaaactcgggtatcagtggaaaaaatcttgcatgaatcaagttacaataagcacaaccgatcggcggaataacaaactaatatttaaagttaacctgcttgagatggacgataagatcctagttgacttcagactatctaaaggggacggtttggaatttaagagacattttctcaagataaagggcaagttaattgacattgttagttctcagaagatttggctcccggctacctag

SEQ ID NO: 14536 - DNA, 1431 bp, synthetic construct
  misc_feature 1..1431: note = Description of Artificial Sequence: Synthetic coding sequence
  source 1..1431: mol_type = other DNA
atggcagttccgtttgtcgaggactgggacctggtccagactcttggcgagggagcatatggcgaagtgcagctcgcagtcaacagagtcacagaagaggccgtggccgttaagatcgtggacatgaagcgggcagtggactgtccagaaaacatcaaaaaggagatctgcataaacaagatgctgaaccacgagaatgtggtaaaattctacggccacaggcgggaggggaacatccagtaccttttcttagagtattgttccggcggtgaactattcgacaggatagagcctgacattgggatgcccgaacccgatgctcagaggttctttcatcagctgatggcaggagtggtttacctgcatgggataggcattactcaccgtgacattaaaccggaaaatctgctgctggacgaacgtgacaatttgaagatctccgacttcggcctggctacggtctttaggtataacaatcgcgagaggttgctaaataagatgtgtggtaccctgccttatgtcgctcctgaactgctcaaacgcagggaattccacgccgaaccagtcgacgtctggtcctgtggcatagttctaacagccatgctcgccggggagttaccctgggaccagccctcagactcctgccaggagtacagcgattggaaggaaaagaagacttatctgaatccgtggaagaagatcgactccgccccactggcactgctacataaaatcttggtggagaacccatcagcccgcatcacaatccccgatattaagaaagatcgatggtacaacaaaccactgaaaaagggggcaaagcggccacgggttacgtctggcggcgtatccgaaagtccatccgggttttccaagcacatccagagtaatctcgacttttctcccgtgaactctgcttcaagcgaagaaaacgtcaagtactctagttctcaaccagaaccaaggactgggctttcactgtgggacacgtctccttcctacattgacaagctcgtgcaggggattagcttcagccagcctacatgcccagaccacatgttactgaattcccagcttctgggaactcccggctccagtcagaatccctggcagaggctagtgaaaagaatgactcgttttttcactaagctggacgccgacaagtcgtaccagtgtctcaaggaaacctgcgaaaaacttggttatcaatggaagaaatcctgcatgaatcaagtgactattagtacaaccgaccggaggaacaataaactgatctttaaggttaacctgttagaaatggatgataaaatcttggtcgatttccgactgtctaaaggggacgggttagagtttaagcgacacttccttaagatcaaagggaaactaatcgacatcgtttcaagccagaaaatttggctccccgcaacctag

SEQ ID NO: 14537 - DNA, 402 bp, synthetic construct
  misc_feature 1..402: note = Description of Artificial Sequence: Synthetic coding sequence
  source 1..402: mol_type = other DNA
atggccgttccctttgttgaagactgggacctggtgcagaccttaggggaaggagcctacggagaagttcagctggctgttaatcgggtgactgaagaggccgtcgcggtgaagatcgtcgatatgaagagagcagttgactgccccgagaatattaaaaaggaaatctgtatcaacaagatgttgaatcatgaaaacgtcgtaaagttttatggccataggcgggaaggaaacatccagtacctcttcttggagtattgttctggcggggagttatttgacagaattgaacctgacattggcatgcctgagcccgatgcccagaggttttttcaccagcttatggctggcgtcgtttacctgcatggtattggaattacccatagagacattaaaccctag

SEQ ID NO: 14538 - DNA, 513 bp, synthetic construct
  misc_feature 1..513: note = Description of Artificial Sequence: Synthetic coding sequence
  source 1..513: mol_type = other DNA
atggccgttccgtttgtcgaggattgggatctggtgcaaacgctgggggaaggtgcctacggcgaagtgcagctcgctgtgaatagagtcacggaggaggccgtcgcagttaaaatcgtggatatgaaacgggccgtcgattgccccgaaaacataaaaaaagagatatgcatcaacaagatgcttaaccatgaaaacgtcgtgaaattctatgggcatcggagagaaggcaacatccagtatctttttctagagtactgttcaggaggcgagctctttgacaggatcgagccagatattgggatgcctgagcctgacgcacagaggtttttccaccagctgatggcgggcgtcgtgtacttgcacggaatcggaataacgcatagggacattaaacccgagaacctgcttctggacgagcgggacaatttaaaaatctcagacttcgggcttgcgacagtgttccgatataacaatcgcgaacggcttctgaataagatgtgcggcacttag

SEQ ID NO: 14539 - DNA, 615 bp, synthetic construct
  misc_feature 1..615: note = Description of Artificial Sequence: Synthetic coding sequence
  source 1..615: mol_type = other DNA
atggcagttcccttcgtggaggactgggatctggtacaaacattaggcgagggggcatacggggaagtccagcttgcggtaaaccgagtcactgaggaagcggtcgctgtcaagatcgttgacatgaagcgagcggtcgactgccccgaaaacatcaagaaagaaatttgcatcaataaaatgctaaaccacgagaacgtggtaaaattttacggccataggcgggaaggcaacattcagtacctatttctagaatattgctccggcggagaactgtttgacaggatcgaacctgacattggtatgcccgaacccgacgcccagaggttctttcatcagctgatggcgggggtggtttacctgcacggaatcgggatcacgcacagggacattaagcctgagaatctgctcctggacgagagggataaccttaagattagcgactttggtcttgccaccgtcttcaggtataacaaccgggagcggctactaaataaaatgtgcgggaccctgccctacgtggccccagagctgctgaagcgccgggagtttcacgcagagcctgtggatgtgtggtcctgcggcattgttctgactgcaatgctggccggatag

SEQ ID NO: 14540 - DNA, 129 bp, synthetic construct
  misc_feature 1..129: note = Description of Artificial Sequence: Synthetic coding sequence
  source 1..129: mol_type = other DNA
atggccgtgccttttgtggaggattgggacctagttcaaaccctgggcgagggtgcctatggggaagtccaactggctgtaaacagagtgacagaagaggccgtggccgtaaagattgttgatatgtag

SEQ ID NO: 14541 - DNA, 1431 bp, synthetic construct
  misc_feature 1..1431: note = Description of Artificial Sequence: Synthetic coding sequence
  source 1..1431: mol_type = other DNA
atggctgtgcccttcgttgaggactgggacctggtacagacattgggcgaaggtgcgtatggtgaggtccaactcgccgtgaatcgggtaaccgaggaggcagtggccgttaaaatcgtggacatgaaacgggcggtggactgccctgagaacattaaaaaagagatctgcataaacaaaatgctgaatcacgagaatgtggtcaagttttatggtcaccgcagggaggggaatatacagtatctcttcctggagtactgctcgggcggcgaactcttcgaccgaattgagcctgacattggaatgcctgaacccgatgcccaacgattctttcaccagctgatggctggagttgtttatctgcacggcattggaatcactcatcgcgatattaagcctgagaatttgctgcttgatgagagagataatttaaaaatttccgactttggactcgccactgtgtttcgctacaataatagggaacgactgctgaacaaaatgtgcggcacacttccatacgtggcacccgaactgttgaagcgccgagagtttcacgctgaacccgtggacgtatggagttgtggaatcgttctgaccgcgatgctcgcaggagagctgccctgggatcagcctagcgactcttgccaagaatacagcgactggaaagagaaaaagacgtacctgaacccatggaaaaagatagatagcgcccccctggcgcttctgcataaaatcttagtggagaacccttccgctagaatcacgatcccagacatcaagaaggaccgttggtataataaaccattgaagaagggggctaagaggcctcgggttactagcgggggagtctctgaatccccgtccggtttctctaaacacatccaatctaatcttgacttcagtcctgtgaattcggcgagctcagaggagaacgtcaaatactcatcttcccagcccgagccacgaacaggcttgagcctttgggacacatctccctcttatattgataaactggttcagggcatctctttttcacagcccacttgcccggatcacatgctgctgaatagtcaattgctgggcactcctggctctagccaaaacccatggcaacgacttgtgaagaggatgaccaggtttttcacgaaactggacgccgataagagttaccagtgccttaaggaaacttgtgagaaactcggctaccagtggaagaagtcctgcatgaatcaggtgaccatttccacaactgaccggagaaacaacaagctaatcttcaaggtgaatctcctggaaatggatgataaaatactggtggattttcgtctttccaagggcgacggtctggaatttaagcgccactttttaaagataaaggggaaacttatcgacatcgtcagtagccagaaaatctggctgcctgcaacatag

SEQ ID NO: 14542 - DNA, 384 bp, synthetic construct
  misc_feature 1..384: note = Description of Artificial Sequence: Synthetic coding sequence
  source 1..384: mol_type = other DNA
atggctgtgcctttcgtagaggactgggacctagtgcagaccctgggagaaggagcatacggagaggtgcagttggccgtgaacagagttaccgaggaagccgtcgcggttaagatcgtggacatgaagcgagccgtcgattgcccagagaatattaagaaagaaatctgtatcaacaaaatgctgaaccatgaaaatgtcgtgaaattttatggccatcgacgcgagggcaacatacagtatctttttctggagtattgcagtgggggggagttgttcgatcgaattgagcccgacattggcatgcctgagccagacgcacagaggttcttccaccagctgatggcgggcgtcgtctaccttcatggcatcggcataacgtag

SEQ ID NO: 14543 - DNA, 1329 bp, synthetic construct
  misc_feature 1..1329: note = Description of Artificial Sequence: Synthetic coding sequence
  source 1..1329: mol_type = other DNA
atggccgtgcccttcgtcgaagattgggatctggtgcaaactctaggcgagggagcctatggcgaagtccagttagctgtgaacagggtcacagaagaggctgttgctgtcaagattgtagacatgaagagggccgtggattgcccagaaaatattaaaaaagagatttgcataaacaaaatgctgaatcacgaaaatgtcgtgaaattctacggacatcgacgggagggcaacatccagtatctgtttcttgagtactgctctggcggcgagttgttcgacaggatcgaacctgacatcggaatgccagagcccgacgcccaaaggttctttcatcagcttatggccggcgtggtctatttacacgggatcggtataacccatcgcgacattaaacctgagaaccttctgctggatgaaagagacaatctgaagatttcagattttggtctggctaccgtattccgatacaataaccgcgagaggctgctgaataaaatgtgtgggacattgccttacgtcgcgcccgagctgttgaaaagacgagagtttcatgccgagcccgtggacgtgtggtcctgcggaatcgttctgaccgcgatgctggctggggaattgccatgggaccagccctccgactcttgccaagagtacagcgactggaaagagaagaagacatatttgaatccttggaagaaaatcgatagtgcccccttagctctactacacaagatcctggtcgagaatccttccgcaagaatcaccatcccagacataaagaaggatagatggtataacaaacctctcaagaaaggagcaaaaagacctcgcgttacctccggaggggtgagcgaaagtccatctggattttcaaaacacattcaatctaatctggactttagtcctgtaaactccgcctcttctgaagaaaatgtgaagtacagcagttcgcagcctgaaccgcgaacaggcctgagtttatgggacacctcccctagctatatcgataagctggtgcaaggaataagcttcagtcagccgacctgcccagaccatatgctgcttaacagtcagttactgggaactcccgggtccagccaaaatccatggcagagattggtcaaacggatgactagattttttacaaaactggacgctgataagagctaccagtgtctcaaggagacgtgcgagaagttgggctatcaatggaaaaagtcctgtatgaaccagggagacgggctcgagtttaaacgacactttctgaaaatcaaaggtaagttaattgacatcgtctcatcacaaaaaatctggctgcccgccacttag

SEQ ID NO: 14544 - DNA, 1632 bp, synthetic construct
  misc_feature 1..1632: note = Description of Artificial Sequence: Synthetic coding sequence
  source 1..1632: mol_type = other DNA
atgagtagggagtccgatgttgaggctcagcagagccacggctccagcgcgtgtagccagccacatggctctgttactcagtctcaaggatcctcttcacaatcacaaggcatttcgtcatcctccacctccaccatgccgaacagctcccagagttctcactcctcttccgggaccctgagttccctggaaaccgtgtctacacaggagctgtacagtatacctgaagatcaagaacctgaagatcaagagccagaagagcctaccccagccccctgggcacgcctatgggcacttcaagacggctttgcaaatctcgagtgcgttaatgacaactactggtttgggagggataaatcttgcgagtactgctttgacgagcccctgcttaagagaactgataaatatcgaacctacagcaaaaagcactttagaatcttccgggaagtggggcccaaaaattcttatatcgcctacattgaggaccatagcggtaatggcacctttgttaacactgaattggtcgggaagggtaagcgccgccctctcaacaacaattcggaaatcgcgttgtcgctcagccgcaataaggtctttgtcttctttgatcttactgtggacgatcagtctgtatatcccaaagccctcagggacgagtacattatgtccaaaactctcggaagcggggcgtgcggcgaagtaaagttagcattcgagcggaaaacctgtaaaaaagtcgctatcaaaatcatcagcaagagaaaattcgcaatcggctcagcccgcgaagctgatcccgccctgaatgtggaaactgaaattgagatcttgaaaaagctgaaccatccctgcatcattaagattaagaacttcttcgacgcggaagattactacatcgtccttgaactgatggaagggggagaactattcgataaggtggtgggaaacaagagactgaaggaagcgacctgtaaactgtacttttaccagatgttgctcgccgtacagtatctccacgagaatgggattattcacagagatcttaaaccagagaatgtgctactgtcttctcaagaagaggattgcttgatcaaaattactgatttcggccattccaagatcctgggggaaacaagcctcatgcgtactctgtgcggtaccccgacatacctcgctccagaagtgctggtgtctgtaggtactgcaggctataacagagcggtcgattgctggtccctcggggtaattctgttcatctgcctgagtggttatcccccgtttagtgagcatcgcacccaggtttctctgaaagaccagatcacatctggaaaatacaacttcatcccggaagtttgggcagaggttagcgaaaaggcgctggatctggtgaagaaactcttggttgtcgacccgaaggctcgcttcaccaccgaagaagctctcaggcacccgtggctccaggacgaggacatgaagcgcaaattccaggatctactgtcagaagaaaacgagagcaccgcattgccgcaagtgttggctcaaccctcaaccagcagaaagagaccgcgagagggagaggccgaaggcgctgaaacaacaaaaaggccagccgtctgcgcggccgttctttag

SEQ ID NO: 14545 - DNA, 1545 bp, synthetic construct
  misc_feature 1..1545: note = Description of Artificial Sequence: Synthetic coding sequence
  source 1..1545: mol_type = other DNA
atgtcccgggagtcagacgtcgaggcccagcagagtcatggcagctccgcttgtagccagccccacggtagcgtaacccaaagccagggttcctcctcacagagccagggaatttccagctctagtacctcgacaatgccgaactccagccaatcttcgcattctagtagcgggacgctctcctcgctggagacagtatcaacccaggagctctattcaatacccgaggatcaggaaccggaagatcaagagcccgaagaacctaccccagcaccatgggcacgactgtgggctctccaagacgggtttgcgaacctcgaatgcgtcaatgacaactactggttcggacgggataagtcttgtgagtactgctttgacgaacctctattaaaaagaactgataaatatagaacatattccaagaaacattttcgcatcttcagagaggtggggcctaagaacagttatatcgcatacatcgaggaccattcaggtaatggcacatttgtcaacaccgagttggtgggaaaaggcaagaggagacccctgaacaacaactccgagattgccctctccctgagccgcaataaggtttttgtttttttcgacttgactgtcgacgaccagagcgtgtaccccaaggccctgagggacgaatacatcatgagcaaaacgcttgggtccggagcatgtggtgaagttaaactcgctttcgagagaaagacatgtaagaaagttgccattaagattatcagcaagcggaaattcgccattggcagtgcccgggaagctgatcctgccctgaatgttgagaccgaaattgaaatcctgaaaaaattaaatcatccctgtattattaagatcaagaattttttcgatgcagaagattactacattgttctggagctgatggaaggtggagagcttttcgataaggtggtcggtaataaaagactaaaagaagccacatgcaaactgtacttctaccaaatgttgcttgcagtccagattacggattttgggcacagcaaaattttgggagagaccagtctcatgcgtaccctctgcggcactcccacctacttggctcccgaggtgctggtgtccgtggggactgcaggctacaaccgggccgtggactgctggtcattgggtgtaatacttttcatctgtctgagtggctatccccctttttcagagcacaggacccaagtgtcccttaaagaccaaatcacctccgggaagtacaactttattccagaagtctgggccgaggtttctgaaaaggccctggacttagtgaaaaaacttcttgtagtagatcctaaagcacggttcactaccgaggaggccttgcgacatccatggctgcaagatgaggatatgaaacggaaattccaggacctgctcagcgaggagaatgagtccacagcactcccccaggtgctcgctcagcccagcacctcaaggaagaggccgcgagagggcgaagctgaaggtgctgaaacaactaagcggcctgctgtctgcgcagccgtgctgtag

SEQ ID NO: 14546 - DNA, 681 bp, synthetic construct
  misc_feature 1..681: note = Description of Artificial Sequence: Synthetic coding sequence
  source 1..681: mol_type = other DNA
atgagtcgcgagagcgatgtagaggctcagcaaagccacggctcatccgcatgtagtcaacctcacgggagcgtgactcaatctcagggctctagttctcaaagccagggcatcagctcatccagcacatctaccatgccaaactccagtcagagcagccactctagttcaggtactctttcttctctcgaaacagtgagcactcaggagctgtatagcattcctcctgaggtattggtaagcgtagggaccgccggatataaccgagctgtggactgctggtccttaggggtgattctctttatctgtttgagtggctaccctccttttagtgagcatcgaactcaggtgtctctgaaggatcagattaccagtgggaagtacaattttatccccgaggtttgggctgaggtgtcagaaaaggctttagacctggtgaagaagctgttggtggttgaccccaaggcccgctttactactgaggaagctctgaggcatccttggctacaagatgaggacatgaagcgaaaatttcaagatctattgtccgaagagaacgagtcaacagcactgcctcaggtgctggcacagccttctacaagtcgcaagcggcctcgagagggtgaagccgagggggctgagaccaccaagcggcccgccgtgtgcgccgcggtactctag

SEQ ID NO: 14547 - DNA, 492 bp, synthetic construct
  misc_feature 1..492: note = Description of Artificial Sequence: Synthetic coding sequence
  source 1..492: mol_type = other DNA
atgagccgtgaaagtgacgtagaagcgcaacagtctcacggctcctctgcatgctcccagccccacggcagcgtgacacagtcccagggctctagttcacagagccagggtataagtagttcatccacgtcaaccatgcccaacagcagccagtcaagccactcgagctctggtactctgagctcactggaaacagtgagtacccaggaattgtacagtatccctgaagaccaggagcctgaggaccaggagcccgaggaaccaaccccggctccttgggctcgcttgtgggcgctccaggacggttttgccaatctgggggacgaggacatgaaacgcaaattccaggatctgctctctgaagagaatgagagcactgctctgccacaggttttagcccaaccttcaacctcccgtaaaaggcctcgggaaggagaggccgagggggctgagaccactaaacgaccagccgtgtgtgcagctgtgctatag

SEQ ID NO: 14548 - DNA, 870 bp, synthetic construct
  misc_feature 1..870: note = Description of Artificial Sequence: Synthetic coding sequence
  source 1..870: mol_type = other DNA
atgtcccgcgagagtgatgtagaggctcagcaatcccatgggagctcggcctgcagccagccccatggatcagtcacgcagtctcagggttcttcgtcacagagtcagggaatctcctcatcttctacatcaactatgcccaactcttctcagagtagccattcaagctccggtaccctgtcctctctggagactgtttcaactcaggagctttactccattcctgaagaccaggagcctgaggaccaagagcccgaagaacccacaccggcaccatgggcccggttgtgggcccttcaggacgggttcgcaaatcttgaatgcgtcaatgataattactggtttggacgggataagagttgcgagtactgcttcgacgagccattgctgaaacgcaccgataagtatagaacttatagtaaaaaacacttcagaattttccgcgaggtgggcccaaagaacagctacatcgcctacatcgaggaccacagcggtaacggcacattcgtgaatactgagttggtgggtaagggcaagagacgaccattaaacaacaacagcgaaatcgcactgtctctctcacgaaataaggttttcgttttcttcgacttgactgtggacgaccagagtgtctatcccaaagcgctgcgggacgagtacatcatgtccaagaccctgggaagtggcgcctgcggcgaagttaaactggcatttgaaaggaagacatgcaagaaggtggcaattaagataatttcaaaaagaaaattcgctataggatcggcccgcgaggccgatcctgccctgaacgtggagacagagatagaaattctaaaaaaactcaaccatgacggacgaggccgcgccgtgtag

SEQ ID NO: 14549 - DNA, 1359 bp, synthetic construct
  misc_feature 1..1359: note = Description of Artificial Sequence: Synthetic coding sequence
  source 1..1359: mol_type = other DNA
atgagtcgtgaaagcgatgtggaggcacagcaatcacatgggtcctctgcctgctcccaacctcatggttccgttacgcaaagccagggctcatctagtcagagccaaggcatctcttcctcttctacatctacaatgccaaactctagtcagagttcccactcatctagtggtaccctcagcagcctggagaccgtttccacgcaagaactgtattcaatacctgaagaccaagaaccagaggaccaggagcctgaggaacctactccagccccctgggcccgcttgtgggcactacaggatggtttcgcaaatttggtcttcgtctttttcgatctgacggtggacgatcaatctgtttatcctaaggccttgcgggacgagtacattatgtccaagaccttaggtagcggcgcatgcggtgaagtaaagcttgcttttgagcgaaagacttgtaagaaagtggccataaaaatcatttcaaaaaggaaattcgcaatcggatccgccagggaagcggatcctgcccttaatgtggagactgaaatcgaaatcctgaaaaagctcaaccacccctgcataatcaagattaagaatttctttgacgcggaagattactacattgtgctcgagctcatggagggcggcgagctgttcgataaggtggtcgggaacaagcgcttgaaggaggcaacatgcaaactgtacttctatcagatgctgctggccgttcagtacttgcacgagaatggcataatccaccgagacctaaagccagaaaacgtgctgctgtcaagccaggaggaggattgtctcatcaagataaccgatttcggtcattcaaagatactaggcgaaacgtctctcatgcggacattgtgcggcacccctacctacctggctccagaagtgctggttagtgtaggcaccgccggctacaatcgggcggtggactgctggtcccttggggtgatcttgttcatttgtctctctggctatccaccctttagtgagcacaggactcaggtgtcactgaaagaccaaattacctcaggcaagtataacttcatccctgaggtctgggccgaagtaagcgaaaaagcactagatttagttaaaaaattgctagtggtggatcccaaagcgaggtttactacggaagaggctctcagacatccatggttgcaggatgaggatatgaagcggaaattccaggacctcttatcggaggagaacgaatcaaccgctttaccgcaggtgctggcccagccttccacaagtcgaaagcggccaagggaaggcgaagccgaaggcgcagaaaccacgaaacggccagctgtgtgcgcggccgtgctgtag

SEQ ID NO: 14550 - DNA, 1761 bp, synthetic construct
  misc_feature 1..1761: note = Description of Artificial Sequence: Synthetic coding sequence
  source 1..1761: mol_type = other DNA
atgtcacgggaatccgatgtggaagcacaacagtctcacgggagttcagcgtgctcacaaccccatgggtccgtcacgcagagccaggggtcctcatcgcagagccagggaatcagctcctccagcacaagcacgatgcccaatagttcacaaagcagccattcctcctcaggaacactgtcctcgttggagacagtttctactcaagagttatacagtattcccgaggaccaggaacctgaagatcaggaaccggaagaacctactcccgccccttgggcccggctctgggctttgcaggacggttttgcaaacctcgaaacagagagcggtcacgtaacccagagcgacctcgagctgcttttgagctctgaccctccggcttccgcctcacagagtgcaggaattaggggagtgagacatcacccccgccctgtttgctcactcaagtgtgtgaatgacaattattggttcgggcgagataaaagttgcgaatactgtttcgacgaacccctcctcaagaggactgacaagtaccgaacctattcaaagaagcatttcaggatattccgggaggtaggccctaaaaactcttatattgcatatatagaggaccacagcggcaacggaacatttgtcaacactgaactggtgggcaaagggaagcggcgcccactcaacaacaattcagaaatcgcattatccctttctcgtaacaaggtgttcgtgttcttcgacttgaccgtagatgatcagtccgtgtatcctaaggcccttcgagatgagtatatcatgtcaaaaacccttggttctggagcctgcggggaagtgaagctcgcatttgagaggaagacgtgtaagaaggttgccatcaaaattatatctaagcggaaattcgccatcgggtctgcgagggaggctgaccccgctttgaacgtggagactgaaatagagatattaaaaaaactgaatcatccgtgcattattaaaatcaaaaacttctttgatgctgaggactattatattgtgctagaactcatggaaggaggagaattgtttgacaaagtcgtgggaaataaaagattgaaggaggccacctgtaaactgtatttttatcagatgctgctggctgttcagtacctgcacgaaaacggcatcatccatagagacttgaaaccagagaatgttttgttaagttcacaagaggaggactgcttaattaagataactgatttcgggcacagcaagatcctgggcgaaacctcactcatgcggactctctgtgggacacctacctatctggcccccgaagtgcttgtgagcgtgggcactgctggctacaatcgggctgttgattgctggagcctgggagtcattctgtttatctgtctctctggataccctcctttttccgaacatcggacacaggtgagcttgaaggaccaaataacttctggcaaatataatttcatcccagaggtctgggctgaggtgtctgagaaggcgctcgatctggtgaagaaattgcttgttgttgacccaaaggccagatttacaaccgaagaggcactccgccatccatggttgcaggacgaagacatgaagaggaaattccaggatctgctttccgaagaaaatgaaagtacggctctgcctcaggttctcgcccagccctcaaccagccgaaagcgcccaagggagggggaagctgaaggcgccgagacaacaaaaaggcccgccgtgtgcgctgcggtgctgtag

SEQ ID NO: 14551 - DNA, 1545 bp, synthetic construct
  misc_feature 1..1545: note = Description of Artificial Sequence: Synthetic coding sequence
  source 1..1545: mol_type = other DNA
atgagtagagaatctgatgttgaagcccagcagtcccacggtagctcagcttgctctcaaccgcacggaagcgtaacccagagccagggttcttcttctcagtcccaaggaatcagttctagctctacctcaaccatgcccaattcttcccagagctcccactccagctctggcaccctcagcagccttgagaccgtttccacccaagagctctactctatacctgaggatcaggaacccgaagatcaggagcctgaggaaccaacccccgcaccgtgggctcgtctctgggccttacaggatggttttgccaacctcgaatgcgtcaatgataactactggttcggtcgcgacaaaagctgcgaatattgctttgatgagcccctgctgaaacgcacagacaagtataggacttactctaaaaagcacttcagaatctttcgagaagtcgggcccaagaactcttacatcgcctacattgaggatcacagtggaaatggaaccttcgtgaacaccgaactggtgggtaaaggcaagagacgccctttgaacaataattcagagattgccctgagcctctcacgaaataaggtcttcgtgttttttgacctcaccgtggatgaccagtccgtgtaccctaaagccctgcgagacgaatacatcatgtctaaaaccctcggaagcggcgcatgcggggaggtcaagcttgccttcgaacgtaaaacatgcaaaaaggtggccattaagatcatttcaaagcgaaagttcgccattggatccgctcgggaggctgatcccgctctcaacgtagagaccgaaatcgaaatcttgaaaaaactgaaccatccctgtataatcaaaatcaagaactttttcgacgctgaggattattatatcgtcctggagcttatggaaggcggagagctgttcgacaaggtggtcgggaacaaacgcctcaaggaagccacttgtaaattatacttttaccagatgctcctggccgtccagattacagactttgggcatagcaagattctgggagagacttcactcatgcgcacactgtgcggaacccctacctatctggcacctgaagttttagtctcggttggtaccgccggatacaacagagcagttgactgctggagtctgggggttattttatttatctgcctgtccggctacccaccattttccgaacaccgtactcaggtgtcactcaaagatcagatcacctcggggaaatacaatttcatcccagaggtgtgggctgaggtcagcgagaaggccctcgatctggtcaaaaaactcctggtcgtagaccctaaggccagattcaccaccgaggaagccctgaggcatccatggctgcaggacgaggacatgaagcggaagttccaggatctgctgtccgaagagaacgaaagtacagccctgcctcaggtcctggcgcagcccagcacctccaggaagaggcctcgggagggagaggctgagggcgccgagaccacaaagaggcctgcagtgtgcgctgcagtgttatag

SEQ ID NO: 14552 - DNA, 1359 bp, synthetic construct
  misc_feature 1..1359: note = Description of Artificial Sequence: Synthetic coding sequence
  source 1..1359: mol_type = other DNA
atgtcgagggaaagtgatgtggaggcccagcagtcccacggatcatcagcctgctctcagccccatggctcagttactcagtcacagggatcttcctcccaaagccaagggatttcaagttccagcacgagcaccatgcccaacagctcccaatcatctcacagcagctcaggtacattgagtagcctggagacagtctctacacaggagctatactccattcccgaggatcaggagcctgaggaccaggagcctgaagaaccaactccagctccatgggctagactctgggctctgcaggacggctttgctaatctggttttcgtattctttgatctgacagtggacgatcagtcagtatatccaaaagcacttcgggatgagtacataatgtcaaagactctcggcagcggcgcctgtggcgaggtgaagttggcgttcgagaggaaaacctgcaagaaggtggccataaagatcatctccaagagaaaattcgcgatagggtctgctcgggaagccgatcctgccctcaacgttgagaccgagattgagatacttaaaaagttaaaccatccctgcataattaaaatcaaaaacttctttgacgccgaagattattatattgtcttggagttgatggaaggaggggaattatttgataaggtagtcgggaacaagaggctgaaagaggctacctgtaagctttatttttatcaaatgctgctggctgtgcaatacctgcatgaaaatggaatcattcaccgcgatttaaagcctgagaatgtgctgctgagttcacaggaggaggactgcctgatcaaaattacagacttcggacacagtaaaatattgggggagacatccctgatgcggacactttgcggaacccctacttatttagccccggaggtgctcgtgtctgttggaacagctgggtataacagagccgtggattgctggagcctcggtgtaattctttttatttgcctgagtggttacccccctttttccgaacataggacacaagtctctctgaaagaccagataacttccgggaaatataactttattccagaggtgtgggccgaggtctcagagaaggcactggacctggtgaaaaaactgttggtcgtggaccccaaagcccgcttcactactgaggaggcactgcggcacccatggctgcaagatgaagatatgaagagaaagtttcaggacttactgagcgaagaaaacgagtcaacagcactgccccaagttcttgctcaaccatccacaagcagaaaacggcctcgagagggggaggccgagggggcggaaacaacaaagaggccagccgtttgtgctgccgttctttag

SEQ ID NO: 14553 - DNA, 1632 bp, synthetic construct
  misc_feature 1..1632: note = Description of Artificial Sequence: Synthetic coding sequence
  source 1..1632: mol_type = other DNA
atgtccagggaatcagacgtggaagctcagcagtcccacggcagctctgcttgctctcagccccatgggtctgtgacacagtcccaggggagctcctctcaatctcagggtatatccagcagcagcacatctaccatgccaaacagcagtcagagttcccacagctctagcggtacactaagtagtttagaaactgtgagcacccaggagctctactcaattcccgaagatcaggagcctgaagatcaggaacctgaagagcccactcccgcaccgtgggctcgcctgtgggccttacaggacggattcgctaacctcgagtgcgtcaacgacaattattggttcgggcgggataagtcatgcgagtattgctttgacgagcctctgttgaaacgcactgacaagtataggacctatagcaaaaagcactttaggatctttcgtgaggtgggccctaaaaactcttatatagcctatattgaggaccattccgggaacgggacttttgtcaataccgagcttgttggcaaggggaagcgcaggccactgaataataattctgaaattgcactgtccctcagtcgaaataaagtcttcgttttttttgatttgacagtggacgatcaatcagtttacccgaaagcgcttagagacgaatacatcatgtctaaaactctcggcagtggggcctgtggtgaggtaaaactggcattcgaaagaaagacatgtaaaaaggtcgctatcaaaattatttccaagaggaaattcgccattggtagcgcacgtgaggcagaccctgcccttaacgtggaaaccgagattgagattctgaagaaactcaaccacccctgtataatcaagatcaagaatttcttcgacgcggaggactattatattgtgctggaactgatggagggtggcgagctttttgacaaagttgtgggcaacaagagactgaaggaggcaacctgcaaactgtatttctatcagatgctactggccgtccagtatctccacgagaatgggattatccaccgcgacctgaaacctgaaaacgtgctcctcagttcccaagaggaggattgcctgatcaagattactgatttcgggcattctaaaattctcggggaaacctcgctgatgagaacactgtgtggaacccccacctacctcgctcccgaggtgctcgtaagtgtgggaaccgccggatataatcgggcagtggattgctggagcctgggcgtgatactgtttatctgcctgagtggttatcctccattctccgaacaccgaacgcaagtctctcttaaggaccagatcacttccggtaagtataactttatccccgaggtctgggcggaagtgagcgagaaggccctggacctggtcaaaaaattattggtagttgatcccaaggcccgtttcacgacagaagaggcgctgcgtcacccctggcttcaggatgaggacatgaagagaaaatttcaggatctgctatccgaagagaatgagagcaccgccctcccccaagtgttggcccagccatcaaccagccgcaagcgtcctagagaaggagaagctgagggtgcggagactaccaagcgaccagccgtgtgcgcagctgtgctttag

SEQ ID NO: 14554 - DNA, 1632 bp, synthetic construct
  misc_feature 1..1632: note = Description of Artificial Sequence: Synthetic coding sequence
  source 1..1632: mol_type = other DNA
atgagcagggagtccgacgtggaggcccagcagtcccatggcagctccgcctgcagtcaaccgcatggatctgtaacccagagccagggcagctcttcacagtcacaggggatctccagctcatctacgtcaaccatgcccaacagtagccagtcctcacactctagcagtggcacactttcttctctggaaaccgtaagcactcaggaactgtactctattccagaggatcaggaaccagaggaccaggagcctgaggaacctacacccgcaccctgggcccgcctgtgggctctccaggatggatttgcgaatttggaatgcgttaacgacaactactggttcggtagggacaagtcctgcgaatattgcttcgacgaaccgctattgaaaaggaccgacaagtaccggacctactccaagaagcactttagaatcttccgggaggtggggccaaaaaactcttacatcgcttatattgaggatcattcaggcaacgggacatttgttaacacggagttggtaggcaagggcaaaagacggccgctcaataacaactccgagatagcactttccctgagccgcaataaggtgtttgtcttttttgacctgactgtggacgatcaatctgtctacccaaaggccttaagggacgaatatatcatgtccaagacgctcgggtcgggagcttgcggagaggtcaaacttgccttcgaacgtaagacatgcaagaaggtcgccataaagatcatttcgaaaagaaaattcgctattggttctgctagggaggcagatccagctctgaacgtagagactgagattgagattctaaaaaagctcaaccacccatgcatcattaagatcaaaaatttttttgacgcagaggattattacatcgtgctggagctcatggagggtggtgagctgttcgataaggtcgtggggaataaacgtctgaaagaggctacatgtaaactctatttctatcagatgctcttagctgttcagtatctgcatgagaatggcatcatccatcgggatttaaagccggagaacgttctgctttctagccaagaggaagactgcctaattaaaataaccgatttcggccactcaaaaattttaggggaaacgtccctcatgcgcactctgtgtggaacacccacctatctggccccggaggtcctagtttctgtgggtaccgctggctataatagggcggtggattgctggagcctcggagtgattcttttcatctgcttgagtgggtatcccccattcagcgaacacagaacacaggtaagtctcaaggatcaaattacctcaggtaagtataacttcattcccgaagtgtgggccgaggtgtctgaaaaggcactagaccttgtgaagaagctgctggttgttgatccaaaagccaggttcacaaccgaagaggccctgagacacccctggcttcaggatgaagacatgaaacgtaaatttcaggacttactgagtgaggagaacgagtcaactgctctcccccaagtgctagctcaacccagcacatcaaggaagagaccacgagaaggcgaagctgaaggggcagagaccaccaagagacccgccgtgtgcgcagccgtactttag

SEQ ID NO: 14555 - DNA, 969 bp, synthetic construct
  misc_feature 1..969: note = Description of Artificial Sequence: Synthetic coding sequence
  source 1..969: mol_type = other DNA
atgagcaaaactcttggatccggggcctgcggggaggtgaaactcgcctttgagagaaagacttgtaaaaaggttgccattaagataattagcaaaagaaagtttgctatcggcagcgccagagaagccgacccagccctgaacgtcgaaactgaaattgagatactgaaaaagttgaaccatccttgtattattaagatcaagaattttttcgatgcagaggactattatatagttctggagcttatggaaggcggggaattgtttgacaaagttgtgggcaataagagactcaaggaggccacatgcaaactgtatttctaccagatgctgctcgccgtacagtatctacatgagaacggcattatccatagggacctgaaacccgaaaatgtactcctgtcttcccaggaggaagactgcctgataaaaatcaccgatttcggccacagtaaaatcctgggggaaacaagcttgatgcgaacactatgcgggaccccaacatacctagcgcctgaagtgctggttagcgttgggaccgccgggtacaatcgggccgtagactgctggtccttgggcgtgatcctgtttatttgcttaagcggatatcccccctttagcgagcacaggacacaggtgtctcttaaggatcagataacaagcggtaagtataacttcatacccgaagtatgggcagaggtgtcagaaaaggcactcgatctggtcaagaagctgctggtggtggaccctaaagctagatttacaacagaggaagctcttaggcacccatggctccaggatgaggacatgaagcgaaagtttcaggacctgctgagcgaagagaacgagtccaccgctctgccccaggtattagcacaaccctcgacaagccgcaagcgcccacgcgagggggaggcagaaggggctgaaaccacaaagcggcctgctgtgtgcgccgccgttctgtag

SEQ ID NO: 14556 - DNA, 624 bp, synthetic construct
  misc_feature 1..624: note = Description of Artificial Sequence: Synthetic coding sequence
  source 1..624: mol_type = other DNA
atgtcccgagaaagcgatgttgaagcgcagcaatcccacggcagcagcgcatgctcgcagccgcacgggagcgtcacacagagccaaggcagtagctctcagtcccagggaatttcttcgtcaagcacgtctaccatgcccaactcctctcagtcatcacactcatccagcggaaccctgtccagcctggagacggtgtcaacacaggagttgtatagtattcctgaagaccaggagccagaggatcaggagccggaggagccaacccccgcaccttgggcccggctgtgggccctacaggacggatttgccaatctggaatgcgtcaacgataactattggtttggcagagacaagagctgcgaatactgctttgacgagcctctgctgaaacggactgacaagtatcgcacctacagcaaaaagcactttaggatcttccgggaggtgggaccgaagaatagttatatcgcgtatatcgaggatcacagcggcaatgggacctttgtgaacaccgaactggtcggcaaaggaaaacgccggcccctgaacaacaactccgaaatcgcactatctctcagccgcaataaagagaaaattctgaagatatactctttatcttag

SEQ ID NO: 14557 - DNA, 294 bp, synthetic construct
  misc_feature 1..294: note = Description of Artificial Sequence: Synthetic coding sequence
  source 1..294: mol_type = other DNA
atgaaagtcagcgccgcccttttatggcttctcttgatcgcagccgcattttccccacagggattggctgggccagcttcagtgccaaccacatgctgtttcaatctggcgaatagaaagatccctctgcagcgcctcgaatcatataggcgcataacctccggtaaatgccctcaaaaagctgtgattttcaaaacaaaattagctaaggatatttgtgccgatccaaagaaaaaatgggtgcaagactctatgaaatatctcgaccagaagtctcccacacccaaaccctag

SEQ ID NO: 14558 - DNA, 1692 bp, synthetic construct
  misc_feature 1..1692: note = Description of Artificial Sequence: Synthetic coding sequence
  source 1..1692: mol_type = other DNA
atgagccgcatcggcggggcaggactgcctgccgcggccctaacaggacctgggaggtttcggatggcacgggaagagcctgcccccgcggcactcgccgctgctggacagcccggaggtgggcgagggggcgagcgagcactgcagggaccaggagtagcgcgtcgcgggaggccaagtttgtcgcgagctaagctgcacggattgcgtcatatgtgcgcgggtcgaaccgctgctggaggatctttccagagacgcgctctgtgggtgctcgccttttgtacgtccttcggcttactgttgagttggtcctccaataggctgctgtactggctttcatttccttctcacacacgggtccatcgagaatggtcaagacaactgccctttcccgccgtgaccgtctgtaacaacaacccgctgcgattcccccgactttcgaaaggcgatctgtattacgctgggcactggctagggctgttgttgccaaacaggacagccagaccgctagtcagcgaattgctgagaggagatgagccacgacgtcaatggttcaggaaactggcggacttcaggttgtttctccctccacgccactttgaggggatctccgccgctttcatggatagactgggccaccagcttgaggacatgttgttgtcatgcaaatataggggcgaactgtgtgggccacacaacttttctagtgtgttcacgaagtatgggaaatgttatatgttcaacagtggggaggacggcaaaccactgttgacaactgtgaagggaggcaccggaaacgggctcgagatcatgctggacatccagcaggacgagtatctgccgatttggggggaaactgaggaaactacattcgaagcgggtgttaaagtccagattcattcccagagcgagccgccttttatccaggagctcggctttggtgttgcgcctggtttccagactttcgtcgccacgcaggaacagcggctcacataccttccccctccctggggcgagtgtagaagctccgagatgggcctggattttttccctgtttactccattaccgcatgtcggattgattgtgaaacacggtacatcgtagaaaattgtaactgccggatggtccatatgccaggggacgcacctttttgtacacccgaacaacacaaagagtgtgccgaacccgcccttggtctcctggccgaaaaggacagtaattattgcttgtgtcgaacaccatgcaatcttacccggtacaataaagaacttagcatggtcaaaatcccctctaagacatctgcaaagtatctagaaaaaaaattcaacaagtccgagaagtatatctctgagaatatcctggtgttggatattttctttgaagcattgaactatgagaccatcgagcagaagaaagcttatgaggtcgctgccctgctcggggacataggtggtcagatggggctgtttatcggagcatccattctcaccatcctggaactgttcgactatatctacgagcttattaaagagaagcttcttgatttactcggcaaagaggaagatgaaggctcacacgatgaaaatgtgagtacatgtgacacaatgccgaaccattccgaaacaatatcacatactgtcaatgtcccactgcagaccacgcttgggaccctcgaggagatcgcttgctag

SEQ ID NO: 14559 - DNA, 2328 bp, synthetic construct
  misc_feature 1..2328: note = Description of Artificial Sequence: Synthetic coding sequence
  source 1..2328: mol_type = other DNA
atggtcgggcccgaagatgccggagcttgttcaggccgcaatcctaagcttctcccagtccccgccccagatcccgttggtcaggatcggaaggtaattcgggccaccggaggcttcggcggtggtgttggggcagtggagccacctgaggaagctgacgaagaggaagaggctgatgaggaggaagagacgcccccaaggcaactgctgcagaggtacttagcagcagccggcgagcagctggagccaggtctgtgctattgtcctctccccgcgggacaggcaggggctccgcctccctcagcagccccccgaagcgatgcatgtctgctgggctcggggagtaagcatcgaggagccgaggttgccgatggccgggccccccgtcacgagggtatgactaacggggatagcggcttcctgcccgggcgggactgtagggaccttgaggaagcccgcggactagctcgggctggcggacgcgaatctagacgtaggagaccttacgggcgcctcagactagaaggtcctggggatgaagacgcagacggggccggatctccttctgattgggcgagcccactggaggacccgcttcgaagttgttgccttgtggctgctgatgcccaggagccagagggcgccggctccgactcaggtgactcacccgcttcttcatgctcctcatcagaggatagtgaacagaggggtgtgggtgcaggcggccctgaggaaggcgccccaccagccacaagcgcggaaaggactaatgggggggccgagccacgcctcggctttagcgacatccacttcaactcacgaaatacgtttcaggtctctcgcggtcaaagcgcacgcgatcatctcccccctgccggtcctcctgtgccactgcctgctgcggagcagggtcccgccggcgcgtccgcccgcgctagaagatcaggcggatttgctgatttcttcacacgaaacttgtttccaaaaaggactaaggagctgaagtcagtcgttcatagcgccccgggatggaaactgtttggtaaagtccccccaagagagaatttgcagaagacaagcaaaatcatccagcaggaatacgaggcacgcacaggccgaacgtgcaagcccccacctcagtcttccagaaggaaaaattttgagttcgaaccgcttagcacgacagccctgatactggaagatcgcccgtctaatctcccagcaaagtcagtggaggaggccctacgacatcggcaggagtacgacgagatggttgccgaagctaaaaagagggagattaaagaggcgcacaaacggaagcgaatcatgaaggaaaggttcaaacaggaagagaacatcgcgtccgcaatggtaatctggatcaacgagattctgcctaattgggaagttatgagatccactagacgtgtgagagaactgtggtggcaagggctgccccccagcgtgcgcggcaaagtctggtcactggcggttggaaacgaactgaacatcacgcccgagctttatgagatctttttatcgcgggctaaggagcgatggaagtctttttctgaaactagttctgaaaatgatacagagggtgtatccgtagccgacagggaggcatcactggagttgatcaagctcgatatcagccggactttccccagcctctacatttttcagaaggggggcccttatcatgacgtactgcactcaatcttgggggcttacacgtgctacagaccagatgtggggtacgtgcagggaatgtcctttatcgcagcagtgctcatccttaacctggaggaggctgacgcattcatcgctttcgctaacttgttgaataagccatgccagctagcctttttccgcgtagatcactctatgatgcttaaatattttgcgaccttcgaggtcttctttgaagagaatctcagtaaactgttcctgcactttaaatcttatagcctgaccccagacatctatttaattgactggatttttacactttacagcaaatctctaccactcgatctggcatgcagagtttgggacgttttttgccgcgacggggaagagttcctatttagaactggtttaggaattttgagactgtatgaagacatactgctgcagatggacttcatccatatcgcacagtttttaaccaagctaccagaggatatcacatccgagaaacttttttcatgtattgcggctatccagatgcagaacagcacaaaaaagtggacccaggtgttcgcctctgtgatgaaagacattaaggagggtgacaaaaatagtagccctgctttgaagtcttag

SEQ ID NO: 14560 - DNA, 276 bp, synthetic construct
  misc_feature 1..276: note = Description of Artificial Sequence: Synthetic coding sequence
  source 1..276: mol_type = other DNA
atgaaagtatcagcggccgcgctggccgttattctgatagccactgccctgtgcgcccccgcttccgcttctccttatagctctgacacaactccctgttgttttgcatatatcgcccgaccactacctagggctcatatcaaagaatacttctatacctctgggaagtgtagtaatccagccgttgttttcgtgacgcgcaagaataggcaagtctgcgccaatccagaaaagaaatgggtccgagagtacattaattcattggagatgtcatag

SEQ ID NO: 14561 - DNA, 276 bp, synthetic construct
  misc_feature 1..276: note = Description of Artificial Sequence: Synthetic coding sequence
  source 1..276: mol_type = other DNA
atgaaagtgagtgccgctgctctcgctgtgattcttatcgctaccgcactttgcgcccctgcctccgctagcccatatagttcggataccacaccttgttgctttgcatatatcgcaagacctctgccccgagcacacatcaaagagtacttctatacctctggcaaatgttccaatccagctgttgtattcgtcacgcggaaaaatagacaggtctgcgccaatcccgaaaaaaaatgggtccgggagtacatcaatagcctggaaatgtcctag

SEQ ID NO: 14562 - DNA, 300 bp, synthetic construct
  misc_feature 1..300: note = Description of Artificial Sequence: Synthetic coding sequence
  source 1..300: mol_type = other DNA
atgaaggcctccgctgccctgctttgtctcctgctgaccgcagccgccttttcaccccagggactggcacagccagtggggattaatacgagcaccacttgttgctaccgcttcatcaacaagaaaattcccaaacagagactggagtcataccggaggactacctcatcgcattgtcctcgagaagccgtgatcttcaagacaaagttggacaaagagatctgcgcggaccctacgcaaaaatgggtgcaggacttcatgaagcacctggacaaaaagacacagacccccaagctctag

SEQ ID NO: 14563 - DNA, 330 bp, synthetic construct
  misc_feature 1..330: note = Description of Artificial Sequence: Synthetic coding sequence
  source 1..330: mol_type = other DNA
atgtggaagcctatgccctcaccttctaatatgaaggcaagcgcggctcttctgtgtcttcttctgacagcagctgctttttcaccacagggtctggcccagccagtgggcatcaatacctccacaacgtgctgttaccgctttattaataagaagatacctaaacagagactggagtcctatcgaagaaccacttccagtcattgcccacgggaagctgtaatctttaagacgaaactggacaaagagatctgcgctgacccgacgcaaaaatgggtgcaagattttatgaaacacctggacaagaaaactcagacccccaaactgtag

SEQ ID NO: 14564 - DNA, 276 bp, synthetic construct
  misc_feature 1..276: note = Description of Artificial Sequence: Synthetic coding sequence
  source 1..276: mol_type = other DNA
atgtggaaaccgatgccgtcaccgagcaacatgaaggcgagcgcagcactcctctgcttgctacttactgcggcagcgttttccccccaaggacttgcacaacctgagcggcctagaacacacccacagtggacctttcttctcgtggtctcactccagctcggacttattcttcaattgccagctgccaccgacctctccataagaaagtctctttcccgagggtggcgggcaaccgaaggtccaccagtggctacagtccccggtaagctgtag

SEQ ID NO: 14565 - DNA, 174 bp, synthetic construct
  misc_feature 1..174: note = Description of Artificial Sequence: Synthetic coding sequence
  source 1..174: mol_type = other DNA
atgtggaagccaatgccaagtccctctaacatgaaagcttcagctgctcttctttgcctcctgctgactgctgctgctttctccccccagggactggcgcagccggcatctaggcccaattggactcgaagatctgtgctcacccctcataggagcggctcccgaacactttag

SEQ ID NO: 14566 - DNA, 297 bp, synthetic construct
  misc_feature 1..297: note = Description of Artificial Sequence: Synthetic coding sequence
  source 1..297: mol_type = other DNA
atgaatcaaacagccattctaatctgttgcctgatctttctgactctatcgggcatccagggcgtgcctctgtcaagaaccgtgagatgtacctgcatctctatttccaaccagcccgtcaacccacggagtctggagaaactggagattatcccggcctctcagttctgtccacgggttgagatcattgccactatgaaaaaaaagggggaaaaaagatgtctgaatcctgaatctaaagccataaagaacctgctaaaagccgtgagcaaggagaggtcaaaacgttctccatag

SEQ ID NO: 14567 - DNA, 270 bp, synthetic construct
  misc_feature 1..270: note = Description of Artificial Sequence: Synthetic coding sequence
  source 1..270: mol_type = other DNA
atgaacgccaaagttgtggtcgtgctggtgctggtgttgacagcactgtgcctaagtgatggcaagcccgtgagtttgtcttataggtgtccctgtagatttttcgaatcacatgtcgcccgggctaatgtcaaacatttgaagattctgaatacccccaattgtgcgctgcagatcgtagctagattaaagaataacaacagacaggtgtgtatcgatccgaagctaaagtggatccaagaatacctggagaaagccctcaataaatag

SEQ ID NO: 14568 - DNA, 360 bp, synthetic construct
  misc_feature 1..360: note = Description of Artificial Sequence: Synthetic coding sequence
  source 1..360: mol_type = other DNA
atgaatgctaaggtggtggtcgtgctggttttggtgcttacagccctctgtctgagtgacggcaagccagtttcactgtcctatcgttgcccatgtagattttttgagtctcatgtcgcccgggccaacgtaaaacacctgaagatactgaatacgcctaattgcgcactacagatcgttgcgcgcctcaagaataacaaccgccaggtgtgtattgatccaaagctcaaatggattcaggagtacctagaaaaggccctgaataagggtcgacgggaagaaaaagttggtaagaaggagaaaattggcaagaagaagcggcaaaaaaagcgtaaggccgcacaaaagagaaagaactag

SEQ ID NO: 14569 - DNA, 282 bp, synthetic construct
  misc_feature 1..282: note = Description of Artificial Sequence: Synthetic coding sequence
  source 1..282: mol_type = other DNA
atgaacgctaaggtggtggtggtcctcgtattggtcttgactgccctgtgccttagcgacggcaaacctgtgtcattgagttaccgctgtccttgccgcttcttcgaaagtcatgtggcaagggccaacgtcaagcacttgaagattctgaacacccccaattgcgccctgcaaatcgttgctcggctcaagaacaacaaccgacaggtgtgcattgatccgaaactgaaatggattcaggagtatctggagaaggccctgaacaaaagattcaagatgtag

SEQ ID NO: 14570 - DNA, 423 bp, synthetic construct
  misc_feature 1..423: note = Description of Artificial Sequence: Synthetic coding sequence
  source 1..423: mol_type = other DNA
atgaatgcaaaagtcgtggtagtcctggtcctggtgctgaccgctttatgtctatccgatggcaagcctgtttcccttagctacagatgtccttgccgattttttgagagccacgtagcacgcgctaatgtcaagcacctgaagatactaaataccccaaactgcgcactgcagattgtggctcgtctcaaaaacaataatcggcaagtgtgcatagatccaaagttaaaatggatccaggaatacctcgaaaaggcccttaacaatctgatttcggctgctcctgcaggcaaacgtgtcattgcaggtgcacgggccttgcaccctagtcccccccgggcatgtccaacggccagagctctgtgcgagatacgcctttggccccccccggagtggtcttggccatcccccggagacgtctag

SEQ ID NO: 14571 - DNA, 273 bp, synthetic construct
  misc_feature 1..273: note = Description of Artificial Sequence: Synthetic coding sequence
  source 1..273: mol_type = other DNA
atgaatgctaaagttgttgtggttctggtcctcgttttgacagccctatgcctgtcagatggaaaaccagtatcactgagttatagatgtccatgccgcttctttgagtctcacgttgcaagggccaacgtcaagcacctgaaaatcctaaacactccgaattgcgcccttcagatcgttgcccggctgaaaaataataacaggcaggtttgtatagacccgaagctcaagtggatccaggaatacctagagaaagcgctaaataactgttag

SEQ ID NO: 14572 - DNA, 330 bp, synthetic construct
  misc_feature 1..330: note = Description of Artificial Sequence: Synthetic coding sequence
  source 1..330: mol_type = other DNA
atgaagttcatcagtacatcgctgttactcatgctcttggtttcctccctcagccccgtgcagggtgtattggaggtgtattacacctctctgcggtgtcgctgcgtgcaggaatcgagtgtgtttatcccacggagattcatagataggatccagatactgcccaggggaaatggctgcccgagaaaagagatcattgtgtggaaaaagaataagagtatagtgtgcgtggatcctcaagccgagtggatccagcgtatgatggaggttctgcgcaagcggtcaagctcaaccctgccggtgcctgtgttcaagcgcaagatcccgtag

SEQ ID NO: 14573 - DNA, 1560 bp, synthetic construct
  misc_feature 1..1560: note = Description of Artificial Sequence: Synthetic coding sequence
  source 1..1560: mol_type = other DNA
atgttcttgcttcccctcccagctgccgggagagtcgtggtgcggcgcctggcagtccgccgcttcggtagcagatccctcagtacagctgatatgacaaagggactggtactcggtatctactcaaaagaaaaggaggacgatgtcccccagtttacctctgccggcgagaacttcgacaaactgctcgccggcaagctacgtgagacgttgaacattagtgggccaccactgaaggccggaaaaacccgcacattctatggcttgcaccaggatttcccctctgtcgtgcttgtcgggctgggaaaaaaggctgctgggatagatgagcaggagaactggcacgagggaaaagaaaacatcagggccgcggtggccgcagggtgcagacagatccaggatctggagttgtcctcagtggaggtggatccttgcggcgatgctcaggcagccgccgagggcgctgttctcggactctacgaatatgatgatctgaaacagaagaagaaaatggccgtgagcgctaaactgtatggttccggtgatcaggaggcatggcaaaagggggtcctgttcgcttctggtcagaatctggccagacaactgatggagaccccagctaacgagatgaccccaacgcgcttcgcggagatcattgaaaagaatcttaagagcgcctcctcaaagaccgaagtgcacatacgacctaagtcatggatcgaggagcaggccatggggtcatttctgagcgttgccaagggatctgacgagcctcctgtcttccttgaaattcactataaaggtagcccgaatgctaacgagccccctctcgtcttcgtcggcaagggtatcactttcgattccggcggtatcagcatcaaggcttcggcaaacatggacttgatgcgggccgatatggggggcgctgccaccatctgctctgcaatcgtcagcgccgccaagttaaatctgcctatcaacataataggcctggcccccctgtgcgagaacatgccaagtgggaaagccaataagcccggtgacgtggtgcgggccaaaaatggtaagactatccaggttgacaacaccgacgccgaaggtaggctcatactggcagacgccctgtgctatgctcacactttcaatcccaaagtaatcctcaacgctgcaactctgaccggtgcaatggacgtggccctggggtccggtgcaacgggggtattcacaaacagttcttggctttggaataaactgtttgaggcatccattgaaaccggagatagggtttggcggatgccactgttcgaacattatactagacaggtggtggactgtcagctggcagatgtgaataatatcgggaaataccgctccgccggggcgtgtaccgcagcagccttccttaaagagtttgtgactcatcctaaatgggcacacctcgacatcgctggcgtcatgaccaacaaggatgaggtgccttaccttcgcaaggggatgacagggagaccaactcggacactgatcgagtttttgttacgattttctcaagataatgcttag

SEQ ID NO: 14574 - DNA, 378 bp, synthetic construct
  misc_feature 1..378: note = Description of Artificial Sequence: Synthetic coding sequence
  source 1..378: mol_type = other DNA
atgaagaaaagcggcgtcctgttcttgttgggcatcattctgttggtgctgataggtgtacagggtactccagtcgttagaaagggccggtgctcctgcattagtactaaccaaggaaccatccacctgcaatccctgaaggacctcaagcagttcgccccatcaccatcatgcgaaaagattgagataattgctaccctgaagaacggagtgcagacttgtcttaaccctgactcggccgacgtgaaagagctgatcaagaagtgggagaagcaggtgtctcagaagaagaaacaaaagaacgggaagaagcatcagaaaaaaaaggtgctgaaagtgagaaagtcccagaggagccgccaaaagaagaccacgtag

SEQ ID NO: 14575 - DNA, 1083 bp, synthetic construct
  misc_feature 1..1083: note = Description of Artificial Sequence: Synthetic coding sequence
  source 1..1083: mol_type = other DNA
atggaggacttcaacatggagagcgactcgtttgaggacttttggaagggagaggatctcagcaactattcctatagctctaccctgccaccttttctattggatgcagccccctgcgaaccagaaagtttagagataaataagtattttgtcgtcatcatttatgctttagtgttcctactgtctctgctgggcaacagtctcgtgatgctggtgattctctattccagggtgggaaggagcgtcactgatgtttacttgttaaacttggccctggccgacctcttattcgcgctgaccctcccaatttgggcagctagcaaagtcaatgggtggattttcggtacctttctgtgcaaagtcgtgagtctgctgaaggaggtcaatttctatagcggtatactgttgctggcatgtatttccgtagacagatatctcgcaatagttcatgccaccaggacattgacgcagaagcggtatctggtcaagtttatttgtctgtccatctggggcctgtccctgctgcttgcacttcccgttctgttgttccggcggaccgtctacagcagcaatgtgtctcccgcatgctatgaagacatggggaacaatactgcaaactggaggatgctactccgaatcctcccccagtctttcgggtttatcgtgcctctgttgatcatgctgttttgttatggtttcacacttaggaccctatttaaggcccatatgggtcagaagcaccgtgctatgagggtcatttttgctgtggtcctgatctttctcctttgctggctcccatacaacctcgtattactggctgatacactaatgagaactcaggtcatacaggaaacctgtgagagacgtaatcacatcgacagggcactggatgctaccgagattttgggaattctccactcttgcctgaacccattgatttatgcattcatcggccaaaagtttaggcatggcctgctcaagatactggcgatccatggcctgattagtaaagactccttacctaaggactctcggccttcctttgttggatcctcctccgggcacacgtcaacgactctgtag

SEQ ID NO: 14576 - DNA, 417 bp, synthetic construct
  misc_feature 1..417: note = Description of Artificial Sequence: Synthetic coding sequence
  source 1..417: mol_type = other DNA
atggaggacttcaatatggaatccgatagcttcgaggacttctggaagggggaagaccttagtaattattcatattccagtacactgccgcctttcttgctggatgccgcgccctgcgagccagagagcttggagatcaacaagtattttgtggtgatcatatacgcactcgtgttcctcctctccttgctgggaaactctttggtaatgctcgtgatcctctactcacgcgtcggccgctccgttactgatgtgtaccttctgaacttggccttggcggatctgctgttcgctctgactctgccaatctgggccgcgagcaaggtgaacgggtggatcttcggaacctttctgtgcaaagtcgtgtcactgctgaaagaggtgaacttttactccgggattttactgctggcatag

SEQ ID NO: 14577 - DNA, 48 bp, synthetic construct
  misc_feature 1..48: note = Description of Artificial Sequence: Synthetic coding sequence
  source 1..48: mol_type = other DNA
atggaagacttcaacatggagtccgactccttcgaggatttttggtag

SEQ ID NO: 14578 - DNA, 519 bp, synthetic construct
  misc_feature 1..519: note = Description of Artificial Sequence: Synthetic coding sequence
  source 1..519: mol_type = other DNA
atggaggacttcaacatggagtccgacagcttcgaggacttctggaagggagaggatctaagcaattacagctatagcagcaccctgcccccattcctcttagacgccgcgccctgtgagccggagtccctggagattaataaatattttgttgtcatcatatacgccctcgtgttcctgctctctctgctcggtaattcactggtcatgctggtcattctgtatagccgcgttggccggagcgtcactgatgtctatctcctcaatctcgccctggctgacttgctcttcgccttgactcttccaatctgggctgcttccaaagtgaatggatggattttcggaacttttttgtgcaaggtggtgtccctgctgaaggaggttaatttctactccggcatcctccttcttgcatgtatttccgtggatcgctacctcgctatcgttcacgccactaggaccttgacacagaaacgatacttggtcaagttcatttgcctcagcatctggggcctgtag

SEQ ID NO: 14579 - DNA, 48 bp, synthetic construct
  misc_feature 1..48: note = Description of Artificial Sequence: Synthetic coding sequence
  source 1..48: mol_type = other DNA
atggaggatttcaacatggagtctgatagtttcgaagatttctggtag

SEQ ID NO: 14580 - DNA, 606 bp, synthetic construct
  misc_feature 1..606: note = Description of Artificial Sequence: Synthetic coding sequence
  source 1..606: mol_type = other DNA
atggaggattttaatatggagtcagattcttttgaggatttttggaagggcgaggacctgtccaactactcttacagcagcacacttccaccctttctacttgacgcagcaccatgtgaacccgaaagtctggaaatcaataagtattttgtagtgatcatctacgccctggtatttctgctttcactacttgggaatagtcttgtaatgttagtgattctgtattcaagagtggggcggtcagttactgatgtctatttactcaatctggccttggccgacctgctgtttgcgcttacgcttccaatttgggcggcatcgaaagtgaatggttggattttcggaacattcctttgtaaggtggtatccttgctaaaggaagtgaatttttacagcggtatcctgttgctggcctgcatctccgtggaccgatacctcgcgatcgtccatgccacccgcacactcacccagaagagatatctggtgaagttcatctgcctatcgatatggggactgtccctactgctggctctaccagtactcttgttcagacgcaccgtgtattcatccaacgtgtccccagcatgctatgaggatatggggtag

SEQ ID NO: 14581 - DNA, 411 bp, synthetic construct
  misc_feature 1..411: note = Description of Artificial Sequence: Synthetic coding sequence
  source 1..411: mol_type = other DNA
atggaagattttaacatggagagcgattccttcgaggacttttggaagggagaggacctctctaattattcgtacagcagcaccctgccccctttcttgctggatgccgccccctgtgagcccgagtctctggagataaataaatactttgtcgttattatctatgccctagtgttcctcctcagcttgctcgggaactctctggtcatgctggtcattctctactcacgagtcgggaggtcggtgactgacgtttatctgctaaacctggccctggctgatttactgttcgcactcacactccccatttgggccgcaagcaaagtcaatggatggatattcggcacgtttctgtgtaaggtcgtttccctcctcaaggaggtgaatttttacagcggaatcctgctgtag

SEQ ID NO: 14582 - DNA, 1059 bp, synthetic construct
  misc_feature 1..1059: note = Description of Artificial Sequence: Synthetic coding sequence
  source 1..1059: mol_type = other DNA
atggaaggcatctccatctacacctctgacaactataccgaagaaatgggatcaggcgattacgactctatgaaagagccgtgtttcagagaggaaaacgccaacttcaataagattttcttgcccacaatctactccattatattcctaacaggaatcgtcgggaatggcttagtgattctggtgatgggctatcagaaaaaactgaggtcaatgaccgacaaataccgtttacatttgtcggtggctgacctattattcgttatcactctgcctttttgggccgtcgacgccgtggcgaactggtacttcgggaactttctttgtaaagccgtgcacgtaatttacaccgtgaacctttactcttctgtgctaattctggctttcatttcccttgatcgatatctcgctatcgtgcacgccaccaactcccagcgtcctagaaagctgcttgcagaaaaagttgtgtacgtgggagtctggattcccgccttgttactgacaatacccgatttcatatttgctaatgtgagcgaagccgacgacaggtatatttgtgatcggttctacccaaatgacttgtgggtagttgtatttcaattccaacacataatggtaggcctgattttgcctggaatcgtgattctctcctgctactgcatcatcatctcaaagctgtctcacagtaagggtcatcaaaaaagaaaagcacttaagaccacagtcatcctcatcctagcatttttcgcatgttggcttccctactatatcggaatcagcatcgatagcttcattctgctggagatcatcaagcaggggtgtgaatttgagaatacagtacacaaatggatcagtatcaccgaggcactcgccttctttcactgttgcctcaacccaatcttgtacgcgttcctcggtgccaagtttaagacgagcgcccagcacgccctgacgtctgtgtcccggggctcatctctgaagattcttagcaaagggaagaggggcggacattcctccgtttccactgagtctgaatcttctagcttccattcttcgtag

SEQ ID NO: 14583 - DNA, 1071 bp, synthetic construct
  misc_feature 1..1071: note = Description of Artificial Sequence: Synthetic coding sequence
  source 1..1071: mol_type = other DNA
atgtcaatcccactgcccctgttgcagatatacacttccgataattacaccgaggagatgggttcaggcgactacgacagcatgaaggagccttgcttcagagaagagaatgccaactttaataagatctttctcccgactatttattcgattatatttctaactgggatagttggtaacgggctggttatactggtcatgggttaccagaaaaaactgcggtctatgactgataaatacaggcttcatctaagcgtcgcggatctgctgtttgtgatcactcttccattctgggcagttgatgccgtggcaaactggtatttcggcaatttcctgtgcaaggcggtccacgtcatctataccgtgaatctttattccagtgtgctcatacttgcttttatcagcttggatagatacttggctattgttcacgccacgaattctcaacggccccgaaagctgcttgccgagaaagtggtttacgttggggtgtggatccctgccctgttgctcacaatccccgacttcattttcgcgaacgtgagcgaagccgacgaccggtacatctgtgatcggttctatcctaatgatctatgggtagtggtttttcagtttcagcatatcatggtgggcttgatcctgccaggaatagtgatcctctcctgctattgcataattatcagtaagctgtctcacagtaaagggcatcaaaagcgcaaggccctgaagaccaccgttatcttgatcttagctttcttcgcctgttggctgccctactacatcggcatcagtattgactctttcattctattggagattataaaacaaggctgtgaattcgagaacaccgtccacaagtggatttctatcaccgaagctctggccttcttccactgttgtctaaatccaattttgtatgctttcctcggggcaaaattcaaaaccagtgcccagcatgccctgacatccgtctcccgggggtcatctctgaagatcctctctaaaggtaaacgcggtggccatagttccgtgtccacagagagcgaatcaagctcattccattccagctag

SEQ ID NO: 14584 - DNA, 669 bp, synthetic construct
  misc_feature 1..669: note = Description of Artificial Sequence: Synthetic coding sequence
  source 1..669: mol_type = other DNA
atgccctggcagacaggaactttggggacctcttacgccaggcagtcaatgagtagtacccagtccacttccacggctgtgtccagttcctggattcccgccctcctgttaacaatccccgacttcatattcgctaacgtaagcgaagccgacgaccggtatatttgcgacagattttaccctaatgacctctgggtggtagtgttccaattccagcatatcatggttggcctgatcctgcccggaatcgtgatcctgtcatgttactgtatcataatctccaaattatcacattcaaagggacaccagaaaagaaaggcactcaaaacaaccgtaatccttattctcgccttcttcgcatgctggctgccctactacattggaatatctattgatagctttatactactggagattatcaagcaaggctgcgagttcgagaacacggtgcacaaatggataagcatcacagaggccctcgcgttcttccattgctgtctcaaccccatcctttatgccttcctgggagccaaattcaagacctcagcccagcacgccctgacatccgtgtcaagaggtagcagcctgaaaattcttagcaaggggaagagaggcggacattcatccgtaagcacagagtcggagtcctcttcattccattccagttag

SEQ ID NO: 14585 - DNA, 2832 bp, synthetic construct
  misc_feature 1..2832: note = Description of Artificial Sequence: Synthetic coding sequence
  source 1..2832: mol_type = other DNA
atgacccagaggtcaattgccggccctatatgcaatttaaaattcgtcactttacttgtggctttaagttctgaactgccatttctgggggccggagtccagcttcaggataacgggtacaatgggctgcttatcgccatcaacccacaggtgcccgaaaatcagaacttaatctccaatatcaaagaaatgattaccgaggcctccttttaccttttcaacgctacgaaacgcagagtcttttttcgcaacattaagattttaatcccagccacttggaaagctaacaataatagcaagatcaagcaggaatcatatgaaaaggccaatgttattgtgacagattggtacggagctcacggagatgacccgtatacactgcaatacagaggatgtggtaaggaaggcaaatatattcacttcacccctaacttcctgcttaatgacaatctgacagctgggtacggctctagagggagagttttcgtccacgagtgggcacacctgaggtggggcgtgttcgacgaatataacaacgataagccgttctacatcaatgggcaaaatcagatcaaggtgactcgctgtagtagtgatattactggaatttttgtgtgcgaaaaaggtccctgtccccaggagaattgcattatttcaaagctctttaaggaaggatgcacattcatctataattcaactcagaatgccaccgcttccatcatgttcatgcaaagtttgtctagtgtggttgagttttgcaacgctagtacgcataaccaggaagcgcctaatctgcagaatcagatgtgcagcctccggtcagcctgggacgttatcactgatagcgctgatttccatcacagtttcccaatgaacggcacagagctacctcccccccctactttttcgttggtccaagcaggagacaaagtcgtgtgcctggtcttggacgtaagctccaaaatggctgaggccgatcgactgctgcaacttcagcaggccgccgaattctacttgatgcaaattgtcgaaatccatacctttgtggggatcgcctcttttgactctaagggcgaaattcgggcgcagttgcaccagatcaatagcaatgacgacaggaagctcctcgtgtcatatctacctactacagtgtctgctaagacagatatcagcatttgtagcggcctgaagaaagggtttgaagtggtggagaaactgaatggcaaagcctacggatcagtcatgattctggtgaccagtggtgacgacaagctactggggaactgtctgcccacggtcctgtcctcaggcagcactatccactcaattgcattgggctcttcggccgctcccaatctggaggagcttagcagactaactggtgggctaaagtttttcgtgcccgatatctctaactccaatagcatgattgacgcttttagccgcatcagtagcgggaccggggatatctttcaacagcacattcaactagagtctaccggagagaatgtaaagcctcatcaccaactgaaaaacacagttaccgtggacaatactgtaggtaacgataccatgtttcttgtgacctggcaggccagtggcccgccagagatcattctctttgaccctgacggcaggaagtattatacgaataatttcatcaccaatctgacatttcgcacagcttcactctggatcccaggcacagctaaaccaggacattggacttacactctgaacaacacacaccacagtttacaagcccttaaagttaccgtcacctctagggcatcgaactcagccgttccccctgcgacagtggaagcatttgtggagagggactccctgcatttccctcaccctgtgatgatttatgctaatgtgaaacaaggattttaccccattttgaacgctacagtgactgccaccgtcgagcccgaaactggcgatcctgtgactctgcgtctgttggacgacggagcaggggccgacgtgattaagaatgatggaatctattcccggtatttcttttcctttgccgctaatgggaggtacagcctaaaggtgcatgtaaatcattcgcctagcatctctacacccgcccactctataccaggctcacatgcaatgtacgtcccgggatatacggccaacggaaatatccagatgaatgctccccgcaaaagcgtcggcagaaatgaggaagagaggaagtggggattttcgcgagtgtcaagcggcggaagctttagcgtcctgggcgtcccggccggccctcacccagacgtgtttccgccctgtaaaattatcgacttggaagccgttaaggtagaggaggagctgaccctctcctggacagccccaggcgaggactttgaccaggggcaggccacctcttacgagatccggatgagcaagtccctacagaatattcaggacgattttaataacgccatccttgtcaatacttcgaaaagaaatccgcaacaggctggtattagggaaatcttcacattcagtccgcaaattagcacgaatggcccagaacaccagccgaacggcgaaacccatgagtcacataggatctatgtggcaatccgggcaatggatagaaactccctgcaaagcgcagtttccaatatcgcccaggcccctctgttcatccctcctaattccgatcccgtcccagcacgagactacctcatcctaaagggggtactaacagcgatgggcctgatcgggatcatttgcctgatcattgtcgtgactcatcacactctaagtaggaaaaagcgcgccgacaagaaggagaacgggaccaaacttttatag

SEQ ID NO: 14586 - DNA, 423 bp, synthetic construct
  misc_feature 1..423: note = Description of Artificial Sequence: Synthetic coding sequence
  source 1..423: mol_type = other DNA
atgacacaacgctctatagccgggccaatctgcaatctgaagttcgtgacactcctggtcgccctgagctctgagctacccttcctaggtgccggagtacaactgcaagataacggatacaacggactcttaatcgctattaatccacaggtgcctgagaatcaaaatctgatcagtaacattaaggagatgataactgaagcaagtttttatctgtttaatgctacaaaacgcagggtcttttttagaaatatcaaaatcctcattccagctacgtggaaggccaataacaactctaagataaaacaagagagttacgagaaagccaacgttatcgttacagattggtatggcgcacacggcgatgaccaaggtgtggaaaaaagagagaacacatttatatcgcatctgattagctactag

SEQ ID NO: 14587 - DNA, 1233 bp, synthetic construct
  misc_feature 1..1233: note = Description of Artificial Sequence: Synthetic coding sequence
  source 1..1233: mol_type = other DNA
atgaatgacgaggattattcaaccatctacgacacgatccagaacgaaaggacctacgaggtcccagaccaaccggaggaaaacgaatctccacactacgatgacgtgcacgagtatttgaggcctgaaaatgatttatatgcgacccagctcaatactcatgagtacgacttcgtgagcgtctatacaatcaagggcgaagagactagcctggcctcagtccagagcgaagatagggggtacttactccctgacgagatctattccgaactgcaagaagcccaccccggagagccgcaggaggacaggggaatttcaatggaggggctgtattcatccacgcaggaccaacagctttgtgccgctgagcttcaagaaaatggctcggttatgaaggaggacctcccatccccctcctcctttacgatccagcacagtaaggccttttccactactaagtacagctgctacagcgacgcagaaggtctggaagagaaggagggcgcccatatgaaccccgagatctacctatttgttaaggctggaatcgatggcgagtctatcggaaactgtccatttagccagcggctttttatgatactctggttgaagggagtggttttcaatgtgaccacggtcgacctcaaaagaaagccagcagacttacataacctcgctccagggacccatccccccttcctgacatttaatggggacgttaagacagatgtgaacaagatcgaagagttcctggaggaaaccttgactccagaaaaataccccaaactagcggctaaacaccgcgaaagcaataccgccggaatcgacattttctcaaaatttagtgcctacatcaaaaatacaaaacagcaaaacaatgcagccttagaacggggtctgacgaaggctctgaaaaagttagacgactatctcaataccccattacccgaggagatcgacgctaacacctgcggagaagacaaaggatcacgccgcaaattcctggatggcgatgagctgaccctggcagactgtaacctcctgcctaaactgcacgttgtaaaaattgtagcaaagaaatacagaaattatgacatcccagctgaaatgactgggttgtggcgctacctaaaaaatgcgtacgctcgggatgaattcactaacacttgcgctgcggatagtgaaattgaacttgcttacgctgatgtggcaaagagactatcacgatcatag

SEQ ID NO: 14588 - DNA, 756 bp, synthetic construct
  misc_feature 1..756: note = Description of Artificial Sequence: Synthetic coding sequence
  source 1..756: mol_type = other DNA
atgactgatagtgccacggcaaatggcgatgatagggacccggagatcgagctctttgtgaaagccggtattgacggagaatccatcggcaattgccccttcagccaaaggctgtttatgatactttggctcaaaggcgtggtcttcaatgtgaccacagtggacctaaaacgcaaacccgctgacctgcacaacctggctcccggcacccatccaccattcctaacatttaatggcgatgtgaagacagacgtgaacaaaatcgaagaattcctggaggagactctgactcctgagaaatatcctaagctggctgccaagcatcgagagtccaacaccgctggaattgacatcttttccaaattcagcgcctatataaagaataccaaacaacagaataacgcagccctggagcggggcctgaccaaagctcttaaaaaactggacgactatctgaatactccactacctgaggagatcgatgcgaacacctgcggtgaagacaaaggtagtcgaaggaagttcctggatggagatgaattaaccctggcagattgcaatctgctgccaaaattacacgtggtgaagatagtggcaaaaaaatacagaaactacgatatccccgccgaaatgacaggcctctggcggtacctgaagaatgcctacgcccgggacgaatttacgaatacatgtgccgctgattccgagattgaacttgcatacgcagatgtggcaaagcgcttgagccgctcgtag

SEQ ID NO: 14589 - DNA, 618 bp, synthetic construct
  misc_feature 1..618: note = Description of Artificial Sequence: Synthetic coding sequence
  source 1..618: mol_type = other DNA
atgacagactctgctaccgccaacggcgatgatcgggaccctgagattgagctgttcgtgaaggccggtatcgacggcgagtctatcggtaactgtcctttttctcagaggctatttatgatactgtggcttaagggagtggtattcaatgtcacaaccgtggacctgaaaagaaaaccagcagacctccataacctcgccccgggcacccatcccccttttctgacgttcaacggggacgtgaagaccgacgtgaataagatagaagagttcctcgaggagacccttacaccagagaagtatcccaaactggctgctaagcatagagagagtaatacagcggggatagacatatttagcaagttcagcgcttacatcaaaaacaccaagcagcagaataacgctgctctcgagcgtggactaactaaggccctgaaaaagctggatgattacctgaacacacctctgccggaagagatcgatgcgaacacctgtggggaagataaaggctccaggaggaaatttcttgacggtgacgaattgacgctggccgactgcaacctgctgcccaaactgcatgttgtcaaggagcaggttccattaaagggcatgatctag

SEQ ID NO: 14590 - DNA, 5823 bp, synthetic construct
  misc_feature 1..5823: note = Description of Artificial Sequence: Synthetic coding sequence
  source 1..5823: mol_type = other DNA
atggcgtcagggctgggatcaccttctccctgttcagcaggtagtgaagaagaggacatggatgcactgctgaacaactcattacctcctcctcacccagagaatgaggaggaccccgaagaggatctgtctgagactgagactcccaagctcaagaagaagaagaagcccaagaagccgagggaccccaagatcccaaagtccaaacgacagaaaaaagagcgtatgctgctgtgccgacagctaggagatagttcaggggagggaccagagttcgtggaggaggaggaggaagtcgcacttcgaagcgactccgaggggtccgattacacccccggaaaaaaaaaaaaaaagaaacttggtcctaagaaagaaaagaaatcaaagagcaaacgcaaagaagaagaagaagaggaagatgacgacgacgattccaaggagccgaaatcttcagctcaactgctggaggactggggcatggaggacatcgaccatgtttttagcgaggaagattaccgcacacttaccaattacaaagccttcagccagttcgtgcgaccgctaatagccgccaagaacccgaagatcgccgtctccaaaatgatgatggttctcggggccaagtggcgggagtttagcacaaacaacccgtttaaaggcagcagcggcgcatcagtggccgccgccgcggccgccgctgtggccgtggtggagtcaatggttaccgcgacagaggtcgccccacctcctccacctgtcgaggtcccaatccgtaaagccaagactaaggagggcaagggacctaacgcccgtcggaaaccaaaaggatctccaagggtccctgatgctaagaagccaaaaccaaagaaagttgcccctcttaagatcaagctcggggggttcggctcgaagcgaaaaagaagttccagcgaagacgacgatctggatgtcgaaagcgacttcgatgacgcaagtataaacagctacagtgtcagcgatggtagcacgagccgaagcagcagatccagaaaaaagctgagaacaacaaagaagaaaaagaaaggagaggaagaagtgacagccgtggatggctacgaaacagatcatcaagattactgcgaggtatgccagcagggcggtgaaatcattttatgcgacacctgcccacgcgcttatcatatggtctgtctggaccccgatatggagaaggctccggaggggaaatggtcgtgccctcattgcgagaaagagggcatccagtgggaggcaaaggaggacaactctgaaggtgaagaaatcctggaagaggtgggaggagacttggaagaggaagatgaccatcatatggaattctgccgcgtatgcaaggacggtggtgagctgctgtgttgcgacacttgccccagtagttatcacatccactgtcttaatcctccactgccagagattcccaacggggagtggctctgccctcgttgcacttgccctgcactaaagggcaaggtgcagaagatcttgatttggaagtggggacaaccaccatctcctacacccgttccacgaccgcctgatgcagatcctaacacaccctccccgaagccgctcgaaggacgacctgagagacagttctttgttaagtggcagggaatgtcatactggcactgcagttgggtttccgagttacagctggagttacactgccaggttatgtttcgaaattatcagagaaagaacgatatggacgaaccccccagcggtgattttggtggggatgaggaaaagtctagaaagagaaaaaacaaggatccgaaattcgccgaaatggaagaacgcttctatcggtacggcatcaagcccgagtggatgatgattcatagaattctgaatcactctgtggacaagaaggggcacgtgcattatctcatcaaatggcgggatttaccctacgatcaagctagttgggagtccgaggacgtggaaatccaggactacgacctgtttaaacagtcttactggaatcacagggaactaatgaggggcgaagaaggaagaccgggaaagaaactgaaaaaggttaagctacggaagcttgaaaggccccccgagacaccaacggtagatccaaccgtgaagtatgagagacaaccagaatacctggacgctaccggtggaactctgcatccctaccagatggagggtctgaactggcttcgctttagttgggcacaggggacggatacaattcttgcggacgagatgggtctcgggaaaaccgtgcagacagctgtcttcttgtacagtctttataaagagggacactccaagggccccttcctcgtctccgcccctctctcaaccattatcaattgggagagggaatttgagatgtgggcacctgacatgtatgtggtgacatacgtgggtgacaaagactctcgggccatcatccgcgaaaacgaattcagtttcgaagacaacgcgatccgaggcggaaagaaggcctcccggatgaaaaaggaagcgtcagtgaagttccacgttctactcacgagctatgagctcattactatcgatatggccattctcggatcaattgattgggcttgcctcattgtcgatgaagcacacaggctgaaaaacaatcagagcaagttcttccgggttctgaacggctactcgcttcagcataaattactgttgacaggtacccctctgcagaataatctcgaggaactcttccatcttttaaactttctgacacctgaaaggtttcacaatctcgaaggattcttggaagagtttgcggacatcgctaaggaggaccagattaagaagctgcacgatatgctcggtcctcatatgttgcgaagattaaaagccgacgtttttaagaacatgcctagcaagaccgaactgatcgtcagggtagagcttagtcccatgcagaagaaatactataaatatatcctcactcgaaactttgaggctctgaacgcccgtggaggtggcaatcaggtgtccttgttgaacgtggtgatggatctgaaaaaatgttgcaaccatccatacctgttccctgtggcagccatggaggcacccaaaatgccaaatggaatgtatgacgggagtgccctaattcgggcttccggtaagttgctactgctgcagaaaatgctgaagaacttgaaagaaggcggccaccgcgttcttattttttcacagatgactaaaatgctcgacctgttggaggactttctggagcacgaaggctataagtacgagaggattgacggaggtatcacgggcaatatgcggcaggaagcaatcgataggttcaatgcccctggggctcagcagttttgcttcttgctgtctacacgggccgggggcctgggaatcaacctggccacagccgatacagtaatcatctatgactctgattggaatccacacaacgacatccaagccttctctcgcgcacatcgtattggacagaataagaaggtaatgatctatcggtttgttactcgagcttccgtggaagaaagaattacccaggttgccaagaagaagatgatgctgacccacctagtggttagacctggcctggggtctaagaccgggtcaatgtctaaacaggagctggacgatatcctcaaattcggaacagaggaattgtttaaagatgaggccacagacggcggcggtgacaacaaggagggcgaagatagctctgtgatccattatgacgataaagctatcgagcgcctgctcgatcgaaaccaggacgagacggaggacaccgaactgcagggtatgaacgagtacctgtcgtccttcaaggtggcacagtatgttgttagggaagaagaaatgggtgaggaagaggaagtggaaagagagattataaagcaggaggagagcgtggaccccgattactgggagaaactgttgcggcaccactacgaacaacagcaggaggatctggcacgaaatcttggaaagggaaagcggataaggaagcaggtgaactacaatgatggctcgcaagaagatcgcggggtctgcggtcggcctagacctcctccaatggggagaagtacgcgggccgtcggacccgcccatctcccatccctgccacccgactggcaggatgaccagagtgataaccaaagcgactattctgtggcaagtgaagaaggagatgaggacttcgatgagagaagcgaggccccgcgtcggccatccagaaaagggctacggaatgataaggataagccactgccacccttgctggctagggttggcgggaatatcgaggtgctcggattcaatgcccggcaacgtaaggcattccttaacgccattatgaggtacggtatgccaccacaggatgcatttaccacacaatggttggtaagagacctgcgcgggaaatcagagaaagagtttaaggcttacgtctctttatttatgcgccacctgtgtgagcctggggctgatggggccgaaacctttgccgatggggtgcctagagaaggcctgagccgccaacacgtgctgacgaggatcggggtgatgtcactcatacgcaagaaagtgcaggagttcgagcacgtgaatgggcgctggagcatgccagagctcgccgaggtcgaagaaaataagaagatgagccaaccagggagtccctcccccaaaacacccactccctctaccccgggggacacacagcccaacaccccagccccagtgccacctgcagaagacggaataaagattgaggagaattcactgaaagaagaggagtctatcgagggggagaaggaagtgaaatccaccgctcccgaaacagcgatcgaatgcacccaggctcctgcgcctgcctccgaggatgaaaaagtggtggtggagcctccagaaggcgaagagaaggttgagaaggcagaggttaaggaaagaactgaggaaccaatggagactgaaccaaagggagccgctgatgtggaaaaagtcgaggaaaagtctgccattgacctcactccaatcgttgtggaggacaaggaagaaaaaaaagaggaggaagagaaaaaagaggtaatgctccagaatggggagacaccaaaagatcttaacgatgagaaacagaaaaagaatataaaacagcggtttatgtttaacatagccgatggtggattcactgagctgcatagcctctggcagaacgaggagcgagcagcgaccgtaaccaaaaagacatacgaaatttggcacaggagacatgactactggttgctggccggtattatcaatcatgggtatgcccggtggcaggacattcagaatgacccacgctacgccatcttgaacgaaccctttaagggggagatgaatcgtggcaacttccttgagatcaagaacaagtttcttgcaagacggtttaagctcctggagcaggcactcgttatagaggaacagctcaggcgagccgcctacttaaatatgtcagaagacccttcacacccctccatggccttgaatacacgcttcgccgaagtggagtgtctggccgaaagccatcagcatctttcaaaagagagtatggcgggtaacaaaccagcaaacgctgtgttgcataaggtcctgaaacagttggaagaacttttgtcagacatgaaagctgacgtgaccagattgcccgccacgattgccaggattccacctgtcgcagttcggcttcagatgagcgaaaggaacatcctgagccgcttggctaacagggcacccgaacccactccacagcaggtggctcaacagcagtag

SEQ ID NO: 14591 - DNA, 5739 bp, synthetic construct
  misc_feature 1..5739: note = Description of Artificial Sequence: Synthetic coding sequence
  source 1..5739: mol_type = other DNA
atggcatccggtctcggaagtccatcgccatgcagcgccggttcagaagaagaagacatggatgccctactgaacaatagcctgcctccgcctcacccagaaaacgaggaggatcctgaggaagacctgagcgagactgaaacccctaagctaaaaaaaaaaaagaagcccaagaaaccccgagatcccaagattccaaagtccaagaggcagaaaaaagagcgcatgctgctttgtcgacaactgggagacagcagcggagaaggacctgaattcgtggaggaggaagaggaggtcgcactgaggtctgatagtgagggctctgattataccccaggaaaaaaaaaaaaaaaaaagctcggccccaaaaaggaaaaaaaatctaaaagtaagagaaaagaagaagaagaggaggaagacgacgatgatgatagcaaggagccaaagtcatccgcccagctgttagaggattggggcatggaggatatagatcatgtcttttccgaggaagactatcgcacattgactaattacaaagcgttcagccagtttgttagacccctcatcgcagctaagaatccaaaaatcgctgtctccaaaatgatgatggtactgggggccaagtggcgcgagttttccacaaataacccctttaagggaagcagcggggcctccgtcgcggcagctgccgccgccgccgttgccgtggttgaaagtatggtgacagcgacagaggtggcccctccaccacctccggtggaagttccaatccgaaaggcaaaaactaaggagggtaaggggcccaacgcaagacggaagccaaaggggtcgcctcgcgtaccagatgctaaaaaacctaaacctaagaaggttgctccgctgaaaatcaagttgggcggatttggaagcaagcgcaagcgaagcagctccgaggatgatgatctcgacgtggagtcggatttcgacgatgcatctattaattcttactctgtatctgatggatccacctctcgctcaagtcgtagcaggaagaagttgcgcacgacaaagaaaaagaaaaagggtgaagaggaagtaacggcggtggacggctatgagaccgatcaccaggattattgcgaagtgtgccagcagggaggagaaatcatcctgtgcgacacctgtcccagagcgtatcacatggtgtgtctggatcctgatatggaaaaagcccctgaaggcaaatggtcctgcccccattgcgagaaagaggggattcagtgggaggccaaggaggacaactcggaaggagaggagattctggaagaagtgggaggagacctggaagaagaagacgatcatcatatggaattctgtcgggtgtgtaaggatggtggagagctgctgtgctgcgacacttgtccctcttcatatcatatccactgtttgaatcctccattgccagaaatccccaacggggagtggctctgtccgaggtgcacttgtccggctctcaagggcaaggtccagaaaatcctgatatggaagtggggacaaccaccttcaccgacgccagtgcctagacctcccgatgccgacccgaacacaccttctcctaagcccctggaagggagacccgagaggcagttctttgtcaagtggcagggaatgagttactggcactgctcgtgggtttccgagctgcagttagagctgcattgtcaggttatgtttaggaactaccagaggaaaaacgacatggacgaaccaccttctggggattttggaggagatgaagaaaagagccggaagcggaagaacaaagatccgaagtttgccgagatggaagagagattctacagatacggcattaagcctgaatggatgatgatccacaggatcctcaaccacagtgtcgacaaaaaggggcacgtccactacctcattaaatggcgcgatcttccttacgaccaggcctcttgggagtctgaggacgtggagattcaagactatgacctgtttaagcaatcttactggaaccaccgggaactaatgcggggggaggaaggccgccccggcaaaaagctcaagaaggtgaaactgcgcaaactggagaggccgcctgagaccccaactgtggatcctactgtgaagtacgagcggcagccggaatatctcgatgcgaccgggggcaccttgcacccctaccaaatggaagggctaaactggctacggttttcatgggcccagggcacagacactatcctggcggatgagatgggcttgggcaaaacagttcagacagccgtttttctctattcactctacaaggagggccattccaaggggccctttctcgtgagtgcgcctttaagtactatcatcaattgggaacgagagttcgagatgtgggctcctgacatgtacgtggtcacctacgtcggtgacaaggattcacgcgccatcatcagggagaacgagttctcatttgaggataacgcaattcggggtgggaagaaggcctcacggatgaaaaaggaagccagcgtgaagttccacgtcctgctcacgagctacgagctcatcacaattgatatggcaattcttggctcaattgattgggcctgcctgatcgtggacgaagcacaccgcctgaagaataaccagtcgaaatttttccgcgtcctgaacggatactccctgcagcacaaattgctcctcacaggcacaccactgcagaataacctggaggaattgttccacttattaaatttcctgaccccagaacgatttcataacttggagggttttctggaagaatttgctgacatcgccaaagaggaccagatcaagaagctgcacgatatgctgggaccacacatgcttagacgtctcaaggccgatgtcttcaagaatatgccatctaaaactgagcttattgttcgcgtggaactatcccccatgcagaaaaaatattacaaatatatcctgacccgaaattttgaggccctcaatgccaggggtggaggaaaccaagtgtcactgctcaatgttgtgatggatcttaagaagtgttgtaatcacccatacctcttcccagttgccgccatggaagccccaaaaatgcctaacggcatgtatgatggctcagccctgattcgcgccagtggcaaactgctgcttctccagaagatgttaaagaacctgaaggagggtggccatagggttctcatcttttcacaaatgacaaagatgcttgatctcctggaggattttttagagcacgaaggctacaagtacgagcgaattgacggaggcatcacgggcaacatgcggcaggaggccatcgaccggttcaatgcaccaggcgcccaacagttctgttttcttctatctacacgggctggagggctcgggatcaatctggcgacagccgatacagtgatcatttacgatagcgactggaacccccataacgacattcaagctttctcacgagctcatagaattggccaaaacaagaaggtcatgatatacagattcgtgaccagggccagcgtcgaagagcgcatcacccaggtcgcaaaaaagaaaatgatgcttacccacttggtcgtgcgtcctggcctgggctctaagacaggctcaatgtccaaacaggagttggatgacatcctgaaattcggcactgaagagctgtttaaggatgaggctacagatggtggtggagataataaggaaggagaagattcttccgtgatccattatgatgataaggctatcgagcggctgctagaccgcaatcaggatgagaccgaagacaccgaactgcagggtatgaacgagtacctgtccagttttaaggtagcccagtatgtggtccgagaagaggagatgggagaggaagaagaagtagaacgggagattatcaaacaagaagaaagcgtggatccagactattgggagaaactcctcaggcaccactatgagcaacagcaggaagatttggcgcgcaatcttggtaaaggaaagcgtatacgaaagcaagttaattacaacgatggttcgcaagaagaccgggattggcaggacgaccagtctgacaatcaaagcgactattccgtagccagcgaggaaggagacgaagacttcgacgagcgctctgaagctccacgcaggcccagccgtaaaggcctccgcaacgataaagacaagccgctcccaccactcctggccagagtgggaggaaatattgaggtcttggggtttaacgcaagacagcgcaaggcctttctgaatgccataatgaggtacggaatgccccctcaagacgcattcacaacccagtggctcgtgagagacctgcgtggaaagtccgagaaagaatttaaggcttacgtgagcctgtttatgcgacacctgtgtgagcctggtgctgacggcgcagagacattcgcagatggcgttcccagggaggggctgtcccgtcaacacgtgctcacccgcatcggcgtgatgagtctcattagaaagaaagtgcaggagttcgagcacgtgaatgggcgctggagcatgcctgaactagctgaggtagaagaaaacaaaaagatgtcccagcccgggagcccttctccaaagacaccaaccccgagcaccccaggggacactcaacctaatacccccgcccccgtgccgcctgctgaggatggcatcaaaatagaagagaattctctgaaggaggaggagagcattgaaggcgagaaggaggtcaagagcactgcccctgagactgcaattgaatgcacccaggccccagcccctgcatccgaagacgagaaggtcgtggttgagccccccgagggggaggagaaagttgagaaggccgaagtcaaagagagaaccgaggaaccaatggaaactgagcctaagggcgcagctgatgtggagaaagtggaagaaaaaagcgccattgatctcacccctattgttgtggaggacaaagaggagaagaaagaggaggaggagaaaaaggaggtgatgctccaaaatggagaaacccccaaagacttgaacgacgagaaacagaagaaaaatataaagcagaggttcatgtttaatatagccgacggcggattcaccgaactgcacagcctgtggcagaacgaagagcgggcagctaccgtgacgaagaaaacttacgaaatctggcaccggagacacgattactggctcctcgctggcataattaatcacgggtacgctcgatggcaggacatccagaacgatccacgatatgctattctaaacgagcctttcaagggggagatgaatcgtgggaattttctggagataaaaaacaagttcctggccagaagattcaagctgctggagcaagctttggtcatcgaagaacagcttaggcgcgcagcttatctgaacatgtctgaggatccatctcatccctctatggcattgaacaccagattcgccgaagtcgaatgtctggctgaatcccatcagcacctgtccaaggagagcatggccggcaacaaaccagccaatgcagtgctacacaaagtattgaaacagctcgaggagctgctgagcgatatgaaagcagatgtcacgagactccccgccactatcgctcgtattccccctgttgcagtccgattgcagatgagcgaacgtaatattctgtctcgactggctaatcgagctccagaacccacccctcagcaggtcgctcagcagcagtag

SEQ ID NO: 14592 - DNA, 5661 bp, synthetic construct
  misc_feature 1..5661: note = Description of Artificial Sequence: Synthetic coding sequence
  source 1..5661: mol_type = other DNA
atggacgctctgctcaataactcattacctccaccacacccagagaacgaagaggatcccgaggaggatcttagcgagactgaaactccgaaactgaagaagaaaaagaagcccaagaagcccagagaccccaaaattccaaagtctaaacgacaaaagaaggagcttggagatagcagtggagaagggcccgagttcgtggaagaggaggaagaggtagctctcagaagtgacagcgagggctccgactacacacccggtaaaaaaaagaaaaagaaattgggacccaaaaaggagaagaagtccaaaagtaagcgcaaagaagaagaggaggaggaggatgatgatgacgattcgaaagaacctaagagcagcgcacaattgctggaggattggggtatggaggatatcgaccatgtcttcagtgaggaggactacaggactctcacgaattacaaggcttttagccagtttgtgcgcccactcatagcagccaaaaatcccaagattgcagtatccaaaatgatgatggtcctgggcgccaagtggcgggaattcagtaccaataatcctttcaaaggatctagcggcgctagcgtcgctgctgccgcagctgcagccgtagccgtggtggaatccatggtgacagctacagaagtagcaccaccacctcctccagtcgaagttccaattcgaaaggcgaagaccaaagaagggaagggaccgaacgcaagaaggaagccaaagggtagtccccgggtccctgatgccaagaagcctaaaccaaagaaggtggcgccccttaaaatcaagctgggtggattcggctcaaagcggaaacgcagctcctcagaagacgatgatctggatgtcgagtctgattttgacgacgcgtccataaacagttattcggttagcgacggttctacctctagatcaagccggagcagaaaaaaactgcgcaccactaagaagaagaaaaagggggaagaagaggtgacagccgttgacggctacgagactgatcaccaagactactgcgaggtgtgtcagcaaggtggagagatcatattgtgtgacacttgccccagggcataccatatggtgtgtctcgaccctgacatggaaaaagcgcccgaagggaaatggtcctgcccccactgcgaaaaggagggcatccagtgggaggcaaaggaggacaattctgaaggggaggaaattttggaggaggtggggggagatctcgaggaagaggatgaccaccacatggagttttgtagagtgtgcaaagacggcggggaactgctctgttgtgatacctgtccctcatcttaccatatccattgtctcaaccctccattgcctgagattccaaacggggagtggctgtgcccccgctgtacatgtcccgccctgaaagggaaagtgcagaaaatcttgatttggaaatggggtcagcccccgtccccaacaccagtgcctcgacctcctgatgcagatcccaatactccttccccaaagccactggaaggacgacccgaaaggcaattctttgtaaagtggcaggggatgtcttactggcactgttcatgggtgtcggaactgcaactggaactgcattgtcaagttatgttccgaaactatcaacgcaaaaatgacatggacgagccccctagtggagatttcggaggagacgaagagaagtcacgaaagcgcaaaaataaagatcccaaatttgcggagatggaggagcggttttatcgctatgggatcaaacctgaatggatgatgatacaccgcatactcaaccactctgtggacaagaaaggacacgtacactatctgatcaaatggagggatttgccatacgaccaggcctcatgggagagcgaggacgtcgagattcaggattacgacctgttcaaacagagctactggaatcacagggagcttatgagaggggaagagggccgcccaggcaaaaagctcaagaaggtcaagctgcgcaagctggagaggcctccagaaacaccgaccgttgatccaacggtgaaatatgagagacagccggagtacctcgatgcaaccggcgggacactgcacccataccagatggagggtctgaattggcttcgattttcttgggcccaaggcaccgacacaatcttggccgacgagatgggccttgggaaaactgtgcaaacggctgtattcctctactctttatacaaggagggccactccaaggggcccttcctcgtttcagctcccctgtctaccattattaattgggagcgagagttcgagatgtgggccccagacatgtacgtggttacatacgttggagataaggactctcgcgctattatccgcgaaaacgagttctcctttgaggacaatgccatacgagggggcaagaaggctagccgtatgaagaaagaggctagcgtgaaattccacgttcttctcacgtcatacgagttgattacgatagacatggccattctgggttcgatagattgggcctgtctcatcgtggacgaagcccaccgcctgaaaaacaatcaaagcaaattttttcgggttctcaatggttactcgctgcagcataaactgcttctcacagggacacctctgcagaacaacctcgaggagctgtttcacttgctcaatttcctgacaccagagagatttcacaacttggagggatttttagaagagttcgctgatatcgctaaagaagatcagattaagaaactccacgatatgctgggtccccacatgttgaggaggttaaaagcagatgtgtttaagaatatgccctcaaaaaccgaactgattgtgagagtcgaactttccccgatgcagaaaaaatactacaaatacattctgaccaggaacttcgaagctctgaatgctcgaggcggtggaaatcaagtctctctgctgaacgttgttatggatctgaagaaatgctgcaaccatccatacctgttccctgtggctgcgatggaagcgccaaagatgccaaatggcatgtacgacggatcagcgctaatccgagcatccgggaaactgctcctgctgcagaaaatgttaaagaaccttaaagaaggcggccatagggtgctgattttttctcagatgacgaaaatgctggaccttttggaagacttcctggagcatgaaggctataagtatgaaagaatagatgggggtattacagggaacatgcggcaagaggctatcgaccgcttcaacgccccaggtgctcagcagttctgtttcctgttatcaacacgggccggaggcttgggcattaatttggccaccgcagatactgtgattatatacgattcagattggaatcctcataacgatattcaggcattttccagggcacacagaatcggacagaacaaaaaggtcatgatctatcgattcgttaccagggcctctgtcgaggagaggatcacccaagtcgccaagaaaaagatgatgctaacacatctggtggtgaggccgggcctcggaagtaagactgggtctatgtctaaacaggagctagacgatatcctgaagtttggcaccgaagaactatttaaggatgaggccacagacggtgggggtgataacaaggagggtgaggatagctccgttatccattacgatgacaaggctatcgagcgccttcttgaccgcaaccaggatgagacagaagacaccgaactgcaaggtatgaatgagtatctctcttcgttcaaggttgcacagtacgtcgtgcgcgaggaggaaatgggagaagaggaggaggtcgaacgtgaaataatcaaacaagaagaatccgttgaccccgactattgggaaaagctcctgcgacatcactacgagcagcaacaagaagacttggccagaaacctgggaaaaggcaagagaattcgaaaacaggttaattacaatgatgggagccaggaggaccgggactggcaggatgaccagtctgataatcagtcagattattcggtggccagcgaggagggcgatgaggactttgacgagcggtcggaggcccccaggagaccttcccgcaaagggctgcgaaacgacaaggacaagccgctccctccccttctggcacgggtgggcgggaatatcgaggtgctgggatttaacgccaggcaacgcaaagctttcctgaatgctatcatgaggtacgggatgcccccccaagatgctttcacaacccagtggctcgtgagagatctgaggggtaagtctgaaaaggaatttaaggcctacgtttcattgtttatgcgccacctctgtgaacccggcgccgatggcgctgagacctttgccgacggagtcccccgggaaggattgtctaggcagcatgtgttgactcgaatcggcgtcatgtccctgatccgcaaaaaggtccaggagttcgagcacgtcaatggtagatggtctatgccggagctggctgaagtggaggaaaacaagaaaatgtcgcagcccggttccccctctcccaagactcccacgccctctacgcccggggatacacaacctaacaccccagcccctgttccccccgcggaagacgggataaaaatagaagagaacagcctgaaggaagaggaatccattgagggcgagaaagaggttaaaagcaccgctccagagacagctattgagtgtacccaggcacccgcccccgcctccgaagatgaaaaggtggtggtggagcctccggagggggaagaaaaggttgagaaagcagaggtgaaggagaggacagaggagccgatggaaaccgaacccaagggtgcagcagatgtcgagaaagtcgaagaaaaatctgccatcgaccttactcccatcgttgtggaggacaaggaagaaaaaaaggaggaggaggagaagaaggaggtgatgcttcagaacggcgaaacaccaaaggatctgaacgatgaaaaacagaaaaagaatattaaacagcgcttcatgttcaatattgccgacggaggctttactgagctgcactctctttggcagaatgaggagcgagcagcgacagtcacaaagaagacttatgagatatggcatcggagacacgattattggctcctcgcaggcatcattaaccatgggtacgcgagatggcaagacatccagaatgatcctcgctatgcgattctcaatgaaccatttaaaggtgaaatgaataggggtaatttcctggagatcaagaataaattcttagcaaggcgctttaagctgctggaacaggccctggtcatagaggaacagttacgacgagctgcgtacctaaacatgagcgaggaccctagccacccttcaatggccctcaacaccagatttgccgaggtggaatgcctggcagagtcccatcagcatctgagcaaagagtctatggcgggaaataagccagccaacgccgtgctgcataaagtcctcaaacaactagaggaactcttgagcgatatgaaggccgatgtgacaagactcccagccactattgcccgcatacctcccgtcgccgtccggctgcagatgagcgaaaggaatatcctttcacggctcgccaatcgcgcccccgagcccacgccacagcaggttgcccagcagcagtag

SEQ ID NO: 14593 - DNA, 5718 bp, synthetic construct
  misc_feature 1..5718: note = Description of Artificial Sequence: Synthetic coding sequence
  source 1..5718: mol_type = other DNA
atggcttcaggactgggtagtccgtcaccatgcagcgccgggagcgaagaagaggacatggacgctctcttgaataattcacttccaccccctcatcctgaaaatgaggaggatcccgaagaggacctgagcgagaccgaaacgcctaagctgaaaaaaaaaaaaaaacctaagaagcccagggatcctaagatcccaaagagcaaacgccagaagaaggagctgggcgactcatccggcgagggtcctgagttcgtcgaagaggaagaggaagttgcgcttcgaagtgactcagagggcagcgactatacccccggcaagaaaaaaaagaaaaaactgggtccaaagaaggagaagaagagtaagtccaagcgcaaagaggaagaagaggaggaagacgacgacgacgacagtaaggaacccaagtcctcagctcagttgctggaggattggggaatggaagatatcgaccatgtgttctcagaggaggactacagaacactgacaaactacaaggccttttctcaatttgtcagaccacttattgcagccaagaacccgaaaatcgccgtctctaaaatgatgatggttttgggggccaagtggcgggaattttccacaaataaccctttcaaggggtcaagcggggcctctgtggcggctgccgctgcagccgcagtggccgttgtagaatctatggtgacggcaacagaggtggccccccccccacctccggtcgaggttcctatcaggaaggcaaagactaaagaggggaagggtcccaatgccaggagaaaacccaagggaagccccagggtgccagatgccaaaaagcccaagcctaaaaaggttgccccgcttaaaatcaagctgggaggctttggcagcaagcggaaacgtagctcttctgaggacgacgacctcgatgttgaaagcgactttgacgacgcatctattaacagctactcggtgagtgacggcagcaccagtcggtcctcccggtcaaggaaaaaactgcgaactaccaaaaagaagaagaagggagaggaggaggtgactgcggtcgatgggtacgaaaccgaccatcaggactactgcgaggtctgtcagcagggaggtgagattattttgtgcgatacctgtccccgggcctaccatatggtatgtctggacccagatatggaaaaagcccctgaagggaagtggtcatgccctcactgcgagaaggaaggaattcagtgggaagccaaagaggataatagcgaaggagaggagattctggaggaggttggaggagacctggaagaagaagacgaccaccatatggaattctgtcgcgtctgcaaggatgggggagaactcctctgctgtgatacatgtccctcgagctatcatatacattgtctgaacccccctctgcctgagattccgaatggtgaatggctctgcccgcggtgcacttgtcctgccttaaagggcaaggtccagaaaatcttaatctggaagtggggccagccaccatcacccacaccagtaccccgccctccggacgccgatcctaacactcccagccccaagcccttggaggggagacccgagcggcagttcttcgtgaagtggcaaggaatgagctactggcattgctcctgggtaagcgagctgcagctggaacttcactgccaggtcatgtttaggaactatcaacggaagaatgacatggacgagcccccatcaggcgatttcggaggcgatgaagagaaatccagaaagcgcaaaaataaagatcccaagttcgccgagatggaggaacgtttttatcgctacggtattaagcccgagtggatgatgattcaccgaatcttgaaccacagcgtggataaaaaaggacacgtccactatcttattaagtggagagacctgccatacgatcaggcctcttgggaatctgaggacgttgaaattcaggactatgacctgttcaagcagtcctactggaatcacagggagctcatgcgcggcgaggagggcagacccggaaaaaaactgaagaaggtaaagctgaggaaactcgaacgacctccagaaacccccactgttgaccccactgtaaagtacgagagacagcctgagtatctggatgccacagggggcactcttcatccgtaccagatggaaggtctaaattggttgagattcagttgggcacagggaacagacactatcctcgccgatgagatgggcttaggcaaaactgtgcaaactgccgtttttctgtacagcctgtacaaggagggtcactccaagggaccgtttctcgtgtctgccccactaagcactatcattaattgggagcgagagtttgagatgtgggcgcccgacatgtatgtcgttacttatgtgggcgacaaagattcgcgcgctatcatcagagagaatgaattttccttcgaagataacgccatacggggtgggaagaaagcgagtcgcatgaaaaaggaagcctctgttaagtttcacgtgctactcaccagctatgaattgatcaccatcgatatggccattcttggatcaatcgactgggcctgcctgatagtggatgaggctcacagattgaagaacaatcaatctaagttcttcagagttcttaacgggtacagtctccagcacaaactgttgctgaccggaactccgttgcagaacaacctcgaagagcttttccatcttctcaactttctgactccagaaaggttccataacctggaaggatttttggaagaattcgccgacatagccaaggaggatcagatcaaaaagctgcacgacatgctaggcccccacatgctgcgtaggctcaaagcagacgtgtttaagaacatgccgtccaagaccgaactcattgtacgcgtggagctgtccccgatgcagaagaaatattataaatacattctcacgcggaatttcgaagcactgaacgcacgaggggggggtaatcaggtttctttgctgaatgtggtcatggacttgaagaaatgttgcaaccacccatatctgtttccagtggccgcaatggaagcaccgaaaatgccgaatgggatgtacgatgggagcgctctgattagggccagcgggaagctgctgctgttacagaagatgttgaagaacctgaaagagggtggacacagggtgctaatcttttcccagatgactaagatgctagatttgttggaggattttctagagcatgaggggtataaatacgagaggatcgatggggggatcactggcaatatgcgacaagaggcaattgaccgtttcaatgccccaggcgctcaacagttttgttttctcctgtctacacgggcgggtggactgggtattaatctggccactgccgatacagtcatcatctacgattccgactggaatccacacaatgatatccaggcattttcacgggcccacagaatcggccaaaataagaaggttatgatctatagatttgtcacccgggcatctgtggaggaacggatcactcaggtggccaagaaaaaaatgatgcttacccacctcgtcgtgaggccgggtttaggttctaaaaccggtagtatgtctaagcaggagctcgacgatatcctgaaatttggaaccgaggagctgttcaaggatgaggccaccgatggggggggggataataaggaaggggaggatagctccgttatccactatgatgataaagccatcgagaggttgcttgatcgtaatcaggatgaaaccgaggataccgaactgcagggtatgaatgaatatctgtcttcgttcaaagtagcccagtatgtggtgcgcgaagaggagatgggtgaagaggaggaggttgaaagggagatcattaagcaggaagagtccgttgatcctgactattgggagaaactgcttcgtcatcactatgagcagcagcaggaggatctggcccgcaatcttggcaagggaaaaagaatccgtaagcaggtaaattacaatgacggtagtcaagaagaccgggactggcaggacgaccagtccgataaccagtccgactatagtgtggcttccgaggagggcgatgaggactttgatgaacgatcagaggccccaaggaggcctagccggaaaggactccggaatgataaggataaaccactaccacccctgttagcccgggtgggagggaacatcgaagtcctgggttttaacgctcgacaaaggaaagcctttctgaatgcaataatgcgctatggcatgcccccacaggacgcttttaccactcagtggctggttagagatctaagaggcaaaagcgagaaagaattcaaggcatacgttagcctgtttatgaggcatctgtgtgaacctggagcagacggcgccgagacctttgccgatggcgttcccagggagggattgagccgccagcatgtcttgacaaggattggcgtgatgtccctcatccgtaagaaggttcaagaatttgagcatgtgaacgggcgatggtctatgccagagctagcagaagtcgaggagaataaaaaaatgtctcaacccgggtcccccagccccaagaccccaacaccaagtacacctggtgatacgcagccgaacacacctgctcccgtgccgcccgcggaggatggtatcaaaatagaagaaaattctctgaaggaggaagagtcgattgagggggaaaaggaggtgaaaagcacggctcctgaaaccgctatcgaatgcacccaggctccagcaccagcctcagaggacgagaaagtggttgtggagccaccggaaggcgaggagaaggtggagaaagctgaagtgaaggagaggacagaagagcccatggaaaccgaacctaaaggtgccgctgatgttgagaaagttgaagagaagagtgcgatcgacttgacgcccattgtagtggaagacaaagaggaaaagaaagaagaagaggagaagaaggaggtgatgttgcagaacggagagacgcccaaagatctcaacgacgagaagcagaagaagaatatcaagcaaagattcatgttcaacatcgctgacggcggatttaccgagttgcatagcttgtggcagaatgaggagcgcgctgcaaccgtgaccaagaagacttacgagatctggcatcgccgccacgactattggcttcttgctgggattataaaccatgggtatgctcgctggcaggacattcagaatgatcctaggtacgctatattgaacgagccattcaagggagagatgaaccgcggcaatttcttggagatcaagaacaaattccttgcaagacggttcaagctccttgagcaggccctggttatcgaggaacagctcagaagggcagcctatttgaacatgagcgaggaccccagccacccttctatggctctgaatacaagatttgccgaagtcgaatgcctggctgagagccaccagcatctgtcaaaggagtccatggcaggtaacaagcccgctaatgccgtactgcacaaggtgctgaagcagctagaggaacttctgtctgatatgaaggcggatgtgacgaggttgcccgccacaatcgcccggattccccctgtagcggtgcgactgcaaatgagtgagaggaatattttgtcacgacttgcgaacagagctcctgagcccaccccccagcaggtggctcagcagcagtag

SEQ ID NO: 14594 - DNA, 5814 bp, synthetic construct
  misc_feature 1..5814: note = Description of Artificial Sequence: Synthetic coding sequence
  source 1..5814: mol_type = other DNA
atggcttcaggccttggatccccgtcaccatgctcagccggatctgaagaggaagacatggacgccctgctaaacaattctctgcctcctccgcacccagaagaccctgaagaggacttgagcgagacagagacacctaagctgaagaaaaagaagaagccaaaaaaaccccgtgaccctaaaattccaaagtccaaaaggcaaaagaaggagcggatgttgctctgcaggcagctgggagattcctccggagaagggcccgagtttgtggaggaggaagaggaggttgccctccgatccgattctgaagggagcgactacactccaggcaagaagaaaaagaaaaagctgggaccaaagaaggaaaaaaaaagcaaatcgaagcgaaaggaagaggaggaagaggaggatgacgacgatgacagtaaagaacctaaaagctcagctcagctcctggaggactggggaatggaggatattgatcacgtcttctccgaggaggattaccggaccctcactaattataaagcattttcccagtttgttcgaccacttatcgccgccaagaaccctaaaatcgctgtcagtaaaatgatgatggtactaggggcaaagtggcgcgagttcagcactaataatcctttcaaaggttccagcggtgcgagtgtcgcagctgctgccgcagcagctgtggccgtggttgagagcatggtcacagccaccgaggttgcccccccacccccccccgtggaagtcccaatacgaaaggcaaagactaaggagggaaaaggcccaaacgcccggaggaaaccaaagggttccccccgcgtgccagacgccaagaaacctaagccaaagaaggtcgcacctctaaagataaaactgggaggtttcgggagcaagcggaagagaagctctagtgaagatgacgatcttgacgtggaaagtgacttcgatgacgccagcatcaattcttattcagtatcagacggaagtacatccaggtcctcccgctcccggaagaagcttaggactacaaagaaaaagaagaaaggcgaagaggaagtcacagccgtcgatggctacgaaaccgaccaccaggattactgtgaggtgtgccagcagggcggagagataatactgtgcgatacctgtcctcgggcttaccatatggtctgtctcgaccctgacatggagaaggcgcccgagggtaaatggtcttgtcctcactgtgagaaggagggcattcagtgggaggctaaggaagacaattccgagggagaggagatcctggaagaagtaggcggggacttggaggaggaagacgatcatcatatggagttctgtcgcgtctgcaaagatggtggtgagctgctgtgctgcgacacttgtccaagctcctatcacattcattgcctcaacccaccacttcctgagatccccaatggcgaatggctttgcccgagatgtacctgccctgcccttaaggggaaagtgcagaaaattctgatctggaagtggggtcaaccacctagtcccacgcctgtaccacgacccccggacgcagacccgaataccccatcaccgaagcctctagagggtcgtcccgaaagacagttcttcgtgaagtggcaggggatgtcttattggcactgtagctgggtctcggaactccaactcgaactgcactgccaggtcatgttccggaactatcagagaaagaatgacatggatgagccgccatcaggcgactttggaggcgatgaggaaaaaagccgcaaaaggaagaataaagatccaaagttcgccgagatggaggaaagattctatagatatgggataaagccggagtggatgatgattcatcggattttgaaccacagcgttgacaagaagggccatgtgcattacctcataaagtggcgggacctgccctacgatcaggcatcttgggagtcagaggatgtggagattcaagattacgacctgttcaaacaatcctactggaaccaccgagagctaatgaggggcgaagaggggagacccgggaaaaagctgaaaaaagtgaaattgcgtaagttggagagaccccccgaaacacctacagtcgacccaactgtgaagtacgaaaggcaaccggaatacctggatgcaaccggcggtaccctgcacccctatcagatggaaggcttgaattggctacgcttctcttgggcacagggaaccgacactatccttgcggatgagatgggcctcggtaagacggtgcagactgccgttttcttgtatagcttatataaagagggacattccaaggggcctttccttgtgtctgcacctctatctacgataatcaactgggaaagggagtttgagatgtgggccccagacatgtacgtcgtgacatatgttggtgataaggatagcagggccatcatccgtgaaaacgagttttcctttgaggataatgcaatccgaggggggaagaaggccagccgtatgaagaaggaggctagtgtcaagtttcatgtgcttttgactagttacgaactgattaccatcgacatggccattctcggctcaatcgattgggcatgtctgatcgttgatgaggcacacaggctgaagaataatcagtctaagtttttcagagtcctaaatggttactccctgcagcacaagctcttgctcaccggcacacccctgcagaataatctggaggagctgttccacctgctgaattttctgactcctgaaagattccataacttggaggggtttctggaggagttcgctgacattgccaaagaagaccagattaagaagctgcacgacatgctgggacctcatatgctgcgccggttaaaagcagatgtgttcaagaacatgccctccaaaacggagctgattgttcgagttgagctcagcccgatgcagaaaaagtactacaagtatatacttacccgaaatttcgaagctctgaatgctcgtggaggtggaaatcaggtttctttattgaacgtcgtgatggacttgaagaagtgttgtaaccatccatatctgttccccgtcgcagctatggaggcccccaaaatgccaaacggcatgtacgacggcagcgccctaatacgagctagtggtaaactccttctgctccagaagatgctgaaaaatttgaaggaaggcgggcatcgggtactcatctttagccagatgacaaaaatgctcgatcttcttgaggacttcttggaacacgagggctacaaatacgaaaggattgacggcgggatcacggggaacatgcgtcaggaggcaatcgatcggtttaacgcgccaggggcccaacagttttgctttctactgtccaccagggccggcggcttgggcatcaatttggcaactgcggatacagttattatctacgacagcgattggaatccccacaacgacattcaggccttctcccgggcacataggattgggcagaataagaaggtgatgatatatcgatttgtgacccgcgcctctgtggaagaaagaattactcaagtggccaagaagaagatgatgcttacccacctcgtggtgagacccggactaggctcaaaaacagggagtatgagcaaacaggagctggatgacatccttaaattcggtacggaagaactcttcaaggatgaggccaccgacggcggcggagacaataaagagggtgaggactcttccgtcatacactatgatgacaaggcaattgaaagactcttggatcgcaaccaggacgaaaccgaggacacagaactgcagggcatgaatgagtacctctcttcatttaaggtcgcccagtatgtggtgagagaggaggagatgggagaggaggaagaggtggaacgggagattatcaaacaagaggaatccgtggatccggattactgggagaaactcctccggcatcactacgagcagcagcaagaagatctggctcgcaacttgggaaaaggaaagaggattcgaaagcaggtaaattacaatgatgggtctcaagaagatcgtggtgtgtgtggacggcctcggccaccccccatggggcgcagcaccagggccgtgggtcccgcgcaccttcctagtctgccaccagattggcaggatgatcagtcggataaccaaagcgattattccgtggcttcagaggagggagatgaggatttcgacgagcgcagtgaggccccacgccgcccctcaaggaaggggctgaggaacgacaaagataagcctcttccccctctcctcgcgagggtaggcggaaatatcgaggtgctgggctttaatgccagacaaagaaaagcgtttctgaacgccatcatgagatatggcatgccccctcaggacgccttcacaacccagtggctggtacgtgacctgcgggggaagagtgagaaagaattcaaggcctacgtgtccctgtttatgcgacacctgtgtgagcccggcgccgacggggcggagacctttgccgacggcgtccctcgcgaaggtttgagcaggcagcacgtgctgacccgtatcggcgtcatgagcctgattcgcaaaaaagtccaggagttcgagcatgtgaatgggcggtggagcatgccagaactggccgaggtcgaagaaaacaagaagatgtctcagcctggaagtcctagccctaaaacacctacgccatcgaccccgggagatacccagcccaacactcccgctcccgtgccacccgccgaagacggtattaaaatagaggaaaattcactgaaggaagaggaatccatagagggagaaaaagaggtcaaaagtaccgcccccgagaccgcaattgaatgtacacaggccccagccccggcaagtgaggatgagaaagtggtcgtagagccccccgaaggggaagaaaaggtcgagaaagcggaagttaaagagcgcacggaggagcctatggaaactgagcccaagggagccgccgatgtggaaaaagtcgaagagaagtctgctatcgacctcacccccattgtagtagaggacaaagaggagaagaaagaagaggaggagaaaaaagaagtgatgctgcagaacggagaaacaccgaaagaccttaatgacgaaaaacagaaaaaaaatataaaacagcggtttatgttcaacatcgccgacggcggatttaccgaactgcacagtctctggcaaaatgaagagcgagcggccactgtcaccaagaaaacttatgaaatttggcaccgtcgccacgactactggttactggccggtattattaatcacggatacgcaaggtggcaagacattcagaacgaccccaggtacgcgattcttaacgagccctttaaaggagagatgaacagaggaaatttcttagagatcaagaacaaattcctcgcaagaaggtttaagctgttggagcaagcactggtgatagaggagcagctgagaagggccgcataccttaatatgagtgaggaccccagccatccctctatggcactgaacactaggtttgcggaggtggaatgtctcgctgaaagccaccagcatctcagcaaggagtccatggccggcaataagccggctaacgccgtgctccataaagtcttaaagcagttagaggagctcctgagtgacatgaaggccgacgtgacccgactccctgccacaatcgcaagaatcccacctgtggcggtaagactgcagatgagcgaaaggaatattctgagcagactcgctaaccgggctccagagcctaccccacagcaagtggctcagcaacagtag

SEQ ID NO: 14595 - DNA, 1065 bp, synthetic construct
  misc_feature 1..1065: note = Description of Artificial Sequence: Synthetic coding sequence
  source 1..1065: mol_type = other DNA
atggcaagcggcctgggatctcccagcccatgctctgccgggtctgaggaggaagatatggatgcactattgaataattccctaccgcccccccatccagagaatgaggaagaccccgaggaggatctctctgaaacggagacaccgaagttgaagaaaaagaagaagccaaagaagccccgcgaccctaaaatcccgaagagtaagagacagaagaaagagaggatgctactctgtcgacagctgggcgacagttctggcgaaggccccgaatttgttgaggaggaggaagaggttgcgttgagatcagacagtgagggatcagactacacccccgggaagaaaaaaaagaagaagctgggccctaaaaaggaaaaaaaatccaaatctaagcgaaaggaagaggaggaagaagaggacgacgatgacgactcgaaggagcccaaatccagcgcacagctgctggaggattggggtatggaggatatcgaccacgtgttcagtgaggaagactaccgcactttaacaaactataaggcattttcccagttcgtaagacccctcatcgccgcaaaaaacccaaaaatcgcagtatccaagatgatgatggtcctgggggcaaaatggagagaattcagcactaataatccatttaaagggtcaagtggcgcaagtgttgcagccgcggctgccgcagccgtggctgtagtggagtctatggtgactgccacagaggtcgcgccaccacccccacctgtggaggtgcctatccgaaaggctaagaccaaagaagggaaaggcccaaatgcccggaggaaacccaaagggtcaccccgggtgccagacgctaaaaagcccaaaccaaagaaggtggctccccttaaaatcaagctcggaggattcggttccaaaaggaagagaagctcgtctgaggacgacgatctggatgtcgaatccgactttgacgacgcttcaattaattcgtacagcgtttcagacggctccacctcgagatcttccaggtcgcgcaaaaaactaagaacaacaaaaaagaagaagaagtag

SEQ ID NO: 14596 - DNA, 1065 bp, synthetic construct
  misc_feature 1..1065: note = Description of Artificial Sequence: Synthetic coding sequence
  source 1..1065: mol_type = other DNA
atggctagcgggttgggatctccttcaccttgttctgccggctctgaggaagaagacatggacgccttactgaataactctctcccccccccacaccctgaaaatgaggaggaccctgaagaggacctgtctgagacagagacgcctaagctgaaaaaaaagaaaaaacctaaaaaacctcgggaccccaaaatacccaaatctaaaaggcagaagaaggagcgtatgctgctgtgtcgtcagctgggagattcatcaggcgaaggccctgagtttgtagaagaagaagaagaagtggctctgagaagcgattccgaggggtcagattacaccccaggtaagaaaaaaaaaaaaaagctggggcccaagaaggaaaaaaagtccaagtcgaagcgcaaggaggaggaggaagaagaggatgatgacgacgactctaaggaaccaaaatccagcgcccagctactcgaagactggggtatggaggatattgatcatgtgttctccgaagaagattaccgaaccctgaccaactacaaagccttctcccagttcgtcagacctctgatcgctgccaagaatcctaaaattgctgtgagtaaaatgatgatggttctgggcgctaaatggcgagaattttcaaccaataacccattcaaaggttcatctggggccagcgtggctgccgcagcggcggctgcggtagcagttgtggagtccatggttaccgctactgaggtcgccccgccgccccctcctgtagaagttcccattcgcaaagccaagacaaaggagggaaagggcccaaacgcccgaaggaaaccaaagggaagccccagggtgcctgacgccaagaagcccaaaccaaagaaggttgcaccgctgaaaattaaacttggcggcttcggatcgaaaagaaagagatccagctcagaggacgacgatctggatgtagagagtgacttcgacgacgcttcaattaactcatattcagtctccgacgggtccacatcccgttcatcccggtcccggaagaagctgagaaccaccaaaaaaaaaaaaaaatag

SEQ ID NO: 14597 - DNA, 2562 bp, synthetic construct
  misc_feature 1..2562: note = Description of Artificial Sequence: Synthetic coding sequence
  source 1..2562: mol_type = other DNA
atgtttctgccccacatgaaccatctgacattggagcagacatttttttcacaggtgctccccaaaacagtgaaacttttcgatgacatgatgtatgaactcacctcacaagcccgtggcctgtccagtcaaaacctggagatccagacaactctcaggaatatcttgcagaccatggtgcaactgctcggggctcttacgggctgtgtgcagcacatctgcgcaacccaggagtccatcattctggagaatatccaaagcttgccatcatctgtgttgcatattataaagtcaactttcgtacattgtaaaaacagcgaatctgtctacagcggttgcttgcatcttgttagtgacttgctgcaagctctgttcaaggaggcgtatagcctccaaaaacagcttatggaacttcttgacatggtctgcatggacccccttgtggatgacaatgatgacattttaaacatggtcatcgtcatacacagcctgcttgacatctgctcagttatttcttcgatggaccatgccttccatgccaatacatggaagtttatcatcaagcaatctcttaaacaccagtcgattattaagtcacagctaaagcataaagacatcattacctcactgtgcgaggatatcctgtttagcttccactcctgcttgcaactggctgagcagatgacacagtccgatgctcaagacaatgcagactatcgactcttccagaagacactgaagctgtgccggttcttcgccaactctttgcttcactacgctaaggagttcctgcccttcttatccgatagctgctgcacactgcaccaactttacctgcagatacattcgaaattccctccgtcgctgtacgcgaccagaataagtaaggcacaccaggaagaaatcgctggcgcctttctagtgacgttggacccgctgatctcacagctgctgaccttccagccatttatgcaggttgtccttgacagcaagcttgatcttccctgtgagctgcagttccctcagtgtctgctgcttgtcgtggttatggacaaactgccctcccagcccaaggaagtccaaaccctctggtgtacagattctcaggtgtctgagaccacaacacgcatcagtctcctcaaagcagtgttttattctttcgaacagtgctccggagagttatccttaccggtgcacctgcaaggcctgaaaagtaaagggaaagctgaggtggccgtcacactgtatcaacatgtttgcgtccatctgtgcacgtttatcacatctttccatcctagcttgtttgccgaacttgatgcagcccttctgaatgccgttttgtctgctaacatgattacatctctccttgcaatggacgcttggtgctttctcgctagatatgggactgcggagctttgtgcccatcatgttacgattgtcgcgcaccttataaagtcatgtcccggtgaatgttatcaactgatcaatttatcgatcctgctgaaacgcctgttcttctttatggccccaccacaccagttggaattcatccaaaaattcagcccgaaagaagcggagaatttacccctatggcagcatatctctttccaagctttgcctcccgagctcagagagcagaccgttcacgaggtgaccactgtaggtactgctgagtgtcggaaatggttgtcccgttcccgtactttgggggagttggagtctctgaacactgtcctctctgccctcctcgcggtctgtaatagcgccggggaagccctcgacactggcaagcagaccgctattatcgaagtggtatctcaactgtgggcattcctgaatattaagcaggtggccgaccaaccttacgtgcagcagactttttcactcctgctcccactgctcgggttcttcatacagactttggatccaaaactgatacttcaagccgtgaccctgcagacttcattgttgaagctggaactgcccgactatgtgagactggcaatgctcgattttgtgtcaagcctcgggaagttgtttatccctgaagctattcaggatcggatcctgccaaacctaagttgcatgttcgccctgctgttagccgacagaagttggctgctggaacaacatactcttgaagctttcacccaattcgcagagggaacaaatcacgaagagatcgtcccgcagtgcctgagcagtgaggaaacaaagaataaggtagtgtcattcttggagaaaaccggattcgtggatgaaacagaagcagctaaggtggaaagagtgaagcaggagaaagggattttctgggaacctttcgctaatgtcaccgttgaggaggccaagcggtcaagcttgcagccctatgctaaacgcgcccggcaggagttcccctgggaggaggaatatcgcagtgcactccataccattgccggagctctggaggcaactgagtcgcttctgcaaaagggacccgcccccgcctggctgagtatggaaatggaagccctgcaagagcggatggacaagttaaagcggtacatccacactttaggatag

SEQ ID NO: 14598 - DNA, 2562 bp, synthetic construct
  misc_feature 1..2562: note = Description of Artificial Sequence: Synthetic coding sequence
  source 1..2562: mol_type = other DNA
atgttccttccccatatgaatcacctcaccttggaacaaacctttttttcccaggtactcccaaaaacggtaaagctttttgatgacatgatgtatgagctgacaagtcaggcccgggggctatcttcacaaaatctggaaattcagactaccttacgcaacattctgcagaccatggtgcagttactgggagcattgactggctgtgttcagcacatttgcgcaacccaagagtctattattttagagaatatacaatcccttccaagttccgttttgcacataattaagtcaaccttcgtccattgtaagaattcggagtctgtgtactcggggtgtctgcacctggtttcagatctgctgcaggccctgttcaaagaagcctattcacttcagaagcagctgatggagctcctggatatggtctgtatggatccgctggtggatgacaatgacgatattctgaacatggtgatcgtgatccactccctgctggacatttgctctgtcattagctccatggaccatgccttccacgcaaacacctggaagttcatcattaagcaatcccttaaacaccagtccatcatcaaaagccaacttaaacacaaagacattataacctcgctgtgtgaggacatattgtttagcttccactcctgtctgcaactggcagaacagatgactcaaagcgacgctcaggacaatgctgattacaggctatttcaaaagacgctgaagctctgtcgattttttgcaaactctttgctccattacgcaaaggagttcctgcctttcctgtcggactcgtgttgtaccctgcaccagctttacctgcagatccactccaagtttcctccctccctgtatgcaactcgcattagcaaggcccatcaggaagaaatcgccggggccttcctcgtgacactggatccccttatctctcaactgctcacctttcagccttttatgcaggtcgtgcttgacagtaagcttgaccttccctgtgaacttcagttcccccagtgtctcctgctcgtcgtggtgatggacaagttgccatcacaaccaaaagaagtacagacattgtggtgtactgattcccaggtctccgaaactaccacccgaatctctctccttaaagccgtcttttattcttttgagcaatgttccggagagctgagcctcccagtgcacctgcagggtttgaaaagcaaaggaaaggctgaagtggctgtcacactgtaccaacacgtgtgtgtccacctgtgcacatttataacgagctttcatccctctctgttcgcagaattggacgccgcccttctcaatgcagtgcttagcgcgaacatgatcacctctttgctcgctatggatgcttggtgctttctggcacgctacggcaccgcagaactttgtgctcaccatgtaacgattgtggctcatcttatcaagtcttgcccaggagagtgttaccagttaattaatctgagcattctgttaaagcggctcttctttttcatggcacccccacaccagctggagttcattcagaagttctcccctaaagaagccgagaatttgccactatggcagcatatttcattccaggccctcccaccagagctacgtgagcagactgtgcacgaggtgacgaccgtgggaacagcagagtgcagaaagtggctgagccggtcccggactctcggtgagcttgaatctctgaacacagttctctccgcccttctggccgtgtgcaatagtgcgggcgaggccctcgacaccggcaaacagacagctattatcgaggtcgtcagccagctctgggcctttttgaatatcaaacaggtggctgaccagccctacgtgcagcagacgttcagcctcttgctgcccctgctgggtttcttcatccagacactcgatccaaaactcattctccaagccgttacactccaaacttccctactgaagctcgagctgcctgactacgtccgtttggccatgctggatttcgtgtccagtctggggaaactgttcatccccgaagccatacaggatcgcatcctgcctaatttgtcctgtatgttcgccttactgctggctgatcggtcctggcttctagagcagcacaccctggaagcattcacccagttcgccgaaggcacaaaccatgaagagattgtcccgcagtgtttgtcaagcgaggagactaagaacaaggtggtgtcatttctggagaaaactgggttcgtggacgagaccgaggctgcgaaagttgagcgggtgaagcaggaaaagggtattttctgggagcccttcgctaacgtgaccgtcgaagaggcgaagcgctcaagtctgcagccatacgctaaaagagcacgacaagaattcccctgggaggaagaatataggtctgcgctgcacactattgctggggccctggaagcaacagaaagtttattgcagaaggggccagcccccgcttggttgtccatggaaatggaagctctgcaagaacgcatggataagttaaaacggtatatacatactctgggttag

SEQ ID NO: 14599 - DNA, 993 bp, synthetic construct
  misc_feature 1..993: note = Description of Artificial Sequence: Synthetic coding sequence
  source 1..993: mol_type = other DNA
atgatgtacgagcttactagccaagcccgcgggcttagtagtcagaacctcgagatacagactacacttagaaacattcttcagacaatggtgcagttgctcggggccttgaccggatgcgttcagcatatttgcgccacgcaggagtctatcatcctggagaacattcagagcctcccttcttctgtactgcacatcattaaatctacattcgttcactgcaagaattccgagtctgtgtatagcggatgcctgcatttagtaagcgacctcctacaagctctgtttaaggaggcctatagtcttcaaaagcaactcatggaactactcgatatggtatgcatggaccctcttgtcgacgataacgacgatattctgaatatggtgatcgtaattcactccctattggatatctgttcagtgatcagcagcatggaccacgctttccacgctaacacgtggaaattcatcatcaaacagtcgttgaaacaccaaagcatcatcaagtctcagctaaagcacaaggatataattacatcactttgcgaggacatactttttagcttccatagttgcctgcaactagcagaacagatgacccagtctgatgcccaagataacgccgactaccggttgtttcagaaaactttgaagttatgtcgattcttcgctaattccctgttgcactatgcgaaagagtttctcccctttctcagcgacagctgttgtactcttcaccagctgtacttacaaatccatagcaagtttcccccttctctgtacgccacgagaatctctaaagctcatcaagaagagattgcgggagcattcctggtgacactggatccgttaatatcccagcttctaaccttccagccatttatgcaggtagtcctagactcaaagcttggatatctgtattcaaaacccttttccactgtgctgagtagtgttctcgttaacagcctgtatctctttatttatagagactag

SEQ ID NO: 14600 - DNA, 1047 bp, synthetic construct
  misc_feature 1..1047: note = Description of Artificial Sequence: Synthetic coding sequence
  source 1..1047: mol_type = other DNA
atgtcacaggaaggggctgtccctgcctccgctgtgcccctggaggaactgtcgtcatggcctgaagaattgtgcaggcgggagcttccatcagtcctgcctaggctcctttccctttcccaacattctgattcctggatcgaacatattcaaattctcaagatcatcgtggagatgtttctgccccatatgaaccatctcactctcgagcagacattcttctcacaggtgctacccaaaacagttaagctctttgatgacatgatgtacgaattaacaagccaggctaggggactgtcctcccagaatctcgagatccagactactttacggaatatactgcagacaatggtgcagctgctgggggcgctgacagggtgtgtccagcatatctgcgcgactcaggaatccatcatcctcgaaaatattcagtcactgccctccagtgtgttacatatcatcaagtcaacgtttgtgcattgtaagaatagcgagtccgtctatagcgggtgtctgcatctagtctcagatctgctccaggcgttgtttaaggaggcgtactccctgcagaaacaactgatggagctgctcgacatggtgtgcatggaccctcttgtcgacgacaatgatgatattctcaacatggtgatagtgattcattccttattagatatctgcagcgttatatcatcaatggaccacgctttccacgcaaatacttggaagttcatcattaagcagagcctgaagcaccagagtattatcaaatcacagctcaaacacaaagatatcatcacttcactttgcgaggatattctgttttcattccactcctgcctccaactggccgagcaaatgactcaatccgatgcccaagacaacgcagattatcgactgttccagaagaccctgaaactttgcaggttctttgccaactcattgctgcattatgccaaggagttcctgcccttcctttctgattcatgctgcaccttgcaccagctttatctgcagatccataggtggtcattcgcccttgctgtctag

SEQ ID NO: 14601 - DNA, 2100 bp, synthetic construct
  misc_feature 1..2100: note = Description of Artificial Sequence: Synthetic coding sequence
  source 1..2100: mol_type = other DNA
atgctgaagctttcaggtgagggtctccgggacagttaccactcacgacgagatcagatagccctgaaaaatctccagagtgatgtcacagaggccaaatctgacttcaccaaggaaactcttgcctcacagaatacaaaaatgattagcagcattgttatctctcagatgatcgacgagaataaatcgagagaaaacagagcttccctccccctgccatgtgcaatcgctcagagtcgtgcccaccatgcaaaacagagtctggctaatcggtcgggtgtcaacatccaccgggcattcgctcttctgccaggccggcttggcattcccgcgccctccgacgagaggggacctgaggctgaacttccacccaaggaggagcgcccgtgcggaggccctaggcgcggcttcgcctccataaccatcacagcccgtcgagtgggaccgcccgcccgagcactggtgtggggaacagccggcgatagtttgtgtcccaagtgtcgtgccgaggatacgcttttccaggctccacctgctctggcgaacggagcccatcctggccgccaccagcgtagctttgcgtgcacggagttttccaggaactcgagtgtagtgcgcctgaaggttccggaggctcacaccgggctgtgtgagcggcgcaaatattgggtgacacatgcagacgacaaggaaacatcatttagccccgataccccgttgtctggaaagagtccactcgtgttttcttcatgtgtacatttgcgcgtgtcccagcaatgcccagacagtatctattacgtggacaaatccttgtccgttcccattgaaccacctcagatcgcttcacccaagatgcatcgcagcgtcttgtcactaaatctgaattgtagttcgcatcggctgaccgcagatggcgtcgacggactcgtcaacagggaaccgataagcgaagcgcttaagcaagaactccttgagggggatcaagacctcgtgggacagcggtggaacccaggattgcaggagagccatcttaaggaaacaccctccctcaggcgggttcacctcgggaccggcgcctgtccatggtcgggctcttttcccttggaaaataccgagctggctaatgtaggcgctaaccaggtgactgtccggaagggagagaaagatcataccactcactgccatgcatctgatcatgctaaccagctcagcatacacattcccgggtggtcataccgggcggtccacacaaaggtcttttcaggcagttcgaagcgccagcagggtgaggtctgcatgacagtgtctgctccccctgtagaacagaagcctacccgtcacttcctgccgattggggattcatcccctagcgacgattgtctgagtcgggatttgagcgaaccaaccgaacgacgacaccagtcattcctaaagcccagaatcctattcccaggattcctttgtccgctgcaggacgtgtgtgcctctttgcaggaagacaacggagtgcagatcgaaagtaaattcccgaagggcgattatacctgctgcgacctggtggtgaagattaaggagtgtaagaagagtgaggaccccaccacaccagagcctagccctgctgcaccaagccctgcaccaagggatggggccggaagcccaggcctgtctgaagactgctcagagagccaacagaccccagcccggtccctgacactgcaggaagccctcgaagtgcggaagccacagtttatctctaggtcacaagaacgattgaaaaagctggagcacatggtgcagcagcggaaagctcagcgtaaggaagacttgcgccagaaacagtctctgctcccaatcagaacctcaaaaaagcagttcactatccctcaccctcttagcgacaatctcttcaaacccaaggaacggtgcatttcagagaaagaaatgcatatgagatctaagcggatttacgacaatttgcccgaggttaagaagaaaaaagaagaacagcgaaaacgggtcatactccagagtaacagactccgggccgaggtcttcaagaaacagctgcttgaccagctactgcagaggaacgctgtctag

SEQ ID NO: 14602 - DNA, 1959 bp, synthetic construct
  misc_feature 1..1959: note = Description of Artificial Sequence: Synthetic coding sequence
  source 1..1959: mol_type = other DNA
atgatcagcagcattgtaatctctcagatgatcgacgagaacaagagccgggagaatcgtgcgtcattgcctctgccgtgcgctattgctcaaagtagggctcaccatgctaaacagtcgctcgcaaaccgctctggagtgaacatccacagggcgttcgccctgcttccgggcaggctgggaataccagccccgtccgatgaacggggccccgaggccgagctccctcccaaggaagagcggccatgcggcgggccccggagaggtttcgcgtctatcacaatcactgcgcgccgggttggcccgcccgcgagggcactcgtctggggaactgctggggacagcctctgccctaagtgccgggctgaagatacacttttccaagctccacctgcactcgccaacggtgcccacccagggagacaccagaggagtttcgcttgcacagaattctcccggaattcttcagtggtgcgcctgaaggttccggaagcccataccggcctatgtgaacgtcgtaagtactgggtaactcatgccgacgataaggagactagcttttcgccagatacccccctctccgggaagagtccactcgtgtttagttcctgtgtgcatcttagggtgagccagcaatgtcccgatagcatttattacgtggacaagagtctctccgtgcctatcgaaccaccacagattgcgtcacctaagatgcaccggtcagtgctttccctcaatctgaattgtagcagtcatcgactaacagccgacggtgtggacggccttgtcaaccgggaacctatctccgaagccctgaaacaggagctcctggagggcgatcaggacctagtgggccagagatggaatccgggcctccaggagagccatcttaaggaaactcctagcctcagacgagttcatttaggaacaggcgcttgcccatggagtggctccttccctctcgaaaacacagagctagcaaatgtaggcgccaaccaggttacggtcagaaaaggggaaaaggaccatacaactcactgccatgcgagcgatcacgcaaaccagctctccattcacattcccggatggtcttacagggccgtgcatacaaaggtgttcagtggttcgtctaaacgtcaacagggggaggtgtgtatgacagtgtcagcccctcccgtggaacagaagccgactcgccactttttgccaatcggcgattctagtccttctgacgactgtctgtctcgcgacctatccgagcctaccgaaaggcgccatcagagctttctcaaaccacgaatcttattccctggtttcctctgtcccctccaggatgtatgcgcctctctgcaggaggacaatggcgtgcagatagaatcaaagtttccgaaaggcgactatacatgttgcgatttggtggtgaaaattaaggaatgcaagaagtcagaagatcccacaacgccagagccgtcaccagccgctcccagtccagcaccccgcgatggtgccgggtctcccggcctcagcgaggactgctccgagagtcaacagacgccagccaggagtctcacactccaggaagccctagaggtaaggaagccccaatttatttcacggagtcaggaaaggctgaagaaattagaacatatggtgcaacagcggaaagcccagcggaaggaggacttgcgtcagaaacagtcactgctgcccatccgaactagcaagaagcaatttactatcccacacccccttagcgacaatctgtttaagcctaaggagcgatgtatatccgagaaagaaatgcacatgagatcgaagaggatttatgataacctccccgaggtgaagaaaaaaaaggaagaacagcgcaagcgggtgatcttgcagagcaatcgtctccgagccgaagtattcaaaaagcagcttctggaccagttattgcaaaggaacgctgtctag

SEQ ID NO: 14603 - DNA, 1152 bp, synthetic construct
  misc_feature 1..1152: note = Description of Artificial Sequence: Synthetic coding sequence
  source 1..1152: mol_type = other DNA
atgattagttccattgtcatctcccagatgatcgacgaaaacaaaagccgagagaacagggcatccctgccactgccttgtgctattgctcagtcccgtgctcaccacgccaagcaaagccttgccaataggtcgggggtcaatatccaccgagcattcgctctgctgcccggtcgcttaggcatccccgcgcctagcgacgagcgaggaccagaggcagagctgcctccaaaggaggaacgcccatgtggcgggcctagacgaggatttgcaagcattacgatcacagctagacgcgtcggacctcccgctcgcgcccttgtgtggggaaccgcaggcgactctctatgccctaaatgccgggctgaggatactctgttccaggctcctcctgcattggccaatggtgctcatcctggaaggcaccagcgtagcttcgcatgcacagagttctctagaaactcttccgttgttaggctcaaagtgccagaagctcatactggtctgtgcgaacggaggaagtactgggtgactcacgcagatgataaggaaaccagcttcagccctgacactccattaagcggtaagagtcctctggtcttttccagttgtgtgcacctcagagtgagtcagcaatgtcccgatagtatatattatgtggacaagtctttatctgtccctattgaacccccgcagatcgcaagccctaagatgcacaggtccgtccttagcctcaacctgaattgttcaagtcatcgccttacagctgacggggtagatggtcttgttaatagagaaccaatctccgaggccctgaagcaggaactgttggagggggatcaagatctggtggggcagagatggaatcctggacttcaggagagtcacctcaaggagactccgagtttgagacgcgttcacctggggaccggagcatgtccatggtccgggagtttccccctcgagaataccgaactggccaatgtcggggccaatcaggttactgtcaggaagggagagaaggatcatacaactcactgccacgccagtgatcacgcaaaccagctgagcatccacatacccgggtggtcttaccgggctgacctactccaggagggccagcataaacagctgtccatgtttcagcgatag

SEQ ID NO: 14604 - DNA, 1152 bp, synthetic construct
  misc_feature 1..1152: note = Description of Artificial Sequence: Synthetic coding sequence
  source 1..1152: mol_type = other DNA
atgatatcatcaatcgttatctcacagatgattgacgagaacaaatcacgcgaaaatagggccagcttgcctcttccctgcgctatcgcccagtcaagagcacaccatgccaagcagtcactggccaataggagcggtgttaatattcatcgagcctttgcgcttttgcccggaagactgggcattcccgccccttccgacgagcggggcccagaggctgaattgcccccaaaggaggaaaggccatgcggaggccctcggcggggcttcgcctccattacaattacggcgcgccgagttgggcctccagcaagagccctcgtctggggaacagccggcgactccctatgtcccaaatgcagggcagaggacaccctcttccaggccccacccgcgctggcaaatggtgcccaccccgggcgtcaccagaggtcttttgcctgtacagagttctcaaggaactcttccgtagtccgactgaaagtcccagaggcacacaccggcctttgcgaacggaggaagtactgggtgactcacgctgatgataaagaaaccagtttctcacctgatactccattgagtggcaagagtccacttgtattctctagttgtgtgcatctcagagttagccagcagtgccccgactctatatattacgtcgacaaaagcctcagcgtgcccatcgaacctccgcagattgcatctccaaagatgcacaggagtgttctgtctctgaatctgaattgctcttctcatcgactgaccgccgatggggtcgacgggcttgtgaatagagagcccatctcagaggcactgaaacaggaactgctcgagggagatcaagatctggtagggcagcggtggaaccctggcctccaggagtcccacctaaaagagacacccagtctccggagggtccatctagggaccggggcctgtccatggagcggatccttcccactcgagaacaccgagttagctaacgtcggggccaaccaggtgaccgtaaggaaaggcgaaaaggaccacactacgcactgccacgcctctgatcacgctaaccagctctcaattcatatccctgggtggtcctatagggccgaccttctgcaggagggccagcataaacagctgtcaatgttccagcggtag

SEQ ID NO: 14605 - DNA, 729 bp, synthetic construct
  misc_feature 1..729: note = Description of Artificial Sequence: Synthetic coding sequence
  source 1..729: mol_type = other DNA
taatggagcggctcgttcccactggaaaacactgaactggccaacgtcggagccaatcaagtgactgttaggaaaggagaaaaagaccacacaactcactgtcatgcttctgatcacgctaaccagctgtcaatccacatccccggatggagctacagagccggagattacacctgctgcgacctagttgtgaaaatcaaggagtgcaagaagtcagaggacccaacaacgccagaaccatctcccgcggctccaagccctgcaccccgagatggagccggatctcctggactttcagaggactgcagtgagtcacaacagacacctgctagaagcctgactctgcaggaggccctagaagtgcgaaaaccccagttcatcagcaggtcacaagagaggcttaagaagttggaacacatggtgcagcaaaggaaggctcagcggaaggaggatcttaggcagaaacagtcactgctccctatacgcaccagcaagaaacaatttacgatccctcatccactgagcgataatttgttcaaacctaaggaacgttgtatctcggagaaagaaatgcatatgcgcagtaagcggatatatgataacttgccagaagtgaaaaagaagaaggaggagcaacgtaagagagtgatcctgcagagtaaccgattaagggcagaggtattcaagaagcagctgctggaccagcttctgcagaggaacgctgtgtag

SEQ ID NO: 14606 - DNA, 1989 bp, synthetic construct
  misc_feature 1..1989: note = Description of Artificial Sequence: Synthetic coding sequence
  source 1..1989: mol_type = other DNA
atgctgaagctatctggggagggcttgagggactcgtaccactcacgaagagaccaaatcgctctgaaaaatctgcagtctgacgttacagaggcaaagtctgatttcaccaaggaaactctcgccagtcagaataccaagatgatttcaagcatcgtgattagtcagatgattgacgagaataagtcccgcgagaatcgcgcttcacttccccttccctgcgctatcgctcagtcaagggcacaccatgccaaacaatccttagcaaatagatctggtgttaacatccatcgagcttttgccctcctaccagggaggctgggcataccagcaccatcagacgagagaggacccgaagcagagctgccccctaaggaggagagaccttgcggcggtccccggagaggctttgcttccataaccattaccgcacgcagggtgggaccccccgctagggcactggtgtggggcaccgctggagactccctgtgccctaaatgccgcgctgaggacaccttgtttcaggctcctccggccctggctaatggggcacaccccgggcggcaccagaggtccttcgcatgtaccgagttcagccgtaattccagcgtagtgcgcctgaaggtcccagaggcccatacagggttgtgcgagcgccgcaaatactgggtcacacacgccgatgataaggagacctcttttagccctgatactcctctctctggcaagtctccactagtgtttagctcatgcgtgcatttacgcgtgagccagcaatgcccagactccatatactatgtcgacaaatcgttgtccgtccccatcgagccaccacagatagcttcacccaaaatgcatcgttccgtattgtccctaaatctgaactgcagctctcaccggctcacagctgatggcgtcgacgggctggttaatcgtgagccaataagcgaagcactgaagcaggaactactggaaggagaccaggacctcgtaggacaacgttggaacccaggcctgcaggagtctcacttaaaggagacaccttccctgcgaagagtgcacctgggaactggggcctgtccctggtccgggagtttccctctggagaacactgaactcgctaacgttggggctaatcaagtaacagttcggaaaggcgagaaggatcacaccactcattgccacgcctctgatcatgcgaaccagctgtctattcatatacccgggtggtcttacagagcagtccatactaaagtgttcagtggatcctctaagagacagcagggcgaggtctgtatgaccgtgagcgcacccccagttgaacagaaaccaactaggcatttcctgcccattggagattcctctccttccgatgattgtctgtcccgggatttaagcgagccaaccgagagaagacaccagtcttttctgaagcccaggattctatttcccggcttcttgtgcccacttcaggatgtgtgtgcctcactgcaggaggacaacggtgtgcaaattgagtccaagtttcccaaaggtgattacacctgttgtgaccttgtcgtgaagataaaggaatgtaagaagtccgaggatcccaccacccctgaaccttcccctgccgctcccagcccagccccaagggatggcgccggatcccctggactgagcgaagactgctcagagagtcagcagaccccggcgcggagtcttactctccaggaggctctagaggtccggaagccccaatttataagtcgctcccaggagaggttgaaaaaactcgagcacatggtacagcagcgcaaggctcagaggaaggaggacttacgccagaagcagtcccttttacccatccggacctctaagaagcagtttacaatacctcaccccctgtccgataacctcttcaagcctaaggagagatgtataagcgaaaaggagatgcatatgaggtctaagcggatctatgataacctgccggaggtgtag

SEQ ID NO: 14607 - DNA, 1809 bp, synthetic construct
  misc_feature 1..1809: note = Description of Artificial Sequence: Synthetic coding sequence
  source 1..1809: mol_type = other DNA
atgcttaagcttagcggagaagggctgagagatagttaccactccagaagggatcagattgctttaaaaaacttgcagtcagacgtgaccgaagcaaaatcagattttacaaaggaaaccctggccagtcagaacacaaagatgattagctctatcgtaatttcgcagatgatcgacgagaataagtctcgagaaaatagagccagcctgcccctcccttgcgcaattgcacagagccgcgcgcaccatgccaagcagtccctcgcgaatagatctggcgttaatatacacagagcattcgccctgcttccagggaggttgggtatccccgccccatccgacgaaaggggtcccgaggccgaactgccacccaaggaagagcggccctgcggaggcccacgcagaggattcgctagtattaccatcacagcaaggcgtgtcggtccacctgcccgtgctttagtctggggcacagcgggcgacagcctctgccctaagtgcagggcggaggacactctcttccaggcccctccagcacttgctaatggggcccaccctggcaggcaccagcgaagttttgcctgcactgagttttcaagaaattcctcagtcgtccggcttaaggtacccgaggctcacactggcctttgtgagcgtaggaagtattgggtgacacatgctgatgataaggagacttccttctctccagacacgcccctcagtggtaaatcgcctctggtcttctcgtcttgtgttcatctccgcgtttctcagcaatgccctgactccatttattacgtggataagtcgctgtcggtccccatcgaacctccccagatcgcatcacccaagatgcatcggtccgtgctgagcctgaaccttaattgtagctctcacagactgactgccgacggagtggatggcctcgttaatcgggagcctataagcgaggctttaaagcaagaactgctggaaggagaccaagacctggtcggacagcgatggaacccagggctccaagagtcccatcttaaggaaaccccttcattaagaagagtccatcttggcaccggcgcctgcccttggagcggcagtttcccactggaaaatactgagctggcaaacgtgggggccaaccaggtgacggtccggaaaggcgagaaggaccacactacccattgtcatgccagcgatcatgcaaaccaattgtccatacatattcccgggtggagctatcgggcaggagactacacatgttgcgatcttgttgtgaaaattaaagaatgcaagaagtccgaggaccctaccacaccagagccgagcccggctgctcctagcccagctccgagagacggcgccgggtctccaggcctctccgaggactgttcagagtctcagcagacacccgctaggtccctcaccctgcaggaagctctggaggtgcgcaaaccccagtttatcagccgttcacaggaaaggcttaagaaactggaacacatggtccagcaaagaaaagcgcagcggaaggaggacctgcgccaaaagcagagtctactgcccatccggacgtcaaaaaaacaattcacaatcccgcacccgctgtctgataatctgtttaaacctaaggagagatgcattagcgaaaaggagatgcatatgcgcagcaaaaggatctatgataacttgcctgaggtaaagaagaagaaagaggagcagcggaagcgagttattctgcagagtaatcgcctgcgggcagaggtcttcaagaagcaattgctggaccaactgttacagagaaacgccgtgtag

SEQ ID NO: 14608 - DNA, 2391 bp, synthetic construct
  misc_feature 1..2391: note = Description of Artificial Sequence: Synthetic coding sequence
  source 1..2391: mol_type = other DNA
atgcagcacagcggcatccctaccaagacccacccccagggatatgctgcacggtatactgagaccgcagtgcatcggactttccagataaaaaccttttctaccgagttgaagaatcacgtgatggtgatggatttcgttaaaagcaactggttccctagccagagacgggccaaagtgtgtataattcatatgtgccagggacttaaaaccgcagaacagactgcctctcggtatgagattcactctcgtctctttagctccccaaaggaccactctgcctgggagagaaatgagtccctgagtaacgcaggcctgcgcgactcttaccactcccgccgagaccagatagcccttaagaaccttcagtctgacgtgacagaggccaagtcagattttactaaggagactctggcctcccagaacaccaaaatgatctcaagtatcgtcatttctcagatgatcgacgagaacaaatcccgggaaaatcgggcatcccttccccttccatgcgccattgcccagagtcgcgcacatcacgctaagcaatccctcgccaaccgctcaggcgtgaacatccacagggcatttgcccttctgccaggcagacttggcattcctgcaccctctgacgagcggggtcctgaagctgaattgccccccaaagaggaacgcccatgtggaggcccaagaaggggatttgcaagcattacaataactgcccgaagagtggggcctccagctcgagccctggtgtggggtaccgcaggtgactctctgtgtccaaaatgccgagctgaagacactctatttcaggcaccacctgcattggccaacggggcacacccaggtagacatcagagaagctttgcatgtacagaattttcccgcaatagctctgtcgtacgcctcaaagtgccagaggctcatactgggttgtgcgagcgtagaaagtattgggtaacccacgctgatgacaaggaaactagcttctcaccagatacccccctgtctggcaagagcccactcgtgttctctagctgtgtgcacctgcgggtgagtcagcagtgcccggactctatttactacgtcgacaagtcactgtcagtgccaatcgaacctcctcagatagcgtctcccaagatgcaccggtccgtcctctcccttaacttaaattgcagctcgcacaggctcacagctgatggagttgatggtctcgtcaatagagagccaatttcagaggcgctaaagcaggagctgttagagggcgatcaggatttagttggccaacggtggaacccaggactgcaagagagccatctgaaggaaacacctagtctaaggagagttcacctggggactggagcatgcccatggagtggttcgttccctcttgagaacaccgaacttgctaatgtaggggcgaatcaggtcaccgtgaggaaaggagaaaaagaccacacgacccattgccacgctagcgatcacgcaaatcagctctcaatacatataccaggctggtcctatcgggcagttcacaccaaggtgttttcgggcagcagcaagagacagcagggtgaggtgtgcatgaccgttagtgccccccccgtcgagcaaaaaccgactcgccattttctgcccattggcgatagtagtccaagcgatgattgtctcagcagggacctatccgagccaactgaacggcgccatcagagcttcttgaagccaaggatcctgttccccggattcctgtgcccactgcaagatgtgtgcgcgtccctgcaggaggataacggggtgcagattgagagcaaattccctaaaggtgattatacatgttgtgacttggttgttaaaataaaggagtgcaaaaaatctgaggatccgactaccccagagcctagcccggctgcgccttcccccgcaccccgggatggcgcagggtcacccgggctgagtgaagattgtagcgagagccagcagacaccagcaagatctctgacactccaggaggccctggaggtccgcaagccacagtttatctcccgatcccaggaaagactgaagaagctcgaacatatggtacaacagaggaaggcacagagaaaggaggatttaaggcaaaagcaaagcctcctgcctattaggacgtcaaagaaacagttcacaataccacatcctctgtcggacaacctgtttaagccgaaagagcgatgtatctccgaaaaggagatgcacatgagatctaagagaatctacgataatcttcccgaagtgaagaagaaaaaggaggaacagcgcaagcgtgtcattctgcagtctaacaggctcagagccgaggtttttaagaaacagctgcttgatcagctgttgcaaagaaacgccgtgtag

SEQ ID NO: 14609 - DNA, 786 bp, synthetic construct
  misc_feature 1..786: note = Description of Artificial Sequence: Synthetic coding sequence
  source 1..786: mol_type = other DNA
atgtcgactactacgtgccaagtagttgcctttctgctgtcaattctcgggcttgctggctgcattgcagctactggcatggacatgtggagtactcaagatctctatgacaaccctgtgactagcgttttccagtatgaaggattgtggcggtcctgcgtacggcagtcgtctggtttcaccgagtgccgcccttacttcacaatcctaggactgccagctatgttacaggctgtgcgggcccttatgattgtgggcattgttttgggcgcgattggattactcgtgtctattttcgcattaaagtgcattcggatcggtagtatggaggatagcgccaaggctaacatgaccttgacgtccggtattatgttcattgtgtcagggctctgcgcgattgccggcgtgtcagtgtttgccaatatgctggtcacgaatttttggatgagcacagccaacatgtacaccggcatgggcgggatggttcagacagtgcagacgagatatacttttggagctgctttgttcgtgggttgggtggccggcggcctgacattgattggaggggtgatgatgtgcattgcgtgtcgcggactcgcaccagaagaaacaaattacaaagcagtcagctatcatgcaagtgggcactcagtagcgtacaagcctggcgggttcaaggccagcaccggcttcggatctaatacaaagaataaaaaaatttacgatgggggagcgcggaccgaggatgaggtgcagtcctacccgagtaaacacgattacgtgtag

SEQ ID NO: 14610 - DNA, 786 bp, synthetic construct
  misc_feature 1..786: note = Description of Artificial Sequence: Synthetic coding sequence
  source 1..786: mol_type = other DNA
atggcagtaactgcttgtcaggggttgggctttgtcgtgtcacttatcggaatcgccggcattattgccgccacctgtatggaccagtggtctacgcaagacctttataacaacccagtcacggctgtgttcaattatcagggactctggcgttcctgcgtgcgagagtcgtccggctttaccgaatgtcgaggatactttaccttactgggccttcccgccatgcttcaggccgtcagggctcttatgatcgttggcatagtgctgggcgcaattggattgttagttagcatttttgcactgaagtgtattcgcatcggctccatggaggactctgctaaggcaaacatgacgctgacaagcgggatcatgttcatcgtgtccgggctgtgcgcaatcgcaggagttagtgtgttcgccaatatgttggtgacgaacttttggatgtctacagcgaacatgtacacggggatgggtggaatggtacagacagtgcaaactaggtacactttcggagcagctttatttgtgggatgggtcgccggggggctgacactcatcggaggggtgatgatgtgcatcgcttgccgcggactagctccagaggagaccaattataaggccgtttcctaccacgcatcagggcattctgtggcatataaacctggaggattcaaggcctcgactggctttggctccaatacgaagaacaagaaaatatacgacggcggcgcccggacagaggacgaagtgcagtcctaccctagtaaacacgattacgtgtag

SEQ ID NO: 14611 - DNA, 753 bp, synthetic construct
  misc_feature 1..753: note = Description of Artificial Sequence: Synthetic coding sequence
  source 1..753: mol_type = other DNA
atgtcgacaaccacctgccaggtggtggcttttctgctgtcaattctgggcctggccgggtgtattgccgctaccggcatggacatgtggtcaacgcaagatctgtatgataatcctgttacctccgtattccagtatgagggattgtggaggtcctgcgtccgccagagctccggctttacagaatgcaggccgtatttcactatcctgggactgccagcaatgcttcaagccgtgcgagccttgatgatcgtcgcgatattcgctctgaagtgcatccgcattggctctatggaggattctgctaaagcaaatatgacactcacatcaggaattatgttcattgtgtccggcctgtgcgccatcgcaggagtgagcgtcttcgctaacatgctagtgactaacttctggatgtcaacagccaatatgtacaccgggatggggggcatggtgcagacagttcagactcgctacacgtttggcgcggcactgtttgtgggatgggtcgcaggaggcttgactctgattgggggcgtcatgatgtgcattgcctgccgtggtcttgctcctgaagagaccaattataaggcagtgtcctaccacgccagcggtcactctgtggcctataagcctggaggcttcaaggcatccacaggtttcggttccaatacaaaaaacaagaagatttacgatggcggagccaggacagaggatgaggtgcagtcataccctagtaagcacgattacgtctag

SEQ ID NO: 14612 - DNA, 3000 bp, synthetic construct
  misc_feature 1..3000: note = Description of Artificial Sequence: Synthetic coding sequence
  source 1..3000: mol_type = other DNA
atgggaccagctccactccccctattgttgggtttatttctgccggccctatggcgacgtgctattaccgaggcaagggaagaagccaagccctacccactcttcccaggtccttttcccgggagcctacagacagaccacacacccctcttgtctcttccacacgcttctgggtatcagcccgcgttaatgttttcacccacccagcccggtaggcctcacaccgggaacgtggcaattccgcaggtaacctcagtggaaagcaaacctctaccccctctggctttcaaacacactgtgggccacattatattatctgaacacaagggagtcaagtttaattgctcgatcagcgtgcccaatatctaccaggacaccacgatctcttggtggaaggacggcaaagagctcctgggggcacaccacgccataactcagttttatccggacgacgaggtcaccgccattatcgcatctttctctattacgtcggtgcaacggtccgataacggctcctacatatgtaaaatgaaaataaataacgaggagatcgtgtctgacccgatctacattgaagtgcagggactgccacacttcactaaacagccagagtccatgaatgtgaccaggaataccgcctttaacctgacatgtcaagccgtcgggccacccgagccggtcaacatcttttgggtgcagaactccagccgggtgaacgaacagccagagaaaagcccctccgtcctcacagttcccggcttgacagaaatggccgtgtttagctgcgaggcccataatgacaagggcctcacagtgagcaaaggggtgcaaatcaatattaaggcaatcccaagccctccaaccgaagtctctattagaaacagtaccgcacactcgatcctaatttcatgggtaccaggttttgacgggtattctccctttagaaactgctcgatacaggtgaaggaggcagatcctctcagcaacggctctgtcatgatcttcaacacaagtgcactcccccatctctatcagataaagcagctgcaggcgctggcgaactatagcatcggcgtcagctgtatgaatgagattggttggtctgcggtatcaccctggattttggctagtactaccgaaggcgcacccagcgtggcgccactgaacgtgactgtctttctcaatgagtctagcgacaatgttgacatacggtggatgaaaccacccaccaagcagcaagatggggaacttgtcgggtaccgcatctctcatgtctggcagtccgctgggatctcaaaagagctcttggaagaggtgggtcagaatgggtccagggccagaatttcggtgcaggtgcacaatgctacttgtactgttcgaattgcagcagttactaggggcggcgtgggtcctttttcggatccagtcaaaattttcataccagcacatgggtgggtggactacgccccatctagtacaccagctccaggaaacgctgatccagttctgataattttcgggtgcttctgcggattcatccttattgggctcattctctacattagccttgccatccgcaaacgagttcaagaaactaaattcgggaatgcctttacagaggaggacagtgaactagtggtgaactacatcgcaaagaagtcgttctgccgcagggccattgaactcacccttcactcattgggagtgtctgaggaactccagaacaagctggaggatgtggtgatcgaccggaacctgctcattcttgggaagattctgggtgaaggcgaatttggcagtgtgatggaaggaaatcttaagcaggaagatgggacctcactgaaggttgcagtaaaaactatgaagttagacaactccagccagagagagattgaggagtttctgtcggaagcagcttgcatgaaagacttctcccaccccaacgtcatacggctgcttggcgtgtgtattgagatgagcagccagggaatcccaaaacccatggttatcttgcctttcatgaagtatggcgaccttcacacctaccttctgtatagccgacttgaaaccggtccaaaacacatcccattacagacccttctgaaattcatggtggacattgcattaggaatggagtacctttccaaccggaacttcctgcacagggacctggccgcccgaaattgcatgttgagggacgacatgaccgtatgcgtcgccgattttggactatccaagaagatatactctggcgactattatagacagggccgaatcgccaagatgcctgttaaatggatcgccatcgagagcttggccgacagggtctacacttcgaagtcagatgtttgggcgtttggcgtaacgatgtgggagatcgcgacgcggggcatgactccctatccgggcgttcagaatcacgaaatgtatgactacctgctgcacggtcaccgcctgaagcagccagaagactgcctggacgaattatatgagatcatgtattcatgctggcggactgaccctctcgatcggcccacattctctgtcctaagactgcaactcgagaagctgctggaatcactgcctgatgtcaggaaccaggctgatgtgatttatgtgaatacccagctgctggagtcctccgagggcctggcccagggcagtactctggctccactagatcttaacattgacccagactccataattgcatcgtgcacaccccgagctgcgatctctgtggttacagcggaggtccatgactccaaaccacatgaagggcgctacattctgaatggaggctcggaagagtgggaggatctgacctcagcccccagcgctgccgtgacggcagagaagaacagtgtgttaccaggggaaagactggtccggaacggggtgagctggagccactcgtccatgctccctctcggtagctcactccctgacgagctgctgttcgccgacgactcaagcgaaggctcggaggtgttgatgtag

SEQ ID NO: 14613 - DNA, 1671 bp, synthetic construct
  misc_feature 1..1671: note = Description of Artificial Sequence: Synthetic coding sequence
  source 1..1671: mol_type = other DNA
atgaaacctcccactaagcagcaggatggggaacttgtgggctatagaatctctcatgtctggcagtccgcaggcatatcgaaagagctccttgaggaggtcggtcagaacggctcacgggcccgcatctcggtccaggtccataacgcaacctgcactgtcagaattgcagccgtgacacgtggaggcgtaggcccattttcagaccctgtgaagatcttcattcccgctcacggggaatcttacacacatgcccaaatagcacgaaatctgcataaggtgagacccgcttacatcagtttaacgatatgcagtagtctcctgcaggcgagtgtttctcacatctttcagacaatgactgggctgttggtttctacacggcttggtaggctgtgtcctctctttaatagcggcgcctggcagcgcagaagttgtgctcaccacttatggttgctcctctggatccttatcggtctcatactgtatatctccctggccattcggaagcgggtgcaagaaaccaagttcggcaacgcctttacggaggaagattcagagctggttgttaattatattgccaagaagtcgttttgtcgtcgggccatcgaactgacactccatagtctgggggtgagtgaggagttgcagaacaaattggaagatgtagttatcgaccgtaacctactgatccttggcaagattctgggagaaggagaatttggttctgtgatggaaggcaatctgaagcaggaggatggtacctctctaaaagtggccgtgaaaaccatgaagctggataactcgagccagagagaaatagaggagttcttatcagaagccgcatgtatgaaggatttttcccatcccaacgtgattcgtcttctgggcacttcggagaaatgcaggtgggtggctaagcgggcgctattgatttgcagcgtcccaaaagaaaagatctctggtgtcgacaagaattgccttcaaatacacattcccctgcagacacttctgaaatttatggttgacatcgcgctgggcatggagtacctgtcaaacagaaactttctgcacagggatcttgctgcgcgcaactgtatgttgagagatgacatgaccgtgtgtgtcgctgactttggactttcgaagaaaatatattcaggggattattatcggcagggaagaatcgccaagatgcccgtgaaatggatcgctatcgaaagcttagccgaccgggtgtatacttcgaagtcagatgtgtgggcctttggtgtgaccatgtgggaaatcgccacgaggggcatgaccccctatcccggtgtgcagaatcacgagatgtacgattacttgctacatggccaccggcttaagcaaccaactgcttggatgaattgtgatcaggtcggcatgtgtagaggggtggaacctacagacacccccgcacaggaaccatttctcatgtgggaaattgtctatgaatgcactctagcgggagaacccatccccgacagaccaaccttctctgttctgcgcctgcaattggagaagctcttagagagcctaccagatgtgcgcaaccaggctgacgtcatctacgtcaatacccagctcctggagtcctctgaagggctggccctgcacccatgctctactggcctcgagcacagaccctag

SEQ ID NO: 14614 - DNA, 2472 bp, synthetic construct
  misc_feature 1..2472: note = Description of Artificial Sequence: Synthetic coding sequence
  source 1..2472: mol_type = other DNA
atgaagatcaacaatgaagaaatcgtgtccgaccccatttacatcgaggtgcagggtcttccacatttcaccaaacagcccgaatctatgaatgtgacaagaaatacggcatttaacctgacctgtcaagccgtgggtcccccggagccagtcaatatcttttgggtgcagaattccagccgagtcaatgagcagccagagaagagtccatccgttttaacagttccaggcctgaccgaaatggccgtgttctcctgcgaggcccataatgataagggactaacggtgtccaagggagtccagatcaacataaaggccattccctcccctcctaccgaagtgagcattcgcaattcaacagcccactcgatcctaatcagctgggtgccgggcttcgacggatacagtcctttccgcaactgcagcatacaggtcaaagaagcagatcccttaagtaatggaagtgtgatgatcttcaatacttcggctctgccccatctctaccaaatcaaacagctgcaggccctggcaaattattctatcggcgtgtcctgtatgaacgaaatcggatggagtgccgttagtccctggatcctcgcctccaccaccgagggtgctccatccgtagctcctcttaacgtgacagtgttcctgaacgagtccagcgataacgtggatatccggtggatgaaaccccccaccaaacagcaggacggtgagctggttgggtatagaatctcccatgtgtggcagtccgccggcatcagcaaggaattgcttgaggaggtcggccagaatggctcgagggctcggatcagcgtgcaggtccacaacgctacctgcacggtgcgtatcgcggccgtcacccggggcggcgtgggacctttctcagatccggtaaagatctttattcctgcgcacgggtgggtcgattatgcccctagctctacccccgcacccggcaacgcagatcctgtattgattattttcggatgcttctgtggctttatcctgattggcctgatattgtacatttcccttgcgatcagaaagcgggttcaggagacaaagttcgggaacgccttcacagaggaggatagtgaactggtggtcaactacatcgctaagaaatctttctgccggagagcaatcgagctaacactgcactcgctgggggtgagcgaggaactccagaataagctggaggacgtggttattgatagaaacctgctgattcttggaaaaatccttggcgaaggcgaattcggcagtgtcatggagggtaacctaaaacaggaggacgggacttctctgaaggtggccgtcaagacaatgaagcttgacaactcctcccagcgagaaatcgaggagttcctctccgaggccgcgtgcatgaaggacttttcacaccctaacgtgatacggttactgggagtctgtatagaaatgagctcccagggaatccctaagcctatggtgattcttcccttcatgaaatatggagatttacatacatatctcctgtattctcggttggaaaccggcccaaagcatatccctctgcagactttactgaaattcatggtagacattgcattagggatggaatatctgtccaatcgaaattttctgcaccgagatcttgcagctcggaactgcatgctgagagatgacatgactgtgtgcgtcgcggacttcggactttcgaagaaaatctactccggcgattattaccgccagggacgaatcgccaaaatgccagtaaagtggatcgccatagaaagcttagccgaccgcgtgtacacttctaagagtgatgtttgggcctttggagtgactatgtgggagattgccacaaggggcatgacgccgtatcccggggtccagaaccatgagatgtatgattatctgctgcatgggcataggctcaaacagccagaggactgcctggatgaattatatgagatcatgtacagctgttggcgaaccgacccccttgaccggccaaccttttccgtgctccggctccagttggaaaagcttctcgagagcctacctgatgtcagaaaccaagccgatgtgatctatgttaacacgcagctactggaaagtagtgaaggcctggcccagggaagtaccttggcccctctggatctgaatatagacccggacagtataattgcttcttgtaccccacgcgccgcaatttctgtggtgaccgctgaggtgcatgactctaaaccacatgagggacgttacatcttaaacggaggaagcgaagaatgggaggacctcaccagcgcaccaagcgctgctgtcaccgccgaaaaaaatagcgtcctgcctggcgaaagacttgtacgcaatggggtgagctggtcacattcaagcatgctccctctcggtagttcattgccggatgaactgctcttcgcggacgactccagcgaaggctccgaggtgctcatgtag

SEQ ID NO: 14615 - DNA, 3000 bp, synthetic construct
  misc_feature 1..3000: note = Description of Artificial Sequence: Synthetic coding sequence
  source 1..3000: mol_type = other DNA
atgggaccagcgcccctcccgctgttactgggcctgttcttaccggcgctgtggagacgcgcaataactgaggctagggaagaggcaaagccctatcccttatttcctgggcccttccccggctctctgcagacagatcataccccgctgctgagcctcccacacgctagcgggtaccagccggctctgatgtttagtccaacccaacccggccgtcctcacactggcaatgtggcgattccccaggtgacctccgtggaatccaagccattgccacctttggcctttaagcataccgtaggacacataattcttagtgagcacaaaggtgtgaagtttaactgcagcatttccgttcctaacatctaccaggacacaactatcagctggtggaaggacggtaaggaattgttaggcgcacaccacgccatcacccagttctacccagatgacgaggttaccgctatcattgcatccttttccattaccagcgtgcagcgcagtgacaacggtagttatatatgtaagatgaagattaacaatgaagaaatcgtaagcgatccaatctacattgaggtgcagggacttcctcacttcacaaagcagccagagtctatgaacgtcacgaggaatactgccttcaacctgacttgtcaggcagtggggcctccagagcccgtgaacatcttctgggtgcagaacagctcccgagtcaacgagcaaccagaaaaatcaccctccgttctcacagtgcccggtctaaccgagatggccgttttctcttgcgaggctcacaacgacaagggccttactgtttcaaagggggtgcagataaacataaaggcaattccctcaccccctactgaggtgtctattcgcaatagtaccgcccactccattctcattagctgggttccagggttcgacggttacagtccattccgcaactgttcgatccaggtgaaagaggctgacccattgtccaatggctccgtcatgattttcaatactagcgccctgccgcacctgtaccaaatcaagcaactccaagctctcgcgaactattccatcggcgttagttgcatgaatgagattggctggtccgcggtatcaccctggattctggcatcaacaactgagggcgcacccagtgtcgcccccttgaacgtgaccgtgtttctaaatgaaagctccgataacgtggatattaggtggatgaaaccaccgactaaacaacaagacggcgaattggttggataccgcatctcgcatgtttggcagtccgccgggatcagcaaagagctgcttgaagaagtagggcagaacggctcgagagcgcgcatctccgtccaggtccacaacgctacgtgtaccgtgagaatcgcagcagttacccgcggcggggtgggccccttctctgatccggtaaagatctttatcccagcacacggctgggtggactatgcccctagtagtactcctgctccagggaacgctgaccccgtcttgattattttcgggtgcttttgtggatttatcctgatcggactcatcctctatatcagtctggctattaggaagcgggtgcaggaaacaaaattcggaaacgcctttaccgaggaagattccgagctcgttgtgaactatattgctaaaaaatctttttgccggagagcaattgaactgacgttgcatagtttgggggtaagtgaagagctgcagaacaagctcgaggacgtggtgattgatcggaacctcctgatccttggcaagattttgggcgaaggcgagtttggctccgtgatggagggaaacctaaaacaagaggatggaacctccctgaaagtggcggttaagaccatgaaactggataatagttctcagcgcgagatagaggagttcctgtccgaagccgcttgcatgaaggactttagccacccgaacgtgatacggctcttgggcgtgtgtattgagatgtcgtcccaggggatcccgaagcccatggttattcttcccttcatgaagtacggggatctgcatacttaccttctctattcgcggttggagacaggtccaaagcatattcccctgcagacccttctaaaatttatggtggacatagccctcggtatggagtacctgagtaacagaaactttcttcaccgtgatttggccgcgcgcaactgcatgctccgggatgacatgactgtgtgcgtcgcagatttcggtctgagtaaaaaaatctacagcggcgactactatcgtcaaggtagaattgccaagatgcctgtcaaatggatagcgatcgaatccctggccgatagggtctatacatccaagagcgacgtgtgggcctttggagtgaccatgtgggaaatcgccacacgaggcatgactccctacccaggcgtgcagaaccatgaaatgtacgattatctgctacacgggcacaggttaaagcaacctgaggactgcttggacgagctgtacgaaataatgtactcatgttggcggacagacccacttgatcgtcccacgtttagcgttctgcgcctccagctggaaaagctgctcgagtctttgccagatgttcgtaaccaggccgacgtcatctacgtcaacacccagctgctggaatcctctgagggactcgcccaaggcagtactctggctcccctggacctgaatatcgatccagatagtatcattgcaagctgcactccgagagctgcgatctctgtcgtgactgccgaggtccacgactccaaaccacatgaaggcaggtacatccttaatggaggatccgaggagtgggaggatctaacctctgccccaagtgcagccgtaacagccgaaaagaactcagtgttgcccggtgaacgcctcgtacgtaatggggtctcctggagtcatagttctatgcttcctctcggcagctcgctgcctgatgagcttctgtttgcagacgatagttctgagggttcagaggtgctcatgtag

SEQ ID NO: 14616 - DNA, 501 bp, synthetic construct
  misc_feature 1..501: note = Description of Artificial Sequence: Synthetic coding sequence
  source 1..501: mol_type = other DNA
atggcctccggcgtggccgtgtcagatggagtgattaaagtcttcaatgacatgaaggtgcggaaatcaagtacaccagaagaggtaaaaaagcgtaaaaaagccgtccttttctgcctctccgaagacaagaaaaatatcatattggaggagggaaaagaaatccttgtcggtgacgtgggacaaactgtggatgatccatatgccacctttgtcaaaatgctccccgataaagattgccggtacgctctttacgacgccacctacgagacaaaggaatcgaagaaggaggatctggtgtttattttctgggcaccagaatccgctcctctcaaatccaagatgatctacgcatcttcaaaggatgctatcaaaaaaaagcttacaggaattaaacacgaattacaggccaattgttatgaagaggtgaaggaccggtgcactctagccgagaaactaggtggctccgccgttattagcctcgagggaaaaccactttag

SEQ ID NO: 14617 - DNA, 501 bp, synthetic construct
  misc_feature 1..501: note = Description of Artificial Sequence: Synthetic coding sequence
  source 1..501: mol_type = other DNA
atggcttccggcgtggccgtgtccgacggagttataaaggtctttaacgacatgaaagtgaggaagtctagtacacccgaagaggtgaaaaaacgcaaaaaagccgtcctcttttgcctgtcggaggacaagaaaaacatcattttggaggaaggtaaagaaattctggtgggagatgtaggacagactgtggacgacccttatgcaacgtttgtcaaaatgctccctgacaaggactgtagatatgctttgtatgacgcaacttacgagacaaaagaaagcaaaaaggaggatcttgtgtttatcttttgggcaccagaaagcgcgccccttaaatcgaaaatgatttatgcatcatctaaagatgcaattaagaagaagctgacaggcattaagcacgaactgcaggccaactgttatgaggaagtgaaggatcgctgcaccttggcagaaaaactgggcggttcagccgtgattagcctagagggcaagccgctctag

SEQ ID NO: 14618 - DNA, 276 bp, synthetic construct
  misc_feature 1..276: note = Description of Artificial Sequence: Synthetic coding sequence
  source 1..276: mol_type = other DNA
atggcttcgggggttgccgtcagcgatggggttatcaaggtgttcaacgatatgaaggtcaggaaatccagtacaccggaagaggtgaaaaaacggaaaaaggccgttttgttttgcctgtctgaggataagaagaatattatccttgaagagggcaaggaaatcctcgtcggagacgtgggtcaaacggttgacgatccatacgctaccttcgttaaaatgctccctgacaaggattgtaggtacgctctctacgatgccacctatgaaacatag

SEQ ID NO: 14619 - DNA, 4101 bp, synthetic construct
  misc_feature 1..4101: note = Description of Artificial Sequence: Synthetic coding sequence
  source 1..4101: mol_type = other DNA
atgctgtctttcgtggatactcggaccttacttctgctggcggtgacgctgtgcttagctacttgccagtctttacaggaagaaacagtgcggaagggaccggctggcgaccggggaccccggggcgagcggggccctcctggcccacctggtcgcgatggggaggacggccctactggacccccaggcccaccaggtccccccggcccccctggactgggtggtaattttgccgcacaatacgatggcaaaggagttggtttagggcctggccctatgggcctgatgggccccagaggccctcctggggcagccggagcaccgggtccacagggttttcaaggccccgccggtgaacccggcgaacccggacagactggtcccgcaggtgcccgaggccctgccggccccccaggtaaagccggggaagacggacacccgggaaagccaggccgccccggcgaaaggggagtcgtcggacctcagggcgcgcgggggttccccggcactcccggactacccggcttcaaggggatacggggtcacaatggcttggatgggctcaagggccaaccgggggcaccaggagtaaagggggagcctggtgctcccggagagaacgggacgcctggtcaaactggggctcgggggctgcccggcgagaggggacgcgtaggcgctcctggacccgcgggggcacgtggttcagatgggtccgtggggcctgtaggccctgcgggccccataggttcggctgggccgcccggattcccaggtgcccccgggcctaagggagagataggtgcagtcggcaatgccggccctgctggccccgctggacctcgtggggaagtaggtctgccaggactgtcagggcccgtcggacctcctggcaaccccggcgctaacggactgaccggcgcaaagggagctgccggactgccaggcgtggccggagctcctggattgccaggccctcgtgggatacctgggcctgtgggggccgctggtgccacaggagcacgtgggctggtgggagaaccgggacccgccgggagtaagggcgaaagcggtaataagggcgagcccggttccgctggcccacaaggcccgcccggtccctcgggtgaagaaggaaagcggggcccaaatggggaggctggctcagctggtccccctgggcctccggggctccgagggtccccagggtccagaggactccccggagcagacggacgcgccggagtgatgggacctccaggttcccggggggcaagcggtcccgcaggggtcagagggcccaacggtgacgctgggaggccgggggagccaggactgatggggcctcgaggcttacccggttctccaggtaatattgggcctgctgggaaagaaggccccgtcggcctgcccgggattgatgggagacctggacccatcgggccggccggggcaaggggcgagcctgggaatattggattccccggccccaagggcccaactggcgaccctggaaagaacggagataaggggcacgctggtttggctggcgctcgcggagcccctggtccggacggcaataatggggcacagggccctcccggtcctcagggagtgcagggcgggaagggcgaacagggccctcccggacctcccggctttcaaggcctaccaggcccaagtggcccagccggagaagtggggaagccgggcgagcgaggcctgcatggcgagttcgggttacccgggcccgcagggccccgaggggaacgcgggccccctggcgagagcggggcagcaggcccaactggacccataggttcaagggggcccagtggcccaccggggcctgatgggaataaaggggagccaggagtagtgggcgctgtgggaactgcaggacccagcggaccttctggcctgccaggcgagcgtggcgctgccggcatccccggcggcaaaggcgaaaagggcgaacctgggctgcgaggggagattgggaacccagggagagatggcgccagaggagcgcctggagccgtgggcgctcctggaccggcgggcgcgaccggggatagaggcgaggctggcgcggcgggccctgccggacccgcggggccacgcggctctcctggcgaaaggggtgaggtgggccctgctggcccgaacgggtttgccggaccagccggtgcggctggccaaccaggagctaagggcgaacgaggcgcaaaaggacctaaaggggaaaacggtgtagtgggccccacaggaccagtcggggctgcgggaccagcaggaccaaacggaccgcctggtcccgctggcagcaggggagatggaggtccgcccggtatgaccgggttcccaggggcagcaggacggacgggccctccaggtccctccgggattagcggaccacctggaccaccgggaccagctggtaaggaagggctgaggggacctcgtggcgatcaaggacccgtaggacgcactggggaagtcggagcggtcgggcctccgggcttcgccggggaaaaaggcccttccggcgaggccggcacagcgggtcccccgggtacccccgggccgcagggactgctgggcgcccccggcatccttggcctgcctggttcccggggggaaaggggcctgccaggcgttgctggagcagtaggcgagcccggaccgttggggatagccggcccccccggcgctagggggccacctggggccgtcggcagcccgggggtcaacggtgctccgggagaagccggaagggacggtaaccctggtaatgatggtcctccagggcgggacggccagcctgggcacaagggcgagcgcgggtaccccggtaatattggacccgtcggcgcagccggtgcgccaggtccccacggcccagtcggccccgctggaaaacacggaaatcggggtgagaccgggccttccgggcccgtgggtcctgccggtgccgtgggccctcgcggaccctcaggtccccagggaatccgcggggataaaggagaacccggcgagaaaggcccccggggactgccaggattaaagggtcacaatggcctgcaaggactccccggaattgctggccatcatggcgatcaaggcgctccgggctccgtggggccagcaggcccccggggacctgcagggccatccggtcctgcgggcaaggatggaaggaccggccatcctgggacagttggtcccgctggaataagggggccgcagggtcaccaaggtcctgctggcccacctggaccaccaggcccacccggacctcctggagtttctggaggtgggtatgactttggctatgatggcgatttctacagggccgaccaaccaagaagtgcacccagcctccggcccaaagactatgaagtggacgctaccttgaagagcctcaataaccagatagagacattattaactcccgaaggcagcagaaagaacccagcaagaacctgtcgtgaccttcggttaagtcaccctgaatggtcaagtggctactactggattgatcccaaccagggctgcacaatggatgctattaaggtctactgcgatttcagtacaggggagacgtgcatcagagcccagcctgaaaatatcccagccaagaactggtacaggtccagtaaggataagaaacatgtgtggttgggcgagacaattaatgcaggttctcagtttgagtataacgttgaaggcgttacttcaaaagagatggcgactcaactggcttttatgaggctgctcgctaattatgcatcgcagaatatcacgtaccattgcaagaatagcatcgcgtacatggatgaagagactggaaacctgaagaaagcagtaatcctgcagggctctaacgacgtggagttagtcgcggaagggaacagccggttcacgtatacagtgctagttgacggttgtagtaagaagacaaatgagtggggcaaaacaattatcgagtataagacaaataagccatcccgactacccttcctggatattgcccccctggacattggtggcgctgatcaggagtttttcgttgatattgggccagtttgcttcaagtag

SEQ ID NO: 14620 - DNA, 4104 bp, synthetic construct
  misc_feature 1..4104: note = Description of Artificial Sequence: Synthetic coding sequence
  source 1..4104: mol_type = other DNA
atgttgtcatttgtggacacgcgcacactgctgctcttagctgtgactctgtgtctggccacatgtcagtgcacccttggcggccagacactgagcaagttccctccataccttcacatcgagcgctccgaacagggccctcccggaccccctggtcgcgacggcgaagatggccctacggggccaccggggccaccaggccctccaggaccaccgggcttgggcgggaactttgccgcgcagtatgacgggaagggcgtgggtcttggacctggacccatgggccttatggggcctcgcggtccgcccggcgccgcaggggcccccgggccacagggctttcaaggacccgcaggcgaacccggtgaacccggccagacaggtccagccggagcccgcgggcccgctggcccacccggaaaggccggcgaggacggccaccctggaaagcctgggcgacccggtgagcgcggcgtagtcgggcctcagggcgcccggggttttcctggtacaccaggcttacccggtttcaagggtatccgaggacataatggacttgacggtcttaagggtcaacctggagcacctggggtgaagggggaaccgggcgcccccggtgagaatggcacaccaggccaaactggggcccgcggcttgccgggtgagcgtggaagggtgggggcacctggccctgccggtgcccgcggctcagacgggagcgtaggccccgttggccctgcggggcccatcgggtctgcaggtccgcccgggtttccaggagctccaggtcccaagggggaaatcggagccgtgggcaatgcagggcccgccggccctgcgggtccaagaggtgaagtaggactgcctggcctgtccggtccagtcgggcctccaggaaatcccggggcaaatggccttacaggcgcaaagggagcggccggccttcccggagtggccggtgccccgggattgcccggcccacgcggaattccaggcccggtaggggcggccggagctaccggcgcacgcgggttggtaggcgagccaggcccagctgggagtaagggcgaatccgggaataaaggtgagcctggtagtgcgggaccacaaggtcccccaggcccatcaggtgaagaaggtaagagagggcccaatggggaggccggttcagcgggacctccgggccctccgggtctccgagggtcccctgggagtagagggctgcctggagccgatggccgagccggcgtcatgggcccgcccggatcccggggcgctagtggacccgcaggagtgcgaggacctaatggcgatgcaggcagaccgggcgaaccggggctgatgggaccaaggggactgcccggatcccctgggaatatcggccccgccggcaaagagggacctgtcggactaccaggtatagatggccggcccgggcctatcggtcccgccggcgctcgcggagagcccggaaacatcggcttcccaggcccgaagggccctactggagatcccgggaaaaacggtgataagggacacgccggcctggctggcgcgagaggtgcccccggacccgatggcaacaacggcgcccagggcccacccggccctcagggggtccaaggcggaaagggggagcagggcccccccggcccacccggatttcagggactgcctgggccctcaggccctgctggagaagttggcaagccaggggaaagaggtctgcatggagaatttgggctgccgggccccgccggacctagaggcgaacgcggacccccaggggagagtggcgcagctggccctactggtcctattggctccagaggtccgtcagggcctcccggacccgatggaaataagggagagcccggggttgtgggggctgtaggtaccgctggacctagtggacccagcggactcccaggggagaggggggccgcaggcattccaggaggcaagggcgagaagggtgagccaggcttgcgtggcgagatcgggaatccaggccgggatggagctcgaggagcgcccggagcagtaggagccccaggtcccgcgggggccactggcgaccgaggagaggcaggagctgctggaccggccggccccgccggcccacgaggctcgccaggagaacgcggggaggtggggccagcgggacccaacggcttcgccggaccagccggcgctgcgggccaacctggcgccaaaggagagcgtggggccaaaggacccaagggagaaaacggtgttgttggccccaccggcccggtgggcgctgcaggcccagccgggcctaacggcccaccaggcccagcaggatccaggggtgacgggggtccccctggaatgactggattcccgggcgcagcaggccgcactggtccacctgggcccagcggcatttccggtcccccggggcctcctgggcctgccggcaaagaaggactgaggggacctcgcggggatcaaggtcccgtgggtcggacgggagaagtgggggccgttggaccccccggcttcgctggtgaaaaagggcccagtggggaggcaggaaccgccggccctccggggactcctggtccgcaggggttattgggcgcccctgggattctaggactcccaggcagccggggtgaacgaggtctccctggtgttgccggagctgtaggagaacccggaccactgggaattgccggcccccccggcgccaggggcccacccggcgcggtgggatctcccggcgtgaacggtgcaccaggggaagcaggcagggatggaaatcccggaaacgatgggccacctgggcgcgacggtcaaccagggcacaagggcgagcgcgggtatcctggtaacatcggccccgtaggggccgcgggtgcacccggaccccacgggcccgtggggccagctggtaagcatggcaatcgcggtgaaaccggcccctccggacccgtgggcccagcaggcgcagttggtcctagaggcccatccggcccccagggcattcgcggggataagggagaaccgggggagaagggcccaaggggtttacctggtctgaaaggccataacggactgcaggggctccctggaattgctggacatcacggcgaccaaggagcccctgggtcagttgggccagcaggcccgaggggtccagcaggtcctagcggtccggccggtaaggatggccggactggccaccccggcacagtcgggccggcaggcattagagggccccagggccaccagggacctgccgggcctcccggcccgcccggtccccctggcccacctggagttagtgggggggggtacgactttgggtatgatggtgacttttaccgggcagatcagccaagaagcgcaccaagcctccgtcccaaagattacgaggtggatgccaccctcaagagcctaaacaatcagatcgagaccctattgacaccagagggatcccgtaagaaccccgcccgtacatgccgggacctgcgactttcccatccagagtggtcgagcggatattactggattgatccaaatcaagggtgtactatggatgcgataaaggtgtactgcgatttcagcaccggagagacctgcattcgggcccaaccggagaatatcccggctaaaaattggtatcgaagctccaaggacaagaagcacgtctggcttggcgagacaattaatgctggatcacaattcgagtataacgtggagggcgttacgagcaaagaaatggccacacagctggcatttatgcggctgctggcaaattacgcctctcaaaatataacttaccattgtaaaaattcgatcgcctatatggacgaagagaccgggaacttgaaaaaggctgtaattttgcaagggtcaaatgatgtagagctagtggctgaggggaatagtcgttttacttacactgtcctggtggacggttgttcaaagaagaccaacgaatggggcaaaactattatagagtacaagactaataagccatccaggctgccttttctcgacatcgccccattagacatcggcggcgccgaccaggagttttttgtggatatcggaccagtgtgttttaaatag

SEQ ID NO: 14621 - DNA, 4401 bp, synthetic construct
  misc_feature 1..4401: note = Description of Artificial Sequence: Synthetic coding sequence
  source 1..4401: mol_type = other DNA
atgatgagtttcgtacagaaaggatcttggttgctactcgcgctgctgcaccctaccattattttagctcaacaggaagctgtagaaggcggttgttctcacctgggtcaaagctacgctgaccgtgatgtctggaaacccgagccttgccagatctgtgtgtgcgactcaggatcagtcttgtgcgatgatatcatctgcgacgaccaggaattagattgtccaaatcccgagattccatttggggagtgctgtgctgtgtgcccccagcccccgacagcccctactaggcctccgaacgggcaggggccccagggccctaagggggatcccgggcccccaggcatacccggtcgaaatggcgatcccggaatcccaggccagccgggcagccctgggagccctggccccccaggaatctgtgagtcttgccccactggtccccagaactacagcccacagtacgattcttatgatgtcaagtcaggagtggctgtgggtggactcgctggataccccggacctgcaggtccccctgggccccctggtcccccgggcactagcggacacccaggttctccaggctctcccggttaccaaggcccaccgggtgagcccggacaagcaggcccttcagggccccccggcccacctggggcgataggccccagcggccctgctggaaaagacggagagagtgggcgtccagggcgaccaggcgaacggggcttgcccggacctcccggtattaaagggccagctggcattccgggattcccgggaatgaagggtcacagaggctttgatggccgaaacggtgagaaaggggaaaccggagctcccggcctgaaaggggaaaacggcctccccggcgagaacggcgcccctggaccgatgggccctagaggagcccccggcgagcgaggtagacccgggctgcctggagcagctggtgccaggggtaacgatggagctagagggagcgacggacagcccgggccacccgggcccccaggtactgctggattcccaggaagccccggagccaaaggtgaggtgggccccgcaggctcaccggggtccaatggcgccccaggccaacggggggaaccagggccccaaggccacgctggcgcccaaggacctcctgggcccccagggattaacgggtctcccggcggaaaaggtgagatgggccctgccggcatacctggagccccaggactgatgggggccagggggccacccgggcccgccggtgctaacggcgccccaggtttgcgggggggcgcaggcgagccggggaagaacggggccaaaggcgaacccggccccagaggggagagaggagaggccggtattcctggcgtgccaggtgcaaagggtgaggatggcaaagacggaagtcctggagagcctggcgccaacggactgcctggcgctgccggcgagagaggggcacctggctttcgggggccagcaggccctaacgggattccgggcgagaagggcccggccggagaacgaggggcccccggcccagctggaccacgaggggcagccggcgagccaggccgggacggagttccagggggtcccgggatgcgcggcatgccaggaagccctgggggtccaggctctgacggcaagcccgggccgccagggagtcagggggagagtgggaggcctggcccccctgggccgagtggcccccgcggccagcccggggtcatgggatttcccggacctaaaggcaacgatggtgccccaggcaagaatggcgagcggggcgggccgggcggccccggcccccagggccctcccggaaagaacggcgagactggcccccagggaccgcccggacctacagggccgggcggggataaaggtgacaccgggcctcccgggccccagggcctgcaggggctccctgggacaggtggaccccctggcgagaatgggaaacccggcgaaccaggtccaaaaggggacgccggcgcccccggcgctcctggggggaagggcgatgccggagcccccggcgagcggggacccccgggtctagctggagcccctggcctcaggggaggggccgggccgcccggacccgagggaggcaagggggcagcaggaccccctggccccccaggcgcagctggaactcccgggcttcaaggcatgccgggcgaaaggggcgggttgggatcacctgggcccaagggagacaagggcgagcccggcggcccgggtgccgatggggttccgggaaaggatggtcctagagggccgacgggccccatcgggcctcccgggccagccgggcagcccggtgataaaggggaaggcggagcccctggattgcccggaatcgctgggcccaggggttctcctggcgagaggggcgagaccggaccccctggcccagctggctttccgggagctccaggccagaatggcgaacctggaggaaaaggcgaaaggggcgcgccaggggagaagggtgagggtggaccgccaggtgtggctgggcctccgggtgggtccgggcccgccggacctcctggcccacaaggcgttaagggcgaacgaggatctcccggaggccccggtgccgcgggatttcccggtgcccgggggcttcccggacctcccggtagcaatgggaaccccgggccaccgggaccttcagggtccccagggaaggatggccctcctgggcccgctggaaataccggcgcccctggtagccccggggtgtccggtcctaaaggagatgccgggcagcccggcgagaagggtagcccaggtgcccaaggaccgcccggagcccccgggccgctgggcatcgcaggtatcacaggcgcccgaggactcgcggggccaccgggcatgcctggacctaggggatctccagggcctcagggcgtcaagggagaaagtggaaaaccaggggcgaacggactcagtggggagagaggaccacccggcccacaaggactccccggcttagctggcaccgctggggagccagggcgagatggtaatcccggcagcgatggactccctggccgcgatggtagtcccgggggtaagggtgataggggagaaaatggtagtcccggcgcccctggcgctccaggtcacccagggcctccaggtcccgtaggcccagccgggaagtccggggaccgaggcgaaagcggcccggccggccccgccggagcacccgggcctgctggctcccgcggtgcccccggccctcagggtcccaggggtgataagggcgagactggggagagaggagcagcgggcattaaagggcacagaggctttcctggcaatcccggtgccccaggttcgcccggccctgcaggccagcagggagccatcggctcccctgggcccgcagggccccgcggacccgtcgggccttcaggcccccccgggaaagacggcacaagcggtcatcctggaccaatcggtccaccgggcccacgtggcaaccggggcgagagaggctccgaaggctcacccgggcatccaggccagccaggtccgccgggacctcccggcgcgccgggcccgtgctgtggcggagtaggcgccgcagcaattgcaggcattgggggcgaaaaagcagggggcttcgcaccatattacggagatgagcccatggattttaaaatcaatacagacgagattatgacaagcctaaaaagcgtgaacggccaaatcgagagtctgatctctcccgacggatcccgaaagaatcctgcccgcaactgtagagacctgaaattctgccacccggagcttaaatctggggaatattgggttgacccaaatcagggctgcaagctggatgccatcaaagtgttttgtaacatggagactggggagacgtgcatttctgccaatccattgaacgtgccccgcaagcactggtggactgactctagcgccgagaagaaacacgtgtggttcggggaaagcatggacgggggttttcaattctcgtacggaaatcccgagctgcctgaagacgttctcgatgtgcacctcgcctttcttagactgttgagttctcgtgctagtcaaaatatcacctaccactgcaagaactcaatagcatatatggatcaggcaagcgggaatgtgaaaaaggccctgaaactgatggggtcaaacgaaggagaatttaaggcggaaggtaacagtaagttcacctacaccgtgctggaggatgggtgcactaagcacactggggagtggagcaaaaccgtgtttgagtacaggacccgcaaggcagtaagactacctatcgtggatatagccccgtacgatataggaggcccagatcaggagttcggagttgacgtgggaccagtatgtttcctgtag

SEQ ID NO: 14622 - DNA, 3492 bp, synthetic construct
  misc_feature 1..3492: note = Description of Artificial Sequence: Synthetic coding sequence
  source 1..3492: mol_type = other DNA
atgatgtcctttgttcagaaaggaagctggctgctactggctctgttgcacccgaccataatcctggcgcagcaggaggcagttgaaggcggctgtagccatctgggccagtcatacgcagacagggacgtatggaaaccggaaccctgccagatatgcgtctgcgactcagggagcgtgctctgtgatgatattatttgcgatgaccaggagctggactgtccaaatcccgaaattccgtttggcgaatgttgtgcagtgtgtccccagcccccaactgctcctacccgtcctcctaatggccaaggtccacagggacccaagggagacccaggaccaccaggaataccgggaaggaacggtgaccctggaatcccaggacagcctgggtcgcctggtagcccaggccctccggggatatgtgaatcatgtccgaccggccctcagaattactccccacagtacgactcctacgatgtaaagtcgggggtcgccgtaggcggactagccgggtatcctggccccgcgggacctccaggaccgcctggccctcctggtacatcaggacaccccggatcgcccgggtcccctggttatcagggacctccaggagagcccggacaggcaggtccttctggccctccaggacctccaggcgctataggtccaagcggacccgcagggaaggatggagagagcggaagaccaggtagaccgggcgagcggggtttgccaggaccgcccggtatcaagggccccgccgggatcccgggtttcccgggaatgaagggccaccggggattcgatggacggaacggtgagaaaggtgaaactggggcaccaggcctgaaaggggagaacgggctgcccggagagaacggcgctcctgggccaatgggcccaaggggcgctccaggcgaaagaggccggccaggtctaccaggcgctgccggtgctcgcggaaacgatggagcccgtggaagcgatggacagccgggtccccccggacccccgggcacagcgggtttcccaggatccccaggtgctaagggtgaggtgggccccgcagggtctccaggatctaacggagcaccaggacagcgcggcgagccaggtccccaaggccacgctggagctcaggggcccccaggcccgccagggattaacggtagccccgggggcaagggtgagatgggtcctgccggcatccccggggcacccggcctgatgggggctcggggtcctcccggtcctgccggtgctaacggagctccagggcttcgaggtggggccggagagcctggaaaaaatggtgctaagggcgagccaggtcctcggggtgagcggggcgaagcaggaatccctggggttcccggcgccaaaggagaggacggcaaggatggtagcccaggggagcccggagccaatggcctccccggagccgcaggtgagaggggggccccgggcttcagaggacccgctggacccaacggaattcctggggagaagggacctgctggcgaaaggggagccccgggtcccgctggcccaaggggagctgccggggagccgggtcgagatggcgtccctggaggcccggggatgagaggaatgccaggctccccaggtggcccaggcagtgatggaaagcccgggccgccaggatcccagggggagtcaggacgtcccggccctcctgggccatctggacctaggggtcaaccaggcgtgatgggtttccctggccctaagggaaacgacggagcacctggcaagaatggagagcgcggtggccctggcggccctggcccacaggggcctcccggcaaaaatggtgaaacaggcccccaggggccaccgggacccaccggtcccggtggcgacaaaggagatactggccccccaggaccccaggggctgcaagggttacccgggaccggaggcccccctggagaaaacggtaagcccggagaaccgggaccaaagggagatgctggcgctccaggcgcaccagggggcaaaggagacgccggagcccccggcgagcggggaccgcccggactggctggggcccctggcctgcgcgggggcgctgggccccctggacctgaaggagggaaaggagccgcgggcccacccggcccgcccggggccgccgggacccccggactccaggggatgcctggggagcgtggagggctgggttcacccggtcccaaaggagataagggcgaacctggtggtcctggcgcggacggagttcctgggaaagacggaccccgagggcccactggcccgatcggcccccccgggcctgctgggcagcctggggataagggcgaggggggggctcccggtctgcccggcattgcaggtccccgcgggagtcccggagagcgtggcgaaactggcccccccgggccagccggatttcctggagcccctggccagaatggggagcccggcgggaagggtgaacgaggggcgccgggcgagaagggagagggagggccaccgggactgttcggacctccaggcaaagatggtacctcaggccaccccggccctatcggaccccccggaccacgcggaaatcgcggagagcgaggttccgaaggatctcctggacatccaggtcagcccgggccacccggcccacctggagctccaggaccatgctgcggaggggtcggcgccgcagctattgctggaattgggggtgagaaagccggtgggtttgccccgtattacggtgacgaacctatggacttcaaaattaatactgacgagatcatgactagtctgaagtcagtcaatggccaaatcgaaagcctgatttctcctgacggctcaagaaaaaaccccgcccggaactgccgggacctgaagttctgccatcccgagctgaaatcaggcgagtattgggtcgaccctaaccaggggtgcaagctggatgcaatcaaagtattctgcaatatggagactggagagacatgtattagcgctaaccctctaaatgtgcccagaaagcactggtggaccgacagtagtgccgagaagaaacatgtttggttcggcgagagtatggacggaggatttcaattttcatacgggaacccagagttgcccgaggacgtgctagatgttcatcttgcctttctgcggctgctgagtagcagagcctctcaaaacatcacttatcactgcaaaaactcaattgcttacatggatcaggcttccggcaatgtcaagaaggcgctgaagcttatgggatctaacgagggagagttcaaggccgaaggaaatagcaagttcacatatactgtcttagaggatgggtgtacaaaacacaccggagagtggagtaagaccgtgtttgaatatcgcacccggaaggcggtgcggctgcctattgtcgacattgcaccttacgacatcggcggccccgaccaagaattcggcgtagatgtcggtccagtctgcttcctctag

SEQ ID NO: 14623 - DNA, 5139 bp, synthetic construct
  misc_feature 1..5139: note = Description of Artificial Sequence: Synthetic coding sequence
  source 1..5139: mol_type = other DNA
atgggccgagaccaaagggcagttgccggccccgctttgaggcgctggctcctgttgggcaccgtgactgtcggctttcttgcccagagtgtgctggccggcgtaaagaaatttgacgtgccatgcggcggtcgcgactgctctggcggatgtcagtgctaccccgagaaaggtggaagagggcagccaggccctgtgggaccccagggttacaatggtccgccgggccttcagggatttcccggtttgcaaggacgcaagggtgataaaggggaacgcggtgcccctggcgtaactggccctaaaggagacgtgggagcacggggcgtgtctgggtttcctggcgccgatggcatccccggtcacccaggccagggcggaccccgcggcagacccggctacgacggctgtaatggcacgcaaggcgattcaggtcctcaggggccgcctggaagcgaggggtttactggtcctccaggcccccaaggtcccaagggccagaagggggagccctacgccctgccaaaggaggagagggaccggtatcggggcgagccaggtgagcccggtctggtaggcttccagggaccaccaggccggccaggtcacgtgggacagatgggccctgtcggtgctcctggtagacccggccccagctctgatgaaagcttcaaaaataagcttaaaaataaaggcctgaactattatacagtcaacagtatgcagggagacgtcggccagccgggccctaatggtatcccgtcagataccctgcatcccataatcgcccccacaggcgttactttccacccagatcagtataagggacccgtgggctggaggggacggccctgggtggccgggatcagtctaaagggcgaggagggcattatgggcttccccggtctgaggggctacccaggcttgtcaggcgaaaaggggtctccaggccaaaaaggatcaagagggctggatggttaccagggtcctgacggcccgcggggccctaaaggcgaagctggcgaccctggtcccccaggtctcccagcctattcaccacacccatctctggctaagggagcaaggggcgaccccggctttcctggcgcgcagggggaacccgggagtcagggcgaaccgggagatcccggactgcccggacctccagggctatcaataggcgacggggaccaaagacgaggcctccctggagagatgggaccaaagggtttcatcggggatccaggtattcccgccctctatggggggcccccaggccctgatggaaagcggggacctcctgggcctccaggcctccccggaccccccggtccagacggatttcttttcggcttaaaaggggccaagggtcgggctgggtttcccggactcccaggctcacctggggcccgtggacccaaggggtggaaaggagacgctggagagtgtcggtgcactgagggagacgaggcaattaagggcctccctggtctcccaggaccaaaaggattcgcaggaattaacggcgagcctgggcggaagggggaccgcggcgaccccggacagcacggattacccggcttccctggattgaagggcgtgcctgggaacattggcgcaccaggcccaaagggcgccaaaggagactccagaacgatcactactaagggagagcgcggtcagcccggggtccccggggtgccggggatgaaaggggatgatggctctccagggcgcgatgggctggatggatttccgggcttgcctggtccgcccggtgacggcatcaagggacctccaggtgatcccgggtatcccggtattccagggactaagggtacccctggcgagatgggacctccaggccttggtctgccaggattaaaaggacagcgcggctttccaggagatgccggcctccccggccctcctggattcttgggacccccagggccagcgggaactcccggccagatagactgcgacaccgatgttaagagggccgtgggaggagatagacaagaagccattcaacctgggtgcataggagggccgaagggcctgcccggcctacctgggccaccaggacccactggggcaaaaggcctcaggggcattcccggttttgctggcgccgatggcggacctggcccccggggcttacccggcgacgccgggagagaaggctttcctggtccaccaggctttataggtcccagaggtagcaaaggggctgtgggtctgccgggacccgacgggtcaccaggtccaattggcttgccaggtcccgacggcccgccaggcgaacgcggccttccaggggaggtattgggggctcaaccgggacccagaggggacgcaggagtgccgggacagcctgggctgaaaggcctgcccggagacagagggcccccagggttccgcggcagccaagggatgcccggaatgccaggcctaaaggggcaacccgggttacccggcccatctgggcagcctgggctttacggccctccaggcctgcatggattccctggtgcacccggccaggagggaccacttggcttgccggggattcctggccgggagggcttacctggtgacagaggtgatcccggagacactggagcccccggcccagtggggatgaaggggctctcaggagatcgaggtgatgctggctttaccggagagcaaggacatcctgggtctcctggctttaaaggtattgacggtatgccaggcactcccggactcaagggagaccggggaagtccaggaatggacggatttcagggcatgcctgggcttaagggcagaccagggttccccggctctaagggcgaagctgggttttttgggattccaggccttaaaggccttgccggcgagcccggatttaaaggaagcagaggggatcctgggccacctggacccccacctgtgattctccctgggatgaaggatataaagggggaaaaaggagatgagggccccatgggcctgaagggttatctgggtgccaaaggtattcagggtatgcccggcatacctgggttaagcgggattcccggtctgccgggccggcccggccacatcaagggggtgaaaggggacattggggtgcccggaattcccgggctacccggcttccctggggttgcggggccgcctggcattaccggttttccagggttcattgggagcagaggcgataagggggcacccggccgagccggcctgtatggtgagattggcgccactggagattttggcgacataggggatacaataaacttgcccggacgtcccgggctcaaaggcgagcggggtacaacggggatcccaggcctgaaaggttttttcggtgagaaggggacagagggagatattggcttccccggtattaccggagtaacaggggtccaggggcctccaggacttaaagggcagaccgggtttccgggactgacagggcctcctggttcacagggcgagctcgggcgcatcggactgcccggggggaagggcgacgacggctggcccggagccccaggcttgcctgggttcccaggtctgagagggatccgagggctgcacggcctgccagggaccaaaggatttcccgggagtccggggtctgatattcacggagaccctgggtttcctgggcccccgggtgagaggggtgatcctggggaagctaatacccttcctggccctgtgggggtgccgggccagaagggggaccagggcgccccaggagagcgggggccccccggctcaccaggcctacagggttttcccgggatcactcctcctagcaatatttcaggcgcacctggcgacaaaggagcaccaggaatcttcggcctgaaaggatatcgcgggccccccggaccaccaggcagtgccgcgttacctggatcaaagggagatactggcaatccgggtgcccccggtacacccggaaccaagggctgggccggcgattcaggaccacagggcagaccaggtgtgttcggcctccccggggagaagggcccgagaggggagcaaggttttatgggaaacactggcccaacgggggcagtgggggatcgaggtccaaagggacccaagggcgacccaggcttccctggagcacccggtaccgtaggggctccgggtatcgctggcatccctcaaaagatcgctgtccagcctggaacagtgggaccccagggtagaagaggccctcccggtgcacctggagaaatgggtccccaggggccacctggcgaaccgggattccgtggagcccccggtaaagccggtccacagggccgcgggggtgtgtctgccgtgcctggatttcgcggcgatgagggtccaattggccaccaaggtcctattgggcaggagggtgctcctggaaggcccggatccccaggattgcctggtatgccaggacggtcagtgtctatcggctacctattggtgaaacatagccagacggaccaggaaccaatgtgccccgtggggatgaataagctttggtcgggctactctttgctttacttcgagggccaggaaaaagcacacaatcaggatctcgggctcgccggttcatgtctggccaggttctcaaccatgccttttctctactgtaatcctggggacgtgtgctattatgctagccggaatgacaagagttactggctatccaccacagctcccttgccgatgatgccagtggccgaggacgagatcaaaccctatatctctaggtgtagcgtctgcgaggctcccgccatagctatagccgtgcattcccaggatgtgagcatcccacactgtcctgcgggatggagatcgctctggatcgggtattctttcctcatgcacaccgccgccggggatgaaggcggaggccagagccttgtctcacccggctcctgtttagaagatttccgtgccacaccattcattgagtgcaatggcggccgggggacttgccattattacgccaacaaatattccttttggttaacgacaattcctgaacaatcctttcaagggtctccctcggccgatactttaaaagccggtttgattcgcacgcacatctccaggtgccaagtttgtatgaaaaacctctag

SEQ ID NO: 14624 - DNA, 5139 bp, synthetic construct
  misc_feature 1..5139: note = Description of Artificial Sequence: Synthetic coding sequence
  source 1..5139: mol_type = other DNA
atggggcgcgaccagagggccgtcgcaggtcccgcgttacgcaggtggctgcttttgggcactgttactgtgggctttcttgcccagtcagttttggccggcgtgaaaaagtttgatgtgccatgtggaggtagggattgttcaggaggatgccagtgctaccctgaaaaaggagggaggggccagcccggaccggtgggacctcagggatacaatggaccacctggcctgcagggatttcctggcctgcagggaagaaagggagataaaggcgaacggggagcaccaggcgtgacaggacctaagggggatgtcggggcacgcggggtttcaggcttccccggggctgatggcattcctggccacccaggccagggtgggcccaggggaaggcctgggtatgacggttgcaacgggacccaaggagacagcggccctcagggtccccccggatccgaggggttcactggccctccaggcccacagggtcctaaagggcagaaaggggaaccttacgccttgccaaaggaagagcgcgataggtacagaggcgaaccaggggagcccggtttggtgggcttccaaggtcccccaggacggccaggtcacgtcggccagatgggtccagtcggagccccagggagacccgggccacccggtcctcccgggccgaagggccaacaaggtaatcgaggtctcggcttctatggcgtgaaaggcgaaaaaggagacgtggggcagcctgggcctaatggcatacctagtgataccctgcatccaattattgccccaaccggagtgacatttcacccggatcagtacaaaggtgagaagggtagtgaaggtgaacctgggataagaggtatttcactgaaaggggaagagggaatcatggggtttccgggtctcagaggttatcccggactgtcgggagaaaaaggatcacccggccaaaagggcagtcgcggactagatgggtatcaagggcccgacggcccccgaggacccaaaggcgaggcaggggatcccggcccgcccggacttccagcatatagtccccacccatctttggccaagggagctcggggtgatcccggcttcccaggagcccaaggagagccaggctctcagggcgagccgggtgaccccggacttcccggtcctcccggcctgtctatcggagacggtgatcagcggaggggcctgcccggagagatggggcctaagggattcataggcgaccctggcattcctgcgttgtacggcggcccaccaggcccagatggaaagagagggcccccaggcccccccgggctgcccggcccccctggtcccgacgggttcctcttcggactgaagggtgctaaaggcagggccggattccccggtctgccagggtcacccggcgcccgggggcctaaaggctggaagggtgacgccggtgaatgccggtgcactgaaggcgacgaggctatcaagggcctgcctggtttgcccgggcccaaggggtttgccgggatcaacggggagccggggcggaaaggggatcgtggagacccaggccagcatggactgcccgggttccctggtcttaagggcgtgcctggcaacattggcgctcccggtccgaagggcgctaagggggactcaagaacgatcactacaaagggggagcgcggtcagcccggcgtgcctggggtgccggggatgaaaggagatgacggatcccctggacgggacggcctcgacggattccccggccttcctggacctcccggcgatgggataaaggggccccccggagaccccggttatccagggatccccggcacaaaaggcactcccggagaaatgggccctcctggccttggactgccaggcctgaagggccagcgcggttttccaggcgatgcaggcttgccggggccaccgggctttctggggccacccggacccgcggggacacccggacaaatcgactgtgatacagatgttaaacgtgcagtggggggagaccggcaagaagctattcaaccaggatgtatcggtggcccgaagggactgcctggtctgcccgggccaccggggcctaccggggctaagggtttacgcggaatcccaggttttgcaggggcggacggtggtccaggacctcgtggactccctggggacgccgggagagaggggttcccgggacctccgggctttattggtcctcggggctccaaaggggcagtcggactccctggccccgacggttctcctggccccatcggcctgcccgggccagacggcccccccggcgaacgcggtcttcctggcgaggtcctgggcgcacagcccggacccagaggggacgctggcgtgcccggacaaccaggcctcaaggggctgcctggcgatcggggcccacccggattcaggggttcgcagggcatgcctggaatgcccggcctgaaggggcagcccggtctgcctggcccgtcaggtcaacccggcttgtacggccctccagggctgcatggattccccggcgccccaggccaagaaggtccacttgggctccctggtattcctggcagagagggactgcccggggacaggggagatccaggagacactggcgctcctggccccgtgggcatgaaagggctatcaggcgatagaggggacgctgggttcaccggagagcagggtcatcctggtagcccaggattcaaaggaatagacggaatgcctgggactcctgggttgaagggagaccgcggtagtcctgggatggatggctttcagggcatgccaggactcaagggacgcccagggttcccgggatccaagggagaggctggcttctttggaattcccgggctaaaaggcctggcaggcgaaccaggctttaagggatctagaggagatccaggaccccccggcccccctcctgtgatcctccccggtatgaaagatatcaaaggagaaaagggtgatgagggcccaatgggcctcaagggatacctgggcgctaaaggcattcaagggatgccagggattccagggctttccgggatcccagggttgcccggtaggcccggccacataaagggtgtgaaaggggatatcggagtgcccggcatccctggtcttcctggctttccaggagtcgccgggcctccagggattacaggtttccccgggttcataggctctcggggagataagggggcgccaggacgggccgggctatacggtgagataggagctaccggcgacttcggcgacataggtgataccatcaatctccctggacgacccggtctgaagggagaacgcggaacaaccggcatcccaggcctgaagggcttcttcggggaaaaaggtactgaaggagacattggattcccaggaattaccggggtaaccggtgttcagggaccgccaggtctgaaggggcagaccgggttccccggactgacaggtccaccaggctcacagggcgaactcggacgaattggactcccaggcggtaaaggtgatgacggctggcctggagcacctggtttacctggcttccctggcctgagggggattaggggtcttcacggtctgcccggcaccaagggtttcccgggcagccctgggagcgatatccatggagatcctggctttccaggcccaccgggcgaaagaggtgatccaggggaggcaaacactcttccaggccctgtgggagtgccaggccagaaaggggaccagggtgcaccgggcgaacgggggcctcctggctctccaggcttgcagggattccctgggatcaccccaccttcaaatatttcaggagccccgggagataaaggcgccccaggcatcttcggattaaaaggatataggggcccacccggacctcccggcagcgccgcattgccagggagtaagggcgatacaggcaatcctggcgccccaggcacaccaggcactaagggttgggccggggattccggccctcagggcagacctggagttttcggccttccaggcgaaaaggggccaagaggagagcaagggttcatgggaaacactggtcccaccggtgccgtgggcgataggggacccaaggggcccaaaggcgaccctggcttcccgggcgctcccgggacagtgggtgctccaggtatagccggcattcctcagaaaatcgccgtccaacccggaaccgtgggtcctcagggccgaagagggcccccaggagccccaggggaaatgggccctcagggccctccaggagaacccggattccgaggtgcacctgggaaggcagggccccaagggcgcggaggtgtctccgcagtgcctggattccgaggcgatgagggacccatcgggcatcaggggccaataggtcaggagggcgctccaggacggcccggatcccctggactgcctggtatgccaggtcgcagtgtgtcaatcggctacctgcttgtcaagcactctcaaaccgaccaagagcctatgtgtcctgttggtatgaataagctgtggagcggctattcactcctctatttcgaggggcaagagaaagcccataaccaggacttgggactggcaggcagctgcctcgctcgattcagtacgatgcctttcctgtactgtaaccccggagacgtgtgctactacgcatctcgtaacgacaagtcttactggctgtccacaaccgcccccctccccatgatgccagtagcggaagatgaaattaagccttatatcagcagatgttcagtgtgcgaagcgcccgctattgcaatcgcggttcactcccaggacgtaagtattccacactgcccagctggatggagaagcctgtggattggctatagttttttaatgcatacagctgctggtgatgagggtggtgggcagtctcttgtttctcctggaagttgcttagaagatttccgtgctacaccatttattgaatgtaacggagggagggggacatgccattattatgcgaacaagtactccttttggctgacaacaattccggaacagtcatttcaggggtccccctcggcagacactttgaaggccggtctgatacgcacacatattagccgctgccaggtttgcatgaaaaacctgtag

SEQ ID NO: 14625 - DNA, 318 bp, synthetic construct
  misc_feature 1..318: note = Description of Artificial Sequence: Synthetic coding sequence
  source 1..318: mol_type = other DNA
atgggcagggaccagcgtgctgttgccggaccggccctgaggagatggctgttgctcgggaccgtgacagtgggttttctggcgcagagcgtccttgccggagtaaaaaagtttgacgtcccctgtgggggccgagactgttcgggcgggtgtcaatgttatccggagaaaggtggccggggccagcctggccccgttgggccacagggatataatggaccccccggactgcagggcttcccggggcttcaggggcgtaaaggcgacaaaggagagaggggtgcccctggagtaactggtcctaaaggggatgtgtag

SEQ ID NO: 14626 - DNA, 4497 bp, synthetic construct
  misc_feature 1..4497: note = Description of Artificial Sequence: Synthetic coding sequence
  source 1..4497: mol_type = other DNA
atgtccgcgcggaccgcgcctagaccccaggtactgcttcttcctctgctcttggtcctgcttgccgccgcccccgccgcttccaaaggatgtgtgtgcaaggacaagggccagtgcttttgtgatggtgccaagggagagaagggcgaaaaaggattccccggcccgcccggcagccccgggcagaagggtttcacaggtcccgaaggactacccggaccacaaggacccaagtccttcagagccattccctcatatagcgggggtaagtctttgcagggcatctcaggtctgccgggtttttctggtagcccaggattgcccggaacacccggcaacacaggtccatacggcttggtgggagtccccggttgcagtggttcgaagggggaacaaggctttcctggactcccaggcacactcggataccccggcatccccggaattcacaacctgaaaatcttcaagggagcccccgcaaaagaggaggacatcgagctcgatgctaagggcgatccaggcttacctggtgcaccagggcctcagggcttgccgggacctcctggcttccccggccctgttggaccacctggtccgcccgggtttttcggcttcccaggagcaatgggacccagaggtcctaaaagttttgttttgtcgtctagaatcagcacaaagggagagaagggagtgaaggggctgacaggacccccgggccctcctggaaccgtgatagttactttaaccggaccagacaatcgcaccgacctgaagggcgaaaagggcgataaaggcgctatgggcgagcccgggcctcctggtccatctgggctgcctggagagagctacggttctgagaagggagcacccggcgatccgggcctccagggcaagcctgggaaagacggagtgccaggcttcccaggatcagagggggtgaaaggaaatcggggtttcccgggacttatgggcgaagatggcatcaaagaggaaaaacgggacgtagccatcgtgagctttagttctaagaccgaatactacgatacgtatcaggagaagggggacgagggcacccccgggccacccggccccagaggggcgagaggtccgcagggcaagaataagtttaggtgtatccccggttctcagggctcaagccggcctggactcaggggagctcccgggtggccagggcttaagggttccaaaggtgagcggggcaggcccggtaaggacgcaatggggacccctggcagccccggctgtgctggcagtcctggacttccgggatctccgggtcctcctggcccacctggtgatatcgtgttccgtaagggacctcctggggatcacggcctgccaggatacctggggtcaccaggaattcctggcgtcgatggccccaagggtgagcccgggcttttatgcactcagtgcccgtacatcccgggccccccaggattacctggcctgcctgggctgcacggagtgaaagggatccctgggagacaaggagcagcaggactcaaaggctcaccaggatccccagggaacaccggactgcctggattccccggattccccggtgcccagggggaccctgggctcaagggcgagaagggggagacactccagcctgaggggcaggttggagtgccaggcgacccaggcctccgcggacaacctggcaggaagggactcgacggaattccaggtactccaggtgtcaagggcctcccaggcccaaagggggaactggctctatccggggaaaagggggaccagggccctcccggcgaccctggatcccctggatctccaggacctgccggtccagcaggcccgcccgggtacggaccacagggagagcctgggcttcagggtacccaaggtgtcccaggtgcccctgggccgccgggggaggctggtccccgaggcgagctatcagtgagtacgcctgtacccggtccgccaggccctcccggtccacctggccatcccggtcctcaggggccacccggtattcccggtagcctgggtaagtgtggcgatccaggattaccagggccagacggtgagcccggaattccaggcattggcttcccaggacccccaggcccaaaaggcgatcagggatttcccggtaccaagggatccttgggatgtccagggaaaatgggtgagcccgggctgcccggaaaacccgggttgccaggcgccaagggcgagcctgccgttgccatgccaggtggtccaggaactcccggctttcccggcgaaagaggcaattccggggagcacggagaaatcggattgcccggccttcccggcctacccgggacacccggaaatgaaggactggacgggccacgtggagatcctggacaacccgggccacccggggagcagggaccaccgggaaggtgcattgaaggtcctaggggcgctcaggggttacccggtttgaacggactgaaggggcagcagggacggcgaggaaagaccggaccgaagggggatcccggcataccagggctcgatagatcagggtttccaggggaaacaggttctccagggattccaggccaccagggggagatgggcccacttggccaaagaggctatcctggaaatcctggtatcctcggccccccaggcgaggacggtgttatcggcatgatggggttccctggagccatcggaccccccggacctcctggaaatcctgggaccccaggacagcgcggaagccccggcattcccggcgtcaagggccagcggggtacccctggcgcaaagggagagcaaggcgacaaaggtaacccaggtcctagtgaaatcagccacgtaatcggtgacaagggagagcccggccttaaggggttcgccggcaatcctggggaaaaaggaaaccgcggagtcccaggcatgcctgggttaaagggactcaaggggctgcccggtcctgcaggcccccccggcccgcgaggagatctgggtagtactgggaatcccggagaacctggcctcaggggaatccctgggagcatgggcaacatgggaatgccggggagcaaagggaagagagggacactcgggtttcccggaagggcgggccgcccaggactacccgggatccacgggctccagggagacaagggggagcccggctacagcgaggggacacgaccgggtcctccgggtccgacaggagaccccgggttgcccggagatatgggcaaaaagggcgaaatggggcagcctggtccccccggacatctcgggcctgcaggcccagagggtgccccgggctcgcctggttcaccaggattacctgggaagcccggacctcacggggatctaggcttcaaagggatcaagggtctcctaggaccgccagggattagagggccacccggcctgcctgggttccctggaagtcctggaccaatgggcattcggggcgatcaggggcgtgacggcattccaggacccgcaggagaaaagggcgagacaggcctcctgcgcgcgccacctggacccagagggaatcccggggcccaaggggctaagggtgaccggggagctcccggcttccctgggttgcctggcagaaaaggagctatgggagatgcaggtccaagaggtcccactggcatcgagggcttccccggtcccccagggttgcccggagctatcatacctggccagacaggcaatcgcggaccccctggatcacgcggcagcccaggcgcaccgggacctccaggaccacccgggtcccacgtgattggaattaagggcgataagggatccatgggacaccccggacctaagggcccccccggaaccgccggagacatgggacctccaggacgcctcggggctcctggtactcctgggctgccaggccctcggggggatcctgggtttcagggattccccggcgtcaaaggcgagaaaggaaacccaggattcctaggctcaatcgggcccccaggccctatcggtccgaaaggcccaccgggcgtccgcggggaccctggcacactcaagataatttctttgcccggttctcctggacctcctggcaccccgggcgagccaggcatgcaaggggagcccggaccccccggaccgcccggcaacttaggaccttgtgggccccgtggcaaacctggtaaggacggtaagcctggaacaccggggcctgccggcgagaaggggaacaagggcagtaaaggcgaacccggtcccgccgggagcgacggactccccggtttgaagggcaagaggggagattctggcagccccgcaacatggacgacgagaggctttgtcttcacccgccactcacagactacggccatcccctcctgtcccgagggtaccgtgccactatattccggcttcagtttcctcttcgtccagggcaaccagcgcgcccatggccaagatcttgacgcactatttgttaaggtgctgcgaagcccgtag

SEQ ID NO: 14627 - DNA, 4914 bp, synthetic construct
  misc_feature 1..4914: note = Description of Artificial Sequence: Synthetic coding sequence
  source 1..4914: mol_type = other DNA
atgtcagcacgcaccgccccccgcccccaagttctgcttctgcccctcctcctggttcttttggcggccgctcctgccgctagcaagggctgcgtgtgcaaggacaaggggcagtgtttttgtgatggtgctaagggagagaagggagaaaagggatttccagggccccctggtagtcctggacagaaagggtttaccggtcccgaagggctgcctggcccacaggggccaaagagctttagagcgattccctcctactctggtggcaaaagcctgcaaggcatttctggactgccaggcttcagtgggagccctggcctccctggcacacccggcaacaccggaccctatggactggtaggggtgccaggctgctccggatcaaaaggggagcagggattccctggtttgccaggcacccttgggtacccaggcatacccgggatccacaacttgaaaatctttaagggggctcccgcaaaggaagaagatatcgagctcgacgctaaaggtgatcctggcctgcctggagcccctgggccgcagggacttccagggccgcctggctttcccgggcctgtcgggccaccgggacctccgggatttttcggattccctggggctatgggccctagaggcccaaagagctttgtgctctcatcacgcatttctaccaaaggcgaaaagggggtgaagggtctgactggacctcccggccctcctggcactgtgatcgtgaccctgaccggcccagataacagaaccgatctgaagggggagaagggggataagggtgccatgggggaacccggacctccaggacctagtggcctgccaggggagtcttacggtagcgagaaaggcgcccctggcgacccaggcctccagggcaaacccggaaaggacggagtccctgggtttcctggctccgagggcgtgaagggcaatagaggttttcccgggttaatgggcgaagatggcatcaaagaggagaaacgcgatgtagcgattgtgtccttctcaagtaaaacagagtactacgacacgtatcaggaaaagggcgatgagggcaccccagggccgcctggtcctagaggcgcacgggggccccagggaaaaaacaagtttcggtgtataccgggctcccaaggcagctctcgacctggactgcgcggtgcccctggatggccgggattgaagggcagcaaaggagaaagaggccggcctggcaaggatgccatgggcacaccaggtagtccaggctgtgcagggagtccgggtctccccggatctccggggccccctggtccgcccggtgacatcgtgtttagaaaaggcccccccggggatcatggacttcccggctacctcgggtcacccggaattcccggtgtcgatggacctaagggagaaccaggcctactctgcacgcagtgtccatacattcccggtccacccggcctgcccggcctcccaggcttgcacggagtgaagggtattccaggacgacagggtgccgccggtctcaagggtagtcccggtagtccaggcaatactggccttcccggattccctggattccccggcgcccaaggcgatccggggctgaagggcgagaagggagaaaccttacagcctgagggccaagtcggggtgcccggcgaccctggccttcgcggtcagccaggacggaagggcctggacggcatccctgggactcccggcgtgaaggggctgcctggacccaagggtgaactcgcactgtctggcgaaaaaggagatcagggtcccccaggcgatccaggaagccccggatccccgggacccgcagggccagccggtccacccggctacggcccacagggtgaacccggactgcaaggcacccaaggagtgccaggtgcacctggaccacccggtgaagctggtccccggggagagttgtccgtgtctacacccgtgcccgggccccccgggccacccggtcctcctggccatcccggcccacagggaccccccggcattccaggctctctgggcaaatgcggggacccagggctgcccgggcctgatggtgaaccaggcattcccggcattgggtttccggggccacctggccccaaaggggatcaggggttcccgggcacgaagggtagcctcggctgtcccggaaagatgggcgagccaggactcccagggaagcccggacttccaggagcgaagggtgagccagccgtggcaatgcccggtggaccgggtactccaggcttccctggcgaacggggcaatagcggcgagcacggggagattgggctaccaggcctccccgggcttcccgggactcctggtaacgagggcctggacggccctagaggagatccaggccaacccggccctcctggtgagcagggcccccccggccggtgtatcgaaggacctcgtggagcacagggactccctggcttaaacggtcttaagggccagcagggacgtaggggcaagacaggacccaagggcgacccaggtatcccaggcttggatcgctccggatttcccggtgaaaccggctccccaggtatcccggggcatcaaggggagatgggacctcttggccagcgcggctatcccgggaaccctgggatcctggggcctccaggagaagacggcgtgataggaatgatggggtttccaggagccatcggtccgccagggccccctggcaacccgggcactcccggacagagaggctcccctggtatccccggcgtgaagggccaaaggggaacaccaggagccaaaggagagcaaggggacaagggaaatccgggcccctccgagatctctcatgttattggagataagggagagcctggtctgaagggcttcgcaggaaatcccggggagaagggcaataggggcgttcctggcatgccaggccttaaaggcctcaaagggctgcccggcccagccggtccaccggggcccaggggtgatctgggatccacgggaaacccgggagagcctggcctaagggggataccggggtcaatggggaacatgggaatgcccggctccaaggggaagaggggcaccctcggattccctggtcgcgccgggcgacctggtctgcctggtatacatggactgcaaggtgacaagggcgagcccggctacagtgaaggcacacggccaggtccccccggcccaacaggcgatcctggattacccggagatatggggaagaagggcgaaatgggacaacctgggccgccgggccatttgggacccgccggacctgaaggcgcccccgggagtcccggttcaccgggcctgcccggcaagcctggccctcacggcgatcttggattcaaaggaatcaagggattgttaggaccacctgggataaggggacctcctggcctgccagggttccctggcagtcctgggcctatggggattaggggagatcagggaagagacggaattcctgggcctgccggcgaaaaaggagagactgggctgctgcgcgcgccgcccggtcctagaggcaatcctggggctcaaggagccaagggcgaccgaggcgccccggggtttcctggcctccccgggaggaagggcgcaatgggggatgcggggcctcgaggccctaccggaattgaaggcttccctgggcctcccggcctgccgggggctatcattcctggacaaaccggtaataggggcccacccggcagccgcggcagcccaggcgccccaggacctccgggtccccccgggtcacacgtgataggtatcaagggtgacaaagggagcatgggacaccctggaccaaagggcccccctggcacagcaggcgatatgggcccgcccggccggctgggggcacctggcacacccgggttacccggcccccgtggcgatcccgggtttcagggcttccctggagtgaaaggtgagaaagggaatcccggctttctgggttccattggtccccccggtcctatcggccctaagggaccaccgggcgttcgcggggacccagggacactgaagataattagtttacctgggtcgcccggcccacccgggacaccgggtgagccggggatgcaaggcgagccagggcctcctgggccacctggcaaccttggcccatgtggtcctcgtggcaagccaggcaaagacggcaaacccggtacacctggaccagcaggcgaaaagggaaacaaggggtctaagggagagccgggccccgccggctccgatggacttcctggtctgaaaggcaagcgcggcgattctggatccccagcaacctggacaactcgaggctttgtgttcacaaggcacagtcagaccaccgccattccatcctgtcctgagggaacagtcccactatattctggtttttctttcctcttcgttcagggtaaccaacgggcccatgggcaagatctgggaacgcttggcagctgcctgcagagatttacaacaatgcccttcttattctgtaacgtcaacgatgtttgcaacttcgcgagccgaaacgactactcttattggctgagcaccccagcgctgatgcccatgaatatggctcccattactggtcgcgccctggagccgtatatcagtcggtgcacagtgtgcgagggcccggccatagccatcgcagtgcatagccagacaacagacatacccccttgtccgcatggttggatatcactgtggaaaggcttttcttttatcatgaaggcttacagcattaactgcgaaagctggggtatccgtaagaataataagagtctcagtggggtccatgaagagaaaacactgaagcttaaaaaaactgccgaactactgtttttcatacttaagaacaaagttatgactgaacatgccgtgatctag

SEQ ID NO: 14628 - DNA, 4485 bp, synthetic construct
  misc_feature 1..4485: note = Description of Artificial Sequence: Synthetic coding sequence
  source 1..4485: mol_type = other DNA
atgtctgcaagaaccgccccacggccacaggtgctacttctgccactgttactcgttctgttggcggctgctcctgccgccagtaaaggttgtgtgtgcaaagataagggccagtgcttttgcgatggcgcgaagggcgaaaagggcgaaaaggggtttcctggccccccaggttcccctggccagaaaggcttcacagggccagaagggttgcctggtccccagggacccaaatcctttagggcaattcctagctattcaggcggtaagagtctgcagggcattagcggactacctggcttctctggttctccaggtttacctggaacccccggaaataccggtccctacggcctggtaggagtgcctggctgttcaggttctaagggggagcaggggtttccaggactgcccgggactctgggttaccccgggatccctggaatccacaacttgaagatattcaaaggcgctccggcgaaagaagaagacatcgagctagatgctaaaggcgatcctggacttccaggggccccagggccccaaggtcttccgggacctcccgggttcccaggtcccgtggggccgcccggcccaccgggctttttcgggtttccaggggccatgggaccaaggggtccaaaatcatttgtgcttagctcacgcatcagtactaagggcgaaaagggcgttaaggggctgacaggccctccaggaccacccgggacggtgatcgtgacactcacaggcccggacaaccgcactgatctgaaaggggaaaaaggcgataagggggcaatgggagagcccgggccaccagggccatcaggacttccgggagagtcctacggctccgagaagggtgcccctggggacccaggtctccaggggaagcctggcaaggacggcgtgccaggatttccgggaagcgaaggggtcaagggcaatcgcggatttcccgggctcatgggcgaggacggaataaaggaggaaaaacgagacgttgcaattgtgtctttctccagcaagactgagtattacgatacataccaggagaaaggggatgagggcacccctggacctccaggaccaaggggcgcccgagggcctcaggggaaaaacaaatttaggtgcattcctggctctcagggcagcagccggcctgggctgagaggcgctcctgggtggcctgggcttaaggggagtaagggggagcggggccgccccggaaaagacgctatggggactcctggttcgccaggatgtgctggcagtccagggctgcctggatcgccgggccccccaggtcctccgggagatatcgtgttcaggaaaggtccccctggggaccacgggctccccgggtatctgggatcccctggaataccaggtgtagatgggccaaagggagagcccggcctgctgtgtactcagtgcccctacatacctggtccacccggccttcctggcttgccaggactccatggggtcaaaggaattccaggccgccagggggcggcaggtcttaagggtagcccaggctcccctggaaacactggactgcccggtttccccggatttcccggcgcccagggcgaccccggactcaaaggcgaaaagggcgagacactgcagccagagggacaggtaggtgtcccaggtgatccaggactgagaggacaaccagggcggaaaggcttggatggcattcctggcacccctggtgtcaaaggcctgccgggaccaaaaggcgagctcgcgctctccggggaaaagggtgaccagggcccgcctggagaccccggttcccccggaagccctggccctgccggtcctgccggaccaccgggttacggtccacagggcgagcctggtctacagggaactcagggagtccctggggcaccagggccgcctggggaggccggccctcggggtgagctgtcagtcagtacacctgtgcctggcccgccaggaccacctggaccacccgggcatcccggtccccagggcccccccggtatcccgggctcattagggaagtgcggggacccaggcctgcctggtcctgacggggagccgggcatccctggtatcgggtttcctgggcctcctggacccaagggcgaccaagggtttcccggcaccaaaggctctcttggctgcccaggcaaaatgggcgaaccaggactgcctggcaagcccggcctcccaggagccaagggcgagcccgccgtggctatgcccggggggccaggtactcccggatttcctggagaaaggggcaattccggagaacatggcgaaattggtctgccagggttgccaggactcccgggcacaccgggcaatgagggtcttgacggaccccgaggtgacccagggcagcccggcccgcccggtgaacagggacccccgggccgatgcatcgagggaccacgtggagcccaaggactgcccggattgaacggtttaaaaggccagcagggcaggaggggtaagacagggcccaagggcgacccagggattccaggactcgataggtccgggttccctggggaaacgggatcgcccggcattccggggcaccagggggaaatgggccctctgggtcagcgcgggtatcccgggaaccccggtatcctcggaccccctggcgaagatggcgtgatcggtatgatggggttcccaggcgctatcgggccgcctggcccacccggcaacccaggtactcctggacagcgcggcagcccaggaatccccggagtaaaaggccagaggggtacccctggtgctaagggcgagcaaggtgataagggtaacccaggcccgagtgaaatctcccatgttattggggacaagggggaacctgggcttaaaggctttgcaggcaaccctggcgaaaaggggaatcgcggggtgccgggaatgccaggcctcaaggggcttaagggtcttcccgggccggccggccctcctggaccccgaggcgacttaggttctactggaaaccctggcgagccgggcttgagggggatccctggctctatggggaacatgggtatgcccgggagtaagggaaagcgaggcactctcggttttccagggcgggccggacgccctggactccccgggattcacggcttgcagggggacaaaggagagcccgggtacagcgaaggaacaagacccggaccgcccggtccgacaggggacccaggcctgcccggagacatgggcaagaaaggcgagatgggccagccaggaccccccgggcatctgggcccagccggtcctgagggggcaccaggcagccctggtagtcccgggctgcccggcaaaccaggcccccacggagatctcggattcaaggggatcaaagggctgctgggcccaccaggcatccggggtccgccgggtctccccggcttcccaggctcacctggcccaatgggtattaggggcgaccagggccgcgatggcatccctgggcctgcaggagaaaagggagaaacaggcctgctgagggcgccacccggcccaaggggcaatccaggagctcaaggtgcgaagggcgatcggggcgctccaggcttcccaggcctgccgggcagaaaaggtgccatgggagacgctggacctcggggacccaccggaattgagggttttcccggcccccctggcctccctggggccatcattcccggccagactggtaaccggggacctccgggtagcagaggctctccgggcgcaccggggcctcccgggccacccgggtctcacgtgatcgggatcaagggggataagggatcaatgggccaccctggtccaaagggccccccgggcaccgccggcgatatggggcctcctggcaggctcggagctccaggaacccctggattgccaggcccccgcggcgacccaggctttcaaggctttccaggggtgaaaggagaaaaaggcaacccgggatttctgggttctattggtcccccagggccgatcggtcctaaaggccctccaggggtacgcggggaccctggtacactcaagatcatctcacttcctggcagcccgggccctcccggcacccccggagagcccgggatgcagggtgaaccaggcccccctggacctccgggaaacttggggccttgcggacctcggggaaaaccgggaaaagacggcaagcccggaactcccgggccagccggtgaaaagggaaataaggggtcaaaaggagagccagggcccgccggctctgacggactgccaggcctcaagggaaaaaggggcgattccggctcccccgctacatggaccactcgtggatttgtgtttaccaggcactctcaaactaccgcgattcccagttgcccagaggggaccgtgcccctttattctggatttagctttttattcgtgcaaggcaaccaaagggctcacggccaggacctggagagcctcttccaccagctgtag

SEQ ID NO: 14629 - DNA, 4275 bp, synthetic construct
  misc_feature 1..4275: note = Description of Artificial Sequence: Synthetic coding sequence
  source 1..4275: mol_type = other DNA
atgtcagctcgcactgcccctcgcccgcaggttctgctgctgccactgctcctggtgctgctggctgccgctccagccgctagcaaagggtgtgtgtgcaaggataagggccaatgcttttgcgatggggccaagggtgaaaagggggaaaaggggttcccggggccccctggatctccaggacagaaagggtttactggcccagagggccttcctgggcctcaaggccctaagagttttagagccataccatcctatagcgggggaaaaagcctacaggggatcagtggcctcccaggtttctctggcagccctgggctccctggaactccgggcaatacaggcccctacggccttgtcggggtcccaggctgttcaggttcaaaaggagagcagggtttccccggccttcctggtactctgggttaccctggcattcctgggatacataatctcaaaatttttaagggcgcaccggctaaagaagaggacatcgaacttgacgctaagggagacccaggccttcccggtgctcctgggccacagggcttgcccggcccccccgggttccctggccccgtcggccctccaggccctccaggtttcttcggctttcccggggccatggggccgcgcgggcctaaatcctttgtgctttctagtagaatatctacgaagggcgaaaaaggcgtgaagggactgactgggccccccggacctcctggaactgtgatcgtgactctcactggccccgacaatcgcaccgatctgaagggcgagaaaggggacaagggcgctatgggggagccgggacctccaggtccgtctgggttgcccggtgagagctatggtagtgagaagggcgcccctggcgatccaggcctccaaggtaagcctggaaaagacggggttcccggattccccggatccgaaggcgtgaaagggaatcggggcttcccgggccttatgggcgaggatgggattaaggaggaaaaacgggacgtggcaattgtatccttttctagcaagaccgagtactacgatacatatcaggagaagggggatgaaggtaccccgggacctcccggtcctagaggggcccgggggccacaaggcaagaacaagttcaggtgcattccagggtctcaagggtcatctaggccaggcctcaggggtgctccgggttggcccgggctgaaaggatcaaaaggagagcgaggcaggccaggaaaagacgccatgggcactcccggcagtccgggctgcgcaggctcgccgggccttccaggaagtcctggaccccctggcccccctggagacatcgttttccgaaaaggcccgcctggcgaccatggcctgcctgggtacctggggtctcctggtatccctggggtcgacggtccaaaaggggagccggggttactttgcacacaatgtccctatatccccggaccgcccgggctccctggactacccgggctccacggagttaaaggcatccctgggcggcaaggcgcagcgggcttgaaagggtctccggggtcgcccggcaatactggattacctggcttccctgggtttccgggcgctcagggggatccaggactgaaaggtgaaaagggagaaacactgcagcctgaaggtcaagtgggtgttcccggggacccaggcctgagggggcagccagggcggaagggattggatggtatccctgggacgcccggtgtgaagggcctaccagggcccaagggcgaactggcactgagcggcgagaagggggaccaagggccgcctggagatcccggctctcctggatccccaggacccgccgggcccgccggtccgccgggctacggcccacaaggggagccgggcctgcagggcacccagggagtccccggtgcccccggccctccaggagaagctggcccccggggggagctgtctgtgtccacccccgtgcccggtccccccgggccaccagggccgccgggacatccggggccgcaaggacctcctggaattcctggctccctggggaaatgcggagaccctggcctgcccggcccagatggagagccagggattcccggaatcggctttccggggcctcctgggccaaaaggggatcagggctttcctggaaccaaggggtcactcggatgtcccggcaagatgggcgaacccggtttgcccgggaagcctggactgccgggcgctaaaggagagcccgctgtcgccatgccgggcggtcctgggaccccagggtttccaggtgaaaggggaaattccggcgagcacggagaaatcgggttaccaggactacctggactccctgggacgcccggcaatgagggcctggatggtccaagaggcgatcccggacagccaggcccccccggcgagcaaggcccacctggcaggtgtattgagggccctcgcggcgcccaggggctccctgggctgaatgggctcaaaggtcagcaaggcaggcgagggaaaactggcccaaagggagatccaggaatccccggcttggacaggagcgggttccctggagagaccggaagtccaggcatcccaggccaccagggagagatgggacccctgggacagagaggatatcctgggaatccggggatattggggccacctggcgaagatggtgtcattggcatgatgggtttccccggcgctatcgggccccccggcccccctgggaatcccggaacccctgggcagaggggaagccccgggataccaggtgttaaaggccagcgcgggacccccggagctaaaggcgagcagggtgacaaaggaaatcccgggccatctgagatttcccatgtgataggagataagggcgaacccggactaaaaggcttcgccggcaacccaggcgagaaggggaatcgcggggtgcctgggatgcccggcctaaaagggctgaaagggctgcccggtcctgccggtcctccggggccccggggtgatctcggtagcacggggaaccccggggagcccggccttcgaggcattcccgggtctatggggaacatgggcatgccgggctccaaggggaagagagggacgctgggctttccgggcagggctggacgtcctggactcccaggaatccatggcctgcaaggagacaaaggagagcctggctatagtgagggaaccaggcctggcccccctggacctacaggggaccccggccttcccggggatatgggcaaaaagggagagatgggccaacctggccctcctggccatcttgggcccgcaggacccgagggagcaccaggctcccctggaagtccaggactgccaggtaaacccggtccccatggcgatctgggattcaaagggattaaaggattattgggacctcccggcatcaggggcccacccggcctgccaggttttcctgggagtcccgggccgatggggatcagaggagaccaagggagagatggaatccctggccctgctggggagaaaggcgagaccggccttctgcgagccccgccaggccctcggggtaatcctggcgcgcagggtgccaagggagaccggggcgcccccggtttccccggactcccaggtagaaaaggtgctatgggcgacgctgggccacgcggacctaccggcatagaaggctttcctgggcccccagggttgcctggcgccatcatacctggtcaaacagggaaccgggggcctcctggatccaggggctcacctggcgcccccggccccccaggtccccccggctctcacgttattggcattaaaggggacaagggatccatgggccaccctggcccaaagggcccacccggcaccgccggcgacatgggcccccctggtagactgggcgcacctggcacaccagggctgcctgggccccgaggggatcctggattccagggatttccaggagtgaagggggaaaaaggcaatccaggattcctcggctccattggacctcctggccctatcggtcccaaagggccacccggagtgcggggagatccaggaacactcaaaatcatttcactgcccggatcccctgggccacccgggaccccaggggaacccggcatgcagggggagcctggcccaccaggcccgcccggcaacctggggccttgcggaccacgcgggaaaccgggcaaagatgggaaacctggaaccccaggtccagcaggtgagaagggcaacaagggaagtaagggggagcccgagtccctgttccaccagctctag

SEQ ID NO: 14630 - DNA, 5013 bp, synthetic construct
  misc_feature 1..5013: note = Description of Artificial Sequence: Synthetic coding sequence
  source 1..5013: mol_type = other DNA
atgtctgccaggaccgctccccgtccacaagtcctcctcctgccactcttgctcgtgctcctggctgcggccccagccgcgtctaaaggctgtgtatgcaaggacaagggccagtgtttctgtgatggcgctaagggcgaaaaaggcgagaagggttttccagggcctcctggaagcccaggacagaaggggtttacagggcccgagggtctgcccgggccccaggggccaaagggattcccgggtttacctggcctcactggcagcaagggcgtgcgcggaattagcgggctgcccggcttcagcggctctcccgggcttcctggcacccctggtaataccggcccatacgggcttgtcggcgttcctggatgttccggcagcaagggagagcaagggttccctggcctgccgggtacacttggataccccgggatcccaggtgccgcgggcctgaagggccaaaagggcgcacctgcgaaagaggaggacattgaactagacgcaaaaggagaccccgggctccctggcgctccaggtccacaggggctgccagggcctccagggttcccaggcccagtcgggccccctggccctcctggattctttggattccccggcgctatggggccacgggggccaaaaggccatatgggcgagagggttatcggccacaagggggaaaggggagtcaagggactgacaggtccccccgggcctccaggaacggttatagtgacacttaccggaccagacaacaggacagatttaaaaggagagaagggtgacaaaggtgcaatgggggaaccgggtccaccgggccctagtggcctccctggagaatcctacgggagcgaaaagggcgctcctggtgatcctggattacagggcaagcccggcaaagatggtgtgcctggtttcccggggagtgagggcgtcaagggcaaccgcgggtttcccggtctgatgggggaggacggcattaagggtcaaaagggggatattggtcctcccggctttagggggccaacagagtattacgatacctaccaagagaagggcgacgaagggactcccggacccccagggcccaggggcgcacgggggccccagggtccttccggcccgcccggcgtaccgggcagtcctgggagctctaggcctgggctgagaggagcccctggttggccaggtctgaaaggctcgaagggggagaggggccggcctggtaaagacgccatgggaactccgggcagtcctggctgtgcaggaagcccaggcttacccggtagtcctggaccccctggcccccccggcgacatcgtcttcagaaaagggccccccggagaccatgggctacctggctacctcggctctccaggcattccgggggtggatggacctaagggcgagccaggactgctgtgcacacagtgcccttacatacctggcccacccgggttgccaggattgcccgggctgcacggtgtgaaaggaatcccgggccggcagggagctgccggactgaaagggtcgcccgggagccccggaaatacaggcctgccaggtttcccggggtttcctggagcacagggggaccccgggttgaagggagaaaaaggtgaaactctccagcccgaggggcaggtcggggtcccaggagaccctggtctgcgaggacagcccggtagaaaaggactggatgggattccagggacccccggcgtcaagggcctgcctgggccaaaaggcgagttagctctgtccggggagaagggcgaccaggggccgcccggggaccctggctcacctggaagcccgggccctgccggcccagcagggccccccggctacgggccgcagggggaacccggtctacaagggacgcaaggcgtcccaggcgcccccgggccaccaggcgaggctgggccacggggagaactgtctgtgtccaccccagtgcctggacctcctggcccaccaggccctccgggacacccaggcccacagggaccccccgggatcccgggtagccttggtaagtgcggtgacccaggattgcctgggcccgacggagagcccgggatccccggaatcggctttccaggaccgccaggccctaagggcgaccagggattcccaggcacgaagggatccttgggatgtcctggcaaaatgggcgagccgggtctgcccggtaaaccagggctcccaggggcgaagggggagccggctgtggccatgccgggcggtcccggtacccccggcttccctggagagcgtgggaattccggagagcacggtgaaatcggccttccgggactcccgggattgcctggaacgcccggcaacgagggcctcgatggcccacgcggggatccgggccagcctggtccacccggtgaacagggcccccctgggcgatgcatcgagggaccacggggagcgcagggtctccctggtttgaacgggttgaagggccagcagggtagaaggggcaagacgggtcctaaaggtgaccccggaattccggggctggaccgttccggtttccccggggagacaggctcccctggaatccctggccaccagggggaaatgggtccacttggtcaaaggggctatcccgggaaccccggcattctgggacccccaggagaggatggggtgattgggatgatgggatttcccggagccatcggaccccccggaccccccgggaacccaggaacccctggacagagagggagtcctggaataccgggcgtgaaaggacagagggggactcctggagcaaagggcgagcagggcgataagggcaacccaggcccttcggagatctcccatgtaatcggagataagggagaacccggattgaagggattcgccgggaaccctggagaaaagggcaatcgtggcgtcccagggatgccgggcctcaaaggcctcaaggggttacctggtccagctggtcctcctggtcctaggggcgatttggggtcaaccggcaaccccggcgagccaggactgcggggaattcccgggtctatgggcaacatgggcatgccgggatcaaagggcaagaggggcaccttgggcttccctggaagagccggcagacctgggctgccgggcatccatggactccaaggggacaaaggggagcccggatacagcgaaggcactcgccctggaccaccgggacctacaggagaccctgggttacccggcgatatgggcaaaaagggagagatgggacagcccggaccccccggccaccttggtccggcaggccctgagggggccccgggcagcccgggctcaccaggcttgcctgggaagcctggacctcacggagacctgggattcaaaggaatcaagggactcctcggcccccctggtataaggggtccccctggtttacctgggttcccggggagcccaggccctatggggatccgcggcgaccagggacgagacggaattcctggaccggccggtgaaaagggcgagacaggtttgctgcgcgcacccccaggtccacgaggcaaccctggcgcccaaggagcaaaaggcgatcgcggagcccccggatttccaggcctgccagggaggaagggcgccatgggcgatgctgggccacgaggacctaccggcatcgagggattccccggcccgcctggactgcccggcgctattatccccgggcagactggtaatcgcggccctcctggctcaagaggaagtcctggagccccaggacctcctggcccccccgggtcccatgtgataggaatcaaaggcgataagggcagtatgggtcatcccggaccaaaaggccctccaggaacagcaggagatatgggacctcctggccgtctaggggcccccgggacccctgggcttccaggcccaagaggcgaccccggtttccaggggttccccggagttaagggggagaagggcaaccctggtttcttggggagcattgggccccccggacccatcggaccaaagggacctcctggagttcgaggggatcctgggacactcaaaataatttctctccccggcagccccggaccacctggcacacctggcgaaccgggaatgcagggcgagcccggtccacccggaccaccaggcaatctgggtccctgtggtcctcgcggcaaacccgggaaagacggcaaacccgggactcccggcccagctggggaaaagggaaataaggggagcaagggtgagccaggcccagcaggtagcgacggcctcccaggactgaaggggaagcggggggattcggggtcccctgcgacatggacaacgagaggttttgtgttcacacggcatagccagaccaccgcgattccctcctgccccgagggtaccgtgccactctatagtggtttctccttcctgtttgtgcaagggaaccagcgagctcacggacaagatcttgggacactcgggtcctgcctgcagaggtttacaacgatgcctttcctgttttgtaatgttaatgatgtgtgcaattttgcgtcacgcaatgattactcatattggctgagcacacctgccctgatgcccatgaacatggctccgattaccggccgggctctcgaaccctatatttcccgttgcacagtgtgtgaggggcccgctattgcaatcgctgttcatagccagactacagatattcccccctgcccccatggctggatcagcctgtggaagggcttctccttcattatgttcacctccgcagggagcgaagggactggccaggccctggcttcaccggggtcttgtctcgaggaattcagggctagtccattccttgagtgccatggccggggcacgtgtaattattactccaactcctacagtttttggttagcatccctcaatccagagcggatgttcaggaagccaattcctagcacagttaaggccggcgagctggaaaagattatttcccgttgccaggtctgcatgaaaaaacggcactag

SEQ ID NO: 14631 - DNA, 4500 bp, synthetic construct
  misc_feature 1..4500: note = Description of Artificial Sequence: Synthetic coding sequence
  source 1..4500: mol_type = other DNA
atgatggctaattgggcggaagctcgccctcttctcatccttatcgtgctcctgggccagttcgtgagcatcaaagcacaggaggaggatgaagatgagggctacggagaggagatcgcatgcactcagaacggacaaatgtacctgaaccgggatatctggaaacccgcgccatgccagatttgcgtttgtgataatggcgccattctctgcgataaaattgagtgccaggacgttctggattgtgccgacccggtgacaccacctggagagtgttgccctgtttgttctcagacaccaggcggcggaaataccaattttggcaggggcaggaaaggccagaagggggagcctggccttgttcccgtggtcacgggcattagaggaagacctgggccagctggtcccccgggatcgcaagggccccggggtgaaagaggccccaagggacgccctggaccgagagggccccagggcattgacggagagcctggggtgccagggcagccaggtgctccgggtccccctggtcatccctcccatcccgggccagacggtttgtcccgcccctttagcgcccaaatggccgggctcgacgaaaagtctgggctcggctcacaggtaggactgatgcccggatcagtcggaccagttgggccaagagggcctcaggggctgcagggtcagcagggtggagccggtccaacagggccaccgggagaaccaggtgaccctggcccgatgggccctattggatccaggggcccggaaggaccgccagggaaaccaggggaggatggggagcctgggcggaacggaaatccaggcgaggtggggttcgcaggctcgccaggagcccggggcttcccaggtgcccctgggcttcccggactaaaggggcatagaggccacaaggggctggagggaccaaaaggggaagttggtgccccggggagcaaaggcgaggccggccctaccggcccaatgggggcaatgggacctctggggccaagagggatgcccggtgagagaggaaggctgggtccacagggcgccccaggacagaggggagctcatggcatgcctggcaaacccggtcctatgggcccccttggtattcccggaagtagcgggtttcccggcaaccctggaatgaaaggcgaagccggccctaccggggctagggggccagaaggtcctcagggccagcgaggagagactggcccccccggacccgtggggtctccaggcctgcctggagccattggcactgatggaacccccggcgcaaaagggcctactggatccccaggcacttccggcccccccgggtctgctggccctcctgggagcccagggccgcaaggttctacgggcccccagggaatcagaggtcagcctggggacccaggggttcctggattcaagggagaggcagggcctaagggagaacctggcccccatggtatccagggccctataggacctccgggcgaggagggaaagagagggccccgcggagatcctggaacggttgggccccctggccctgtgggcgaacgcggggcccccggcaataggggcttcccaggatctgacggcctccctgggcctaaaggcgcgcagggggaacgcggcccagtcggctcttccggtcccaagggttcacagggtgatccgggaagaccaggtgagccaggcctaccaggagctcgaggtctcactgggaacccaggggtccaagggcccgagggcaagctgggcccgctgggggcgcctggcgaggacggccgcccaggaccccccggctcaattggaatccgggggcaacccgggtctatgggcttgcctggcccaaaaggctcaagcggagacccaggcaagccaggagaggctggtaacgcaggtgttccgggacagaggggcgcgccaggaaaagacggtgaggttggaccaagcggtcctgtcggacctccaggtttagcgggcgaacgaggtgaacagggaccacctggcccgaccggatttcaggggctccctggccccccgggcccacctggggagggagggaagcctggggatcagggggttccgggggaccccggggcagtcggtccattgggccccagaggggagcgcgggaacccaggggaaagaggcgagccaggcatcaccggtctacctggagaaaagggcatggccgggggacacggacctgacggccccaagggtagtcctggcccctctgggacccccggggacactggaccacccggtctgcagggcatgcctggcgagagaggaattgcaggcacccctggcccaaagggcgaccgggggggaataggcgagaaaggagctgagggtacagcagggaatgacggagcccgaggactacccggccctctgggaccaccggggccggctgggcctacaggagagaagggcgaaccgggcccccgggggctggtgggaccaccagggagtagaggaaatcccggcagtcggggtgagaacggccccaccggggcagtaggcttcgcaggaccccaaggacctgacggccaaccaggagttaagggtgagcctggggagcctggccagaagggggacgctggtagccctggcccccagggcctcgcgggttctcccggccctcacggtcccaatggggtacctggcctcaaaggcggacgcgggacccaggggccacccggcgctactggttttccagggagcgcggggcgggttggaccccctgggcctgctggagcccccgggcccgctggtcctttgggggagccggggaaggagggacctccaggactgagaggcgaccccggaagtcacggtcgggtgggcgacaggggcccagcaggcccccccggtggcccaggggacaaaggcgatcccggggaagacggacagcctggtcctgacggcccgcccggccccgccggaactaccggacagagaggcatcgtgggcatgcccggacagcggggtgaaaggggtatgccaggtcttccaggccctgcaggtaccccaggtaaagtcggtcctaccggggctactggcgacaaggggccgccaggccccgtcggcccaccagggtccaacggacccgtgggggaacctgggcctgaggggcccgcagggaacgacggtacccctggacgagatggggcggtgggtgaaaggggcgatcggggcgatcctggacccgcgggcctccctggaagtcaaggagctcccgggactcccggtcccgtaggcgcacccggcgatgctggacagaggggggaccctggatcacggggcccaattgggcctcctgggagagctggaaaacgggggcttcctgggcctcaagggccccgcggggacaaaggggaccacggggaccgcggagatcgggggcagaaggggcatcgcggctttacaggcttgcagggccttcctgggcctcccggtcctaatggtgaacagggaagcgccgggattccaggcccttttggtcctcgtggccccccggggcccgtgggcccctctggcaaagaaggaaatcctggaccactcggacccattgggcctccaggggtgcggggatccgttggagaggcagggcccgagggcccgcccggtgagccaggtccgccaggaccgccaggacctcccgggcacttgaccgccgcccttggcgatattatgggacattacgatgagtccatgccagatcctctccccgagttcacagaagatcaggccgcaccggatgacaaaaataagaccgaccctggcgtccatgccaccttgaaatctctgagtagtcagatcgaaacgatgcggagcccagatggctccaagaaacaccctgcacgaacttgtgacgacctgaagctttgtcattctgccaagcaatctggggaatactggattgatccaaaccaaggcagcgtggaggatgctataaaggtgtattgcaacatggagactggggaaacctgtatttcagctaaccctagcagcgtcccgcggaaaacatggtgggcaagcaagagtcccgataacaaaccagtgtggtatgggcttgacatgaacagagggtcgcaatttgcctacggtgatcatcaatcccccaatactgcaatcacacagatgacctttctcaggctgctgtccaaagaggcttcacagaacattacatatatatgtaaaaatagtgttggttatatggatgaccaagccaagaatcttaagaaggctgtcgtgctcaaaggtgctaacgatttggatatcaaggcagaggggaatatccgattcagatatattgtgctacaggatacgtgttccaaacgcaacgggaacgtggggaagactgtgttcgagtacagaactcaaaacgtagctcgtttaccaattatcgacttagcacctgttgatgtgggcggcaccgatcaagaatttggagtggagattggacccgtgtgctttgtatag

SEQ ID NO: 14632 - DNA, 3420 bp, synthetic construct
  misc_feature 1..3420: note = Description of Artificial Sequence: Synthetic coding sequence
  source 1..3420: mol_type = other DNA
ctgcccggccgtcgccaccggctgggtcctcctggctctcaaggtccacggggtgagagggggcccaaaggaagacccggaccgcgcggcccccagggtatagacggcgaaccaggggtgccagggcaacctggcgctcctggaggcgcaggcccaacagggcctcccggcgaaccaggtgaccctggaccgatgggacctatcggatctaggggccctgaaggccctccgggcaaaccaggtgaggacggcgagcccggtaggaatggaaatcccggcgaagttggttttgcaggatcccccggcgcgcggggcttccccggagcgccgggcttgcctggccttaagggccaccggggccataagggactcgagggccccaagggagaggtgggagcccccggaagcaagggcgaagcaggaccaactggccctagaggcgacccagggacagtggggcctcccggtcctgttggagagaggggcgctcctggaaatcgcggcttcccaggctctgacgggcttccaggtcctaaaggggcccagggtgaacgcggtccagtcggttcgtccggacccaagggaagccagggcgatcctgggagaccaggtgagcctggactgcccggagctaggggactaacaggtaatcccggcgtgcagggcccagaaggcaagctggggcccctgggggcgcctggggaggatggcagacccggaccaccgggaagcattgggattcggggccagcccggctccatgggtttgccaggccctaaagggagttccggggaccccggtaagccaggtgaggcagggaatgcaggggtgccggggcagcgcggagcccccggtaaggatggggaggtcggcccaagcggacccgtaggcccacctggcctggccggagaaaggggagaacaaggtcccccaggaccgacaggattccagggactcccgggaccccccggcccgcccggcgaaggtggcaagcccggggatcagggcgttccaggagaccctggcgcagtgggcccgttggggcctaggggcgaacggggtaatccaggcgaaagaggcgagccgggtatcacgggcctcccaggggagaaggggatggccggcggacacgggccagatggtccaaaaggcagccctggaccatcaggaacacctggcgacaccggtcctcccggtttgcagggcatgccgggggagcgcggcatcgccggcactcctggcccaaaaggggatcgagggggaatcggcgagaagggcgccgaaggaacagcaggcaatgacggcgcacgtggacttccgggccctttagggcctcccggccctgccggccccacaggcgagaagggtgaaccaggtccaagaggcttagttgggccacctggatcgaggggaaatcccgggtctcgcggagagaatggccctaccggggctgtagggttcgccgggcctcaggggccagacggacagcctggagtcaagggagagcccggcgagcccgggcagaaaggcgacgccggcagccctggaccccaggggttggctgggagccccggtcctcacggaccaaatggggtgccagggctgaagggaggacggggcactcagggaccaccgggtgccacaggttttccagggtcagctgggagggtgggacctcccggccccgctggcgcccccggacctgcgggtccactgggcgaacccggcaaggaaggaccacccggcctgcgaggggatccaggttctcatggcagagtaggagatcgcggaccagccgggcccccaggtgggccaggggacaagggggacccaggcgaggatggacagcccggcccagacggaccgcccggccctgcagggacgaccggccagagaggaattgtgggaatgcctggccagcggggcgagaggggcatgccagggcttccagggccggccggtacaccaggtaaggtcggacctacgggtgccactggtgataaaggcccacccggccccgttgggcctccagggtctaatggtcccgtgggagaaccgggccctgagggaccagctggtaacgacggaacaccgggtcgcgacggagccgtgggtgagagaggcgataggggagaccctggtcctgctggactcccaggcagtcaaggcgcgccaggtacccctgggcctgtaggagcacctggggatgctggccagcggggtgatcccggctctcgcggacctatcgggcccccaggccgggccggaaagcgaggcttgccgggcccccaagggccacgaggagacaaaggtgaccacggagaccggggagacagaggacaaaaaggccacagaggctttacaggcttgcaggggctcccagggccccccggtcctaacggagaacaggggtctgctggaatccccgggccctttggccccagggggcctcccgggcctgttggcccgtctggaaaagagggtaacccagggcctctgggcccgatcgggccaccaggcgtccgcgggtcggtcggagaagcaggaccagagggcccacctggagagccgggccctccaggacctccggggccccctgggcacctaaccgctgcactcggcgatattatgggacattacgacgagagcatgccagaccccctgccagaatttaccgaagaccaggccgcccctgatgacaagaacaaaacagatccaggagtccacgccaccttgaagagtctatccagccagattgaaaccatgcggagcccagatggctctaagaagcacccggcacgcacatgcgacgatttgaagctttgccactccgcaaagcagagtggagaatattggatcgacccaaatcaggggagtgtggaagatgctattaaagtttactgcaacatggagactggcgaaacctgcatcagtgccaatccctcatccgtgccccggaagacttggtgggcctccaagtcccctgataacaagcccgtttggtatggactggatatgaatcggggatcccagtttgcgtacggggaccatcaatctcctaatacggccataacgcagatgacatttttacggcttctatccaaggaggccagccagaatatcacctacatatgcaaaaatagcgttggttacatggacgaccaagcgaagaacctcaagaaggccgtcgtgttgaagggggcaaacgacttggatatcaaggccgagggaaatatcagatttcgctacatcgtactgcaagacacctgtagtaaacgaaacggtaacgtcggaaagaccgtgttcgagtatcgtacacaaaacgtggctcggttgccaatcattgatctagcaccagttgacgtgggcggcactgaccaagagtttggtgttgagatcggcccagtatgcttcgtgtag

SEQ ID NO: 14633 - DNA, 5304 bp, synthetic construct
  misc_feature 1..5304: note = Description of Artificial Sequence: Synthetic coding sequence
  source 1..5304: mol_type = other DNA
atggagccgtggtcatcccgctggaaaactaagcgctggctgtgggacttcacagtcactaccctggcactaacctttcttttccaggctagagaagtccggggagccgcacctgtggacgtgctcaaagccctggattttcacaacagtcccgagggcataagcaaaacaactggattttgtactaaccgaaaaaattcaaaagggagcgacactgcctatagagtatccaaacaggcgcagctaagcgctcccaccaagcagctgtttcccgggggcacattccctgaggacttctcaatactgtttacagtgaagcctaagaaggggattcagtccttcctgcttagtatttacaatgagcatggcattcagcaaataggagtcgaggtgggtaggtccccagttttcctctttgaggatcatacaggaaagcccgccccagaggactaccccctgttcaggaccgttaatatagcggacggaaaatggcatagagtggctatcagtgtcgagaaaaaaaccgtaacgatgattgtggactgtaaaaagaagaccactaaacccctcgaccgcagcgaacgggcaattgttgatacaaatggcattacggtgtttggaaccagaattttggatgaggaggtgttcgaaggagatatccaacagtttctcattactggcgatcccaaggcagcttatgattactgtgaacactacagccccgattgcgatagcagcgcccctaaggccgcccaggctcaggagcctcagatcgacgaggcaaacattgtagacgacttccaggaatacaactacggcacaatggagagctaccagacagaagcaccacgccacgtgtctggaacaaatgagcctaatccggtggaagaaattttcaccgaggagtacctgacaggagaggattacgattctcagcggaagaactccgaggacacgctgtacgagaacaaagagatcgatggacgggatagtgacctgctggtggacggagatctgggggagtacgacttctatgagtataaggagtacgaggacaagccaacctctcctcccaacgaagagtttgggccaggtgttcctgctgagacagacatcaccgagaccagcatcaacgggcacggcgcctacggcgaaaagggacagaagggcgaacctgcagtggtagaacctgggatgttggtagaaggccccccaggtcctgctggaccggctggtatcatgggcccacccggcctacagggccccaccggtccccccggagacccgggagatcggggacctcctggccggccagggttgccaggcgctgacggactgcccggaccccccgggactatgctgatgcttccattccggtatgggggcgatggcagtaaaggaccaacaatctctgcccaagaagctcaggcccaggctatcctgcagcaggctaggatagcactccgcggacccccagggccaatgggtcttaccggtcgtccaggacccgtgggcggcccaggatcctcaggagccaaaggggagtcaggcgatccagggcctcagggccctcgcggagtccagggaccgcccggccccactggtaagcctggtaaacgcggacgtcctggcgcagacggaggcaggggcatgcccggcgaacctggtgctaaaggcgacagaggctttgatgggttgcccggcctccccggagataaaggacaccggggggagagaggcccacaaggcccccctgggccaccaggcgacgatggaatgaggggggaggacggcgagatcggacccaggggtctcccaggggaagccggccccagagggctgcttggtcccaggggaactcctggagcccccggtcagcccggcatggccggcgtggacggtccccccggaccaaagggcaacatgggcccccaaggagaaccaggaccacctggacagcaagggaatccaggcccccagggcctgccgggaccacaaggacctattggccctccaggagaaaaaggtcctcagggaaagccgggcctcgccgggctgcctggtgcagatggaccccccggccaccccgggaaggaaggtcagagtggagagaaaggcgccttaggcccccctggccctcagggacctatcggttatcctgggccccggggggtcaagggcgccgacggggtgcgggggctgaaaggatcaaagggagaaaaaggggaagatggatttcccgggtttaagggggacatgggcctaaagggagacaggggtgaagtgggtcaaatcgggcctagaggcgaagacgggccagaaggccccaaaggacgggctggcccgaccggggaccctggtcccagtggccaagcaggcgagaaaggcaagcttggggtgcctggtttaccgggttatcccgggcgccaaggtccaaagggaagcactggatttcccggttttccaggggcaaatggggaaaaaggtgcacgaggcgtggcgggcaaacccggacctcgggggcaacggggccctaccggccctcggggatcaagaggggcacgggggcctacgggcaaaccaggtcccaaaggtacctccgggggagatggacccccaggtccacccggggaaagaggaccacaagggccccaggggccggtgggctttcctggtccaaagggccctccaggaccacctggcaaagatgggctaccaggtcacccaggccagaggggcgagacaggttttcagggaaagacagggcccccaggccccggtggggtcgtgggaccccagggcccgactggcgagacagggcctattggggagagaggccacccgggccccccggggccacccggggaacagggtcttcccggggcagctggaaaggagggcgccaagggcgaccccggacctcaaggcatcagtggaaaagatgggcccgccggtttacgggggttccctggcgagaggggcctgcctggagcccaaggagcacccggccttaaggggggagagggcccgcaggggccccccgggcccgtcgggagtcctggagagaggggttccgctggcactgccgggccgatcgggctgccaggacgccccggcccccagggtccccccggaccggcaggagaaaagggcgccccgggggagaagggtccccaagggccagctggacgggacggggtgcaagggcccgtcggcctacccggtcctgccggacctgccgggtcgccaggcgaggacggcgacaagggagagattggcgaacccggtcagaaaggcagcaagggcgataagggcgaaaacgggcctcccggccctccaggcctccagggaccagttggggcacctggaatagcaggaggggatggggaaccaggcccccggggccagcagggcatgttcggacagaaaggagatgagggggctcgcggctttccaggtccacccggaccgataggcctgcaggggctgccggggcctccaggagagaagggagagaacggcgatgtggggcccatgggccctccaggaccccccggaccccgagggccccagggacctaatggggccgacggacctcagggcccgcccggttctgtgggatctgtgggcggtgttggcgagaagggcgaacccggtgaggccggaaaccccgggcccccaggggaggccggagtcggcggccctaagggagagcgaggggaaaagggggaagccggccctcccggagccgcaggccctcccggtgcaaagggtcctcccggtgacgacgggcctaagggaaaccctgggccagtggggtttcccggggacccggggcctccaggcgagccgggtcccgcaggacaggacggcgtgggcggagataaaggagaagacggagaccctgggcagcccggccccccaggtccgtcaggtgaggcaggccctccggggcctcctggaaaaagagggcccccaggtgcggcaggagctgagggacgccagggcgagaagggagccaaaggagaggcaggggccgagggcccacccgggaaaacagggccggtcggtccacagggaccggcagggaagcccggcccagagggcctccggggcattcccggccccgtgggagaacaagggttaccgggtgccgctgggcaggatggtccgcctggacctatgggccctcctgggttgcccggcctcaagggtgacccgggatccaaaggcgagaaaggtcacccaggactcatcgggcttatcgggcctccaggtgaacaaggagagaaaggggatagaggactgccgggtacacagggcagccccggtgctaaaggagacgggggtatcccgggccctgccggccccctggggccaccaggtccgccaggcttacctggcccacagggaccaaaaggtaacaaaggctcaactggacccgctggacagaaaggggacagcggcctgcctgggccaccaggatcacctggccctcctggagaagtgatccagcctctacccatcctctcctcaaaaaaaacgcggagacataccgagggcatgcaggccgacgcggacgataacatcctcgattatagtgatggaatggaagaaatttttggcagtctgaacagcttgaagcaggatatcgagcatatgaagttccccatggggacccagacgaatccggcgcgcacatgtaaggaccttcaacttagccatcccgatttccctgatggggagtattggattgacccaaaccagggctgcagtggcgactcttttaaggtctattgtaacttcactagtggtggtgagacttgcatctacccagacaagaagtccgagggtgttcgtatcagtagctggccaaaagagaagcctggctcctggttctccgagttcaagcgcggcaaattgctcagttatctcgacgttgagggtaacagcatcaacatggtccagatgacatttctcaaactgctgaccgctagcgctaggcagaacttcacctaccactgtcaccagagtgcagcgtggtacgatgtgagctcgggttcttatgataaggcgctgaggttcctaggaagcaacgatgaggagatgtcctatgacaacaatccctttattaagaccctgtacgatggatgcgcaagtcgcaagggatatgaaaagaccgtaattgaaatcaacacccctaagatcgaccaggttcccattgttgacgtgatgatcaatgatttcggcgaccaaaaccagaagttcggtttcgaggttggccccgtctgcttcctaggctag

SEQ ID NO: 14634 - DNA, 5457 bp, synthetic construct
  misc_feature 1..5457: note = Description of Artificial Sequence: Synthetic coding sequence
  source 1..5457: mol_type = other DNA
atggagccttggtcttccaggtggaaaacaaagcgatggttatgggatttcacagtcaccactctggccctgacctttctgtttcaggcgcgcgaggtccggggtgccgctcctgtcgacgtcctcaaggcactggattttcacaactctccagagggcataagcaagactaccggcttttgtactaatagaaaaaactctaagggaagcgatactgcctatcgagtgtcaaagcaggcacaactttcagctccgacaaagcagctgttcccaggagggacatttccagaggacttctccatactctttaccgtgaaaccaaagaaggggatccaaagcttcctgctgagcatttataatgaacacggcattcaacaaataggagtcgaggtgggtaggagccccgttttcctgtttgaagaccataccggaaaacctgcacccgaagattacccactttttaggactgtgaatatcgcagacggaaaatggcatagggttgctatcagcgtggaaaagaagaccgtgactatgatcgtcgactgcaagaagaagactactaagcctcttgaccgaagcgagagggcaatcgtagatacaaacggtatcacagtgtttggcacacgcatcctcgacgaagaagtgttcgagggggatattcagcagtttctcattactggggacccaaaggcggcctacgattactgcgagcactattctcccgattgcgactcatctgcacctaaggcggctcaggcgcaggaaccacagattgacgaaaagaagaagtccaatttcaagaagaagatgaggaccgtggcaaccaaatccaaagagaaatctaaaaagttcactcccccaaaatctgagaaattctcatccaaaaagaagaagtcttatcaggccagtgctaaggccaaacttggtgtgaaggctaacattgtcgacgacttccaggagtataattacggaactatggagagctaccagaccgaagctccccggcatgtttcaggcaccaacgagccgaatccggtggaagaaattttcaccgaagaatacctgactggcgaggattatgattcccaacgaaaaaacagtgaagacaccctgtatgagaataaggagatcgatgggcgtgacagcgatctcttggtagatggtgatctcggtgaatacgatttttatgaatataaggaatacgaggataaaccgaccagccccccaaatgaggagtttgggcccggagtccccgccgagaccgatatcactgagacttccattaacggccacggcgcctatggcgagaaaggccagaaaggcgagcctgccgtcgtggagccgggcatgctcgtggaaggcccgccgggaccagcaggacctgccggtatcatgggacctccggggttacagggccccactggtcccccaggcgatcctggcgaccggggaccacccgggagacctggcttaccaggtgcggacggactgcctggccctccaggaaccatgctgatgctcccctttcgctatgggggcgacggttcgaagggcccgacaatcagcgcccaggaggctcaggcccaggcaatcctgcaacaggcaagaatcgcattgaggggcccccccgggcctatggggttgacaggtaggcccggtccagtgggtggacctgggtcaagtggcgcaaaaggggagagtggggacccaggtcctcagggccccaggggagtccaagggcctcctggcccaactggtaagccagggaagaggggccggcctggcgctgatggtggcaggggcatgcctggggagcccggggcaaaaggcgaccgagggtttgacggtctgccaggactgccaggcgataagggccaccggggagaaaggggacctcaaggacctccaggcccacctggtgatgatggcatgagaggggaggatggcgaaatcggcccacggggcctgccgggagaggccggtcccaggggtttactgggaccccggggaacaccaggagcgcccggacaacccggaatggcaggagtagatggtccccccggccccaagggaaatatggggcctcagggagaaccgggtcctcctgggcaacagggcaatcctggcccacagggactgccaggcccccagggaccgattggtccccctggtgagaaaggccctcagggcaagccaggtttggccgggttacccggagccgacggacccccaggtcatcctggcaaagagggacagtcaggggagaagggagctctagggcccccaggcccacaaggaccaatagggtatcccggacccaggggggtcaaaggcgcggatggcgtgcgcggccttaaaggctcaaagggagagaagggcgaagatgggttccccgggttcaagggcgacatgggtctcaagggtgacagaggcgaagtgggacagatcgggcctagaggcgaagatggaccggaggggcctaaaggtagggccggtccaacaggcgaccctggaccgtctggacaggctggggagaaggggaaactgggagtgccaggtttgcccggatatccaggccggcagggccccaaaggttcaacaggctttcctggctttcccggcgccaacggggagaaaggagctcggggagtagccggcaagccaggtcctaggggtcaaaggggccccactggcccgcgcggatcgcgcggcgcgaggggaccaaccggcaaacctgggcctaagggcacatccggtggagatggacctccaggaccgcctggggagcgcggacctcagggtcctcaggggcccgtcggctttccgggcccgaaaggaccacccggacctccagggaaggacggcctgccgggccaccccggccagagaggcgaaacaggattccagggcaagactggtccgcctgggccagggggagtggtggggccacaaggacccactggggagactgggcccattggggaaaggggacacccagggccccccggtccccccggcgagcagggattacctggtgcagccgggaaagagggggccaagggcgatcccgggccccaaggaatcagcgggaaagacggcccggctggcctaaggggctttcccggagagcggggtcttcctggcgcgcagggcgcccctggcctcaaagggggtgagggcccacagggaccgccagggccagtagggtcacccggagagcggggctcggccggtaccgctgggccaatcgggctccccggacggccagggcctcagggaccccctggacccgccggagaaaaaggcgcgcccggcgaaaagggcccccagggccctgctggccgagatggcgtgcagggccctgtcgggctgcccgggcccgccggccctgcagggtctcccggggaggacggagataagggcgaaataggggaacctggtcagaagggcagcaaaggagacaagggcgaaaatgggccgccaggccccccaggattacagggacccgttggagcccccggaatagcaggaggcgacggagagcctggaccccgaggtcaacaaggaatgttcgggcagaaaggggacgagggggcgcgggggttccctggtccacccggccctatcggcctccaagggttgcctggtcctccaggcgaaaagggcgagaacggggacgtcggtccaatgggtccccctggccccccaggccctagaggaccccaaggccctaatggagcagacggcccccagggaccacccggaagcgtcggttcagtgggcggggttggagagaagggcgagccaggtgaggctggtaatcctgggcctccgggagaagctggtgtagggggaccaaagggagaacgcggcgagaagggcgaggctgggcctcctggcgcagccgggcccccaggagcaaagggccccccaggcgacgacggccctaaaggaaatccaggcccagttgggtttcctggtgatcccgggccaccaggagaacccgggcccgcaggacaggatggagtcgggggagataaaggagaagatggagaccctggacagccaggcccgcccggtccttcaggtgaagccggcccccctggacctccagggaagagaggtcccccaggggcagcaggagccgaagggagacagggcgaaaaaggggccaagggcgaggcaggtgcagagggacctcctgggaagacgggaccagtcggcccccaaggccctgcgggcaaaccagggcctgaaggtctccggggaatcccgggccctgtcggcgagcaagggttgcccggtgctgctgggcaggacggccctcctgggccaatgggtcctcccggattacccgggctaaaaggagaccctgggtctaaaggggaaaaagggcatcctggactcattggcctgataggaccccccggggaacagggagaaaagggagaccgtggactgccaggcacacaaggatctccaggcgctaagggagatggagggatccccggccctgcaggcccattaggacccccagggccccccggcttgcctggccctcagggaccaaagggcaacaagggctctactgggccggctggacagaaaggggattccgggctgccggggccaccggggtcgcccggtcctcccggagaggtcatacagccactccctattttaagctcaaagaagacaaggcggcacacagaaggaatgcaggccgatgccgatgacaacatcttagattacagcgacggcatggaagagatctttggctcactgaatagcctgaagcaggacatagaacacatgaagtttccgatgggtacacagaccaaccccgccaggacatgtaaggacctgcaattgagtcacccggatttccccgacggcgaatattggattgacccaaatcagggttgctccggggattccttcaaggtttattgtaacttcacatcggggggcgaaacgtgtatttatccagataagaagtccgagggcgtccgaatatcttcttggcccaaagagaagcctggatcatggttcagcgaatttaagcgcggcaagttgctgagttatctcgacgtagagggcaactccataaacatggttcagatgacttttcttaaactgctgactgcctccgctcgacaaaactttacctaccactgccaccaatccgccgcctggtacgacgtctcttccggctcttacgacaaggcactgaggtttctgggaagcaatgacgaggagatgtcctacgataataacccatttattaagactctgtacgatggttgtgcttccaggaaaggatacgagaaaactgtcatagagatcaacactccgaaaatagatcaggttcccatagtggatgtaatgattaacgatttcggcgatcagaatcagaaatttggtttcgaggtgggccctgtgtgttttctcggctag

SEQ ID NO: 14635 - DNA, 3081 bp, synthetic construct
  misc_feature 1..3081: note = Description of Artificial Sequence: Synthetic coding sequence
  source 1..3081: mol_type = other DNA
atggtgagcgaggtgtcccgagatctcaaagtgaagcgcgaaaagctggtgaaactcgctcaggaaggaaagatggccctgaaggatccaaaggtggaacaggcacagctggagactcaggttttgcaggtgaagcaagagaaacgtgaaaacctcgagttccaagattatcaggatatccaggaggacaaggtccaaagaatcagtgacgtgatcggatctactggttttcccggctttcccggggcaaatggggagaagggagctcggggagtggccggtaagcccggcccccgtgggcagagggggccgacaggacccagaggaagtcgcggagcaagaggtcccactgggaaacctggccctaaggggacatctggaggggacggccctcctggccctcctggcgagaggggcccgcagggaccccagggacctgtcggattcccgggtcctaaaggtcccccagggcctcccgggaaggatgggctgcctggccaccccgggcaaagaggggagactggcttccagggcaagactggaccccctgggcctgggggggtcgtgggaccacagggcccaaccggggagactggccctatcggcgaaaggggtcacccagggccccccggcccccccggtgaacagggactcccgggtgcagcagggaaagagggcgccaagggagaccccggcccacagggcatcagcggaaaggatggtcctgccggccttaggggctttccaggcgaacgtggcctacccggcgcccagggtgctcccggactgaagggtggggagggaccccaaggacctcccggccctgttggcagcccaggcgaaagggggtccgccggtacagccggacctatcgggctgcccggacggcctgggccacaaggacccccaggtccggccggggaaaaaggcgctccaggggagaaaggtccccaggggccagccggcagggatggggtgcaaggccccgtgggcctgcccgggccggccggacccgcaggaagcccaggtgaggatggggataagggggaaatcggagagcccggccaaaagggaagtaaaggagataaaggcgagaatggcccccctggcccaccagggctgcagggtccagtgggtgctcctggcattgcagggggtgatggagaacccgggcctcgaggccagcagggcatgttcgggcaaaagggagatgagggcgcacgtggcttccctggcccacctgggccgatcggtctgcagggcctgccaggaccacctggggagaagggggaaaatggagacgtcggcccaatgggaccacccgggcctccgggcccacgcggtcctcagggtccaaacggcgctgatgggccacagggtccaccgggaagcgtcggctctgtggggggtgtcggagagaaaggtgagcccggtgaagctggaaaccctggaccacctggcgaagctggggtggggggacccaaaggcgagcggggtgaaaaaggggaagccggccctccaggcgctgcaggtcccccaggcgctaaaggaccccccggtgacgacggcccgaagggcaacccaggtccagtgggcttccccggggaccctggaccccctggcgaaccagggccggccggacaggatggagtcggcggcgataaaggtgaagacggggacccaggtcagccaggtccaccaggcccgtctggagaagccggccccccagggccacctgggaagcgtggccctccaggcgccgcaggcgccgaggggcgccaaggtgagaagggcgccaaaggggaagcaggagccgaaggccctcctggtaagactggcccggtgggccctcagggcccggccggcaaaccaggccctgaggggctacgaggcattcctggaccagtgggcgaacaggggctacctggagcggccgggcaggatggacccccaggccccatgggccccccaggtctgcctggactgaagggggaccctgggtccaagggcgaaaaaggccatcccggtctcatcggcctgatcggtccacctggagagcagggagaaaaaggggacagaggcctcccaggcacacaggggtcacctggcgcaaagggggatggtgggattcctggacctgccggcccactcggaccccccggaccaccgggcttgcctggcccccagggcccaaagggcaacaaggggagtaccggtcctgccggccagaagggagactctggcctacctggcccaccaggatcccccggcccacctggcgaagtgatacagcctctccccatcctgtcctctaaaaagacaaggaggcataccgagggtatgcaggcggatgcggacgacaacatcttggattatagtgacggaatggaggagatcttcggatcattgaattctctgaagcaagatatagaacatatgaagttccctatggggacacaaaccaacccggctaggacctgtaaggaccttcagctgtcacacccagacttccctgatggcgagtactggatcgacccaaaccaggggtgctcaggagactcctttaaagtgtattgtaattttaccagcggtggagaaacatgcatttaccccgacaagaagtctgaaggggtgcggattagctcttggccgaaggagaaacccgggtcatggtttagcgagttcaaaaggggtaaacttttgagctatttagacgttgaagggaactcaattaacatggtccagatgactttcttgaaactgctgaccgcctccgcccgccagaatttcacttatcactgccaccagtcagctgcctggtacgatgtctcaagtggcagctatgacaaagctttgcgattccttggttcaaatgacgaggaaatgtcttacgacaacaaccccttcattaagacactctacgatggctgtgcttccaggaagggttacgaaaagacggtgatcgaaattaatactccgaagattgaccaggtgccaattgtcgatgtaatgataaatgattttggcgatcagaaccaaaagttcggctttgaagtggggcccgtttgttttctcggatag

SEQ ID NO: 14636 - DNA, 5421 bp, synthetic construct
  misc_feature 1..5421: note = Description of Artificial Sequence: Synthetic coding sequence
  source 1..5421: mol_type = other DNA
atggagccatggagcagcaggtggaaaaccaaaagatggttatgggacttcactgttacaaccctggccttgacattcctgtttcaggccagggaggtcagaggagccgcacccgttgacgtgctaaaggccctcgacttccataatagtcccgaagggatatccaagacaaccgggttctgtacgaatcggaaaaattcaaaggggagcgatactgcgtatcgggtctccaaacaggcccagctgagcgctcccacaaaacagctgttcccaggcggcactttccccgaggactttagcatacttttcaccgtcaagcctaagaagggaatccagagcttcttgctgagtatatataatgagcacgggattcagcagattggagtggaagtgggtcgatctcccgtcttcctcttcgaagaccacactggaaaaccggcacctgaggactacccgctgttcaggaccgtgaatatcgccgatggcaagtggcaccgggttgccatctcagtggagaagaagaccgtcacgatgatcgtggattgcaagaaaaagacaacaaagccactcgacagaagtgaaagggctatagtggacacaaacggcataactgtttttggaacacgtatcctggacgaagaggtgttcgagggggacattcagcagttcttgattactggggatcccaaggccgcctatgactactgcgaacactactcacccgattgcgactcctccgcgcccaaggccgcacaggcacaggaacctcagattgatgaatacgcaccagaggacatcatcgaatacgattatgaatacggagaagcagagtacaaagaggccgagtccgtcacagaaggaccaacagtgacagaagaaacaattgcccaaacagaggctaacattgtggacgattttcaggagtataactacggaacgatggagtcttaccagactgaagccccgaggcacgtgagcggaacgaacgagccaaaccctgtggaggagattttcacagaagagtatctcacaggtgaggattacgatagccagcgcaagaacagtgaggacactttgtacgagaataaggaaattgatggtcgtgattccgaccttctggtggacggtgatcttggggagtatgacttctacgagtataaggagtacgaagataagcccaccagtccacccaatgaggagttcggacctggggtacccgctgaaacagatatcaccgagacttctattaacggtcatggcgcctatggggaaaagggacagaagggtgagcccgctgtggtggagcctggcatgttagtggaaggcccacccggacccgctggtccagcgggcattatgggccctcccgggctccagggccccactggacccccaggtgaccccggcgatcggggccctcctgggaggcctggccttccaggtgctgatggcttacccggccctccagggacgatgcttatgctgcccttcaggtacggaggcgacggaagtaagggtccaactataagcgcgcaagaagcccaggcccaggccattctccagcaagctcgaattgctctgcgtgggccgccagggcccatgggcctgactgggcggcccgggcccgtgggggggcctggatcatccggagccaagggtgaatccggagatcctggaccccagggacccagaggagtgcagggaccacctggtccgaccgggaaaccaggcaagagagggcgtccgggcgcagacggaggtcgcgggatgcctggggagcctggtgctaaaggcgaccggggatttgatgggttgccgggcttgccaggcgacaaagggcacaggggtgagaggggcccacagggcccgccaggacctcccggggacgatgggatgagaggcgaggacggcgagatcggtccccgcggcttgcccggcgaggctgggccacgaggcctgctgggaccacggggcacgcctggagcccccggacagcccggtatggccggggtcgacggtcctcccggccctaaaggtaacatgggcccccagggtgagccaggacccccagggcagcaaggcaatccagggccgcaagggctccccggccctcagggcccgataggccccccaggggagaaggggcctcagggtaagcctggactcgctggattgcccggagccgatgggcctccaggccaccccggaaaagagggtcagtccggagagaaaggcgctctgggcccaccgggaccgcagggcccaataggttaccctgggccacgcggggtgaagggcgccgacggagtccgtggcctgaaaggatcaaagggggaaaagggggaggacgggttccctggctttaagggggatatgggtcttaagggtgacagaggggaagttggacagatcgggcctcgcggcgaagatggtcctgagggccctaagggccgagccgggcctactggtgatccagggccctccggccaggccggagaaaaagggaaactgggtgtgccaggtctgcccggttatcctgggaggcaggggcccaaggggtcaactggattccctggctttcctggcgctaatggggaaaaaggggcgcggggagtggcaggcaaacccggccctcggggccaaagagggccgactgggcccaggggtagtcgcggggccaggggcccaaccgggaagcccggcccgaaggggacctcagggggcgatggccctccaggtccacctggtgaacgcggtccacaaggaccacagggcccagtagggtttccgggtcctaaaggcccccctggccctcctggaaaggatggactgcctgggcacccgggccagcgcggagagacagggttccaggggaaaaccggtccgccaggccccggcggagtggtcggcccacaagggcccaccggggagaccggacccatcggcgagcggggacatccaggtcctcccggaccccctggagaacaaggacttcctggcgccgccggcaaggaaggcgctaaaggagatccaggaccgcaagggatctcggggaaagacggcccagctgggttgcgaggcttccccggagaacgcggtctcccaggcgcacagggcgcgccaggcctgaagggtggcgaaggacctcaggggccccccggcccagtcgggtccccaggggagaggggtagcgcagggacggctggccccataggcttgccggggcggccaggaccgcaaggtcctccgggccccgccggcgagaaaggcgcccctggagagaaaggcccccaaggccccgccggcagggatggcgtgcagggtcccgttgggctgcctggtccagccggccccgctggctcccctggagaggatggtgacaagggggaaattggcgaacctggtcaaaagggttccaagggcgataaaggggaaaatggaccaccagggcctcctggactccagggcccggtcggcgcacccggtattgcggggggagatggagaaccaggccccagaggacaacagggtatgttcggacagaagggggacgagggcgctagagggttcccgggacctccaggcccaatcggacttcagggattgccagggcctcccggcgagaaaggcgaaaacggtgatgtggggcccatgggcccgccggggcccccagggccaaggggcccacagggtcctaatggagcagacgggcctcagggcccgcccggcagcgtaggtagtgtaggaggggtgggcgagaaaggcgagcccggtgaggccggaaaccccggccctcctggagaggctggggttgggggccctaagggagagagaggggagaagggggaagccggaccccccggagccgccgggccaccaggagcgaaaggcccaccgggtgatgatggtcctaagggtaatccaggaccagttgggttccccggagaccccggcccacctggtgagcctggtcctgccgggcaggacggcgtaggcggcgacaagggggaagacggggatccaggacagcccggtcctcctggccccagtggtgaggctggcccaccaggcccacccgggaagcgtggcccgcccggcgcagctggggctgaaggtagacagggggagaaaggcgcaaagggggaggctggggcggagggtccacccggcaaaaccgggccagtcggaccacaagggcccgcgggaaagcccgggcctgagggtttgagaggcatccccggcccagtaggcgaacagggtctcccaggcgcggcgggccaggatgggcctccgggaccaatgggacccccaggcttaccggggttgaagggggaccctggcagcaagggagaaaagggccatccgggcctgatcggattaatcgggcccccgggagagcagggcgagaagggagacaggggactcccgggaactcagggctcaccaggcgccaaaggtgacggcgggatccctggccctgcaggacccttaggtccccccggccctccgggtttacccggccctcaaggcccaaaaggaaataaaggcagtactggaccagcaggccagaagggtgacagtggcctaccggggcccccaggatctcccggtccccctggggaagtcattcagcccctgcccattttgagctctaagaagacaagacgacacactgagggaatgcaggctgatgccgacgataacatccttgattattctgatgggatggaagaaatctttggcagccttaatagcttaaagcaggacatcgagcatatgaaattccctatggggactcagacaaatcctgctcgaacttgcaaggacctgcagctgagccatcccgatttccctgacggggagtattggatcgacccaaatcagggatgctctggcgacagttttaaggtgtactgtaactttactagcgggggcgagacgtgtatttatcccgataaaaagtctgagggcgttcggatcagctcttggcctaaagagaaacctgggagctggttctccgagttcaaacgcggcaaactcctgagctacttagacgtggagggtaactctataaatatggtccagatgacattcttaaagctgctgaccgcttctgcccgccagaacttcacgtatcactgtcatcagtctgccgcttggtacgacgtctcctctggttcatatgacaaggccctgaggtttctagggtcgaatgatgaggaaatgagctacgataacaacccttttataaaaaccttatacgacggatgtgcctcccggaaagggtatgagaaaaccgtcatcgaaatcaacacccctaaaatcgatcaagtcccgatcgttgatgttatgatcaatgatttcggcgatcaaaatcaaaaatttggttttgaagtcggaccagtatgtttcctgggttag

SEQ ID NO: 14637 - DNA, 5073 bp, synthetic construct
  misc_feature 1..5073: note = Description of Artificial Sequence: Synthetic coding sequence
  source 1..5073: mol_type = other DNA
atggagccatggtcaagccggtggaaaacaaagcgttggttatgggacttcacagtaactacattggcccttacctttcttttccaggctagggaggtccgcggggcagctcctgtcgacgttctcaaagcactggactttcacaactcccccgagggcataagcaaaactacgggcttttgcactaacagaaagaatagtaaaggttccgacaccgcctaccgagtctccaaacaggcacaactcagtgcacctacaaaacagctcttccctggcggcacttttcctgaagatttttccattttgttcaccgttaagcccaaaaaggggatccagtcttttctgttgagcatctacaatgaacacggaatccagcaaatcggcgtggaggttgggagatcgcccgtattcttattcgaggatcatacaggcaaacccgcccccgaggattaccctctgttccgcaccgtgaacatcgccgatgggaaatggcacagagttgctattagcgttgagaaaaagactgtaaccatgattgtggattgcaagaagaaaaccaccaaacccttagataggtccgaacgagctattgtcgacactaacggaattactgttttcggcactaggatcctggacgaagaagtgtttgagggagatatacagcaatttctgatcaccggagatcctaaggcggcatacgattattgtgaacactactcacctgactgcgactcttctgcccccaaagccgcccaggctcaagagccacagattgacgagtatgcacctgaagatattatcgagtatgactatgaatatggtgaagccgagtataaagaagcggaaagcgtaaccgaaggtcctactgtgactgaagaaaccatcgcccagaccgaaataaatggacacggagcctatggggaaaaaggccagaagggcgagccagcagtggtggaaccggggatgctggtggaggggccgcctggaccggcagggcccgctggcatcatggggcctcccgggctccaaggccccactggaccccctggcgacccaggtgacagaggccccccagggagacccggactcccgggagccgatggccttccaggcccccccggaaccatgctgatgttaccgttccggtacggaggtgacggatcaaaggggccaacgatcagtgcgcaggaagcccaagctcaggcaattttgcaacaggcacggatcgctttacgtggacccccgggacctatgggcctgactggtaggccagggcctgttggcggtcccggcagttctggcgccaaaggtgaaagtggcgaccctggaccccagggacctcgtggcgtgcaagggcccccagggccaaccggaaaacctgggaagagggggcgtccgggcgcagatggaggcagaggcatgcctggggagcctggagcaaagggggataggggcttcgacggcctcccagggctgcccggcgataaaggtcacagaggcgagcggggaccgcagggacctccggggccacctggagatgatggcatgagaggtgaagatggggagattggtcctaggggactaccaggagaagcgggtcctagaggcctgctagggcctaggggtacccccggcgctccgggtcagcctggaatggccggtgtggatgggccaccaggtccaaaaggcaacatgggacctcaaggcgagcccgggccccctggccaacaaggtaatcccggcccccaagggcttccaggacctcagggaccaataggccccccgggggagaagggccctcaggggaagccgggcctggccggcctgcccggagcagacggcccacccggccatcctggtaaagagggacagagtggcgagaaaggcgcactgggacctccaggccctcagggcccaattgggtaccccggccctaggggcgtgaaaggtgcagacggcgtgcgagggctgaaaggatcgaaaggcgagaaaggagaagacggctttccgggcttcaagggggatatggggctaaagggggaccggggagaggtgggacagatcggccctcggggagaagacggcccggaaggtccaaagggccgcgccgggcctaccggtgaccctggaccctcagggcaggcgggagagaaggggaaactaggtgttcccggactgccaggatatcctggccgtcaaggtcccaaaggtagcaccggctttccgggattccccggagctaacggagagaagggagcacgcggagtggccggcaaacctggcccccgtgggcagcggggacccacaggaccccgagggagccgcggggctcggggtcctaccggaaaaccagggcccaaaggtacatccgggggggacggacctcctggccctcctggtgaaagaggccctcaagggccccagggaccagtgggattccctggcccgaagggaccccctggccccccggggaaggacggcctgcctggacatcctggacaaagaggcgagaccggatttcaaggtaagaccggcccacccggccctggaggcgtggtcgggccccagggcccaaccggagagactggacctatcggggagaggggacatccgggccctcctggcccacctggtgaacaggggttacccggcgccgccgggaaggagggggccaagggggatcctggaccacaggggatttcggggaaagatggaccagccggactccggggctttcctggagagagaggactgcctggcgcccagggagcccccgggctaaagggcggagagggtccccaggggccacccggtcccgtgggatcaccaggggagagagggagcgcgggaactgccggccccatcggtctgcctgggcgtccaggcccccagggccctccggggcctgccggggaaaagggcgcccccggggagaaggggccccaggggcccgctggacgagacggggtgcaagggcctgtgggtctccctggccccgcaggtccagcaggaagccccggagaagatggagacaaaggtgagattggcgagcctggtcaaaagggatctaagggtgacaaaggcgaaaacggcccgccagggccaccaggactgcagggcccagtgggtgctccaggaatcgccggaggcgacggagagccaggaccgaggggacagcagggcatgttcggccaaaaaggggatgaaggagctcggggattcccaggccctcccggaccaataggcctgcaggggctgcccggccctcctggtgagaagggagagaacggagacgtcggccctatgggccctccaggcccccctgggcctcgcggccctcaaggccccaacggtgctgatggaccgcagggacccccgggtagcgtgggaagcgtcggcggagtgggagaaaaaggagaaccaggtgaggccgggaatcccggaccgccaggcgaggccggagtcggaggacccaagggcgaacgaggagaaaaaggtgaagccgggccaccaggcgcagccgggcccccgggtgcaaagggaccccctggcgacgacggcccaaaaggaaatccagggccagttgggtttccaggggacccaggccctccaggagaaccaggaccggcaggtcaggacggtgtgggtggggataaaggcgaggacggcgacccaggccagcccgggccccccggccccagtggagaggctggacccccaggccctccaggcaaaagaggtcccccaggcgctgccggagctgagggccgccagggtgagaagggagctaagggggaggccggggctgagggccctccaggtaaaactgggccagtcgggccacagggtccagccggtaagccaggccccgaaggtttacgcggcatcccagggccagtgggcgagcaagggctgcccggagctgctggccaggacggaccccccgggccaatggggccgcctggtcttccaggcttaaagggagatcctggaagcaaaggcgagaaggggcaccccggacttattggactcatcgggccccccggtgagcagggagaaaagggtgataggggcctacctggaactcaaggatccccgggagccaagggcgatgggggtatcccaggaccagctggacctctcggcccccccggcccaccaggccttccaggcccccagggacctaaaggcaataaagggtctaccgggcccgcgggacagaagggggactcagggttgccggggccacctggctctcctggaccacctggagaggttattcaacctctgccaattttgtccagtaaaaagacaagacgccacacagaagggatgcaggcagacgcggacgataatatcctggattattccgacgggatggaggaaatctttggaagcctaaacagtcttaagcaggatatcgagcacatgaagttccccatgggaacacagactaaccccgctagaacatgcaaggatctccagctttcacacccagacttccctgacggcgagtattggattgaccccaatcagggctgttccggggacagtttcaaggtgtactgcaatttcacctcaggcggagaaacgtgtatctatcccgacaagaagagtgagggagttcggatttccagctggcccaaagagaagcccggtagttggttcagcgagtttaagcggggaaagctattgtcttacttggacgtggaagggaattctattaacatggtgcaaatgacttttctgaaactcttgactgccagtgcacgccaaaattttacttaccactgtcatcagagtgcagcctggtatgacgtgtcgagtggtagctatgataaggcactacggtttttaggttctaatgatgaagagatgtcttacgacaataacccattcataaagactctctacgacgggtgtgctagtcgtaaggggtatgagaaaactgttatcgaaattaacaccccaaagatcgaccaggtgcccatagtggatgtgatgatcaacgattttggagaccaaaatcaaaaatttggatttgaggtgggtcctgtctgctttctgggctag

SEQ ID NO: 14638 - DNA, 4560 bp, synthetic construct
  misc_feature 1..4560: note = Description of Artificial Sequence: Synthetic coding sequence
  source 1..4560: mol_type = other DNA
atggccccttatccgtgcggctgtcatatcttattactgctgttttgctgtcttgcggccgctcgggccaacctgttaaatctgaattggctctggttcaataatgaggacacaagtcacgcagctacgacaatccccgaaccgcagggcccccttcctgttcaacccacagcagacacaactacccatgtgactccacggaatggctcaacagaacctgccactgcgccagggagccccgaacctccaagtgagctactggaagatggccaggacacaccgacgtctgcagagtcgcctgatgcgcccgaggaaaatatagccggcgttggcgccgaaatcctgaacgtggcgaagggcattaggtcctttgtgcaattgtggaacgacacagtcccaactgagtctctcgctagagccgaaaccctggtgctcgagacacccgtcggccccctggccctcgctggcccttcctctacccctcaagaaaacggtacaaccttgtggccaagccgcggcattccctctagccccggggcccataccactgaagctggtacactgcctgctcccactccttctccaccctccctgggtcgtccttgggctccactcacaggaccctccgtgcctccacctagttctgagcggatttcagaggaggttggactactgcagctgcttggggacccaccacctcagcaggttactcagactgatgatccggatgtaggcctggcgtacgttttcggaccagacgccaactctgggcaggtcgcaaggtaccattttcccagtctcttcttcagagattttagcctgttattccacatcagacccgcgactgaaggtccaggtgttctgttcgccattactgattcagcccaggctatggtgctcctcggcgtgaagctgagtggagtccaggacgggcaccaggacatttcattgctatataccgagcctggcgcgggacaaactcacaccgcagccagctttaggttaccggcatttgtcggtcagtggactcatttagcactcagcgtagcgggaggattcgtcgccctgtatgtggactgcgaggagttccaaagaatgccattggcgaggagctcccggggcctcgagctggagcccggggctgggctatttgtcgctcaggccggcggcgcggatccagacaaattccagggggtgattgccgaattgaaggtccgtagagacccccaggtgagtcctatgcactgtttagacgaggaaggcgatgactcagacggcgcctccggagactccggctccgggctgggggatgcccgggaactcctacgcgaagaaactggcgctgcgctaaaaccaaggctgccagcaccgccaccagtgacgacaccaccacttgcaggcgggagcagcaccgaggatagtagatcagaggaggtggaggagcagacaacagtcgcaagcttaggggcacaaaccctgcctggttcagattctgtgtccacttgggacggcagcgtgaggaccccgggaggaagggtcaaggaagggggactcaagggacaaaagggagaacctggtgttcccggcccccccggtcgagcggggccccccggaagtccttgcctgccgggacctcccgggctgccctgccccgtgagccctctggggccagccggtcctgctcttcagaccgtgcctggcccccagggaccccccggtcctcccggaagggacggtacacccggcagagatggtgagcctggggaccccggagaagacggcaaacccggggacactggcccacaagggtttccagggactccaggcgatgtagggcccaaaggggataagggtgatcccggggtgggtgaacgcgggcctccagggcctcagggaccaccaggtcccccaggccccagcttccggcatgataaactcactttcatcgatatggagggatcaggatttggcggcgaccttgaggccctgcggggaccaaggggattccccggccccccaggcccccctggcgtgcctgggttgcccggcgaacctggacgatttggagttaactcctctgacgtgccgggacccgctgggctgcccggagttcctggtcgggaaggccctcccggctttcccggactgcctggccctcctggacctcctggccgagagggcccgccagggcgcacaggccaaaaagggtctctaggggaagctggtgccccagggcacaaagggtccaagggagcccccggccccgctggggcgagaggggagagtgggctggctggggcccccgggcccgctggccctcctggaccacctggacctcccgggccccccgggcctggactgccagccggatttgatgacatggaaggctcgggagggcctttctggtctaccgcacggagcgcagatgggcctcaggggccccccgggttacccggccttaagggcgatccaggggtcccaggtttaccaggcgccaaaggggaggtcggcgctgatggggtgccgggtttccctggattgcctgggagggaaggtatcgctggacctcagggacctaaaggagatagggggagccgtggggagaaaggtgatcccggaaaagatggcgtggggcagccaggcttgccgggccctcctggcccacctggacccgttgtatacgtcagcgagcaggatggaagcgtcctatcagtacccggccctgaaggccgaccggggttcgctggcttcccaggtccggctggaccgaagggcaatctgggatcaaagggagaaaggggttcaccagggcctaaaggcgagaagggggaaccaggcagcatttttagccctgatgggggagctttaggccccgctcagaagggtgcgaagggtgaacccggattccgaggtcccccaggcccatatggcagacccggatataagggtgagataggcttcccagggcgcccaggccgtccagggatgaatggtttgaaaggagaaaaaggagaacctggggacgccagcttaggtttcggaatgcgggggatgcctggtccacccggcccaccaggtcctccaggacctcccggcacgccagtctatgatagtaacgtcttcgctgaaagcagccgtcccggcccccccggactcccggggaaccagggaccccctgggcccaagggtgccaaaggagaggtcgggcccccagggccgccaggacagttcccctttgatttcttacagctggaagccgagatgaagggggagaaaggcgatagaggagacgccggacaaaagggcgaacggggcgaacccggaggagggggttttttcggttccagcctcccagggccgccggggcctcccgggccccctggacccagaggctacccaggaattcctggcccaaaaggagaatccatcaggggtcaacctgggccccccgggcctcaggggcctccaggaattggctatgagggaaggcaaggtccacctgggcctcctggacctccaggacccccgtcattcccaggcccgcataggcaaactatctcagtacctggcccccctggtcctccagggccgcccgggcctcccggaacaatgggtgcatcctcaggggtgagattgtgggccacgcgtcaagcaatgctgggtcaggttcatgaggtacccgaaggttggctgatcttcgttgccgaacaggaagagctgtacgtgcgagttcaaaacggcttcagaaaggttcaacttgaggcccgcacacccctgccaagaggcacagataatgaggtggcagcgctacagccacccgttgtccaactgcacgactctaacccttaccctcgacgcgagcatccgcaccctacagctagaccgtggcgagctgatgatatcctggcctcgccacctcgactcccggaacctcagccctaccccggcgctccccatcattcctcctacgtgcatctgcggcccgcccggcctacctcgccaccagcacactcccaccgtgatttccagccggtgctccatttagtcgctctcaactcccccctgagcggtggtatgaggggcattcgtggcgcagatttccagtgcttccagcaggcacgcgcagtaggcctcgcgggaacatttagggctttcctgagctccaggctccaagacttgtactcgatcgtacggagagccgatagagctgccgtgcccattgtcaatctgaaggacgagctgttgttccccagctgggaggcgctgttctctggatcagaaggccctttgaaacccggtgcacggatcttttcatttgacggcaaggacgtgctccgccatccgacatggccacaaaagtctgtctggcatggttctgatcccaacggccgccggttgacagaatcgtactgtgagacatggcgcacagaggccccctccgcaacagggcaggcctcctcccttcttggtggccgtctgcttggccagtctgcagctagttgccaccacgcctacatcgtgttgtgcattgaaaattcgtttatgacagcctcaaaatag

SEQ ID NO: 14639 - DNA, 5265 bp, synthetic construct
  misc_feature 1..5265: note = Description of Artificial Sequence: Synthetic coding sequence
  source 1..5265: mol_type = other DNA
atggcaccttacccctgtgggtgccacatcttgctcctgctgttttgctgcctggctgctgccagggccaatctcctcaacctgaattggctttggtttaacaatgaagacacctcccacgctgcgacaacgatccccgaacctcaggggccacttccagtgcaacccacagcagacaccactactcacgtaacacccagaaatggatctacggagccagcgacagcccccggatcgccggagccgcctagcgagctcctggaagatgggcaggatacccccactagcgcagagagccccgatgcccccgaggagaatatagctggagtgggagctgagatattgaatgtggcaaaaggtatcagaagcttcgttcaactgtggaatgatacagtacccactgagtcactggcccgggctgagacattagtactcgaaacacctgtgggaccactcgctctggctggacctagttccaccccacaggaaaatgggaccacattatggccaagtcggggaatcccatccagcccaggagctcacaccacggaggccggaacattacccgcacctactccctctcccccgtctctcggccggccctgggctccactgaccggtccgagcgtgccacccccttcgtctgggagagccagcctgagcagtctcctaggaggcgcacccccctggggctcactccaagatcctgacagccagggtctctctccagccgcagcagccccaagccagcaactgcagcgcccggatgtgagacttcgtacccctctcctgcaccctctggtgatgggctcattaggcaaacatgctgcgccatctgccttctcttccggactgcctggagcactcagtcaggttgctgtaactaccttgaccagagatagtggggcatgggtgagccatgtagccaatagcgtgggcccaggcctggccaataactccgctcttttaggcgctgaccccgaagctcccgccggcagatgcctgcctttgccccctagcctaccggtttgcggtcaccttggcatctcacggttttggcttccaaatcaccttcaccacgagtctggcgaacaagtgcgtgctggcgcgcgggcatggggcggactgctgcagacacactgccacccgttcctcgcttggtttttttgtctgctgctggtacccccctgcggatctgtgccgccgccagcccctccaccctgctgccaattttgtgaggctttacaagatgcttgttggagccggcttggtggcgggcgcctgcccgtggcatgtgcatccctgcctactcaagaggacggctattgtgtgctaatagggcctgcggccgagcgaatttccgaagaagtgggactgcttcagttgcttggggatccaccacctcagcaggtcacccagaccgacgaccctgatgtaggcctagcctatgtgtttggacctgacgcgaattccgggcaggtggcccggtaccattttccctctctcttctttagggacttctcactgcttttccacataagaccggccactgagggtcctggagtactctttgccatcacagacagtgcccaggcaatggtgctactgggcgtcaagttaagtggagtgcaggatggtcaccaagatatttctcttctgtacaccgagcccggagctggccagactcatactgcagccagttttaggttaccggcattcgtaggacagtggactcatctcgccctgtccgtggcggggggcttcgtagcactttatgtcgattgtgaggagtttcaaagaatgccacttgcacggtcttccagggggctggaattagagcccggcgccgggctcttcgtggctcaggccggaggcgcagatcccgataaattccaaggagtcatcgctgagctgaaagtacgccgagatccgcaggtcagcccaatgcactgcttggacgaggagggcgacgacagcgatggcgctagtggggattctgggtcagggctgggagacgcacgggagttacttcgcgaagagaccggggctgctctcaagccaaggctgccagcccccccgccggtcactacacctccactggcagggggctcgagtacagaagattcaaggtcggaggaagtcgaggagcagaccacggttgctagcctgggtgcacagaccctccccgggtcagattctgtcagcacgtgggatggttccgtgcgcacgccaggcggcagagtcaaggagggtggactgaaggggcagaagggtgagcctggggtgcccgggcctcctggaagagctggtccaccaggctcaccctgcctccccggtccccccgggttgccctgccccgtcagtccactgggacccgcagggccagcccttcagaccgtgcccggcccccaagggcctcctggacctcccggtcgcgatgggacacctggcagggatggggaaccaggtgatcccggtgaagacggaaagccgggcgacacagggcctcaaggctttccggggacccctggagacgtggggcctaaaggagacaagggggatccaggggtaggagagcgcggcccaccagggccccaggggccacccgggcctcccgggcccagtttccggcacgacaaactgacatttatcgatatggagggcagtggtttcggaggtgacctggaagcacttcgcggaccacgagggttcccaggccctcccggccccccaggggtgccaggtctgcccggtgagcctggtagattcggggtcaacagctctgacgtgcccggccccgcgggactgcctggtgttcctggtcgcgagggcccaccagggttcccaggacttcctggtccccccggcccccccggccgcgaaggccctccgggacggaccggccagaagggcagcctgggggaagccggcgcccctggccataaagggtccaaaggcgctccgggccccgccggtgcacgcggtgaatccgggctcgccggggccccaggtcctgccgggccgcctggaccacccggtcctcccgggccacctggtcccggactgcccgctggcttcgatgatatggagggcagcggcggacctttctggtccacagctcgctcagcagacggtccgcaaggaccaccagggctccctggcttaaagggtgatcccggagtccctggactgcctggggcaaagggcgaggtgggtgcagacggggtgccagggttccctgggcttccagggcgtgaagggatagccggaccccaagggccaaagggcgatcggggctccaggggggagaaaggggaccctggaaaggatggcgtgggtcagccaggcttaccaggacctccgggaccaccaggacccgtcgtatatgtcagcgaacaggacggaagtgttctgagcgtgccaggacccgaggggaggcctgggttcgccggctttccgggtccagcgggcccaaaaggaaatctgggttctaaaggagagcggggatcaccaggaccgaaaggagaaaagggagagccgggctctattttcagcccagatgggggggccctcggacccgctcaaaagggtgctaagggcgaaccagggttccgggggcctcctggaccatacgggagacccggatacaaaggggagattgggtttccggggaggcccggtaggcctggcatgaatggcctcaaaggcgaaaagggggaaccaggagatgcctccctcgggttcggtatgcgtggtatgcctggtccccctggtccgcctggtccgcccggtccccccggaacacccgtctatgatagcaacgtcttcgccgagtcatcccgtccaggaccaccaggccttccaggcaaccagggcccacccggtccaaaaggcgccaagggtgaggtcggccccccggggccgccgggtcaattccctttcgacttcctgcagcttgaggccgaaatgaagggtgaaaaaggggatcggggtgacgcaggccagaagggggagcgcggcgagccaggcggaggcggctttttcggttcttctcttcccgggccccctggcccaccaggtccaccgggccctaggggctatccagggattccaggacctaagggggagtctataagaggtcagccaggaccacccggccctcaggggcccccagggatcgggtacgaaggaaggcaaggaccccccggacctcccggccccccgggacctccctctttccctggtccacacagacagacaattagtgttcccggtcccccaggcccccccgggccacccggccctcccggcacaatgggtgcctctagcggagtgcgcctatgggcaaccagacaggcaatgttaggtcaggtccatgaggttccggaggggtggttgatttttgttgcagaacaggaggagctgtatgtcagggtgcagaacggctttcgcaaagtgcagctggaggcccggacgcctcttcctcgtggtactgataacgaagttgcggctcttcagccacccgtcgtacagctgcatgattctaatccatatcctagacgggagcatcctcacccgacagcgagaccctggcgagctgatgacattcttgcctctcccccaaggctgcccgaaccgcagccttacccaggcgctccccatcacagctcttacgtccatctccgcccagcgagacctaccagcccgcctgctcatagccacagggatttccagcctgtcctccatctggtcgccctgaactctcctctgtccggggggatgcgaggtatcaggggagctgattttcagtgttttcaacaggcacgtgcggtggggcttgccggtacatttcgggcatttttatcttcacgcctgcaagatctgtattctatcgtgcggcgggcggatagagcagccgtccccatcgtgaacctgaaggacgaacttctgttcccttcctgggaggcgttattttcaggctcagaggggcctcttaagccaggcgccagaatcttctccttcgacggaaaggatgtgctccgacaccccacatggccccaaaagtctgtctggcacggctctgaccctaacgggagacgtctcacagagagttactgcgagacttggcggacggaggcacctagtgccacaggccaggcgtccagcttacttggcggccgcctgttaggtcagtctgccgcctcatgtcatcacgcctatatcgttctatgcattgaaaactcttttatgactgcctcaaagtag

SEQ ID NO: 14640 - DNA, 4020 bp, synthetic construct
  misc_feature 1..4020: note = Description of Artificial Sequence: Synthetic coding sequence
  source 1..4020: mol_type = other DNA
atggcccccagatgtccatggccttggccccgtaggaggaggctcctggacgtgctagcacccctggtacttttgctcggcgtccgtgcagccagcgcagaaccagaaaggatatcggaagaggtagggcttctacagcttctgggtgacccacccccacaacaggtgacccagacagacgaccctgacgtaggacttgcttacgtgttcggcccagacgccaattccgggcaggtggcccgctatcattttcctagcctcttcttcagggacttttccctgctgttccacattcgacccgcgacggaaggccccggagtactgttcgccatcaccgacagcgctcaggcaatggtgctgttgggcgtcaagctttccggggtgcaggacggccatcaggacattagccttctgtacactgagcctggcgccggacagacgcacacagccgccagctttcggctcccggcttttgttggccagtggactcacctggctttatcggttgccggggggttcgttgctctttatgtggattgtgaggagttccagcggatgccactcgctagatcttcgcgcgggctggagctggagccaggcgccggcctttttgtagcccaagccgggggggccgatcctgacaaattccagggcgtcattgcggagctgaaagtccggcgcgacccacaggtaagtcccatgcactgtctggacgaggagggcgacgactcagatggtgccagcggcgacagtggaagtggcctcggagatgcccgagaactgctgagagaggagactggtgcagcactgaagccaaggctgccagctccacctcccgtgactaccccaccactggcgggggggtcaagcaccgaggactcacggtccgaggaggtggaagagcagacaactgtggcttcgcttggggctcagacattacctggatctgatagtgtctccacatgggatgggtctgtgagaacgcccggcgggcgcgtgaaggaaggcggtttaaagggtcagaaaggagagccaggcgttcccgggcccccaggacgcgctggaccgcccgggagcccatgtctgcccgggccacctggcctgccctgtcctgtgagtccgctgggacccgcggggcccgccctccagaccgtccccgggcctcagggtccccctggtcccccaggacgggacggcaccccaggcagggacggagaaccgggcgatcccggggaagacgggaaacctggtgatactggaccccaggggttccccggaacacccggggatgtgggtcctaagggggataaaggggatcctggggtcggtgaacggggccccccagggccgcaaggtcccccaggcccacctggcccctcgtttcgccatgacaaattgaccttcatcgacatggaagggtcgggcttcggaggcgacctggaggccttgcgtggacccaggggctttccgggcccacccgggccacccggagtcccaggtctcccgggtgagcctggtcgctttggggtcaatagttccgacgttccaggacccgccggattgccaggggttccaggaagggagggcccgccagggttccccggcctccctggaccccctgggccaccagggagggagggacctccgggaagaacgggtcagaaaggatcattgggcgaggctggcgcccccggacacaagggcagcaagggagcgcccggccccgctggggctcggggagaaagcggtttagctggcgcccccggtcctgccggcccccccggcccccccgggcctcccggacctccagggccgggactgcccgctgggtttgacgacatggagggctccggcgggccattctggtccactgctaggtccgcagacggcccacagggaccacccgggttacccggactgaagggcgatcccggagtcccaggactccctggagccaaaggtgaagtgggagccgacggagtgccaggatttccaggcctcccaggaagagagggaattgcaggccctcaggggccaaaaggggataggggctcaagaggtgaaaaaggcgaccctggcaaagatggcgtgggacagcccggccttccgggcccaccgggtccaccaggaccggtggtatatgtgtctgaacaggacggatcagtgttgtccgtacccggcccagaaggtagaccaggctttgccggctttcctggaccggccggacccaaggggaacttgggatctaagggagagcgaggatcaccaggccccaaaggagaaaaaggggagcccggctccatcttttcacctgacggtggtgcccttggcccagctcagaagggagctaagggagaacccggctttcggggaccaccaggcccttacggccggccagggtataaaggtgagatcgggttccccggcaggcctggcaggccgggcatgaacgggttaaaaggcgagaagggggaacccggtgatgcctccctgggctttgggatgcggggaatgcctggaccccccggcccgccaggacccccaggaccccccgggacaccagtgtacgactctaatgtgtttgcagagtcgtcccgtcctggtcccccaggcctgccgggtaatcaggggccccctggacccaaaggggccaaaggcgaagttggtcctcccggcccaccggggcagttcccttttgacttcctgcagctggaggccgaaatgaagggagaaaaaggggacagaggcgacgctggacagaagggagagaggggcgagccagggggcggcgggttctttggctcgtccctcccaggccccccgggccctcccggcccccctggacccaggggttaccctggcattcctggccccaaaggtgagtctatccgcggtcaaccgggccctcccggaccccagggccctccagggatcggttatgagggaaggcaggggccacctggacccccaggacctccaggccccccttcatttcccggaccgcatcgacagacaatctccgtgccaggccctcctgggccacctggacccccgggcccacccggcactatgggggcctcctctggcgtgcgcttatgggccacaagacaggcgatgcttggccaagtgcatgaggtgcctgaaggctggcttatattcgtcgcagagcaggaggagctgtatgttagagtccagaatggattccgcaaagtccaactggaagcaagaacccctctgccacgaggcacagataacgaggttgcagctttgcagcctcctgtggtccagctccatgacagcaacccatacccgagaagagagcaccctcacccaaccgcccgtccttggcgcgcggacgatatcctggcaagcccaccccggcttccggaacctcagccttatccaggggcccctcatcacagcagctacgtacatctgagacccgccagacccacttcccctcccgctcacagccaccgggactttcagcctgtgctccacctcgtggcgctcaatagtccattaagtggcggaatgcggggcatcagaggtgcggattttcaatgcttccagcaggctcgggctgtaggattggccggcacttttagggcctttctctcttccaggctgcaggatttatatagcatcgtgcgcagagccgatcgcgcggctgtaccaatcgttaatctgaaagatgaactgctgtttcccagctgggaagccctgttctcaggttccgaggggcctctgaagcctggcgcgagaatattctcatttgatggtaaagacgtgctgcgacatcccacttggccacagaaaagcgtatggcatggtagtgatcccaacggccgcagactgacagaatcttattgtgagacgtggcgaaccgaagcaccaagcgctacgggccaagcgtcatctttacttgggggacgcctcctggggcagtcagcggcaagttgccaccacgcctacatcgttctctgcatcgagaatagtttcatgaccgcctccaaatag

SEQ ID NO: 14641 - DNA, 4020 bp, synthetic construct
  misc_feature 1..4020: note = Description of Artificial Sequence: Synthetic coding sequence
  source 1..4020: mol_type = other DNA
atggcaccccggtgtccctggccatggcctcggcgtcgaagactgctagacgttctggctccactggttcttctgctgggcgtgagggccgcctctgctgagcccgaaagaatcagcgaggaggtcggactgctccaattgttgggggacccccccccgcagcaggtgacccaaaccgatgatccagatgtcggcctggcgtacgtgttcggacctgatgctaacagcggacaagtggcaagatatcattttcctagtctcttctttagagatttctcgcttttgttccatataagaccagccaccgagggtcctggggtcctcttcgcaattacagatagcgctcaggcgatggtgctcctgggagtgaagctgagcggtgtccaggatggtcaccaggatattagtttgctgtacactgagccaggtgcaggtcagacacataccgccgccagtttccgcttacccgcctttgtcggccagtggactcacctagctctgagtgttgctgggggatttgtggccctctacgtcgattgtgaggagttccaaaggatgccgctcgcaagaagtagcaggggcctggagctggaacctggagcgggtctgtttgtagcccaagcaggaggtgctgacccggataagttccagggcgttattgccgaactgaaggtgcgccgcgatcctcaggttagtcccatgcactgcctagacgaggagggcgatgactctgatggtgcaagcggcgattcaggctccggactcggggacgctagagagctgttgcgtgaagaaacaggcgctgccctcaagccccggctgccggctccgcctccagttactactcctcccctcgccgggggatcgagtacagaggattcccggagtgaggaagtggaagagcagaccaccgtagccagtctgggagcccagaccctaccaggcagcgatagcgttagcacatgggatggaagcgttaggactccaggcggtagggtgaaggaaggtggactgaaaggccagaagggggaacccggagtccccggaccaccaggtagagccggaccgcccggatctccttgccttcctggccctcctgggctcccttgtccagtgtctcctctgggccccgcagggccagcactgcagaccgttcctggtccccaagggccccccggtccccctggccgggatggaactcccggcagagatggagagcccgtctcaccccatgtcccaccatctccaggagataccggaccacaaggttttcctgggacgccaggggacgtcggccctaagggcgataagggggatcccggggttggggagagggggcctcccggaccacagggtcctcctggccctcccgggccatcttttcgacatgacaaacttacttttatcgacatggagggcagtggctttgggggcgacctggaggccctacgcggtccacgaggttttccaggccctcctggtcccccaggagtcccagggcttcccggagagcctggacgtttcggtgtgaactccagtgacgtgcctgggccagcaggcctccccggcgtaccaggacgcgagggcccccccggcttccctggcctcccaggcccccccgggcctcctgggcgggagggccctcctggcaggacaggacagaaaggcagtttgcagggagccggagccccaggagttcagggcagtaaaggagctcctgggcccgcaggagcccgcggcgaatccggcctggccggcgccccgggacctgccggaccaccggggcccccagggccccccggcccaccgggtcccggacttccagcaggatttgatgacatggagggctccggagggccattttggagcacagcacgaagtgcggacggaccccaggaaccaccagctctgcacgggattggcggcgatcctggcgtgccagggctcccaggtgctaagggagaggtgggggcagacggagttcccggtttcccaggactacccgggcgggagggcattgctggcccccagggcccgaaaggtgacaggggcagccgcggagagaagggagaccccggcaaggacggcgtgggacagccgggcctgcctggacctcccggccctccagggccagtggtatacgtgagcgagcaggacgggtcagtgttgtctgtgcccgggccagagggccgacccggttttgcgggcttccccggacctgctggccccaaaggtaacctgggctccaaaggcgaacggggaagcccaggcccaaaaggcgagaagggtgagcccggtagtatcttttcacctgacggaggcgcgctgggtcctgcccaaaaaggcgcaaaaggggagcctggattcaggggacctccaggcccgtatggccgccccggctacaaaggtgagatcgggtttccaggcagacccggacggccgggaatgaacggtttgaagggagagaagggagaacctggcgacgcctctctgggcttcggtatgcgcgggatgccggggcccccgggcccgcccggtcctccgggccccccagggactccagtgtatgattcaaatgtgttcgccgaaagcagccgcccaggccctcctggactaccaggcaaccagggcccacctggccccaagggagcaaagggtgaggtgggccctccaggcccccccgggcaattcccatttgacttcctgcagcttgaggccgaaatgaagggagaaaagggagatcgtggcgacgccggtcagaagggagaaaggggtgagccagggggtgggggattcttcgggtcatcccttcccggcccccccggccctcctggaccacccggcccccgggggtaccctggcatacccggcccgaaaggggagagcatcaggggtcagcccgggcctcctggcccccagggccctcctggtatcggctacgagggacggcagggacctccgggacctcctggacctcccggtccccccagcttccctggacctcatcgacagaccatcagcgttcccggcccccccggcccacccggcccgcccggtccaccgggcacaatgggtgcgtcatcaggtgtaaggctttgggccacccgacaagcaatgctaggtcaggttcacgaggtaccagaggggtggctgatttttgtggctgagcaggaggaactgtatgtacgtgtccagaacgggtttcgtaaggttcagcttgaagcccgaacacctctgccaaggggtacagataatgaagttgctgccctccagccacccgtggtgcagctgcatgacagcaatccatacccccgccgagagcacccccaccctactgcccggccatggcgcgcggacgacatcctggccagcccaccgcgactgccggaaccgcaaccctacccaggggcaccccaccattcatcctacgtgcacctaaggccagcgaggcccacctcacctcccgcccactcacaccgcgactttcagcccgtgttacatctggttgccttgaatagtccattatctgggggcatgaggggtatccgaggcgcagacttccagtgctttcagcaagccagggccgtgggcctggctgggacatttcgggcttttctgagcagccggctgcaggatctttactccatcgtccggagagcggatcgcgccgcggtcccaattgtgaatctaaaagacgagctcctgtttcccagctgggaggctctcttcagtggctcagaggggcctctcaagcccggagctagaatcttttctttcgatggcaaggacgtgttgaggcaccccacttggccccagaagagcgtgtggcatggcagcgatcctaatggtcgccggctgaccgagtcatactgcgaaacatggcggaccgaagctccatccgcgaccggacaggcttccagccttctgggtggccgcttgctcggacaatcagctgcatcttgtcaccacgcctacatagtgctgtgcatagagaattcttttatgacggcctccaaatag

SEQ ID NO: 14642 - DNA, 5265 bp, synthetic construct
  misc_feature 1..5265: note = Description of Artificial Sequence: Synthetic coding sequence
  source 1..5265: mol_type = other DNA
atggccccgtatccttgtgggtgtcatattctgcttctccttttttgctgtttagcggctgcacgagccaacctcctgaacctaaactggttgtggttcaacaacgaggatacctcccatgccgccacgaccatccccgagccgcagggccctctgccggtgcagcccacggccgacacgacaactcacgtgacgccccgaaacggttcgaccgaacccgctacagcgcccggctccccagagcctccctctgaactactggaagacggccaggataccccaacaagtgcagaatcgcctgacgctccagaagagaatatcgccggcgtcggcgctgaaatcttgaacgtggcgaaaggcatccgatcctttgtgcagctttggaacgatactgtgccgactgagagccttgcccgcgctgagaccctggtgctcgaaaccccggtcggtcctctcgctctagctggcccctcatcgacaccacaggagaatggcactacgctctggccaagtagaggcatcccatcatcaccaggcgcacatactaccgaggccgggactctgcctgcccccacacccagtccccctagtctgggccgcccctgggcccccctgaccggaccctctgtccctcccccctcatctggcagagcgagtctgagtagccttcttgggggcgcgccgccatggggatccctgcaggaccccgatagccagggtctctccccagctgccgcagcaccatcacagcagctgcagaggcctgacgttcggcttagaacgcctctcttgcacccgcttgtgatgggctctctcggaaagcacgcggcaccatctgcattcagcagcgggctgccgggtgccctgtcgcaggtggctgtaaccactttgacacgggactcaggcgcatgggtatctcacgttgcgaactccgtggggccagggcttgccaataattctgctctgttaggcgccgacccagaggcgccagctggacgttgtcttccgctgccacctagtctgcccgtgtgcggtcatctcggaatctctcgattctggctccccaaccacctgcaccacgaaagtggtgagcaggtgagggccggggcccgcgcgtggggcggtctgctgcaaactcactgccatccgttccttgcttggttcttttgtttgctgctcgtgccaccctgcggtagtgtacccccacctgctccacctccttgttgccagttctgtgaggcgctccaggacgcctgctggtccaggctaggcgggggtagactgcctgtcgcatgcgcgtcccttccaactcaggaagatggctactgcgtcctgattggccctgccgctgaacgaataagcgaagaggtgggtctgctccagctgctgggggatccaccccctcaacaggtgacacagacagatgatcccgacgtgggtctggcctacgtgtttggacctgacgcaaactctggccaggttgccaggtaccatttcccatccctcttttttagagactttagcctcctgttccacataagaccagccactgaaggtcctggtgtcctgtttgcaattacggatagcgctcaagctatggtgttgctgggagttaaactgagcggggtccaggatggacaccaggacattagccttctgtacacagagccgggcgccggccagacacatactgccgcttcattcaggctccctgccttcgttgggcaatggactcacctggccctgagcgtggcagggggctttgttgccctgtatgtggactgtgaggaattccagcggatgccactggctagatcaagccgaggactggagcttgaacctggagccggccttttcgtggcccaggccggaggcgcagaccccgacaaatttcagggtgtaattgcagaactcaaagtgagacgcgaccctcaggtttccccaatgcattgtctcgacgaagaaggagatgacagtgacggtgcttctggcgactccggttcaggcctgggcgacgctagggagctcctccgcgaggagaccggcgcggctctcaagcctcgactgccagcaccgcctcccgtgactactccacccctcgccggaggaagctcaacagaagatagccggtctgaggaggtggaagagcagacaactgtcgcttccctgggcgcccagacgcttccgggatctgacagcgtttcgacctgggatggctccgtgcggacccctggcggccgcgttaaggagggcgggctgaagggtcagaaaggggagcccggggtgcctgggccgcctggcagagcaggccccccgggatcaccctgcctacctggacccccggggctgccctgcccagtctccccactcgggccagcaggccctgcactccagacagtgcccggcccccaaggaccacctggaccacccggccgagacggcacccccggcagggacggagaaccagttagtccacacgttccgccttccccgggggacaccggcccccagggatttcccggaacacctggggatgtgggacctaaaggtgataagggcgacccaggtgtcggcgagagaggaccgccaggtccgcagggccctccggggccccccggaccatctttcagacatgataaattaacatttatcgacatggaaggtagtggtttcggcggtgacctcgaagcccttagaggaccccgtgggttccctgggccccctggacctcccggcgtgccaggcctgcccggtgaaccgggtcgcttcggagttaacagctccgacgtcccagggcctgccgggctacccggggtgcctggtagagagggaccccccggctttccgggtttgcccgggccaccgggaccgccagggcgggaggggccacctggccggacagggcaaaagggaagtctgcagggcgccggagccccgggcgtgcagggctccaaaggagcacctggtccagctggcgcgaggggggaatccggactggcaggagcccccggcccagccggaccaccaggtcctcccgggccacctggaccaccagggcccggcttaccagcaggctttgatgatatggagggttccgggggccctttctggtcaacagctaggtccgcagatgggccacagggtccaccaggcctcccaggactgaagggggaccctggcgtccccgggttacctggcgccaagggagaggtgggcgcagatggagttcccggtttcccaggacttcccggacgtgagggcattgcagggccccagggacccaaaggagacaggggaagtcggggagaaaaaggcgaccccggcaaggatggggtcgggcagccaggtctgcccggtcctccaggcccgccaggaccggttgtgtacgtatcagaacaagatggctcagtgctctcagtgcctgggccggagggccgccctggcttcgccggctttcctggccctgccggacctaagggtaatttgggtagcaaaggagagcgaggatctcccggccccaagggcgaaaaaggtgagcccggctcaatcttctccccagatggtggggccctgggtcctgcccaaaaaggcgcgaagggcgagccgggcttcagagggcctcccggaccttatggaagacctggatataagggcgagattggatttcccggccgacccggcaggcccgggatgaacggactgaaaggcgaaaagggagaaccaggagacgcgagtctgggattcgggatgcgggggatgcctggaccacccggaccccctgggcctcctggaccgccggggactcccgtctatgacagcaacgtcttcgccgaaagttcaaggcctgggccaccagggctgcccggaaatcagggccctcctggcccgaagggggctaagggggaggtgggacctcccgggccaccaggtcagtttccgttcgacttcctgcagttggaggcggaaatgaagggggagaagggggataggggcgatgctggacagaagggggagcggggcgagcctggaggcggcggatttttcggaagtagtcttcccggcccaccggggccccctggacctcctggcccaagagggtatccaggtatacctggccctaagggagaaagcatcagggggcagcccgggccaccggggccacaagggccccctgggatcgggtacgagggtcgccaaggccctcctggtccacccggcccgccgggtcctccttctttccctggaccccataggcagactatttccgtgcctggaccaccagggccacccggtcccccaggaccccctggcacaatgggggcctcttctggtgtcagattgtgggccactcgacaggccatgttaggccaggttcatgaggtgccagaaggctggttgatctttgttgcagagcaggaggagctgtatgttagggtgcaaaacggctttagaaaagttcaactggaggcgcggacacccttaccacgtggaacagacaacgaggtggcagccctgcaacccccggtagtacagcttcacgactctaatccgtatcccaggagagagcacccacacccgacagctaggccttggcgggcagacgacatcctagcttcaccaccaagactgccagaaccacaaccctatccaggagccccacaccattccagctacgttcaccttaggccggctagacctacatcccctccagcccatagccacagggattttcaaccagtgctgcacttggtcgctcttaattcccccttaagtgggggaatgcgcgggatccggggcgccgacttccagtgcttccaacaggcacgggctgtgggtttggccggcacctttagagcctttctgtcgtccagattgcaggacctgtattctatcgttcgaagagccgatcgtgctgccgtgcccattgtgaacctgaaggacgagctactgtttccctcctgggaagcgctcttttccggaagcgaaggccctctcaaacctggcgctcggatcttctctttcgacggcaaggatgtgctccgtcaccccacttggccccagaagtctgtatggcatggttcggatccgaacggccgcagactcacagagtcatattgcgaaacatggcgcactgaggcccctagtgctacgggccaggcttccagtttgcttggcggcagattactgggccagtcagccgcttcctgccatcacgcatacatcgtactgtgtatagaaaactcctttatgaccgcttccaaatag

SEQ ID NO: 14643 - DNA, 1623 bp, synthetic construct
  misc_feature 1..1623: note = Description of Artificial Sequence: Synthetic coding sequence
  source 1..1623: mol_type = other DNA
atgggccctggcgagcgcgcaggtggcggcggagacgcaggaaagggaaacgcagctggtggaggcggagggggccgaagcgctacaaccgcggggtcacgggcggtgagcgccctgtgcctcttgctgtcagtcggctccgccgcggcatgcctcctactgggcgtacaggcagcagctttgcagggaagagtggctgcactcgaagaggagcgcgagctcctccggcgcgccgggccacccggggcactggatgcctgggcagagccccatctggaacgtctgctgcgggaaaagcttgacggcctggcgaaaattagaacggcgagagaagccccatccgagtgcgtgtgcccacctggtcctccaggtcgaagggggaaaccgggacggcgcggggaccccggtccccctggccagtccggccgggatggatatcccggtcccctcggactggatggtaagcccggccttccaggacccaagggcgaaaaaggcgcgccaggtgattttggccctagaggcgatcaggggcaggacggggcagcagggcctccagggccgccaggtcccccgggcgctagggggcccccaggcgatacgggcaaggacggccccagaggagcccaagggccggctggaccaaagggcgaacccggccaggacggagagatggggcctaagggtccccccgggccaaagggcgagccaggtgttcccggcaaaaagggagatgacgggacaccaagccagcccggtccccctggcccaaaaggcgagcccggctccatgggacctaggggagagaacggagtagacggtgctcccggccctaagggggaacctggacatagaggaactgacggggctgcgggacctaggggagcccccggactcaagggtgaacagggggacaccgttgttattgattatgacggcagaattctggatgctctgaaagggccccccggtccccagggcccacccggcccccccggaattccaggagccaagggcgagcttggactgccaggggctccaggaatcgacggagaaaaagggcccaaagggcaaaaaggcgatcctggtgagcctggtccagccggactgaagggcgaggccggggaaatgggcctgtcaggcctgccaggggctgatgggctgaaaggagaaaagggcgagagtgcatccgattctctgcaggagtctctcgcgcagttaattgtagagcccggaccacctgggcccccaggccccccaggtcctatggggctgcaaggaattcagggacctaagggactggatggggctaagggtgagaagggagcctccggcgagcgcggcccgagcggtctcccaggccctgtgggcccccccggcctgatcggcctccctggcaccaagggggagaagggacgtccaggagagcccggcctggacgggttccccggcccgaggggtgagaagggggaccgcagtgagcgtggagaaaaaggggaaaggggcgtccctggaagaaagggtgtgaaaggccagaaaggagagcccgggccaccgggactcgatcagccatgcccagtgggacccgatgggttaccagtcccgggctgttggcacaaatag

SEQ ID NO: 14644 - DNA, 930 bp, synthetic construct
  misc_feature 1..930: note = Description of Artificial Sequence: Synthetic coding sequence
  source 1..930: mol_type = other DNA
atggaatcccgttccggtattcaggccggagtgcggtgtcgtgatcttggaagcctgcagcccccacctctcgccctgaagcagttcagttcactgtctttgcccagttcctgggactacaggcggcttccccctcgctgcggatttctctttgaggtttcggaaaccaccaatcctcctgccgggacaaattctagacacaccctgactgtcaaactggacggcctggccaaaattcgcaccgctagggaagctccctctgagtgcgtttgccctcctggccctcccggccgccgaggcaaacctgggaggaggggcgatcccggacccccgggcccgctagggttagacggcaaaccaggactgcctggaccgaaaggcgagaaaggcgcgcctggggatttcggaccaagaggagatcagggacaggatggagccgccggacctccagggccgcctggcccccctggtgctagaggccctccaggagacaccgggaaagacgggccaaggggcgcacaaggccccgctgggcccaagggcgaacctggccaggacggggagatgggccccaaaggcccaccgggcccaaagggagagcctggagtgcccggcaagaaaggggacgatggcaccccatcacagcccggaccccccgggcccaagggggagcctgggtcaatgggccccagaggcgaaaacggggttgacggcgcccccgggcctaaaggggagcctggccaccgcggaacggatggcgcagctggaccgcggggtgatgtccgagacccgggcctgggcagcgtgtcatcgtgttcgcagcgacttgcaagttcttccaagaagaatggcagcgaaccacccccaggctgcgccggttgtcctaggcctcaagggagagccggtcgtcatagcggggatcgcttatag

SEQ ID NO: 14645 - DNA, 1665 bp, synthetic construct
  misc_feature 1..1665: note = Description of Artificial Sequence: Synthetic coding sequence
  source 1..1665: mol_type = other DNA
atgaccgctcctggagcagcgggcagatgccccccaactacgtggctgggctctttgttgctcttagtgtgcttactcgcatctagaagtataacagaggaggtctccgaatactgtagccatatgataggatccggccacctgcagagtctgcagaggttgatcgacagtcagatggaaaccagctgtcagatcaccttcgagtttgttgatcaggaacagcttaaagatcctgtctgctatctgaaaaaagcctttctcttggtacaagatatcatggaggatacgatgcggtttagggacaacacgcccaacgctattgcaattgtacaactgcaggaactgagcttaagactcaagagctgcttcacaaaggactatgaggagcacgacaaggcttgcgtcaggactttctacgagacccccttgcagttattggagaaggtgaagaacgtgttcaacgaaacaaaaaacctgctggataaggattggaacatcttcagcaagaactgcaataacagttttgccgaatgtagctctcaggacgtcgtcaccaaaccggactgcaactgcctctaccccaaagcaatcccttcttctgaccctgcatcagtaagcccgcaccagcctcttgcaccttccatggctcctgtcgcgggtctgacatgggaggacagcgaaggcactgaaggcagtagcttacttccgggagagcaacctctccatactgtggatcctggatccgccaagcaaagaccacctagatcaacttgtcagagctttgaacctcccgagacaccagtggtgaaagactctactataggtgggtccccccaaccgcgcccctctgtgggcgcctttaatcctggtatggaagatatcctggactctgcaatgggtacaaattgggttcccgaggaagcttctggcgaggcctccgagattccagttcctcaaggcactgagctgagtccaagccgacccggagggggcagtatgcaaaccgagcccgcccgtcctagtaatttcctgtcagcctcttctccattgccagccagtgccaagggacagcagccagccgatgtcaccggaactgccctgccgagggttgggccagtgagacctaccggccaagattggaatcacaccccccaaaagactgaccacccctcggccctcctccgggacccccccgagcccggatccccccgtatctcttcgttgaggcctcaaggcctctccaacccaagcactctctctgctcaaccacaattaagcagatcccatagctcagggtccgtgcttccactgggagaactcgagggtaggaggtctaccagggatcgacgctcacctgccgagcccgagggagggcccgcgagtgagggcgcagcccgcccgcttccccgcttcaatagtgtccccttaaccgacactggtcatgagaggcaatctgaggggtctttcagcccacaactgcaggagtctgtgtttcacctccttgttcccagcgtgattctggttttactcgcagtcggtggactgctgttctacaggtggagacggaggagccaccaggagccacaaagggccgactctcctctggagcagccagaggggagcccgctcacacaagacgaccgccaggtggaactcccagtttag

SEQ ID NO: 14646 - DNA, 1317 bp, synthetic construct
  misc_feature 1..1317: note = Description of Artificial Sequence: Synthetic coding sequence
  source 1..1317: mol_type = other DNA
atgacagcacccggagcggcaggccggtgcccgccaacgacctggctgggatccctgctgctactggtatgtctcttagcatcccgatccattaccgaagaagtttctgaatattgtagtcatatgatcggctcaggccacttgcagtcgctgcagcggctcatcgactcacagatggaaacttcgtgccagatcacctttgagtttgtcgaccaggagcagctcaaagaccccgtttgttaccttaaaaaagcctttctgctagtgcaggacattatggaggataccatgcgcttcagagataacacaccaaacgctattgccattgtgcagttgcaggaattgtccttaagactgaagagctgctttacaaaggactatgaggagcacgataaggcctgcgttcgcacattttacgaaactcccctgcagctactagagaaggtgaagaacgttttcaacgagacaaaaaatttactggataaagactggaacatctttagcaaaaattgtaataactccttcgccgagtgctcatcccaggatgtagtgaccaagccagactgcaattgcctgtaccccaaggcaatcccttcctccgaccccgcctcagtatctccccaccaacccctagccccatcaatggctccagtggctggtcttacctgggaggattcagagggcaccgagggtagcagcctcctgcctggggagcagcccttacatactgtagatcctgggtctgccaagcagaggccaccgagatctacgtgccagagcttcgaacctcccgaaacaccagtggtgaaagattctacaatcggtgggtcaccccagccgcgcccttcagttggagccttcaacccgggcatggaagatattcttgatagcgcaatgggcacaaactgggttccggaggaagcttcaggagaagcctctgaaattcccgtacctcaaggcaccgagctcagcccgtcacggcccgggggaggcagcatgcaaacggaacccgcacgaccaagcaatttcttaagcgcctctagccccctccccgcctctgcaaaaggccaacagcctgcagacgtcacgggccacgaaaggcagtccgaggggtcattttctccccaactgcaggagtcggtcttccatctcctcgtgccctccgtcatcctcgtgctactcgctgtgggcgggttgctgttttaccggtggcggagaagatctcaccaggagccccagcgcgccgacagcccactggagcaacccgagggctcccccttaacacaggacgaccgtcaagtggaactacctgtgtag

SEQ ID NO: 14647 - DNA, 360 bp, synthetic construct
  misc_feature 1..360: note = Description of Artificial Sequence: Synthetic coding sequence
  source 1..360: mol_type = other DNA
atgacagcgccgggcgccgcaggcaggtgtcccccaaccacctggctggggagcctgctcctgctggtgtgtctcctggcttccaggagcattacagaggaggtctcagaatactgttcacatatgatcggatctggacatctgcagtcactgcagcgtctgattgacagccaaatggagacttcctgccagattaccttcgagttcgttgatcaggaacagctgaaagaccctgtatgttatttgaagaaagctttcctactcgtgcaagatatcatggaagacaccatgcgcttccgggacaacacccctaacgcgattgccattgtgcagctgcaggaactgtcgctgcggttgtag

SEQ ID NO: 14648 - DNA, 1317 bp, synthetic construct
  misc_feature 1..1317: note = Description of Artificial Sequence: Synthetic coding sequence
  source 1..1317: mol_type = other DNA
atgactgccccaggcgcagcgggtaggtgcccccccacgacttggctaggatcattgctgctgctggtgtgccttctggcatcgcgttctatcaccgaggaagtgtctgagtattgttctcacatgattggttctggccatttacagtcgctccagcggttgatcgatagtcagatggagaccagctgtcaaatcacttttgagtttgtcgaccaggaacagctgaaagaccctgtctgctacctcaagaaggctttcctcctggtacaagatatcatggaagatactatgcggttccgcgacaataccccaaatgctatcgcaattgtgcaattgcaagaactgtccctgcgcctcaagagttgttttacaaaagattatgaggaacatgataaagcatgcgtgagaaccttctatgagactccattgcagttacttgagaaagttaagaacgtgtttaacgagacaaagaacctgctagacaaggattggaacatcttttccaaaaactgcaataactcatttgcagaatgttcgagccaggatgtggtaaccaaacctgattgcaattgcctatatcctaaagccatcccttcctctgatcccgcatcagtgtctccacatcagccacttgcccctagtatggctcccgttgccggtctgacatgggaggattccgaaggcacagagggaagctcactcctcccaggcgagcaacccctgcataccgtggatccagggtcagccaaacagcggcctcctcgcagtacttgtcagagtttcgagccgcccgaaactcccgtggtaaaagatagcaccataggtggaagccctcagcccaggcccagcgtcggcgcctttaatccgggaatggaagacatccttgactccgcaatgggaacaaactgggttccagaggaggcaagcggagaagcttctgagatcccggttcctcagggaacagaattgtctccttctcggccaggtgggggctctatgcagacagaacccgctaggccctctaacttcctttcagcctcttcaccactgcccgcctctgccaaagggcagcagcccgcagacgtcactggccacgaacgacagtcagagggttcttttagcccgcagttacaggagagcgtgttccatttgttagtcccaagcgtcattttagtgctgttagctgtgggaggccttctgttttacaggtggagaagacgctcgcatcaagaaccacagagggctgactccccacttgagcaaccagaaggttcgcctcttacccaagacgatcggcaggtagagctgccggtgtag

SEQ ID NO: 14649 - DNA, 1665 bp, synthetic construct
  misc_feature 1..1665: note = Description of Artificial Sequence: Synthetic coding sequence
  source 1..1665: mol_type = other DNA
atgaccgccccgggggcggcaggccgctgtcccccgactacatggctagggagtttattgcttctggtgtgcctcctcgcatcccggagcatcaccgaggaagtatcagagtattgttcccacatgatcggctcaggccatctccagtcgctgcagcggctgatcgacagtcaaatggagacatcatgtcaaatcacctttgagtttgtggatcaggagcaactgaaggatccagtgtgttacctaaagaaggcctttctattagtacaagacatcatggaagacactatgcggttccgcgacaacacaccaaacgccatcgcaatagtacaactgcaggaactgtccctgcgcctgaaaagctgtttcactaaagattacgaagagcatgacaaagcttgcgtgcgaaccttctatgagacacccctccagttgctcgaaaaagttaaaaacgtgttcaacgagactaagaacctgctcgacaaagactggaacatcttctccaaaaactgcaacaatagtttcgctgagtgctcctctcaggatgtggtaacaaagcctgattgtaactgtctctacccaaaggcgattccatcctcagaccctgcatctgtgagccctcaccagccgctggccccaagtatggccccagtggccggcttaacttgggaagactcagaaggtacagaggggtcatctctcttacccggagagcaaccactgcacaccgttgatcccggatccgccaagcagaggccacctagaagcacgtgtcaatcctttgagccacctgagactcccgtggtaaaggacagcacaataggcggttctcctcaacctcggccctccgtaggagcctttaatccaggaatggaggatatactggattcggctatggggaccaactgggttccagaagaggcctccggggaggcctccgaaatccccgttccgcaggggacagagctgtcaccgagtcgtccgggaggagggtcaatgcagaccgaacctgctcggcccagtaacttcctgagcgcctcctctccattgcccgcatctgccaagggacaacaacctgcagatgtcacaggcacagcactgcctcgggtaggaccagtgagacccacaggacaggattggaaccacaccccacagaaaaccgaccacccatctgctctgctgagagacccccctgagcccggctccccccgcatctcctcacttcgacctcaggggctatcaaatccatccacactgagtgcccagccacagttatctaggtcccatagcagtggatctgttctccctctgggtgagctagaaggcagaaggagtacacgcgacaggcgaagcccagccgagcccgaaggagggcccgccagcgagggggcagctcggcctctaccccgatttaactcggttccccttacagatactggccacgaacggcaatccgaaggatcttttagcccacagcttcaagaatccgtattccacctgctcgtaccgtctgtgattcttgtgctcttagccgtcggaggactgctattctacagatggagacggcggtctcatcaagagccacagcgggcagacagcccactggagcaaccggaggggagtccattgacacaggatgataggcaagtcgaactccccgtttag

SEQ ID NO: 14650 - DNA, 771 bp, synthetic construct
  misc_feature 1..771: note = Description of Artificial Sequence: Synthetic coding sequence
  source 1..771: mol_type = other DNA
atgactgcacccggcgccgcgggacgctgcccacctaccacctggctgggcagtttgctcctcctggtctgcctcctagccagccggtccattaccgaggaggtgtccgagtactgcagtcacatgatagggtcagggcacttgcagtctctgcaaagactaatcgattcccagatggaaactagctgtcagatcacctttgaattcgtggatcaagaacagctgaaggatcccgtttgctaccttaagaaagctttcttgttggtgcaggacattatggaagatactatgaggttccgggacaacacccccaacgctatcgccattgtccagttacaggagctgtccttgcgcctgaagtcttgtttcaccaaagactatgaggaacatgataaagcttgtgtgcggacattttacgagacacctctgcaactcctggaaaaggttaagaatgtgtttaacgaaactaaaaatcttctcgacaaagattggaatatcttctctaaaaactgcaacaattccttcgctgagtgcagctcgcagggccacgaaaggcagtccgagggcagtttttctccccagttgcaggagagcgtctttcaccttctcgtgccaagcgtgatcctggttctgctggcagtggggggactgctcttttaccgctggagacggcgcagccaccaggagcctcaacgcgcagactcacctctcgagcagccagaagggtcccctttgacgcaggacgaccgccaagtggaactgcccgtatag

SEQ ID NO: 14651 - DNA, 828 bp, synthetic construct
  misc_feature 1..828: note = Description of Artificial Sequence: Synthetic coding sequence
  source 1..828: mol_type = other DNA
ggaagccctggcatggccggagctctttgcgcaggacatatcgctggcctgtatggcgaccgtggcttggtgccaagcacccgaagggaggaacgcgggggaagaaagacgtggcagactggagccgctcgcccccaaggcggggccagaggggccggcgggccttggcatcccgacaggcacccacgtcccaaggaaaccaggggcaatctgggcccactggaaactcctgctcgttgggctacacagggcccagccgcaccaagcgaacccattccagggatcaaggggactaagggcagccccgggaatattaaagaccagcctaggccagcgttctcagcgatcagaagaaatccaaatgggggacaaagagggcacagcacaagatctagcccaactcgaaagaacaggacccgcaccactcctgctgattcaagtgcattgtaccctgctacaacgacatctccatctaggtgctgccccagcggaaagtctgcatgcccctcgtctcccccccagggcgcacgatcggacgccccatgggcctctgttacccccccgacaagaggtagctcgagatggtgtcagggcgcctggtgtttttcatgttctcgagtgaccaggtcaggactcaaaaagacccccaagcgcgtgacattcaccagggccctgcgcccaacagcatctagcgcagccagttcctctagtcacctccccgaacctgggaaagacccgcttccccatccccctctttggcttccttgctccgcttgtaaaatgggagccctgctgttgcagcttctgaaaggtggtgggtggttatag

SEQ ID NO: 14652 - DNA, 738 bp, synthetic construct
  misc_feature 1..738: note = Description of Artificial Sequence: Synthetic coding sequence
  source 1..738: mol_type = other DNA
atggagggtccgagaggctggcttgtgctctgtgtgctggcaatctccttggcctctatggtcacggaggacctgtgcagagcacctgacggtaagaagggcgaagcaggccgccctgggaggagagggcgaccaggcttaaagggggaacagggcgaacctggggcccccggaattagaaccggcattcagggcctgaaaggcgatcagggcgagcctggccccagtggtaacccgggtaaggttggctatccgggcccctcaggtccactgggggctcggggaatccccggcattaaaggaacaaaaggaagccccgggaacattaaggatcaaccaaggccagccttctccgcaatccggcggaaccctccaatgggcggaaacgtggtcatttttgatacggttattaccaaccaggaggagccttatcagaatcacagtggacggttcgtatgtacggtgccaggctactactacttcacgttccaggtgttgtctcaatgggagatctgtctgtccattgtcagttccagccgagggcaggttaggcgaagccttgggttctgcgacactacaaacaaggggctattccaggtcgtatccggagggatggtgctccagctccagcagggggatcaagtctgggtggagaaagatcccaaaaaggggcacatttatcaaggttcggaagccgactccgtgttcagtggctttttgatcttccccagtgcgtag

SEQ ID NO: 14653 - DNA, 738 bp, synthetic construct
  misc_feature 1..738: note = Description of Artificial Sequence: Synthetic coding sequence
  source 1..738: mol_type = other DNA
atggagggaccgcgtgggtggctcgtgctgtgcgtgctggcgatctcactggcgtccatggtcacagaggacttgtgcagggcacccgatggcaagaagggcgaagcaggacggcccgggagacgcggtcgccctggcctcaagggagagcagggagagccaggggctcccgggatccgtacaggaatacagggactgaaaggggaccagggagagccaggccctagcggaaatccaggtaaggtggggtatcccggcccaagcggtccacttggggcgcgaggaatccctggcatcaaagggacaaaaggctctcctggaaacattaaggatcaacctcggcctgctttcagcgccatccgaaggaatccacccatggggggcaacgtcgttattttcgatacggtgatcactaaccaggaggagccctaccagaatcattcggggcgcttcgtgtgcactgtaccaggctactattatttcacctttcaggtgctgagtcagtgggaaatttgcctaagcattgtgagtagctccagggggcaagtgaggcggtctctcggattctgcgacaccaccaacaaaggcttgttccaggtagtaagtggcggaatggttctgcaactacagcagggagatcaagtctgggtcgagaaggatcctaagaaaggccatatctatcagggcagcgaggctgatagtgtcttttctggttttttgattttcccttccgcatag

SEQ ID NO: 14654 - DNA, 666 bp, synthetic construct
  misc_feature 1..666: note = Description of Artificial Sequence: Synthetic coding sequence
  source 1..666: mol_type = other DNA
atggaaggtcctcgcggatggttggtcttgtgtgtgttagcgataagtctcgccagtatggtcactgaagatctctgtagggcgccagatggaaaaaaaggtgaagccggaagaccgggcaggcgcggaagaccgggcctaaagggggagcaaggtgagcctggagcccccggcattcgtacaggcatacaggggctgaagggcgatcaaggcgagcctggacccagtggcaatcctggcaaagttggatatcctggaccttcaggcccattgggcgccagagggattcctgggattaaaggtaccaaagggtcacccgggaacattaaggaccagccacgaccagctttttctgctattcgtcgtaacccccctatgggtgggaacgtcgtgatctttgacaccgttattacaaatcaggaagagccgtaccagaaccactctggcagattcgtgtgtaccgtgccgggctattattactttacatttcaggtgttgagtcaatgggagatatgcctctcaatagtgagcagctctcgcggccaggtgcgtcgtagccttggcttttgtgataccacaaataaggggctctttcaggtcgtatcaggggggatggtgctgcaactgcagcagggagatcaggtctgggtcgagaaggacccgtag

SEQ ID NO: 14655 - DNA, 1050 bp, synthetic construct
  misc_feature 1..1050: note = Description of Artificial Sequence: Synthetic coding sequence
  source 1..1050: mol_type = other DNA
atgacagcggcctccatggggcccgttagagtggccttcgttgtgctgttagcactgtgcagtaggcccgccgtgggtcagaattgtagcggtccctgccgatgtcctgacgagcctgcaccacgctgccccgcaggagtgagcctcgtgctggatgggtgcggctgctgccgggtctgcgctaaacagctgggcgagctatgcaccgaacgcgacccttgcgacccacacaaggggcttttttgccattttggttctccggccaatcggaagatcggcgtgtgcaccgccaaagatggggccccctgtatttttgggggcacggtgtaccgctctggagaatccttccagtcctcatgtaagtatcagtgtacgtgtttggatggcgcagttgggtgcatgcccttgtgctccatggatgttcgcctcccgagcccagattgtccctttcccaggcgcgtcaaactccccggcaagtgttgtgaagaatgggtctgtgatgagccaaaagatcagacagtcgtcgggcctgcactcgccgcctaccgtctggaggacacgtttggaccagatcctactatgattcgcgccaactgtctggtccagaccacagagtggtctgcatgtagcaaaacctgtggaatgggtataagtaccagagttactaacgataatgccagttgtaggctggagaagcaatctcgcctctgcatggtgcgaccatgtgaagccgacttagaagaaaacatcaagaaggggaaaaaatgtatccggactcctaagatttccaaacccattaaattcgagctgagtggctgcacatccatgaaaacgtaccgggccaagttttgtggcgtgtgcacagacggtagatgttgcactccccacaggacaacaactctgccggttgagtttaagtgccctgacggcgaagtgatgaagaagaacatgatgtttatcaagacctgtgcatgccactataactgccctggagacaacgacatatttgagagtctgtactaccgcaagatgtatggagatatggcctag

SEQ ID NO: 14656 - DNA, 2238 bp, synthetic construct
  misc_feature 1..2238: note = Description of Artificial Sequence: Synthetic coding sequence
  source 1..2238: mol_type = other DNA
atggaaaggcctcccgggctgagacccggggcaggggggccttgggaaatgcgagagcgcctgggcaccggcggcttcggaaacgtatgcctataccagcatcgcgagttggatctcaaaatcgcgatcaagtcttgccgcttggagctgagcactaagaacagggagcggtggtgccatgagatacagattatgaaaaagttaaaccacgcaaatgtggtcaaggcttgcgatgtgccggaagagttgaacattctgatacatgacgtgcccttgctcgctatggaatactgttccggcggggatctgaggaagctgctgaataagcctgaaaattgctgtggtttaaaagaaagccagattctgtccctgctgagcgacataggaagcgggatacgctacctccacgagaacaaaattattcaccgggacctgaagcccgaaaatatcgttcttcaggacgtgggtggaaaaatcattcataagataatagacttaggttacgctaaagatgtggaccaggggtctttgtgcactagttttgtaggaacgttacaatacctcgcacctgagctcttcgagaacaagccctacaccgctaccgtggattactggagcttcggcacaatggttttcgaatgtatcgcgggctaccgtccgttcctccatcacctgcagcctttcacctggcacgagaaaataaagaagaaagatcccaagtgtatcttcgcatgcgaagagatgtccggggaagtgaggttctcctctcatctgccacagcccaactccctctgctctctcgtcgttgaacctatggaaaattggctgcagctgatgttaaactgggatccccaacagcgggggggccctgtggatctgacactaaaacagcccaggtgttttgtactcatggatcatatcttgaatttgaaaatagtgcacattttaaatatgacaagcgcaaaaatcattagttttcttctcccccctgacgaatctcttcactctctgcagtcgcggatcgagcgggaaaccggcatcaatacaggaagtcaggagttacttagcgaaacgggcatttccctcgatccacggaagcctgcaagccagtgcgtgctggacggtgtgaggggctgcgacagttatatggtttatctcttcgacaagtcaaaaaccgtctacgagggcccgttcgcctcgcggtcactcagcgattgtgtaaactatatcgttcaggactccaagatccaactgcccattatccagctccggaaagtatgggcagaagccgtacattatgtctcgggtctcaaagaggattactcaagacttttccagggacagagagccgcaatgctatccctgctgcggtacaacgcgaacctgacgaagatgaagaacacactcatatcggcctcgcagcagctgaaagccaaactcgagtttttccacaaatcgatccagctggatctggaacgctactccgagcagatgacttatgggatttcctcagagaaaatgctaaaggcctggaaggagatggaagagaaagccatacattacgcagaggtgggggtcatcgggtaccttgaagaccagattatgtccctccacgccgaaatcatggagctgcagaagtccccttatgggcggaggcagggagacctcatggagtcattagaacagcgcgccatcgatctgtacaagcagctcaaacataggcctagcgaccattcttactctgacagtaccgagatggtcaagattatcgtgcacacagtccaatcccaggatcgagttctgaaggaactgtttgggcatctgagtaagctgttggggtgcaaacagaagatcatagatcttctccccaaagtggaagtcgcattatctaatatcaaggaagccgacaacacagtgatgttcatgcaggggaagcgtcagaaggaaatctggcacctcttaaagattgcctgcactcagagctccgcccggtctctggtcgggtcttctctggaaggcgcagtgacccctcaaacatccgcatggcttcctccgacgtccgccgagcatgatcactccctttcctgtgtagtgactccccaggacggagaaacatccgctcagatgatcgaagagaacctgaattgtctaggtcacctgtccaccataattcacgaagccaatgaggagcaaggcaacagtatgatgaacctagattggagttggctcacagaatag

SEQ ID NO: 14657 - DNA, 1653 bp, synthetic construct
  misc_feature 1..1653: note = Description of Artificial Sequence: Synthetic coding sequence
  source 1..1653: mol_type = other DNA
atgtggaaagctagtgcaggccacgcggtttctattgcccaggacgatgcaggagccgacgattgggagacggatcccgacttcgtgaacgacgtgtctgagaaggagcagcgatggggcgcgaaaaccgttcaagggtctgggcaccaagaacatataaatatccacaagctcagagagaatgtgttccaggaacatcagaccctgaaagaaaaagagctggagaccgggcccaaagcctctcatggttacggtggtaagtttggcgttgagcaggaccgcatggacaaaagtgccgtcgggcatgagtatcagagtaaactgagcaaacattgtagtcaagtggacagcgtgcgagggttcggtgggaaatttggcgtccagatggaccgcgttgatcagtcagccgtcggcttcgagtaccaggggaagacagagaaacacgcgagccaaaaagattatagttcaggattcggagggaagtatggagtccaggcagaccgagtggataagagcgccgtggggttcgactaccaggggaaaaccgagaaacatgaaagtcaacgcgattactcaaaagggttcggtggcaaatatgggatcgataaggacaaagtggacaaaagtgccgtcggcttcgagtatcagggcaagactgagaagcatgagagccagaaagactatgtgaagggatttggcggcaaatttggtgtccaaaccgacaggcaagacaagtgtgcactaggctgggaccaccaagagaagctgcaacttcacgagagccagaaggactacaagactgggtttggaggaaagttcggcgtccagtccgagcggcaggactcggccgccgtgggcttcgactacaaagaaaagttggccaaacacgaatcacagcaggattactcaaaaggcttcggaggcaagtatggcgtacagaaagaccgcatggacaagaacgcctccacctttgaagacgtcactcaagtcagctccgcttatcagaagaccgtacctgtggaggctgtgaccagcaaaacctccaatatccgcgctaatttcgaaaaccttgctaaagagaaggagcaggaagaccgaaggaaagctgaagctgagagggcccagaggatggccaaggaacgacaggagcaagaggaggctagaagaaaactggaggaacaggctcgtgctaagacgcagacaccacccgtatcccctgcaccccagcccacagaagaacgtctgccctcttcacctgtgtacgaagacgcagcctctttcaaggccgagctttcctaccgaggtcccgtgtctggaacagagcccgagccagtatattctatggaggctgccgattaccgagaagcgtcttcgcagcagggactcgcatatgcaacagaggcagtgtacgaatcagctgaagccccaggtcattatccggctgaggattccacatacgatgagtatgaaaacgaccttggcataaccgccgtggccttgtacgactatcaagctgccggggatgatgagatctccttcgatcctgacgacattattaccaacatcgagatgatcgatgacgggtggtggcgcggagtctgtaaaggtaggtatggcttgtttcccgccaactatgtcgaactgaggcaatag

SEQ ID NO: 14658 - DNA, 1542 bp, synthetic construct
  misc_feature 1..1542: note = Description of Artificial Sequence: Synthetic coding sequence
  source 1..1542: mol_type = other DNA
atgtggaaagcttctgccggtcatgcagtttctattgctcaggatgatgcaggcgctgacgattgggagactgatccggactttgttaacgatgtctctgagaaggagcagcgctggggggctaaaacagtacaggggtccggacaccaggagcacattaatatccacaaacttcgggagaacgttttccaagagcaccagacgctcaaagagaaggagctggagaccggcccgaaagcctcccatgggtacggtggcaaatttggtgtggagcaggatcggatggacaagagcgctgtgggccatgagtaccaatcaaagctgtcaaagcactgctcacaggttgactcggtgcgcggcttcggcggcaaattcggcgtgcaaatggacagagtggaccagagcgccgtgggcttcgagtaccagggtaaaacagagaaacatgcgtcccagaaagactactccagcggttttggagggaaatatggcgtgcaggcagatcgggtcgataagtcggccgttggatttgactaccaaggcaagaccgaaaaacacgagagccaaagagactattccaaaggattcggaggtaaatacgggatcgacaaggataaggttgacaagtcggccgtaggcttcgaatatcagggcaagactgagaagcacgaatctcagaaagactatgttaaaggctttggggggaaattcggtgtgcaaacggatcgacaggataagtgtgccctgggatgggatcatcaggaaaaattacagttgcacgaatcacagaaggactattcaaagggattcggcggcaagtacggcgtacagaaggacagaatggacaagaatgcttccacatttgaagatgtgacccaagtgtccagtgcttaccagaagacggttccggttgaggctgtgacctccaaaactagtaacataagagccaactttgagaaccttgcgaaggagaaagagcaggaagatcggcgaaaggctgaggccgaaagggcccagaggatggccaaggaacggcaagaacaggaagaagcccgtagaaaattggaggagcaggcaagagccaagacccagacccctccagtgtctcccgcccctcagcccacagaagaaagattgccttcgtcgccagtctatgaggacgctgcctcctttaaggccgagctgtcgtaccggggcccggtgagtggcacagagcccgaaccggtttattcaatggaagccgcggactatagggaggcttcctctcagcagggtcttgcgtatgcaactgaagccgtctacgagtccgccgaggcacctggacactaccctgctgaagattctacttacgatgaatacgaaaacgatctcggcattacagccgtggccttgtatgattatcaagccgcaggggatgatgaaattagctttgaccctgacgacattattacgaatattgagatgatcgacgatgggtggtggcgaggagtgtgcaaaggccgctacggactgttcccggcgaattacgtcgaactccgccagtag

SEQ ID NO: 14659 - DNA, 1905 bp, synthetic construct
  misc_feature 1..1905: note = Description of Artificial Sequence: Synthetic coding sequence
  source 1..1905: mol_type = other DNA
atgtggaaagcttctgctggtcatgccgtgagcattgctcaggacgatgcaggggccgatgattgggaaaccgaccctgacttcgttaacgatgttagtgaaaaagagcagcggtggggcgcaaaaacagttcagggaagcgggcaccaggaacatatcaacatacataagctccgtgagaatgtgttccaggaacaccaaactctcaaggaaaaggaattggagacaggccccaaagcctcccacggatatggaggcaagtttggagtagaacaagaccggatggacaagagtgccgttgggcacgaatatcaaagcaagcttagtaagcactgcagccaagtcgactcagtgcgagggttcggcgggaaatttggggtgcaaatggacagggttgatcaaagcgctgttggattcgagtatcagggaaagacggagaagcacgcttctcagaaggactatagcagcggatttggaggcaagtatggggttcaggccgatcgagtagacaaatcagccgtcggttttgactaccaaggaaaaacagagaaacatgaatcgcagcgcgattattcaaaaggatttggggggaagtatgggatcgataaggacaaggtggacaaaagcgcagtgggcttcgaatatcaaggtaagactgagaagcacgaaagtcagaaagattacgttaagggattcggcggcaaatttggcgttcagacagaccggcaggataaatgcgcgctggggtgggatcaccaggaaaaacttcaactccacgaatcacagaaagattacagcaaaggctttgggggtaaatacggcgtgcagaaggacaggatggacaagaatgcttccacatttgaggatgtgacacaggtcagctctgcctatcagaaaactgtgccagtggaagccgtgacatcgaaaacctctaacattcgcgctaatttcgaaaatctggccaaagagaaggagcaagaggatcgaagaaaagctgaggccgagcgggcacaacggatggcaaaggaaaggcaggagcaggaggaggctagaaggaagttggaggagcaggctagggcaaaaacccagaccccccccgtgtcccctgctcctcagccaaccgaggagcgtctaccgtccagccctgtgtatgaagatgccgcgtccttcaaggcagagctgagttaccgcggacccgtgagcggaactgagccagaacctgtctactcaatggaggctgcagactatcgggaggcgagttctcaacagggtctcgcctatgcgactgaggcagtgtacgagagtgccgaagccccaggacattacccggcggaggacagtacgtatgatgaatacgaaaacgatcttggtattacggcggtcgccctttacgactatcaggcggccggggacgatgagatctcattcgaccctgacgatattataaccaacatagaaatgattgacgatgggtggtggaggggagtgtgtaagggtagatttagggaactggccttttcctgcgtgcgcgttgcgctggttccaattaagtgctccagagatcttccaggccaggctagaggcctgaggtcagccttatggcgagtgggccgcaaagactgtcctcgtcggggtgccagcagccgcgtgagtcttctgggacgaagaggactgggcctgatggaggtgaacccagagctctctcaccccgagcatcgcagttgccatgtccgatgggaaatctgtctgtgtcatacagtgacggccagacgcatcaggaagcttatttccttcttaagatccagggaagctggtcccgtaccaagttgttcacaggttggtggagtcagttttcagaaagtgacctggaaatgcctagggacctgggtgccagagtgtccttag

SEQ ID NO: 14660 - DNA, 945 bp, synthetic construct
  misc_feature 1..945: note = Description of Artificial Sequence: Synthetic coding sequence
  source 1..945: mol_type = other DNA
atggataagaacgcttctacatttgaagacgtgacacaagtgtctagcgcgtaccaaaaaacagttccagtggaggccgtgacatctaaaacaagcaatattcgggcaaactttgaaaatctcgcaaaggaaaaagaacaagaagatagacggaaagctgaggcggagcgagcacaacgcatggcaaaggagcgtcaggagcaggaggaagccaggcgaaagctcgaagagcaggcccgcgccaaaactcagacccctcctgtgtcccccgccccgcaacctacagaggagaggttgccctccagtccggtgtatgaggatgccgcaagcttcaaggccgagctgagctacagaggtcctgtgtcgggtacagagccggagcccgtgtacagcatggaagcggccgactacagagaagcgtccagtcagcaagggttagcttacgcaaccgaggcagtgtacgagtctgccgaagccccgggccactacccagctgaggatagcacctacgacgagtacgagaatgatctcggcatcacagcggttgccctgtatgattatcaggctgccggagatgacgaaatttcattcgatcccgatgacatcatcacaaacatagagatgatagatgacgggtggtggcgaggcgtctgtaaaggcagattccgagagctagcatttagttgtgtccgcgtggccttggtccccatcaagtgcagtcgagacctccctggccaggcccgggggctcaggagcgctttatggcgagtgggacgcaaagattgcccacgccgcggcgcaagtagccgggtttccctccttggcaggcgtggtctcgggctgatggaggtgaacccagaactgtctcatccagaacatcgctcatgtcacgtgcgatgggagatctgtctgtgtcacacggttactgccaggagaatccgctag

SEQ ID NO: 14661 - DNA, 1761 bp, synthetic construct
  misc_feature 1..1761: note = Description of Artificial Sequence: Synthetic coding sequence
  source 1..1761: mol_type = other DNA
atgggggtcaacgcagtgcactggttcaggaagggacttcgtcttcacgacaatcctgctctgaaggaatgtatccagggggctgacaccattcgatgtgtgtacatcctagatccttggtttgccggaagttcgaacgttgggattaatcggtggcgatttctgctgcagtgcctggaggacttggatgccaacctgagaaaactgaactcgcgtctttttgtgattcgaggtcagcctgcggatgtctttcccagactctttaaagaatggaatatcaccaagctgtccatcgaatacgatagtgaacctttcggtaaagagcgcgatgccgctataaagaaactggcaaccgaggccggcgtggaggtcatcgtccggatttctcacaccctctatgatctggacaagatcattgaactgaacggggggcagcccccgctgacatacaagagatttcagacactgatctcaaagatggagccgcttgagatcccagtggaaaccatcacatccgaggtcattgagaagtgtacaacacccctcagcgatgatcatgatgagaagtacggcgtgccctccctggaagagctcggcttcgacacagatgggttgagttccgccgtatggcctgggggagagaccgaggcccttacccgactggaaagacatctagagcgcaaagcctgggtcgctaacttcgaacgtcctaggatgaatgccaatagtctcctcgccagccctaccggactctccccatatctcagatttggttgcctttcttgcagactcttctacttcaagctgaccgatctttataagaaggtgaagaagaacagctctccaccattaagcttgtacgggcagctgctgtggagagagtttttctatactgcagctacaaataatcctcggtttgataagatggaaggaaacccaatctgtgttcaaatcccttgggacaaaaatcccgaagctttagcaaagtgggcagagggccggaccggatttccgtggatagacgcgattatgacccagctgcgccaggaaggatggatccaccatctggcgcggcatgctgtcgcctgtttcctaacaaggggcgatctttggatatcctgggaggaggggatgaaagtgttcgaggaacttctgctggatgccgactggtccattaacgccggaagctggatgtggttgtcttgttcctcgttcttccagcaatttttccattgctattgtccagttggatttggcaggcggaccgacccaaacggcgactatatacggaggtatcttccagtccttcgcggattccccgcaaagtacatatacgacccctggaacgctcctgagggaatccagaaggtagctaaatgtttgattggcgtcaattacccgaagccaatggtaaatcacgccgaagcatcacggctcaatatcgaacggatgaagcagatctatcagcagttgtcaagatacaggggattgggactgttggcatctgtaccctcaaacccaaatggtaatggtgggttcatgggatacagtgcggaaaatataccaggatgtagctccagcggatcttgctcccagggttccggaattctgcactacgctcatggcgatagtcagcagacccacctactaaagcagggccgaagttctatgggaaccggccttagtgggggaaagcgtcctagccaggaagaagatacccagtccattggacctaaagtacagagacaaagcacaaactag

SEQ ID NO: 14662 - DNA, 582 bp, synthetic construct
  misc_feature 1..582: note = Description of Artificial Sequence: Synthetic coding sequence
  source 1..582: mol_type = other DNA
atgttggaggttggttgtggctgcctggtggttccatttttcaactttttccattgctactgtcctgtcggttttggaagaagaaccgaccctaacggggattatatcagaagatatctgcctgtcctgagaggctttcccgccaagtatatctacgacccttggaatgctcccgaggggatacagaaagttgctaagtgcttgattggggttaactacccgaaacccatggtgaatcacgctgaggcctcacgcctcaacattgaacgtatgaagcagatttaccagcaacttagtcggtataggggcttagggctgttggccagtgtgccatctaaccctaatggcaatggtggattcatggggtactctgcggaaaatatccccggctgctccagtagtggcagctgctctcagggctcaggaatactgcactatgcccacggcgattctcaacaaacgcacttgctgaaacaaggccggtcatctatgggcacaggtctaagtggcggaaaaaggccaagccaggaagaagatactcaatcaattggcccgaaagtacagagacagtctaccaattag

SEQ ID NO: 14663 - DNA, 1323 bp, synthetic construct
  misc_feature 1..1323: note = Description of Artificial Sequence: Synthetic coding sequence
  source 1..1323: mol_type = other DNA
atgggatcaagccacctgctgaataagggactgccacttggggttcggccacccattatgaatggcccactgcatcccagaccactggtggcccttcttgacggaagagactgcactgtggagatgcccatactgaaggatgttgcaacggttgcattttgcgacgcacagtccactcaggagattcatgaaaaggtgctgaatgaagctgttggggctctcatgtaccatactatcacattgactcgggaggatctggagaaattcaaggccctgcgaattattgtgaggatcggctccggcttcgataatatcgacattaagtcagctggcgatctgggcattgccgtatgtaacgtaccagctgctagcgtggaggaaaccgctgattcaaccctctgccacatcctgaacctataccgacgggcaacctggctacaccaggcccttagggaaggaacacgcgtgcagtctgtggaacaaatccgagaggtggcctccggcgccgctaggatacgtggtgaaaccctcggcatcatcggcctgggacgtgtgggccaggctgtcgcgctcagggctaaggcgtttgggttcaacgttttattctacgatccttatctgagcgatggggtagagagggcactggggctgcagagggtttctacacttcaagatttgctcttccatagcgactgtgtaacacttcattgtgggcttaacgaacacaatcaccatttaatcaatgactttactgtcaagcaaatgagacagggggccttcttagttaacactgccaggggtggtctggtggatgaaaaggcactggcacaggcactcaaggagggccgaatccgtggtgccgctctggacgtccatgaatctgaacccttttccttttcacaaggtccactgaaagacgctcccaatctgatctgtacgccgcacgcggcatggtactccgagcaagccagcattgagatgcgggaggaggccgctcgagaaatcagacgcgccatcactgggaggattcctgactccttgaaaaactgcgtcaataaagaccaccttactgccgccactcattgggcttccatggatcccgcagtagtgcatccagagttaaatggcgctgcctacagataccctccaggggttgtgggagttgccccaactgggatccccgcggccgtggaggggattgtaccgtccgctatgtcactgagccacggattgccacccgtcgcacaccccccacacgcaccatctcctggtcagacggtgaaaccggaggctgatcgcgatcatgcttctgatcagttatag

SEQ ID NO: 14664 - DNA, 1290 bp, synthetic construct
  misc_feature 1..1290: note = Description of Artificial Sequence: Synthetic coding sequence
  source 1..1290: mol_type = other DNA
atgtctggtgtgcgaccaccgatcatgaacgggcctcttcatccacgccctcttgtcgcactgttggacggaagggactgcaccgtagagatgcccatcctgaaggatgtggcgacggttgctttttgtgacgctcagtccactcaggagatccatgaaaaggtgctcaacgaggctgtgggggccctgatgtatcatactataaccctgacccgagaagatctcgagaaatttaaggctctccggataattgtgcggattgggtccggcttcgataacattgacatcaaaagcgccggagatctggggatcgccgtgtgcaacgtccccgctgccagcgtcgaggagactgctgattctactctttgccatatactgaacttatatcgtcgcgcaacatggcttcatcaggcattgagggaaggcacccgcgtgcagagcgtggagcagattagagaggtggcctctggcgctgcgaggatccgtggtgagacactggggatcatcggcctgggaagggtggggcaggctgtcgcgttaagagccaaggccttcgggtttaatgtgctgttctacgatccctacctatccgatggcgtggaacgcgccctcggtctccagagagtgagcactctgcaggatttacttttccacagtgactgcgtaacactgcactgcggcttgaatgaacacaatcaccatctcattaatgatttcactgtaaagcagatgcggcagggtgccttcctggttaatacagcccggggtgggctggtcgatgagaaagcactggcacaggcactcaaagagggaaggattcgaggagccgctcttgacgtccacgaatccgagccattctctttctcacaaggcccattaaaggacgcccccaatttgatttgcaccccgcacgctgcatggtacagtgagcaggccagtattgagatgcgcgaggaggctgctagggaaatacggcgggcgataaccggcagaattccggacagtttgaagaattgcgtgaataaggaccacctgactgcagccacacactgggcttctatggatccagccgtggtccaccctgagttgaacggtgccgcctaccggtatcctccgggcgtagtgggtgtggcacccaccgggatccccgccgcagtcgaagggatcgtcccttcggcaatgtctttgtctcatggtctccccccagtagcccaccctccacatgccccttcaccaggacagactgtgaaaccggaggcagacagggaccacgcgtcggaccagttgtag

SEQ ID NO: 14665 - DNA, 438 bp, synthetic construct
  misc_feature 1..438: note = Description of Artificial Sequence: Synthetic coding sequence
  source 1..438: mol_type = other DNA
atgtcaggcgttcgccctcccattatgaatggacccctgcaccccagaccattggttgctctcctcgatggcagagactgtacagtcgagatgccaatcctcaaagacgtggcaacagtcgccttttgcgatgctcagagtacccaggaaatacatgagaaggtccttaacgaagctgttggcgccttgatgtaccacactatcaccctaacgcgagaggatctggaaaaattcaaggctcttaggatcattgtccggatcggcagcgggttcgataatattgacataaagtcggctggagatcttggtatcgccgtgtgtaatgtacccgcagcgtctgtcgaggagaccgcagacagcacactttgtcatatcctcaacctgtatcggcgcgctacatggttgcaccaggcccttcgggagggcactcgcgtttag

SEQ ID NO: 14666 - DNA, 516 bp, synthetic construct
  misc_feature 1..516: note = Description of Artificial Sequence: Synthetic coding sequence
  source 1..516: mol_type = other DNA
atgtctggagtccggcctcctattatgaacggccctctgcaccctcggcccctggtcgcactgctagatggtcgcgattgtacagtggaaatgcctatcctgaaggatgtggccaccgtggccttctgtgatgctcagtctacccaggaaatccatgaaaaagtgctgaacgaggctgtgggagcactgatgtaccataccatcacgctcacccgtgaggacctggaaaagtttaaggcactaagaattattgtgcgtattggttccggttttgataacatcgatattaagagcgcaggggatctgggcattgcggtttgtaatgtccccgctgcatcagtcgaggagacggcggattcaaccctctgtcatattctgaatttgtaccgcagagcgacttggctccaccaggcgctccgagagggaactcgagttcagagtgttgaacagatccgcgaagtggcatcaggcgcggcacgtattaggggtgagacccttggcattatcgggctctag

SEQ ID NO: 14667 - DNA, 2958 bp, synthetic construct
  misc_feature 1..2958: note = Description of Artificial Sequence: Synthetic coding sequence
  source 1..2958: mol_type = other DNA
atgccagttcccagtcggcatataaacattggccgctcgcagtcctgggacgccgccggatggtatgaggggccttgggagaacgctgaaagtctgcgtcccttgggtaggcgatcttcccttacatatggaacagcagaagggacttggtttgagccaaaccatcgcccgcaggatgctgccctgccggtagccgccgagccgtatctctaccgggaggcagtgtacaactccgtagccgctcgtaaaggctctacgcctgactttaccttctacgattcaagacaggcggtcatgtccggaaggtctcccctgttgcctcgcgagtattattcagatccttccggcgccgcaagggttcctaaggaacccccattgtatagagaccccggcgtttctagacccgtcccctcttacggtgtgcttggctcccgtacgtcttgggaccccatgcaaggtagatcccctgcattgcaggatgcaggccatctctatcgtgatccaggtggaaaaatgatcccacagggacggcaaacacagtcaagggccgcctctcccggtcgctatggtcgcgagcagcccgacacccggtatggcgccgaagtacctgcatatcctctatctcaggttttcagtgacatctcagaaagacccattgatccggccccagcacgccaggtagcccccacatgtctcgtggtggacccttcttctgccgcagctccggagggaagcacaggggtggctccgggggccctcaacaggggatacggtcctgctcgggaatcaatccctagcaagatggcctatgagacatatgaagctgatctgagtacattccagggcccaggaggaaaacgcacagtgctacctgaattcctggcttttctgcgtgctgaaggcctcgctgaggcaactctcggagccctgctccagcaaggctttgactctccggctgtactggccaccctggaggacgctgatatcaaaagcgtcgcccccaatttaggccaagctagagtactctccagactagccaattcttgcaggaccgagatgcaacttagaaggcaggatcggggaggtcctcttccacgggccaggtcatcatctttcagccacagaagcgaactgctgcatggcgatctcgcatctctaggtgccgccgcacccctgcagaccgcttcacctcgcgcaggcgaccctgctagacgcccaagcagtgctccttcccagcaccttctcgagaccgccgccacctacagcgctcctggcgtcggcacacacgccccacatttcccatccaactccggatatagttctcccacaccttgtgcattgaccgctcgcctttcccccacttacccgctccaggccggggtggccctaactaaccctggaccatccaatcccttgcacccaggccctaggactgcttatagcacagcctacaccgtgccgatggaactcctgaagcgcgaacggaacgtcgcagcatctccgcttccgtccccgcatggatcacctcaggttctgagaaaacccggggccccactggggccctccaccctgccccctgctagtcagtcactgcacacccctcatagtccatatcagaaagttgctaggagaaccggagctccaatcatcgtctctactatgctggcacccgagcctagcatacgaccccaaattatgaacggtcctctgcatcctaggcctctcgtggctttgcttgatggtcgcgactgtactgtcgagatgcccatactgaaagatctggcgacagtagccttctgtgacgctcagtctactcaggaaattcacgaaaaggtcttaaatgaagctgtgggcgcaatgatgtatcatacgatcacgcttacgagagaagatctggagaagtttaaagccctgagggtaatcgtgaggattgggtctggctacgacaacgtggacatcaaagcagctggagagttaggcattgcggtgtgtaacatcccctcggctgccgttgaggagacagccgatagcaccatttgtcatattttaaacctttaccgcaggaatacgtggctgtatcaggcactcagggaggggacacgggttcaatccgtcgagcagataagggaagtggcttctggagctgcaagaatacgaggagaaactctaggactcattggattcgggaggacaggacaggcggtggccgtgagagcgaaagctttcgggttctccgtgattttctacgacccatatctgcaggatggcatagagagaagcttgggcgtgcaacgcgtgtacactctgcaagacttgctctatcagtctgactgtgtgagtttgcattgcaatctaaacgaacacaaccatcatctgataaatgactttactattaagcagatgaggcaaggcgcatttctggtcaacgcagcacggggggggctggtggacgaaaaggctctagcccaggccctgaaggagggacggatcagaggagctgctttggacgtccacgagtctgaaccattctcctttgctcagggcccgctgaaagatgcacccaatttgatctgcactccacacaccgcttggtacagcgagcaggcctccctggaaatgcgtgaagctgctgctaccgagatacgtcgggcaatcactggacggattccagagtcgctccgaaattgtgtgaacaaggaattctttgtgacgagcgcaccctggtctgtaattgatcaacaagcaatccaccccgagttgaacggcgcgacctatagataccctcccggaattgtaggggtagcaccaggtggcctgccggcggccatggaaggcattatccctggcggaatccccgtcacacacaacttgccgacagttgcccacccctcccaggctccgtctccaaaccaaccaaccaagcacggcgacaatcgagagcaccctaacgaacagtag

SEQ ID NO: 14668 - DNA, 1338 bp, synthetic construct
  misc_feature 1..1338: note = Description of Artificial Sequence: Synthetic coding sequence
  source 1..1338: mol_type = other DNA
atggccctcgtggacaaacacaaagtgaagaggcagagactggacagaatttgtgaaggcatccgcccacagattatgaacgggcctctgcatccacgcccgctggtcgccctgctggacggtagagattgtacagtagaaatgcccattctgaaagatctggcgacagttgccttttgcgacgctcagtctacccaggagattcatgaaaaagtgcttaacgaagctgtcggggcaatgatgtatcacacaatcaccctgaccagagaagacctggagaagttcaaagcactgcgggtaattgttagaattgggagcggttatgacaatgtggatatcaaagccgccggtgagctcgggatcgccgtgtgtaacataccctctgcggcagttgaggagactgccgatagtacaatttgtcacattctgaatctttaccggcgcaatacgtggctctaccaagcactcagggaaggcacgcgtgttcagtccgtagagcagatccgcgaggttgccagtggagcagcccgtatccgcggcgagactttagggctgataggctttgggcgcaccggccaagccgttgcagtgagggcaaaagcgttcggcttctctgttattttttatgacccgtacctccaagatggtatagaacgctccctgggcgtgcagagggtatatactctccaagatctgttgtatcaaagcgattgtgtgtcactgcactgcaatctcaatgaacacaaccatcatcttataaatgacttcactataaaacaaatgcgtcagggagctttccttgtgaacgccgcaagaggaggcctcgtggatgagaaagcactggcacaggctctgaaagaagggcggatcaggggtgccgcgttggacgttcacgaatctgagccatttagcttcgcacaaggcccacttaaggacgctcccaatttgatttgtacgccccacacagcctggtacagcgagcaggcttcactggaaatgagagaagctgccgcgaccgagatccggagagcaattaccggacgaataccagagagtctccggaactgtgttaacaaggaattttttgtcacctcagctccctggagcgtaatagaccagcaagccattcacccagagttaaatggtgcaacatatagatacccccccggaatagtaggcgtggctcccgggggtctccctgcagcaatggaaggcataattcccggtggtatccctgtcacccacaacctcccaacagtggcgcatccctcacaggcgcccagccccaaccagccgaccaagcacggtgacaatcgcgaacacccaaacgaacagtag

SEQ ID NO: 14669 - DNA, 1338 bp, synthetic construct
  misc_feature 1..1338: note = Description of Artificial Sequence: Synthetic coding sequence
  source 1..1338: mol_type = other DNA
atggcgctggtggacaaacacaaagtgaaaagacaacgcctggataggatctgcgaagggatcaggcctcagatcatgaacgggcccctccacccacgccctctagtggctctgttggatgggcgtgattgtacagtggaaatgccaatcctcaaagacctcgccaccgtggccttttgtgacgctcagtccacacaggagatccatgaaaaagtgctcaacgaggccgtaggcgccatgatgtaccacaccattacgctgactcgggaggaccttgagaaatttaaggctctcagagtgatcgtgcgcataggaagtggatacgacaatgtagacatcaaagctgctggggagctggggatcgccgtgtgtaatattcccagcgccgcggtcgaagaaacagcagactctacaatctgccacatccttaacctctatcgtagaaacacttggctgtatcaggcactccgcgaagggacacgggtgcaatcagtagagcaaattcgagaggtggcaagtggtgcagccaggatcagaggtgaaactctgggcctgattggcttcgggcgcacaggccaagcagtggctgtcagggcgaaggcctttggcttttcagtgatcttttatgacccctacctccaggatggcatcgaaagaagcttgggtgtacagagagtgtataccctgcaggaccttctctatcagtctgactgtgtgagcctccactgcaacctgaatgagcataaccaccaccttattaatgactttactatcaaacagatgcgccagggtgccttcctggtgaacgccgcacgggggggcttggtggacgagaaggcacttgcacaggcactgaaagaaggccgcatccggggggcagccctggatgttcatgagtctgagcccttttccttcgcccagggccccctcaaagatgctcccaatctgatatgcactccccacactgcctggtattccgagcaggcatctctagagatgcgagaggcagccgccaccgaaatccggagagccatcacgggccggatcccggagtcccttcgtaactgcgtaaacaaggaattcttcgtgactagcgccccctggtctgtcatcgaccagcaggcaatccaccccgaactgaacggggcaacgtatcggtatccgcccggcatcgtgggcgttgccccaggcgggctgcccgctgccatggaggggattattccaggagggatccctgtcacccacaacctccctactgtcgcacatcctagtcaggccccttcaccaaatcaaccaacgaaacacggtgacaacagggagcatcctaacgagcaatag

SEQ ID NO: 14670 - DNA, 1338 bp, synthetic construct
  misc_feature 1..1338: note = Description of Artificial Sequence: Synthetic coding sequence
  source 1..1338: mol_type = other DNA
atggcattggttgacaagcacaaggtgaagcgccagcggctggatcgcatttgtgaaggcattaggcctcagatcatgaacggacctctgcacccaaggcctttggtcgcacttttagatggaagggactgtaccgtggagatgcctatattgaaagatctggcaactgtggccttctgtgatgcccagagtactcaggagattcatgaaaaggtgctaaatgaggctgtaggggcaatgatgtatcacacaatcaccctgactagagaagacctggagaagttcaaggcactgcgggtgatcgtaagaataggatccggttacgataacgttgacattaaagcagcaggtgagctgggaattgctgtctgcaatatcccatcagccgccgtggaggagacagcagattcaacaatttgtcacattctcaacttgtacaggagaaacacttggctgtaccaggcactgcgcgaggggacacgggtgcaatctgttgagcagattagggaggtcgcttcaggtgccgcacgcattcgtggtgagacgctgggactgattggtttcggcaggaccgggcaggcggttgccgtgcgagctaaggccttcggatttagcgtcatcttctatgacccttacctgcaagacggtatagagcgttccctgggggtccagagagtgtataccctgcaagatcttctttatcagtccgattgcgtcagcctgcactgcaatcttaacgagcacaatcaccacctcataaatgatttcacgatcaagcaaatgaggcagggtgcttttctggtcaatgccgctaggggcggcctggtcgacgagaaagcactcgctcaagccctcaaagagggaaggattcgcggtgcagccttagatgtccacgagagcgagcccttctcattcgcacagggcccgctaaaagacgcacccaatttgatctgcactccccacactgcctggtactctgaacaagcctcactcgagatgcgagaggccgctgctactgagattagacgcgctatcaccggccgcataccggaaagtctgcgaaattgtgtgaataaagaattctttgtgacatctgctccctggagtgtcatcgatcagcaggccatccatcccgagttgaatggagctacatatcgctatcccccaggcatagtgggagtggctccagggggcctacctgctgccatggaggggattatccccggcggtatccctgtgacccacaatcttcccactgtagctcaccccagccaggccccttccccaaaccagcccacaaagcatggagataaccgcgagcatcccaatgaacagtag

SEQ ID NO: 14671 - DNA, 12 bp, synthetic construct
  misc_feature 1..12: note = Description of Artificial Sequence: Synthetic coding sequence
  source 1..12: mol_type = other DNA
atggccctgtag

SEQ ID NO: 14672 - DNA, 1338 bp, synthetic construct
  misc_feature 1..1338: note = Description of Artificial Sequence: Synthetic coding sequence
  source 1..1338: mol_type = other DNA
atggccttagtggacaagcacaaagttaaacgccagcggctggataggatctgtgaggggattagaccgcagatcatgaacggtccactccatccccgaccactggtagccctgcttgacggcagagattgtacggttgagatgcctatacttaaagacctggccaccgtggctttttgtgacgcccagtcaacccaggagattcacgagaaagtgttgaacgaagccgtcggcgctatgatgtatcatactataactctcacccgggaggacctggaaaagtttaaagcactgcgagtgatcgtgcgaatcggctcaggatacgataacgtggacatcaaagctgccggagagttgggcatcgcagtgtgtaatatcccgagcgccgcggttgaggagaccgcggactcgaccatatgtcacattctaaatctatacaggaggaacacttggctctaccaggcccttcgagaaggtacaagagtccagtctgttgagcagatcagagaggtggcgtcaggagcagcacggattaggggggaaaccctgggactgattggcttcggacgcaccggacaggcagtcgcagtgcgcgcaaaagcctttggcttttctgtgatcttttacgatccttacctgcaggatggcatcgaacggagcctcggggtacagagagtgtatacgctgcaggacctgctttaccagtccgactgcgtttcccttcattgcaatctgaacgagcacaaccatcatctcatcaacgattttacaataaagcaaatgagacagggcgccttcctcgttaacgctgcgagaggaggcctggtggatgagaaggccttggcccaagctctgaaagaaggaagaatccgtggcgcagccttggatgtgcacgagtccgagcctttcagttttgcccagggccccctcaaggatgcccctaatctgatatgcaccccccacacggcttggtattcggaacaggcttctttggagatgcgagaggccgcagcaaccgagatacgccgggctattacgggccgaatcccagagagcctgcgcaactgcgtgaataaggagttttttgtgacttctgctccttggtccgtcatcgatcagcaggcaatccatcctgaactcaacggggcgacctaccgttatcctcctggaatcgtgggcgtggcgcctggaggactccctgccgcgatggagggaattatccctgggggcattcctgttacccataatctgcccactgttgcgcacccgtctcaggctccctcaccaaatcagcccaccaagcacggcgataacagggagcaccccaatgaacagtag

SEQ ID NO: 14673 - DNA, 2331 bp, synthetic construct
  misc_feature 1..2331: note = Description of Artificial Sequence: Synthetic coding sequence
  source 1..2331: mol_type = other DNA
atgtctagtactaggagccagaacccgcacgggctaaagcagatagggctggaccagatttgggacgatctccgggcgggtatccagcaggtttatacaaggcagtccatggcgaaaagccggtacatggaactgtacactcatgtctacaattattgcaccagtgtccatcagtccaaccaggctaggggtgcaggagtccctccctctaaatctaagaagggtcaaactcccggtggggcgcagtttgtcgggctggagctatacaagagacttaaggagttccttaaaaactatcttacaaatctgttaaaggatggagaagatctcatggacgagagcgtccttaagttctatacacagcagtgggaagattacagatttagctctaaggtactgaacggaatatgcgcatacctcaacagacactgggtgcggcgcgagtgcgacgagggaaggaaagggatctacgaaatctattctttagctctggttacctggagggattgtctttttcgccctctcaacaaacaggtgacaaatgccgtcctgaaactcattgagaaggagcgaaatggagaaaccattaacacccggcttatttcgggagtggtccagagctacgtggaattgggccttaacgaagatgatgcttttgcgaaagggcccaccctcacagtctacaaggagagttttgagagccaattcctcgccgatacggagcgcttttatacccgggagtccactgaattcttgcagcagaatccagtgaccgagtatatgaaaaaagctgaggctcggttgctggaggaacagcgccgggtgcaagtgtacctgcacgagtcaacccaggacgaactcgctagaaagtgcgaacaggtgctgatcgagaaacatcttgagatatttcataccgaatttcaaaacctactggacgcagacaagaatgaagacctgggtaggatgtataacctggtctctcgcatccaggacggacttggtgaactcaaaaaacttttggaaactcatatccacaatcagggacttgctgctatcgagaaatgcggcgaggcagcgctgaatgacccaaaaatgtacgtgcagaccgtgttagacgtccacaagaagtacaacgccctggttatgtctgcttttaacaacgatgcagggtttgtggctgctctggacaaagcttgtggccggtttatcaacaacaatgcggtcaccaagatggcccagtccagctctaaatcacctgaactcctggcgcgctactgtgattcccttctgaagaagagttctaaaaaccccgaagaggccgaactggaagataccctgaaccaggtcatggtcgtctttaagtacattgaggataaagatgtgtttcaaaaattttacgctaaaatgttggctaaaaggctagtacaccagaatagcgcatccgacgatgcagaagcaagcatgatctcgaaactgaagcaggcctgcgggttcgaatacacttcaaaactgcaaaggatgttccaggacattggcgtttctaaagatttgaatgagcagtttaagaaacatttgacaaactcggaaccgctggacctggatttttccattcaggtactgtctagcggctcttggccattccagcagtcctgtaccttcgcactgccttccgagttggagcgtagttatcagcggttcacagcattttatgcttccaggcacagtggtaggaaacttacctggctgtaccaacttagtaaaggcgagttagtgacaaattgtttcaagaatcgctatactttacaggcttctactttccaaatggctattctcttgcaatataatacagaggacgcttacactgtgcagcaactgacagactctactcagatcaaaatggatattctcgcacaggtactgcaaatcttgctgaagtccaagctgctggtactggaagacgaaaacgccaatgtggatgaagtcgagttgaagcctgatactctgatcaaactgtatctcggctacaagaataaaaagctgcgcgtgaatattaatgtgcctatgaaaactgagcagaaacaggagcaagagacaactcacaagaatattgaggaggacaggaagttactgattcaggcagcgatagttaggattatgaagatgcgaaaggtgcttaaacaccaacagctgctcggcgaagttctgacacaactgagctcacggttcaagcctcgggtcccagtgattaagaagtgtattgatatccttattgagaaggagtatctggagcgtgtggatggcgagaaagatacatactcgtatttggcgtag

SEQ ID NO: 14674 - DNA, 2331 bp, synthetic construct
  misc_feature 1..2331: note = Description of Artificial Sequence: Synthetic coding sequence
  source 1..2331: mol_type = other DNA
atgtcaagcaccaggtctcaaaacccacacggcttaaagcaaatcggactggaccaaatttgggacgatttgcgagccggaattcagcaggtgtacaccaggcagtctatggccaagtctcggtacatggaactgtacacacatgtatataattattgcacctccgttcaccagagtaatcaggcccggggcgccggcgtccccccgagtaagagcaagaaggggcagactcctggaggggctcagtttgtgggtctggaattgtacaagcgcttgaaggagttcctcaaaaattacctaaccaatctgctgaaagacggggaggatctgatggatgagtcggtgcttaagttctacacgcagcagtgggaagattataggttctcttccaaggtattgaatgggatttgtgcctacctgaatcgccactgggtacgaagagagtgtgacgaaggccgtaagggcatttatgaaatctactccctggccttggtgacctggagagactgcctatttagacctctgaataaacaggttacgaacgccgtcctgaagttaatcgaaaaagagagaaatggcgagaccattaatactcgtctcattagtggagtggtgcaatcctatgttgaactgggtttgaacgaggacgacgcctttgctaaaggtcccacgctcacagtctataaggagagtttcgaaagccagttcctggccgacaccgagcggttttatacccgtgagagtaccgagttcctgcagcagaacccagtcacagagtatatgaagaaagctgaggccagactcctcgaggaacagcgcagagtgcaagtttaccttcacgagtccacccaggacgaactggctcgaaagtgcgagcaggtgctgatcgagaagcacttagaaatcttccacacagagtttcaaaacctcctggatgctgataagaacgaggacttggggcgtatgtacaatctggtatctcgaatccaagacggactgggggagctgaaaaagttgttagagacgcatatacacaaccagggacttgccgccattgaaaagtgcggagaggctgccctgaacgatcccaaaatgtatgtgcagacagtgctcgatgtacacaagaaatacaacgctctcgtgatgtcagcctttaacaatgatgctggctttgtggctgctctcgacaaggcctgcggccggttcattaacaacaatgcagttacaaaaatggctcagtcctccagcaagtcaccagagctgctagcacggtactgcgacagcctcctgaaaaaatcgtctaagaatcctgaggaggccgagttggaagacacgctgaatcaggtgatggtcgtcttcaaatacatcgaggataaagacgtgttccagaagttttacgcgaagatgttggcgaagagactggtgcaccagaacagcgccagcgacgacgccgaggcttccatgattagcaaactaaagcaagcttgcggattcgaatatacctcaaaattgcagcggatgttccaggatataggcgtatctaaggatctcaatgaacaatttaagaagcacctcactaatagtgaaccattagacttggactttagcatccaagtgttgtccagcggtagttggccgtttcagcagtcatgtaccttcgccctaccctccgagctcgagcgtagctatcagcgatttaccgcgttctacgcaagccggcatagcgggagaaaactcacatggctgtaccagcttagtaaaggcgaacttgtcacaaattgtttcaagaatcggtatacgttgcaggcttcgacattccagatggctatcttgctgcagtataatacagaagatgcatatactgtgcagcagttgacggatagcacccagataaaaatggatatactcgcccaggtgctgcagattctcctgaagagcaagctcctggtactggaggacgagaatgctaatgtggacgaagttgaactgaaaccagataccctaatcaaactttatcttggctataaaaataagaaacttcgcgtcaatataaacgtccccatgaaaacggagcagaaacaggagcaggagacaactcacaaaaatattgaggaagatcggaaactcctcatccaagccgctatcgtgagaatcatgaagatgcgcaaggtcctgaaacatcagcaactgctcggggaggtgttaacccaattaagctcccggtttaaacctcgggtcccagtgataaagaaatgtattgatattctcattgagaaggaatatctggagcgagtcgatggagagaaggacacctactcctaccttgcctag

SEQ ID NO: 14675 - DNA, 2112 bp, synthetic construct
  misc_feature 1..2112: note = Description of Artificial Sequence: Synthetic coding sequence
  source 1..2112: mol_type = other DNA
atgtcgtccacccgttcacaaaatcctcacgggctgaagcagattggcttggaccagatctgggacgaccttcgcgccggtatccagcaagtctacacaagacaatctatggcaaaatccagatacatggagttgtacacacagcaatgggaggactatcgattctcctccaaggtactgaacggtatctgtgcctacctgaatagacactgggtgcgtagggagtgcgacgagggaagaaaaggtatttatgagatatatagcttagctctcgttacttggcgtgattgcctatttcgcccactcaataagcaggtcaccaatgccgtccttaaactgattgagaaagagcgaaacggggaaaccattaatacgcgactgatttcgggagtggtgcagagttatgtagaattaggactgaatgaagacgacgcctttgctaagggcccaaccctgaccgtgtacaaagagtcattcgagtctcagttcctggctgataccgaaaggttttatacacgcgaatccacggaattcctccagcagaaccctgttacagagtacatgaagaaagcagaggcccggctcctggaggaacaacgtcgggtgcaggtctatctgcatgagtccacgcaagacgaacttgccaggaagtgtgaacaggtactgatcgagaagcacctcgagatctttcacaccgagtttcagaatctactggacgctgataaaaacgaagacctggggcgtatgtacaacctagtgtcccgcatccaagacgggctgggtgagctgaaaaagttgctggagacacacatccataatcaggggctcgctgccatcgaaaagtgcggcgaggctgcactcaatgatccaaagatgtacgtgcagactgtgctggacgtgcacaaaaaatacaatgcactcgtaatgtccgcctttaacaatgacgccggattcgtggccgcactggacaaggcctgtggccggttcattaataacaatgctgtcacaaaaatggcccagtcctcctccaagtcccccgagctcttagctcggtactgcgattcgttattaaaaaagtcgtccaagaatcctgaagaagccgagctggaggataccttaaaccaggtgatggtagtatttaagtacatcgaggacaaagacgtgtttcagaagttctacgccaaaatgcttgcaaagcgtctggtgcatcaaaattcagcctcagacgacgctgaagcatccatgattagcaaattaaagcaggcatgtggcttcgagtatacctccaaacttcagcgcatgtttcaggatatcggagtgagtaaggaccttaatgaacaattcaagaaacatttaactaactctgagcccctggatctcgacttctccatccaggttttatcaagcggatcatggccgtttcaacaatcttgcacgttcgcactgccttccgagctggaacgatcctatcagcggtttaccgctttttatgcatcacgacactcaggtcgcaagctaacctggttgtaccagctgagtaagggcgaactggtgaccaactgctttaagaataggtacaccctccaggcctccacattccagatggccattttgctgcagtataataccgaagacgcttacacagttcaacagctcaccgacagcacccagattaagatggacatattggcacaggttctgcagattctgctgaagtcaaaactcctggtcctcgaggacgaaaatgctaatgtcgatgaagtggagttgaaaccggatacactgataaaactgtatttgggttacaagaacaaaaagctacgggtgaatatcaacgtgcctatgaagaccgaacagaaacaggagcaggagactacgcacaagaatatcgaggaggatcgcaagctgttgattcaggccgccatcgtgcgcattatgaaaatgcgaaaagtcctgaagcaccaacagttgttgggggaagtgctgacacagttgtcgtcaaggttcaagcccagagtccctgtcatcaagaagtgcatcgatatactcattgaaaaggagtatctggagagggttgacggggagaaggatacatactcatacttggcatag

SEQ ID NO: 14676 - DNA, 1824 bp, synthetic construct
  misc_feature 1..1824: note = Description of Artificial Sequence: Synthetic coding sequence
  source 1..1824: mol_type = other DNA
atggagttgtacacccacgtgtataactactgcacttcagttcatcaatccaatcaagctagaggagcaggcgttcctccgagtaaaagtaagaagggccagacacccggcggcgcgcagttcgttggattagaactctataaaaggcttaaggaattcctgaaaaattacctgaccaatctgttaaaagacggggaggatcttatggacgaatccgtcctaaaattttacacgcagcagtgggaagattaccgattcagctctaaggttctgaatggtatttgtgcctacctaaatagacactgggttagaagggagtgcgatgaaggacgcaagggcatctacgagatttatagtttggctctcgtcacctggcgggattgcctctttaggccattgaataagcaggtcacaaacgcagtgctgaagctgattgagaaggaacgaaacggcgagaccatcaatacaaggttaatcagtggagtggtgcagagttatgtggagctgggactgaacgaggacgatgccttcgcaaaaggcccaacactgacggtatataaagaatctttcgaatcccaattcctggccgataccgagcggttctatacacgggagtccaccgaatttctccagcagaatcccgtcacagaatacatgaagaaagccgaggcacgactactggaggagcaaagaagagtccaggtctatctacacgagtccacacaggatgagctcgcccgaaaatgcgagcaggtgctgattgaaaagcacctggaaatctttcataccgaattccaaaacttgttggacgcagataagaacgaagatctgggacgcatgtacaatctggtttcccgcatccaagatgggctgggcgagcttaagaagttgttggagacacacattcacaatcagggcctcgccgctatcgaaaagtgcggggaggcagccctgaatgaccccaagatgtatgtgcagactgtactcgacgtgcataagaaatataacgcactcgtgatgtccgcctttaataacgatgccggattcgtggctgctttggacaaggcctgcgggcggtttatcaataataacgccgtaactaagatggcccaatcatcctctaagtcacctgaactgctggcccggtactgcgacagtttgctgaaaaaaagttccaaaaatccagaagaggccgaattggaggatactttgaaccaggtgatggtggtctttaagtacatcgaggacaaggacgtgttccaaaaattttacgccaaaatgctcgccaagcggctggtgcaccagaacagtgcgtcagatgacgcagaagcctcaatgatttccaaacttaagcaggcctgcggattcgagtatacttcaaagctccagaggatgttccaagatataggtgtttcaaaagacttgaacgagcagtttaagaaacatttaactaattccgaacccctagatctcgacttttcaattcaggtgctgtccagtgggagctggcctttccaacagtcctgcacgttcgcgctgccctcagagttagaaaggtcatatcagcgcttcacagcattttatgcatctcgacacagcggtagaaagctgacttggctctatcagctgtctaaaggggagttagtcaccaactgctttaagaaccggtacacactgcaggcatctacatttcaaatggccattctactccagtacaataccgaggatgcttatactgttcagcaactgacagactccacacagatcaagatggacattctagcccaagtgctacagattttgctgaagtccaaactactctag

SEQ ID NO: 14677 - DNA, 2121 bp, synthetic construct
  misc_feature 1..2121: note = Description of Artificial Sequence: Synthetic coding sequence
  source 1..2121: mol_type = other DNA
atgagcctgaagccccgggtggtggatttcgacgagacttggaataagctgctcacaaccatcaaggcggtggttatgcttgaatatgtcgagagggccacctggaatgatcggttcagcgacatctacgccctgtgtgtggcatatccagaaccgttgggggaacggttgtatacagagactaagatctttttggagaatcacgtgagacatttgcacaaacgggtgctagagagtgaagaacaggttctggtgatgtaccacaggtactgggaggagtattctaagggggctgactatatggactgcctctacaggtacttgaacacacagtttataaagaaaaataaacttacagaggctgatctgcagtatggatacggtggcgttgatatgaacgagcctctgatggagatcggcgagctcgcacttgacatgtggcgcaaactgatggtagagcccctgcaggccattctcattcgtatgttgctgagagaaatcaagaatgatcgaggaggagaggatcccaatcaaaaagtcattcatggtgtgattaatagctttgtacatgtggagcagtacaagaagaaatttcccctgaaattttatcaagagatcttcgagtctcccttcctgaccgagacaggtgagtactacaaacaggaagctagcaacctcttgcaggagagtaattgttcccaatacatggaaaaggtgcttggaagactgaaagacgaagaaatccgatgtaggaagtacctgcatccgagtagctacactaaggttattcatgagtgtcagcaaaggatggttgccgaccatctccagtttctccacgcagaatgtcataatatcatccgccaggagaaaaagaacgatatggccaatatgtatgtactgctgcgagccgtctctaccgggctgccccatatgatccaggaactacagaaccatatccatgatgagggactaagggctacttccaatctcacccaagaaaacatgccaactctgttcgtggaatctgtgctggaggttcacggcaaatttgtacagttaataaatacagtgctgaacggagaccagcatttcatgagcgccctggataaggcattgacaagcgtggttaactatcgggagcccaagtctgtatgtaaggcgccagaactgttggcaaaatactgcgacaatttgctgaaaaaatccgctaagggcatgactgaaaatgaggtcgaagacagactgacttcattcataacggtctttaagtatatagacgataaggacgtctttcagaaattctacgcgcgtatgctcgcgaagcgattaattcacgggttaagcatgagcatggattccgaggaggccatgatcaataaacttaagcaggcttgcggttacgagtttacttcgaagttgcaccgcatgtacaccgatatgagcgtgtccgcagatcttaataataagttcaataattttatcaaaaaccaggatacagtgatcgatctcggcatcagcttccaaatctacgtgctccaggctggagcctggcccctcacccaggctccttcctccacctttgcaattcctcaggaattggagaagtccgtgcaaatgtttgaactgttctactcccagcacttcagtgggaggaaacttacatggcttcactacttatgtacaggcgaggtgaaaatgaactacctcggcaagccttatgtcgccatggtgacgacctatcagatggcggtcctgctagcatttaacaacagcgagaccgtgtcatataaggagctacaggactccacgcaaatgaatgaaaaagagctcaccaagaccatcaagtctctgctggacgttaagatgataaaccatgactctgaaaaggaggatatagacgccgagtccagcttctcactgaacatgaatttctccagcaagcgaacgaagttcaagatcaccacttctatgcagaaagacactccccaagtgattagtcagagtcgggcccggttcaaccctagcatcagcatgatcaaaaaatgcatcgaggtactcatcgacaaacaatatattgagcgcagccaagctagcgcggatgagtactcctatgtcgcgtag

SEQ ID NO: 14678 - DNA, 2121 bp, synthetic construct
  misc_feature 1..2121: note = Description of Artificial Sequence: Synthetic coding sequence
  source 1..2121: mol_type = other DNA
atgtctctgaaacccagggtcgtcgattttgacgaaacatggaataagctgctgacaactatcaaggcggtggttatgctggagtacgtcgagagggcaacttggaacgacagattctccgacatctatgccctgtgcgtagcctatccagaacccttgggtgagaggctatataccgagactaaaatcttcctcgagaatcatgtcagacacctgcacaagcgcgtgttggagagcgaagagcaagtgttggtgatgtatcatagatattgggaggagtattccaagggcgccgactatatggactgcctgtacagatacttgaatactcagtttatcaagaaaaataaactgacagaagcagacctacagtacggatacgggggcgtggatatgaacgagccgctgatggagatcggagaactggccctggatatgtggcggaaactgatggtagaacctctgcaggcgattttgatacgtatgttgttacgcgagatcaagaacgatcggggtggtgaggatcccaatcagaaggtgatacacggggtcataaactctttcgtacacgtggagcagtacaaaaaaaagttccccctgaagttctatcaagaaattttcgagtcccctttcctgaccgaaacaggagaatattacaagcaggaagcttccaatctgttacaggagtctaattgttctcagtacatggaaaaggttttagggagactgaaagatgaagagattaggtgtaggaagtacctgcatccatcttcttacacaaaggtgatacatgaatgccaacagaggatggtggccgatcatctgcagtttttgcatgccgaatgtcacaatattatcaggcaggaaaagaaaaacgatatggccaatatgtacgtgctgctccgagcagtgtccacaggtctgccccacatgatacaggaactgcaaaatcacatccacgatgaaggcctgagagcgacgtccaaccttacacaggagaatatgcccacactgtttgtggagagcgtcctcgaagtgcacgggaaatttgtgcagctcattaataccgtgctgaatggggaccagcatttcatgtccgcattagataaagctttgacctccgttgtgaactatcgggagcctaagtctgtgtgtaaggcaccagagttactcgcaaagtattgcgataacctgttaaaaaagtctgctaagggtatgactgaaaatgaggtcgaagacaggcttacctctttcatcactgtattcaagtatatagatgataaggacgtgttccagaaattttatgccagaatgttggccaaacgtctcatccacggactcagcatgagtatggatagtgaagaagctatgatcaacaagctaaagcaggcctgcgggtatgagttcacgagcaagctgcacaggatgtacacggacatgagtgtcagtgctgacctgaacaataaatttaataattttattaaaaaccaggataccgtgattgacttaggaatttcctttcagatttatgtgctccaagccggggcgtggccacttacccaggcgcctagcagtactttcgcgattccccaagaacttgagaaaagtgtgcaaatgtttgaactgttctatagccagcacttcagtggccggaaacttacctggctgcactacctatgtaccggcgaggtaaagatgaattacctcggtaagccgtatgtggccatggtgactacataccagatggcagttctgctggcctttaacaactcggagacggtttcctacaaggaacttcaagactcaacacagatgaatgaaaaagaactgacaaaaaccatcaagtctcttctggatgttaaaatgatcaaccacgattcggagaaggaggacattgacgccgaatcatcattcagtctgaacatgaacttctcctctaaacgtacaaaatttaagatcaccacaagcatgcagaaggatacccctcaagtgatctcacaaagcagagcgaggttcaatccatcgatttcgatgatcaaaaagtgcattgaggtgctgatcgataaacaatacatcgagcgtagtcaggcctccgcagacgaatactcttatgtggcctag

SEQ ID NO: 14679 - DNA, 2238 bp, synthetic construct
  misc_feature 1..2238: note = Description of Artificial Sequence: Synthetic coding sequence
  source 1..2238: mol_type = other DNA
atgagccttaaaccgcgggtggtcgatttcgatgaaacatggaataaactattaactactatcaaagccgttgtgatgctggagtatgtcgagcgggcgacatggaacgatcgcttttcagatatctatgccttgtgtgtagcctacccagaaccgttgggtgaacgcctgtatactgagactaagatattcctcgagaatcacgtgaggcatctgcacaagagagtcctggagagcgaagaacaggttctcgttatgtatcataggtattgggaggaatattctaagggcgcggactatatggattgtctttatcgctatctgaatactcaatttatcaaaaagaataaacttaccgaggccgacctccaatatgggtatggcggcgtggacatgaacgaaccattgatggagatcggagagctggccctggacatgtggcgaaagttgatggtggagcctctccaggccattctgatccggatgcttttgcgagagatcaagaatgatcgtggcggagaggatcccaatcagaaggtgatacatggggttattaattcgttcgtgcatgttgaacagtataaaaagaagtttccactgaaattctaccaagagatttttgaaagcccatttctgactgagaccggggaatattacaagcaagaagccagcaaccttctccaagaatctaattgcagtcagtacatggagaaggttctaggtcgcctcaaggacgaggagattaggtgtcgcaagtatctgcatccgtctagttacaccaaagttatccacgagtgccaacagcgaatggtggctgatcacctacagtttctgcacgcggagtgccacaacataatcaggcaggaaaagaagaacgatatggccaacatgtacgtccttctccgcgccgtatcaactggtctgccccatatgatccaagagctgcagaatcacatccatgacgaaggtctgcgtgcaacctcaaaccttacacaggaaaatatgccgactctcttcgtggagtccgtcctagaggtgcacggtaaattcgtacaactgattaatactgtcctgaacggtgatcaacatttcatgtccgcgcttgacaaagctctaacctcggtagtcaactatagagagccaaagtccgtttgcaaagctcccgagcttctcgcgaagtattgcgacaatttgttaaagaaatctgccaaggggatgacagaaaatgaagtggaggaccgcctgacctcattcattactgtctttaaatatatcgatgataaggacgttttccagaaattttatgcgagaatgttggcgaaacgactgattcatggcctcagcatgtcaatggacagtgaggaagctatgataaacaagctaaagcaagcgtgcggatacgagtttacaagtaagctgcaccgaatgtacactgacatgtctgtgtcggcagacctgaacaacaagttcaataatttcattaaaaatcaggacaccgtcatcgacttggggataagttttcagatctacgtgcttcaagcaggggcatggcccttgacacaagccccttctagcacatttgccattccacaggagctcgaaaagtcagtgcagatgttcgagctgttctacagccagcactttagcggtcgaaagcttacatggctccactacctgtgtactggagaggtcaaaatgaattatctgggcaaaccgtatgtggccatggtgaccacatatcaaatggccgtgttactggcatttaacaactcggaaactgtaagctataaggagttgcaggattctacacagatgaatgaaaaggagctcacgaagactatcaaaagcctgctagacgtgaagatgatcaaccacgattctgagaaggaggacattgacgccgagagctccttttcactgaatatgaacttttccagtaaacgtacaaaatttaagattacaacatccatgcagaaggacaccccgcaggagatggaacagacccggtctgccgtagatgaggatagaaagatgtacctccaggctgccatagttcgcattatgaaggctagaaaagtgctcaggcacaacgccctgattcaggaggtgatatcccagtctagagcaaggtttaacccctctatctcaatgatcaagaagtgcattgaagttctgatcgataagcagtatattgagagaagtcaggcaagcgctgacgagtactcctatgtcgcctag

SEQ ID NO: 14680 - DNA, 2238 bp, synthetic construct
  misc_feature 1..2238: note = Description of Artificial Sequence: Synthetic coding sequence
  source 1..2238: mol_type = other DNA
atgagtctcaagccccgggttgtggacttcgacgaaacttggaacaaactgctaaccaccataaaggccgtggttatgctcgaatacgtggaacgggccacatggaacgaccgctttagtgacatctatgcactgtgcgtagcatatccagagccactgggcgagcggttgtacacagagacaaagattttcttggagaaccatgtgaggcatctgcataagagagtgctagaatcagaggaacaggtgctggtgatgtaccaccgatactgggaggaatacagcaagggagcagattacatggattgcttgtaccgttaccttaatactcagttcatcaaaaaaaataaattgaccgaggcggatctgcagtacggatatggcggagtcgatatgaatgagcctctgatggaaattggggaactggccttagatatgtggcgcaaactcatggtggagcctctgcaggccatcctcattcgtatgctgctgcgggagatcaaaaatgaccggggcggagaagatccgaaccaaaaggtgattcatggagtgatcaattcttttgttcacgtcgaacagtataaaaagaagtttccgctgaagttctatcaggagatttttgaatcccctttcctcacagagacaggcgagtactataaacaagaagcgtcaaacttgctacaggaatctaactgctcccagtacatggagaaggtgctgggccggctcaaggacgaggagattagatgccggaagtaccttcatccttcatcctatacgaaggttatccacgagtgccaacagaggatggtggccgatcacttgcagttcctgcatgcagaatgtcataacataattaggcaagagaagaagaatgatatggctaatatgtatgtcctcctgagggcagtgtccacaggcctgccgcatatgatacaggagctgcagaaccatatccatgacgagggcttgcgcgctacctctaacctgacacaggagaacatgcccaccctgtttgtggaatctgtcctggaggttcacggcaaattcgtgcagctgatcaacaccgtgttgaatggcgatcaacacttcatgtctgctctggataaagctctcacatctgtggtgaactatagagagcccaaatccgtgtgcaaggcaccggagctacttgccaaatattgtgacaacctcctgaaaaagtctgccaaagggatgaccgaaaatgaggtagaggatcgccttacatcctttatcaccgtgtttaaatacatcgatgacaaggatgttttccaaaaattctacgcccggatgctcgccaaaaggctgattcacggactctcgatgtccatggattcagaagaagccatgatcaacaaactgaagcaggcgtgtggctacgaatttacttccaagctacataggatgtatactgacatgtctgtgagcgccgacttgaataataaatttaacaatttcataaagaatcaggacactgtgattgacctgggaatcagctttcaaatctatgtattacaggctggggcgtggcctcttacccaggcgccttcctcaacatttgccataccccaggaacttgagaaaagcgtgcagatgttcgagctcttttactcccagcacttttccggcaggaaacttacatggttgcactacctctgcacaggcgaagtgaagatgaactatctcggcaagccatatgtggccatggtaaccacctaccagatggctgttttgcttgcctttaataactcagagacagtgtcatataaggagctgcaggacagtactcagatgaatgagaaggaactgaccaagactatcaagtccctgctggacgtgaaaatgatcaaccacgattcagagaaggaagacatagacgccgaatcctctttcagtctcaatatgaacttcagctctaaaagaactaaattcaaaatcacaacctccatgcaaaaagataccccacaggaaatggagcagacgcggtctgccgtcgatgaagacagaaagatgtacctgcaagcggcgatcgtgaggatcatgaaggctcgcaaagtgttgagacacaatgcgctgattcaggaggttatctcgcaaagtagagccagattcaatccatccatctccatgatcaaaaagtgtatcgaagttctgatagacaaacaatatatcgagcgctctcaagcatccgctgacgaatattcgtacgtggcctag

SEQ ID NO: 14681 - DNA, 2238 bp, synthetic construct
  misc_feature 1..2238: note = Description of Artificial Sequence: Synthetic coding sequence
  source 1..2238: mol_type = other DNA
atgtccctgaaacctagagttgtcgatttcgatgagacatggaataagctgctgaccacgataaaagccgtagtgatgctggagtatgttgaacgcgctacatggaacgaccgtttcagcgacatttacgccctgtgtgtggcctatccggagcctcttggcgaaaggctgtataccgagactaaaatttttctcgagaatcacgtgagacatctgcataaaagggttttggagtcagaagagcaggtgctggtgatgtatcacagatactgggaggagtacagtaaaggggccgactatatggactgcctgtacagatacctgaacacccagttcatcaagaagaacaaactgaccgaagctgatctccagtacggatacggcggagtggacatgaacgaacctttaatggaaataggagagttggcactcgacatgtggagaaagctcatggtcgagcccctgcaggctatcttgatcaggatgctccttagggagatcaagaatgaccgagggggcgaagatcctaatcagaaggtgatccacggagtgattaatagttttgtgcacgtggaacagtacaagaaaaagtttcccctcaagttttaccaagagatcttcgagtctccgtttctgaccgagaccggggaatattacaaacaagaggctagcaatctcctgcaggagtcgaactgctcccagtacatggagaaagtcctcgggcgactgaaagatgaggagatcaggtgtaggaagtatctccatccctcgtcctataccaaggtgattcatgagtgtcagcaacgcatggtggcagaccacctgcagttcctgcacgctgagtgtcataacataattaggcaagaaaagaagaacgacatggccaacatgtacgtgctcctacgagcagtttcaacagggttacctcacatgatccaagagttgcagaaccatattcatgatgaggggttgcgggccacatcgaatctcacacaagagaacatgcctacactattcgtggaatcagtcctagaggtgcacgggaagtttgttcaactgatcaataccgtgctgaacggggaccagcattttatgtcagcgctggataaagcactcacctctgttgttaactatcgcgagcctaaaagtgtgtgcaaagcccccgagcttttagcaaagtactgcgacaacctcttaaagaagagcgcgaagggcatgaccgagaatgaggttgaagacagactgacctcttttatcactgtgttcaagtacatcgatgataaagacgtttttcaaaaattctacgcgaggatgcttgccaagagactcattcacggcctgtccatgagtatggatagtgaggaggcaatgattaataagctgaagcaagcctgcggctacgagtttacttccaagctgcatcgcatgtatacggacatgtccgtgtccgctgacctgaataacaagtttaataattttattaagaatcaggacacagtgattgatttgggtataagcttccagatttacgtcctgcaggcaggggcctggccactgacccaggcgccgagctctaccttcgccataccgcaagagctggagaaaagtgtccagatgtttgagctcttttattctcagcacttctctggtcgcaaattgacttggctccactacctgtgtaccggcgaggtgaaaatgaactacctcggcaaaccctacgtggctatggttacaacctatcagatggccgtgttgttggcattcaacaactcagaaaccgttagttacaaggaattgcaggacagcacccagatgaacgagaaagaactgaccaaaaccataaaatctttgctggacgttaagatgatcaatcatgactcagagaaggaggatatagatgccgaaagctcattctctctaaatatgaatttcagcagcaagagaactaagtttaaaatcactacctccatgcagaaggatacaccacaagagatggagcagacccggtctgcagtggatgaggaccggaagatgtatttgcaggctgccatcgtccgcattatgaaggccagaaaggtgctccggcacaacgcattgatccaagaagttataagccagagcagggccagattcaatccttcaatttccatgattaagaagtgcattgaggtcttaattgataagcagtatatcgagaggagccaggcttccgcagacgagtacagttacgtggcctag

SEQ ID NO: 14682 - DNA, 2067 bp, synthetic construct
  misc_feature 1..2067: note = Description of Artificial Sequence: Synthetic coding sequence
  source 1..2067: mol_type = other DNA
atgctgtacgtctggccaatcctgaatccattggagaaggactttatccaaaagctgaggttcttctggaagattatgttcggcatctgcatccggtactgggaagaatactcaaaaggcgcagactatatggattgcttgtaccggtacctgaacacacagtttatcaaaaagaataaactcacagaggccgatcttcagtatggttatggaggagtcgatatgaacgagcctctgatggagatcggggagttggctctggacatgtggagaaagctgatggtggaacctctgcaagctattctaatcaggatgctactccgggaaatcaagaatgatagagggggtgaggaccctaaccagaaggtaatacatggcgtgatcaacagtttcgtccatgtggagcagtacaagaaaaagtttcctttaaagttctatcaagagattttcgagtccccattcctgaccgagaccggtgagtattataaacaggaggccagcaatctattgcaagaaagtaactgcagccagtatatggagaaggtgctgggtaggctcaaggatgaggagataaggtgccgcaagtacctgcaccccagctcatatacgaaagtcatccacgaatgtcagcagcgtatggtggccgatcatctgcaatttttacacgccgaatgtcataatattataaggcaagagaagaagaacgacatggccaacatgtatgttctgttgagagcggtgtctactgggttgcctcacatgatccaggagttgcagaaccatatccacgatgaggggctaagagccaccagtaatcttacccaggagaacatgccaacattgttcgtggagagcgtccttgaggtgcacgggaaatttgtgcagctcatcaataccgtcctcaacggcgaccagcattttatgtcagctctggataaggccctgacctctgtagtgaattatcgtgaaccaaagagtgtatgtaaggctcccgaattgctggcaaagtattgtgataacttactcaaaaagagtgccaagggcatgacagaaaatgaggtggaggatcgcctcacaagtttcattacagtatttaagtatatcgatgacaaggacgttttccaaaagttctacgcaagaatgctggccaaaaggctcatccacgggttatctatgtctatggattcagaggaagccatgatcaataaactaaagcaggcctgtggatatgaatttacatcgaaactccacagaatgtacacagatatgtcggtctccgccgacctgaacaataagttcaacaattttattaagaaccaggataccgtgattgacctcgggatctcatttcaaatatatgttctacaggccggagcatggccccttacacaggccccgtcctcgacatttgctattccgcaagaactggagaagagtgtgcaaatgtttgaactcttttatagtcagcactttagcggtcgaaaattgacctggttgcactatctgtgcactggcgaggttaaaatgaattacttaggtaagccctatgtagcaatggtgacaacctaccaaatggccgttctgctcgcattcaataacagcgaaaccgtttcttataaggaactgcaggattccacacagatgaacgaaaaggagctcaccaaaacaatcaagtctttactggacgtgaagatgattaatcatgattcagagaaggaggacatagatgccgagagctctttctccctaaacatgaactttagcagcaagcgcaccaaattcaaaattacgacaagtatgcagaaggatacacctcaggaaatggaacagacaagaagcgctgtcgacgaggacagaaaaatgtacctgcaagctgccatcgttcggattatgaaagcacgcaaggtcctaagacataacgccctgatccaggaagtgatatctcagagtcgggctcggttcaacccctcaatttcaatgatcaagaaatgtatcgaggtgctaattgataagcaatacattgaacgctcgcaggcttccgccgatgaatatagttacgttgcctag

SEQ ID NO: 14683 - DNA, 651 bp, synthetic construct
  misc_feature 1..651: note = Description of Artificial Sequence: Synthetic coding sequence
  source 1..651: mol_type = other DNA
atgtcccttaaacctcgcgtcgtggattttgacgaaacatggaataaattgctgacaactatcaaggcggtggttatgctggaatacgtggagagagcaacttggaacgacaggttttccgacatctacgccctttgtgtggcttatccagaaccactcggagagaggctgtataccgaaactaaaatattcctggaaaaccatgtgcgccaccttcacaagcgggtcctggaaagtgaggaacaggtcttagtcatgtatcatcgatattgggaagaatattccaagggggcagattacatggattgtctctatagatacctgaatactcagtttattaaaaaaaacaaattaaccgaagctgaccttcagtatggatacgggggggtggacatgaacgagccccttatggagattggggagttggcccttgatatgtggaggaagctgatggtcgagcctctgcaggctattctcatccgcatgctgttacgcgaaattaagaatgatcgcggcggagaggacccaaaccagaaagtcattcacggggtgattaattcctttgtgcacgttgagcagtataagaagaaatttcccctgaaattttaccaagagattttcgaatcacccttcctgacagagacgggatag

SEQ ID NO: 14684 - DNA, 2295 bp, synthetic construct
  misc_feature 1..2295: note = Description of Artificial Sequence: Synthetic coding sequence
  source 1..2295: mol_type = other DNA
atgtatcgggtcacatggtctacgttctggctgaggttccagcactacacctgtacaatgagcttaaagccaagggtggttgacttcgatgagacttggaacaaactgctcaccacaattaaagccgtggttatgctagaatacgtcgagcgtgccacctggaacgacaggttttcagacatttacgccctgtgcgttgcctacccagaacccctcggcgagcgactgtacaccgagaccaaaattttcctggagaatcatgtgagacacctacacaaacgagtgctggaaagtgaggaacaagtgcttgtgatgtatcatagatattgggaggaatatagcaagggggccgattatatggattgcctctaccgatacctcaacacccagttcattaaaaaaaataagcttactgaagccgatttgcaatacgggtatgggggtgtggatatgaatgagcccttgatggagattggcgagctcgcgttggacatgtggagaaaattgatggtggagcctctgcaggccatcctcattcgtatgttgctgagagaaatcaaaaatgatcgcggcggtgaggaccctaaccagaaagtgattcatggcgtgattaactcttttgtgcacgttgaacagtacaaaaagaagttccccctcaaattctaccaggagatctttgagagtcctttcctgacggaaacaggggagtattacaagcaagaggcttcgaacttacttcaggagtcaaattgtagccaatacatggagaaagtgttaggccggttaaaggatgaagagattagatgccggaagtacctgcacccttcatcctacaccaaggtgatccatgagtgtcagcagcgcatggtggctgatcatctgcaattcctgcacgctgaatgccacaacattattcgccaagaaaagaaaaatgatatggctaatatgtatgtcctcctacgcgccgtcagcacaggccttcctcacatgatacaggaattgcagaatcatatacatgacgaaggcctgagggccacttcaaaccttactcaggagaacatgcccactcttttcgttgagtcagtcttagaggtgcacggtaagtttgttcagctgatcaatactgttctcaatggggatcagcacttcatgtccgccctggataaagccctgacaagcgtcgtcaattaccgcgagccaaaatcagtgtgtaaggcacctgaactgctcgcaaaatattgtgacaacctgctgaagaagagtgcgaaaggtatgactgagaacgaggttgaggaccggttgacgtcttttattacagtgtttaaatacatcgacgataaggacgtgtttcagaagttctatgcccgtatgctggccaaacgtctcattcacggactgagcatgagcatggattcagaagaggcaatgattaataaactgaagcaggcgtgtggatacgagttcacatccaagcttcataggatgtatacagacatgagcgttagcgccgatctgaacaataagttcaacaattttataaagaaccaggacaccgtaatcgacctcggtatttcattccaaatctatgtcctgcaggcaggagcctggccactaacacaggcacctagcagcacttttgccattccacaagaactggagaagtccgtgcagatgttcgagctgttctacagtcagcacttcagcgggcggaagttaacttggcttcattatctgtgtaccggagaggttaagatgaactacctgggcaagccatacgtggcaatggtgaccacttaccagatggcagtgctgctggccttcaataacagtgagactgttagttacaaggaacttcaggattccacccagatgaacgaaaaagaattaacgaagaccattaagtctctgctggacgtcaagatgattaatcacgattccgagaaagaagacatcgacgcagaatcgagcttttcgttgaacatgaacttcagttccaagaggacgaaattcaaaattaccacctcaatgcagaaggacacgccacaggaaatggagcaaacgcgcagcgcagttgatgaagaccgtaagatgtatttgcaggctgccatcgtccggatcatgaaagcacgaaaggtgctgaggcacaacgcactgattcaggaggtcatttcccaatcacgggccagatttaacccatctatctctatgatcaagaaatgtatagaggtcttgatagacaaacagtatattgaaaggagccaggccagcgcagacgagtattcttacgttgcttag

SEQ ID NO: 14685 - DNA, 2307 bp, synthetic construct
  misc_feature 1..2307: note = Description of Artificial Sequence: Synthetic coding sequence
  source 1..2307: mol_type = other DNA
atgtctaacctgtcaaagggcaccgggtctagaaaggacacaaaaatgcgcattcgtgcattcccgatgaccatggatgaaaaatacgtcaactccatctgggatttgctaaaaaatgccattcaggaaatccagcggaaaaacaactccggactgagcttcgaagagctttaccgtaacgcgtacacaatggtcctgcataaacacggagagaagctctatactggtctgagggaagtggtgaccgagcacctcatcaacaaagttcgggaagatgtactgaactctctgaacaataatttcctgcaaacgttgaaccaagcttggaatgaccaccagaccgcaatggtcatgattagggatatcctcatgtacatggatcgggtgtatgtgcaacagaacaacgtcgagaacgtgtacaatctgggcctcattatcttcagggatcaggtagtgagatacggctgcatccgagatcacctgagacagaccttgttagatatgattgctagggagcgtaaaggggaagtggtagaccgcggggcgatccgtaatgcctgtcagatgctaatgattctgggacttgagggccgatccgtctacgaagaggactttgaggccccctttctggagatgtcagcagaattttttcagatggaatctcagaagttcctcgctgaaaattccgcctccgtttatatcaagaaggtggaggcgcggatcaatgaggaaattgagcgagtcatgcactgcctggataaatcaacagaagaaccaattgtgaaagttgtcgagcgggagcttatcagtaagcatatgaaaacaatcgtcgagatggaaaactccggccttgtccatatgttaaagaacggcaaaaccgaggatcttggttgcatgtacaagctgttctctagggtgcccaacggccttaaaactatgtgcgagtgcatgtcgagttatcttcgagaacagggcaaggcccttgtcagtgaggagggcgagggcaagaatccagtggattatattcagggtcttttggatttgaaatctcgattcgatcgtttcctactcgagtcctttaacaacgatcggcttttcaaacagacaattgctggcgatttcgagtatttcctgaatctgaactcaagatctccagaatacctgtctttgtttatagacgacaaattgaaaaaaggtgtgaaaggactgacggagcaggaggtagagacaatccttgataaggccatggttctgttccgcttcatgcaggagaaagacgtgttcgaacgctactataaacagcacctggcaaggcggctgctgaccaacaagtcagtaagtgacgactcagagaaaaacatgatcagcaagctgaaaactgagtgtggttgtcagttcacttcgaagttagaagggatgttcagagatatgtctatcagcaatacaacaatggatgaattcagacagcatctgcaagccacaggggttagcttaggcggagtggacctcaccgtaagggttttgaccaccggctattggcctacgcaaagcgcgactcccaagtgcaacatacctcccgcacctagacacgctttcgaaatctttagaagattctatttagcaaaacattcgggccggcagctcactcttcagcatcacatgggatcagcagatttaaatgcaacattctatggccccgtcaaaaaggaggacggtagtgaagttggggtcggaggagcccaagtcacaggatccaacacacgtaaacacatactacaagtttctacattccagatgacaatactgatgctcttcaataaccgcgagaaatatacgttcgaagagatccagcaggagacagacattcctgagcgcgagttggtgcgggctctccaaagcctggcctgtggtaagcccacccagagagtgctaacaaaagaaccaaagtcaaaggaaatcgaaaacggacatatcttcacagtgaatgatcaatttacctctaaactgcatagggtgaagattcaaacagtggccgctaagcagggcgaaagcgatcccgagcggaaagagacaaggcagaaagttgatgacgataggaaacacgaaattgaggccgctatagtccgaataatgaaaagtcggaagaaaatgcagcacaatgtgctggttgcagaagttacccagcagttaaaagcccggttcttgccaagccccgtggtgattaagaagcgaatcgaggggcttatagaacgcgagtacttggcccgaactcctgaagatagaaaggtatatacatacgtagcttag

SEQ ID NO: 14686 - DNA, 2109 bp, synthetic construct
  misc_feature 1..2109: note = Description of Artificial Sequence: Synthetic coding sequence
  source 1..2109: mol_type = other DNA
atgtcaaacctgtcaaaggggaccgggagccgcaaagatactaagatgcggataagggcgtttccagtccgagaggatgtactgaattcattgaataacaatttccttcaaacacttaaccaggcatggaacgaccatcaaactgcgatggtaatgattagagacattctgatgtacatggatcgtgtgtatgtccaacaaaacaacgtggaaaacgtttataacctcggacttatcatatttcgagaccaggtggttcggtatggctgtatacgtgaccatctccgacagactctcctggacatgattgctcgggagaggaagggagaggtggtggatcgcggcgcaattaggaatgcttgccaaatgttgatgatcctgggccttgagggtaggagcgtctacgaagaagacttcgaggctccatttctcgagatgtcagccgaattcttccagatggagagtcagaagtttcttgccgagaacagtgcttccgtgtacattaaaaaggtggaggctcggataaacgaggagattgagcgcgttatgcattgccttgataagtctactgaggaacccattgtgaaggtcgttgagcgagaactgatctctaaacacatgaagactatcgttgagatggaaaattccgggctggtgcacatgcttaagaatggcaagaccgaagatctcgggtgcatgtacaagctcttcagcagggtgcctaatggactaaagacaatgtgtgagtgcatgtcttcctacctgagagagcaggggaaggccctggtctccgaagagggtgaaggcaaaaatcctgtcgattacattcagggcctactcgatctaaagtcccggttcgaccgcttcttgttggagtctttcaacaatgacagactgtttaaacagaccatagctggggactttgagtacttccttaacctgaactcaagatctccagaatatctcagccttttcatagacgataagttgaagaaaggagtcaagggactgactgaacaagaagtcgaaacaattctggataaggccatggtgctctttagatttatgcaggagaaggacgtctttgaacgctattataaacaacaccttgctagaagactgttgaccaacaaatctgtcagtgatgacagtgaaaagaatatgattagtaagctgaaaacagagtgtgggtgtcagtttacttccaagctggaaggcatgtttcgggacatgagcataagtaatactaccatggatgaatttcggcagcatttgcaggccacaggcgtcagcttaggcggcgtcgatcttactgtgcgtgtgctgaccaccggatactggcctacacaatctgcaacccccaagtgcaatatccctcctgcaccgaggcatgccttcgagatctttagacgcttctatctagccaagcatagcggtaggcaactgactcttcagcatcatatgggttccgctgaccttaatgcaacattttatggaccagtgaaaaaagaggacggttcagaagtgggggtcgggggcgcacaggtgaccggcagcaacactcgaaaacacatcttgcaagtgtctactttccagatgaccattctgatgctcttcaataatcgggagaaatatacattcgaagagattcaacaggagaccgacattcctgagcgagagctggtgcgtgcccttcagtccctagcttgtggaaaacccactcagcgggttctgactaaggagcctaaaagcaaagaaattgaaaatgggcacatcttcactgtgaatgaccagtttacctctaagttgcacagggtaaaaatccagactgtggccgccaaacaaggcgaatccgacccagaacggaaggagaccagacagaaagtcgatgacgacagaaaacacgaaatagaggctgcaattgtgcgcatcatgaagagcagaaagaaaatgcaacacaatgtgttagtggcagaggtgacccagcagctgaaagctcggttcctcccaagcccagtggtgattaaaaaaagaatagaaggcctcatcgagagggagtacctggcacgaacgccggaggatcggaaggtgtatacatatgtcgcttag

SEQ ID NO: 14687 - DNA, 2235 bp, synthetic construct
  misc_feature 1..2235: note = Description of Artificial Sequence: Synthetic coding sequence
  source 1..2235: mol_type = other DNA
atggacgaaaagtatgtgaactctatctgggatttattgaagaatgcgattcaagagattcaaagaaagaataacagcggcttgagcttcgaagaactgtatagaaatgcctacacgatggtcttgcacaagcatggggagaaactttatacgggcctgcgagaagttgtaaccgagcacctgatcaacaaggtgcgtgaggacgtcctcaattccctaaacaataactttctgcagacgctaaaccaggcatggaacgaccaccagacggccatggtcatgattcgcgacatcctcatgtacatggatcgcgtgtatgtacagcagaacaacgttgaaaatgtctataacctcggattgatcatcttccgggatcaggtcgtaagatacggctgtatcagggatcacctgcgccagactctgctggatatgattgcccgagagcgaaaaggggaggtagtggaccggggcgctatcagaaatgcatgtcagatgcttatgattctgggattggaaggtcgctccgtttatgaggaggactttgaggcccctttcctcgagatgtccgcggaattcttccagatggaatcccaaaaatttctggcagagaacagcgccagcgtgtatattaagaaagttgaggctcgcattaacgaagagatcgagcgggtgatgcattgcttagacaaaagcacagaggagccgatcgttaaagtcgtcgagcgcgaactcatctctaaacacatgaagacaattgtggaaatggaaaattccgggctggttcacatgcttaagaacggcaaaactgaggacctgggttgcatgtacaaattgttcagtcgagtcccaaacggtctcaagactatgtgcgagtgcatgtcaagttacctgcgagagcaggggaaggccctggtgtccgaggagggggagggcaagaatccagtggactatatccaggggctgcttgacctgaagtctcggtttgaccggtttctcttggagtcctttaacaacgataggttgttcaaacagacaatcgccggcgacttcgaatacttcctcaatctgaatagcaggtcacctgagtatcttagcctgtttatcgatgacaaactgaagaagggagtgaagggcctgacggagcaagaagtcgagacgattctcgacaaggctatggtgctgtttcggtttatgcaagaaaaggatgtattcgaacggtactataagcagcacctggcccgccgactgctgaccaataagtctgtctctgacgattccgagaagaatatgataagcaagctgaagacggagtgcggatgtcaatttacttctaagcttgagggtatgtttcgtgatatgtctatttctaacacaacaatggacgaattccggcagcatctgcaagccaccggcgtctccctcggcggggttgatctgaccgtcagggtgctcacaacaggctactggccaacacagagtgccacgccaaagtgcaacattcctcctgccccccgtcatgcttttgagatctttcggcggttctatttagccaaacattcaggacgccagcttacgctgcagcaccatatgggtagtgcggacctgaatgcaactttctatgggccagtaaaaaaagaagacggatcagaagtgggcgtcggtggtgcacaggtgaccggcagcaacaccagaaagcatatcctgcaagtgtcaacatttcaaatgacaattctgatgttatttaataacagagagaaatataccttcgaggagattcaacaggagaccgacattcctgaacgggaactcgtgagggctctacaatcactggcttgtggtaagccaactcaacgtgtcttgaccaaagaacctaaaagcaaggagatcgagaacggacatatctttactgttaatgatcagtttacctctaagctccatcgggtcaagattcaaactgtggcagcaaagcaaggggagagcgacccggagagaaaggaaactaggcagaaggttgatgacgatcgcaagcatgaaatagaagccgctatcgtacggattatgaaaagcaggaaaaagatgcaacataatgtgctggtggcggaagttacacagcagttaaaggcacgattcctgcccagtcccgtggtgattaagaagcgcatcgagggtttaatcgagcgggagtatctggcccgaacacccgaagatcgcaaggtgtacacttacgtggcctag

SEQ ID NO: 14688 - DNA, 2235 bp, synthetic construct
  misc_feature 1..2235: note = Description of Artificial Sequence: Synthetic coding sequence
  source 1..2235: mol_type = other DNA
atggacgagaagtacgtcaactccatctgggatctgctgaagaacgctattcaggagattcagaggaaaaacaattccggcctgtcgttcgaggaactatacaggaatgcctacacgatggtcctgcacaagcacggggagaagctgtataccggcctcagagaagtagtgactgaacacctgatcaacaaggtgagagaggatgtgctaaattctcttaataataacttcctgcaaaccctgaatcaggcttggaacgaccatcagaccgctatggtgatgattcgagatatcctgatgtacatggatcgagtgtacgtgcagcagaataacgtggagaatgtgtacaaccttggactcataatttttagagaccaggtggtcaggtacggttgtattagggatcacctgaggcagaccctgcttgatatgatagcgagggagaggaagggggaagtcgtagacagaggagccatccggaacgcctgccagatgctgatgatcctgggattggaagggagatccgtgtacgaggaggacttcgaagcaccctttctggagatgtctgccgaattctttcaaatggagtctcagaagtttctcgccgagaattccgcaagcgtatatatcaaaaaggtggaagcccggatcaacgaggagatcgagagagtcatgcattgtctcgacaagtctacggaagaacctattgtgaaagtagtggaacgcgaattgatcagcaagcacatgaaaactattgtcgaaatggagaacagtggtctcgtgcacatgctgaaaaacgggaagactgaggacttgggctgtatgtataagcttttttctagagttccgaacggactgaagactatgtgcgagtgtatgtcaagttatttgcgggaacaaggaaaggccctagtatcggaggaaggtgagggcaaaaatcccgtggattatattcaaggcctcctcgaccttaagtccaggtttgaccgattccttctggaaagcttcaacaacgacagacttttcaaacaaacaatcgccggagactttgaatactttttgaacctgaattctagatcacccgagtatctcagcctgttcatcgatgacaaactgaagaagggtgtgaagggcctgacagaacaagaggttgagacaatcttagataaggctatggtcctatttcggtttatgcaggaaaaggatgtctttgaaaggtactacaagcagcatctcgcacggcggcttctcactaataaaagcgtttccgatgacagcgaaaagaacatgatttccaagcttaagactgagtgtgggtgccaattcacctctaagttggaggggatgttcagagacatgtccattagcaatacaacgatggacgaattccgccagcatctgcaggcaacaggtgtcagcctgggaggcgtcgacttgactgtccgcgtcctgaccacaggatattggccaacccagtccgcaacacccaaatgtaatattccccccgccccccggcatgcctttgagatcttcaggcgcttctacctggccaaacatagcggccgccagttgaccttgcagcaccatatgggatcagctgacttaaatgctaccttctatgggccagtgaagaaggaagacggaagcgaggtgggggtgggtggagcacaggtcaccgggagcaacacccgcaagcacatccttcaagtgagtaccttccagatgaccatcttaatgttgttcaataatcgagagaagtacacctttgaggagatccaacaggagaccgacatacctgagagagagctggtgcgcgctctgcagagcctggcctgtggcaagcccactcagcgcgtgctcaccaaggagccaaaatctaaggaaattgaaaatggccatatcttcaccgtgaatgaccaatttacatccaaattacacagagtcaaaattcaaacagtggcggcaaaacagggcgaatccgatcccgaaagaaaagagacgaggcagaaggtggacgatgaccgaaagcacgagatagaagcagcaatcgttcgcattatgaaaagtagaaaaaagatgcagcataacgtgttagtagccgaagttacccaacagttaaaagcccggttcctgccctccccagtggttatcaaaaagagaatagagggtctgatcgaacgggagtacctggctcggacgccggaggaccggaaagtctacacgtacgtcgcatag

SEQ ID NO: 14689 - DNA, 1398 bp, synthetic construct
  misc_feature 1..1398: note = Description of Artificial Sequence: Synthetic coding sequence
  source 1..1398: mol_type = other DNA
atggaaaccggattccctgcgattatgtacccaggctcctttatagggggatggggtgaagaatacctcagttgggaaggccctggcctgccggattttgtgttccaacagcagcccgtggaaagcgaagcgatgcactgctccaatccgaaatccggcgtggtgctagccacagtggcacggggtcctgacgcgtgtcagattctgacaagggcccctcttggccaggatccacctcagagaactgtcctgggcttgctgactgctaacggtcaataccgtagaacatgcgggcagggaatcacacggattcgctgctatagtggtagcgaaaacgcattcccacccgcgggcaagaaagctttgccagattgcggagtccaggagccgccgaagcaggggtttgacatctacatggatgagctggagcagggtgatagggactcatgctctgtgagggagggcatggcctttgaggatgtgtatgaagtggacactggaacactgaagtccgatttgcactttctgctcgacttcaatacggtgtccccgatgctagttgactctagcctgctgagtcagtccgaagacataagcagccttggaacagacgtcataaacgttaccgagtatgctgaggagatctaccaatatctgagagaggccgagattcgacatagacctaaggcccactatatgaagaaacaacccgacattacagagggcatgaggaccatcctcgtcgattggctggtggaagtcggagaagaatataaactgagagctgaaaccctctatctggcagtgaacttcctggacaggttcctgtcatgtatgtctgttctgcgcgggaaactacagttggtcggaaccgccgcaatgctgctagcctcaaagtatgaggagatttacccccctgaagtggatgaattcgtttatataaccgatgacacatacactaagcgccagctgcttaaaatggaacacctgctcctgaaggtgcttgcctttgacctgactgtgcccaccaccaaccagttcctgctccagtaccttagaagacagggcgtgtgtgtgaggaccgagaacttggccaagtatgtcgccgaactttccctgctggaagctgatccctttctcaagtacctaccatctctgattgccgcagccgcgttttgtttggcaaactatacagtaaacaaacatttctggcctgaaacactggccgcattcaccggctacagcttgagtgaaattgtaccctgtcttagcgaattgcataaggcctatttagatattccccacagaccccaacaagctatccgagaaaagtacaaggcctcaaagtacctgtgtgtgtccctgatggagccgcccgcggtgttgctcctccagtag

SEQ ID NO: 14690 - DNA, 1395 bp, synthetic construct
  misc_feature 1..1395: note = Description of Artificial Sequence: Synthetic coding sequence
  source 1..1395: mol_type = other DNA
atggaaactggctttcctgcgatcatgtatccgggctccttcattggggggtggggcgaggaatatctgtcctgggagggaccagggctgcccgatttcgtgttccaacagcccgtggagtccgaggccatgcattgctctaatcccaagtctggcgtcgtgcttgcaaccgtggcccgtggcccagacgcctgccagattctgactcgcgccccgctcggacaggaccctccccagcgcactgtgttgggactgttaacagcaaacggccaatatcgacggacatgtggacaaggcataacaaggatccgctgttactctgggtcagaaaacgccttccccccagctgggaaaaaggccctgcccgattgcggcgtccaggagcctcctaaacaaggcttcgatatctatatggacgagctggaacaaggagatcgggacagctgcagcgtcagggaaggcatggctttcgaggatgtttacgaggtggataccggcacgctgaaatcggacctgcactttctcctcgactttaacacagtgagccccatgcttgtggactcatccctgctttcgcagagcgaagacatttccagccttggaaccgacgttattaacgttactgagtacgcggaggaaatttatcaatacctcagagaagccgaaattagacaccgccccaaggcccattatatgaaaaagcaaccagacatcaccgaaggtatgcgaaccatactggtggattggttggtcgaggtaggggaagaatataagcttcgagccgaaactttatatctggctgtaaactttctagatagatttctgtcctgcatgtctgtcctgaggggcaaactacagctggttggaaccgccgcaatgctcctggccagcaagtatgaggaaatttaccctccggaggttgacgagtttgtgtacatcacggacgatacgtatacaaagagacaactgctgaagatggagcacctgcttctgaaggtcctggcgttcgacttgacggttccgacaacaaaccaattcctgttacagtatcttcgtcggcagggggtctgtgtacggacagaaaatctcgctaaatacgtagccgaattaagcctgctggaagctgacccctttctaaaatatctgccctccctgatcgctgcagcggcattttgtcttgccaattataccgtcaataaacatttctggccagagaccctggccgccttcactgggtactccctgagcgagatcgtgccttgtctaagtgaattacacaaggcatacctggacatccctcaccggccgcagcaggctatccgggaaaagtacaaggcgagcaagtacctatgtgtgtcccttatggagcctccagccgtgctcctgttacagtag

SEQ ID NO: 14691 - DNA, 1266 bp, synthetic construct
  misc_feature 1..1266: note = Description of Artificial Sequence: Synthetic coding sequence
  source 1..1266: mol_type = other DNA
atgcattgttcaaatccaaaatctggggtggtccttgccaccgtggcccgaggcccagacgcctgccaaatcctcactcgggcaccgctcggccaggatccgccccaacgaaccgtgctaggtttgctgacggccaacggccagtaccggagaacatgcggacaaggtattactcgcatcaggtgctacagtggttcggaaaatgcatttccccccgcaggcaaaaaagctctacccgactgcggcgttcaggaacctccgaagcagggttttgacatctatatggatgagctcgagcagggagatcgcgattcttgctcagttcgggaaggtatggcattcgaagacgtttatgaagtggatacgggtacattgaagtcagaccttcacttcctgctcgactttaatactgtcagtcccatgctcgtggacagctctcttctgtcccagagcgaagacatttcctcccttgggacggatgtgattaatgtgacagaatatgctgaggaaatctatcagtacctgcgggaagctgagatcaggcataggccaaaggcccattacatgaaaaaacagcccgatattaccgaaggcatgcggaccatcttggtagactggttggttgaagtgggggaggagtacaagctccgtgccgagaccctttacctggccgttaacttcctggaccggtttctgagctgcatgagcgtgctgcgaggcaaactgcagctcgttgggaccgctgctatgcttctagcaagcaagtatgaagaaatttatccccccgaggtggatgagtttgtttatattactgatgatacctacacaaaaagacaattgctcaaaatggagcatctgctgctcaaagtcctagctttcgacctcaccgtgccgacgacgaatcaatttctgctgcagtacctcagaagacagggcgtgtgtgtccgcacggaaaacctcgctaagtacgttgctgaactgtcactgctcgaggccgatcctttcttaaaatacttgccatcactaattgcagccgctgctttttgccttgctaattacactgtgaacaaacatttttggccagagactctggctgcatttaccgggtacagtctcagtgaaatcgtaccttgtctgagtgagctgcataaggcctatctggacatacctcacaggcctcagcaggcgatcagagagaaatacaaggcaagtaaatatctgtgtgtttccctaatggaacctccggctgttctcctgctacaatag

SEQ ID NO: 14692 - DNA, 1266 bp, synthetic construct
  misc_feature 1..1266: note = Description of Artificial Sequence: Synthetic coding sequence
  source 1..1266: mol_type = other DNA
atgcattgcagcaaccccaagtctggcgtggtgctcgccaccgtggctaggggcccagatgcatgccaaattcttacgagggccccactcgggcaagatccccctcagcgcaccgtgctcgggctcctgaccgccaatggccagtacaggaggacttgtggtcaaggtatcaccaggatacgctgctattctggatctgagaacgccttccctccggccggcaaaaaggctctccccgattgcggagtccaggagccacctaaacagggctttgacatatatatggacgagctggagcagggcgatagagactcctgcagtgtgagggagggcatggccttcgaggacgtgtacgaagtggatacaggtacccttaagtctgacttgcattttctgttggactttaataccgtgagtccaatgttagtcgactcttcactcctgagtcagagcgaggacatctcctccctgggaacagacgtgatcaacgtgactgaatacgccgaagagatttatcagtacttgagggaagcggaaattcggcaccggcctaaagcacattatatgaagaagcagcccgatattaccgaggggatgcgcacaattctggtggactggctcgtggaggttggcgaggagtacaaacttcgggcagagaccctatacctggcagtaaactttttggataggtttcttagctgtatgtccgtgcttagaggaaaactacaattggtcggcacagcagccatgctccttgcctctaagtatgaagagatctacccacccgaagtggatgaatttgtctatattacggacgatacctacaccaagcgccagctcttaaagatggaacatttacttctgaaagtcctcgcttttgatctcactgtcccaaccacaaatcaatttctgctgcagtatctgcggagacaaggagtctgcgtgagaactgaaaatttagctaagtacgtcgcagagcttagtctccttgaggcagacccatttctgaagtatctgccttcacttattgcagcggccgccttctgtctcgctaactacacggtcaataagcacttttggccagagactctcgccgcattcacgggatactccctgagcgagattgtgccatgcttaagcgaattgcataaggcataccttgacattcctcatcggcctcagcaggccatccgcgaaaaatataaagcgtctaaatacttgtgtgtctccctaatggaaccacccgccgttttgttgctccaatag

SEQ ID NO: 14693 - DNA, 1299 bp, synthetic construct
  misc_feature 1..1299: note = Description of Artificial Sequence: Synthetic coding sequence
  source 1..1299: mol_type = other DNA
atgctcggtaattctgctcccggacctgcaacgcgggaggccgggtccgccctactggctctgcaacagacagcgttacaggaagatcaagagaacattaatccggaaaaagccgctcccgtgcaacagcctcgcacccgtgccgccctggctgtgctgaagagtggaaaccccagggggctggcccagcagcagcgtcccaaaacaagacgggtcgcccctctgaaagatctaccagtgaacgacgagcatgtcactgtgccgccctggaaagccaattccaagcagccggcatttacaattcatgtggacgaggccgagaaagaggctcagaagaaaccagccgagagccagaaaatcgagagagaggatgccctagccttcaattcggccatttctcttccgggaccccgcaagcccttagtgcctcttgactacccaatggatgggtcctttgagtcacctcatactatggacatgtcaatcattctcgaggacgagaaaccagtgagtgttaatgaggtccccgattaccatgaagacatccatacttaccttagagaaatggaagtgaaatgcaaaccaaaggtgggatatatgaagaagcaaccggatattactaactcaatgcgggcgattttagtggactggctggtagaggtaggagaggaatacaaactccaaaacgagaccttgcacctcgcggtaaactacatcgaccgcttcctgtcctccatgtcagtgctgagaggcaaactgcagctggtcggcactgcagccatgttgcttgccagtaaatttgaagaaatatacccacctgaggtggccgagtttgtgtacataacagatgatacgtatacaaagaagcaagtactcagaatggaacaccttgtcctaaaggttctgacatttgatctggccgcacccactgtcaaccagttcttgacacaatactttctgcaccagcagcctgccaactgtaaagtagaatccctcgctatgttcctaggggagctgagcctcattgatgccgacccttaccttaaatacctgcctagtgtcatagcaggcgcggcattccatctcgccctgtatactgtcaccggccaatcctggccagagtcgctgattagaaaaaccggttacactctggaatcgctcaagccctgtctgatggatctgcaccaaacctacttgaaagctcctcagcacgcacagcagagcatccgagagaaatacaagaattctaagtatcacggagtcagtctcctgaatcccccggaaacactcaatttatag

SEQ ID NO: 14694 - DNA, 1302 bp, synthetic construct
  misc_feature 1..1302: note = Description of Artificial Sequence: Synthetic coding sequence
  source 1..1302: mol_type = other DNA
atggcattgagggtcactcgtaactccaagataaacgcagagaataaggctaagatcaatatggcaggcgccaagagagtccctactgcgcctgctgccaccagcaaacccggcttgcgccccagaacagctctgggcgatatcgggaataaggtcagcgagcaattgcaggccaaaatgccaatgaagaaggaggccaagcccagtgccaccggcaaagtaattgacaaaaaactgcccaagccgctcgagaaggtcccaatgttggtccccgttccagtgagtgagccagttcccgagcctgaacccgagcctgaacccgagcctgtcaaggaagaaaaactgtcccctgagccaattctggtagataccgcatctccatctccaatggagacctccggatgcgcgccagcagaggaggatctgtgccaggctttttctgacgttatcttagcagtgaacgacgttgacgccgaggacggcgccgaccccaacctgtgctctgaatacgttaaggatatctatgcatatctgcggcaactcgaggaggaacaggccgtgcggccaaaatatctgttaggtagagaagtaacaggcaatatgagagccattttgattgattggttggtgcaggtccaaatgaagtttaggctgttgcaagagaccatgtacatgacagtcagcatcatcgaccgatttatgcagaacaattgtgtgcccaaaaagatgttacagctcgtcggagttacagcgatgttcatcgctagcaagtatgaggaaatgtatccgcccgaaattggtgactttgcatttgtaacagacaacacttacacaaagcaccagatcagacagatggaaatgaagattctcagggccttaaatttcgggctggggaggccccttcctcttcatttcctgaggagggccagtaaaattggggaggtggatgtggagcaacacaccttagctaagtacttaatggagctgaccatgttagactatgacatggtgcacttccccccatcccagattgccgctggggcgttctgtttagccctgaaaatacttgataatggcgagtggactcccacattacagcattatctctcttacaccgaggaaagccttctacctgtgatgcagcacctggcaaagaacgtcgtgatggtgaatcagggactgactaagcatatgaccgttaagaacaagtatgccacgagtaaacatgccaagatatccacattaccacagcttaacagcgcgctggttcaagacctcgccaaggcggtggctaaagtttag

SEQ ID NO: 14695 - DNA, 1191 bp, synthetic construct
  misc_feature 1..1191: note = Description of Artificial Sequence: Synthetic coding sequence
  source 1..1191: mol_type = other DNA
atggcactgcgcgtgactcgtaattccaagataaacgccgagaataaagccaagatcaacatggctggggcgaaacgagtcccaacggctccagcggctacatctaaacctgggctgcgcccccggactgctctaggcgacattggaaataaagtcagcgaacaacttcaagccaaaatgcctatgaagaaggaagccaagccctcagcaacgggaaaagtgatcgataagaagctgccgaaacccctggagaaggtccctatgttagtcccagtcccagtctccgaaccagtgccagaacctgagcctgaaccggagccggagcccgttaaagaggaaaaactctcaccggaacccattcttgtcgatacagccagcccatcaccaatggaaacctctggatgtgcgccagccgaggaagacctctgccaggcgttctctgacgtaatcctggccgtcaatgacgtcgatgctgaggacggcgccgaccccaacctgtgctccgagtacgtgaaggatatatatgcatacctccggcagttggaggaagagcaggctgtgcgcccaaaatatcttctggggagagaagtaaccggtaatatgagagccattttgatagactggttggtacaggttcaaatgaaattccgactgctgcaggagaccatgtatatgacggtctcaataattgacaggtttatgcagaacaactgtgtccctaaaaaaatgttgcagctcgtcggagtcacagcaatgttcattgccagtaaatacgaagagatgtatcctccagagatcggtgacttcgcctttgtcaccgataatacgtacactaaacatcagattaggcagatggagatgaagatccttcgggcgctgaattttggtcttggccgacctttgcccctacacttccttcgccgggcatcaaagattggagaggtggatgtcgagcagcacaccctcgctaaatatttaatggagttgacgatgcttgattatgatatggtgcatttccctccaagccagattgctgctggggccttctgtctggcgctgaagatacttgacaacggggagtggactgttaagaataagtacgcaactagcaaacatgccaaaatcagcaccctgcctcagctgaacagtgctctggtgcaggacctcgccaaagctgtggctaaggtctag

SEQ ID NO: 14696 - DNA, 1206 bp, synthetic construct
  misc_feature 1..1206: note = Description of Artificial Sequence: Synthetic coding sequence
  source 1..1206: mol_type = other DNA
atggctctgcgggtgacgagaaattccaaaattaacgctgaaaataaggctaagattaacatggcaggagccaagcgagtgcctaccgctcccgccgcgacgagcaaacccgggctgcgcccacgaacagcactgggcgatattggaaacaaagttagcgagcagctgcaggccaagatgcccatgaagaaagaggcaaaaccatccgcaaccggcaaggtgatcgacaagaagctcccaaaacccttagagaaggtcccgatgctcgtgcccgtcccagtatcagaacccgtccctgagccggaaccagagcctgagcccgaacccgtgaaagaggagaaattgtccccagaacccatcctagtagacaccgcatccccgtccccgatggaaacttctgggtgcgcccccgccgaggaagacctgtgtcaggccttcagtgatgtgatcctcgctgtcaacgacgtcgatgctgaagacggcgctgatcccaacctgtgttccgaatatgtgaaggacatttatgcatacctgcgccagctggaggaggaacaggccgttcgccctaagtatcttttaggcagggaagtgaccggaaatatgcgggccatactgatcgattggttagttcaagtgcagatgaaattcagattactgcaggaaaccatgtatatgacagtgtccattatcgaccgattcatgcagaataattgcgtcccaaagaaaatgttacagctcgtcggtgtgacagccatgttcattgctagtaaatatgaagagatgtatccacccgaaatcggagactttgcttttgtaacagacaatacgtacacgaaacaccagatccggcagatggagatgaagattcttcgcgccctgaatttcggattgggccgccctctgcctttgcacttcctcaggcgggctagcaaaatcggtgaggtggatgtggaacagcatacactcgcaaaatacttaatggaacttaccatgctggattacgacatggtgcatttccccccgtctcagatcgccgcgggcgcattttgcctggccctgaagatcttggacaatggagagtggacacccacactgcagcactatctgtcctacactgaagagtcactattgcctgtgatgcagcatcttgccaagaatgtagtgatggtcaatcagggtctgaccaaacatatggtgtcacagtag

SEQ ID NO: 14697 - DNA, 1197 bp, synthetic construct
  misc_feature 1..1197: note = Description of Artificial Sequence: Synthetic coding sequence
  source 1..1197: mol_type = other DNA
atggctctgctgagaaggccaacagtgtcatcagacctggagaatatcgatacgggagtcaactctaaggtgaaatctcatgtgaccattcgtaggactgtgctggaagaaataggaaaccgggtgacgactagagcagcacaggtcgccaagaaagcgcaaaacaccaaggttcccgttcagcctaccaaaaccacaaacgtcaacaagcaacttaagccgaccgcttctgtcaagcccgtacagatggagaagcttgcccccaaagggccttccccgaccccagaagatgtgtccatgaaggaggagaatctgtgccaagcgttttcggatgcgctgctgtgtaagattgaggacattgacaacgaggattgggagaatccccagctatgctccgactacgttaaagacatctaccagtatctgcgacagcttgaagtgttacagagtataaacccacactttttagatgggcgggacatcaatgggcgtatgcgggccattctggtggattggctagtccaggtccattctaaattccggttgcttcaggaaacactgtatatgtgcgttggtattatggaccgcttccttcaggtgcagccggtgtcccgcaagaagttacaattggtgggaattaccgccctcctccttgcaagcaaatacgaagagatgttttcccccaacatcgaggacttcgtctatatcacggataacgcctatacctctagccaaattagggaaatggaaacactcatcttgaaagaactgaagtttgagttaggccggcctttgccacttcattttttgcgtcgagcgagcaaggcaggcgaggttgacgttgagcagcacaccctggcaaagtatttaatggagctgacgttaattgattacgacatggttcattaccatccgtcaaaagtggccgcagctgcttcttgcttatcccagaaagtgttggggcaaggcaagtggaacttaaaacagcagtattacactggatacacagagaacgaagtcttggaggtaatgcaacacatggcgaagaatgttgtgaaggtgaacgagaacctgaccaagttcatcgccatcaagaacaagtatgctagtagtaagctgttgaagattagtatgataccacaattaaactcaaaggccgtgaaggaccttgcatcccccttgataggccgatcctag

SEQ ID NO: 14698 - DNA, 432 bp, synthetic construct
  misc_feature 1..432: note = Description of Artificial Sequence: Synthetic coding sequence
  source 1..432: mol_type = other DNA
atggcaggcaatttttggcaatcctctcactacctccagtggattttggacaagcaagacctgctcaaagaacgacaaaaggacctgaaattcctttccgaggaagaatactggaagctgcaaatattctttaccaacgtcatacaggcgctgggcgagcacctcaagctgcggcagcaggtgattgcaaccgccacagtgtatttcaagagattttatgcacggtatagtctcaagtctatcgatccagtactaatggcccctacttgtgtttttctggcttctaaggtcgaagagttcggtgtggtttccaacaccaggttaatagctgctgccacatctgtctgcaagtgcaaaaaatacatctgcttcaaggacgtgattctcaaaaaggccccagagtacatcgatttctttttcttttccctatag

SEQ ID NO: 14699 - DNA, 852 bp, synthetic construct
  misc_feature 1..852: note = Description of Artificial Sequence: Synthetic coding sequence
  source 1..852: mol_type = other DNA
atggcaggtaatttttggcagtcctcccattatcttcagtggatcctggataaacaggatttgctgaaagagaggcagaaggatctgaagttcttgagcgaggaggagtactggaagctccagatctttttcaccaatgtaatccaggcattgggcgagcatctgaagcttagacagcaggtcatcgcgacagccactgtgtactttaagaggttttacgcacggtactctttaaaaagtattgacccggtccttatggcgcccacgtgtgtgtttttggcaagcaaggtagaagaatttggagttgtatcaaacacaaggcttatcgcagccgcaacgtccgttcttaaaactcgcttcagttacgcttttcccaaggaatttccctacagaatgaatcacatcctggaatgtgaattttatctcttagagctgatggactgctgcttaattgtttaccacccctaccgacctctgctccagtacgtgcaggacatggggcaggaggacatgctccttcctctggcctggcgtatagtcaacgacacctaccggactgatttgtgccttctgtacccaccattcatgatcgccctggcttgtctccacgttgcttgtgtggtccaacaaaaagacgctagacagtggtttgcggagttatctgtggacatggaaaagatacttgagataataagagttatcctaaaactgtacgagcagtggaaaaacttcgacgagcgaaaagaaatggctacgatcctgtcgaagatgcccaagcccaagcccccgcctaactctgagggagagcagggccctaatggctcccagaattcttcctactcgcagtcttag

SEQ ID NO: 14700 - DNA, 597 bp, synthetic construct
  misc_feature 1..597: note = Description of Artificial Sequence: Synthetic coding sequence
  source 1..597: mol_type = other DNA
atggcacccacatgtgtcttccttgctagcaaagtcgaagaatttggggtggtctcaaacacacgattgattgccgctgccacttctgttctgaaaactcgctttagctatgccttcccaaaagagtttccatacagaatgaaccacatcctggagtgtgaattctacttgcttgagctgatggattgctgcttgattgtgtatcacccatacaggccactacttcagtatgtccaggacatggggcaggaggacatgctcctgccactggcatggaggattgtcaacgacacctatcgcactgatctttgtcttctctaccccccttttatgatagctctcgcctgcctccacgtggcctgtgtggtacaacaaaaagacgcgcgtcagtggtttgcagaactttccgtcgacatggaaaagatcctagaaattatccgcgtgatcctgaagctttacgagcagtggaagaacttcgacgaacgcaaggagatggctaccatattaagcaagatgccgaaacctaagccccctcccaatagtgagggagaacaagggcccaacgggtctcagaactcatcttactcccagagctag

SEQ ID NO: 14701 - DNA, 597 bp, synthetic construct
  misc_feature 1..597: note = Description of Artificial Sequence: Synthetic coding sequence
  source 1..597: mol_type = other DNA
atggcaccaacatgcgtatttctcgcctctaaggtggaagagttcggcgtagtgtctaatacccggttgatcgccgcagccaccagtgttctgaaaacaagattcagctatgccttcccgaaagagtttccctaccggatgaaccacattctggagtgtgaattctacttgttagagttgatggattgctgcctgatcgtataccatccatatcgtcctctgcttcaatacgtacaggacatggggcaggaagacatgcttctgcctctggcttggagaatcgtcaacgacacctacagaacagatttgtgcctcttatatcctcccttcatgattgcactcgcctgcctacatgtggcctgtgtggtgcagcagaaagacgcaagacagtggttcgcggagctaagtgtggacatggaaaagatactggagatcattagggtaatccttaaactgtatgagcagtggaaaaacttcgatgagaggaaagagatggccaccattctgtctaaaatgccaaaacccaagccccctcctaattcagagggtgagcagggccctaacggaagccagaattcttcctattcacaaagttag

SEQ ID NO: 14702 - DNA, 489 bp, synthetic construct
  misc_feature 1..489: note = Description of Artificial Sequence: Synthetic coding sequence
  source 1..489: mol_type = other DNA
atggcccccacatgcgtgtttttggccagtaaggtggaggagtttggagtggtgtccaacacccgcttaatagccgccgcaacgtctgttctgaagacgaggtttagttacgcatttccgaaggaattcccctacaggatgaatcatatcctggaatgtgagttttatctgctggagctgatggattgttgcctgatcgtgtatcatccgtacagacccctcctccaatatgttcaggacatgggacaggaagacatgctcctgcccctcgcttggagaatcgtaaacgacacgtatagaaccgacctgtgcctactctaccccccattcatgattgcactcgcctgtctccacgtggcctgtgtagtgcagcagaaagatgcaagacaatggttcgctgagctctctgtggatatggagaagattctcgaaattataagagttattctaaagctctacgagcagtggaaaaattttgacgagcgctag

SEQ ID NO: 14703 - DNA, 2283 bp, synthetic construct
  misc_feature 1..2283: note = Description of Artificial Sequence: Synthetic coding sequence
  source 1..2283: mol_type = other DNA
atgtctaccgtggaggaggattccgacaccgttactgtggagacagtgaattccgttaccttaacccaggataccgaaggaaatcttatcctccactgtccgcagaatgaagcagatgagatcgactcagaggatagcatcgaacctccccacaagcgtctctgcctctcatctgaggacgatcagagtattgacgactctaccccctgcatttcggtggtggcgttgccccttagcgagaacgatcagagcttcgaggttaccatgacagcgacaactgaagtggcggacgatgaagtaacggaggggactgtgacccagatccagatcttgcaaaacgaacaactggacgagataagtcccttgggcaatgaggaagtcagtgcggtaagccaggcctggttcaccacaaaggaagataaggatagtttgactaataaggggcataagtggaaacagggcatgtggtcgaaagaggagattgacattctgatgaataatatcgaaagatacctaaaagccaggggaattaaggacgctaccgagataatcttcgaaatgtctaaggacgagcggaaagatttctatcgaacaatcgcctggggcctgaacaggcctctgttcgctgtgtatcgccgcgtgctccgcatgtacgacgatcgaaatcacgtgggcaaatacacaccagaggagattgaaaaactgaaggagttacgtatcaaacacgggaatgactgggccaccataggagcagccctgggcaggagcgctagcagtgtgaaagacagatgtagacttatgaaagatacgtgtaatactgggaagtggacagaggaagaggaaaagaggctcgcagaggtggtgcacgagctgacatctactgaacctggagatatcgtcactcaaggggtgagttgggccgcagtggccgagcgggtgggtactagaagtgagaagcagtgtcgcagcaagtggcttaattatttgaactggaaacagagtggtgggacggaatggaccaaggaagatgagattaatcttatacttcggatcgctgagctcgatgtggctgatgaaaacgatatcaactgggatttactggccgaaggttggagttctgtgcggagccctcagtggttgagatcaaaatggtggaccattaagcgccagatcgcaaaccataaggatgtatccttcccagttctcattaaagggcttaagcagctgcatgagaaccaaaagaacaatccaactcttctggaaaataagtccggctcaggggttccgaactccaacactaactcgtcggttcagcacgtgcagatcagagtcgcccgactcgaagacaataccgccatatccagctctcctatggcggctctgcagattcctgtccagataactcacgtgagtagcgcagacagcccagctacggtggactccgagaccatcacactgaattcggggacactgcagacatttgaaatattacctagtttccaccttcagcctactgggacccctggaacttatctgctgcagacgagttcttctcaaggtctcccactgacgctgacggcatcccccactgtgacgcttacagctgcggctccagcatccccagaacagatcatagttcacgcccttagccctgaacaccttctgaacacgtctgacaacgtgactgttcaatgtcataccccaagggtgattattcagacagtggcaaccgaggacataacatcctctatctctcaggccgaattaaccgtcgatagcgacattcagtccagcgattttcccgagccacccgatgcactggaagcagacacatttcctgatgagattcaccaccccaaaatgacagtcgaaccaagcttcaacgacgcccatgtgagtaaattttctgaccagaacagcaccgagctgatgaacagtgtgatggtccgcaccgaggaggaaattagcgacacagacctgaagcaggaagagtctccgagcgacctcgcttccgcctatgtgacagagggtctggagagtcccacgatcgaggaacaggtggaccaaactattgacgatgagactattctcatcgttccctcacctcacggctttatacaggcatccgatgtgatcgacaccgagagcgtcctgcccctcactacccttacggaccccatcctgcaacaccaccaggaggagagcaacatcatcggaagttccctcggttcacctgtaagtgaggactctaaggatgtggaggacctggtgaactgccactag

SEQ ID NO: 14704 - DNA, 858 bp, synthetic construct
  misc_feature 1..858: note = Description of Artificial Sequence: Synthetic coding sequence
  source 1..858: mol_type = other DNA
atgtccacggtggaagaagatagcgatactgttacagtcgaaactgttaacagtgtcaccctaacacaggatacagaaggtaacctaattcttcattgccctcaaaatgaagctgatgagatcgattccgaagattccatcgaacccccacacaagaggctgtgtctatctagtgaagatgatcaatcaattgacgatagtacaccttgcatcagtgtggtagccctcccactttctgaaaacgaccaatcattcgaggttaccatgactgccaccacggaggtggcagatgatgaagtgacagaaggtaccgtgacccaaatacagattcttcagaatgagcagctggacgagattagccccctgggtaacgaggaagtcagtgctgtgagtcaagcttggtttaccacgaaggaggataaggactctctgacaaacaagggccataaatggaagcaggggatgtggtctaaagaggaaatcgacatcctcatgaacaatatcgaacgatacctgaaggctcgcggtatcaaagacgctacagaaataatttttgagatgagcaaggatgaacgcaaagatttctatcggacaatagcctggggcctgaatagacctctgttcgcagtgtaccgacgcgtactgcgtatgtatgatgatcgcaatcacgtcggaaagtatacacccgaagagattgagaaactgaaagagaaaaaggccattgccgcttgtttctttttcacccatcggcagctgtggactccaaagaaaggccatacctttaagctgtggctttccaagtactgctgcccacagttgccaaatcaatccaacgggaagaaaaagaacgaagagtag

SEQ ID NO: 14705 - DNA, 2283 bp, synthetic construct
  misc_feature 1..2283: note = Description of Artificial Sequence: Synthetic coding sequence
  source 1..2283: mol_type = other DNA
atgagcaccgtggaggaagattctgatacagtcaccgtagagacagtgaactctgtcactctcacacaggatacagagggtaatttaatcctgcactgccctcagaacgaggccgatgaaatcgattcggaggactctatagagccgcctcataaacgcctgtgcctcagttcggaggacgatcagtccattgacgatagcacaccttgtatcagcgtcgttgccctgccgctgtcggagaacgatcagtctttcgaggtgaccatgactgcaacaacagaggtcgcagatgacgaggttacagaagggacagtcactcaaattcaaattctccagaatgagcagctggacgagatctcccccctggggaatgaagaagtgagcgcagtatcacaggcttggttcacaactaaagaagataaggactcccttacgaacaaaggtcacaagtggaagcaggggatgtggtccaaagaagagatcgacatcctgatgaacaatatcgagaggtaccttaaggctcgagggatcaaggacgccactgagataatctttgaaatgtcaaaagacgagcgaaaagatttttataggacgatcgcatggggactgaacaggccactcttcgccgtctatcgccgagttttaaggatgtacgacgacaggaatcacgtcggcaaatacacacccgaggagatagagaaactgaaggaactgcgaattaagcacggcaatgattgggccaccatcggcgccgctttaggtaggtctgcttccagcgttaaagataggtgtagactcatgaaggacacctgcaatacgggaaagtggaccgaagaagaggagaagcgacttgctgaggttgtgcacgagcttactagtacggaacctggtgacattgtcacacagggagttagttgggccgctgtggcagagcgggtaggcacccgtagcgagaagcagtgtcggtcaaagtggctgaattacctgaactggaagcaatcgggcggtactgagtggaccaaggaagacgagatcaatttgatcctgcgcattgccgagctcgacgtggcagacgagaacgacattaactgggaccttctcgctgaaggatggagcagtgtccgtagtccccagtggcttagaagtaagtggtggactatcaaacgacagatcgctaatcacaaggacgtctcttttcccgtgctgattaaaggcctcaaacagctgcatgaaaaccagaagaacaacccaacactgctggagaacaagagcggaagcggcgtgcctaatagtaacaccaatagctcagtgcaacatgtgcaaatccgagtggctaggctagaggataacactgccatcagtagttcccctatggccgcccttcagatcccagtgcaaataactcacgtctcaagcgctgactcccctgctactgtcgactctgaaacgatcactttaaacagtgggacgctgcagaccttcgagatcctcccatcatttcatttgcaacctaccggtactcccgggacatacctgctgcagacttcctcgtcacagggcctcccccttacgctgaccgcatcccccaccgtgacgctgaccgcagccgccccggcaagccccgagcagatcatcgtgcatgcactgtcccctgaacatttactgaacacaagcgataacgttacagtgcagtgccacaccccaagggtcatcatccagacggtcgcgacggaagatataacctctagcattagtcaggccgagctgaccgtggattctgatatccaatctagcgattttcccgagccccccgatgccctagaagccgacacctttcccgatgaaatccaccatccaaagatgactgtggaacccagctttaacgatgctcatgtttcgaaatttagtgaccagaattccaccgagctcatgaattcggtaatggtacggaccgaagaggagattagcgacacagacctaaagcaggaggaatcaccatctgacctggcctctgcatacgtgactgagggcctcgaaagccccactatagaggagcaggtggaccagacaatcgacgacgaaacaattctcatcgtgccctccccacacggtttcattcaggcctcagatgttattgatacagaatcagtgctgcccctcaccactctgacagaccctattctccaacaccatcaggaggagtccaacatcatagggagctccctggggagccccgtatcggaggattctaaagatgtagaggatctggtgaactgccattag

SEQ ID NO: 14706 - DNA, 735 bp, synthetic construct
  misc_feature 1..735: note = Description of Artificial Sequence: Synthetic coding sequence
  source 1..735: mol_type = other DNA
atgtccacggtggaagaagatagtgatactgtcacggtagaaaccgttaattcagtgactttgactcaggataccgagggcaatctcatccttcattgcccgcaaaatgtttctgaaaacgaccaatccttcgaagtcaccatgactgccacaacagaggtcgccgatgatgaagtcacggagggcacagtcacccagatccagattttgcagaacgaacagcttgacgagattagtcctctgggcaatgaggaagtgtcggcagtctcccaggcgtggttcactaccaaagaggacaaagacagtttaaccaataaagggcataagtggaagcaggggatgtggtcaaaagaggagatcgacattctgatgaacaacatcgagcgctacctcaaagccaggggaatcaaggatgccacagagatcatctttgagatgtcaaaggacgaacgcaaagatttttaccggaccattgcctggggactgaataggcccctgttcgcagtctacaggagagtactgaggatgtacgatgaccgcaatcatgttggaaagtatactccagaggaaatagaaaagttaaaggaaaagaaggctatcgcggcctgtttcttctttactcatagacagctgtggacgcctaaaaagggtcacacatttaagctgtggctgagcaagtattgttgtccccagctcccaaaccagagtaatggaaagaagaaaaacgaagagtag

SEQ ID NO: 14707 - DNA, 819 bp, synthetic construct
  misc_feature 1..819: note = Description of Artificial Sequence: Synthetic coding sequence
  source 1..819: mol_type = other DNA
atgtcaaccgttgaggaggatagtgacacagtcaccgtagagacagtgaactccgtgacgctgactcaagatacagaggggaatctaatcttgcattgtccgcagaacgaggctgacgaaattgactccgaagactctattgaacccccacacaaaagattgtgtctatcctctgaggatgaccagagcatcgatgacagcactccgtgcatttccgtggtggctctgcccctgagtgaaaatgatcagtccttcgaggtgacaatgaccgcgaccacagaagtggccgacgatgaggtcacagagggtacagtgacgcagatacagatcctgcaaaacgagcagctggatgagatcagccccctgggaaacgaggaagtgtccgccgtgtcccaggcgtggttcacaacaaaagaggacaaggattccctcacaaacaagggtcataagtggaaacagggtatgtggagtaaagaagaaattgatatactcatgaacaacatcgagcgatatttaaaagcgagaggaataaaggacgccacagagataatcttcgagatgtcaaaagacgaaaggaaggatttctatcgcacaattgcttggggcttaaataggccactgttcgccgtatatcgtagagttttgcggatgtatgacgaccgcaaccacgtgggtaagtacactcctgaggagattgagaagctcaaagagcagctgtggacgcccaagaaaggccacacgtttaaactctggctgtccaagtattgttgtccccagctccctaatcaatctaatggcaaaaagaagaatgaagaatag

SEQ ID NO: 14708 - DNA, 2073 bp, synthetic construct
  misc_feature 1..2073: note = Description of Artificial Sequence: Synthetic coding sequence
  source 1..2073: mol_type = other DNA
atgtcaacagtcgaggaagactccgacaccgtcaccgtggaaaccgtcaattctgtcaccctgactcaggatacagaaggtaacttgatcctgcattgtccccagaacgaggcagatgagatagattcggaagattcgatcgaacctcctcacaaaagactctgcctctcttctgaagacgaccagagtatcgatgatagtacgccttgcatttccgtagtcgctctccccctctccgaaaacgatcaatccttcgaagtgaccatgacagccacaaccgaggtcgccgacgatgaagtgaccgagggtaccgtgacacagatccaaatcctgcagaatgagcaactcgatgagattagccctctcgggaacgaagaggtttcagcagtgagccaggcttggttcactaccaaggaagataaggacagtctcactaataagggacataagtggaagcagggcatgtggtctaaggaagaaatagacatcctgatgaacaacatcgaacgatacctgaaagccagggggataaaagacgctacggagataattttcgagatgagtaaagacgagcggaaagatttttacagaacaattgcctgggggctcaaccgccctctgttcgccgtatatagaagagtcctgcggatgtatgatgacaggaaccacgtaggcaaatacaccccagaagagatcgaaaaacttaaggagctgcgaataaaacacggaaacgactgggctactataggggccgcgctaggaagatcggcatcctcagtgaaggacaggtgccggttaatgaaggatacatgtaatacaggaaagtggaccgaagaagaagagaagcgtctggcggaggtggttcacgagctgaccagcacggaacctggagatattgtgacacagggagtttcatgggctgccgttgcggagagagtcgggacaaggagcgaaaaacaatgccggagcaagtggttaaattatctgaattggaaacagtccggcggcaccgagtggacaaaggaggatgagataaatctcatactgcgtatcgcagaactggacgtggcagatgaaaacgacattaattgggacctattggccgaggggtggtcctcagtccggagcccccagtggctgcgctcaaaatggtggacgataaaaagacagatagccaatcacaaagatgtgagtttccctgcttcagccgatagtccagcgaccgtcgatagtgaaactattacactgaacagcggaacattgcagacattcgaaatccttccctcttttcacctgcagcccactggtacacctggcacctacctgcttcagacgtctagtagccagggcttgcccctgacgctaacagcctcccccacagtcactctgaccgccgcggctcctgcctcgcccgaacaaatcatagtgcatgctctgagtcctgaacacctattgaatacctctgacaacgttactgtccagtgccataccccaagggtgattatacagaccgtcgccacagaagatattactagcagcatatcacaggccgaactgactgtcgatagcgatatccagtcctccgacttcccagagccccctgacgccttggaagcagatacgttccccgacgagatccaccaccctaaaatgacggttgagcccagtttcaacgatgcccatgtctcgaaattcagtgaccagaattccacagagcttatgaattcagtgatggttcggacagaagaagagatatccgacaccgacttgaaacaggaggaaagtccaagtgacctggcttcagcctatgttacagaaggcctggaatcccccactatcgaggaacaagtagaccaaaccattgatgatgagactatactgatagtgccatccccacacggcttcattcaagcctcagatgtgatagacacggaaagcgttctgcctttgacgacattgactgaccctatcctccagcaccaccaggaagagtccaatatcatcggtagctcattgggtagtccagttagtgaggattcgaaggacgtcgaggacttggtgaactgtcattag

SEQ ID NO: 14709 - DNA, 1485 bp, synthetic construct
  misc_feature 1..1485: note = Description of Artificial Sequence: Synthetic coding sequence
  source 1..1485: mol_type = other DNA
atgaaagacacatgtaataccggcaagtggacagaagaagaagaaaagcgattggcagaagtcgtgcacgagctcacatccactgagccaggcgatatcgtaacccagggagtctcttgggctgccgttgcagaacgagtgggcacacggagcgagaaacaatgtcggagcaagtggctcaactacctgaattggaagcagtcgggcggtactgagtggacaaaagaagacgagatcaacctgatcttgcggatcgcagaactcgacgtggccgatgagaatgacattaattgggaccttctggccgaagggtggtccagcgtaagatcgccacaatggttgcggtccaagtggtggacaatcaagaggcaaattgcaaatcacaaggatgtctcatttcctgtgcttatcaagggcttgaaacagcttcacgagaaccaaaaaaataatcccacccttcttgagaacaaatccggttccggcgttcccaatagtaacaccaattcttcagttcagcacgtgcaaattagagtcgccagactggaagataatacagccataagtagcagtcctatggcggctctacagatccctgttcaaatcactcacgtctctagtgctgactcgccagccacggtcgactctgagacaatcaccttaaacagcggcacactccagacctttgaaattttgccatcctttcatctgcagcctaccggcacaccgggcacttacctcctccagacctctagctcccagggcttaccgctaactctgacagctagcccaacagtcaccctgaccgctgctgcacctgccagcccagaacagattattgtacatgctctcagccctgaacacctgctcaacacctccgataacgtgaccgtgcagtgtcacacaccgcgggtgattatccaaacggtcgccacagaggatatcacttcaagtatcagtcaggccgagctgaccgtcgactcagatatccaatccagcgacttccccgagccacccgatgctcttgaggcagatacctttcctgacgagatccaccacccgaaaatgactgtggaacctagctttaacgacgctcacgtgagtaaattttcagatcagaacagcaccgagctcatgaatagcgtgatggttcgcacagaggaagaaatctcagataccgacttgaaacaggaagaatcgccctccgaccttgcaagtgcctatgttaccgaggggcttgagtcccccacaatcgaggagcaggtcgaccaaactattgatgatgagacgatcctgatcgtgccgtctccccacggcttcatccaagcttccgacgtcatcgacacagagtccgttttgcccctgaccacactaaccgatcctatccttcagcatcatcaagaagagagcaatataattgggagttcgcttgggtcccctgtgtccgaggatagcaaggatgtagaagatctcgtgaactgtcattag

SEQ ID NO: 14710 - DNA, 111 bp, synthetic construct
  misc_feature 1..111: note = Description of Artificial Sequence: Synthetic coding sequence
  source 1..111: mol_type = other DNA
atgtcaacagttgaggaggacagcgacacggtgacagtggagaccgtaaacagtgtgactctgacccaggacactgagggcaacttaatactgcattgtcctcagaattag

SEQ ID NO: 14711 - DNA, 33 bp, synthetic construct
  misc_feature 1..33: note = Description of Artificial Sequence: Synthetic coding sequence
  source 1..33: mol_type = other DNA
atgaccgccactacggaagtggccgatgactag

SEQ ID NO: 14712 - DNA, 111 bp, synthetic construct
  misc_feature 1..111: note = Description of Artificial Sequence: Synthetic coding sequence
  source 1..111: mol_type = other DNA
atgtctaccgtggaagaggactctgacaccgtcaccgttgaaacagttaattctgtgacactgactcaggatacagaagggaacctcatactccattgtccccagaattag

SEQ ID NO: 14713 - DNA, 735 bp, synthetic construct
  misc_feature 1..735: note = Description of Artificial Sequence: Synthetic coding sequence
  source 1..735: mol_type = other DNA
atgtctactgtggaggaggactcggataccgtgacagtcgaaaccgtaaactcagtcacactaacacaggacacggaagggaacctgattttgcattgcccacaaaatgtgtcggagaacgaccaaagcttcgaagtcaccatgaccgccacaacggaagtcgccgacgacgaggtgacagaagggactgtaacacagatccagattctgcagaatgagcagttagacgaaatatccccgctgggcaacgaggaggtgagcgccgtgagccaggcctggttcactacaaaggaggacaaagactcactaacaaataagggccacaagtggaagcagggtatgtggtcgaaagaggagattgatattttaatgaacaatattgagcggtatctgaaggccaggggcattaaagacgccacagaaatcattttcgagatgagtaaagatgaacggaaggatttttacaggacaattgcctggggacttaataggcctctgtttgcagtatacaggcgagtccttcggatgtatgatgaccgcaaccacgtaggtaagtacactcctgaagagatcgaaaagcttaaagaaaaaaaagcaatcgctgcctgctttttctttacccacagacagctatggactcctaagaagggccacacattcaagctgtggttatctaagtactgctgcccacaattgcctaaccaatctaacggtaaaaaaaaaaacgaggagtag

SEQ ID NO: 14714 - DNA, 582 bp, synthetic construct
  misc_feature 1..582: note = Description of Artificial Sequence: Synthetic coding sequence
  source 1..582: mol_type = other DNA
atgagcactgttgaagaggattctgatacggtgaccgtcgagaccgtcaatagtgtaacactgactcaggacactgaaggaaacctgatcctccattgcccccagaacgaagccgatgagatcgattcagaggactcaatcgagcccccgcacaagagactctgtctgagcagcgaggacgaccagagcatcgacgacagcaccccttgcatttccgtggttgcactgcccctttcggaaaatgaccagtctttcgaggtgacgatgaccgcaacaacagaggtggccgacgacgaggtaaccgagggcactgttactcagatccagatcctccagaacgagcaattagacgagatcagtccgctaggcaatgaggaagtatcagccgtgtcacaggcttggtttactacgaaggaggataaggatagcttgacaaataaaggacacaaatggaagcagggaatgtggtccaaggaagagattgacattcttatgaacaacatcgagagataccttaaagccaggggaataaaagacgccaccgagatcatcttcgaaatgtccaaggacgaacgcaagtag

SEQ ID NO: 14715 - DNA, 84 bp, synthetic construct
  misc_feature 1..84: note = Description of Artificial Sequence: Synthetic coding sequence
  source 1..84: mol_type = other DNA
atgtccacagtggaagaggatagcgatactgtgaccgttgaaaccgtgaacagtgtgactttgacccaagatactgaaggatag

SEQ ID NO: 14716 - DNA, 444 bp, synthetic construct
  misc_feature 1..444: note = Description of Artificial Sequence: Synthetic coding sequence
  source 1..444: mol_type = other DNA
atgagcacggtagaggaggactccgacaccgtgacggtagagacagtgaactctgtgacgctaacccaggatacagaagggaatctgatacttcattgccctcagaacgaagctgacgaaatcgatagcgaggactctatcgagccccctcataaacggttgtgtctgagcagcgaagacgaccagtccattgatgacagcaccccatgcatcagcgtggttgcactgccactctctgaaaacgatcagtcattcgaggtgacgatgacagctacaactgaggttgcagatgacgaagtgacggagggaacagtcacacagattcaaatccttcagaatgaacaactggatgaaatctcccctctgggcaacgaagaagtgagtgctgtgagccaggcttggttcactactaaggaggataaggatagcctgacgaataagtag

SEQ ID NO: 14717 - DNA, 222 bp, synthetic construct
  misc_feature 1..222: note = Description of Artificial Sequence: Synthetic coding sequence
  source 1..222: mol_type = other DNA
atgagcaccgtggaggaagattccgatacagtgacagtcgaaactgtgaattccgtcacgctcacgcaagacaccgaaggcaacttgattctgcattgccctcagaatgaggctgacgagattgactccgaagattctattgagcctccccacaagaggctttgcctgtcctccgaggacgatcagagcatcgatgactccaccccgtgtatttccgtctag

SEQ ID NO: 14718 - DNA, 2019 bp, synthetic construct
  misc_feature 1..2019: note = Description of Artificial Sequence: Synthetic coding sequence
  source 1..2019: mol_type = other DNA
atgaccgcaacgacagaagtagccgatgatgaggtcacggagggaaccgtgacgcaaatccagattctccagaatgagcagctggacgagatctctcccctcggaaatgaggaggttagcgccgtcagccaggcctggtttaccacaaaggaagataaagatagtttgaccaataaaggtcataagtggaagcaggggatgtggagcaaagaggaaatcgacatcctcatgaataatattgagaggtacttaaaagcgcgcgggatcaaggatgccacggagattatttttgagatgtcaaaagacgaaagaaaggacttttacagaactatcgcttggggattaaatagacccctgtttgcagtgtatagaagagtcctaaggatgtacgatgataggaatcacgtaggaaagtacaccccagaggagattgaaaaactgaaagagctacgtatcaaacatggtaatgactgggcaacaattggcgccgctttgggaagatccgcctcttccgtcaaggacaggtgccgattgatgaaagacacctgcaatactggaaagtggaccgaagaagaagagaagcggctcgccgaggtggttcacgagctgacaagcaccgagccgggtgatattgttacacagggtgtctcctgggccgccgtggcggaacgcgttggcactcgcagtgaaaagcagtgccgtagcaagtggctgaactatctcaactggaaacagtctggcggcacagaatggacgaaggaagatgaaataaatttgattttaaggatcgccgaactcgacgtggccgatgaaaatgacatcaactgggaccttctagctgagggttggtcatcagtgcgttccccgcagtggctgcggagcaaatggtggactatcaagcgacagattgctaatcacaaggatgtgtcctttcctgttttaattaagggactgaaacagctccacgagaaccagaagaacaatcctacattgctcgaaaacaagtctgggtccggcgttcccaatagcaataccaattcttcggtgcagcatgtgcagattcgcgtggcacgattggaagataacactgctatttcctcctctcctatggcagctctgcagatccccgttcagattacgcacgtgtcttccgccgacagccccgccacagttgatagtgagacaatcactcttaactccggaactctgcaaacgtttgagatcctgccatcattccaccttcagcctactggcactcctggtacctacttactccagacgtcgtctagccaaggtctcccgctcaccctgactgcatcgccaacggtgacactaaccgccgcagcgccagcgtccccagaacagatcattgtccatgccctatctccggaacatctacttaatacctccgacaatgtgacagtacagtgccatacacctcgcgttattatacagactgttgccaccgaggatatcacgagctccattagccaagcagagctgacagttgactccgacatccaatccagcgactttccagagccgccagacgcgctagaagctgacactttccccgacgagattcaccatcccaagatgaccgtcgagccatcatttaacgatgcgcacgtgagcaaattctcagatcaaaactctactgagctaatgaattccgtgatggtacgcacggaagaagaaatatctgacacagatctcaagcaggaggaaagtccctcagatctggcgtccgcctatgtcactgagggcctggagtcacctacaattgaggagcaggtggaccagacgatcgatgacgagacgatactgattgtgcctagtcctcatggatttatccaggctagcgatgttattgatactgaaagcgtgctgccgctcactaccctgaccgatccgatcctgcagcaccaccaggaggagtctaacataatcgggagctccctgggctcgcctgtctcagaggattctaaggatgtcgaagatctggtgaactgtcattag

SEQ ID NO: 14719 - DNA, 291 bp, synthetic construct
  misc_feature 1..291: note = Description of Artificial Sequence: Synthetic coding sequence
  source 1..291: mol_type = other DNA
atgtcgacagtcgaggaagactctgacactgtgaccgtcgagaccgtcaacagtgttacactcacccaggacaccgagggcaatctgatactacattgtcctcaaaacgaagccgatgagatcgattctgaggactcgatcgaacccccgcacaagcgcttgtgcctttctagtgaagacgaccagagcatcgacgattcaacaccttgcatttccgttgtggccttgcccctcagcgaaaacgaccagagcttcgaggtcactatgactgctaccactgaggtcgcctag

SEQ ID NO: 14720 - DNA, 171 bp, synthetic construct
  misc_feature 1..171: note = Description of Artificial Sequence: Synthetic coding sequence
  source 1..171: mol_type = other DNA
atgtcaacagtcgaggaggatagtgataccgtcacagtcgaaaccgttaactcggtgaccttgactcaggatacggagggaaatcttatactgcactgtcctcagaatgaggctgacgaaatcgactcagaggacagtatcgaacctcctcacaagcggctctgcttatag

SEQ ID NO: 14721 - DNA, 858 bp, synthetic construct
  misc_feature 1..858: note = Description of Artificial Sequence: Synthetic coding sequence
  source 1..858: mol_type = other DNA
atgtcaacagtggaggaggattctgataccgtgacagtcgagaccgtgaattctgtaactttgacacaggatactgaaggtaacctcatcctgcactgccctcagaacgaggctgacgagatcgattccgaagattcgatcgagcctccacataaacgcttgtgcctatcatcagaggacgaccagagcattgatgacagcacaccctgtatttccgtggttgctctgccactgtccgagaacgaccagagctttgaagtgacaatgaccgccactacagaagtcgccgatgatgaggttacggagggcacagtgacacagatccagatattgcagaatgagcaactggacgagattagtcccctgggaaatgaggaagtctctgccgtgtcacaggcctggtttacgacaaaggaggacaaagatagtctgaccaacaaagggcacaagtggaagcagggaatgtggagcaaggaagaaatcgatattttgatgaataatatcgaacggtacttaaaggctcgcggcatcaaggacgccacagaaatcatcttcgagatgtccaaagatgaacggaaagatttttatcgtacgatcgcctgggggctcaaccgtccgctctttgcagtatacaggcgcgtgctgcgaatgtacgatgaccggaaccacgtaggaaaatatactcctgaagaaatagagaagctaaaggagaaaaaagctattgcagcttgttttttcttcacacatcgacaactgtggaccccaaagaagggccacactttcaaactgtggctgtctaaatattgctgtcctcagctccccaaccagtctaacggcaaaaagaaaaatgaagaatag

SEQ ID NO: 14722 - DNA, 150 bp, synthetic construct
  misc_feature 1..150: note = Description of Artificial Sequence: Synthetic coding sequence
  source 1..150: mol_type = other DNA
atgtctacagtcgaagaggactctgacaccgttaccgtggaaaccgtcaatagcgtcacccttacgcaagataccgaagggaacctgattctgcactgcccacagaatgaggcggacgaaattgacagcgaagactcaattgagccctag

SEQ ID NO: 14723 - DNA, 330 bp, synthetic construct
  misc_feature 1..330: note = Description of Artificial Sequence: Synthetic coding sequence
  source 1..330: mol_type = other DNA
atgtctaccgttgaagaggacagcgacaccgtgactgtggagacggtgaatagcgtgacgttgacacaggatacagagggcaatctcattcttcactgccctcagaacgaagcagacgaaatcgactccgaagactcaatagaacctccccacaaacgactctgcctaagtagcgaagacgaccagagcattgatgacagcaccccatgtatcagcgtggttgcgctgccattaagcgagaatgaccaatccttcgaggtgacaatgacagctacaactgaggtcgccgacgacgaggtgaccgagggtacggtgactcaaattcagtag

SEQ ID NO: 14724 - DNA, 276 bp, synthetic construct
  misc_feature 1..276: note = Description of Artificial Sequence: Synthetic coding sequence
  source 1..276: mol_type = other DNA
atgagcacagtcgaagaagactcggatactgtgacagtagagactgtcaatagcgtgactctgacccaggataccgaggggaatctcatcctgcactgccctcagaatgaggccgacgagatcgactcagaggattcaattgagcccccacataaacgactctgtctatcatcagaagatgaccagagcatcgacgattccacaccttgcattagcgtcgtcgccctgcccctgtccgaaaacgaccaatccttcgaagttaccatgacagcctag

SEQ ID NO: 14725 - DNA, 1647 bp, synthetic construct
  misc_feature 1..1647: note = Description of Artificial Sequence: Synthetic coding sequence
  source 1..1647: mol_type = other DNA
atggcaacgggagcgaacgccaccccactcgattttccatccaaaaaaaggaagagaagcaggtggaatcaggacaccatggaacagaagactgttattcctgggatgcccacagtgattccgccaggattaacgcgcgagcaggagagagcatacattgtacaactgcagattgaagatctgacaaggaaactcagaactggagatctgggaatcccacccaatcccgaggatcggagcccctctcctgagcctatctacaattccgagggtaagaggcttaacacaagagagttcaggacacgcaagaagctggaggaagagcgccataatcttattactgagatggtggcactaaatccagattttaagcctcccgccgattataagccccctgcaacaagggtgagtgacaaagttatgatcccgcaggatgagtatcctgaaattaatttcgttggactcctgatcgggccaaggggtaatacgttaaaaaacattgaaaaagaatgcaacgccaagataatgatccggggtaaggggagcgttaaggaaggtaaggttggtagaaaagacggccagatgctgcccggcgaggatgagcccttacacgccttggtgactgctaatactatggagaacgtgaagaaggcggtggaacagatcagaaatatcttgaagcagggcatcgaaacacccgaagatcagaatgaccttcggaagatgcagcttagagagctcgctcgtctgaacgggactctgcgtgaggacgataacaggatccttcgcccctggcagagttctgagactaggagtattacaaacacaaccgtgtgcacgaaatgtggcggggccggacacattgccagcgactgcaaatttcagagacccggcgacccgcagagcgctcaggacaaagctaggatggacaaagagtatttgtcccttatggcagaactgggggaggccccagttcctgccagcgtcggctcaaccagtggcccagcgactaccccactggcaagtgcgccgcgtcccgcggctcccgcgaacaacccgccacctccctctctgatgtctaccacacaaagtagaccaccctggatgaacagtggaccatctgagagtcgtccctatcacggcatgcacggaggcgggccggggggacctggaggggggcctcactctttccctcaccccctgccatccttgacaggagggcatggtggccacccgatgcagcataatccaaacggtccaccaccgccatggatgcagccacctccaccaccaatgaatcagggcccacacccccccggtcatcatggtcctcccccaatggatcagtatctaggttcaaccccagtcggttccggcgtttacaggctgcatcagggcaagggaatgatgccacccccccctatgggtatgatgcccccaccacccccccccccaagcggccaaccccctcccccaccatctggaccgctaccaccttggcaacagcagcagcagcagcccccgccacccccgcccccttcgtcctccatggcctcctccacaccacttccttggcagcaaaggagcctacccgccgccgccatggctcgggctatgcgggtccgtacgttccgggctcattggtag

SEQ ID NO: 14726 - DNA, 486 bp, synthetic construct
  misc_feature 1..486: note = Description of Artificial Sequence: Synthetic coding sequence
  source 1..486: mol_type = other DNA
atggaacaccagctgctgtgctgcgaagtcgagactattcgccgagcttatcccgacgctaatctgctgaacgatagggtgctgagggctatgctgaaagccgaagagacttgcgctcccagtgtgtcttactttaaatgtgtccagacattcgtggccctgtgtgccactgatgtgaagtttattagtaaccctcccagcatggtagccgcaggttccgtggttgccgcggtgcaaggcctgaacctgcgctcacccaataatttcctttcatactaccgcctgacccgatttctttctagggttattaaatgtgatcctgactgtctaagagcctgccaggagcagatcgaggcccttcttgaaagtagcctccggcaagcccagcagaatatggaccccaaggcagctgaagaagaggaggaagaagaagaggaagtcgacttggcctgcaccccaacggacgtccgggacgtcgacatttag

SEQ ID NO: 14727 - DNA, 870 bp, synthetic construct
  misc_feature 1..870: note = Description of Artificial Sequence: Synthetic coding sequence
  source 1..870: mol_type = other DNA
atggaattactatgccacgaggtggaccccgtgagaagagccgtcagggataggaatctcctacgcgatgatcgggtgctgcagaacctgttaaccattgaggagaggtacttgccccagtgcagttacttcaagtgcgtacagaaggacattcagccatatatgcgacggatggtggcaacctggatgctcgaggtgtgtgaggagcagaaatgtgaagaggaggtgtttcctctcgccatgaattacctggaccgttttctggcaggtgtgcccaccccaaagtcccatctccagctgctaggcgctgtgtgtatgttcctggcctcaaaacttaaagagacaagccccttgaccgctgagaagctgtgtatctacaccgacaatagtatcaagccacaagagttattggagtgggagttagtggtgctgggcaaattaaagtggaatttagctgcagtgaccccacacgatttcatcgagcacattctcaggaagctcccccagcagagggaaaaattgtcattaattcggaaacatgcacagacttttatcgctctgtgcgccaccgactttaaatttgcaatgtatcccccctctatgatcgcaacagggtcagtgggcgctgcaatctgtgggctacagcaggatgaggaagtgtcctcactaacttgcgatgcactgaccgagctgctcgccaaaataactaatacagacgtggactgcttaaaggcatgccaggaacaaatagaggctgtgctgctgaacagtctgcaacagtacaggcaggatcaacgcgacgggtctaaaagcgaggatgagctggaccaggcttccacacccactgatgtgcgcgacatcgacctttag

SEQ ID NO: 14728 - DNA, 729 bp, synthetic construct
  misc_feature 1..729: note = Description of Artificial Sequence: Synthetic coding sequence
  source 1..729: mol_type = other DNA
atgaagtccgccgggggcagcgggcgtagccttttaccttcgcccagggtttgtgaagaacagcgttgtgaagaggaggtctttcctcttgcaatgaattatctggacaggtatctgtcctgcgttccgaccaggaaagctcagctgcagctgcttggtgcagtttgcatgctgctagccagcaagctgagagaaaccaccccccttacgattgagaagctgtgtatctacacagaccacgcagtgtctcccaggcagctgcgcgactgggaagttctcgtgttgggaaaactgaaatgggacctcgcagccgtgatcgctcacgactttctggcatttatactgcacagactgagtcttccgcgggaccgccaagctctagtgaagaagcatgctcaaactttcctggcactgtgcgcaacagactacacattcgccatgtatccccctagcatgattgccaccggttccattggggccgccgttcaagggctgggcgcctgctctatgagtggtgacgagctgacggagctgctggccggcatcaccgggactgaggtggactgcctcagggcatgtcaggagcagatagaagcagctcttcgagagagccttcgcgaggcaagccagacatccagtagccccgcaccaaaggcaccgagaggctcctcgagtcagggaccttcccagacatctacacccactgacgtcactgcaatccacctatag

SEQ ID NO: 14729 - DNA, 636 bp, synthetic construct
  misc_feature 1..636: note = Description of Artificial Sequence: Synthetic coding sequence
  source 1..636: mol_type = other DNA
atgaattatttggatcggtacctttcttgtgtgcctacacggaaggctcagctgcagctgttaggcgcggtgtgcatgctccttgcctcgaaactacgagaaaccaccccattgaccatagaaaagttgtgcatttacacggaccatgcagtcagtcccaggcaacttcgggactgggaggtgttagtacttggcaagctgaaatgggacctcgccgccgtaattgcgcatgacttcctggcgttcattctccaccggttatcactgccacgcgatcgtcaggccctggtcaagaaacatgcccagacctttttggcattgtgtgccaccgattacacttttgccatgtatcccccatcaatgatcgccacggggtccatcggcgccgctgttcagggattgggcgcctgttccatgagcggggatgaactcactgaactgctcgccggcatcactggaaccgaggttgactgcctccgcgcctgccaagaacagattgaggccgcactgagagagagccttcgagaggctagccaaacatccagttctcctgcaccaaaggctccccgcggaagcagtagtcagggtccttcacaaacctccacccccacagatgtgactgctattcacctctag

SEQ ID NO: 14730 - DNA, 879 bp, synthetic construct
  misc_feature 1..879: note = Description of Artificial Sequence: Synthetic coding sequence
  source 1..879: mol_type = other DNA
atggagctgctttgttgtgaaggcacccggcacgccccccgggcggggcccgacccccgactgctgggcgaccagcgtgtgctgcaaagtctccttcgtttagaagagagatacgtccctcgggcctcatatttccagtgtgttcagagggagatcaagcctcatatgagaaaaatgctagcctactggatgcttgaggtctgtgaagagcagagatgcgaagaagaggtgttcccactagcgatgaattacctcgaccggtacttaagttgcgtccccactcgcaaggcccaacttcaattgctcggagccgtctgtatgttacttgcctcaaagctccgggaaaccaccccactcactatcgagaagctgtgtatatacacggatcacgcggtgtcaccccgccaactccgcgactgggaggtccttgtccttggcaagttaaaatgggatttagccgccgtgattgctcatgattttctggcgtttattctccatagactgtctttaccgagggataggcaggccttagtcaagaagcacgcccagacctttctagccttgtgcgcaactgattacacattcgcgatgtacccaccttccatgatcgcaaccggctctatcggggcagcagttcagggcttgggcgcctgtagtatgtctggagacgaactgacagagctgctagctggcattacgggaacagaagtggattgtctccgggcatgtcaggaacagatagaggcggccctccgcgaaagcctccgtgaggcatcacagactagttcaagcccagcccccaaggcccccagggggagctctagccaagggcccagtcagactagcactcctaccgacgttaccgctatccacctgtag

SEQ ID NO: 14731 - DNA, 663 bp, synthetic construct
  misc_feature 1..663: note = Description of Artificial Sequence: Synthetic coding sequence
  source 1..663: mol_type = other DNA
atggaacttttgtgctgtgagggcactcggcacgccccccgcgccggacccgatccaagactccttggagaccagcgcgtgctgcaatccctgttgcgattagaagaacgttatgtcccccgggcctcttacttccagtgtgtacagagggagataaagccgcatatgaggaaaatgctggcctattggatgctggaagactgggaagtgctcgtgctgggcaagctcaagtgggacctggccgcggtcattgcacatgactttctggctttcattctgcatcgattgtcacttcccagagacagacaggccctcgtgaaaaaacacgcacaaacgttcttggcgctctgcgccaccgactatactttcgctatgtacccgccttctatgattgccacagggtccataggggccgcagttcaaggcctgggggcttgcagcatgtcaggcgacgaactgacagaactgctggctggaattactggtactgaagtcgactgtctgagggcttgtcaggaacagatagaggctgcactgcgggaaagtctccgggaggcctcccaaacatcgagctctccagcccccaaggcaccccgtgggagcagttctcagggtcccagccaaactagcacgcctaccgatgtgacggcaatccacttatag

SEQ ID NO: 14732 - DNA, 291 bp, synthetic construct
  misc_feature 1..291: note = Description of Artificial Sequence: Synthetic coding sequence
  source 1..291: mol_type = other DNA
atgtacccgccttccatgattgccacaggctctataggcgcggccgtccagggactgggagcctgcagcatgagcggcgacgaattaactgaactgctcgctggcattacgggaactgaagtagactgtttacgtgcatgtcaggaacagattgaagccgcattgcgggaatccctcagagaggcaagtcagacgtcttcatcaccagcccctaaggcacctcgcggttcctctagtcagggaccatcacagacatccactccaaccgatgtcaccgctatccatctgtag

SEQ ID NO: 14733 - DNA, 132 bp, synthetic construct
  misc_feature 1..132: note = Description of Artificial Sequence: Synthetic coding sequence
  source 1..132: mol_type = other DNA
atgaactacctggaccgttacctgtcgtgcgtgccaacaaggaaagcacagctgcagctgctcggtgcggtctgcatgttgctggctagcaaattacgcgagactactcccctgaccattgagaaactttag

SEQ ID NO: 14734 - DNA, 357 bp, synthetic construct
  misc_feature 1..357: note = Description of Artificial Sequence: Synthetic coding sequence
  source 1..357: mol_type = other DNA
atgaattacctggataggtacctgagctgtgtacctaccaggaaggctcaactgcagcttctaggagccgtctgtatgctcctggcttcaaaattgagggaaacaacaccactgacgattgagaaactttgtatatacacagatcacgccgtgtcgccccggcagctgagggactgggaagtgctcgttctcggcaagctcaaatgggacttagccgcagtgatcgcccacgactttcttgctttcattctgcaccgcctcagcctcccccgcgatagacaagctcttgtgaaaaagcacgcccagacttttctggcactgtgtgcgacggattacacattcgccatgtatccgtag

SEQ ID NO: 14735 - DNA, 33 bp, synthetic construct
  misc_feature 1..33: note = Description of Artificial Sequence: Synthetic coding sequence
  source 1..33: mol_type = other DNA
atgtaccctcccagtatgatcgctacaggatag

SEQ ID NO: 14736 - DNA, 636 bp, synthetic construct
  misc_feature 1..636: note = Description of Artificial Sequence: Synthetic coding sequence
  source 1..636: mol_type = other DNA
atgaactacttagaccgatatctctcatgcgtacccactaggaaagcccagctacaactgctgggagccgtatgtatgcttcttgcctccaagctgcgggaaaccaccccacttaccatagaaaagctgtgcatctacaccgaccatgctgtgtctccgcgtcaacttagggattgggaagtgctcgtgcttggtaaattaaaatgggacctcgccgcggtgatcgcccatgattttctggctttcatactccaccggctgtcactcccaagggataggcaggcactggtgaagaagcatgcccagacatttttggccctgtgtgcaaccgattacacattcgcaatgtacccacctagcatgatagctactggatctatcggcgccgcggttcagggtctaggggcctgttctatgtctggcgacgaactgactgaacttctggctggcattacaggaaccgaggtcgactgcctccgggcgtgtcaagagcaaattgaagcagcacttcgagagtcccttcgcgaggccagccagacgtcttcctccccggcaccaaaggctcctagagggtctagcagtcaggggccctcacagacctctacccccaccgatgttaccgccattcacctgtag

SEQ ID NO: 14737 - DNA, 1233 bp, synthetic construct
  misc_feature 1..1233: note = Description of Artificial Sequence: Synthetic coding sequence
  source 1..1233: mol_type = other DNA
atgccaagggaacggcgcgaaagagacgctaaggaacgagatactatgaaggaagatggaggtgccgagttctctgctaggtcacgcaaaaggaaagctaatgtgaccgtgttcctgcaggatccagatgaagagatggctaagattgatcggacagcccgcgaccagtgtgggagccagccttgggacaacaatgccgtctgtgctgacccttgctctcttatacccactccagacaaagaggacgatgaccgtgtgtaccccaactctacatgtaagccccggatcatcgcaccttcccgggggtccccgctgccagtcctgtcctgggcgaacagagaagaggtatggaaaatcatgttgaacaaggaaaaaacctacttacgtgatcaacacttcctggaacagcaccctttgctgcagcccaagatgagagccattctgctcgattggctgatggaagtgtgcgaagtgtacaaactgcatagggaaaccttctacttggctcaggatttttttgaccgctatatggcgacccaagagaacgtggtaaagaccctcctgcaactgatcgggattagcagcttgtttattgctgctaaacttgaagagatctatcctccgaaactacaccagttcgcctatgtgacggacggtgcctgctcaggcgatgaaattttgaccatggagcttatgattatgaaagccctgaaatggagactttcccccttaactatcgttagttggttgaacgtctacatgcaggtggcttatctcaatgacctacacgaagtcctgcttccacaatatcctcagcaaatctttatccagattgcggaactcctggatctgtgtgttctggacgtagactgtctcgagtttccctacggtatactggccgcctctgccctgtaccatttctcaagcagtgagcttatgcagaaggtgtccggttatcaatggtgtgacatcgaaaactgcgtgaaatggatggttccttttgccatggtgatccgcgaaacgggctccagcaagctgaaacattttaggggcgtggcagatgaggacgcgcacaacatccaaacccatcgggactcccttgacttgttggataaggctagagccaaaaaggccatgcttagtgaacagaaccgggctagtcctctgccctccggtctgcttacacccccacagagcggaaaaaagcaaagctcgggaccggaaatggcttag

SEQ ID NO: 14738 - DNA, 1104 bp, synthetic construct
  misc_feature 1..1104: note = Description of Artificial Sequence: Synthetic coding sequence
  source 1..1104: mol_type = other DNA
atgcctcgcgagcgtagggaacgagacgccaaggaacgcgacactatgaaggaggacggaggagccgagttctctgcccggtccaggaagcggaaggccaatgttactgtgttcctccaagaccctgatgaagagatggcaaagatagacagaacagcgcgagaccagtgcggctctcaaccctgggacaataatgcagtgtgtgcagatccttgctcactgatacctacccctgacaaggaggatgatgaccgcgtttatccgaattctacatgcaagcctcgaatcattgcaccttcaaggggctctcctctgcctgtactgagctgggccaatagggaggaagtgtggaagatcatgctgaataaggaaaagacatacctccgggaccagcatttcctcgagcagcaccccctgttacagcccaagatgcgagctatcttactggattggttaatggaggtaagcctttccctcccagagatttaccccccgaaactccaccagttcgcctatgtgacagatggagcgtgtagtggcgatgagattttgaccatggaactaatgattatgaaggccctgaagtggcgtttgtccccgctgaccatcgtgagctggttaaatgtgtatatgcaggtggcctacctcaacgacctgcatgaggtgcttcttcctcagtacccacagcagatattcatacaaattgccgagctcctcgacttgtgcgtgttggatgttgattgtcttgagttcccatatggtatcctggctgcgagcgccctgtatcatttttctagtagtgagctgatgcaaaaagtttccggctatcagtggtgcgacatcgaaaactgtgtgaaatggatggtgccctttgccatggtgataagggagacaggatcttccaagttaaagcacttcaggggagttgccgatgaggatgctcacaacattcagactcaccgagactccctggacctactcgacaaagcacgggcaaagaaggcaatgctctcagagcaaaatcgcgcatcacccctgcctagcggcctgttaacgccgccccagtctggaaaaaagcaaagctccggccctgagatggcatag

SEQ ID NO: 14739 - DNA, 1188 bp, synthetic construct
  misc_feature 1..1188: note = Description of Artificial Sequence: Synthetic coding sequence
  source 1..1188: mol_type = other DNA
atgaaggaagacggaggggccgaattttcagctcgaagcagaaaacggaaagctaacgtgacagtatttttgcaggaccctgacgaggagatggcaaaaattgaccggactgctcgggaccagtgtggatcccaaccctgggataataacgccgtgtgtgccgacccctgctcactaatcccaaccccagacaaggaagatgatgaccgggtatatccaaattccacctgtaaaccccgaataatcgcgccatcaagaggttcccctctgccagtgctgagttgggctaatcgagaggaggtttggaagattatgttaaataaagagaagacatacttgcgtgatcagcattttcttgagcagcaccccctgctgcagcctaagatgcgcgcaatactgctagattggcttatggaagtatgcgaggtgtacaagcttcacagagagactttctacttagcccaggacttttttgataggtacatggcgacccaggagaacgtggtgaaaactctcctccaactgatagggatctccagtcttttcattgctgctaagctcgaggagatttacccccctaaattgcatcaatttgcatacgtgaccgacggcgcctgctcaggggacgagatcctcactatggagcttatgattatgaaagcgttgaaatggaggctgtcccctctgaccatcgtgagctggttaaatgtttatatgcaagttgcgtatctgaacgatctgcacgaggttcttttgcctcaatacccgcagcaaatcttcattcagattgcggagctgctagacctgtgcgtgctggacgtcgattgtctggagttcccgtatggaatcttggctgcctcggccttgtaccactttagctcctctgaacttatgcagaaagtttcaggataccagtggtgtgacatcgagaattgcgtgaagtggatggtgccttttgccatggtaatcagggagaccggctcaagcaagctgaagcacttccgcggggtcgccgacgaggacgcgcataacatccaaactcatagagacagcctggatcttctcgataaagcccgtgcaaaaaaggccatgctgtccgagcaaaatagggcctctccgcttccctccggcctgttaacaccaccccaatcgggtaagaagcagtctagcggacccgagatggcatag

SEQ ID NO: 14740 - DNA, 2106 bp, synthetic construct
  misc_feature 1..2106: note = Description of Artificial Sequence: Synthetic coding sequence
  source 1..2106: mol_type = other DNA
aggacctcctggccgtctgaactggccgcagaaaaaggcaacttcgaagctgccgttaagcttgggatcgcatatctgtacaacgaagggctctcggtgtccgacgaagcccgggccgaggtgaacggattgaaggcaagcagatttttctcgctggccgaacgactcaacgtgggggccgccccctttatctggctgtttatccgtcccccgtggagcgtgagcggatcctgttgcaaagccgtagtgcatgagtcgctgcgggccgaatgccagctacagagaacccacaaggcttccatcctccactgcctcggtagggttctctccttgttcgaggacgaggaaaaacagcaacaggcacacgatttattcgaagaggccgctcaccaggggtgtttgacttcgtcttacttgctttgggaatccgataggcggacggacgtgagcgaccccggaagatgcctgcacagtttccgcaagctgcgggactacgctgccaaagggtgctgggaggcccaactttcgttggcaaaagcctgcgccaacgccaatcagctgggcttggaagtgcgggccagctcagaaatcgtgtgccaactctttcaggcttcgcaggccgtgagcaagcagcaggtgtttagcgtgcagaaaggactgaacgacacaatgcgatatattttgatagattggctggtcgaagtggctaccatgaaggattttaccagcctgtgtttgcatctcaccgttgagtgcgtcgatcgctatctgaggcgtcgtctggtgccccgctaccgcctccagctccttggaatcgcctgtatggtaatctgtacacgttttatctctaaagagatcctgactatccgggaagctgtttggttaacggacaacacctataagtatgaggatttagtgcgcatgatgggagagatcgtgagcgccctggaaggcaaaatacgtgtaccaacagtggtggactataaagaggtactgctgactctcgtccctgtagaacttaggactcagcacctctgttcgttcctctgtgagttgtctttactccatactagcctatccgcgtatgctcccgcccgacttgctgccgccgccctgctgctcgcccgcctgactcacggacagacacagccttggaccactcaattgtgggacttgaccggcttctcctacgaggacctcattccgtgtgtgttgtcactgcacaagaagtgttttcatgacgacgctcctaaagattacagacaggtgagtctgaccgcagtgaaacaaaggtttgaggataagagatacggagaaatttctcaggaggaagttctgagctattcacagctttgcgcagctttgggcgttacgcaggactcacccgacccccctacctttttatctacgggggagatacatgcattcctgtcatccccctcagggaggcgaactaagcgcaaaagggagaattctctgcaggaagatcgggggtctttcgtgacaacacccactgctgagttatcttctcaggaggaaacactgctcggcagttttttagattggtccctcgactgttgctcaggatacgaaggagaccaggagtctgaaggcgagaaagaaggcgacgtcaccgccccatcgggcatcctcgacgtgacagtggtctacctgaatcctgaacaacactgttgtcaagagagctctgacgaagaggcctgccccgaggacaaggggccgcaggatccacaggcattggccttggatacgcaaattccagccacacccgggcccaagcccctggtgaggacctcaagggaacctggtaaggatgttacaaccagcggctatagttcagtgtctactgcatcaccgacttccagcgtggacggcggactcggcgctttgccacagcccacttcagttttatctttggactcagatagtcacactcagccttgtcatcaccaggcaagaaagtcatgcttacagtgtaggccaccatcgccaccggaatcttcagtgccccaacaacaggtaaaaagaataaacctctgcatccattctgaagaggaagatatgaacctggggcttgtgagactctag

SEQ ID NO: 14741 - DNA, 2361 bp, synthetic construct
  misc_feature 1..2361: note = Description of Artificial Sequence: Synthetic coding sequence
  source 1..2361: mol_type = other DNA
atgggctccggtggggttgtgcactgccgctgcgcaaaatgcttttgctatccgacgaaaagacgcatccggcggcgcccacggaatttaactatcctgtcactccctgaggacgtgttattccatattctgaagtggctttccgtcgaggacatcctggcggtacgggcggtccactctcagctgaaagatctcgtagataatcatgcatccgtgtgggcctgcgcttcctttcaagagctgtggccatcgccaggaaacctcaagttgtttgagagggccgccgagaaaggcaattttgaagccgcggtaaaactggggatcgcctacctttacaacgaaggactatccgtaagcgacgaagctagggccgaggtgaatggcctcaaggcttcacgattttttagtctggctgagcgcctgaacgtgggggcagccccttttatctggctgtttattcggcctccctggagcgtatcaggatcctgctgcaaagccgtcgtgcatgaatccctgcgcgccgaatgtcagctgcagcgaacgcacaaggcttcaattttacattgcttgggacgggttttgagcttgttcgaggacgaggagaagcagcagcaggcacacgacctgtttgaggaggctgcccaccagggatgtctgaccagttcttatttgttgtgggaatctgacagacggacagatgtctctgaccccgggaggtgtctgcattcatttcggaagctcagagactacgctgctaagggttgctgggaggctcagctcagcctcgctaaagcctgcgccaacgccaaccagctcggtcttgaagtgcgagcctctagcgaaatcgtgtgtcagctttttcaagcctctcaggcggtgtcaaaacagcaggtgttttcagtgcagaaggggctcaacgacactatgagatacatactgattgactggctcgtcgaggtcgctactatgaaggattttactagtctttgtctgcacctgaccgtggaatgcgtggatcgctacctgagaagaaggctggttccccgctacagactgcagctgctgggcatcgcctgcatggtgatctgcacaagattcattagcaaggagatactgacaatcagggaagcagtgtggctcactgataatacatacaagtatgaagacctggtccggatgatgggcgaaatcgtctctgcactggaaggaaaaataagggttccgaccgtggtcgattacaaggaggttctcctgactctagttcctgttgagctgcgcacccagcatctttgctctttcctgtgcgagcttagcctgcttcacaccagcctcagtgcctatgcaccagcccgcctggccgccgcagctctgctcttagcgagactaacacacggccagacccagccatggacaactcagctttgggatctgacggggttcagctacgaagaccttattccatgcgttctgtccctgcacaagaagtgctttcacgacgatgcacccaaggactatagacaggtgtctctcactgccgtgaaacaacgctttgaagacaagaggtacggtgagatcagtcaggaggaggttctgagttattcgcagctgtgtgcagcactgggcgttacacaagactctcccgacccgccaaccttcctctctacaggggaaatccatgcattcttaagctcacccagcggcagaaggacgaaacgcaagcgggaaaattctctgcaggaggatagagggtccttcgtgacaactccaaccgccgagttgtctagccaggaggaaacccttttaggttcttttctcgactggtccctggattgctgcagtgggtacgagggggatcaggagtccgaaggcgagaaggagggcgatgtgaccgctccttctggaatcttagatgttaccgtggtttatctcaatccagaacaacattgttgtcaagaatcttctgacgaggaagcttgtcccgaagacaagggtccacaggatccccaggccctggccctagatacgcagatccccgccacgccaggcccgaaaccgctggtccgcacatcccgcgaaccgggtaaagacgtcacgacgtcaggatacagttcggtgtccaccgcaagtcccacttcctcagtggatggcggcttaggcgcactgcctcaacccactagcgtgctcagcctggactcagattcccacacccagccgtgtcaccaccaggctcggaagtcttgtctgcagtgtaggccacccagcccgcccgagtcaagtgtgccacagcagcaggtgaaacgaatcaacctttgtattcattccgaggaggaggacatgaacctcggcttagtgcgcctctag

SEQ ID NO: 14742 - DNA, 888 bp, synthetic construct
  misc_feature 1..888: note = Description of Artificial Sequence: Synthetic coding sequence
  source 1..888: mol_type = other DNA
atgatcgaagtgctcacaaccactgactcacagaaactgctccatcaattgaatgccctgcttgagcaggagtctagatgccagccaaaggtttgtggcctccgccttattgagagcgcccacgataacggactccggatgactgctaggttgagagactttgaggtcaaagacctgttatcgcttacacaattcttcggctttgatactgagacattttccctggccgtgaatttgttagatcgcttcctgtcaaaaatgaaggtacagcctaaacatttaggctgtgtgggtctctcctgtttttacctcgctgttaaatcaatcgaagaggagcgcaacgttcctctggccactgaccttatccggattagtcagtacaggtttaccgtctccgacctcatgcgaatggaaaaaattgtgctggagaaggtgtgctggaaagtcaaagcaacaaccgcattccaattcctccagctctattactccttgctacaggagaacctgccgttggaaaggcggaattctataaattttgaaagactggaagctcagctgaaggcctgtcactgcaggattatcttctcgaaggcaaaaccttctgtgctggctttgtccattatcgcgctcgaaatccaggctcagaaatgcgtcgagctcaccgagggcattgagtgcctgcagaaacatagcaagatcaatgggcgggacctaactttctggcaggaactggttagcaagtgtctgacggaatactcgagcaacaagtgctccaaacccaatgttcagaagttaaagtggatcgtgtccggccggaccgctcgacaactgaagcactcttattatcggatcacgcatctgcccacaatcccggagatggtgccgtag

SEQ ID NO: 14743 - DNA, 888 bp, synthetic construct
  misc_feature 1..888: note = Description of Artificial Sequence: Synthetic coding sequence
  source 1..888: mol_type = other DNA
atgatcgaagtactgaccacaacagactctcagaagctgctgcaccaactgaatgcacttctagagcaggagagccgttgtcagcccaaagtgtgtggcctacgactcattgaatctgcacacgataacggccttcggatgaccgcccgtctgcgggatttcgaggtgaaggatttactgtctctgactcagttctttggtttcgacactgagacctttagtttggcggttaatttgctggatagatttctgtctaaaatgaaagtgcagcccaaacacttaggatgcgtcgggctctcttgtttttatctcgcagtgaaatcaattgaggaggaaagaaacgtgccgctagcaacagacttgattaggatcagccagtatcggtttacagtgtccgacctaatgcggatggaaaagattgttctggagaaggtgtgttggaaggttaaggccacaacagcgtttcagtttctgcagctttactattcactactccaggaaaatctccctctggagagaagaaatagcatcaactttgagaggctagaagcccagctaaaagcgtgtcactgccggatcatattttcgaaggcaaagccaagcgtgttggcgctctccattatcgcattggagatacaagctcaaaaatgtgtcgaactgaccgaagggattgagtgcctgcaaaagcacagcaagataaacggcagagatctcaccttctggcaggagcttgtctcaaaatgcctgacagagtatagttccaataaatgttcaaaaccaaatgttcagaagctcaaatggatcgtgtctggtaggaccgcacgtcagctcaagcacagttattacaggatcacccatctacccacaattccagaaatggtcccctag

SEQ ID NO: 14744 - DNA, 411 bp, synthetic construct
  misc_feature 1..411: note = Description of Artificial Sequence: Synthetic coding sequence
  source 1..411: mol_type = other DNA
atgatcgaggtcctgacaacgacagattcccagaagttgctgcatcaactgaatgcgctgctagaacaggaatctcgctgccagcccaaagtttgcggcctgcgcttgatcgagtcagcgcacgataatggcctgcgcatgactgccaggctccgggacttcgaagtcaaggacttactgtcactgacccagttctttgggttcgatacggagacattttccctcgctgtgaacctgttagacagatttttgagtaaaatgaaggtgcagccaaagcacttgggttgcgtcgggctgagctgtttctatcttgcagtgaagagtattgaggaggaacggaatgtaccgctggcaaccgacctgatcagaatcagccaatataggttcaccgtttctgacctgatgaggtag

SEQ ID NO: 14745 - DNA, 411 bp, synthetic construct
  misc_feature 1..411: note = Description of Artificial Sequence: Synthetic coding sequence
  source 1..411: mol_type = other DNA
atgattgaggtcctgactaccactgattcccagaagctcctccatcaattgaacgctttattggaacaggaatctaggtgccagcctaaagtttgtgggctgcggctgattgaatccgcacacgacaatggacttagaatgacggctaggctgagagatttcgaggtaaaagacctgctgagcctcacccaattttttggtttcgacactgagacattctcactggcagtgaacctgctcgatcgattcttgtccaagatgaaggtgcagcccaaacatttgggctgtgtgggcctctcctgcttctatctagcagtgaagtccatcgaagaggagcggaacgtacctcttgctactgacctcattagaatctcccagtatcggtttaccgtctccgatttgatgcggtag

SEQ ID NO: 14746 - DNA, 504 bp, synthetic construct
  misc_feature 1..504: note = Description of Artificial Sequence: Synthetic coding sequence
  source 1..504: mol_type = other DNA
atgtccgcgaaagatcttatgcgtatggagaagattgtcctagagaaagtttgttggaaggtcaaagccacaacggcattccagttcctgcagttgtactattctttgctgcaggaaaatctgccgctagagcgacggaacagcatcaatttcgagaggctcgaggctcagctcaaagcctgccactgtcggatcatcttctcgaaggcaaaaccgtcggttctagcgctgagtatcattgccctggaaatccaggcccagaagtgcgtagagcttactgagggcattgagtgtttgcagaaacacagcaaaatcaatggtcgagacctcacgttttggcaggagttagtgtctaagtgcctgactgaatacagctcaaacaagtgctctaagccaaacgtgcagaaattgaaatggatagtatcaggaaggacagcacgtcaattgaagcactcttactatagaataactcacctgcctactatccctgagatggtcccctag

SEQ ID NO: 14747 - DNA, 348 bp, synthetic construct
  misc_feature 1..348: note = Description of Artificial Sequence: Synthetic coding sequence
  source 1..348: mol_type = other DNA
atgatcgaagtgttgaccacgaccgattcacagaagctgctccaccaactgaatgcgctgctggagcaggaatctcgctgtcagcccaaggtgtgtgggctgcgactgatcgagtcagcacatgataacggcttacggatgactgcgcggcttcgagatttcgaagtgaaggatctcctgtcactgacacagtttttcgggtttgataccgaaacattcagccttgccgtcaatctccttgatcgctttctgtccaagatgaaggtgcagcccaaacatttggggtgtgtgggcctgtcatgcttttatttagccgtcaagtccatagaagaagaacgcaacgtttag

SEQ ID NO: 14748 - DNA, 486 bp, synthetic construct
  misc_feature 1..486: note = Description of Artificial Sequence: Synthetic coding sequence
  source 1..486: mol_type = other DNA
atgcggatggagaagatcgtgctggaaaaggtgtgttggaaagtgaaggcaaccacagcttttcagtttcttcagctctactattccctgctccaagagaatctgcctctggaacggcgaaattcaataaatttcgagcggctggaagcacaactgaaggcttgtcactgtagaatcatattcagtaaggctaaaccttccgtcctcgctctgtcgatcatcgcgctggagatacaggcccaaaaatgtgtcgagctgacagaagggattgagtgtcttcagaagcacagtaaaattaacgggcgcgatctcacattctggcaagagctggtgagcaagtgtttaacggagtacagcagcaataagtgcagcaagccaaacgtgcaaaaactgaagtggatagtctcaggcagaactgctcggcagcttaaacactcctattacaggataacccacctgccaaccattccagagatggtcccttag

SEQ ID NO: 14749 - DNA, 486 bp, synthetic construct
  misc_feature 1..486: note = Description of Artificial Sequence: Synthetic coding sequence
  source 1..486: mol_type = other DNA
atgagaatggagaaaatagttcttgaaaaggtttgctggaaggtcaaagctactactgccttccagttccttcaactctattactcactgctccaggagaacctgcctcttgagcgaagaaacagcatcaacttcgagagattggaagcacaactgaaagcgtgtcactgtcggatcatttttagtaaagcaaaaccctccgtactggcactgtcaattatagctcttgaaatccaggcgcagaaatgtgtggaactgaccgaggggattgagtgtctgcagaaacactcgaagatcaacggaagagatttaaccttttggcaggaactggtgagcaagtgtctcacagagtattcctctaacaagtgctctaagcctaacgtccagaagctgaagtggatagtcagcgggaggaccgcacgccagctgaagcacagctattaccgcatcactcacttaccgaccatacctgagatggtgccgtag

SEQ ID NO: 14750 - DNA, 105 bp, synthetic construct
  misc_feature 1..105: note = Description of Artificial Sequence: Synthetic coding sequence
  source 1..105: mol_type = other DNA
atgatcgaggtgctgaccaccacggacagtcaaaagctgctacaccagcttaacgcgttactggagcaggagtctcggtgccaacccaaacgccactttttgtag

SEQ ID NO: 14751 - DNA, 1035 bp, synthetic construct
  misc_feature 1..1035: note = Description of Artificial Sequence: Synthetic coding sequence
  source 1..1035: mol_type = other DNA
atgaaggacttaggggccgagcatttggctgggcatgaaggagtccaactcttgggtctcctcaacgtctacctagagcaggaggagcgttttcagcctagggagaaggggcttagcctgatcgaagcaactcccgaaaacgacaacacactgtgtcctgggctgcgcaacgctaaagtcgaggatctacgttctttggctaacttcttcggcagctgcacagagacatttgtgctggccgtcaatattctcgacaggtttcttgccctgatgaaggtgaaaccaaagcacctcagttgtatcggcgtgtgttcattcctgctcgctgctcgcatagtcgaggaagactgcaatattccctccacacatgacgtcatccggatcagtcagtgcaaatgtaccgcatcagacatcaaaagaatggaaaagatcatatcagagaagcttcattacgaactcgaggctaccactgccttgaacttcctgcatctttaccataccatcatcctgtgccatacttctgagcggaaagagattttgtccctggacaagttagaagcccagcttaaggcgtgtaactgtaggcttatattttccaaggccaagccgtctgtcctcgccctgtgtctacttaatttggaagtggagaccctcaagtcagtggagctgctggagattctgcttttagtgaaaaaacattctaaaattaacgataccgaattcttctactggcgcgagttggtctctaaatgccttgcagagtattcgagtccggagtgctgcaagcccgatcttaaaaaactggtttggatcgttagccggcgcacagcacaaaatcttcataattcctactactctgtgcccgagctacccaccatccccgaaggcgggtgctttgacgagtccgagtcggaggactcttgcgaagatatgagctgtggagaagaatcactctccagcagcccaccctctgaccaggaatgtactttcttcttcaactttaaggtagcgcagaccctatgttttccttcatag

SEQ ID NO: 14752 - DNA, 1035 bp, synthetic construct
  misc_feature 1..1035: note = Description of Artificial Sequence: Synthetic coding sequence
  source 1..1035: mol_type = other DNA
atgaaggacctcggagctgaacacctcgccggccatgaaggcgtgcagctcctgggcttgcttaacgtttatcttgaacaggaagagcgatttcagccccgagaaaaaggactgtccctgattgaagccactcctgagaatgataataccctatgcccgggactgaggaacgcgaaggtggaggatctgcgttcgctcgcgaacttctttgggagctgtacagagacttttgtgctggctgtgaacattctcgacaggtttttggcactgatgaaagtgaaaccaaagcacctcagttgcattggagtctgttccttcctcttggctgctcggattgtggaagaagactgtaatataccctctacgcatgacgtgatacgcatttcccagtgtaagtgcactgcctcggacatcaaacgcatggagaagattatcagcgaaaaacttcactacgagctcgaggctacaactgccctgaactttcttcacctttaccacacaattattttatgccacacctccgaacgtaaggagatcctgagcctagacaagctcgaagctcagctgaaagcctgtaactgcagactgatcttcagcaaagctaagccgtctgtcttggcactgtgcctcctgaatctcgaggtcgaaaccctgaaatccgtggagttgctggagattcttctcctcgttaaaaagcactctaaaattaatgatacagaattcttttactggcgcgagctggtttccaagtgcctggcagaatactcatcccccgagtgctgcaagccagatctgaagaagcttgtgtggattgtaagcaggaggactgcccaaaacctccacaatagttactattcggtccccgagctccccactatacccgagggtgggtgttttgacgaaagcgagagcagcgtggcccaggcaggcgtgcagtggcctgacctttcgtcttttcagcccccgccaacccggttcaaaaggttcagctgcctctccctgaggagcagctgggactatagctcttggacatag

SEQ ID NO: 14753 - DNA, 1035 bp, synthetic construct
  misc_feature 1..1035: note = Description of Artificial Sequence: Synthetic coding sequence
  source 1..1035: mol_type = other DNA
atgaaggatctgggcgccgagcatctggccggacatgaaggcgtccagctgttgggtttactcaatgtttatcttgaacaggaagaaagattccagccacgggagaagggactctctttgattgaggcaacccccgagaacgacaacacattatgcccgggccttagaaatgccaaggttgaggatctgaggtcccttgccaactttttcggcagttgcactgagacattcgtcctggcagtgaatattctggatagattcctagccctcatgaaggtgaagccaaagcacctgagctgcattggtgtctgtagtttcctgcttgccgcacggattgttgaggaagattgtaatatccccagcacacacgacgtgatcaggatttcccagtgtaaatgcactgctagcgatatcaaaagaatggagaaaatcatctctgagaagctgcattacgagttggaagccacgactgccctcaatttcttacacttatatcatactatcatcctgtgccacacatcagagcgaaaagagatcctctctctggacaaactcgaagcgcagctgaaggcttgcaattgcaggctgatcttttccaaggctaaaccttcagtactggctctttgcctgctcaacctggaagttgaaaccctcaaatctgttgaactgctagagatccttttgctcgtgaagaaacatagcaaaatcaatgacaccgaattcttctattggagggaactggtctcaaaatgtctggctgaatacagtagcccagaatgttgcaagcctgaccttaaaaaactggtctggatcgtaagtaggaggaccgcccagaatctgcacaactcctactacagtgtgcctgaactgcccacgatccctgagggtggctgtttcgatgaatctgaatccgaggactcctgtgaggacatgagttgtggggaagagtccctatctagcagccccccttctgaccaggagtgtacattctttttcaactttaaggtggctcagaccctgtgcttcccatcatag

SEQ ID NO: 14754 - DNA, 1035 bp, synthetic construct
  misc_feature 1..1035: note = Description of Artificial Sequence: Synthetic coding sequence
  source 1..1035: mol_type = other DNA
atgaaagacctcggcgccgagcacttggcaggacacgaaggggtgcagctgctgggactccttaacgtgtacctggagcaggaggagcggtttcaaccacgagaaaaggggctcagtctcatcgaagctacccccgaaaacgacaacacactttgccctgggcttcgtaacgccaaggtggaggacctgcgatcactcgctaatttcttcgggtcctgcacagaaaccttcgtgctcgccgtcaacatcctggataggtttctggccctaatgaaggtgaagcctaagcatctgtcgtgtattggagtttgtagcttcctcttggccgcaaggatcgtcgaggaagattgtaacattccgtctactcatgatgtgatccgtatatcacagtgtaaatgtactgcaagtgatatcaagcggatggaaaaaatcatttctgaaaagctgcactacgaacttgaagctacgaccgccctcaacttcctccacctttaccatacaatcattctgtgtcatacaagtgagagaaaagagatattgtcattagataagctagaagcacagctgaaagcttgtaactgccgcctcatctttagcaaagccaaaccttctgtgctcgccctgtgtctactgaacctggaagtggagaccttgaaaagtgtcgaactgcttgagatccttctgctggttaaaaaacactccaaaatcaatgacaccgagtttttctactggagagagttggtctccaagtgtctggcagagtatagctccccggagtgttgcaaacctgatttgaagaagctggtttggattgtgtcacggcgcactgcccaaaacttgcacaactcctattactcagtcccggagctccctaccatccccgaggggggctgctttgatgaaagcgagtcagaggacagctgcgaagacatgtcctgcggtgaggagtcactgtcatcctcacctccgtcagatcaggaatgcacgttctttttcaacttcaaggtggcccagaccctgtgtttcccatcttag

SEQ ID NO: 14755 - DNA, 483 bp, synthetic construct
  misc_feature 1..483: note = Description of Artificial Sequence: Synthetic coding sequence
  source 1..483: mol_type = other DNA
atgaaggacctaggcgcagaacacctggccggacacgagggggttcaactgctggggctattgaacgtctatcttgaacaggaggaacgattccagccgcgagaaaaaggcctgtcgctaatcgaggccacacccgagaacgataacacactctgcccaggcttgaggaatgccaaggtcgaggacttgcgttctctcgccaatttcttcggttcctgtaccgaaaccttcgtattggccgtaaacatccttgacaggttcctagcactgatgaaggttaagcctaagcacctgtcgtgtataggggtctgctcgtttctgctggccgccaggattgtggaggaagattgtaacatccctagcacccacgacgtaattaggatatcccagtgcaagtgtacagcttcagatatcaagcgaatggagaaaatcatctcggagaagttgcattatgagcttgaagccactacagccttgaattag

SEQ ID NO: 14756 - DNA, 972 bp, synthetic construct
  misc_feature 1..972: note = Description of Artificial Sequence: Synthetic coding sequence
  source 1..972: mol_type = other DNA
atgtaccataacagctctcaaaaaaggcattggacatttagctccgaagagcagttggcacgcctgagggctgatgccaaccggaaattcaggtgcaaggcagtggcgaacgggaaggttctgcctaacgatcctgtctttttagagcctcacgaggaaatgaccctctgcaaatactatgagaagcgtttactggaattttgttcagtcttcaaacccgcaatgcctcgttccgtggtgggtacagcctgcatgtacttcaagagattttacctgaacaactccgtgatggaatatcatccaagaatcattatgctgacctgcgcctttctggcatgcaaagtggatgagttcaacgtgtcctccccccaatttgtaggcaatctgcgagagagcccccttgggcaggaaaaagccctcgaacagatactcgaatacgaactgcttctcattcagcaactgaatttccatctaatcgtgcataatccttatcgccctttcgaggggttcctgattgacctgaagaccagataccccatactggagaatccggagattctgcggaaaactgctgacgattttttgaacagaatcgctctaaccgacgcatacttgctctatactccaagccaaatcgctctgacagcaattctgagcagtgcatcccgcgccgggataactatggaaagctacctgtctgaatcactcatgctcaaggaaaaccgaacctgcctgtcacaattactggatatcatgaaatctatgcggaaccttgttaaaaaatatgaaccaccgaggagtgaggaagtggcggtgctcaaacaaaaattagaaaggtgccactctgccgagctcgctctgaacgtcatcactaagaagaggaaaggatacgaagatgatgattacgtatcgaaaaagtcaaagcatgaggaggaagaatggacagacgacgatctggtggagtccctctag

SEQ ID NO: 14757 - DNA, 768 bp, synthetic construct
  misc_feature 1..768: note = Description of Artificial Sequence: Synthetic coding sequence
  source 1..768: mol_type = other DNA
atgccaagatcagtcgtaggcacggcttgcatgtactttaagagattctatctaaataatagcgtcatggaataccaccctagaattattatgttgacctgtgctttcctggcttgcaaagtcgacgaattcaatgtgagttccccccaattcgtgggcaacctgagagagagcccactgggccaagagaaggctctggagcaaatcctcgagtacgagctgttgttgattcagcaactgaacttccacctcattgtgcacaatccctaccgcccattcgagggctttctcatcgacctcaagactcggtatcccatccttgaaaatccagagatcctacggaagactgcggacgattttctcaatcgcattgcactcacggatgcttatttactatacacaccatcacaaattgctctgacagccattctgtcttccgcttctagggcgggcataacgatggagtcatacttaagcgaaagccttatgctaaaagaaaatcgaacatgcctgtctcaactcttggatatcatgaaaagtatgaggaatttggtgaagaagtatgaacctccaagatctgaggaggttgccgttctgaagcaaaagctggagagatgtcactctgctgaactggccctcaacgtgatcacaaaaaaacgtaagggatatgaggatgatgattacgtcagtaaaaaatcaaagcacgaggaggtttgcttcactcctaaaatgaactcgaagctgtttttgctttatatccttgtttag

SEQ ID NO: 14758 - DNA, 750 bp, synthetic construct
  misc_feature 1..750: note = Description of Artificial Sequence: Synthetic coding sequence
  source 1..750: mol_type = other DNA
atgcccaggtccgtggttggaacggcttgtatgtatttcaagcgcttttacttgaacaactctgtaatggagtatcatcccagaattattatgctgacctgtgcctttcttgcttgcaaagttgatgagttcaatgtatctagtccccagtttgtcggcaatctgcgggaatccccactggggcaggagaaggccctcgaacagatccttgagtatgagctcttgttgattcagcaactgaatttccacttaatcgtgcataatccttatcgccccttcgagggctttttaattgacctcaaaacccggtaccccatcctcgaaaaccccgaaatactccgcaaaacagcagatgacttcctgaaccggattgcattgacagatgcatacctcctgtacaccccgagccagatcgctcttacggccatcctgagctccgcatcccgtgcgggaatcaccatggaaagttatttgagtgagagcctgatgctcaaagaaaatcgtacttgtctgtctcagcttctcgatattatgaaatccatgcgcaatttagtcaaaaaatatgagcccccaagatcagaagaggtggctgttttgaaacagaagctggagcgttgccacagcgcagagttggccctcaacgtcattacaaagaagcggaaggggtatgaagatgatgattacgtgtctaagaagagtaagcacgaagaggaggaatggactgacgatgacctggtcgaatcactgtag

SEQ ID NO: 14759 - DNA, 1053 bp, synthetic construct
  misc_feature 1..1053: note = Description of Artificial Sequence: Synthetic coding sequence
  source 1..1053: mol_type = other DNA
atggtgaccccatgtcccacatctccaagctcacccgccgcccgtgcgggccgccgagataacgaccaaaatttacgggctccagtgaaaaagtctcgccggccacggctgaggaggaagcagccgctgcacccattgaacccctgtccgctccccggcgactcaggcatttgcgatctgttcgagagtccttcgtccggctccgacggcgccgagagcccttcagccgccagagggggatctcctctccctggcccggcacagcctgtggctcagttggatctgcagacgtttagggactatgggcagtcctgttatgccttcagaaaggcccaggaaagccatttccatcctagagaggccttagcccgtcaacctcaagtcaccgctgagtcacgctgtaagctactgtcttggctgattcccgtgcatagacaatttggtcttagcttcgagtcgctgtgtctcactgtaaacacattggaccggtttctcacaacaacccccgtcgccgctgattgctttcagcttctcggagttacatctttattgattgcgtgcaaacaagtcgaagtacacccccctcgggtgaagcagctgctggcactttgctgcggcgcctttagtcgccaacaactgtgtaacctcgagtgcatcgtgttgcacaagctccatttcaccctgggtgcacccaccatatcgttcttcctcgagcactttactcatgctagagtggaagcaggccaagcagaagccagcgaggccttggaggcgcaggcactcgcacggggtgtcgccgagttaagtctggcagattatgctttcaccagctactccccatctctgttggccatctgctgtctggctctggcagatcgtatgttgcgggtctcaagacctgtggacttaagattgggtgatcatcctgaagcagcactggaggactgcatggggaagctacaactgcttgtagctattaatagcacaagcttgacccatatgttgccagtgcagatctgtgagaagtgctccctgcccccgtcgagtaagtag

SEQ ID NO: 14760 - DNA, 2181 bp, synthetic construct
  misc_feature 1..2181: note = Description of Artificial Sequence: Synthetic coding sequence
  source 1..2181: mol_type = other DNA
atggaaggagagaggaagaataacaacaaacgctggtactttaccagggagcagctagagaactccccatcaagacggtttggggtggaccctgacaaagaactgtcttaccgacagcaggccgctaatctcctgcaagatatgggtcagaggttgaatgtatcgcaactgacaatcaataccgcaatcgtgtacatgcaccggttttacatgatccagtcttttacccagttcccgggaaattctgtagctcctgccgccttatttcttgccgccaaggttgaggagcaaccaaagaagctagagcacgtgatcaaagttgcccacacttgcctccaccctcaggaatccttaccggacactcggagtgaggcctatttgcagcaggtacaggatctcgtgattctcgagtctattattctgcagactcttggctttgagctgaccatcgatcacccacacacccatgtggtgaaatgtacacaacttgtccgagcaagcaaggaccttgctcagactagttatttcatggccaccaactcactgcatctgactactttttcactgcaatacacacctcctgtggttgcctgtgtatgcatacacctagcctgcaaatggtctaactgggaaattccagtgtccacagatggcaaacactggtgggagtatgttgacgccactgtgactttggagctcctggatgagctaacacacgagttcctgcagattctagaaaagacgccgaatcggctcaaacgaatctggaactggagagcatgcgaggccgctaaaaagactaaagccgatgatcggggaactgatgaaaagacaagcgagcagacgattctgaatatgatctcccagtcttcttccgacaccacgatcgccggcctgatgtcaatgtccacaagcactacgtccgcggtcccctctcttcctgtatcagaggagtcttcatccaatcttactagcgtagagatgctcccgggtaagagatggctctccagccagcccagcttcaaactggagcccacacagggacaccgcacctctgaaaatctcgccctgactggcgtggaccactcactgccacaagatggcagcaatgccttcatctcccagaaacagaactctaaaagcgtgccctctgccaaagtttccctaaaggagtacagagccaaacatgcagaggaattggctgcgcagaagcgacagctcgaaaacatggaagcgaatgttaaatcccagtacgcatacgctgcccagaacctcctctctcaccatgactctcactcaagtgtcatcctcaagatgccaattgaaggtagtgaaaaccctgaacgcccatttcttgaaaaggctgataaaaccgcactcaagatgagaatcccagtcgcgggtggagataaagcggcctcctccaagccagaggagattaagatgcgaatcaaggtgcacgcagcagccgacaaacacaatagtgttgaggacagtgtcacaaagagcagagaacacaaggagaagcataaaacccacccgtctaatcaccaccaccatcacaatcatcattctcacaagcacagtcactcccagttaccggttggaactggaaacaagcgtcctggcgaccccaagcattcaagtcagacttcaaacctggcccacaagacatacagcctcagtagttcgttcagctccagtagcagcactcggaagcgaggacccagcgaggagactggtggcgctgtgttcgatcaccctgctaagatagctaagagcacaaaatcatcttcactcaacttctcattcccatcactgcccacaatgggccagatgccgggccattcgtcagatacaagcggcctgtcctttagccagccaagttgtaagactcgggtcccccactcaaagctggacaaggggcctacaggcgcaaacggacataatacaacacagacaatcgattatcaggacacagttaatatgctgcattctttactgagtgctcagggcgtacagcccactcagcctactgccttcgagtttgtccgaccctactctgattacctgaatcccagaagtggcggcatcagctctcgcagcggaaacacggacaaaccacgacctccccctcttccttccgagcctccaccaccactgcctccgctgcccaaatag

SEQ ID NO: 14761 - DNA, 723 bp, synthetic construct
  misc_feature 1..723: note = Description of Artificial Sequence: Synthetic coding sequence
  source 1..723: mol_type = other DNA
atggaggattacactaaaatcgagaaaatcggcgagggaacatacggagtggtgtataaaggccggcataaaacaaccgggcaggtcgtcgccatgaagaaaatccggctggagtccgaggaggaaggtgtgcctagcactgctatcagggagataagcctcctgaaggagctccggcatcccaatatcgtgtcactgcaagacgtgctcatgcaggattctcgcctctatctgatttttgagtttctctccatggatctgaaaaagtatcttgacagcatacccccaggccaatacatggatagctccctggtgaaagtggtgaccctttggtaccgctccccagaagtcctgctgggcagtgctagatacagcactcccgtggatatctggtccatcggcacaatcttcgcggagctcgccacgaagaaacccctgtttcatggcgactccgagattgaccagttatttaggatcttccgggcactgggcacccctaacaatgaagtgtggcctgaggtagagtccctgcaggattacaagaatacatttcccaaatggaagccaggttccttggcatcgcatgtgaagaacctggacgaaaacgggctcgatcttcttagtaaaatgcttatttacgatcccgcgaagaggatatctggtaagatggcccttaaccacccctactttaacgatctcgacaatcagatcaaaaagatgtag

SEQ ID NO: 14762 - DNA, 723 bp, synthetic construct
  misc_feature 1..723: note = Description of Artificial Sequence: Synthetic coding sequence
  source 1..723: mol_type = other DNA
atggaagactacactaagattgagaagatcggagagggcacttacggcgtagtttataaagggagacataagacgaccggacaggtggtagcgatgaaaaaaattaggctggagtctgaggaggagggagttccttctactgctatacgggagatcagccttttaaaggagctgcgtcatcctaacatcgtgtctctgcaggacgtgctcatgcaggatagccgtctctacctaatctttgagtttctgtctatggatctgaagaaataccttgatagtatccctccaggccaatatatggattcatccctggtgaaggtggtgaccttgtggtaccgctccccggaggtgcttctgggtagtgccagatacagcactcctgtcgacatctggagtattggaacaatttttgccgagctcgccaccaagaagccactatttcatggggattccgagatagatcagctattccgtatatttcgggccctcggaactcctaacaacgaggtctggcccgaggtggaatcactgcaggactacaagaacacatttcccaagtggaaacctggcagtctggcatcacatgtgaagaacctggatgagaatggactggatcttctgagtaagatgctgatatatgatcctgctaaacgcatctccggaaagatggccctgaatcacccatattttaacgatctagataaccagatcaagaagatgtag

SEQ ID NO: 14763 - DNA, 894 bp, synthetic construct
  misc_feature 1..894: note = Description of Artificial Sequence: Synthetic coding sequence
  source 1..894: mol_type = other DNA
atggaggattacacgaaaatagagaaaatcggggaggggacatatggagtggtgtacaagggcagacacaagaccaccgggcaggtagtcgccatgaagaagattagactcgagtctgaggaggaaggggtgccaagcactgccatcagggaaatctccctgctgaaggaattgcgccaccccaatatcgtcagcctacaggacgtgctcatgcaggactccagattgtacctgattttcgagtttttgagcatggaccttaaaaagtacttagatagcatccctccgggacagtacatggacagcagtttggtcaagagctatctctaccaaatcttgcagggcatcgttttttgccacagtcgtagggtcttacaccgggatctgaagccacagaatctcctgattgatgataagggcaccataaaattggccgatttcgggctagcgagagcgttcggaattcctatccgggtgtacacgcacgaggttgtgacgctgtggtacagatctcccgaagttctattggggtccgcacgttattcgacccccgtggatatctggtccattgggaccatcttcgccgaattagccaccaagaagcctcttttccatggagactccgaaatcgatcagttgttcagaattttcagagctctcggaacacctaataacgaggtttggcccgaggtggagagcttgcaagattacaaaaatacctttcctaaatggaaaccgggatccctggcaagccacgtgaaaaacctggacgagaacgggcttgacttgctgtcaaaaatgttgatctacgaccccgccaaaaggattagcggaaagatggcattaaatcatccttactttaatgatctggacaatcagatcaagaaaatgtag

SEQ ID NO: 14764 - DNA, 894 bp, synthetic construct
  misc_feature 1..894: note = Description of Artificial Sequence: Synthetic coding sequence
  source 1..894: mol_type = other DNA
atggaagactacacaaagatcgagaagatcggggagggcacctacggtgtagtctacaagggtagacataaaacaactggtcaggttgtcgcaatgaagaagatccgtctggagagtgaggaagaaggtgtcccaagcacagcaatccgggagattagcctcctcaaagagctccgacacccaaacatagtttccttgcaggatgtacttatgcaggacagccggttatacctgattttcgagttcctgagtatggatctcaaaaagtaccttgactcaattccccccggacagtatatggactcgagcttagttaagtcctatctatatcagatcctgcagggaattgtgttttgccattcacggagggtcttgcaccgcgatcttaagccacagaatctgctcatcgacgataaggggactattaaactcgcagatttcggcctcgcccgcgcctttggcattcctatacgggtgtatacccatgaggccattaccctgtggtacagatcaccggaagtgctgttgggctctgctaggtactctactcctgtcgacatatggagcatcggaaccatttttgcagaacttgccaccaagaaacctctttttcatggcgattccgagattgaccaacttttcagaatctttagggcgctcgggacaccaaataatgaggtctggccagaagttgagtccctgcaggactataaaaatactttccctaagtggaaaccaggctctttggcctcacacgtaaagaatcttgacgagaatgggctcgacctgctgtctaaaatgctaatttatgacccggcaaaaagaatatctggcaaaatggccttgaaccatccctattttaacgacttggataatcaaatcaaaaagatgtag

SEQ ID NO: 14765 - DNA, 570 bp, synthetic construct
  misc_feature 1..570: note = Description of Artificial Sequence: Synthetic coding sequence
  source 1..570: mol_type = other DNA
atggaggactacactaaaatcgagaagatcggtgagggcacttatggcgtagtgtataaggggcgacacaagactacaggccaggtggtggccatgaaaaaaatccgcttagagagcgaggaagagggcgtgccttcaactgccattcgcgaaatctcactgctcaaggaactgaggcaccctaatatcgtgagcctgcaggatgtactgatgcaggattcaagactgtaccttattttcgaattcctctccatggatcttaagaagtacctcgacagcatacctcctggccaatacatggatagctcactggttaagagctacctgtatcaaatcctccagggcattgtcttttgccattccagacgggttctgcaccgggacctgaagccccagaatttattaatcgatgataaggggaccatcaaattggccgacttcggcctggcccgcgctttcggaataccaatcagggtgtacactcacgaggcaataacattatggtataggagcccagaggtactcctcgggagtgcacggtacagcacacccgtcgatatctggagctag

SEQ ID NO: 14766 - DNA, 897 bp, synthetic construct
  misc_feature 1..897: note = Description of Artificial Sequence: Synthetic coding sequence
  source 1..897: mol_type = other DNA
atggaaaactttcagaaggtggaaaagattggggaagggacctacggggtggtctataaagcccggaataaacttaccggagaggtcgtggcgctgaagaaaattcgcctggatactgaaaccgagggtgtgccaagtaccgccatcagagaaatttcccttctgaaggaactgaaccatcccaatatcgtgaaactcctggacgtcattcatactgagaataagctctacctggtgtttgagtttctgcatcaggacctcaagaagttcatggacgcttccgccctgaccggaatcccgctcccactcattaaaagctacctcttccagctgttacagggcctcgcattctgtcatagccatagggttttgcatagagatctgaagccacaaaatctcttgattaacactgagggagcaataaagctggctgactttggcctggccagggcatttggagtcccagtccggacgtacacacatgaggttgtgaccctttggtatagagccccagagatccttctgggttgtaaatactactcgacagcggtagatatctggtcattggggtgtatcttcgctgagatggtcactcgccgggccctttttccgggagattcagagattgaccaacttttcagaattttccggaccttagggacccccgacgaggtggtatggccaggcgtgacaagcatgccggactacaagccctccttcccaaagtgggcccgtcaggacttctcaaaagtcgtccctcctttggatgaggatggccgctccttgctgtcacagatgcttcactatgaccctaataagaggatttcagctaaagcggctctcgcccatccattcttccaggacgttactaagcctgtgcctcacctcaggctctag

SEQ ID NO: 14767 - DNA, 795 bp, synthetic construct
  misc_feature 1..795: note = Description of Artificial Sequence: Synthetic coding sequence
  source 1..795: mol_type = other DNA
atggagaatttccagaaagtcgagaagatcggagaaggaacatatggggtggtatacaaagccagaaataagcttactggggaggtcgtggctctgaagaagatccgcctggacacggagaccgagggggtgccttccactgcaattcgggagatatctttgctaaaggagctgaaccatccaaatatcgtcaagctgctggacgtcatacatactgaaaataagctgtacctcgtctttgagttcctgcaccaggatctgaagaaattcatggacgccagtgctcttactggcattcctctgccactcattaagtcttatctcttccagttgctgcagggcctggccttttgtcacagtcacagagtgctgcatcgcgaccttaaaccccaaaacctgctgatcaatacagagggagctataaagcttgcggatttcggactggctcgggccttcggggtccccgtccgcacttatacacatgaagtgactcgcagggctctgtttccaggggattcggagattgaccagctgtttcgaatctttcgcacactagggacaccagacgaggtggtgtggccaggggtcacctcaatgccggattacaaaccctctttcccaaagtgggccaggcaggacttttcgaaggtggtacccccccttgacgaggacggtcggtccctcctgagccagatgctccattatgatcccaataagcgtatctctgctaaggcagccctggcccacccgttttttcaggacgtgactaaacccgtccctcaccttcgactctag

SEQ ID NO: 14768 - DNA, 348 bp, synthetic construct
  misc_feature 1..348: note = Description of Artificial Sequence: Synthetic coding sequence
  source 1..348: mol_type = other DNA
atgtcttacaagcccaatctggcagctcacatgccagctgcggctctgaacgccgctggtagcgtacactccccaagtacatcgatggccactagttctcagtacaggcagctgctctcagattatggtccaccttccctagggtatactcagggaaccggaaactcacaggtgcctcagtcaaagtacgcggagctgctggccataatcgaagagctcggcaaagaaatccgaccaacgtacgcaggctccaaatcagctatggaaaggttgaagagaggcattatccatgcccgagggctcgtgcgagagtgtctagcagaaacggaaagaaacgcccgcagctag

SEQ ID NO: 14769 - DNA, 912 bp, synthetic construct
  misc_feature 1..912: note = Description of Artificial Sequence: Synthetic coding sequence
  source 1..912: mol_type = other DNA
atggctaccagccggtacgaaccagtcgccgagataggtgtaggagcttacggaaccgtgtataaggccagggatcctcacagtggtcacttcgttgctctgaaatcagtgagggtaccaaacggcggcggaggaggagggggccttcccatcagcacagtaagggaggttgcactgctgaggagactcgaagcattcgagcaccccaatgtggtgcgacttatggatgtgtgcgcaacctccagaacggatagggaaatcaaagtcacactggtttttgagcacgtggaccaggatctcaggacatacttggataaagcccccccgcccgggctgcccgctgaaacaataaaagacttgatgcgacagttcttacgcggcctcgacttcttgcatgcaaactgcatagttcaccgcgatctgaagccggagaacattcttgtcacttccggcgggacagtaaaactggctgactttggtctcgcaagaatttactcctatcagatggcacttactccggtggtagttactctctggtatcgagcaccagaggtgttactgcagagcacatatgcaacaccagtggacatgtggagtgtgggatgtatttttgcggagatgtttcggcgtaagccactattctgcggcaatagtgaggctgaccagctgggcaaaatatttgatctaataggcttgcccccagaggatgactggcccagagacgtgagtctcccgagaggcgccttcccccccagaggaccccggccagttcagagcgtggtgcccgagatggaggaatcaggcgcacaactgctgctggagatgctcactttcaatcctcacaagcgaattagcgccttccgcgctctgcaacatagctatttgcacaaggacgagggtaaccctgaatag

SEQ ID NO: 14770 - DNA, 336 bp, synthetic construct
  misc_feature 1..336: note = Description of Artificial Sequence: Synthetic coding sequence
  source 1..336: mol_type = other DNA
atggccaccagccggtatgaacctgttgcagagattggtgttggggcttacgggaccgtgtataaggctagagatccccatagcggtcacttcgtggccctgaaaagcgtgagggttccgaatggcggcggaggcggaggcggtttgcctattagcactgtgcgggaggttgcgctactgaggaggctcgaagcctttgagcaccccaacgtggtcaggctcatggacgtctgcgctacatctaggactgacagagaaattaaaaggtgcttcgtagaatccctgtccagcgtggaaaccctgaaaccgactagctgggccaagtctctgacatag

SEQ ID NO: 14771 - DNA, 552 bp, synthetic construct
  misc_feature 1..552: note = Description of Artificial Sequence: Synthetic coding sequence
  source 1..552: mol_type = other DNA
atgagacaatttttacgcggcctggactttctccacgcaaactgcattgtccaccgagatcttaagcctgagaatatcctagttacttccggcggcaccgtgaagctggccgattttggacttgcaagaatctatagctaccagatggctctgacacctgtggtcgtcacattatggtacagagccccagaggtattattgcagagtacttacgctacaccagtggatatgtggtctgtgggttgtatattcgcggagatgttcaggaggaaacccttattttgcggtaacagcgaggccgaccagctgggcaagatcttcgatttgatcggattgccacccgaagatgattggcctcgcgatgtcagtctcccacgcggagcgttcccaccaaggggacctaggcccgtccagtccgtggtgccagagatggaagagtccggggcccagttattgctggaaatgctgactttcaacccacataagagaatttcagccttccgggccctccaacactcttatcttcataaagacgaggggaacccggagtag

SEQ ID NO: 14772 - skipped

SEQ ID NO: 14773 - DNA, 612 bp, synthetic construct
  misc_feature 1..612: note = Description of Artificial Sequence: Synthetic coding sequence
  source 1..612: mol_type = other DNA
atggccacctcgaggtatgagcccgtggccgagatcggtgtgggtgcatatgggactgtttacaaggcccgggatcctcactcagggcacttcgtcgcattaaagtcggtgcgggttccgaatggagggggcgggggcgggggcctccctataagcaccgtccgtgaagtcgctctgctccgcaggttggaggcatttgaacatcccaatgtcgtccgcctgatggatgtttgcgcgacaagtcgaaccgatcgggaaataaaagtcaccttggtgtttgagcatgttgaccaggatctcaggacctatctggataaagcccccccgccgggcctcccggccgaaactatcaaggacttaatgaggcaatttcttcgcggactcgacttcttacatgcgaattgcatagttcaccgagacttgaagccagagaacatcctggtgacttccggaggtactgtcaaactagctgattttggtctggcaagaatctattcgtaccagatggctctgacccctgtggtggtgaccctctggtatagggctccagaagtgttgttgcaatccacctatgcaacccctgtggacatgtggtccgtcggttgtatctag

SEQ ID NO: 14774 - DNA, 513 bp, synthetic construct
  misc_feature 1..513: note = Description of Artificial Sequence: Synthetic coding sequence
  source 1..513: mol_type = other DNA
atggccactagtagatacgagcctgtcgcagaaataggagttggggcgtacgggacggtctacaaagctagagacccacactctggccacttcgttgctcttaaatccgtgcgcgtgcctaacggagggggcggtggtggagggctccctatttccaccgtcagagaagtggccctgctgaggcgccttgaggcattcgagcatccaaacgttgtccggctgatggatgtttgcgcaacatcacggaccgaccgggagataaaggtcaccctggtgtttgaacatgttgatcaggatctgcgcacttatttggacaaagccccccctcctgggttgcctgctgaaacaataaaagatctgatgcgccagtttctccggggcctggactttcttcacgctaactgcatagtacacagggacctgaagccagaaaatattctggtaacgtccgggggaacagtcaagcttgctgacttcggactggccaggatctattcttaccagatggcatag

SEQ ID NO: 14775 - DNA, 348 bp, synthetic construct
  misc_feature 1..348: note = Description of Artificial Sequence: Synthetic coding sequence
  source 1..348: mol_type = other DNA
atggcaacaagccgctatgagcccgtcgccgagatcggagtcggcgcctacggcacggtctacaaggcccgggatccgcactctgggcattttgtggctctgaagagtgttcgggttccgaacggcggcggggggggaggaggcctgccaattagcaccgtgcgtgaggttgccttgcttcggcgtttagaagccttcgagcacccaaacgtagtgcggttaatggatgtctgcgccacaagcaggaccgatagagagatcaaagtaacattagtatttgaacatgttgaccaggatctccggacctaccttgataaagctcctccgcccggtctgccagccgagtag

SEQ ID NO: 14776 - DNA, 924 bp, synthetic construct
  misc_feature 1..924: note = Description of Artificial Sequence: Synthetic coding sequence
  source 1..924: mol_type = other DNA
atgggaacagtcttgtctctgtcccccagttatagaaaggcaactcttttcgaagacggggcagccaccgttggccactacacagcagtgcagaactccaaaaatgccaaagataagaatctcaagagacattctattatctcggtgctgccttggaaaagaatcgtagctgtgagcgccaagaaaaaaaactcaaaaaaggtgcagcctaacagcagttatcagaacaatataacccatctgaacaacgaaaatctgaagaagtcccttagctgcgcgaatctgagcacctttgcacagcccccacccgcgcaaccccctgctcctcccgcctcccagctgtcaggcagccagacaggcgggagctcttccgtgaagaaggctcctcatccagccgtgacaagcgcgggaactccaaaaagggtaatcgtgcaggccagtacaagtgaactcctcagatgcttgggggagttcctttgcagacgctgttaccgcttaaaacacctgtcaccaaccgaccccgtcctttggctccgatccgtagaccgctcgctgttgctgcaaggctggcaggaccaaggatttatcactcctgccaatgtcgtgttcctctatatgttgtgccgcgacgtgattagtagcgaggtgggatctgaccatgaactacaggcggtacttcttacatgcctgtacctgtcctactcttatatggggaatgaaattagttaccctcttaagcctttcctcgtggagtcctgtaaagaagctttctgggaccgctgcctgagcgtgatcaatttaatgtcgtctaagatgctgcagatcaacgctgacccacattacttcactcaggtgttctcagaccttaaaaacgagtccgggcaggaggataagaagagacttctgcttgggctcgatcgctag

SEQ ID NO: 14777 - DNA, 981 bp, synthetic construct
  misc_feature 1..981: note = Description of Artificial Sequence: Synthetic coding sequence
  source 1..981: mol_type = other DNA
atggaaaaagatggactgtgccgcgccgaccagcagtacgaatgcgtggccgagattggtgaaggcgcgtacgggaaggtgttcaaggccagagacctgaagaacgggggtcgctttgtcgctctgaaacgcgttcgggtccagaccggcgaagagggtatgcccctgtcgactattcgtgaagttgccgttctgagacatttggaaactttcgagcaccctaacgtggtgaggcttttcgatgtatgcacagtgtcccgcacagaccgcgagacaaagctgacccttgtgttcgaacatgtcgaccaggatctcaccacatatctggataaagtgcctgaacccggagtgccaacagagactatcaaggacatgatgttccagctgttaaggggactggatttcctgcatagccaccgcgtagttcatcgcgacctgaaaccccagaatatcttagtgacatcgtctgggcagatcaagctggccgactttggcctcgctcgaatctactcgtttcagatggcactgactagtgtcgttgttacgctgtggtatcgagcgcccgaggttctcctgcagtcctcctacgcaactcccgtagatttgtggtccgtgggatgtatctttgccgagatgtttcgcagaaagccactgttcagggggtctagtgacgtggaccagctgggcaagattttagatgtgattggactccctggcgaggaggactggcccagagacgttgcgttgcccagacaagcctttcatagcaagtctgcgcagccgatcgagaaattcgttactgacatagacgagctggggaaagacctcctgttgaagtgcctcacgttcaaccctgctaagcgaatctccgcctatagtgcattatcccacccctactttcaggacctggagaggtgcaaggaaaatctcgatagtcacttgcccccctctcaaaacacatccgagctcaatacagcgtag

SEQ ID NO: 14778 - DNA, 981 bp, synthetic construct
  misc_feature 1..981: note = Description of Artificial Sequence: Synthetic coding sequence
  source 1..981: mol_type = other DNA
atggagaaagatgggctatgccgcgccgaccagcagtacgaatgtgtggctgaaatcggagaaggagcctacggaaaagtttttaaggccagagacctgaagaacgggggacgcttcgtcgcgctcaagagggtccgggtacagaccggcgaagaagggatgccactttctacaattagagaagttgccgttctgcggcatctcgaaacatttgagcaccccaatgttgtgcgactgttcgacgtctgtacagtttcgcggaccgacagagagacaaagcttacgctggtctttgaacacgtggaccaggacttgaccacctatctggacaaggtcccagaacccggagtgccaaccgaaaccatcaaggatatgatgtttcaattactcaggggcctcgacttcctgcacagccaccgggtcgtgcaccgagatctcaaaccacagaacatactagtcacttcctccggacagatcaagcttgctgatttcggtcttgcaagaatctactcatttcagatggctctgactagcgttgttgtaactttgtggtatagagccccggaggtgcttttgcagtccagttacgcgacaccagtggatctgtggtcagtcggttgtatttttgccgaaatgttcagaagaaagcctctgttccggggaagttccgatgtagaccaactgggaaaaattctggacgtgattggccttcctggtgaagaggactggccacgagacgtcgcactgcctaggcaggcatttcacagtaagagcgcccagcctattgagaaattcgttactgacattgatgaactggggaaagacctgttgcttaagtgcctgacatttaatccagccaaaagaatctctgcatactctgcactgagccatccatattttcaagatctggaaagatgtaaggaaaatttagatagccacctacctccctctcagaacacatctgagcttaatactgcctag

SEQ ID NO: 14779 - DNA, 1041 bp, synthetic construct
  misc_feature 1..1041: note = Description of Artificial Sequence: Synthetic coding sequence
  source 1..1041: mol_type = other DNA
atggctctggacgttaagtccagagctaaacgttacgaaaagttggatttcctaggagagggccagttcgcaactgtgtataaggcaagggacaaaaatactaatcagatcgtcgctataaaaaagattaagctgggccacagatcagaggcaaaggacggtattaacagaactgctctaagggaaattaagctcttacaggagctttcccatccgaatatcattggcttactggacgcctttggacataagagtaacatttccctggtctttgactttatggagaccgatctcgaagtaatcattaaggataacagtcttgttctgacccccagccacatcaaagcgtacatgctgatgacactgcagggcttggaatatttacatcagcactggatcttgcacagggatctgaaacctaataacctattgctggatgagaacggagttctgaagttggctgactttggccttgccaagtctttcggatcgcccaacagagcctatacacaccaggtggttaccagatggtatcgggcacctgaattactattcggagccagaatgtacggggtgggcgtggacatgtgggccgtggggtgtatccttgcggaactgctgctccgggtaccctttcttcccggtgatagcgatttggaccagttgacgagaatcttcgaaaccttaggcaccccgaccgaagaacagtggcccgacatgtgttcactaccagactatgtaaccttcaagagtttccccgggatacctctccaccacattttctctgccgctggggatgatcttctcgatttgatccagggcctctttctatttaatccgtgcgccaggatcactgcaacacaagcactgaagatgaaatacttcagcaataggccagggcccacacccggatgccaattgccccgacctaattgtccagtggagacgctcaaagagcagtccaatccggccctggccattaaaagaaagagaactgaagccttggagcaaggggggttgcctaagaagttgatattctag

SEQ ID NO: 14780 - DNA, 1395 bp, synthetic construct
  misc_feature 1..1395: note = Description of Artificial Sequence: Synthetic coding sequence
  source 1..1395: mol_type = other DNA
atggactacgatttcaaagtgaagctatctagcgagcgtgaaagagtggaagacctgttcgagtacgagggatgtaaggttggcagaggaacctacggtcacgtctataaagccaaaaggaaggacggcaaggatgacaaagattacgctctgaaacagattgaggggactggtatctcgatgtccgcttgtagggaaatcgctctcttgcgcgaacttaaacatccaaacgtgataagcctccagaaggtgtttttgagccacgccgaccgcaaagtgtggcttctgtttgactatgccgagcatgatttgtggcatattattaaattccatagggccagcaaggcaaataagaagcctgtacagctgcccaggggcatggttaaatcactcctctaccagattctggacgggatacactacctccatgccaattgggtcctacacagagacctaaaacccgctaacattttagttatgggagaaggacctgaaagaggccgggttaagattgccgacatgggcttcgcccgcctattcaattctcctctgaaaccattggccgacctggatccagttgtggtcactttttggtaccgggcacccgaactactgttgggggctagacactacaccaaggctatcgacatctgggctattggatgcatttttgcagaattacttacgtctgagcccatttttcattgtcggcaggaagacatcaaaacttccaacccttatcaccacgatcagttagaccgtatttttaatgttatgggcttcccagccgacaaggattgggaagatataaaaaaaatgcccgagcattccacccttatgaaggactttagacgcaatacctacacaaattgtagcctaatcaagtatatggagaagcataaggtgaagccagattctaaagctttccatctgcttcaaaagctgttaactatggatccaatcaagcgcattaccagcgagcaagcaatgcaagacccatatttccttgaggatccactccctacatctgatgtttttgcgggttgtcaaatcccttatccaaaacgtgaatttctgacggaagaggagccagacgataaaggcgataaaaaaaatcagcaacagcagcaaggaaacaatcatactaatggaacaggccatcccggaaaccaagatagctctcatacccagggccctcctctgaagaaagtgagggtggtgccaccgacaaccacttctggaggacttattatgacatcagattaccagaggtcaaaccctcatgctgcctacccaaacccaggaccctcaacctcccagccgcagtcaagcatgggctactcagcgacctcacagcagcccccgcagtacagtcatcaaacacaccgctactag

SEQ ID NO: 14781 - DNA, 495 bp, synthetic construct
  misc_feature 1..495: note = Description of Artificial Sequence: Synthetic coding sequence
  source 1..495: mol_type = other DNA
atggactatgactttaaagtgaaactgagcagcgagagggagagggtggaggacctcttcgaatacgaaggctgcaaagtggggcgtgggacatacgggcacgtgtataaggccaagcgcaaggacggtaaggatgacaaagactatgccctgaagcagattgaaggcaccggaattagcatgagcgcatgcagggaaatcgcccttctcagagaactcaagcatcctaatgtgattagcctccagaaggtgttcctaagtcacgccgaccgcaaagtgtggcttttattcgactacgctgagcatgacctttggcacataataaagttccaccgcgcctcaaaggccaataaaaagccggtccagctcccaaggggaatggtaaagagcctgctgtatcaaatcctggacggtattcactacttgcatgctaattgggtgctgcatagagacttactgacttgggcgttgccggactacctcatccatctgtag

SEQ ID NO: 14782 - DNA, 1119 bp, synthetic construct
  misc_feature 1..1119: note = Description of Artificial Sequence: Synthetic coding sequence
  source 1..1119: mol_type = other DNA
atggccaagcagtacgattcagtggaatgtcccttctgcgatgaagtgtctaaatacgagaaactggcaaagatcggacaggggacgtttggtgaagtcttcaaagcaagacacaggaaaaccgggcagaaagtggcccttaagaaggtcctgatggaaaacgaaaaggagggtttccccataacagctctgagggagattaagatactacagctcctgaagcatgagaacgttgtaaatctaattgaaatctgcagaacaaaggccagtccttacaatagatgtaagggctctatctatctggtcttcgatttctgcgaacatgacctggccggcctgcttagcaatgtcttagtgaaattcaccttgtcagagatcaaacgggtcatgcagatgcttctcaacgggctttattatattcaccgaaacaagattctacaccgggacatgaaagccgctaacgtgctgatcacccgcgatggtgtactcaaattggccgacttcggactagctagggcgttctctctcgctaaaaacagccagcccaaccgctacactaatcgagttgtgacattatggtaccgtccccctgaactccttctgggcgaacgagattatggcccccccattgatctgtggggcgccgggtgcatcatggccgagatgtggacaagaagccctatcatgcaaggaaatacggagcagcatcagctggctctgatctcacagctctgtggaagcataaccccagaggtgtggcctaatgtggacaattacgagctgtatgagaagttggaacttgtgaaaggtcagaaacgtaaagtgaaagaccgcttgaaagcctacgtgcgtgacccttacgcgctggatttgattgataagctgctggtgctggatccagcgcagcggatcgactcagacgatgcgttaaaccacgactttttctggagtgacccaatgccatcggacctcaagggcatgttgtcaacccaccttacttctatgtttgagtacctcgctccccctaggaggaaaggatctcagattactcaacagtccacaaatcagtctcgaaaccccgcaaccactaatcagaccgagtttgaaagggtattttag

SEQ ID NO: 14783 - DNA, 1470 bp, synthetic construct
  misc_feature 1..1470: note = Description of Artificial Sequence: Synthetic coding sequence
  source 1..1470: mol_type = other DNA
atgcagagggacgcgccacccagagctcctgcacccgcgccacgccttccagcacctcctatcggtgccgcagcctcctcgggaggcggaggcggaggtggcagcggagggggcggaggaggggccagtgcagcaccggccccacctggactatccggcaccactagccctaggggacctggcggcgggaggagggccgaagaagccggttccgcacctcgtgggaggaagtggccctggcgtcgcaagtggcgtgggcgaggaggcgcttggagtgccgcagcggcgggaccaggcgccggagccgcagcggcggcgacaggaggcgggggcggcgccctggaagccgccatggccaagcagtacgatagcgtagagtgccccttctgtgatgaagtgagtaagtatgagaagttggccaaaattggccagggcactttcggagaggtgttcaaagcaagacaccggaagactggccaaaaggtcgccttaaagaaggtgctgatggaaaacgaaaaagaggggtttccaattactgctctcagagagatcaaaatcctgcaactgctgaagcacgagaatgtggtgaacttgattgaaatctgtcgcacaaaagcgtcaccttacaaccggtgtaaaggatccatttatctggtctttgacttctgcgaacatgatctggctgggctcctgagtaatgtcctcgttaaattcaccctgtccgagattaaaagagtgatgcaaatgcttcttaatggtctgtactacatccatcgcaacaagatcttgcaccgcgatatgaaagcagcgaatgtccttattaccagggacggagtactgaaattagctgattttggcctggctagggctttttccctcgctaagaattctcagccaaaccgatataccaaccgtgtggttaccctttggtatcggcccccagaattactgctgggtgagcgagattacgggccacccatagatctgtggggagccggatgcattatggcggaaatgtggacccgcagtcccattatgcaggggaacacagaacagcaccaactcgcattaatcagccagctgtgcgggagcataacacccgaggtctggcccaatgtggacaactacgagctgtacgagaaattggagctggtcaaagggcagaaaaggaaggtcaaagatagactcaaggcgtacgttagggacccttacgcactcgacctcatcgataagcttttggtgctcgacccagctcagaggattgattccgatgacgcgttgaaccatgactttttctggtcggaccctatgccaagcgatttgaagggaatgcttagtacgcaccttacctccatgtttgaatacctggcgcccccacggcgcaagggctcacagatcacacagcaatcgacaaaccagagtcgtaatccagccaccaccaaccaaactgaatttgaacgtgtcttctag

SEQ ID NO: 14784 - DNA, 585 bp, synthetic construct
  misc_feature 1..585: note = Description of Artificial Sequence: Synthetic coding sequence
  source 1..585: mol_type = other DNA
atgcagcgggatgcacccccccgggctcctgcccctgcacccagactgcccgcgccccccatcggagccgcggccagtagcggtggggggggggggggcggctctggtggaggaggaggtggcgcctccgctgcacccgccccccctggcctttccggcaccacgagcccccgaggccctgggggaggcagaagagcagaggaagctggtagcgctccccggggccggaagtggccctggagacggaagtggcggggtcgcggcggggcatggtctgctgccgcggccgggcccggagccggtgccgccgcagcagctaccgggggcggtgggggcgccctcgaggctgccatggctaagcagtacgattcagtggaatgccctttttgcgacgaggtcagcaaatatgaaaagctcgctaagataggtcaaggtacattcggcgaagtgttcaaggcaaggcatcggaaaaccgggcaaaaagttgccctgaaaaaggtgctgatggagaatgagaaagaaggcttccctatcactgctttacgtgagattaaaattctgcagctcttgaagcacgagaactag

SEQ ID NO: 14785 - DNA, 495 bp, synthetic construct
  misc_feature 1..495: note = Description of Artificial Sequence: Synthetic coding sequence
  source 1..495: mol_type = other DNA
atgtctgagcccgccggcgatgtccgtcagaatccatgcgggtctaaggcctgcagacgcctgtttggtcctgtggatagcgagcaactgtctcgcgattgtgacgctctgatggctggctgcattcaagaagcccgtgagagatggaattttgattttgtgaccgagacgccactggagggggactttgcatgggagcgtgtgcgcggtctcggcctgccaaagctctatctgcccacggggccccggcggggaagagacgaattggggggaggtcgacgaccaggaactagccccgccttactgcaggggaccgcagaggaggaccatgtggatctgtccctgagttgtaccctggtcccccgttctggggagcaagcggaggggtccccagggggccccggcgacagtcagggaagaaaacgaaggcagacatccatgactgatttctaccactctaagcgaaggctgatcttctctaaacggaaaccttag

SEQ ID NO: 14786 - DNA, 495 bp, synthetic construct
  misc_feature 1..495: note = Description of Artificial Sequence: Synthetic coding sequence
  source 1..495: mol_type = other DNA
atgtccgaaccagctggagatgtccggcaaaacccgtgtggcagtaaagcttgtcggagactgtttgggcccgtggactccgagcagctgagcagagactgcgatgcattgatggctgggtgtatccaggaagcccgtgagcgctggaactttgatttcgtcactgaaacgcccctggagggcgacttcgcctgggaacgagtcagaggtttagggctgcctaagctgtatttgcctacgggaccaaggaggggtcgagacgagctgggggggggtagacgaccaggaacgagcccagcactattgcagggaacagccgaggaggatcacgtggatctgagcctgagttgcacccttgtacccagaagtggggaacaggcggagggctccccaggaggtcctggcgattctcaagggcgaaaacgaagacagacctccatgactgacttctatcattctaaacgacggctcatcttttccaagcgcaagccatag

SEQ ID NO: 14787 - DNA, 495 bp, synthetic construct
  misc_feature 1..495: note = Description of Artificial Sequence: Synthetic coding sequence
  source 1..495: mol_type = other DNA
atgtcagaacctgcaggagacgtgcgccaaaacccatgcggtagcaaagcctgtcgtcgactgttcggacccgtggacagtgagcagctcagtagggactgtgacgcgctgatggcagggtgtatccaggaagctagagaacgttggaacttcgactttgtgacagaaactcctttggaaggcgactttgcctgggaaagagtgaggggtctgggcctccccaaactctacttaccgacaggtcctcggcggggtagagacgagcttgggggtggccgtcgacctggaacatctcccgccttattacagggcactgcagaggaggaccatgtggacctttccctgtcatgcactttggttccacggtctggtgaacaggccgagggctcgcccggcggccctggggattcccaggggcgaaaaagaagacagacttccatgactgatttttatcatagcaaaagacgcttgattttttctaagagaaagccctag

SEQ ID NO: 14788 - DNA, 597 bp, synthetic construct
  misc_feature 1..597: note = Description of Artificial Sequence: Synthetic coding sequence
  source 1..597: mol_type = other DNA
atgtggggagtcttccggcgacagacaacacactccagcaatccgcccctgcccggccagcaatcttgctgtaatcaccgggatttcttctgttcaggggctatgagcgagccagccggcgacgttcgtcaaaatccatgtggaagtaaagcatgcaggagactgtttggacccgtggattcggagcagctgtccagggactgtgacgctttgatggcaggatgtatacaagaggctagagagcggtggaatttcgacttcgtgactgagacccccctggagggagactttgcctgggaacgcgtgcgcgggctgggtctgcctaaactgtatcttcctacaggcccccggcgtggacgagatgagttaggcggaggaagaaggccaggcactagtccagctctgcttcagggaacagcggaggaagatcatgtagacctttcactctcatgcactctcgtgcccagaagtggcgaacaggccgagggctcccccggaggccctggcgactcacaaggccggaaaagacgccagacctcaatgaccgatttctaccattctaagcgtagactcattttttccaaacgaaaaccttag

SEQ ID NO: 14789 - DNA, 363 bp, synthetic construct
  misc_feature 1..363: note = Description of Artificial Sequence: Synthetic coding sequence
  source 1..363: mol_type = other DNA
atggacgatagcaaagtcgtaggcgggaaagtcaagaaacccggtaagcgcggtcggaaacctgcaaaaatagacctaaaagcgaaactggaacgcagccgccagagcgctcgcgaatgccgtgcgaggaagaaactccgttaccagtacctagaggagctggtctcttcgcgcgagcgagctatctgcgccctgcgagaagagctcgaaatgtacaagcaatggtgtatggcaatggaccagggcaaaatcccaagcgagatcaaggcattactgaccggggaggaacagaacaagtcccagcagaattcttctcggcacactaaggctggcaaaacagatgctaactccaatagctggtag

SEQ ID NO: 14790 - DNA, 444 bp, synthetic construct
  misc_feature 1..444: note = Description of Artificial Sequence: Synthetic coding sequence
  source 1..444: mol_type = other DNA
atggaggaggccagtcaacggaaatggaactttgactttcagaaccataagcccctggaggggaaatatgagtggcaagaagtggagaaagggtccctgcccgagttttactaccgccccccccgtccccctaagggtgcatgcaaggtgcccgcccaagagagtcaggacgtgtcgggttctagacccgcagccccactgattggagccccagccaattcggaagatacccacctggttgatcccaagacagacccatccgacagccagacgggactcgcagaacagtgtgccggaattaggaagcgaccagctactgatgattcttcaacacagaacaaacgggcgaaccgtactgaagagaacgtgtctgacgggtcaccaaatgcgggctcagtcgagcagacacctaagaaacccggtctccgacgccgtcagacttag

SEQ ID NO: 14791 - DNA, 918 bp, synthetic construct
  misc_feature 1..918: note = Description of Artificial Sequence: Synthetic coding sequence
  source 1..918: mol_type = other DNA
atggagcgcctggtcgcccgaggaacgttccccgtgctagtcaggacctcagcttgccgctccctgttcggaccggtggatcacgaggagctgtctagggaactgcaagcacgcctggccgaacttaacgccgaagatcagaatcgatgggactatgattttcaacaggacatgcctctgagagggcctggcagacttcagtggaccgaagtggatagcgacagcgtcccggctttctatagagagactgttcaagtgggtcggtgcagacttttacttgcaccgagacctgttgctgtcgccgttgcggtgagccctcctctagagcctgccgccgagagtctggacggcctggaagaagcaccggaacagttgccgtctgtccccgttcccgcccctgcatccacgccaccccccgttcccgtactggccccagccccagcccctgcacctgcaccagtcgcggcgcctgttgctgcccccgtagccgtcgcagtattagcccccgcgccagcgcctgctcctgcccctgcccccgctccagcgccagtggcagcaccagcaccggcccctgctcccgcacctgctccggcgcccgcccctgcccctgcacccgatgccgcaccccaggagagcgccgagcagggagccaatcaaggacagcggggacaagagccgcttgcagatcagttgcacagcggcattagcggtcggcccgccgcagggaccgcggcagctagcgcgaacggcgcagcgatcaaaaagctgtctgggccacttatttcagatttcttcgccaaaagaaaaaggagcgccccagagaagtcaagcggggacgtgccagccccatgcccttcacctagtgccgctcccggagtcggaagcgtcgaacagacacctcgcaaacggctgaggtag

SEQ ID NO: 14792 - DNA, 951 bp, synthetic construct
  misc_feature 1..951: note = Description of Artificial Sequence: Synthetic coding sequence
  source 1..951: mol_type = other DNA
atgagtgacgcaagtctaagatccactagtacgatggagcgcttggtggcccggggcacctttcccgtgctggttagaacatctgcctgtcgaagtctgtttggccccgttgaccacgaagaactttcacgtgagctccaggcccgcctggccgagctgaacgcggaagatcaaaatagatgggattacgatttccagcaagacatgccgctgcgcggaccaggacgtctgcagtggaccgaagttgattccgattcagtgccggcattttacagagagacagtacaagtgggcaggtgtcgcctcctcctggccccacgacccgtggccgtcgcagttgccgtctcaccacccctggaaccagcggcggagagcttagacggattggaggaggcaccggaacaactgcctagtgtgccagtcccagcccctgcttcgacccctcctcccgtacctgttctcgccccagctcctgctcctgcccccgctcccgtcgccgctcccgtagcggctccagtggccgtcgcggtactggctccggcccccgccccggcaccggcgcctgcccccgcaccagcacctgttgctgcaccagctcccgccccggccccggcaccagcacccgcccctgcgcctgccccagcacccgacgccgctccacaggagtcggctgagcagggggccaatcaggggcaacgcggccaggagccccttgccgatcagctccattctggtatctctggaaggcccgctgcgggaactgcagccgccagcgcaaatggagcagccatcaagaagctgagtggaccacttatctcagacttctttgccaagcgaaagagatcggctccagaaaagtctagcggggacgttccggcgccatgtccctcaccatcagctgccccaggcgtgggatcggtggagcaaacccctcgaaaaagacttcgttag

SEQ ID NO: 14793 - DNA, 951 bp, synthetic construct
  misc_feature 1..951: note = Description of Artificial Sequence: Synthetic coding sequence
  source 1..951: mol_type = other DNA
atgtccgatgcttctctgcgaagtactagcacaatggagagactagtcgctaggggtactttcccagtgctggtgcgcaccagcgcctgtagaagtctgttcggcccagtggaccacgaggagctgagccgcgagctgcaggctcgtctcgcggagctgaacgccgaggaccagaatcggtgggactacgattttcagcaagatatgccgttgcggggccccggacgacttcagtggaccgaagtggatagcgatagtgtgcctgccttctatcgggaaacagtgcaggtcggaagatgcagactactactcgccccccggcccgtggcagtcgccgtcgcagtgagccctcccttagaacccgccgctgagagtttggacggcctggaagaggctcctgagcagctccctagtgtgcccgttcctgcacctgcctccactcctcccccagtgcccgtcctggcacctgcacccgcaccagctcccgctccagtggctgctccagtggctgcccctgtggccgtggccgtgctggctccggcgcctgctccagccccagctccagcccctgcccctgctccagtggctgccccagcacccgctccagcacccgcccccgcacccgcacccgcacccgccccagcgcctgacgcagctccacaggagagcgctgaacagggcgccaaccaaggccagcggggacaggagcctctggcggatcagttacattctgggatcagtggccggccggcggccggcacggccgccgcctctgctaatggggcagcaattaaaaaactcagtggccccttaatatccgacttttttgccaagagaaagcgttcagcacccgaaaaaagttccggagatgtgcccgcgccatgtccaagccccagcgctgcgcctggcgtgggcagtgtcgagcagaccccccgcaagaggttgcggtag

SEQ ID NO: 14794 - DNA, 918 bp, synthetic construct
  misc_feature 1..918: note = Description of Artificial Sequence: Synthetic coding sequence
  source 1..918: mol_type = other DNA
atggaacgcctcgtggccaggggaacttttcccgtcctcgtccggacgtccgcctgcagatcattatttggcccggtcgaccacgaagagctttctagggagcttcaggcaaggctggccgaactgaacgctgaagaccagaatcggtgggattatgatttccaacaggatatgcctttgcggggtcctgggaggctccaatggaccgaggtagattccgattccgtgccagcattttatagagaaacagtccaggtcggtcgatgccgactgctgctggcaccacgcccagtcgctgtggccgtggccgtgagccctccccttgaaccagctgctgaatcactggatgggctggaggaagctccagaacaactgcccagtgtgccggtccccgccccagccagtacaccacctcccgtgccagttctcgccccggctccagcccctgcccccgcgcccgtcgccgctcccgtggcagctcctgtggccgtcgccgtcctcgcacctgcacccgcaccggcacctgctcccgcacccgcccccgcccctgtagccgcacccgcaccagcacccgctccagcacctgcccctgcccccgctccagctccggcccctgacgctgctcctcaggagtccgccgaacaaggcgcgaaccaggggcagcgtggacaggagccactcgccgaccagttgcactccggaatctcggggagaccggcggctggtacagctgccgcaagtgccaacggggccgctattaagaagctgtctgggcctctcattagcgatttctttgctaagagaaaacgctcagccccggaaaaatcctcaggtgatgtgcccgcaccgtgccccagcccttccgcagctccgggagtcggctccgtggagcagaccccacggaagcgtttgcgttag

SEQ ID NO: 14795 - DNA, 504 bp, synthetic construct
  misc_feature 1..504: note = Description of Artificial Sequence: Synthetic coding sequence
  source 1..504: mol_type = other DNA
atggaacccgctgcgggctcctctatggaacctagcgccgattggctggcaaccgctgcagcaagaggtagggtggaggaggtgagagcacttcttgaagccggtgccctgccaaatgcccccaattcttacggtcgccggcctatccaggtcatgatgatgggttctgctagggttgccgagttgttgcttctgcacggcgcggagcccaactgtgccgatccagccaccctgactcgtcccgtccacgatgcagctcgtgaaggcttcttggatactttggtcgttttgcatagggccggtgcccggctggacgtccgagacgcctggggccggctgcccgtggacctggctgaggagttgggacacagagacgtcgcccggtatctgagagctgctgctggtggcacccgaggcagtaatcacgctcgaatcgatgccgctgaaggcccctcggaaatgattggtaatcacctgtgggtctgtaggagcaggcatgcttag

SEQ ID NO: 14796 - DNA, 471 bp, synthetic construct
  misc_feature 1..471: note = Description of Artificial Sequence: Synthetic coding sequence
  source 1..471: mol_type = other DNA
atggagcctgctgccggctcctcaatggagccaagtgcagactggctagccacagcggctgctaggggccgcgtagaggaggttagggctctgcttgaggcaggcgccctgcccaacgcacctaacagctatggccgccgcccaatccaggtgatgatgatgggtagcgctagagtggcagagcttctgctgcttcatggggccgagcccaattgtgccgaccccgctacactaacaagacctgtgcacgacgcggcccgggaaggctttctcgacacgttggtcgtgttgcaccgtgcaggggcaaggttggacgtgcgggacgcatggggcagacttccagtggaccttgccgaagagctgggtcatcgagatgtagcccgctacctccgggcagctgccggcggcaccagagggagcaatcatgcccgaatcgatgctgcagagggtccctcagacatcccagattag

SEQ ID NO: 14797 - DNA, 522 bp, synthetic construct
  misc_feature 1..522: note = Description of Artificial Sequence: Synthetic coding sequence
  source 1..522: mol_type = other DNA
atgggcaggggacgctgtgtgggcccttccctgcagttgcgcggacaggagtggaggtgtagcccgttggttcctaaaggaggtgctgctgccgcagagttgggtcctggtggaggcgaaaatatggttaggcggttcctcgttaccctcagaatacgtagggcatgcggcccaccccgagtgcgggtcttcgtcgttcatatcccaaggctcacgggggaatgggctgcccctggagctcccgcagccgtcgcacttgtgctcatgctgctccgatcccaacgattgggtcagcagcctcttccccggcgacccgggcacgatgatggacagaggccatcagggggcgcagccgccgcaccaagacgaggcgcccagctgcgccggcctcggcactctcaccctacgcgcgcacgacggtgcccgggcggcctgcccggccacgcaggtggggctgcaccaggccggggggccgcaggcagggctcgatgcctgggcccaagcgcacgtggtcctggttag

SEQ ID NO: 14798 - DNA, 504 bp, synthetic construct
  misc_feature 1..504: note = Description of Artificial Sequence: Synthetic coding sequence
  source 1..504: mol_type = other DNA
atggagccagccgcgggctccagtatggagccatctgccgattggctggccacagccgccgcacgtgggagggtcgaagaagtgcgagcactcctggaagcaggggcacttcctaacgcccccaatagttacggcaggcgccccattcaggttatgatgatgggatctgctagggttgccgagctccttctcctgcatggtgctgaacctaattgtgccgatccggctacactcacgcggcctgtccatgatgccgcccgagagggctttcttgacactttagtggtattacatagagccggcgctcgactggacgtgcgggatgcctgggggcggttgcccgtggacttagctgaagagttaggccatcgcgatgttgccaggtatctgcgtgcggctgcgggaggaactaggggctctaaccacgctagaatcgacgctgcggagggcccttccgaaatgattggcaaccatctgtgggtttgcagatctcgacacgcgtag

SEQ ID NO: 14799 - DNA, 399 bp, synthetic construct
  misc_feature 1..399: note = Description of Artificial Sequence: Synthetic coding sequence
  source 1..399: mol_type = other DNA
atggtcaggcgctttctggttacacttcgcattcgtagagcttgtgggcccccaagggtgcgcgtgtttgtggtgcatatccctaggctaacaggagagtgggccgccccaggcgcccctgccgctgtagctcttgtactgatgctactgcggtctcagcggctggggcaacagccccttccgcgccgacccgggcacgacgatggccagcgcccctcaggtggggccgcagccgccccaaggagaggggcccaactgagaagaccacgccatagtcaccccaccagggccagacgatgccctggcggtctgcccggccacgctggcggcgctgcacccgggagaggggcagccggacgcgcccggtgcctgggcccgagtgcccggggcccaggctag

SEQ ID NO: 14800 - DNA, 417 bp, synthetic construct
  misc_feature 1..417: note = Description of Artificial Sequence: Synthetic coding sequence
  source 1..417: mol_type = other DNA
atgcgtgaagagaataaggggatgccatccggcggcggctctgacgaagggctggcctctgccgctgcccgcggtctggtggaaaaggtgagacagttgcttgaagcgggggcagatccaaacggggtcaaccgttttggccgcagggccatccaagtcatgatgatggggagcgcaagggtagcggaactccttcttctccatggggcagaacctaactgcgccgacccggcgacactaaccaggcccgtccacgacgctgccagggaggggtttctggatactctggtcgtgctgcaccgtgctggcgcccggctggacgtgcgagatgcctggggccgcttacccgtggacttagccgaagagcgaggccaccgagatgtcgctggctacttgcgcacggcaactggtgactag

SEQ ID NO: 14801 - DNA, 237 bp, synthetic construct
  misc_feature 1..237: note = Description of Artificial Sequence: Synthetic coding sequence
  source 1..237: mol_type = other DNA
atgcgcgaagaaaacaagggtatgccctctggagggggcagcgacgaggggctcgccagcgctgctgccagaggactggttgaaaaagttagacagctcctggaggcgggcgccgaccccaatggcgtgaatcggttcggcaggcgcgccatacaggtggctggcgcacccgggccacgacggcagggggcgagagaaagaggtgcccggcccagacggatcggggcaggcacctag

SEQ ID NO: 14802 - DNA, 237 bp, synthetic construct
  misc_feature 1..237: note = Description of Artificial Sequence: Synthetic coding sequence
  source 1..237: mol_type = other DNA
atgcgcgaggagaacaaaggaatgcccagtgggggcggaagcgatgaggggctcgccagcgctgcagctagaggtttagtggagaaagtgaggcaattgctggaagctggagcagaccccaatggagttaaccgcttcggtcggagagccatccaggttgcaggggcccccggtcctagaagacaaggagccagagagaggggcgccagacctcgtaggatcggagccggaacctag

SEQ ID NO: 14803 - DNA, 507 bp, synthetic construct
  misc_feature 1..507: note = Description of Artificial Sequence: Synthetic coding sequence
  source 1..507: mol_type = other DNA
atggccgagccttggggaaacgagctagcttcggcagctgcgcgcggggatttggagcagcttacttccttgttgcagaataacgtgaatgtgaatgctcagaatgggttcggtcgaactgctctgcaagtgatgaagctgggaaaccctgaaatcgctaggcggctcctcctgcgaggtgcaaacccggatcttaaagaccgaacgggcttcgcagtgatccacgacgccgcgcgagccggattcttggacacgttgcagaccctcctggaatttcaggctgacgtaaacatcgaagacaatgagggcaacctgccactgcacctggccgcaaaagaaggacacctgagagtggtcgagttcctggtgaagcatactgccagcaacgtggggcaccggaatcataaaggggataccgcatgcgatctggcccggttatatggcaggaatgaggtggtttctttaatgcaagcaaatggggccggaggagcaaccaacctgcagtag

SEQ ID NO: 14804 - DNA, 507 bp, synthetic construct
  misc_feature 1..507: note = Description of Artificial Sequence: Synthetic coding sequence
  source 1..507: mol_type = other DNA
atggccgaaccatggggaaatgaactggctagcgccgccgcacgcggcgatctagaacagttaacctccctgctgcaaaacaatgtgaatgtcaatgcccagaacgggtttggacgaaccgccctgcaagtgatgaagctaggcaatccagagattgcccgtcggctcctgctgcgcggtgctaaccccgatttaaaggaccgtaccgggtttgctgtcattcatgacgcagccagggctggtttcttggatactctccagacactcctggaatttcaggccgatgtaaacatcgaagacaacgaaggcaatctgcctctacatctggccgccaaggagggacacttgagagtggtggagttcctggtgaagcataccgcatcaaacgtcggccacaggaatcataagggtgatacagcttgcgatctggctaggctgtacgggagaaatgaggtggtgtctcttatgcaagccaatggtgcagggggtgcaacgaacctgcagtag

SEQ ID NO: 14805 - DNA, 507 bp, synthetic construct
  misc_feature 1..507: note = Description of Artificial Sequence: Synthetic coding sequence
  source 1..507: mol_type = other DNA
atggcagaaccttggggcaatgagctcgcctcagctgcagcacgcggtgaccttgagcaactgacatcccttctgcagaataacgtgaacgtaaatgcgcagaacggtttcggtcgcacagctctgcaggtcatgaagctcggaaatcccgagattgccagacgtctgctcttgcgtggagccaacccagatttgaaggaccggacagggtttgcagtgattcatgacgctgctcgtgccggcttccttgacactctccagactctgctcgagtttcaagctgatgtaaacatcgaagacaatgagggaaatctccccctgcatttggcagcgaaagaaggacacctgcgagtcgtggaatttcttgtgaagcacacagcctctaacgtcggacaccgcaaccacaaaggagataccgcctgtgacttagctaggctgtacggaaggaatgaggtagtcagcctaatgcaagcaaatggtgctggcggcgcaacaaatttacagtag

SEQ ID NO: 14806 - DNA, 501 bp, synthetic construct
  misc_feature 1..501: note = Description of Artificial Sequence: Synthetic coding sequence
  source 1..501: mol_type = other DNA
atgctcctggaggaggtacgagccggggaccgtcttagcggggcggctgctaggggagatgtgcaagaggtacggcgccttctccacagagagctggtccaccccgatgctctgaaccgctttgggaaaaccgcattgcaagtcatgatgttcgggtctactgccattgcgctggaactgttgaaacagggggcatctcccaacgtgcaggatacatcgggtacgtctcccgtgcacgatgccgcccgcactgggttccttgacacgcttaaagtgcttgttgagcacggagcggatgtgaatgtgcccgacggcacaggtgctctcccaatacatctggccgtacaggagggacatacggccgtggtctcctttttggcggcagaatctgacttacaccgcagggacgcccgtggcttgacacccctggagttggccctgcaacgcggtgcacaggatctagtggatattttacaggggcacatggtggcccccctgtag

SEQ ID NO: 14807 - DNA, 501 bp, synthetic construct
  misc_feature 1..501: note = Description of Artificial Sequence: Synthetic coding sequence
  source 1..501: mol_type = other DNA
atgttgcttgaggaggtacgggccggagaccgactatccggggccgccgcaagaggtgacgttcaggaagtccggcggttgcttcaccgagagctagttcacccagacgctctgaacaggtttggtaagaccgcactacaggttatgatgttcggatccactgcgatcgcgctcgaactgctgaaacagggggcatccccgaacgtacaagacacctcaggaacttcaccagttcatgacgccgctaggacgggcttcctcgatactcttaaagttttggtcgaacacggtgctgacgtcaatgtgccagatgggactggggccctgcccatacaccttgccgtgcaggaggggcacaccgctgtggttagttttctggctgcagagtccgaccttcaccggcgcgatgctcgggggctgacccccctggaattggccttgcaacggggggcccaggacctggtggacatcttacaggggcacatggtggccccactgtag

SEQ ID NO: 14808 - DNA, 639 bp, synthetic construct
  misc_feature 1..639: note = Description of Artificial Sequence: Synthetic coding sequence
  source 1..639: mol_type = other DNA
atgaagcctccctcgagcattcagaccagcgaatttgattcctcagatgaagagcctatagaagatgagcaaacccctatccacatatcttggttatcattgagccgggtaaactgcagccagttcctcggactttgcgctctgccaggctgtaaattcaaggacgtgcgcagaaatgtccagaaggatactgaagagttgaagagttgcggaattcaggacattttcgtgttctgcacacgcggcgagcttagtaagtaccgtgtccctaatctactcgacttataccagcagtgtgggataataacgcaccatcatcctatagccgacggcggaacacccgacattgcttcttgctgcgagatcatggaggagcttacaacttgcctgaagaattacagaaagactctgatccactgctatggtgggctcggccggtcatgtctggtagccgcctgcctcctcctgtatctcagcgacactattagccccgaacaggccatcgatagcctgcgggatttgaggggcagtggtgcaatacagaccattaagcagtacaactatctgcacgaattcagagacaagttagccgctcatctgagcagtcgagattcgcagtctagatctgtgtctcgatag

SEQ ID NO: 14809 - DNA, 501 bp, synthetic construct
  misc_feature 1..501: note = Description of Artificial Sequence: Synthetic coding sequence
  source 1..501: mol_type = other DNA
atgaacccctgctgcaaatttaaggacgtgcgcagaaacgtgcagaaggacactgaggagctgaagagctgtggcattcaggacatatttgtgttctgtacgaggggagagttgtcaaagtaccgcgtgccaaatcttctggacctttaccaacagtgtggcattataacacatcaccacccaatcgctgatggcggaacccccgacatcgcctcttgttgtgagataatggaggagctcaccacttgcctcaagaactatcgtaaaaccctgatacactgttatggaggccttgggaggtcttgtcttgtcgctgcgtgcttacttttgtacctctcagacacaatctctcccgagcaggcgatcgacagtctgcgtgatctgcgcggatcaggagctatacaaaccataaagcagtacaattatttgcatgaatttcgggataaactggctgcacatttgtcctcccgagactcccagtcccgttcagtttctcgatag

SEQ ID NO: 14810 - DNA, 210 bp, synthetic construct
  misc_feature 1..210: note = Description of Artificial Sequence: Synthetic coding sequence
  source 1..210: mol_type = other DNA
atgaagcctccctcttccatacagacctcagaatttgactcaagtgatgaagaacctattgaggatgagcagacccctatacacattagttggctctccctcagccgggtcaattgtagccaattccttgggctgtgcgctttgcccggctgcaagtttaaagacgtgcggaggaatgttcagaaagagaagaagaagaagaagaaatag

SEQ ID NO: 14811 - DNA, 624 bp, synthetic construct
  misc_feature 1..624: note = Description of Artificial Sequence: Synthetic coding sequence
  source 1..624: mol_type = other DNA
atgaagccaccatcttcgatccagacatccgagttcgattcgagcgacgaagagcctatcgaggatgagcaaactccgattcatatttcctggttgagtctctcacgagtcaactgcagtcagtttttaggactgtgtgccctccctgggtgcaaattcaaggacgttagacgcaacgttcagaaagacaccgaagagctgaagtcctgcggcattcaagacatcttcgtgttttgcacacgaggcgagctctccaaataccgggtgcccaatctcctggatttataccagcagtgcggaatcatcacgcaccaccatcctatcgccgacggggggaccccagatatcgcttcttgttgtgagatcatggaagagcttaccacatgtttgaaaaatcttttctgctacgggggccttggccggtcatgcctcgttgccgcatgcttgctgctctacctgagcgacacaatctctccagaacaggctattgattccttgagagatctccgggggtcgggagccattcaaaccatcaagcagtacaactatttgcatgaattcagagacaagctcgccgctcatctgtcttctcgggactcccaatctaggtccgtctcaagatag

SEQ ID NO: 14812 - DNA, 519 bp, synthetic construct
  misc_feature 1..519: note = Description of Artificial Sequence: Synthetic coding sequence
  source 1..519: mol_type = other DNA
atgaagcccccatctagtattcagacaagctgcaagttcaaggacgttcggcggaacgtacaaaaggataccgaggagttgaagtcctgtggaatccaggacatctttgtgttctgtactcgaggcgagctgtctaaataccgggtcccgaacctgctggatctctaccagcagtgcggcataattactcaccaccatccaatagccgatggcggaaccccggacatcgccagctgctgcgaaattatggaggaactgaccacatgcctcaagaactacaggaagactcttattcactgttacgggggcctcggacggagctgcttggttgctgcatgtctgctgctatacttgtctgataccatcagtccagagcaagccatcgactctctgagagaccttaggggcagtggggccatccagaccataaagcagtacaactacctccacgagttcagggataaactagctgcccatctgtctagcagggatagccagtcgaggagtgtctctagatag

SEQ ID NO: 14813 - DNA, 2871 bp, synthetic construct
  misc_feature 1..2871: note = Description of Artificial Sequence: Synthetic coding sequence
  source 1..2871: mol_type = other DNA
atgtcctctggcctttggagtcaggagaaggtcacctcgccctactgggaggaacgaattttctatctgcttctgcaggaatgctccgtcacagataagcagacacagaaacttctcaaggttccaaagggcagtatcggtcaatacattcaggaccgttccgtcgggcattctagaattccctcggcaaaaggtaagaagaatcagataggtctaaagattctggagcagccccatgcagtgctctttgtcgacgaaaaggacgtcgtggagataaacgagaaattcacggaactgcttctggctatcacaaattgtgaggaacggttctcccttttcaaaaatcgcaacaggctctctaagggtctccaaatagacgtcggctgtccagtcaaggttcagcttcgcagcggagaagaaaaatttcctggagtcgtgcggttccgcggtcccctgttggcagagaggaccgtgtccggaatcttttttggagtggagttgttggaggaggggagaggccagggatttaccgatggcgtttaccaggggaagcagctctttcagtgtgacgaggactgcggggtgttcgtcgcgctggataagctggagctcatcgaggatgatgacacagccctggagtccgactacgctggtccgggtgacaccatgcaggtggagttgcctccgctcgagatcaacagccgggtctcgctgaaggtgggagagacgatcgagagcggtaccgtcatcttttgcgacgttctccccggcaaggaaagtctggggtacttcgtcggggtggatatggacaatccgatcggcaactgggacggtcgctttgacggtgttcagctctgctcgtttgcctgcgttgaaagtactatcctgttgcacattaacgacattatccccgccctgtctgagtcggtgactcaggaacgccgcccgcctaaacttgcatttatgagccgaggggtaggcgataaaggatcaagctcacataataagccaaaggctaccggctctacaagtgaccccggtaacagaaatagatccgagttgttttacacacttaatgggtcctctgttgactctcaacctcaaagcaagtccaagaacacctggtacatagatgaggtcgccgaggatccggccaaaagcctcacagagatctccactgattttgataggtcctcgccccccttacagcccccgcctgtcaactcattgacaaccgagaataggtttcactctctcccattctcgctcactaaaatgcccaacacgaacggctccattggtcatagccccttgtcgttgtccgcccaatccgtcatggaggaattgaatacagcacctgtgcaggagagtccgccactggcaatgcccccaggcaacagtcacgggttagaagtgggctccctcgcagaggtcaaggagaacccaccattctacggggtgattagatggattgggcaaccacctggactcaacgaggttcttgctgggctggaactcgaggacgaatgcgctggatgcaccgatggcacattcaggggcacaaggtacttcacctgcgcccttaagaaggctttattcgtgaagctgaagagctgtaggccagatagcagattcgcctccctacaacccgtttccaaccagatagagaggtgcaatagtctagcatttggaggctatctgagtgaagtagtagaggagaatactcctcctaagatggaaaaggagggtttggagatcatgattggtaaaaaaaaaggcattcaaggccattacaactcttgctacctcgattccacgctgttctgcctcttcgctttctccagcgtgctggatacagtcctgctaaggccaaaggaaaagaacgacgtagaatattactcagaaacgcaggagcttcttagaaccgagattgtgaatcctcttcgcatttacggatacgtgtgtgcaaccaagattatgaagctgcgtaagatcttagagaaagtggaagcagccagcggctttaccagcgaagagaaggatcctgaagaattcctgaatatcctcttccaccacatcctgcgagtggagcctcttcttaaaataaggtctgctggtcagaaagtgcaggactgctacttttatcagatcttcatggaaaaaaacgagaaggtgggggtgccgacaatccaacagctgttggaatggagtttcatcaactccaatctgaaattcgctgaggcaccatcctgtctgattattcaaatgcctcgtttcggaaaggactttaaactgttcaaaaaaatcttcccctctttggaattgaatataaccgacctccttgaagacactccccgacaatgccgcatctgcggcgggctcgcaatgtacgagtgccgcgagtgttacgacgacccggatattagcgctggaaagattaaacagttttgcaagacctgtaacacccaggttcatttgcaccctaagaggcttaaccacaaatataaccccgtctcattacccaaggacctaccagattgggattggcggcacggctgcatcccatgtcagaacatggaactttttgcggttttatgcatcgagacatcccactatgtggcttttgtcaaatatggcaaggacgattcagcctggctctttttcgattctatggcagacagagacggaggtcagaatggctttaacataccacaagtgaccccttgtcctgaggtgggggaatacctcaaaatgagtctggaggatttacactccctggattccaggagaattcagggttgtgcacggcgactcttatgcgacgcctatatgtgtatgtatcagtcccctaccatgtctctgtacaaatag

SEQ ID NO: 14814 - DNA, 2862 bp, synthetic construct
  misc_feature 1..2862: note = Description of Artificial Sequence: Synthetic coding sequence
  source 1..2862: mol_type = other DNA
atgtcaagtggtctttggagtcaggaaaaggtaacctctccgtactgggaagagaggatattctacctactgctgcaggagtgctccgtcacagataagcaaacacagaagttgttgaaagtccctaaggggtccatcgggcaatacatacaggacagatctgttggtcacagtagaatcccttctgccaaggggaaaaagaatcagattggactgaagatattggagcagcctcatgctgtgctttttgtcgacgagaaagacgtcgttgagattaatgagaaatttacggaactccttttggccatcaccaactgcgaagaaaggttctctctgttcaaaaatcgtaatagacttagcaaaggcctgcagatagacgtgggctgcccagtcaaagtgcagctccgctctggtgaagagaaattccctggcgtagtgagatttagagggccactgctcgctgagagaaccgtcagtggcattttcttcggagtggagctgctagaggaaggacgtggccaagggtttacggacggagtatatcaggggaaacaactttttcagtgtgacgaggattgcggtgttttcgtcgccctggataaactagaactgatcgaagatgacgatacagccttggagtcagactacgctgggcccggcgacactatgcaggtagagttgccaccactcgagatcaattctcgggttagcctgaaagtcggcgagaccattgaatccggaacggtcattttctgcgatgtcctgccaggtaaggagagtctggggtattttgttggggtcgacatggataaccctataggcaattgggatgggagattcgatggtgttcagctttgttcattcgcctgtgtggagagcaccatcttactgcatattaatgacatcatccctgaatcagtgacacaggagcgtaggcctcctaaactggcattcatgagccgaggtgtgggggataagggaagctcgtcccacaataaaccgaaggccactggctcaacctcggatccagggaatagaaataggagtgagctgttttatactcttaatggatcttccgtcgacagccaaccccagagtaagtccaaaaacacatggtacatcgatgaagtggcagaggaccccgcaaagtcactaacggagattagtaccgacttcgaccgctccagtcctccgctccagcctcctccggttaactctcttactacagagaaccgcttccactctcttccctttagtctgacaaaaatgcccaacaccaatggtagcatcggacatagcccactgtccctgtctgcacagagcgttatggaggaattaaatacggcacccgtccaggagagcccgccactcgccatgcctcctgggaattcccacggacttgaggtgggcagcttggccgaggtgaaggaaaatccacccttctacggggtaatacgctggatcggccagcctcccggcttgaatgaagtactcgccggattggagctggaagacgagtgcgctggatgcacggacggaacatttcggggaaccaggtattttacctgcgctctcaagaaagctttgtttgtgaaactgaagagttgtcgtcccgattcgcggttcgcttccctccagcccgtttcaaatcagattgaacggtgtaactctctggcattcggtggctacctcagtgaggtggtggaagagaacacaccgccaaaaatggagaaagaagggctggagattatgatcggcaaaaagaagggaattcagggacattacaattcttgctatctggattcaacactgttttgtttgttcgctttctctagcgtccttgatactgtactcctgcgccccaaagaaaaaaacgacgttgagtattacagtgaaacacaggaattgctcaggacagagatagtaaatccgctgaggatatacgggtacgtgtgtgcgaccaagatcatgaagctgcgtaaaatcctggagaaagtggaagctgcttccggtttcacctcagaggaaaaagatccagaagaattcctcaacatcctgttccaccatatcttacgggtggaacccctcttaaagatccgatccgctggtcagaaagttcaggattgttacttctaccagatcttcatggaaaaaaatgagaaggtcggggtacctacgatccaacagctccttgagtggagcttcataaatagtaatctgaagtttgcagaggcaccctcttgcctgatcattcaaatgccaagattcggtaaagacttcaagctgtttaagaaaatttttccaagcctggagctgaacatcacagacctgttggaggacaccccccggcagtgtcgcatttgcggcgggttagccatgtacgaatgtcgcgagtgttatgacgatccagacatcagcgccggcaaaatcaaacaattctgtaagacctgcaacacgcaggtccatctgcatccaaaacgactgaatcacaagtataacccggtgtcattgcccaaagatctgccggattgggactggaggcatggttgtatcccatgccagaatatggaactctttgctgtactgtgcatcgagacatctcattatgtcgcatttgttaaatacgggaaggatgattcggcgtggctgtttttcgatagcatggccgaccgcgacggtggccagaatggatttaacataccccaggtcactccgtgtcctgaggtgggagagtatctcaagatgtcactagaggacctccatagccttgacagcagaaggattcagggctgcgctcggcggctgctctgtgatgcttacatgtgcatgtaccagagcccaacaatgtcactttataagtag

SEQ ID NO: 14815 - DNA, 2862 bp, synthetic construct
  misc_feature 1..2862: note = Description of Artificial Sequence: Synthetic coding sequence
  source 1..2862: mol_type = other DNA
atgtccagcgggctgtggagccaggaaaaagtgacaagcccctattgggaggaaaggatcttttacctgctgctacaggaatgttctgtaactgataaacagacacagaaattgttgaaagtgccaaaaggctccataggtcaatatattcaagacagaagcgtcggccactcccgaattccttctgccaaggggaaaaaaaatcagatcgggcttaaaatactcgagcagccacacgccgtgctattcgtagatgaaaaagatgtcgtggagataaacgagaagttcactgagcttctccttgctatcaccaactgtgaggaacggttctctttgtttaagaaccggaacagactcagcaagggcttgcagatcgatgtcggctgtcctgtgaaagtccagcttcggtcaggcgaagaaaagtttcccggagtagtaagatttcgaggtccactgttggccgagcgcactgtttccggaattttcttcggggtggagctcctggaagaagggaggggccagggtttcacggacggtgtatatcaggggaaacaactgttccagtgcgacgaagactgcggggtatttgtggccctggataagttggagcttatagaagatgatgacactgctctggagagtgactacgcaggaccgggagatacaatgcaggtggagttaccaccactcgagatcaacagcagggtttcactaaaagtcggggagacaatagaatcaggcaccgtgatcttttgtgacgtattacccggcaaagagagcctgggatattttgtgggggtggatatggacaaccccatcgggaactgggatggacgcttcgacggagtccaactgtgctcatttgcctgcgtggagtccactatacttctgcacattaacgatataattccagagagcgtgacacaagagagaaggcctccaaagttagccttcatgtcccgaggcgtgggagacaagggcagcagctcacacaacaagccaaaagctacggggagtacttcagaccctggcaatagaaaccgatcggaactattctatacgctgaatgggtcatccgtcgacagccaaccacaatcaaagtctaagaatacttggtacattgacgaggtcgcggaagaccccgccaagtccctcacagagatttccaccgactttgatcgaagctcacctcctcttcagcccccacccgtgaattccttgactactgaaaataggttccactccctgcccttctcactcaccaaaatgccgaacactaacgggtctattggacatagcccgctttctttgtcagcacaatctgtaatggaggagctgaacactgcgccagtgcaggaatctcccccattagccatgcccccaggcaattcgcacgggctggaggtaggaagcctagcagaggtgaaggaaaatccaccattctacggggttatcaggtggatcggccagccgcctggattgaatgaggtgctagctgggctcgaactcgaggacgaatgcgcaggctgtactgatggaacctttcggggcaccagatattttacttgcgcactgaaaaaggcactgttcgtcaaactaaagagctgccgccctgacagccggtttgcctccctgcaaccagtaagtaatcagattgagcggtgtaattcactcgcatttggcgggtacttgagcgaagtagttgaggagaatacacctcctaagatggagaaagagggcctggagatcatgatcggaaaaaagaagggtatccaggggcactacaattcatgttacctggacagcacactgttctgcttatttgcctttagctcagttctggacaccgtactcctgagaccaaaggagaagaacgacgtggagtactattccgagacccaggagctcctgcgtaccgaaattgtcaatcccctgagaatatacggctatgtctgcgcaaccaaaatcatgaagctgaggaaaattctggagaaggtggaggctgcttcggggttcacatcagaggaaaaggatcccgaggagtttctgaatatcctttttcaccacattctcagggttgaacctctcctgaagatccggtccgcaggccagaaggtgcaagactgttacttttatcagatctttatggagaagaatgaaaaggtgggcgtgccgacaatacagcaactgctggagtggtcattcattaatagcaatctgaaattcgccgaggccccctcttgcttgataattcaaatgcctcggtttggtaaagacttcaagctgttcaagaagatattcccctccctggagctgaacattactgacctcttggaagacaccccgagacagtgccggatttgcggcgggctggcaatgtacgagtgccgcgagtgttatgacgaccctgatatttccgccggaaagattaaacagttctgtaaaacctgtaatacacaggtgcatctgcacccaaagagactgaatcataaatataaccctgtttcgttgcccaaagatctgccagactgggactggaggcatggctgtattccctgccagaacatggaactcttcgcggtgttgtgcatcgagacctcccactacgtggcattcgtgaagtacggaaaagatgactcagcgtggctttttttcgacagtatggcggacagagacggtggccaaaatggattcaacatcccccaagttacaccttgccctgaggtcggggaatacctgaaaatgtcactggaggacctgcattctctggactccaggcgaatccagggatgtgcccgccggctcctgtgcgatgcctacatgtgcatgtatcagagccctacaatgagcctgtataaatag

SEQ ID NO: 14816 - DNA, 2871 bp, synthetic construct
  misc_feature 1..2871: note = Description of Artificial Sequence: Synthetic coding sequence
  source 1..2871: mol_type = other DNA
atgagctcaggcctgtggtcccaggaaaaggtgacgagcccttactgggaggagagaattttctacctcctcttgcaggagtgctctgtaacggacaagcagacgcaaaaacttctgaaggtccctaagggcagcattggacagtacatccaagataggagtgtcgggcattctagaatcccttctgcgaaggggaaaaagaaccagatcggcctgaagatacttgagcagccacacgcagtcctcttcgtagatgaaaaagatgttgtcgagatcaacgagaaattcacggagttgctgctggccatcacaaactgcgaggagcggtttagccttttcaaaaaccgcaacaggctctctaaaggcctgcagatcgacgtgggatgccctgtcaaggttcaactacggtcgggcgaagagaagtttcccggggtagtgagattccggggcccgctcttggccgaacgaactgtttcaggtatttttttcggggtggaactgcttgaagaaggccgaggccaggggttcaccgatggagtctaccaaggtaagcagctgttccagtgcgatgaagactgtggggtgtttgtggcactggacaaactcgaactgattgaggacgatgacacagccctggaaagtgactacgccgggcccggggacaccatgcaggtcgagcttcctcccctcgagatcaatagtcgtgtgtcgttaaaggtcggtgaaacaatcgaatctgggacggtgattttttgtgatgtgctccctgggaaggaatcgttaggatatttcgtgggcgtggatatggacaatcctataggcaactgggacgggcggtttgacggggtgcagctctgttcatttgcatgcgtagaaagcaccattcttctgcatatcaacgacatcatacctgcagtctcagagagtgtgacacaagaacggcgaccccccaaactcgcctttatgtcccggggagtgggggacaaggggtcatcttcccataacaagcccaaggccacggggagcacaagcgacccaggcaaccgcaacagaagtgagttgttctatactttaaacgggtctagtgtggatagccagccccaatccaaatcaaaaaacacatggtatatcgatgaggtcgcagaagatcccgcgaagagcctgactgaaatttccactgactttgatcgaagcagtcctcctctgcagcccccccccgtgaactctttgacaacagagaatcgctttcattctctgcctttcagtctcacgaaaatgccgaacacaaacgggtcaatcggtcactcacctctatcattgtccgcgcaatcagtgatggaggaattgaatactgccccagttcaagaaagtccccccctcgctatgccccctggaaacagccacggtctggaagtgggctcactcgctgaggttaaagaaaaccctcctttttatggcgtgattaggtggatcgggcagccaccaggtctgaacgaggtattagcaggcctggagctcgaggacgagtgcgcgggctgtacagacggcaccttccgaggaacccgatactttacgtgcgcgctcaaaaaggccttatttgtgaaactgaagagttgtcgccctgacagccgcttcgcaagcctccagcccgttagcaaccagatagagaggtgcaactccctggcattcggaggatatctgtccgaggtggtagaagagaacacacctcccaaaatggaaaaggaagggctggagatcatgatcggcaaaaaaaagggcatccagggccactacaattcatgctacctggattcgaccctgttctgtctttttgccttttcatccgttctcgatactgtgttacttcgcccgaaagagaagaatgatgttgagtattacagtgagacccaggagctgctccgcacagagatagtaaacccgctccgcatttatgggtacgtgtgcgcaacaaagattatgaaacttaggaaaattcttgaaaaggtggaagccgcgtcagggttcacatcagaggagaaagaccccgaggagttcctaaatatcctctttcaccacattctacgtgtggaacctcttctgaaaattcgctccgccggccagaaggttcaggactgctacttttaccagatctttatggagaagaacgaaaaggtgggcgttccaacgatccagcagttgctcgaatggagctttattaatagcaatctcaagttcgcagaagccccaagttgccttatcatacagatgcccaggtttggaaaggatttcaagcttttcaagaaaatattcccttcacttgaactgaacatcaccgacttgctagaagacaccccaagacaatgccggatctgcggaggactggccatgtacgagtgccgggaatgctatgacgacccagacatttctgctgggaaaattaaacagttctgcaagacctgcaacactcaggtgcatttgcacccaaaacgcctaaatcataaatacaatcctgtgagtttgccgaaggatttacccgactgggactggcgtcacggttgtatcccctgccagaacatggagctgttcgcagtgctgtgcattgagacctcccactatgtggccttcgttaaatatgggaaagacgattcggcttggctcttctttgacagcatggctgatagggacgggggccagaacggattcaatatcccccaggtgacgccctgtcccgaggtgggggagtacctgaagatgtcgctagaagatctacacagcctcgactcccgccgcattcaaggttgtgcccgccggctcctctgcgatgcttatatgtgcatgtaccagagccccacaatgtccctctataaatag

SEQ ID NO: 14817 - DNA, 450 bp, synthetic construct
  misc_feature 1..450: note = Description of Artificial Sequence: Synthetic coding sequence
  source 1..450: mol_type = other DNA
atggccaggtcaaatcttccactcgccctgggactggccttagtggcgttttgcttgcttgcgctgccaagagatgcccgggcacgcccccaagagaggatggtcggcgagctcagggacctgtcccctgatgacccacaggtgcaaaaggccgcacaggcagcagttgcaagctataatatgggaagtaactccatctattactttcgagatactcacataataaaagcccaatctcaactcgtcgccgggattaagtattttttgacaatggagatgggttcaaccgactgtcgtaaaactcgcgtgaccggtgatcacgtggacttgacaacatgccctctcgctgcaggggcacagcaggaaaagctgaggtgtgattttgaagtgctggtggtgccctggcaaaacagtagccagctgttgaagcataattgcgtgcagatgtag

SEQ ID NO: 14818 - DNA, 504 bp, synthetic construct
  misc_feature 1..504: note = Description of Artificial Sequence: Synthetic coding sequence
  source 1..504: mol_type = other DNA
atgctgcccgagaaggctttacatggacacccccagctccctcgtaccgtccccaccagggcagcaatgagagcggccggaaccctgctggcattttgttgccttgtgctgtcgaccactggcgggcccagtccggacacttgttctcaggacctgaacagtcgagtgaagcccggatttcccaaaacgattaaaacaaatgatcccggtgtgctacaggccgctcgttactctgtcgagaaattcaataactgcactaacgatatgtttctattcaaggaaagccgcatcacccgggccctggtccagattgtgaagggcctgaagtatatgctggaggtggagatcggtcgtacaacatgcaaaaagaaccagcacctgcgcttggatgattgcgacttccagacgaaccacactctcaaacagactctctcctgctacagtgaagtgtgggtcgtcccctggctccaacacttcgaggtgcccgtgctccgctgtcactag

SEQ ID NO: 14819 - DNA, 438 bp, synthetic construct
  misc_feature 1..438: note = Description of Artificial Sequence: Synthetic coding sequence
  source 1..438: mol_type = other DNA
atgcgggcagctggcacacttctggctttctgctgtttggttctatccacaaccggggggccctcaccggacacttgttctcaggacctgaattcaagggtgaagcctgggtttcctaaaacaataaagactaatgatccaggcgtattacaggctgcaagatacagcgtcgagaagtttaataactgcaccaacgacatgttcctgttcaaggagtctagaattacacgcgcgctcgtccagatagtgaagggcctcaaatacatgctcgaggtggagatcgggcggacgacttgtaagaaaaaccagcatttgcgcctggatgattgtgacttccagacaaatcatacactgaagcagactctctcctgctactctgaagtatgggtggtaccctggttacagcactttgaagtgcccgttcttcgctgtcattag

SEQ ID NO: 14820 - DNA, 453 bp, synthetic construct
  misc_feature 1..453: note = Description of Artificial Sequence: Synthetic coding sequence
  source 1..453: mol_type = other DNA
atgctcggcgcggctctgcggcggtgcgctgttgcagcaactacaagggcagaccccaggggcctcctccacagcgccaggacacctgggcctgctgtcgccatacagtccgttcggtgctattcccacgggtcgcaggagacagacgaggagtttgatgctcggtgggtcacatatttcaataagcccgatatcgacgcctgggagttacgaaaaggaatcaacacgctggttacctatgacatggtccctgagcctaagataatcgatgcagctttgcgcgcatgccgcagactcaatgactttgccagcactgtgcgcattctagaggtagtgaaggacaaggctgggccacacaaggagatttacccatacgtaattcaggaactgcgccccacactgaacgagctgggaatctcaacaccagaggaactaggcctggacaaagtctag

SEQ ID NO: 14821 - DNA, 318 bp, synthetic construct
  misc_feature 1..318: note = Description of Artificial Sequence: Synthetic coding sequence
  source 1..318: mol_type = other DNA
atgggcgacgtggagaagggtaagaagatttttattatgaaatgcagccaatgtcataccgtcgagaagggtggtaaacacaagaccggccccaacctccacgggctgtttggaagaaagactggtcaggcccctgggtactcctacactgccgccaataagaacaaggggataatctggggtgaagacacgctcatggagtacctcgagaatccaaaaaaatacatcccaggtacgaaaatgatattcgtcggtattaaaaagaaagaggaaagggcggacctgatcgcctatcttaagaaggccacaaatgagtag

SEQ ID NO: 14822 - DNA, 318 bp, synthetic construct
  misc_feature 1..318: note = Description of Artificial Sequence: Synthetic coding sequence
  source 1..318: mol_type = other DNA
atgggcgatgtcgagaagggcaagaaaatctttattatgaaatgttcacagtgccataccgtcgaaaagggagggaaacacaagaccgggccgaatttacatggactgttcgggagaaaaaccgggcaagcacccggttactcttatactgctgctaacaagaacaagggtatcatatggggcgaagacaccctgatggagtaccttgaaaatcctaagaaatacattccgggtacaaaaatgatcttcgttgggatcaaaaagaaggaagagagggcggatctgatagcttacctgaagaaggctacgaatgagtag

SEQ ID NO: 14823 - DNA, 318 bp, synthetic construct
  misc_feature 1..318: note = Description of Artificial Sequence: Synthetic coding sequence
  source 1..318: mol_type = other DNA
atgggagacgtggaaaaaggaaagaagatctttatcatgaaatgcagtcagtgtcacaccgtggagaaggggggcaaacacaagacaggccccaatcttcatgggcttttcggaaggaagaccggtcaggccccagggtactcttacactgccgccaacaaaaacaaggggatcatctggggcgaggatactctgatggagtacctagaaaaccccaagaagtatatccctggtacaaaaatgattttcgtggggatcaaaaagaaggaagaacgcgccgatctcatcgcatatcttaagaaagcaaccaacgagtag

SEQ ID NO: 14824 - DNA, 306 bp, synthetic construct
  misc_feature 1..306: note = Description of Artificial Sequence: Synthetic coding sequence
  source 1..306: mol_type = other DNA
atgggagatgtggaaaagggcaaaaagatctttatcatgaagtgttctcagtgccacactgtcgaaaagggcggtaaacataagaccggccctaatttgcacggactgtttgggcgaaagactgggcaggcgcctggctatagctacactgccgcgaataagaacaaaggcattatatggggagaggacaccctgatggaataccttgagaatcctaaaaaatacatccctggcacaaaaatgatttttgtaggaataaaaaaaaaggaagaacgggccgatctgatcgcttatctgaaaaagtag

SEQ ID NO: 14825 - DNA, 1632 bp, synthetic construct
  misc_feature 1..1632: note = Description of Artificial Sequence: Synthetic coding sequence
  source 1..1632: mol_type = other DNA
atgggaacgagcctgtcgccaaacgatccttggcccctgaaccccctctctatccagcagactactctgttacttctcctgtccgtgctggccaccgtacacgtggggcagcgactcctccggcagcgccgcaggcagctgagaagcgctcctcccgggcccttcgcctggccactaataggaaacgccgccgcagttggacaagcggctcacctttccttcgccaggctggctcgcaggtatggagatgtgtttcaaatcagattgggctcctgccccatagtggtgctcaacggggagcgggctattcaccaggctctcgtacaacagggaagtgccttcgccgatagacctgccttcgcatcgtttagggttgtttccgggggaaggtcaatggcctttggccactacagtgagcactggaaagttcagcgacgggcagcacattccatgatgcggaacttctttactcgacagcccaggtcacggcaggtgctggagggacacgtgttgagtgaggctcgggagttggtagctctcttggtccggggctcagcagacggggccttccttgacccgagacccctgacagtggtggccgtagcaaatgtaatgagtgccgtttgcttcggatgtcggtattcccatgatgaccccgagttccgtgagctgctttcccataacgaagaatttgggcgaacggtcggggctgggagcctggtcgacgtaatgccgtggcttcagtatttcccgaatcccgtgaggaccgtgttcagggaatttgaacagctgaataggaacttctccaactttatcctcgacaagttcttgagacattgtgagtcattgcgcccgggggccgcccctcgggacatgatggatgctttcattctgtccgctgagaaaaaagctgctggcgacagtcacggcggaggagcaagactggatcttgagaatgtgccggccacgatcaccgatattttcggggcgtcacaggacaccctttcaacagcacttcagtggcttctgctgctgttcaccaggtacccagatgtgcagaccagagttcaggccgaactcgaccaggtcgtcggccgggacaggcttccatgcatgggtgaccagcccaacctaccgtatgttttggctttcctctatgaagcaatgcgattctcttcttttgtgcctgttacaatccctcacgccacaactgcaaacacatcagtgctgggctaccacataccgaaggacaccgttgtgttcgttaatcagtggtccgtgaaccacgacccagtcaaatggccaaacccagaaaatttcgaccccgcccgattccttgacaaggacggcctgatcaacaaggacctgacttcaagggtgatgatttttagcgttggaaaaagaagatgcattggggaggaactgagcaagatgcagctcttcctttttataagtatcctggcgcatcagtgcgactttagggcaaatcccaacgaaccagcaaaaatgaacttttcttatggtcttacaatcaagcctaaatcatttaaggtcaatgtcactcttcgagagagtatggagctgcttgactctgctgtgcagaaccttcaggccaaagagacctgtcagtag

SEQ ID NO: 14826 - DNA, 1632 bp, synthetic construct
  misc_feature 1..1632: note = Description of Artificial Sequence: Synthetic coding sequence
  source 1..1632: mol_type = other DNA
atggggacatctttgtcaccaaacgacccatggcccctgaaccctctttccatccagcaaactacattgctcctattgctgtccgtgcttgcgaccgtccatgtcggtcagcgcctccttcgtcagcggcgtcgtcagctcaggtctgccccaccaggtccattcgcctggccgctgattgggaatgccgcggctgtcggccaagccgcccacctgtcattcgcccgcctcgctcgtagatacggggacgtttttcaaatacggctcgggagctgccctatcgttgtcctgaatggagaacgcgctatccatcaagcgctagtgcaacaaggcagtgctttcgccgataggcccgccttcgcatcttttcgggtggtgtccggaggccggagtatggcgttcggacactattcggaacattggaaagtgcagaggagggccgcgcatagtatgatgagaaattttttcactcgacaaccaaggagtcgccaggtgctggagggccacgtgctctcagaggccagagagctggttgcccttcttgttaggggctcggccgacggggcattcctggaccccaggccattaaccgtggtagccgtggcaaatgtcatgagcgccgtctgctttggctgtcgatactcccatgacgatcctgagtttagggagttgctctcccacaacgaagagttcggccgaacggtgggcgcgggaagccttgtggatgtgatgccctggctacaatacttccctaaccccgtgagaacagtcttcagagagtttgaacagttaaatcgaaacttttctaattttatcctggataagttccttcgtcactgcgagtccctcagaccaggtgcggcccccagagacatgatggacgcattcatcctgtccgctgaaaaaaaagcagccggtgattcacacgggggtggagcacgccttgacttagagaacgttccagcgaccattactgacatcttcggcgcctctcaggataccctgagcacagctctacaatggctgcttctgctgttcaccagatacccggacgtccaaacccgtgtgcaggcagagttggatcaggtcgtcggccgggatcggttaccctgtatgggcgatcagccaaatctgccctacgttctagctttcctgtatgaagctatgaggttctcctcatttgtgcccgtgaccattcctcacgctaccacggccaatacaagtgttcttggttatcacattcctaaagacaccgtcgtgtttgtgaaccaatggagtgtcaatcatgatcccgtgaaatggcctaacccagagaattttgatcccgccaggttcctcgataaggacgggctgatcaacaaggacctgacttcccgcgtgatgatattctctgtggggaaacgaagatgcataggagaagagctttcaaaaatgcaactgttcctgttcatttctatcctcgcccatcagtgcgactttagggccaatccaaacgaacccgccaagatgaatttctcctacggcctgacgattaaaccaaagagcttcaaagtgaacgtaacgctacgagagtcaatggagttgctggattctgccgtgcagaatctgcaggctaaggaaacatgtcagtag

SEQ ID NO: 14827 - DNA, 3399 bp, synthetic construct
  misc_feature 1..3399: note = Description of Artificial Sequence: Synthetic coding sequence
  source 1..3399: mol_type = other DNA
atggagcctgactctctgttagaccaggacgattcctatgagagcccacaggaacgtcccggcagtcgaagatccctccccggcagcctgagtgaaaaaagtccgagtatggagccaagcgccgccacacccttccgcgtcacaggcttcctctcacgtcggctgaaagggtcaatcaagcggaccaaaagccagcctaagttagatcggaaccactccttcaggcacattctgcccgggtttcggagtgctgctgcagcggcggcggataatgagcgctcccacttaatgccccgactcaaggagagcagaagtcacgagtccttactgtcgccatcctccgcggtggaggccttagatctgtctatggaggaagaagtggtgatcaaacccgttcacagttcaatcctgggccaagattactgctttgaggtcaccacttctagtggttcaaagtgttttagttgccggtcagcggcagaaagggataaatggatggaaaatcttagaagggccgtgcaccctaacaaggataatagcagaagggtggagcatatcctgaagctatgggtcatagaggcaaaagatctacctgcgaaaaaaaagtatctgtgtgaattgtgtctcgacgatgtcctgtacgcgaggactacaggcaaactgaaaacggacaacgttttctggggtgagcacttcgagtttcacaatctgccgcctctccggacggttaccgttcacctttatagagagactgacaagaaaaaaaaaaaggaacgaaactcgtatcttgggctcgtgagtctgccagccgccagtgtcgcaggacgtcagttcgtggagaagtggtacccggtagtaacaccaaaccctaaggggggtaagggacctggaccaatgatcaggattaaagcaagataccaaactatcaccatcctacccatggaaatgtacaaggagtttgcggaacatataaccaatcattacctggggctgtgtgctgcacttgaacccattctgtcggccaagacaaaagaggagatggcctctgcgttggttcacatcctccagtcaactggcaaagtaaaagatttcctcaccgatctcatgatgtccgaagtcgaccgatgcggagataatgagcacctgatcttccgggagaatactctggcaacgaaggccatcgaggaatatctgaagctggtgggacagaaatacttgcaggatgcgctgggggaatttatcaaggcactgtacgagtctgacgaaaactgcgaggtggatccttctaaatgctcggcagctgacctgcccgagcaccagggtaacctgaaaatgtgttgtgagcttgccttctgtaaaattattaacagttactgcgttttcccccgggaactgaaggaagtttttgcctcgtggagacaggagtgctctagccgcggcagaccagacatctccgaacggctgatctccgcttccttatttctgaggttcctgtgtccggcaatcatgtccccctctttgtttaacttgctacaggagtatcctgacgacagaacagccaggactttaaccttgatagcgaaggtaacacaaaatcttgctaactttgccaaattcggctccaaagaggagtacatgtctttcatgaatcagttcctcgagcacgagtggacaaacatgcaaagattcctgctcgaaatcagtaaccccgaaaccctgtcaaatacagcaggctttgagggctacatagacctgggcagggaattgtcctccctccattcccttctgtgggaagcagtttctcaactggaacaaagcatcgtgtctaagctcggcccacttccacggatcctgagggatgtacacaccgcgttgtctactcctggcagtggacaactcccaggaacgaatgacctagcaagcacgccagggtccggaagctccagcattagcgcaggcctgcagaagatggtaatcgagaacgatctgagtggattgatcgactttaccaggctcccatcaccaaccccagaaaacaaggatctgttctttgtcacccggtctagcggagtgcaaccctctcccgccagaagcagctcttactctgaagccaacgagcctgatctgcagatggctaacggcgggaagagcctgagcatggtcgacctccaagacgctcgtactctggatggagaggcaggcagtcctgctggcccggacgttttaccaacagatggtcaggccgctgcagcacagcttgtggccggatggccggcacgggctacacctgttaatctggctggcctagccaccgtgcgacgtgctgggcagacccctaccacaccaggcacttcagaaggagctccgggccggcctcagttactcgcccccctttcctttcagaacccagtataccagatggctgctgggcttccactctctcccagaggtctgggcgattccggtagtgaagggcactcttccctgtcatctcactcaaattcagaggagctggctgcagcagccaagctcggctctttctccaccgccgcagaggaactagcgagacgccccggagagctggcaaggaggcagatgtctctcacagaaaagggcggccagccgacagtgcctaggcaaaacagtgctggtccacagcgccggatcgaccagccacccccaccccctcctccccccccccctgcccctaggggcagaactccccctaaccttttgagtaccctgcagtatcctaggccatcatcagggacactcgcttccgcctcccccgactgggtcgggccatccacgagactgaggcagcagtcctcaagctcaaagggagatagccctgagctgaagcctagagctgtgcacaagcaggggccttcaccagtctctccaaacgccctggaccgcacagctgcctggctgctgacaatgaatgcccagcttctggaggacgagggcttgggacctgatcctccccaccgagaccgactgaggagtaaagatgaacttagccaggccgaaaaggacttggccgttttacaggacaagctgaggatctctactaagaaactggaagaatatgagaccctgttcaagtgccaggaggaaacgacacagaagctggtgctcgaataccaagctagacttgaggagggtgaggaaaggttgagacggcagcaggaggacaaagacatccagatgaaggggattattagcagactcatgtctgtagaagaggaactgaagaaagaccacgcagaaatgcaggccgctgttgatagtaaacaaaaaatcatcgacgcgcaagaaaagagaatagcttccctggatgctgcaaatgctcgcctgatgtccgctttgactcaactcaaggagtccatgcattag

SEQ ID NO: 14828 - DNA, 3198 bp, synthetic construct
  misc_feature 1..3198: note = Description of Artificial Sequence: Synthetic coding sequence
  source 1..3198: mol_type = other DNA
atgccgagactgaaagaatcaagaagccacgagtcactcctgtcgcccagttccgctgtagaagccctcgacctgagcatggaagaagaggttgtcattaagccagtgcactccagcatcctgggacaggactactgctttgaggtgactacctcaagcggcagtaaatgcttctcttgcagaagcgcggcagagcgcgacaagtggatggaaaaccttcgaagagcggtacatccaaataaagacaactccaggcgcgtggaacacatcttgaagctgtgggttatcgaggcaaaggaccttccagcaaagaagaagtatctctgtgagctgtgccttgatgacgtgctgtacgcccggactaccggcaaactgaagacagacaatgtcttctggggcgagcacttcgaatttcacaacttaccaccccttcgaaccgtaacggtccacctataccgcgaaaccgacaaaaaaaaaaaaaaagaacgcaactcgtacttgggtctggtgtctctcccagccgcctcagtggcgggacgtcagttcgtggagaagtggtatcccgttgttacacctaaccctaaaggcggcaaagggcccggacctatgatcaggattaaggcccgctaccaaacgattaccatcctccccatggagatgtataaggagttcgcggaacacatcacaaatcattacttgggactctgtgccgcacttgagcccatactgagcgccaaaacgaaagaagagatggcctctgctctggttcacatccttcagtctacggggaaggtgaaggacttcttaaccgacctgatgatgagcgaagtggacagatgtggcgataacgaacacctgatatttagagagaacactctcgccaccaaggcaattgaagagtatttgaagttggtgggccaaaagtacttgcaagatgcgctgggcgagttcattaaagcgctttatgaatctgatgagaattgcgaagtggatcctagcaaatgcagtgccgccgacttgcctgaacaccaagggaatctcaagatgtgctgcgaattagccttctgcaagattataaattcgtactgcgtatttccacgcgaattaaaggaagtgtttgcatcgtggcggcaggaatgcagttctagaggcaggcctgacataagtgagagacttatcagcgcctccttgtttttaagattcttatgcccggccatcatgtctccttcactgtttaacctgcttcaggagtaccccgatgacagaaccgctaggaccctgacattgatcgctaaggtcacgcagaacctggcgaactttgccaagttcggctccaaggaggagtacatgtccttcatgaaccagttcctcgaacacgaatggaccaacatgcaaagattcctcctggaaatctccaacccagaaactctgtctaatactgcggggttcgaaggctatatcgatcttggtcgagaattgagcagcctgcatagcctgctgtgggaagcagtgtcccagctagaacagtccattgtgagcaaattaggccctctacctagaatactgagggacgtccataccgctctgagtaccccaggctctggacagctacctggcaccaacgacctggcatcaacaccagggtccggatcgtcaagcatctcagcgggactgcagaagatggtgattgaaaatgacctctccggcttgatcgactttacaagactgcctagtcctacccccgagaacaaagatttgttcttcgtcacccgcagctctggggtacagccttctccagcgaggtccagctcttattcagaagcaaatgaacctgatctccagatggcgaatggcggcaaatccctctccatggtggacctgcaagacgcccgaaccttggacggagaggcgggcagccctgcaggacctgacgtcctgcctacggatggtcaggccgctgccgcccagttggtcgccggctggcccgctcgggcgacccccgtcaatttggcagggcttgccaccgtgagaagggccgggcagacccccacaactcccggtaccagtgaaggcgctcctggccgtcctcagcttttggctccattaagttttcagaaccccgtataccaaatggccgccggattgccattgagccctcgggggctgggggacagtggctcggaaggccactccagcttgagttcccactcaaactcagaggaactggctgcggccgccaaactgggaagtttctctaccgccgctgaggagctggccaggcggcccggagagctggcgcggcgccagatgtcactgacagaaaagggtgggcagcctaccgtgccccgccaaaactctgcagggcctcagagaagaattgaccaaccacccccgcctcccccccccccacctcctgctccaagaggccgtactccccctaacctgctttccacccttcagtatcccaggcccagcagtggaactctcgcttcagcgtcaccggattgggtaggcccatccacaagattgaggcaacagtcaagtagtagcaagggggactcaccggagttgaagccgagggcagtccacaagcaggggcccagtcctgtctctccaaacgcactggatcgtaccgccgcgtggttgctgacgatgaatgcccagctccttgaagatgaaggcctggggcccgacccaccccacagggaccgactgcgatctaaggatgaactgtcacaggcagagaaagacctcgctgtgctacaggacaagctgagaatttccaccaagaaattggaggagtacgagactcttttcaagtgccaggaggaaaccacccagaagctggttttggagtaccaggcccggctggaggaaggagaagagagactaagaaggcagcaggaagataaagatatccaaatgaaaggtattatttctagattgatgtcagttgaagaggaactgaaaaaagaccatgccgaaatgcaagccgcggtggacagcaaacagaagataatcgacgctcaagagaagcgcatagctagtctggacgctgccaatgctcgactgatgagcgcccttacacagctgaaggaacggtacagtatgcaggcaagaaatgggatttctcctacgaatcctacgaaacttcagataaccgaaaatggcgaatttaggaactccagtaactgctag

SEQ ID NO: 14829 - DNA, 3210 bp, synthetic construct
  misc_feature 1..3210: note = Description of Artificial Sequence: Synthetic coding sequence
  source 1..3210: mol_type = other DNA
agccagccaaagctggacagaaaccattcctttcgtcacatcttacctgggttccgcagcgccgccgcagccgccgctgataatgaacgcagccacctaatgcctaggctcaaggaatctagaagtcacgaatccttattaagcccctcctccgcagtcgaggccctggacctctctatggaggaagaggtcgtgataaagcctgtgcacagttccatccttggccaggattattgcttcgaggttacaacaagttctgggagtaaatgctttagctgtcgaagcgcagcagaacgtgacaaatggatggagaatctccgccgcgcagtgcatccaaacaaagacaattcgagaagggtcgagcatattctaaaattatgggtgatcgaggctaaagacctgcctgcgaaaaagaagtacctttgcgagctgtgcttggacgatgtgctgtatgccaggacgacagggaagctaaagaccgataacgtgttctggggggagcactttgagttccacaacttgccaccattgagaactgttacagtacacctgtatcgtgaaaccgacaagaaaaaaaagaaagagagaaattcttaccttggccttgtctccctgccagccgcctcggtagccggcagacagttcgtcgaaaagtggtacccagttgtgactccaaatcctaaaggaggtaaaggccctggccccatgatcaggatcaaggcgcgttaccagacaatcaccatccttcccatggaaatgtacaaagaattcgccgagcacattactaaccattacctgggattatgcgctgcactggaacccattttgtcggccaaaacaaaagaagagatggcgtccgcactggtgcatatcctccagtccaccggcaaagtcaaggatttcctgaccgatcttatgatgtctgaggtggatagatgcggcgacaacgagcatctgatttttcgcgagaataccttggccaccaaagcaatagaggagtatctgaaactggtgggtcagaagtacctccaggacgccctcggcgaattcattaaggcactgtatgagtccgatgagaactgcgaggttgacccatctaagtgttccgctgctgacctcccggaacaccagggcaatttgaaaatgtgctgtgaacttgcattctgcaagattatcaacagctattgcgtgttcccgcgcgagctcaaggaagtcttcgcttcctggcgccaagaatgctcctccagaggccgccccgacatcagcgagcgtttaatctctgcctcgctgtttctccggttcctctgtcccgcgataatgagcccatccctgtttaatcttttgcaagagtatccagatgatcggactgctcgcacacttaccctcatcgcgaaggttacccaaaacctcgccaacttcgcaaagtttggctccaaagaggaatacatgagctttatgaaccagttcctcgagcacgagtggactaacatgcaaaggttcctgctggaaataagcaatccagaaactctctccaacaccgcagggttcgagggatatatcgatctgggacgtgaactatctagcctacacagcctgctgtgggaagctgtctcacagctggagcagtccattgtgtctaaactgggcccgctaccacgtatattgcgtgatgtccatacggcgctgtccaccccaggtagcggccagttacctggcacaaacgacctggcttccactcccggcagtggctcgtctagtatctccgcagggctgcagaaaatggtgatagagaacgacctcagtggcctgatagatttcacgcgtctgccatcccctacccccgagaacaaggacctcttttttgttaccagatcatccggcgtacagccctcccccgccaggtcttcctcctattcagaggccaacgaaccagacttgcagatggccaacgggggaaaatccctgtctatggtggacctccaagatgccaggacactggacggcgaggcgggatcccccgcaggtccggatgtgctccctacggatggccaggccgctgccgctcagctggtggcgggctggcccgctcgcgcaactccggtgaatctggctgggctcgccacagtgcgaagggctgggcaaacgcctactacaccaggcacctcagagggagcaccagggcgccctcagctgctcgctcctctctcattccagaacccggtgtatcagatggccgccgggttgcccctctctcccagggggctgggcgattcaggttccgagggccattcctcattgtcatcccatagtaactcggaagagctggccgcagccgctaagctagggagtttcagtactgccgctgaggagctggccaggagacccggtgagctcgccagaagacagatgagtttgactgaaaagggtggccagcctaccgttccacgtcagaattccgcgggccctcagagacgcatagaccagcccccgccccctcccccccctcccccacccgctcctcgaggtcggacgccccctaacctgctttctaccctccagtatccccgtcctagtagtggcaccctcgcatcggcttcaccggactgggttgggcccagcaccaggctgaggcagcaatcatctagttcaaaaggcgacagcccagaattgaaaccgcgggccgttcacaaacagggccccagtcctgttagccccaacgctttggaccgcaccgccgcatggcttctgacgatgaatgctcagttgctcgaggatgaaggcctagggcccgatccacctcaccgcgacaggctacggtccaaggatgaactgtcccaggccgaaaaagacctggcagtgctgcaggataagctgaggattagcactaagaagctggaagagtacgagactctcttcaagtgtcaggaagagacaacgcagaagctagtcctggagtatcaggcgagactcgaggaaggggaggagagacttcgcagacaacaggaagacaaagatatccaaatgaaggggattatctcacgactcatgagcgtcgaggaggagctaaagaaggaccacgctgagatgcaggccgctgtcgactctaaacagaagattatcgacgcccaagagaaaaggatcgccagtctcgatgccgctaatgctcggcttatgtctgctcttacccaactcaaggagtctatgcactag

SEQ ID NO: 14830 - DNA, 876 bp, synthetic construct
  misc_feature 1..876: note = Description of Artificial Sequence: Synthetic coding sequence
  source 1..876: mol_type = other DNA
atggagccagactctttacttgaccaggatgacagttatgagtccccccaggagcgaccggggagcaggcggtccctccccggatccctgtcagagaagagtccttcaatggaaccaagcgcagcaaccccctttcgggtgaccgggttcctgtctaggagactaaagggcagtatcaaaaggaccaaatcgcaaccgaaactggaccggaaccatagcttccgacatatcctccctggattcagatcagcagcagcagcggctgcagataatgagcgatctcatttgatgccacggctcaaagagtctcggtctcatgaatctcttttgtccccgtcatctgcagtggaggcactcgatctctccatggaagaggaggtcgtgattaagcccgtccacagctccatccttgggcaggattactgcttcgaggtgaccaccagctccggcagtaaatgcttctcgtgtcggtccgccgcagagcgtgataaatggatggaaaatctgagacgggcggtgcaccctaataaggacaacagtcgccgggtcgaacatattctcaagctttgggttatcgaggctaaggatctgcctgccaaaaagaagtacctctgtgagttgtgcctggacgatgtactctacgccagaaccacaggaaaactgaaaacggataacgtgttttggggagagcacttcgaatttcacaatctgccgcccctccgaactgtaaccgtgcacctctatagagagacagacaaaaaaaaaaaaaaagagcggaatagctacctcggtctcgtgtcacttccagctgcatcagtcgcaggcagacaattcgtcgagaagtggtatcccgtagtcacacccaaccctaagtag

SEQ ID NO: 14831 - DNA, 3570 bp, synthetic construct
  misc_feature 1..3570: note = Description of Artificial Sequence: Synthetic coding sequence
  source 1..3570: mol_type = other DNA
atgtctgctggcggaagcgcgagaaaaagcacaggccggtccagttattattaccgcctgctgcgtagacctcgcctccagaggcaaaggtctcgttcccggtccagaacaaggcccgctagagagagccctcaggagcgacccggcagccgaagaagtttgcctggttctctgagtgaaaaatcaccatctatggaaccctccgcggccaccccttttcgcgtgactgggttcctttccagaaggctaaaaggaagcattaaaaggacaaagagtcaaccaaagctcgatcgcaatcattcgtttagacacattcttccaggatttaggtcagcagctgccgcggccgctgacaatgaacggagtcatctaatgccgagactcaaggagagtaggtcccacgaaagtctgttatccccttccagcgccgtagaggcgctggacttatcgatggaggaggaagtcgtgattaaacctgttcacagttccatactggggcaggattactgttttgaggtgaccactagttcaggatccaaatgcttttcatgtagatccgctgccgaacgcgataagtggatggagaacttacgacgcgcagtccacccgaataaggacaacagtcggcgggtagaacacatattaaagctctgggtgattgaggctaaggacctgcccgccaagaagaagtacctatgtgagctttgtctcgacgacgtgctgtacgcaaggaccacaggtaagctgaagacagacaatgtgttctggggggagcattttgagttccacaatctgccaccactgaggaccgtcactgtacacctgtaccgagaaacggacaagaagaaaaagaaggagcggaacagctaccttgggctggtctcccttcccgccgcatccgtggcaggtagacagtttgtggaaaaatggtacccggtggtcacccccaacccaaaaggggggaagggccctggccctatgatcagaattaaagcacggtaccagacaattacaatactccctatggaaatgtataaggaattcgcggaacatattactaaccattatctgggcctctgcgccgcgctcgaacccatactttccgcaaagactaaagaagagatggcctccgccttagttcacatcctgcagtcaaccggcaaggtcaaggatttcctgacagacctgatgatgagcgaagtagatcgctgcggtgataacgagcatctcatcttcagggaaaacactctggctaccaaagccattgaggagtacctcaaactcgtagggcaaaagtatctacaagacgcactgggagaattcataaaggccctttacgagagcgacgagaactgcgaagtggatcccagcaaatgcagtgcagcggatttgcctgagcaccagggaaatctcaagatgtgctgcgagctggctttttgcaagatcatcaatagttactgcgtattccctcgggaattaaaagaggtgttcgccagttggcggcaggaatgttctagccgcggaaggccagacatttccgaaaggctgatctcagcgtccctctttctgcggtttctgtgcccagccatcatgtctccctcgttgttcaatctgctgcaggaatatcccgacgacaggacagcgagaacgttaacactcatcgcgaaagttacacagaatctcgcaaactttgccaaatttggcagcaaggaagagtacatgtccttcatgaatcagtttctagaacacgagtggactaacatgcagcggttcctgctcgagattagcaatcctgagacactgtcaaatacagccggattcgaggggtacattgatttaggccgggaactgagtagcctacatagtctcctgtgggaagcagtgtcccaactggagcagtctattgtgtcaaagcttggacccctacccagaattctgcgagatgtacacacggcgctgagtacccccggatccggccagctgcctggtacgaatgacctcgccagtacccccggttccggctcatcctcaatatccgctggcttacagaagatggtgatagaaaacgacctatctggactcatcgattttaccaggctcccctcccccacacctgagaataaagatctgttcttcgtgactaggtcatctggcgtgcagccctccccagctcggtcttcttcttatagtgaagctaatgagcccgatctccagatggccaacggtggcaagagcctctccatggtggatcttcaggatgcccgcactttggatggcgaggccggcagtccagctggccctgacgttctgcctaccgacgggcaggcagcggcagcccagctggtggctggatggccagcccgagcaacaccagtaaatttggccgggctggctacagtgcggcgcgcgggccagacaccaaccaccccaggcacctctgagggagccccagggagaccgcagctactggcccccctgtcttttcaaaaccccgtttatcaaatggccgctggtctgccgctgagcccaaggggcttaggggactccggctcagaggggcactcgtctctgagtagtcactcaaacagcgaagagctggcggccgccgcaaagctgggcagcttcagtacagctgctgaggaactcgcccggaggcccggggagctggccagaagacagatgagcctgacggaaaagggtgggcagcctactgtaccccgccagaattctgctgggccccagaggcgaattgaccagccccctccgccacctccaccgcctcctccagcgccccgcggacgcaccccacccaacctgctgagcaccctgcaatatcctagaccttcttcggggacgctcgcgtcagcttctccggactgggtcggccccagtaccagactgcgtcaacagtcgagttcaagtaagggcgactcccccgagttgaagcctcgagctgtgcacaaacaggggcctagtcccgtgtccccaaatgcgcttgatagaacggccgcctggttgctcacgatgaatgcccagctactagaggacgagggactgggtcctgatccaccacaccgggacagattgagaagcaaggatgagctcagtcaggctgagaaagacctcgccgtgcttcaggacaagttgaggatatctactaagaaactggaggaatacgaaacattgtttaaatgtcaggaagagactactcagaaacttgtactggaatatcaagcgcggttggaggagggggaagaacggctgcggcgccagcaggaggacaaggatatccaaatgaagggcatcattagtcgtctaatgtcagtggaagaggagcttaagaaggaccacgccgagatgcaggctgccgtcgactcaaagcagaagatcatcgacgctcaggagaaacgcatcgcctccctcgatgcagccaacgcccggttgatgtccgctctgactcagttgaaagagcggtactccatgcaggccaggaatggcatctctccaacaaatcccactaagcttcaaattactgaaaatggagaattcaggaatagcagtaattgctag

SEQ ID NO: 14832 - DNA, 690 bp, synthetic construct
  misc_feature 1..690: note = Description of Artificial Sequence: Synthetic coding sequence
  source 1..690: mol_type = other DNA
atgccaagacttaaggagtctcggtcacacgagagcctgctcagcccttcctcggctgtcgaggccctggatctttctatggaggaggaagtcgttattaaaccagtgcattctagcattctggggcaggactactgctttgaggtgactaccagctcagggtctaagtgtttctcatgtcgctccgccgccgagcgggataaatggatggaaaatttacggagggcagtgcaccccaacaaagacaatagccgccgagttgaacacatcctgaaactgtgggtgattgaggccaaggacctccctgctaaaaagaagtatctgtgtgaattgtgcctcgacgatgtcctctacgcccgcactacgggcaaactaaagacggataacgtgttctggggggagcattttgagttccacaacttgccccccctgcggaccgtgaccgtccatttgtatcgagagaccgacaagaagaagaaaaaggagcgcaattcctatctggggctcgtctcactaccagcggcctctgtcgcaggacgtcaattcgttgaaaaatggtacccagtcgtgacccccaaccctaagggaggcaagggcccaggcccgatgatcaggatcaaagctcgataccagacaatcactattctgcctatggagatgtacaaggagttcgcagaacacatcacttag

SEQ ID NO: 14833 - DNA, 3423 bp, synthetic construct
  misc_feature 1..3423: note = Description of Artificial Sequence: Synthetic coding sequence
  source 1..3423: mol_type = other DNA
atgagttacaactatgtggtgaccgcccagaagcccacggcggtcaatggctgcgtcaccggtcatttcacaagtgctgaggacttaaacctcctgatcgccaagaatacacggctcgagatatacgtagtcactgcagaggggctgcgccccgtaaaagaagtcggaatgtacgggaaaatagcagttatggagctgttccggcccaagggagaatccaaagatctgctctttatactgacggccaagtataacgcctgcattctagagtataagcagtccggagagtccatagacattatcacccgagctcacggaaacgtgcaagacagaataggaaggcctagcgagaccggcattatcgggatcatcgacccagaatgtcgaatgattgggttacgcctgtacgatgggctgtttaaggtgattcctctggaccgggataacaaagagttaaaggcttttaatatacgacttgaggaactccacgttatagatgtcaagttcctatatggttgtcaggccccaacaatttgcttcgtgtaccaggacccccagggcaggcacgtgaaaacgtatgaggtgtctcttcgggaaaaggaatttaataaaggtccgtggaagcaagagaatgtggaggccgaagcgagtatggtgattgccgtgccagaaccttttggaggtgccatcattattggccaagagtctattacataccacaatggcgataaatatctggccattgcccccccgatcataaagcagtcaaccattgtttgccacaacagagtcgaccctaacggttcacggtacctgcttggagatatggagggtagattattcatgttgctgctcgagaaggaagagcagatggatggaacagtgaccttgaaagacctgcgcgtcgagcttctgggggaaaccagtatcgctgaatgtcttacctatctggataatggtgttgtgtttgtggggagccggctgggcgactctcagttagtgaagctgaacgtggacagtaacgaacagggctcttacgtggtggccatggagacctttactaatctgggtcccattgtggatatgtgcgtggtagacttggagagacagggtcagggccagttggtgacctgctctggcgcctttaaggaagggtcattgaggattatacgcaacggtatcggtatccacgaacatgcctcaatagacttgcccggcatcaaaggactatggcctttaagatcagatccgaatagagaaacagatgacaccttagtactatcattcgtgggtcagactcgtgttctcatgttgaatggcgaggaggtggaggaaactgaactaatgggcttcgtcgacgatcagcagacttttttctgtggaaatgtcgctcatcaacagttgatacagatcacctctgctagtgtgcgtcttgtcagccaggagccaaaggcgttagtcagtgaatggaaagaaccccaggccaagaacatttccgttgcaagttgtaactcgagccaagtggtagtggctgtgggcagagctctttactacctacagatccacccccaggaactgcgacagataagtcacacagaaatggagcacgaggttgcttgcctcgacatcactcccctcggggatagcaatgggctgtcacctttgtgcgctatcggcttatggactgacatctccgctaggatattaaagctcccctcctttgaactcctccataaagaaatgctcggaggcgagatcatcccccgctccattctcatgacgacgtttgagtcctcccattacctcctctgtgctctcggggacggagccttattctattttggccttaacattgaaactggtctcctgtccgacagaaagaaggtaacactcggaacgcagcccactgtgttgcgcactttccggtccttgagtactactaacgtctttgcatgttccgatcgtcccaccgtgatctacagctctaaccacaagctggtgttcagtaacgtgaatctgaaggaagtcaactacatgtgccccctgaactctgacggatatcccgacagtctagccctcgctaacaattctacactaactatcggaaccattgatgaaatccagaaactccacatacggaccgtgcctctgtacgagtcgccccgtaagatctgttaccaggaagtcagccaatgttttggagtattatcctcaaggatcgaagttcaggacacttccgggggcactaccgcactccgcccctcggccagcacacaggccctgtcctctagcgtgtctagtagcaaactgttttcatcaagcaccgccccacacgagacaagttttggtgaggaggtggaggtgcataatctattaattatcgatcagcacaccttcgaagtgctgcacgcccaccaattcctacagaacgagtacgccttgagcctcgtctcatgcaagctgggcaaagaccctaacacttatttcatcgtgggaacagcaatggtataccctgaggaggctgagcccaagcaaggccggatcgttgtcttccagtacagtgatggtaagctacagacagtagctgaaaaggaggtaaaaggggccgtatattccatggttgagttcaacgggaagttactcgcttctatcaatagcaccgtccgtctttatgagtggaccacagagaaggaacttaggaccgaatgcaaccattacaataatattatggccctctacctcaaaaccaagggggacttcattttagttggagatctcatgagaagcgtgcttttactcgcgtacaaaccaatggaaggcaacttcgaggagattgcgagagatttcaaccccaactggatgtccgctgtggagattctggatgacgacaattttcttggggccgaaaatgccttcaatctctttgtttgccaaaaagacagtgctgctacaacggatgaagaaagacagcacctgcaggaggtggggctgtttcatctcggtgagtttgtcaacgtattttgccacggatccctggttatgcagaatctgggggaaacgtctaccccgacacaggggtctgtgttgtttggaacagtcaatgggatgattggcctggttacgagcctctctgaaagctggtacaacctcctcctggacatgcaaaaccgcttgaataaggtaatcaagtcagtggggaagattgaacactctttctggagatctttccatacggaacgcaagaccgagccggcaactggatttatcgacggcgacctgattgaaagttttttggacatctcccgcccaaaaatgcaggaggtcgtggctaacctgcagtatgatgacgggagtgggatgaaacgggaggcaacagccgacgatctaattaaggttgtcgaagagttaacccggattcactag

SEQ ID NO: 14834 - DNA, 1356 bp, synthetic construct
  misc_feature 1..1356: note = Description of Artificial Sequence: Synthetic coding sequence
  source 1..1356: mol_type = other DNA
atgagctacaattacgttgtgactgcacagaagcccaccgccgtgaatggttgcgtaacaggccattttacaagcgccgaggatctcaatctgctgatcgccaagaatactcgcctggagatctacgtggtgactgccgaggggctgcgtccggtaaaggaggtgggcatgtacgggaagattgcagtgatggagttgtttagacccaaagccctgagcagctcggtcagcagttccaagctgtttagcagctccaccgctccccacgagacttcctttggcgaggaagtagaggtccacaatctgcttatcatcgatcagcatacattcgaggttctgcacgcccaccagttcctccagaacgagtacgctctctccttggtatcctgcaagctcgggaaagatcccaacacatattttatagtgggtactgcaatggtgtaccctgaagaagctgagcccaaacaggggcggattgtggtcttccaatattccgacgggaaactgcagaccgttgcggagaaggaggttaaaggcgctgtgtactccatggtggaatttaatggtaagctgctggccagtattaattccaccgttcgtctgtatgagtggacgacagagaaggagcttcggactgagtgcaatcactacaacaatatcatggccctgtatctgaagacgaagggagactttatactggtcggtgacctgatgaggagcgtgctccttctcgcctacaagcctatggaggggaatttcgaggagatagctcgggattttaatcctaactggatgtctgcggtcgaaatcttggatgatgacaactttctgggcgcagaaaatgcatttaatctgttcgtctgccaaaaggactctgccgcgaccactgatgaagagaggcaacacttacaggaggtgggtctgtttcatttaggggagttcgtgaatgtgttctgtcatgggagcctggtgatgcagaacctgggagagacatccactcctacccagggctcggtgttgtttggcaccgtgaatgggatgatagggctcgtcaccagtctgtcagaaagttggtataacctgctgctggacatgcagaatcggctgaacaaagttataaaatcagtgggtaagattgagcatagtttctggcggagcttccacacggagcggaaaaccgagccggcgacaggatttattgacggagatctgatcgagtcctttctggatatcagtcgccccaagatgcaggaagtcgtggccaacctgcaatacgatgacggcagtgggatgaaacgagaggccaccgccgacgatctcatcaaggtggtagaggaactaacgcggattcactag

SEQ ID NO: 14835 - DNA, 441 bp, synthetic construct
  misc_feature 1..441: note = Description of Artificial Sequence: Synthetic coding sequence
  source 1..441: mol_type = other DNA
atgtcctacaattacgtagtgacggcccagaagcccaccgcagtgaatggatgcgtgacgggccactttacaagcgctgaagatctgaatttgttaattgccaagaacacacggctagagatctacgtggttaccgccgaaggtctccgacccgtgaaagaagtgggtatgtacggaaagattgcagtaatggaattgttccgccctaagggagagtctaaagacttgttgtttatactaaccgctaaatacaacgcttgcatcctggaatataaacagtcaggagaaagtatagacatcatcaccagagcccacgggaacgtccaggaccgcattggtcgacccagcgaaacagggatcattgggattatagaccccgaatgtaggatgattggactgagactgtacgacggcctcttcaaagtgatcccactggactag

SEQ ID NO: 14836 - DNA, 330 bp, synthetic construct
  misc_feature 1..330: note = Description of Artificial Sequence: Synthetic coding sequence
  source 1..330: mol_type = other DNA
atgtcctacaactacgtagtgaccgcacagaagcccactgctgttaatggatgcgtgaccggccactttacaagcgccgaagatctcaacctccttatagcgaaaaatactcgattagaaatatacgtggtgacggctgagggtttgcgccccgtcaaggaggtcgggatgtatggcaagattgccgtcatggagctgttcagaccgaagggagaatcaaaagacctgctgttcatccttaccgccaagtacaatgcttgcatcctggagtacaagcagtcaggtgaatctatcgacattataacccgagcgcacggaaacgtgcagtag

SEQ ID NO: 14837 - DNA, 1284 bp, synthetic construct
  misc_feature 1..1284: note = Description of Artificial Sequence: Synthetic coding sequence
  source 1..1284: mol_type = other DNA
atggctcccaagaaacgacccgaaacacagaaaacatcggagatcgttctgaggccacggaacaaaaggagcaggtccccactggagttggaacccgaggctaagaagttgtgtgcgaaaggctctggcccctcacgacgctgcgatagtgactgtctgtgggtgggcctggcgggaccacagatcctgcccccatgcagaagtattgtacgtactctacatcagcacaaactcgggcgcgcctcctggccttctgtccaacagggtctccagcagagctttcttcatacactggattcgtataggattctccaaaaggctgcccctttcgaccgcagagcaacatcactcgcgtggcatccaacccacccctcaacggtggccgtgggtagtaagggtggcgacataatgttgtggaattttggcattaaggataagcctactttcatcaaaggtataggggctggcggcagtatcaccggcctcaagtttaacccactgaacactaatcagttttacgcttcaagcatggagggaactacacgcctgcaggatttcaaaggcaacatcctgcgagtgtttgccagctcagatacaatcaatatctggttctgctcactggacgttagcgcctcaagtagaatggtcgtcacaggggacaatgtggggaacgtcatcctgctgaatatggatggcaaggagctgtggaatctgaggatgcacaaaaagaaagttacacacgtcgccttgaacccttgttgtgattggtttctggccacagccagcgttgatcagaccgttaaaatctgggatctccgccaggttaggggaaaagcatcatttctgtattctctgccccaccgccaccctgtcaacgcagcatgtttctctcccgacggagcccgcctccttaccacagatcagaaatcagagatacgagtgtattccgcttctcagtgggactgcccccttgggctcattccacatcctcatagacactttcaacatcttacgcccatcaaggctgcgtggcacccgcgatataatctgatcgtagttggacgctacccagacccaaactttaaatcatgcacaccttacgagctgcgcaccattgatgtttttgacggcaacagtgggaagatgatgtgtcagttatacgatcccgagtcatccggcatttctagtctcaacgaatttaacccgatgggagacactctggcaagcgcaatggggtatcacatcctcatctggtctcaggaggaagcaaggactagaaaatag

SEQ ID NO: 14838 - DNA, 717 bp, synthetic construct
  misc_feature 1..717: note = Description of Artificial Sequence: Synthetic coding sequence
  source 1..717: mol_type = other DNA
atggcccccaagaaaaggcccgagactcagaagacttctgagattgtgctgcgccctaggaataaacggtccaggagcccgctggagctcgagcccgaggccaagaagctgtgcgctaagggcagcggtccttcgagacgatgtgattctgactgtttgtgggtaggtctggccggacctcaaattctgcctccttgtcggagcatcgtgcgtaccctacaccagcataagctgggtagggctagctggccaagcgtgcagcaaggtctgcagcagagcttcttgcacacgctcgattcctatcgtattctgcagaaggccgctccattcgaccgtagagccaccagcctggcttggcaccccactcatcccagtactgtcgcagtcggaagcaaggggggcgatatcatgctgtggaacttcggaataaaggacaaacctacttttataaaaggtgccgcttggcacccaaggtacaatctaattgttgtgggtcggtaccctgatccaaactttaaatcctgtaccccatacgaactcagaaccatagacgtgttcgacggcaatagcggtaaaatgatgtgccaattatacgacccagagagttctgggatctcttctctcaacgaatttaaccctatgggcgatacgctcgcctccgccatgggttatcacattctcatttggagccaggaggaagcaaggactcgcaagtag

SEQ ID NO: 14839 - DNA, 735 bp, synthetic construct
  misc_feature 1..735: note = Description of Artificial Sequence: Synthetic coding sequence
  source 1..735: mol_type = other DNA
atggctcctaaaaaacgccccgagacccaaaaaacatcagagatcgttctgcggccccgcaataagcggtcaaggagccccctggaactcgagcccgaagctaagaaattgtgtgcaaaggggtctgggccaagtcgtagatgcgattcagactgcctgtgggtcgggctggctggcccccaaatactgcctccgtgcaggagtattgtcagaactctccaccaacacaaacttggccgcgctagctggccatctgtacagcaaggcctccaacagtccttcttgcacactctggattcctatcgaattctgcagaaagccgctccatttgatagacgagctacaagtctggcttggcatcccacacacccctcaacagtggccgtgggctcaaaagggggtgatatcatgctgtggaattttggaatcaaagacaagcctacctttattaagggcatcggtgcgggaggatcgatcaccggactgaagttcaatccactgaacacaaaccaattttatgcctcttccatggaagggacgacaagactccaggatttcaagggcaatatccttcgggtcttcgcaagctcagacactattaacatctggttctgttctctggatgtgtcagcatccagcagaatggttgtgacgggggacaacgttgggaatgtgattctgctgaacatggacggtaaagagctggtctccgttcctatggaacccggatcctag

SEQ ID NO: 14840 - DNA, 1092 bp, synthetic construct
  misc_feature 1..1092: note = Description of Artificial Sequence: Synthetic coding sequence
  source 1..1092: mol_type = other DNA
atggcgccaaagaagagacctgaaacccagaaaacatccgagatagtgctgcgcccgcgtaacaagcggtccagaagccccctggaactggaacctgaagccaaaaagttatgcgctaagggctccggcccatcgaggaggtgtgactctgactgcctgtgggtggggctggctggcccacaaattcttcctccttgccggtctatcgtccgcaccctgcaccaacataagctaggcagagcttcctggcccagcgtgcagcagatcggtgctggaggatctattacaggcctcaaattcaatccactcaatactaaccagttctatgcatcttccatggagggtactactagactgcaggatttcaaagggaatatcttaagggtgttcgcgagtagcgacaccatcaacatctggttttgtagcttggacgtgtctgccagttccagaatggttgttaccggagacaacgtcggcaatgtgattctcctgaacatggatggaaaagaactgtggaatctacgaatgcacaagaagaaggtgacacatgtagccctcaatccttgttgcgactggtttctcgctaccgcctcggtggatcagaccgtgaaaatctgggacctgaggcaggtgaggggcaaagcaagcttcttatactccctgcctcacagacaccctgtgaacgctgcctgcttctcaccggacggcgccagactgctgaccactgatcagaagagcgagattcgggtgtatagcgcctcccagtgggactgtccactcggactgattccacaccctcaccgtcacttccagcacttgaccccaattaaagccgcttggcatcctcggtacaatctgatcgtcgttggacgctacccggatcctaacttcaaaagctgcactccgtacgagctgcggactatagacgtgtttgacgggaacagcggcaaaatgatgtgccaactctacgatcctgagtcatcaggcatttcctccttgaacgagttcaaccctatgggcgacacactagcctcagccatgggttatcatattctgatctggtctcaggaggaggctcgcacccggaagtag

SEQ ID NO: 14841 - DNA, 1119 bp, synthetic construct
  misc_feature 1..1119: note = Description of Artificial Sequence: Synthetic coding sequence
  source 1..1119: mol_type = other DNA
atgtccgaggccggtgaggctaccaccaccaccacgaccacactaccacaggcacccaccgaggccgcagccgcagctccacaagaccccgcccccaaaagtcccgtggggagtggcgcaccccaggctgctgcacccgctcctgcggctcacgttgcaggcaatccggggggcgacgccgcccccgcagccacagggaccgcagcagctgcttctctcgccaccgcggccggttcagaggacgcggaaaaaaaggtattagctaccaaagtgctgggcactgtgaaatggttcaatgtaaggaacggctacgggttcattaaccgtaatgacaccaaagaggacgtattcgttcaccagacagcaattaagaaaaacaacccgcgtaaatacctgcgaagcgttggagacggggaaaccgtggaattcgatgtggtggagggagagaaaggtgcagaggccgcaaacgtcacaggaccagatggggtgccagttgaggggagcaggtatgcagcagataggcgccgctataggaggggatattacggaaggcggcggggtccaccacgcaattacgccggcgaagaggaggaggaaggtagtggcagttccgagggctttgatcctcccgcaacggaccgccagtttagcggggcccgtaaccagctgagaaggcctcaatacagaccacagtaccgccagaggcgctttcccccgtaccacgtcggacagacattcgataggcgaagccgagttctgccacaccctaatcggatccaggctggcgagatcggggagatgaaagatggagttcctgagggagcccagttgcagggacctgtgcatcgtaatccaacttaccgtcctagatataggtccagaggccccccaagaccacgcccagcccccgccgtgggagaagctgaggacaaggaaaatcaacaagctacgagtgggcccaatcaaccatccgtccgtcgcggctatcggaggccttataattaccgacgcaggccgcgcccccctaatgcgccatcgcaagacggaaaggaggccaaagcaggcgaagcacctacagaaaatcccgctccaccaactcagcaatcctccgcagaatag

SEQ ID NO: 14842 - DNA, 867 bp, synthetic construct
  misc_feature 1..867: note = Description of Artificial Sequence: Synthetic coding sequence
  source 1..867: mol_type = other DNA
atggcaaatgaaacgcagaaggtgggggctatccattttcctttccctttcacaccctactccatccaggaggacttcatggctgaactctatcgtgtcctcgaggctgggaaaattggcatcttcgaatcccccacaggcacaggcaaatcattgtctctcatctgcggagccttgagctggcttcgggatttcgagcagaaaaagcgtgaggaggaagctagactgctagagactggcactggccccctccacgatgagaaggacgagtccttgtgtctatctagcagttgcgaaggcgcagcagggacgccgagaccagcaggtgaacccgcttgggtcactcaatttgtgcagaagaaagaggaacgcgacctggtggacaggctgaaagcggagcaggccagacgaaaacagagggaagaacgcctccagcaactgcaacaccgcgtccagctgaaatacgctgccaagcgcctccgccaggaagaggaagagcgagaaaatttattgcgactcagccgtgaaatgctggagactggtccagaagcagagcgtttggaacagctggagtctggggaggaagaactcgtgttagctgagtatgaatcagatgaggagaagaaagtggcgtctagggccccctctgatgctactagctcccgccatccacccgacgcatcttttccggcagccctcaacttcctgcaacgcacacgcccctccagcgtgctgagtgaagatctcttaatgcaacgagccgtggccaagcaccccgccttgcttccctggcagatgtcatcttcccctctgcgaccgggctctgaatggatgcggatgcggatgacatggcgcaagaatacctag

SEQ ID NO: 14843 - DNA, 2571 bp, synthetic construct
  misc_feature 1..2571: note = Description of Artificial Sequence: Synthetic coding sequence
  source 1..2571: mol_type = other DNA
atggctaatgaaacccaaaaggtgggcgcaatacacttccccttcccatttacaccgtattcgatccaggaggactttatggccgaactctacagagtgctggaggctgggaaaattggaatattcgaatcacccaccggcacagggaaatccttgtcgttgatctgcggcgcgttatcttggctgcgtgactttgaacaaaagaaacgcgaggaggaggcgcggctcctggagactggcacgggaccactgcacgatgagaaggatgagtcactctgcttatcttccagttgtgaaggtgcagccgggaccccccgcccagctggcgagccggcctgggtgactcagttcgtgcaaaaaaaggaagaacgggatcttgttgatagactgaaggctgagcaagctcggagaaagcaacgggaggaaaggctgcagcagctgcagcaccgcgtgcagctcaagtacgctgctaagcgtcttcgacaggaggaagaagaacgtgagaacctgctccggttgagtagagagatgctcgaaacggggcctgaggccgaacgactggaacagctcgagtcgggcgaagaagagctcgtgctggccgagtatgagtccgacgaggagaagaaagttgcaagtcgcgtcgatgaggatgaagatgacctggaagaggagcacattacaaaaatctactattgcagccgaacccactctcagcttgcccaatttgtgcatgaggtaaagaagtcaccgttcgggaaggacgtcagactcgtgtccctgggaagtcgacagaatctgtgcgtgaatgaggacgtaaagagtcttgggtcagtccagctgatcaatgatcgctgcgtggacatgcaacgcagtcggcacgaaaaaaagaaaggtgccgaggaagagaagccaaagcgcagaaggcaggaaaagcaggccgcctgtcctttctacaatcatgagcaaatgggattgctgcgcgatgaagccctggcagaggtgaaggacatggaacaactgctcgctctcgggaaggaggcgagagcgtgtccttattacgggtcccggctggctatcccagccgctcagctggtggtgctgccatatcagatgctcttgcacgctgcaactcgccaggccgcaggtatcaggctccaagaccaggtggtgataatagatgaagctcacaatctgattgatactataaccggcatgcattcagtcgaagtgtctggctcccagttgtgccaagcgcacagtcaactcctgcaatacgtcgaacggtatggcaagaggctcaaggcgaagaatcttatgtatctgaagcagatcctctacctcttggaaaagtttgtcgctgtacttggaggtaacatcaagcagaatcccaatacgcagtctctgagccagaccggaaccgaactgaagacaatcaatgactttctgttccagagtcaaattgataacatcaatctttttaaggtgcagaggtattgcgagaagtccatgatatctcgaaagctgtttggattcactgaaaggtacggagccgtgtttagttctcgcgaacagccgaaactcgccgggttccaacagttcctacagtcacttcagccaagaacaacagaagccctggcagcccccgcagacgagagtcaagcatcaaccttacgacctgcaagtcccctcatgcacatccagggtttccttgcagcccttaccaccgcaaaccaggatgggcgggtcatcctgtcaaggcaggggtcattatcccagagtacacttaagtttctcctccttaatcctgctgtccatttcgctcaagttgtgaaagagtgcagagctgtcgtgatagcaggaggtacaatgcagcccgtttctgactttagacagcaattgctggcatgcgccggggtggaagccgagcgcgtggtggagttctcctgcggacatgtcattccgccagacaatattttgccactcgtaatttgcagcggcatctccaatcagccactggagtttacatttcagaaaagagaattgcctcagatgatctttcaggaacccaagagcgcacaccaggtcgaacaggttttattggcttacagtcgctgcattcaagcgtgtggtcaggagagaggccaggtgacaggcgctctgttgttgtcagtggttgggggaaaaatgtctgaaggaattaatttcagcgataacttaggaaggtgtgtcgtgatggtcggaatgcccttcccaaacattaggtccgcagaactccaggagaagatggcgtacctggatcaaactcttccaagagctcccggccaggccccccctggaaaagctctggtggagaacctgtgtatgaaggctgtaaatcagagcatcggccgagcaatccgccatcagaaggatttcgcgtccgtggtcttactggaccaaagatacgcccgacccccagtcctagctaagctgccggcgtggatccgggccagggtagaggtgaaggccaccttcggacccgcaattgcggccgtgcagaagtttcatagggagaaatctgcctcctcctag

SEQ ID NO: 14844 - DNA, 1671 bp, synthetic construct
  misc_feature 1..1671: note = Description of Artificial Sequence: Synthetic coding sequence
  source 1..1671: mol_type = other DNA
gaagaagagccgttatggcagggctgtagcgccggcctgccatggctgcccgctgaaaaaaaaaagggagccgaggaggaaaagccaaaaagacgacgtcaggaaaaacaggcagcatgcccattctataatcatgagcagatgggccttctacgcgatgaagcgctggcggaggtgaaggacatggagcagctcctggccttaggaaaggaagcacgagcatgcccatactacggctcccgcttagccattccggcagctcagttggtggtgttgccctaccaaatgctcctacacgctgctacgaggcaggctgcgggcatcagacttcaggatcaggtcgtcatcatcgacgaggctcacaacctgatagacacgatcactggcatgcactctgttgaagtaagtggctctcaactatgccaggctcattctcagttgctgcagtatgtggagagatacggaaagcgactgaaggcaaagaacctaatgtaccttaaacagattttatatcttctggaaaagttcgtcgcagtattgggaggcaacattaaacagaaccctaatactcaaagcttgtctcagaccgggacagaactgaaaaccataaatgactttctgttccaaagtcagattgataacataaacctctttaaagtgcagcgttactgtgagaagagcatgatcagcagaaagttgttcggctttacggaacgctatggtgcagttttctcctcgcgagagcagcctaagttggccggattccagcaattcttgcaaagcctgcagcccagaacaactgaagctctcgcagccccagcagatgagagccaggctagcacccttcgcccagcgtccccactgatgcacatacagggtttcttagccgcactgaccaccgccaaccaggacggcagggtaattctgagcaggcagggctctctgtcacaaagcaccctgaaattcctcctgctgaaccccgcagtgcatttcgcacaagttgtcaaagagtgcagggctgtagttatagcaggtggtactatgcagccagtgagcgacttccgccagcagctcctggcctgcgccggcgtcgaagccgagcgggtagtcgaatttagctgcggacacgtgatcccaccagacaacatacttcctcttgtgatctgttctggtatctctaatcagccattagaatttactttccagaagagagagcttccacagatgatggacgaggtagggaggatcttgtgcaacctgtgtggtgtggtgcctggtggagtagtatgtttttttcccagttatgaatacctcagacaggtgcatgcccactgggaaaaaggagggctgctcggtagactcgcagcccggaaaaagatctttcaggaacctaaatcggctcaccaggttgagcaggtgctgctggcatacagtaggtgtatacaggcatgcggtcaagagcgggggcaggtgacgggcgccctcttattgtcggtggtgggcgggaaaatgtcggaagggattaattttagtgataacctcggaagatgcgtcgtgatggttggaatgcccttcccaaacatacgatctgcagaactacaggaaaaaatggcctatctggaccagaccctggccgggcccagtgggacccgcaggatactacccgcatag

SEQ ID NO: 14845 - DNA, 2913 bp, synthetic construct
  misc_feature 1..2913: note = Description of Artificial Sequence: Synthetic coding sequence
  source 1..2913: mol_type = other DNA
atggcgaacgagacccagaaagtgggcgcaattcattttccgtttcctttcaccccatactccatacaagaagattttatggccgagctctaccgagttctggaggccggcaagattggaatattcgagagccctaccggcaccggaaaatctctgagtttgatatgtggcgcactgtcgtggctgcgagattttgaacaaaagaaaagggaagaagaggccaggctccttgagactggtaccgggccactgcacgacgagaaggacgagtccctatgcctcagctcatcgtgcgagggtgcagctggcactcctaggcctgccggagagcctgcttgggtgacgcagtttgtacaaaagaaggaagagcgagacctcgtggaccggttaaaggccgagcaggccagacggaagcagagggaagagcgactacagcagctgcagcacagggtccagcttaagtacgccgctaaacgattgaggcaggaggaagaggagcgtgagaaccttctacgactttcgagggaaatgttggagaccggcccagaggccgagcgtctggaacagctagagtcgggcgaggaggagctggtcctggccgagtatgaatccgacgaggagaagaaggtggcaagccgagtcgacgaagatgaggacgatctggaggaagaacatatcactaaaatttactactgtagtagaacccactcccagcttgcccagttcgtgcacgaagtaaagaagtctccgttcggcaaggatgtgagactggtaagcctgggcagccggcagaacctctgcgtcaatgaggacgttaagtcactgggcagtgtccagctgataaatgataggtgtgttgacatgcagagatcaaggcatgaaaagaaaaaaggcgccgaggaggaaaaaccaaagaggcgtaggcaggaaaagcaggcggcctgtccattttataatcacgagcagatgggtttgctccgggacgaggccctcgcggaagtcaaggacatggaacagctgcttgcactcggtaaggaagcgcgagcatgcccttactacggcagccgccttgccatccccgctgcccaactcgtggtgcttccgtatcagatgctactgcatgccgcgacgagacaagcagccgggattcgacttcaggatcaggtggtcatcatagatgaggctcataacctgatagataccatcacaggtatgcactcagtcgaggtcagcgggtcccagctttgtcaggcccactcccagctccttcagtacgtggaacgctacggcaagcgcctgaaggcgaagaacctaatgtatctgaagcagattctctatctccttgagaagttcgtggccgtactgggtgggaatattaagcagaacccgaacacacagagcctcagccaaaccgggacggagttgaagaccatcaacgattttctcttccagagtcagatcgataatataaatcttttcaaggtgcaaaggtactgcgagaaatcgatgatttccagaaagctgtttggtttcacagaaaggtatggggcggtttttagctctcgtgagcagccaaagctggctggtttccagcagttcctccagagcctgcagccacgtactactgaagcgctcgcggctcctgccgatgaaagccaggcgagtacgctaagaccagcctccccactgatgcacatacaaggtttcctggccgcattgactaccgctaatcaggatggacgcgtcatcttaagtcgccagggctctttaagccagtcaacattgaagttcctcctgcttaatcctgctgtgcatttcgcccaggtggtcaaagagtgtcgagcagtggtaatcgccggaggcactatgcagcccgtgagtgacttcaggcaacagttgttagcgtgcgccggtgtcgaagctgaaagggtggtggagtttagttgcgggcatgtgatcccgcccgacaacatactgcctctggtgatctgttcaggcatttctaaccaaccactagaattcacgttccagaaacgggaattaccacagatgatggatgaagtgggcaggattctgtgcaacctatgcggggtcgtgccaggaggcgtggtttgcttctttccttcttacgagtacctgcgccaggttcacgctcattgggagaaggggggtcttttaggcaggctcgcagccaggaagaagatcttccaggagcccaagtctgctcatcaggtggaacaggttctcctggcttacagcagatgcatacaggcctgcgggcaggagagaggacaggtgaccggcgcgctactcctttccgtggtgggggggaaaatgtccgaaggaatcaattttagcgacaacttgggcagatgcgtggtaatggtcggaatgcccttccctaatatcaggagtgcagagcttcaggaaaaaatggcctatttagaccagactctgagtccaagacctggcacccctcgcgagggcagcgggggtgagcctgtccacgagggaagacagcctgtgcacaggcaagggcatcaggccccagagggattttgccagagaagcgcacccggtccggcgatctgcccggcgccatgcccggggcaggcagccggtttggaccctagcccgtgtggaggacagtcttatctgtggccacgccactgttgttgcgctgaagtgtcccccggagaggtgggcctgttcctaatgggcaaccacactactgcctggagacgagccctgccgttaagttgccctctggagactgtctttgtggtaggcgttgtctgcggagaccccgtgactaaagtcaaaccacgccgcagagtttggtctccagaatgttgccaggatcctggaactggagtgtcatcccggcggcgtaagtggggtaatccagaatag

SEQ ID NO: 14846 - DNA, 675 bp, synthetic construct
  misc_feature 1..675: note = Description of Artificial Sequence: Synthetic coding sequence
  source 1..675: mol_type = other DNA
atggctgaactttacagggtgcttgaggctggaaagattggcatcttcgagagccctaccggcactgggaaatccctctcccttatctgtggggccctgagctggctgcgggattttgaacagaagaagcgagaagaagaggccagacttttagaaaccggcactggacctcttcatgatgagaaggacgagagtctgtgcctgtcatcttcctgtgaaggggccgctgggacccctagaccagctggcgaacctgcttgggttacccagtttgtgcagaaaaaagaagaaagggatctggtagatcgtctgaaggcggagcaggctcgtagaaaacaacgggaagagaggctccagcagctgcaacatcgcgtgcagcttaagtacgccgctaagcgccttcgacaggaggaggaggagagggaaaacctgctgagactctccagggagatgctggaaaccggaccggaggctgagcggctcgagcagctggagtccggtgaggaggaattggtgctagccgaatatgaatccgacgaggagaaaaaggttgcgagcagggtggacgaggatgaggacgatcttgaggaagagcatattaccaaaatttattactgcagcagaacccattcgcagctggctcagttcgttcacgaggttaaaaaaagcccctag

SEQ ID NO: 14847 - DNA, 2721 bp, synthetic construct
  misc_feature 1..2721: note = Description of Artificial Sequence: Synthetic coding sequence
  source 1..2721: mol_type = other DNA
atggccaatgagacgcaaaaggttggagccatccactttcccttcccttttactccctattcaattcaggaggacttcatggctgagctgtaccgggtgttggaggcaggaaagatcggaatatttgagtctccaaccggcacagggaaatcgttgtcactgatatgcggcgctctcagttggctgcgtgactttgaacagaagaagcgtgaggaggaggctaggctgctggagacgggcactggccccttgcatgatgaaaaggatgagtctctctgcctgagcagctcttgcgaaggagcagccggtactccaaggcctgcaggtgagcctgcgtgggtgacccagttcgtgcagaaaaaggaggagcgtgatcttgtcgatagactgaaagcagaacaggcgagacgcaagcagagggaggagcgtctgcagcagcttcagcatcgggtccagctgaaatacgcagcaaagcggctgcgacaagaagaggaggagcgggaaaatttactgaggttgtcacgcgaaatgctggaaacgggtccggaggccgagcgattggagcaactggagtccggcgaggaagaattagtgctggccgagtacgagtccgacgaagagaagaaagtggcatctcgtgtcgacgaagatgaggacgacctcgaagaagagcatataactaaaatctactactgtagcaggacgcactcccagctcgcccagtttgtgcacgaggtcaagaaatcgccctttggaaaagacgttagactggtcagcctgggaagtcgccaaaatctgtgtgtaaatgaagatgttaagtccctcggatctgttcaattgataaacgataggtgcgttgacatgcagcggtcacggcatgagaagaaaaagggagccgaggaagaaaaacccaaacgccgaagacaagagaaacaggccgcgtgccccttctataatcatgagcagatgggtcttctgagggatgaggctttggcagaggtcaaagacatggagcagctgctagccctgggtaaggaggctcgggcatgcccctactacgggagtagattggctattcccgctgctcagctggtcgtgttaccctaccagatgctgctgcacgccgctaccaggcaggccgctggaattcgccttcaggatcaggtggtgattatagatgaggcccataatctgattgataccatcacggggatgcacagcgtggaagtgtctggaagtcagctgtgtcaggcccattcccagctgctgcagtacgtcgaacgctacgggaaacggttaaaagctaagaatctgatgtatttgaagcagatcctctacctcctggaaaagttcgtagccgttctgggaggcaatataaagcagaacccaaatacgcagtcactgagccaaaccggtaccgagctcaagacgattaatgatttcctgttccagagccaaattgacaacatcaacctctttaaagttcaacgctattgtgagaagagcatgatcagccgtaaactatttggtttcacagaaaggtacggggcagtcttttctagtcgagaacagccaaagcttgctggtttccagcaatttctccagagcttgcagccaagaaccacagaagccctggcggcccccgctgacgagagccaggcctctaccttacggccagcctctccgctgatgcacatccagggcttcttggccgccctcaccaccgccaaccaagatgggcgggtcattctgtcccgccaggggtctctgtcccagtcaacactcaaattcctgcttctaaatcctgctgtgcacttcgctcaggtcgttaaagagtgtcgggctgtcgtgattgcaggtggaactatgcaacccgtttccgactttcgccagcagctgctggcctgcgcaggcgtggaggctgagagggtggtcgagttttcatgcgggcatgtgattcctccggataatatccttcccctggtcatatgcagcggcatcagtaatcagcccctcgaatttactttccagaagagggagcttcctcaaatgatggatgaggtaggaaggatcctatgcaatctgtgtggggtggtgcccggtggagtggtttgttttttcccttcttacgaatacctgcggcaggtgcacgcccactgggagaagggcggcttactcgggagactcgctgccagaaagaaaattttccaagagcccaagtctgcccatcaggtagaacaggtcttactggcctacagtcggtgtattcaggcttgtgggcaggaaagagggcaagtaacaggtgccctcctcctcagcgtcgtggggggaaagatgtccgagggtatcaacttctccgataacctgggtcggtgcgtggtcatggtcggcatgcctttcccaaacattcgctccgcagagttgcaagagaagatggcttatctggaccagacacttcccagggctcctggtcaggctcccccaggcaaggcactcgtagaaaacctttgtatgaaagcggtcaatcagtcaatcgggagagccatccgtcaccagaaggattttgccagcgtagtactactcgaccagcgatacgcccggcccccggtgcttgccaagctccctgcgtggatccgtgccagagttgaggtcaaggccacattcggacctgccattgctgctgtgcaaaagtttcatcgggaaaaatccgcttccagctag

SEQ ID NO: 14848 - DNA, 2913 bp, synthetic construct
  misc_feature 1..2913: note = Description of Artificial Sequence: Synthetic coding sequence
  source 1..2913: mol_type = other DNA
atggcgaacgaaactcagaaagtcggagccattcactttccttttccatttaccccctactctattcaggaggacttcatggcagagctgtaccgcgtgctagaagccggaaaaatcggaatcttcgagagccctaccggtactggaaagagcctgagcctaatatgtggcgctctgtcctggctcagggattttgaacagaaaaaaagagaggaagaagccaggctccttgagaccgggacaggtccgctgcatgacgaaaaggatgaatcactgtgcctctcatccagctgtgagggcgctgccggaacaccgaggccggctggggagccagcatgggttactcagtttgtgcagaagaaggaagaaagagatctggtggatcgcttgaaggccgagcaggcaagaagaaagcagagggaagagcggctgcagcaactgcagcatcgggttcagctgaagtatgcagccaagaggctgcgccaggaagaggaagaacgggagaacctgctgcgtctgtcacgtgagatgctagaaaccgggcccgaggcagaaaggctggagcagctggaaagcggcgaagaggaacttgtgttggcggagtacgaatccgacgaggagaagaaagtcgctagcagggtggacgaagacgaggatgatttagaagaggaacacatcacaaaaatctattactgctcaagaacccactcccagctggcccagttcgtccatgaggtcaagaagtcgcctttcgggaaggatgtgagattggtctcactgggtagcagacagaacttgtgcgtgaatgaagatgtgaagtctcttggaagcgtgcagctgattaatgacagatgtgtggacatgcagagatcaagacacgaaaaaaagaaaggggccgaagaggagaaacctaagcggagaagacaagagaaacaggctgcatgcccgttctacaatcacgaacagatggggctgctcagggatgaggcccttgccgaagttaaagacatggagcagctgctggcccttgggaaggaggctcgcgcgtgtccttattacgggtctagactggccattccagccgcgcaactggttgtgcttccctatcagatgctcctccacgccgccacgagacaggcggcgggcattcgcttacaggaccaggtggtgattatcgacgaagcacacaacctcatcgatactatcactgggatgcactcagttgaggtgtcaggaagccagctgtgccaagcccacagccagcttctgcagtacgtggagaggtacggtaagaggctcaaggccaagaatcttatgtacctgaagcagattctgtatttgctcgagaagttcgtggctgttctcggcggtaacatcaaacaaaatcctaacacacagagtctgagccagactgggacagaactgaagacaatcaacgacttcctcttccagtcccaaatcgacaatattaacctctttaaggttcagcggtattgcgagaaatcaatgatctcgaggaagctgtttgggttcacagaaaggtatggcgcagtgttctcaagcagggagcagcccaaactggctggattccagcagttcctccagtcgctgcagcctagaactaccgaagcattggctgcccccgctgacgaaagccaggctagcacactccggcccgcttctccattgatgcatatccaggggttcctagcagccctaacgacggcgaaccaggatggtcgagtcattttgtctagacaaggtagtctgtctcagtctacgctgaaatttctcctgctgaaccccgccgtgcattttgcccaggtcgtgaaagagtgtagagctgtagttatcgccggaggcactatgcagccagtgtctgactttcgccagcaactgttagcctgcgcaggcgtcgaagccgaacgggtggtggagttcagctgcggccatgtgatccctcccgataatatcctgccgctcgtcatctgcagtggcatttctaaccagcctttggaatttacattccagaaacgagagttaccccaaatgatggatgaagtcggcagaatactctgcaacctgtgcggtgtggtaccaggcggagtcgtctgcttcttccccagctacgaatacctacgccaggtgcacgcgcactgggagaagggaggcctgctagggagactggccgcccggaagaaaatatttcaggagcctaagtctgcgcaccaggtggagcaggtgcttctggcctattctcgctgcattcaggcctgcgggcaagagcgcggtcaagtcacaggcgccctcctcctgagtgtggtgggaggcaagatgagtgagggcataaattttagcgacaatctggggcggtgcgtggtcatggtgggaatgccatttcctaacatcaggagtgctgaattgcaagaaaaaatggcatacctggatcaaacattgagccctcgacctgggactccccgggaagggtccggaggggagcctgtccacgaaggacgccaacctgtacaccggcaaggccaccaggctcctgagggattttgccaaaggagcgcacctgggccagctatatgtccggccccatgccctgggcaggccgccgggctcgatcccagtccctgcggaggtcagtcatacctgtggccccgccattgctgctgcgcagaagtaagcccaggtgaggtagggctgttcctaatgggtaaccacactacagcgtggcgccgcgcactccccttaagctgtcccctggagacggtcttcgtggtcggagtagtctgcggcgatccagtcactaaagtgaaaccaagacgaagggtttggtcaccagagtgttgccaggatccaggcacgggagtgtccagccgacgacggaagtggggcaatccagagtag

SEQ ID NO: 14849 - DNA, 4293 bp, synthetic construct
  misc_feature 1..4293: note = Description of Artificial Sequence: Synthetic coding sequence
  source 1..4293: mol_type = other DNA
atgacagtctttcgccaagagaacgtggacgattactatgacacaggggaagagctggggagcggccagttcgctgtagtgaagaagtgccgcgagaagagcaccggcttgcagtatgccgcgaagtttatcaagaagcgacgaaccaagtcctcccgtcgtggcgtctcaagggaagacattgaacgcgaagtcagcatcctcaaggaaatccagcaccccaacgtcattaccctccacgaagtgtacgagaacaagactgacgtgattctaattctggagctggtggctgggggggaactattcgacttcttggcggagaaggaaagtctaacagaggaagaggctactgagttcctcaaacagatattaaacggcgtctattacctgcactcattgcagattgctcactttgatttgaagccagagaacatcatgttgctggatagaaatgtgccaaaacctaggatcaagatcatcgactttggcctcgcgcacaaaatagacttcggaaacgagttcaagaacatttttggaactcctgagttcgtggcgcccgagatagtaaactacgagccactgggtctagaggctgacatgtggagtatcggagtgataacctacatactcctgtccggagcctcaccattccttggcgacacaaaacaggagacactagccaatgtaagtgccgtgaattacgaattcgaggatgagtactttagtaatactagcgcgctcgccaaagatttcatcagacggcttctggtcaaggaccccaagaaacgaatgaccatccaggattctctgcagcatccctggataaagcccaaggatacccagcaagcactgtctaggaaggcaagtgcggtgaacatggagaaatttaagaaatttgcagcacgcaaaaagtggaagcagagcgttcgtctgatctccctttgtcaaagactctccaggagctttctgagccgctcgaacatgtcagtggctcgcagtgatgataccctggatgaggaggattctttcgtcatgaaagccattatccacgctattaatgacgacaacgttcctggtcttcagcacctgcttggcagtctgtccaattacgatgtaaaccagccaaacaagcacgggactcctcccctgctcattgctgccggttgtggaaatatacaaattctccaactgttgattaaaagggggagtaggatcgacgttcaggataaaggtggcagcaacgcggtgtactgggcagccaggcatggacacgtggatactctcaagtttctgtccgaaaacaagtgccccctcgacgtcaaagacaaaagcggggaaatggccctgcacgtggctgcccgatatgggcacgctgacgttgctcagctgctgtgctcttttggttccaaccctaatattcaagacaaggaggaagagacgcctctgcactgtgccgcttggcacggctattacagtgtggccaaggccctgtgtgaggccggatgcaatgtcaatattaaaaatagagaaggtgaaacacccttactgacagcaagtgctcggggatatcatgacatcgtagaatgcctcgccgagcacggcgctgatctcaacgcctgcgacaaagacggtcatattgccttgcacctcgccgtccgtaggtgccagatggaagtgattaaaacactgctcagccaaggatgcttcgtagattaccaagaccgccacggaaatactccactccacgtggcttgcaaggacggcaacatgcctatcgtggtcgctctctgcgaggcaaattgtaaccttgatatatccaataaatatgggagaacacccctgcatctggctgcaaataatggcattcttgacgtagtgcgatacctgtgccttatgggcgcaagcgtggaggccctgaccaccgacggcaagacagcagaggatcttgcgcgctcagagcagcacgagcatgtggctggtcttcttgcgagattaagaaaggacactcacagaggactgttcatacagcagcttagacctacacagaacctccagcccagaattaagctcaagctgtttggtcactctgggtcaggcaaaacaacgttggtggaatcattgaaatgcggattgttaagatcattttttcgtcgtcgccggcccagactttctagcaccaattcttcaaggttcccaccatcccctctggcctccaagccgaccgtgtctgtgagtataaataacctctatcccggatgcgagaacgtttctgtgcgtagcagatccatgatgttcgagcccggcctgacaaagggaatgttggaggtgttcgtggctccaactcaccacccccactgctccgcagatgatcaatcaacaaaagcaatcgatatccagaacgcctacctcaatggcgttggcgattttagcgtttgggagttctcaggcaatccagtgtacttttgttgttacgactattttgccgcaaacgaccctactagtatccatgtggtggtcttctctctggaggagccctacgaaatccagctgaaccaagtcattttctggctgtccttcctgaagagtttggtacccgtggaagaacccatagccttcggtggaaagttgaaaaaccccctccaggtggtcctcgtggcgacccacgccgatataatgaatgtgcctaggcctgctggcggcgagtttggctacgataaggacacttccttgttaaaggaaatccggaacagatttgggaatgatctgcatatcagcaacaagctgtttgtgctcgatgccggcgcttcagggtctaaggacatgaaggtgctccgcaatcacctccaggagatcagatctcaaattgtgtcagtctgtccccctatgactcatctttgcgaaaagatcattagtactctgcccagctggcgtaaacttaatggtcctaaccagctgatgagtctgcagcagtttgtgtatgacgttcaggaccagttgaaccccctggcgtccgaagaggatttacgccggatagcccagcagctgcatagtacaggggagatcaacatcatgcagagtgagacggttcaggatgttttattactggatcccaggtggctgtgcaccaacgtcctgggcaaactgttatccgtggagaccccacgtgctctccaccactatcgggggcggtacacagtggaggacatccagcgactggtgccagacagcgacgttgaggaactcctgcaaatattggacgctatggatatatgcgccagggatttgtcttcaggcacaatggtagacgtacctgcactcataaagacagataacctgcaccgaagttgggccgatgaagaggatgaagtcatggtatacggtggagtgcgcatagtgccggttgaacatttgactccttttccctgtggcatcttccataaggtgcaggtgaatctgtgtcgctggatccaccagcaatctactgaaggggacgccgacattaggctgtgggtgaacgggtgcaagttagctaaccgaggagcggagctgctcgtccttctggtgaatcacggccagggcatcgaggtacaggtgcgcggattggaaaccgagaagattaagtgttgcctcctattggattctgtgtgcagcacaatagagaacgtgatggcaactaccctgccaggccttttgaccgtgaagcactatctgagccctcaacaacttagagagcatcacgagcccgtgatgatttaccagccacgcgatttttttcgggcacaaacgctgaaagagacaagcctcaccaacacaatgggcggttacaaagagtcgtttagcagcatcatgtgttttggttgtcatgacgtctactcccaagccagcctgggtatggatatccatgcatcggacctgaatcttctcacacgtcgcaaactgtcgcggctgctggaccctcctgaccccctgggtaaggattggtgtttgctcgccatgaacttgggcctgccagacctggtcgccaaatacaatacatctaacggtgctcctaaagacttcctgccatctcctctgcatgcccttctgagagaatggacaacataccccgagagcacggtgggcacgctaatgtcgaaactcagggagttaggccggcgcgacgccgccgatttcttgctgaaagcatcgtccgtctttaagatcaacctggatggaaacgggcaagaggcgtatgctagcagttgcaattcagggacctcctacaattccatcagcagtgtcgtatctaggtag

SEQ ID NO: 14850 - DNA, 4293 bp, synthetic construct
  misc_feature 1..4293: note = Description of Artificial Sequence: Synthetic coding sequence
  source 1..4293: mol_type = other DNA
atgaccgtcttccgacaggagaatgtggacgattactacgacactggcgaagagcttggctcgggccaattcgctgtcgtaaagaaatgccgggaaaagagcaccgggctgcagtacgctgccaagttcattaagaagcgacggactaagagttcacgacggggagtgtcacgggaggatattgaacgggaagtgtctatcttaaaggagattcaacaccctaacgttataaccctccacgaggtctatgaaaacaagacagacgtgattctcattctggaactagtggcaggaggcgagttgtttgacttcttggccgagaaggaatctctcaccgaggaggaggccaccgagttcctcaagcagatcctcaacggtgtgtattatttgcacagcttgcagatcgcacactttgacctgaaacccgaaaacattatgttactggataggaatgtgcccaaacccagaatcaagattatcgatttcggcttagcccataaaattgactttggaaacgagtttaagaacatctttgggactcccgaattcgtcgctccagagatcgtaaattacgagccacttggtctggaggcagacatgtggtcaatcggggtgatcacctacatcctgctctcaggagcctccccttttctcggggatactaaacaggagacgctggctaatgtgagcgcggtcaactacgagttcgaagacgagtacttcagcaacacttccgctttggctaaggatttcatccgcaggttgctggtgaaggacccaaagaaacgcatgaccatccaggattcattacagcatccatggatcaaaccaaaagacactcagcaggccctgtcgagaaaagcctctgcagtgaacatggagaagtttaaaaagtttgctgctaggaagaagtggaaacaatccgtgaggctgatatccctctgccagagattgagtcgatcctttctttcgagatccaatatgagtgttgccagatccgatgacaccctggacgaggaggactcatttgtgatgaaggcgatcattcacgctataaatgacgacaacgtgcctgggctacagcacctcctggggtctctatctaattatgacgtgaaccagccgaacaaacatggaaccccccccctgcttatagccgcgggttgcgggaacattcagatcctccagctgcttattaaaaggggtagccgcattgacgtgcaggataagggtggcagcaacgcagtctattgggccgcaagacacgggcacgtagacaccttgaaatttctcagcgagaataaatgcccactagatgttaaggacaagtcaggagagatggctctgcatgtcgccgcccgatacgggcatgcggacgtggcgcagctcctttgtagcttcggctcgaaccccaatattcaagataaagaggaagaaacccctctgcattgtgccgcttggcatggctattattccgtcgcgaaagccttgtgtgaagccgggtgtaatgtcaacatcaagaacagggagggggagactcctctcctgaccgcctctgctcgcggctaccatgacatagtcgagtgtttggctgagcacggggccgacctgaatgcatgtgacaaggatggccacatcgcactgcatttagccgtgcgtaggtgtcagatggaagtgattaagactcttctcagccaaggatgcttcgtagactaccaggaccgacacggcaacaccccattgcatgttgcatgtaaggacggcaatatgcctatcgtcgttgctctatgtgaggccaattgcaacctggacatttcgaataaatacggtaggacacccctgcatctggccgcaaataatggcattttggacgtcgtacgctatctttgtctgatgggggcctctgtggaggctttaacaaccgatggaaaaaccgccgaggatctggctcggtccgagcagcatgagcatgtggctggactgctggccagactccgtaaggatacacaccggggcttgttcatccagcagttgcgccccacccagaacctgcagccaaggatcaagctcaagctgtttggccatagcggcagcgggaagactactctcgtggagagcctgaagtgtgggcttctacgaagtttctttagacgtcgtcgcccccgtctctcaagcaccaattccagcagatttccacctagtccgctggcatcaaaaccaaccgtgtcagtgtcaatcaataacctgtatccgggttgcgagaatgtatcagttcgaagccgatccatgatgttcgagcctggcctcacgaaggggatgctggaggtgtttgtagcgcctacacaccacccacactgctctgcagatgatcagtcaacaaaggccattgacatacagaatgcctatcttaacggcgtcggagacttttctgtgtgggaattctcggggaatcccgtgtacttctgctgctatgattattttgcagcaaacgatcctacctctattcacgtcgttgtcttctctttggaagagccctatgagatacagctcaaccaggtcattttctggctgtcattcttaaaatcccttgttcctgttgaagagcctatagcattcggtggcaaactgaagaatccactacaagtcgtactggtagctacacatgccgatattatgaacgtcccccggccggcaggaggggagtttggctacgataaggacaccagcttgctcaaagagattcgaaacaggttcggaaacgacttgcatatctccaataaactcttcgtgctcgacgccggagcctctggttccaaggatatgaaggtacttcgaaaccacctacaggaaatccgcagtcagatcgtgagcgtgtgtccccctatgacacatctgtgtgaaaaaataatttctacattgcctagctggcgcaaactgaatggaccaaatcagctgatgtcactccagcagtttgtgtatgatgtgcaagaccagctcaaccctctggcgtccgaggaggaccttcggcggattgctcagcaacttcacagcactggcgaaattaacatcatgcagagcgaaactgtgcaggacgtgctgcttctagatccacggtggctttgtaccaacgtgctgggcaaattgttgagcgtagaaactccgcgggccctgcatcactacagggggcgctacaccgtagaggacatccaaaggctggtccctgactctgacgtggaggaactgctccagatcttagatgccatggacatctgcgctcgcgatctgagcagtggcaccatggtagatgtacccgccctgatcaagaccgataacctccaccggagctgggccgacgaggaggatgaggttatggtctatggaggtgtcagaattgttccagtagaacatctcacacccttcccctgcgggatttttcataaggttcaggttaatctgtgtcgatggatccatcaacagtccaccgaaggtgacgctgacatcaggctgtgggtaaatgggtgcaaactggccaacagaggagctgagctgttggtgttactggtgaatcatggtcagggcatcgaggtgcaggtccggggcttagagacagagaaaatcaaatgctgcctgctccttgattccgtgtgttcaacaatagaaaatgtcatggctacaacattgcccggacttctaaccgtgaaacattacctgtccccccaacagctccgcgaacaccatgagcctgtgatgatctaccagcctagggattttttccgggcacagacattgaaagagacgagtctgacgaataccatgggcggatataaggaaagcttcagttccatcatgtgttttggttgccacgatgtgtactcacaagcttctctgggcatggatatccatgccagtgacctcaacttgctgacaaggcgaaaactgagtcggcttttggatccccccgaccctctggggaaagactggtgccttttggctatgaacttaggactcccggacctcgttgccaaatataatacctccaacggggcaccaaaagactttctcccaagccctttacacgccctgcttcgtgaatggaccacttatcctgagtccaccgtcggtaccctgatgtcaaagctacgtgaattgggacgtcgcgacgctgcggactttttgttaaaggcatcatccgtttttaagataaacctggacggcaatggacaggaggcatatgctagctcatgcaattctggcacaagctacaactcaatctcttccgtggtcagccggtag

SEQ ID NO: 14851 - DNA, 4368 bp, synthetic construct
  misc_feature 1..4368: note = Description of Artificial Sequence: Synthetic coding sequence
  source 1..4368: mol_type = other DNA
atgacggtgttccgccaggagaacgtcgatgactactacgatacaggagaggagctggggagtggtcaatttgccgtggttaagaagtgcagggaaaagagcaccgggttgcagtatgccgcaaagttcattaaaaaacggaggaccaaaagcagcagacggggcgtgtcacgcgaggacatcgaaagggaggtctcaattctgaaggaaatacagcatcctaacgtgatcacgctgcatgaagtctacgagaataagacagatgtgattctaattctcgagctggttgccgggggagagctcttcgacttcctcgcagagaaggagtccctgaccgaggaggaagcaacagagtttttaaagcagattctcaatggcgtctattatctacatagcctccaaattgcccacttcgatcttaaaccagagaatatcatgctcctagatcggaacgtgccgaaaccaagaatcaaaatcatcgactttgggctcgctcacaagatagacttcggaaatgaattcaagaacattttcggaactcctgagtttgtggcgcccgaaattgttaactatgaaccattggggctcgaagctgacatgtggagtatcggagtgattacatatatcctgctctcaggcgccagcccgttcctcggtgacactaaacaggaaacgctggcgaacgtgtcagctgtaaactatgaatttgaagacgagtatttcagcaatacctcagccttggctaaagacttcatccgcaggttgctggtgaaggatccaaagaaacggatgacaattcaggatagcctgcagcatccatggatcaaacctaaggacacacaacaggccctcagtagaaaggcaagtgcagtcaatatggagaagttcaaaaagttcgcagctaggaagaagtggaagcagtcggtccgcctaatctccctttgccagcggctgtctagatccttcctcagtcggtccaacatgtcagtggcgaggtccgatgatactttagatgaagaagactcttttgtgatgaaagccataatccatgccataaatgatgacaacgtgccaggtctccagcatctgcttggatcactgagtaattatgacgtgaatcagccaaataagcacggaactccccccctgctcattgcagctggatgcggcaatatccagatactccagctcctcatcaaacgaggcagtcgcatcgacgtgcaggacaagggcggctccaacgccgtctactgggcagccagacatggccacgttgacactctgaaattcttatccgagaacaagtgtccattagatgtgaaagataagtccggcgagatggccctgcacgtcgctgcacggtacggtcacgcagacgttgctcagttgttgtgttcatttggatccaatcctaatatccaggataaggaggaggagaccccgctgcattgcgccgcatggcacggctattacagtgtcgccaaagctctttgtgaagcggggtgcaacgtcaatataaagaatcgcgagggagagaccccccttctgacggcctctgctaggggttaccatgacatcgtggagtgtctcgctgagcatggtgctgacctcaacgcctgtgacaaagacggccatattgctttgcaccttgccgtccgccggtgtcaaatggaggtcattaagaccctcttaagccagggctgctttgtggactatcaggacaggcacggaaatactccactccatgtggcttgcaaggatggtaatatgcccatcgttgtggcactttgtgaagccaattgcaacctggacatctctaataaatacggcagaacccctctgcacctggcagccaacaacgggatccttgatgtcgtacggtacctctgtttgatgggagcaagtgtggaggccctaactaccgacggaaaaaccgccgaagacctggcccgaagcgagcagcatgagcacgtggccggcttgctggcccggctgcggaaagatactcaccgtgggttgttcattcagcagctgcgaccaacacagaacctccaaccccgtattaaactgaagctctttggtcatagcggcagtggtaagactacattagttgaatcgttaaagtgcggattactgaggtcttttttccgcagacggagacccagattgtcatccaccaactccagccgatttccaccatctcctctggcttctaagcctaccgtcagtgtcagtatcaataacttgtacccagggtgtgaaaatgtgtctgtgcgctctcgctccatgatgtttgagccaggactcacaaagggcatgcttgaggtctttgtcgctccgactcaccacccgcactgctctgctgacgatcagtcaacaaaagctatagatatccagaacgcatatttaaacggggtgggcgatttctctgtgtgggagttttctggcaaccctgtctatttttgttgttatgattattttgccgcgaatgatccgacatctatccacgtagttgtcttttccttagaagagccttacgaaatccagcttaatcaggtaattttttggctctcctttctgaagtcactggtgccggtggaagaacctatcgccttcggaggcaagttgaagaatcccctgcaggtggtgctcgtggccacccatgccgacataatgaacgtccctcggcccgcgggtggcgagttcggctacgataaagataccagcttgcttaaggagatcagaaacaggttcggcaatgacctccatatttctaacaaactcttcgtgcttgacgctggagcctccgggtccaaggatatgaaagtcttaaggaaccatctgcaggagattcgaagccagatagtcagtaaaacgttaccattcactcccgatatactggtaggagttcctttatggcatcatcagaaaattgggggatccccagtgtgccctcctatgactcacctgtgcgaaaaaataatctcaaccttgcccagctggcgaaaattgaacggacctaaccagcttatgtcactgcaacaattcgtgtacgacgtacaggaccagctgaatcctctggccagcgaggaagacctgagaaggatcgcccagcagttgcactccaccggagagattaacataatgcagagcgaaaccgtgcaagacgttctcctgctagacccaagatggttgtgtaccaatgttctgggcaagttattgtccgtggagactccacgtgctttgcaccactacagggggagatataccgtcgaagacattcagagacttgtcccagatagcgatgtcgaagagttattacagatcctggatgcgatggatatttgtgcccgggacttgtcctcgggcaccatggtcgatgttccggcactgatcaaaaccgacaatctgcaccgctcatgggctgacgaggaagacgaggttatggtgtacgggggcgtacgcattgttccagttgagcaccttactccatttccctgtggcattttccacaaggtgcaggttaacctttgccgatggatacatcagcagtcaaccgagggcgacgccgacattagactttgggtcaacggctgcaagctggctaacaggggcgcagagttactggtgcttctggtgaaccatggccagggtatcgaagttcaggtacgggggctcgaaaccgagaaaatcaaatgctgcttgcttctcgacagcgtctgctcaacgatcgagaacgtaatggctaccactctgccaggcctcctgactgttaaacactatctgtctccacagcaactgagagaacaccatgagccagtcatgatctaccaaccaagagacttcttcagagctcaaacccttaaagagacctctcttaccaacacgatgggtggctataaggagtccttttccagcattatgtgcttcggatgtcatgatgtgtatagccaggcttcccttggtatggatatacatgccagtgacctcaacctgcttacacgcaggaagctttcaaggttgctagatcctccagacccactcggaaaagattggtgcctgctggcgatgaatttagggctcccggatcttgtcgcaaagtacaacacctcaaatggagctcccaaggactttctgccttcacctttacacgcactactgcgggaatggaccacctatccagagtctactgtgggcacacttatgagcaagttacgggagttaggtaggagagatgctgccgacttcctgcttaaggcatcgagtgtatttaagatcaacctggatggcaatgggcaggaggcttatgcttcatcctgtaattcaggaacttcctacaattccataagctcagtcgtgtctagatag

SEQ ID NO: 14852 - DNA, 4293 bp, synthetic construct
  misc_feature 1..4293: note = Description of Artificial Sequence: Synthetic coding sequence
  source 1..4293: mol_type = other DNA
atgaccgtgttcagacaggaaaacgtggacgattattatgacactggcgaggaacttgggtccggacagtttgctgttgtgaaaaagtgtcgggaaaaatcgactgggctccagtacgcagcaaagtttataaaaaaaagacgtaccaaatcaagcaggcggggcgtgagtcgggaggatatcgagagggaagtaagtattctgaaggaaattcagcacccaaacgtcatcacattgcacgaggtttatgagaataagaccgatgtgatactgattctcgaactggtggccggaggtgaactgtttgatttcctcgccgagaaagagagcctaaccgaagaggaagctacggagttcttgaaacagattctgaacggtgtttattacctccactccctgcagattgcccatttcgatctgaaacctgagaacatcatgctgctggatcgaaatgtcccaaagcctagaatcaagataattgacttcgggctggctcacaagatcgatttcggcaatgagtttaaaaatattttcggcacccccgaattcgtggctcctgaaatcgttaattacgaaccattaggcctagaagcagatatgtggtcgattggagtaatcacgtacatccttctgagcggggcctccccattcctcggcgacacgaaacaagagaccctggcaaatgtatcagcagttaactacgagtttgaggatgaatacttctcaaatactagcgcccttgctaaggactttatacgaaggctgctggtgaaagatccaaaaaagcgaatgactattcaggactctctgcagcatccctggataaaaccgaaggacacccagcaggctttgtccaggaaggccagcgccgtcaatatggagaagtttaagaagtttgccgcccgtaaaaagtggaagcaatccgtccgcctgatttctctatgtcagcggctttcccgcagcttcctcagcagaagcaatatgagtgttgctagaagcgatgacactcttgacgaagaggattccttcgtcatgaaggctatcatccatgctatcaatgatgataatgtacccggacttcagcacctgcttgggagtctctctaattatgacgtgaatcaaccaaataaacacggcactccacctcttctgattgctgcgggatgcggcaacattcagatcctccaactgctgattaagagggggagccgcatcgacgttcaggacaaagggggaagcaacgccgtatattgggccgctcggcacggacacgtggacactcttaaatttttgtccgagaacaaatgccccctggacgttaaagacaagtccggagaaatggctctacacgtagccgcacgctacgggcatgcagacgttgctcaattgctctgcagtttcggatccaacccaaatattcaagataaagaggaagaaacgcccttacactgtgccgcctggcatggatattattccgtagcaaaggccctttgcgaggccggctgcaatgtcaatatcaaaaatcgtgaaggtgagacacctcttctgactgccagtgcccgtggatatcatgatatcgtcgagtgcttagccgagcacggtgcagatctgaacgcatgcgataaggatggccacattgccctccaccttgctgtacgtagatgtcagatggaggtgatcaaaaccctgttaagccagggctgcttcgttgattatcaagatcgccacggcaatacacctttacacgtggcttgtaaggacggtaacatgcccatcgtcgtagcgctctgtgaggccaattgcaacctcgatatctctaacaaatacggaagaacccccctacacctggctgcgaataacgggatactggacgtcgtccgctatctgtgtttaatgggggcatccgtggaagctttgaccaccgacggtaagacagccgaggaccttgcccgcagcgagcagcatgaacatgttgccggtttgctggcaagactgaggaaagacacacacagaggcctcttcatccaacagctcagaccaacacagaacttgcagccgcgtatcaaactcaagctcttcggacattccggtagtggcaagactacgttggttgagagcctgaaatgtggactgctgagatccttctttcgcaggaggaggccccgtcttagctctaccaattcttctagatttcctccatcgcctctagcatcaaagcccactgtgtctgtctccataaataacctgtacccgggctgcgagaacgtctcagtgaggtctaggagtatgatgtttgaaccaggactcaccaagggcatgcttgaagtgttcgtggcacccacccaccatccacactgtagcgccgatgatcagtccacaaaagctattgacatccaaaatgcatatttgaatggggtaggggatttctcagtgtgggagttcagcggtaaccctgtatacttctgttgttatgactactttgctgccaacgacccaacttctatccacgtagtcgtttttagtttggaggagccatatgagatccaactcaaccaggtgatcttctggctgtctttcctcaaatctctcgtgcccgtagaagagcctatcgccttcggcggcaaactgaagaatccgctgcaggtggtacttgtcgcgactcacgccgacatcatgaacgtgccacgacccgcgggaggcgaattcggttatgacaaagatacaagtttattgaaggaaattcgaaaccggttcggcaacgatttacacatctctaacaagctgtttgtgctggatgccggtgcctctggctcaaaggacatgaaagtcctgagaaatcacctgcaggagataagaagccagattgtgtctgtgtgcccacccatgacacacttatgcgaaaagatcattagtactctcccctcatggcgtaagctgaatgggccaaaccagttaatgtccctgcagcagttcgtttatgacgtgcaggatcagctgaacccactggcttctgaggaagacctaagacgaatcgcacaacagctgcactctaccggagaaataaacattatgcaaagtgagaccgtccaggacgtactgctcctagatcctagatggctgtgcaccaatgtcctgggcaaactgttgtcagtggaaaccccacgcgccctccaccactatcgtggccgctatacagtggaggacatccagagattagtgcccgacagcgacgtagaggaactgctccagatcttggacgctatggatatttgtgcacgggaccttagctccggtaccatggtggacgtgcctgcactgatcaaaaccgacaatctgcatcggagctgggcagacgaggaagatgaagtgatggtgtatggtggcgtccgtatcgtgccagtagaacatctgacgccttttccttgcggaattttccataaagtgcaagtcaatctctgccggtggattcaccagcaaagtaccgaaggagacgccgacatccggctgtgggttaatggatgtaagttggcaaaccggggagcagagctgcttgtgctcctcgtgaaccacggccagggcattgaagtacaagtgagagggcttgagactgaaaagattaagtgctgcctccttttggattccgtgtgtagcacaatcgagaatgtgatggctacgactctccccgggctgctgactgtgaaacattatctctcaccgcagcaactgagggagcatcatgaaccagtgatgatctatcagcccagagatttctttagagcacagactctgaaagaaacgagtctcaccaacacaatgggaggatataaagaatcgttctcttccattatgtgcttcggctgccacgacgtgtattcccaggcatcactgggtatggacattcatgctagtgatttgaatctcctgacaaggcgcaagctgtctaggctcttggatccacctgatcccctgggcaaagattggtgtttgctggcgatgaaccttgggctccccgaccttgtggcaaaatataacacctccaacggggctcccaaggattttctgccgagccctttgcacgctctgctacgggagtggaccacctatccggagagtacagtgggcacactgatgtctaagctccgcgagctgggccgcagggacgctgccgacttcttgctgaaggcttcgagcgttttcaagattaacctcgatggaaacgggcaggaggcatacgcaagtagttgtaactccggcacctcttataacagcatctcttcagtcgtgagccgctag

SEQ ID NO: 14853 - DNA, 4095 bp, synthetic construct
  misc_feature 1..4095: note = Description of Artificial Sequence: Synthetic coding sequence
  source 1..4095: mol_type = other DNA
atgactgtgtttcggcaggagaatgtagacgattactatgataccggagaagagctgggatccggacagtttgccgtggtgaagaaatgccgggagaagtccactggactgcagtacgctgctaagtttattaagaaaagaaggaccaagagctctcggaggggcgtttcaagagaagatattgagcgcgaagtgtccattctgaaagaaatacagcatcccaatgtgatcactttgcacgaggtgtatgaaaacaaaaccgatgtcatcctgatacttgaactggtggccggcggagagctgtttgacttccttgctgagaaggagtcactgacagaagaggaggcaacggagttcctgaagcagatcctgaatggcgtatactacttacacagtctgcagatcgcccacttcgacctcaaacctgagaacatcatgctgctggaccgcaatgtgcccaaaccccggattaagataattgactttggcctcgcacacaagatagactttgggaacgagttcaagaacattttcgggacgccagagttcgtcgcaccagaaatcgtgaattacgaacccctgggactggaagctgacatgtggtccattggcgtgattacctacatacttctgtctggagccagcccctttctaggcgacacaaagcaggagaccctggccaatgtctccgctgtaaattacgagtttgaggatgaatatttcagtaatacctcggcactggccaaagatttcattcgccgccttcttgttaaggaccccaagaaacggatgacgatccaggactccctacaacatccatggatcaagcctaaagatacacaacaagctctgtcaaggaaagcaagcgctgtgaatatggaaaaattcaagaagtttgcggcccgtaagaagtggaagcaaagcgtgaggctgatctctctttgccagcgactgtctcgctcttttctgtcgcggtctaacatgtctgttgcgagaagcgatgacaccttagatgaggaagattcatttgtgatgaaagccataatccacgctataaacgacgataacgtgcctggacttcagcatttgttaggcagtttatccaattacgacgtgaaccagccaaataaacatggcacacctccactgctcatcgccgccggatgcggaaatattcagattctacagctattaattaaacgaggatctcggattgacgtgcaggacaaaggaggtagcaatgccgtctactgggcggcccgacacgggcacgttgacacacttaagttcctttcagaaaataaatgtcctttagatgttaaggacaagtcgggcgaaatggctctgcacgtggccgccaggtatggccatgcggacgttgcacagctgttgtgcagcttcggctctaatccgaacatccaggataaggaggaggaaactcctctgcactgtgcagcatggcatggctactacagcgtcgccaaagccctgtgtgaggccgggtgtaacgtcaacataaagaacagagagggagagacccctctccttaccgccagcgccagaggctaccatgatatcgtggaatgtctcgcagaacatggcgcggatctgaacgcttgcgacaaggatggtcacatcgccctgcacttagctgtcaggcgctgccagatggaagtaataaaaactctgctgtcccaggggtgtttcgtcgactaccaagatcgccatgggaatacacccctgcacgtggcatgtaaggatgggaacatgcctatcgtggtggccttatgtgaagcaaattgcaatctggatatttccaacaagtatggtcgtacaccattacatctggctgctaacaacggcattttagatgtcgtaaggtatttgtgtttgatgggtgcttctgttgaggcactgaccacagacggcaagactgcagaggatttggctaggtccgagcagcacgagcacgtggcaggcctgcttgccagactgcggaaggatacacatagggggctttttatccagcaattacggcctacccaaaacttgcagccccgtatcaagctgaagttgtttgggcattcagggtctggcaagactaccctcgtggagtcactgaagtgtgggctgctccggtctttctttaggcggaggagaccccgtttgtcctccacaaactctagtagatttccacccagcccactcgccagcaagccaacagtatctgtctcgatcaacaacctctaccctggctgcgaaaatgtgtcggtgcgaagtagaagcatgatgttcgaacctggtctgacgaagggaatgctcgaggtgttcgtcgcccctacccaccacccccactgttctgctgacgaccagtcaaccaaagcgatagatatccagaatgcctacctgaacgctttcggaggcaaactcaagaacccactccaggtcgtcctagtggcaacacatgcagacattatgaatgtaccgaggccggcgggtggtgagttcggttacgacaaggacacgtctttgctgaaggagattcgtaataggtttggtaacgatctgcatatatccaataaactgttcgtcttggacgccggtgccagcgggtcaaaggatatgaaggttctgaggaaccacctgcaagaaattcggtctcaaatcgtctcggtctgccctccgatgacccacttatgcgaaaagattatttcaaccctcccaagctggaggaaactgaacggacctaaccaactgatgtcactgcaacagtttgtctacgatgtgcaagatcagctcaacccgctcgcgagcgaggaagacctgcgacgcattgctcagcaactgcactcaactggcgaaatcaatatcatgcagagcgagacagtccaagacgttctgctgctagacccccggtggctctgtactaatgtgcttgggaaactgctgtccgttgagacacctcgggctttgcaccactataggggccgatatacagttgaggacatccagcggctcgtgccagattccgatgttgaggagctgttgcagatcctggatgctatggacatctgtgctcgggacctgagctcaggaaccatggtggatgtgcccgccttaatcaaaaccgacaatttgcatagaagctgggctgacgaggaagatgaggtcatggtatatggaggcgtgcggatcgtgccagtcgagcacctgacccctttcccctgtgggatttttcacaaagtgcaggtgaatctgtgtaggtggattcatcaacaatccacagagggcgacgccgatatcaggctttgggtgaacggatgcaagctcgcgaaccggggcgctgaactactcgtactgctggtgaatcacgggcaaggtatagaagtccaggtgagggggttagagacagagaagataaaatgctgtctcctcctcgactccgtatgtagcacaattgagaatgtcatggctaccaccctccctggcttgctgacggtgaaacactacctctccccacaacagctacgcgaacaccacgagcctgtgatgatttaccagcctagagacttctttagggctcagacattgaaagaaacatcacttactaacaccatgggaggctataaggaaagcttcagctctatcatgtgcttcggctgccacgacgtgtattcccaggcctccttgggcatggacattcatgcctctgacctgaacctgctgacaaggcgcaaattgtccaggctgctagacccacccgaccccctcggaaaggattggtgcctactagccatgaacttgggcctgcccgacctggtggctaagtataatacaagtaatggagcacctaaggatttccttcctagtccactccacgcactgctgcgtgagtggactacctacccggaaagcacagtcggaactcttatgagcaaactgcgcgagctcggacgaagggatgcggccgattttctgcttaaagccagctctgtctttaaaattaatctggatgggaacggccaagaggcctatgcctcttcatgcaattctggcacatcatacaattccatcagctcggttgtcagcagatag

SEQ ID NO: 14854 - DNA, 2223 bp, synthetic construct
  misc_feature 1..2223: note = Description of Artificial Sequence: Synthetic coding sequence
  source 1..2223: mol_type = other DNA
atggcaacggcaaactccatcattgttcttgacgacgacgatgaggatgaagccgctgcccaacctggtccttcccaccctctcccaaacgctgcatcccctggcgctgaagctccaagttccagcgagcctcatggagcccggggaagcagcagttccgggggaaagaagtgctacaaactggaaaacgagaagctcttcgaggagttccttgaactttgtaagatgcagacagccgatcacccagaggttgtgccatttctatacaacaggcagcaaagagcacactccttatttttggcctccgcagagttttgtaacatcctttctagggtgctaagtcgggcaagaagcagaccagccaaattgtatgtgtacattaatgagctttgcacggtgctcaaggctcactccgccaagaagaagctgaatttagctcccgcggccacaacctctaacgaaccatcaggaaataaccccccaacccacttgtcactggatcccaccaacgcggagaataccgcaagccagtctccccgcaccaggggctcccgccgccagatacagagactggagcagctgctagcactttacgtggctgagatcaggagactccaagagaaagagctggacctctcagagctggacgacccagacagcgcctacctgcaggaagcccgtttgaaacgcaaactcatccgcttattcgggaggctctgcgaactaaaggattgctcatccctcaccggccgcgtgattgaacaaagaataccttaccgcggcacccgatacccggaagtgaacaggcgcatcgagaggctgatcaacaagccaggtcccgatacatttcccgattacggggatgtgttgcgtgctgtggagaaggcggcggcacgccacagcctcggattgcccaggcagcagttgcaactcatggcccaggatgcttttcgagacgtaggaataagattgcaggagaggcgacatctggatctgatctataacttcggatgccatcttaccgacgattatcgccccggcgtggatccagctctgtcggatcctgtgctggctagacgtttgagagagaaccgcagcttagccatgtctcgcctcgacgaggtcatttctaaatacgccatgctccaggacaagtcagaggagggagagagaaagaaaaggcgagctagactgcaggggacatccagccacagcgctgatacccctgaggcctcactggacagcggtgagggtccatccggcatggcctcacagggctgcccatcagcctcacgcgctgaaacagatgacgaagatgatgaggagagtgacgaggaagaggaagaagaggaagaagaagaagaggaagaagcaactgattctgaagaagaggaggacctggagcaaatgcaggagggccaggaggacgacgaagaagaagatgaggaggaggaggccgccgccgggaaggacggggacaaaagtcctatgtcatctctgcagatctctaacgagaaaaacctggagccagggaagcagataagccgctctagtggagaacagcagaataagggacgtattgtttcacctagccttctatcggaggaaccccttgccccatcctccatcgacgccgagagtaacggcgagcagcctgaggagctgacactggaggaggaaagtccagtctcccagctgttcgagctagagatcgaggccctgccgctcgacacgccttcatcggtggagacagatattagttcttcccgaaagcaaagcgaagaacccttcacgaccgtgctggagaatggcgctgggatggtgtcttcaacatccttcaatggcggagtctctccacataattggggggactctggacccccttgtaagaagtcaagaaaggagaagaaacaaactggctccggcccactcgggaactcctacgtggagcgtcagcgtagtgttcacgagaagaacggaaaaaaaatctgtaccttgcccagtcctccaagtccactggcctcgctcgcccctgtggctgacagctctactcgggtcgatagcccgtcgcatgggcttgtcacctcaagcctgtgcataccgtcgcctgcacgcctgtcacaaactccgcacagtcagccacctcggcccggtacatgcaaaaccagcgtcgctacccagtgcgacccagaagaaattatcgtactctctgactccgactag

SEQ ID NO: 14855 - DNA, 2223 bp, synthetic construct
  misc_feature 1..2223: note = Description of Artificial Sequence: Synthetic coding sequence
  source 1..2223: mol_type = other DNA
atggcaactgcaaattccatcatcgtattggacgacgatgatgaagatgaggccgctgctcagccagggccttcacaccccctccccaacgctgcgtcccctggcgcagaggccccctcatcctccgagcctcatggcgcaaggggctcctcgagttctggtggaaagaaatgctacaaacttgagaacgagaagcttttcgaagagttcttagaactgtgcaaaatgcagacagctgaccacccggaggttgtgcccttcttgtacaatcggcagcaacgggcccactctctgttcctggcgtcagccgagttctgtaatatcctgtccagggtactgtctcgggctaggtcaaggcctgccaagctatacgtgtacatcaatgaactttgtactgtcctcaaagcccacagcgcgaagaagaaactgaacctggccccagcagcaacaaccagcaacgagccatccggtaataaccctccaacccacctgagcttagatcctacaaatgccgaaaacaccgcctcacagtcaccccggacccgcggctcccggagacagatccagcgtctggagcaactgctggcactttacgtcgctgaaatcaggcggctgcaggagaaagaactcgatctctctgagctggatgaccccgacagcgcatatctgcaagaggctaggctcaaaagaaagctcatacggctcttcggcaggctctgtgaattgaaggattgtagtagcctgactggaagagttatcgaacagcgcattccataccggggtacaagatatccggaggttaataggaggatcgagcgcttgattaacaaaccagggccagacacttttccagactacggtgatgtactgcgagcagtggaaaaggctgctgctaggcactccctgggattaccacggcagcagctgcagctgatggcacaagatgcttttagggatgtgggcatcaggttacaggagagaaggcaccttgatctaatttataactttggttgtcatctgacagacgactatcgcccaggagtggatcccgcactcagtgacccagtgctcgccagacggctgcgggagaataggtctctcgccatgagcagactggacgaagttatcagtaagtatgccatgttgcaggacaaatcggaggagggagagcggaaaaagagacgggcccgcctacagggcaccagctctcatagtgcagacactccagaggctagtctggatagcggagagggtccctctgggatggcctcccaagggtgtcccagcgccagcagggccgagacagacgatgaggacgacgaggaatcggatgaggaagaagaggaggaagaggaggaggaagaagaggaggccacagactcagaggaggaggaggacctggagcagatgcaagagggtcaagaagacgacgaagaggaggacgaagaggaagaggctgcagcgggtaaagatggggataagtctcccatgagcagtctgcagatctccaatgaaaagaacctggagcctggcaagcagatctcccggtcaagtggggagcagcagaacaagggtcgaatagtctctccatctcttctgagcgaagaacctctggccccgtcttcaatcgatgccgaaagcaacggagaacagcccgaggaactgaccctcgaagaagaatcacccgtgagccaactgttcgaactagagatcgaggccctgcccttagataccccgtcgagcgtggaaacagacattagctcgtctcgaaaacagagcgaggaaccattcaccaccgtactggagaatggagctgggatggtcagttccacgtcttttaacgggggcgtatcacctcacaactggggggacagcggtccgccgtgtaagaaatcacgaaaagagaagaaacagaccggctccggtccactgggaaatagctacgttgaacgccagagatctgtccatgagaaaaacggaaaaaaaatatgcacactcccatcgcctccatccccacttgccagtctggccccggtggcagatagctcaaccagggtggactcaccaagccacggcctcgtcacctctagtctatgcatccccagccctgctcggctatcccaaacaccacactcccaaccaccacgccccggaacttgcaaaacatccgttgcaacacagtgcgacccagaggagatcatagtcctgtctgactctgattag

SEQ ID NO: 14856 - DNA, 1998 bp, synthetic construct
  misc_feature 1..1998: note = Description of Artificial Sequence: Synthetic coding sequence
  source 1..1998: mol_type = other DNA
atgcagaccgctgaccaccctgaagtggttcctttcctttacaatagacagcagcgcgctcattcactgttcctggctagcgcagaattttgtaatatactctctcgcgtgttatcacgtgctagatccagacctgcgaagttgtatgtgtacattaacgagctgtgtaccgtgttaaaggctcattccgctaagaagaaactgaatctcgcacccgcagccaccacttccaacgagccttcaggcaataatcccccgacacacctgtcgcttgatccaaccaacgccgagaatacagcctcgcagtcgcctagaactagaggctctcgcagacagatccagagactggaacagctgctggccctgtatgttgccgagataaggcgcttacaggaaaaggagcttgatctcagcgagcttgacgacccagatagtgcttatctgcaggaggcacggctgaagaggaaactgattcgactatttggaagactctgcgagctgaaagattgttcctcccttacagggcgagttatagaacagaggattccctaccggggaacccgatatcccgaagtcaaccgcaggattgaaaggcttataaacaagccggggccggacactttccccgattacggcgacgtgctgcgcgctgtggagaaggcggctgctagacacagcttgggcctccctcgacaacagctgcagttgatggcccaggatgcattcagggatgtgggaatcaggctgcaagaacgtcgccacctggatttgatatataacttcgggtgccatctgaccgatgattaccgaccgggagtggaccccgccctatcggaccccgtgctagcacgaagacttagagagaaccgctcccttgcaatgtcacgcctcgacgaggtgatctctaagtacgcaatgcttcaggacaagtctgaagaaggtgaacgtaagaaaagacgagccagattacaggggacctcatctcacagcgccgacacacccgaggcctctctggacagcggtgagggcccctccggcatggccagccaggggtgccccagcgcttcgcgggctgaaactgacgacgaggatgacgaggagtccgacgaggaagaagaggaagaagaggaagaagaagaagaggaggccacggactcagaagaggaggaggacttggaacaaatgcaggagggacaggaggatgacgaggaagaggatgaagaagaggaggccgctgctggtaaggacggagataagagccctatgtcatcactacagatctctaatgagaaaaacttggagcccgggaagcagatttcaaggagcagcggcgaacagcagaacaaaggtcgaatagtttcaccttcactcttatccgaggaacctctcgcaccttccagcatcgatgccgaatcaaatggcgaacagccggaagaactcacccttgaagaggaaagtcctgtctcccagctgttcgaactcgaaatcgaggcacttcctctcgatactccttcttccgtggaaacggacatcagttcatctcggaagcagtctgaggagccattcacaaccgtgttggagaacggagcagggatggtctcatcaactagtttcaatggtggcgtaagcccccataattggggagacagcggcccaccttgcaagaagagtcgtaaagagaagaagcagacagggtctggcccactcgggaacagctacgttgagaggcagcgctccgtgcatgaaaaaaacggcaagaaaatctgcacactgccctcccctccaagcccactcgcctccctggcccctgtggctgattcctcaacacgggtggactcccccagccatgggctagtcacatcatctctgtgcatccccagtcccgcacgcctaagtcagacacctcatagtcagcctccaagacctggtacctgtaagacttctgtggcaacacagtgcgaccccgaggaaattatcgtactgtcagactctgactag

SEQ ID NO: 14857 - DNA, 537 bp, synthetic construct
  misc_feature 1..537: note = Description of Artificial Sequence: Synthetic coding sequence
  source 1..537: mol_type = other DNA
atggcgaccgcgaactctatcatcgtgctagacgatgatgatgaggatgaggccgcggcgcagccgggaccatctcatccactgcccaatgctgcgagcccaggtgctgaggccccaagctcatctgaaccccacggagcaagagggagcagtagctcaggaggcaagaaatgctacaagctagaaaatgaaaaactcttcgaagagttcctggaactgtgcaaaatgcagactgccgaccacccagaggtggtaccattcttgtacaatcgccagcagcgcgcacattccctgtttttggcgtccgcagaattctgcaatatcctttctagagtgctttcccgcgcccggagccgccctgcgaaactgtacgtctacattaatgagctctgcaccgtcctgaaagcacattccgcgaaaaagaaactgaatctggcgccagccgctacaaccagcaatgaaccctctggaaataatccacctactcacctgagcctggatcctactaatgccgaaaacaccgcctctcagtcgtag

SEQ ID NO: 14858 - DNA, 147 bp, synthetic construct
  misc_feature 1..147: note = Description of Artificial Sequence: Synthetic coding sequence
  source 1..147: mol_type = other DNA
atggctaccgctaattctatcatcgtgctggatgacgacgatgaggacgaagcagcagcccagccgggcccaagccaccccctgcctaacgctgcctcacccggtgcagaagccccttcaagctctgagccgcatggcgcacgttag

SEQ ID NO: 14859 - DNA, 393 bp, synthetic construct
  misc_feature 1..393: note = Description of Artificial Sequence: Synthetic coding sequence
  source 1..393: mol_type = other DNA
atggcgacagctaactcaattattgtcctcgacgacgatgatgaggacgaggccgcagcccaacctggcccctctcatcccctgcctaacgccgcatcacccggggccgaggcgccctctagctccgagccgcatggggctagaggcagcagtagtagcggggggaagaagtgttataagctggagaacgaaaagctctttgaggaatttctagaactttgcaagatgcagactgctgaccacccagaggtggtgccattcctgtacaataggcagcaacgtgcccacagtctctttttggcatccgcagagttctgtaatattctctcacgcgttctcagtcgcgcccggtcacgaccagccaagctgtatgtgtacatcaacgagctgtag

SEQ ID NO: 14860 - DNA, 2316 bp, synthetic construct
  misc_feature 1..2316: note = Description of Artificial Sequence: Synthetic coding sequence
  source 1..2316: mol_type = other DNA
ggtgtgcccgtgatcaaatggaagaaagacggcattcatctcgcactgggtatggacgaacgcaaacagcagctcagcaacggctcactgcttattcaaaatatcctgcactccaggcaccataagcctgatgagggtctgtaccagtgtgaggcgtcactgggtgattcagggtctattatctcgaggacagcgaaggttgccgtggcaggaccgctgcgtttcctgtcgcagaccgagtccgtgaccgcattcatgggtgatactgtgctgctgaaatgcgaagtgatcggggaacccatgcctacaatacattggcagaagaaccagcaggatctgaccccaatcccaggcgactcgagagtcgttgtgctgccaagcggcgcactgcaaatatcacggctgcaacccggagatattggtatttaccggtgcagcgcaagaaacccagcatcctcaagaaccggcaacgaggccgaagttcggatcttgagcgaccctggacttcaccgccagctgtattttctccagcggccctcgaacgtggtggccattgagggaaaagacgccgtacttgaatgctgcgtctcagggtaccccccacctagctttacgtggctccggggagaggaggtaattcagctaaggagcaagaaatattcgctgttggggggcagcaaccttctcatcagcaatgtaacggacgacgatagcgggatgtacacatgcgtcgtcacatacaagaatgagaatatttccgcgtcagccgagcttactgtcctggtgccaccttggttcctcaaccacccgtccaacttgtacgcttacgagagtatggacatagaatttgagtgcactgtgagcggaaagcctgtgcctaccgtaaactggatgaagaatggggacgttgttatcccctcggactacttccagatcgtcggagggtctaacttaaggatattaggtgtggtaaaatccgacgagggcttctaccagtgtgtggccgagaatgaggctgggaacgcccagacgtcagcccagctcatcgtgcctaagcctgcgattccctcctctagcgtgctgccgagcgccccaagagacgtcgtgcctgtcctggttagctcacgttttgtgagactgtcctggagaccacctgccgaggccaaggggaacatccagaccttcacagttttctttagcagggagggcgataatcgcgagagggcgctcaacacaacccagcccggatcgttgcagttaacagtggggaatctaaagcctgaagcaatgtatacgtttcgagtggttgcctacaacgagtggggacccggagagtctagtcagccaatcaaagtggctacccagcccgaactgcaggtaccagggccagtcgagaatttacaggctgtaagcacatctccgacttcgattctcattacctgggagccacctgcctatgctaacggccccgtacagggttataggttgttttgcacggaagtgtctactggaaaggaacaaaatattgaagtggatggtctcagttacaaattggaagggctgaaaaagttcacagaatactctctgaggttcctggcttacaacagatacgggccaggagtgtcaaccgacgacatcactgtcgttactttgagcgacgtgccatcggcgcctcctcagaatgtttctctcgaagtggtcaattctaggtccattaaagtgtcatggctccctccacccagtggaactcagaacggtttcatcaccggctacaagatccgacacaggaagacaacaaggcggggggagatggagaccttagagccaaataatctgtggtacttgtttaccggtctggagaaaggatctcagtacagttttcaggtttccgctatgacggtgaatggtacagggccgcccagcaactggtatacagcggaaacccccgaaaatgacctggatgaatcccaggtgcctgaccagccctcgtccctacatgtgcgcccacagacaaattgtatcattatgagttggactcctccactgaaccccaatatcgttgtccgggggtatataatcggctatggagtgggcagtccttacgcggagacagtacgggtggactcaaagcagcggtactattctatcgaaagactcgagtccagctcccactacgtgatcagcctaaaggcctttaataacgctggagagggagtccccctgtacgagagcgctacaacccgctctatcacagtccggcgtcacaatatcagcaaactgcattctaacaggccccagacgaagcataacgtttag

SEQ ID NO: 14861 - DNA, 2694 bp, synthetic construct
  misc_feature 1..2694: note = Description of Artificial Sequence: Synthetic coding sequence
  source 1..2694: mol_type = other DNA
atgggcgataccgtactgctgaaatgtgaagttatcggcgagccaatgcctaccatccactggcagaagaaccagcaggacctcacgcccattccgggcgattcgcgggtcgtggtgcttcccagtggcgcactgcagatatcaaggctccagcccggcgatatcggaatctaccggtgctcagccaggaaccctgctagctctcgcacaggcaatgaagcggaagtgaggattttgtcggaccccggtctgcacagacagctgtacttcctacagaggccatcaaatgtcgtggccatcgagggcaaagatgccgtattggagtgttgtgtatcaggctatcctcccccatcttttacttggttgcgaggagaggaagtcattcagttgcgcagcaagaaatacagtctgttgggtggaagcaatttacttatttccaacgtgaccgacgacgattccgggatgtatacctgtgttgtcacttacaagaacgaaaatatctctgcaagtgccgagctaaccgtgctggtgcctccatggtttttgaatcacccatcaaatctctacgcatacgagtcaatggacattgagttcgagtgcacagtgagcggtaagcctgtacccacggtgaattggatgaagaacggcgatgtggtaatcccttctgactactttcagatagtaggcggctccaacctccgaatacttggcgtggtgaagtccgatgagggcttctatcagtgtgttgctgagaacgaggcgggaaatgctcagaccagcgcacagctcatcgttcctaaacctgcaatcccctcctcctcagttctgccttctgcccctcgggacgtcgtaccagttttagtcagctcgcgatttgtgcggctgtcttggagaccaccggcggaggctaagggcaatatacagacgtttaccgtgttcttttcccgggagggggataatcgagagagagcactcaacactacccaaccagggtcactgcagctcactgtgggcaatctgaaacctgaggcaatgtatactttccgggttgtggcttataacgagtgggggcccggagaaagtagtcagccgataaaggttgcaacacaacccgagcttcaagtgccaggtcctgtggagaatctgcaggcggtgagtacttctcctaccagcatcttaatcacctgggaaccacccgcatatgccaatgggccagtccaggggtacagactcttctgtaccgaagtatcaactggaaaggaacaaaatatcgaagtggacggactgagctataagctggaagggctaaagaagttcaccgagtattctcttagattcctcgcatacaacagatatgggcccggggttagtacagacgatatcactgtcgtgacattgagtgacgtgccatctgcccccccacaaaacgtctcattggaggtcgtgaactccaggtccatcaaagtgtcatggcttccccccccgtctgggacccagaacgggtttataaccggatacaaaattcgccaccgaaagacaacacgtcggggcgagatggagacacttgaacccaacaatctgtggtacctgttcactggacttgagaaaggtagtcagtactcatttcaggtctcagcgatgactgttaacggcaccgggccaccctctaattggtacacagctgagacgccagagaatgatctggacgaatcccaggtaccagatcaaccgtcttcactgcatgtgagaccacagacaaattgcattatcatgtcgtggacaccacccctcaatccaaatatagtagttcgtggctatatcattggatacggggtgggatctccttatgccgagacagtgcgggttgactctaagcagcgatactactcaattgaaaggctcgaaagttcttctcattacgtgatctcgctgaaggcgttcaataacgcaggggaaggagtgcccctgtatgagtccgcgaccacacggagcatcacggacctctcaaccccaatgcttccccctgtgggggtgcaggctgtagccctgacccatgacgcggttcgggtgtcatgggctgataacagtgtgcccaaaaaccagaagacaagtgaagtgagattgtatactgtgaggtggagaacatcgttctctgcaagcgccaagtataaaagcgaagacacgacttctctttcttatacagcaaccggcctcaagcctaataccatgtacgaattttccgtcatggtaacaaagaaccgccgctccagcacctggtcaatgaccgctcacgccacgacctacgaggccgctcctacatctgcccctaaggatctgactgtgatcactcgggaaggaaagcccagagccgtgattgtgtcttggcagccacccctggaggccaacggaaagattaccgcctatatcctgttctacactctggacaaaaacatcccgattgacgactggattatggagaccatttctggagaccggctgacacatcagattatggatctgaatcttgatacgatgtactactttcgcattcaggctcgaaattccaagggggtcggtcccctcagtgaccccatcctttttcggacactgaaagtggaacatcctgataagatggctaacgatcaagatactggtgttaccatcaacctcgtgaacgaagtgttgctggggtag

SEQ ID NO: 14862 - DNA, 4344 bp, synthetic construct
  misc_feature 1..4344: note = Description of Artificial Sequence: Synthetic coding sequence
  source 1..4344: mol_type = other DNA
atggaaaactcgttgcggtgcgtttgggtgccaaaactggcatttgtgctgtttggcgcctctttgttttcagcgcatctccaggtgacaggcttccagatcaaagcgttcaccgcgttgcgattcctctctgaaccttcggatgcagttaccatgagaggcggtaacgtgctgctagattgcagtgccgagtcagacagaggagtgccagtcatcaagtggaagaaagacgggattcacctcgctctgggaatggatgagcggaagcagcaactgtcaaatggcagtctactcattcagaacattctgcactcccggcatcataagcccgacgaggggctctaccagtgtgaggcctctctgggggatagtggctccatcatttcccggacagcgaaagtggccgtggctggccctctgcgatttcttagtcaaaccgaatccgttacagcttttatgggcgatacagttctgttgaagtgtgaagtaatcggggagcccatgcctacaatccactggcagaagaatcagcaggatctgacgccaattccaggggacagccgagttgttgtcctgccctccggagccctgcagatcagcaggctccagccaggagatatcggcatttaccgttgttcagcccggaacccagcctcctctcggacggggaatgaagctgaagtgcgcatcctctcagaccctggactgcaccggcaactatactttttacagagaccaagcaacgttgtcgcgatcgaaggaaaagatgctgttttggaatgttgcgtttctggctatcccccaccatctttcacttggctgcggggggaagaggtaatccaactgcggtctaaaaagtatagcctgctgggtgggagcaatctgctgatctccaacgtgacagacgatgattcaggtatgtacacgtgcgtcgtcacttataaaaatgaaaacatcagcgcctccgctgagttgaccgtacttgtccccccttggttcctgaatcacccatccaacctctatgcctatgagagtatggatattgagtttgaatgtacggtatccggcaagccagtgcctacagtgaactggatgaaaaacggagatgttgtcatccctagcgattactttcaaatcgttggcggcagcaatttgaggattctgggtgtggtgaagtcagatgagggattctaccagtgcgtggccgaaaacgaggcaggcaatgctcaaacaagcgcccagcttattgtgcctaagcctgctattccctccagctcagtgttgccaagtgctcccagagacgtggtgcccgtgctcgttagtagtagatttgtcaggttgtcatggagaccacccgccgaggcaaagggtaatattcagaccttcaccgtcttcttttcaagagagggagataatcgcgagagggcactaaatactacacaaccaggctctttacaactaacggttggaaaccttaagccagaggctatgtatacttttcgcgtggtcgcttacaacgaatggggacccggtgaatcctctcagcccatcaaagtagctacccagcctgagttacaggttcctgggccggtcgaaaatctgcaagcagtatccacaagcccaacaagtatcctgattacctgggaaccacccgcatacgctaatggtcccgtccaggggtatcgactgttctgcaccgaagtgtcaaccggaaaggaacagaatatcgaagtggacggactgagttacaagctggagggtctgaaaaagttcaccgagtattcactccgcttcctggcctacaatagatatgggccaggtgttagcaccgacgatatcacagtagttaccctgagtgacgttccatccgcccctccacaaaatgtgtctctggaggttgtgaacagtaggtccattaaggtgtcctggttgcccccaccctccggtacacaaaacggattcattaccggctataaaatacggcaccgtaagaccacccggaggggagaaatggaaaccctggaaccaaacaacttgtggtatcttttcactgggcttgaaaaaggatcccaatactcctttcaggtgagtgccatgactgtgaatggcacaggacccccctcgaactggtacactgcagagacccccgaaaacgacttagatgagtcccaggtgccagaccagccctcaagtctgcatgttagacctcaaaccaactgcataatcatgagctggacacctccgcttaatcctaacattgtggtacgagggtatataatcggatatggggtaggatccccttatgccgagacggtcagagtggattctaaacagcggtactacagtattgaaaggcttgaaagttcaagtcattacgtgatcagtctgaaggctttcaataatgccggggaaggggtcccactttacgagtccgctactactaggtccattacggatcccaccgatcccgtggattattatcccctgctggacgactttccaacgtctgtccctgaccttagcacacccatgttgcccccagtgggagtgcaggcagtggctctgacgcacgacgccgtcagggtgtcttgggcagacaactccgtgccgaaaaaccagaaaacttccgaagtacgtctctataccgttaggtggaggacctctttttcggccagcgcgaaatacaagtctgaagatacgaccagcctaagttatactgccaccggcctcaagcccaataccatgtatgagttttcagttatggtgaccaagaataggcgatcaagcacatggtctatgacagcccatgctacaacatatgaggcagcccctactagcgccccaaaggacctcaccgttatcactcgggagggcaaacctcgtgccgtaatcgttagttggcagccacctctcgaagcaaacgggaagatcacagcttacatcctcttttataccctcgataagaacatccccatcgatgactggattatggagacaatttccggagacagactgacgcaccagattatggacctcaacctggacactatgtactattttcgcatccaagcccgcaacagcaagggcgtcggccccttaagcgaccctatactgtttcgtacgctgaaagtcgagcaccctgacaagatggccaacgatcaggggcgacatggagacggcggatattggccagtggataccaacctgattgatagatccactcttaatgagcctcctattggccaaatgcacccgccacatgggtcagtgacccctcagaagaatagcaatctgctggtcattatcgtggtgacggttggcgtcataaccgtgctggtagtggtaatcgtggcggtgatctgcacgagaaggtccagtgcgcagcagcgtaaaaagcgggctacgcattcggctggcaagcggaagggctcccagaaagatctgcgccctccggacctgtggatacaccatgaagagatggaaatgaaaaatattgagaaacccagtggaactgatcctgcaggaagagatagccctatacagtcctgtcaggatctgactccagtgtcacacagtcagagcgagactcagctgggtagcaaatctaccagtcactccggccaggatactgaagaggctgggtcttccatgtccacactggagcgctcactggccgctcgtcgggcacctcgggccaagctaatgatccctatggacgcccagagcaataatcctgcagttgtttcagccatccctgtccctaccctcgaatctgcccaataccctggaatcttgccaagcccgacttgcggataccctcatccgcagtttacgctccggccggtgcccttccccactctatctgtggatcgaggatttggcgccggacgtagtcagagtgttagcgaaggcccgaccacccaacagcctcccatgctcccaccatctcagccagaacactcgtcttccgaggaggcgccaagccggaccatacctacggcatgtgttcggcctacccaccccttgcgttcttttgctaatcctcttctccctccgcctatgagcgctatcgaacccaaagtgccctacacacccctgctttcccagccaggaccgacgctccccaaaactcacgtcaagacagccagcctcggcctggccggcaaagctaggagcccattgcttcccgtttccgtccccacagctcctgaagtttcagaggagagccacaaaccaaccgaggactcagccaacgtgtatgaacaggatgatctgagtgagcaaatggcttctctggagggcctaatgaagcagttaaatgccatcacaggctcagccttttag

SEQ ID NO: 14863 - DNA, 213 bp, synthetic construct
  misc_feature 1..213: note = Description of Artificial Sequence: Synthetic coding sequence
  source 1..213: mol_type = other DNA
atgaccatgaatgtgttggaggccggcaaatggaagagtatcgtgccagcacctggcgagggcttgttagctgtacttcacatgatggtgttcactgacgcattacacagggagcggtccgtaaaatggcaagcaggggtgtgctataatggaggaaaagacttcgccgtttccctcgcccgcccaaaggctgcagagggaatagctgattag

SEQ ID NO: 14864 - DNA, 1392 bp, synthetic construct
  misc_feature 1..1392: note = Description of Artificial Sequence: Synthetic coding sequence
  source 1..1392: mol_type = other DNA
atgtcggtggccatcaggaaaaggagctgggaagaacatgttacccactggatgggtcagccatttaactccgacgaccggaataccgcctgtcatcacggccttgtggctgacagcctgcaggcatctatggaaaaagacgctactctcaacgttgacaggaaggagaaatgcgtgtcccttcccgactgttgccacggaagtgaacttcgcgattttcctggtaggcccatgggacacctatccaaggatgtggatgagaatgactctcatgaaggggaagaccagttcctgtcattagaggcatccacggaaacactggtccatgttagcgacgaggataacaatgcggacctctgcttgaccgacgacaaacaggtcctgaatacacaaggccagaagacttccggacaacatatgatacagggcgccggatctctggagaaagcgctcccgatcattcaatctaatcaggtctcttccaatagctggggcattgcaggagagacagagttggcccttgtgaaggagagtggagaacgaaaagtcactgattccatctctaaaagcctcgagctttgcaatgagatcagcttgtctgagatcaaagacgccccaaaagttaatgccgtagacaccctgaatgtgaaagatatcgctcctgaaaagcagctactcaacagcgccgtaatagctcagcaaaggaggaaacccgatccaccgaaagacgaaaacgaacggtctacatgcaatgtcgtgcagaatgaatttctggacacaccctgcacaaatcgtggtctcccactgctgaaaacagacttcggaagttgcctgctccagccaccctcctgtcctaatgggatgtcagccgaaaatgggctggagaagtccggattcagccagcaccagaataagtcaccccccaaagtgaaggccgaggacggtatgcaatgcttacaacttaaagagacgctggccacccaagagccaacggacaatcaggtacggctgagaaaacgaaaagagatccgggaagacagggaccgcgccaggttggattcaatggtgcttctgatcatgaaacttgaccagctggatcaagacatagaaaatgcactgagtactagctcttctcctagtggcaccccgacaaacctccggcgacatgtgccagacctggagtctggttcggagtccggcgctgacactattagcgtgaatcagacccgcgtgaatctttcatctgacacagaatcaacggatttgccctcctctacccctgtcgctaacagcggaacaaaaccaaaaacaacagccattcagggcattagcgagaaggagaaggctggcaagttaaccttctggttttgctttttagcaaatttgttctag

SEQ ID NO: 14865 - DNA, 5268 bp, synthetic construct
  misc_feature 1..5268: note = Description of Artificial Sequence: Synthetic coding sequence
  source 1..5268: mol_type = other DNA
atggaaactcgcagtagtaaaacaaggcgctccctggcttcaagaaccaatgagtgccaaggcactatgtgggccccgacttctcctccggctggctcctctagcccaagtcaacctacatggaagtcttctctgtactcgagcttagcttattcggaggccttccattattctttcgcggcccggcccagaaggctgacccaactggcgttggcacaacggcccgaacctcaactcttacggctgaggcctagctcgctgcgaacacaggatatatctcacctgctgactggggtctttagaaatctgtattctgccgaagtgatcggggacgaggtgtctgctagtttgattaaagctaggggcagcgaaaacgagaggcacgaggagtttgtagatcagctgcagcaaataagagagctgtacaaacaacgcctggatgagttcgagatgctggaacggcacatcacccaggcccaggcccgtgctatcgcagagaacgagcgggtcatgtcccaggctggtgtgcaggatctcgagtctctggtgcggctgcccccagtgaagtcagtttctagatggtgtatcgattcagagctgcttagaaaacatcacctgatatctcctgaggattattacaccgacacggtacctttccattcagctcccaagggaattagcctccctgggtgtagcaagctcacgttctcctgcgagaagaggtcagtacaaaagaaggagcttaacaaaaagcttgaggattcctgtaggaaaaagctagctgagtttgaggatgagctcgatcatacagtggattccttgacctggaaccttactccaaaagcaaaggaacgcactcgggaacctctgaaaaaggctagccagccaaggaataagaactggatgaaccatttgagagtaccacagcgcgaactggaccgactactgctcgcccgcatggagtcacgcaaccactttctgaagaacccacgcttttttccaccaaacacccgatatggaggcaaatcacttgtcttcccgccaaagaagccagcacccatcggagagttccagtcaactgagcccgagcagtcgtgtgccgatactccagtctttttggccaagccaccgattggtttctttactgactacgaaatcggcccggtgtacgaaatggtgattgctctacaaaacaccactacaacatctaggtacctgcgggtgctgccaccatcgaccccctatttcgccctgggtttaggaatgttccccggaaaaggtggtatggtggccccgggaatgacatgccaatatatcgttcaattttttccagattgcctgggcgattttgacgactttatactggttgaaacgcagtctgcccacacactcctgatacctctgcaggccagaaggcctccgccagtcctgactctatcacccgttttggattgcgggtactgccttattggcggggtcaagatgactcgcttcatctgtaaaaatgtcgggttttcagtgggaagattctgcataatgcccaagacttcctggcctccactgtcattcaaggcgattgctactgttggatttgtagagcagcccccatttggcatcttgccgtctgtgtttgaactcgctcccgggcacgctattctggtagaggtgcttttttcacctaaaagcttgggaaaggctgagcagacttttattatcatgtgcgacaattgccagattaaagaactcgtcacaattggcatcgggcagctgattgctttggacctcatctacatttcaggagaaaaatcccaacctgacccaggcgaactgacagatctgaccgcccagcatttcatccgcttcgagcctgagaacttacgcagtacagcacgcaaacagctgataattaggaacgccacacacgtagaactcgctttttactggcagattatgaaaccaaacttacaacctttgatgccaggagaaacatttagtatggactctataaagtgctaccccgacaaagagacagcctttagcataatgccccggaagggcgtcctgagccctcacaccgaccatgagttcatcctgagcttttctcctcacgagctgagagattttcacagcgtcctccagatggtactggaggaagttcccgagccagtgagttccgaggccgagtctttgggacacagcagctatagcgtcgacgacgttatcgtgctcgagatagaggtgaaggggtccgtagagcctttccaggtcctgttggagccgtacgctctgatcatccccggcgaaaactatatcggcatcaatgtgaagaaggcctttaaaatgtggaacaacagcaaatcccccatccgttatttatggggcaaaatctccgactgccacattatagaggtagagcccggaacaggtgtgattgaaccttcagaggtcggtgacttcgaacttaacttcacgggcggggtaccaggcccaacctctcaggatttactctgcgagattgaggattcgccatcccccgtcgtgctccatattgaagccgtcttcaagggacccgccttaataattaacgtgtctgccttgcagtttggattactccgcctgggccaaaaagcaacgaactccatccagattaggaacgtatctcagttacctgctacgtggcggatgaaagaaagcccagtgtctctgcaggaaagaccagaagacgtcagccccttcgatattgaaccgagctctggccagttacactctcttggagaatgtcgggtggatatcacacttgaagccctacactgtcagcacctcgaaactgtcctggagctggaagtggagaacggggcttggtcctacctccccgtatacgcagaagtacagaagccccacgtttatctccagtcaagccaggttgaggtacggaatctttatctgggagtgcccacaaaaaccactatcacgctgattaatggcacattattgcctacccagtttcattgggggaaactcctggggcaccaggccgagttttgcatggtcaccgtgtctccaaagcacggactcctaggaccatcagaggaatgtcagctgaaactggagttgaccgctcatactcaggaggaattgactcatttggctctgccctgccatgtttccggcatgaagaagcccttggtgcttggtatcagtgggaaaccccaaggattacaggtggcaatcacaatctccaaagagtcctcagactgttcaaccgaacaatggcccgggcatccaaaggagctgaggctagattttggctctgctgttcctctgaggactcgcgttactcgtcagttgattctcaccaataggtctcccatcaggacaaggttctccctgaaatttgaatattttggtagtcctcagaattctctctctaaaaaaacttccctgcccaatatgcctcccgcactgcttaaaaccgtgcggatgcaggagcatttagcgaaacgcgaacagctagacttcatggaaagcatgctttcgcacggcaagggggcggccttttttcctcacttctcccaaggcatgttaggaccttatcaacagttgtgtattgatattaccgggtgcgcgaatatgtggggagaatattgggacaaccttatatgcaccgtaggcgatctgctcccggaagtcatccctgttcatatggccgcagttggatgcccaatttcctctctgcgaaccactagctatactatcgatcaggcccagaaggagccggcaatgcggttcggtacacaggtgtccgggggagacactgtgactagaacgttacggctgaacaacagttcaccttgcgatatcaggctggattgggaaacctacgtccctgaagacaaggaagacagactggtcgaacttctggtgttttatggccccccatttcccctacgggaccaggctggtaacgagctggtttgccccgacacacctgagggagggtgcctgctttggtctcctgggcctagtagtagttccgaattcagtcatgagacggattcctcggtggagggctcaagctccgcctcgaatcgggtggcgcagaagttaatctccgttattctgcaggctcatgagggagttccatccggccacctctactgtatttctccaaagcaggtagtggttccagctggtggaagttcaacaatctacataagctttaccccaatggtgttgtctccggagattcttcataaagtggagtgtaccgggtacgcactcggctttatgagcctggacagcaaggttgagagggagatccccggcaaacggcacaggctgcaggatttcgcagttggcccactgaagctggacctccacagctatgttcggcccgctcagctgtctgtcgagctggactatggcggctccatggaatttcaatgtcaagcctcagatttaattccagagcagccctgctctggcgtgctcagtgagctcgtgactactcaccacctcaagttaacgaatactactgagataccccactactttcggctgatggtcagtcgccctttctcggtcagccaggacggagctagccaggaccacagagcccccggaccagggcagaaacaagaatgtgaagaggaaactgcctcagccgataagcagctagtgctgcaggcccaggaaaacatgctcgttaacgtgagcttctcactcagtctcgagctgttaagctatcagaaactgcccgcagaccagacactccctggagtggacattcagcagtcagcctctggagaacgggagatggtttttactcagaacttgcttctagagtatactaatcagacgactcaggtggtgccccttcgggcggtagtcgcagtccccgagctgcagttgagcacctcgtgggtcgattttggaacatgtttcgtgtcacagcagagggtacgagaggtgtacctgatgaatctgtccggttgccgttcctactggacgatgctcatggggcagcaggagcctgctaaagctgccgtggccttccgcgttagtccaaattccggcttgctggaagcacgctccgcaaatgccccaccgacgtctatcgcattgcaggtttttttcactgcccgcagtagtgaattgtacgagtctactatggtagtagagggcgttctgggggaaaaatcctgtacactaaggctaaggggccagggttcatatgatgagaggtacatgctgcctcaccagccctag

SEQ ID NO: 14866 - DNA, 5337 bp, synthetic construct
  misc_feature 1..5337: note = Description of Artificial Sequence: Synthetic coding sequence
  source 1..5337: mol_type = other DNA
atggagacccggtcctccaagacccggcgctcgctggcctctaggacaaacgaatgtcagggaacaatgtgggcgcctacctcaccacctgctggctccagtagcccctctcagcccacatggaagagttctctgtactcctctctagcttattccgaagcctttcactactcttttgctgctagacctcggcgcctaactcagctcgctctcgcgcagagacccgagccccaactgttgcgccttagaccaagttctctacggacacaagatatttcccacctgctgacaggagtgtttagaaacttgtacagtgccgaggtgattggtgacgaagtcagcgcctctctgataaaagccaggggcagcgagaacgagcgtcacgaggagtttgtagaccagctgcagcagattagagagctgtacaaacaaaggctagatgagttcgagatgcttgaacgccatatcacccaggcacaggcacgggccatcgcagagaacgagagagttatgagccaggctggggtgcaggatctggagtccctggtgcgcctgccaccagtgaagtctgtatcacggtggtgtattgattccgagctgttgcggaagcatcacctgataagccctgaagattattacaccgataccgtgccgttccattcagctccaaaaggcatctccctgcctggatgctccaaactcacattcagctgtgagaaaaggtccgtgcagaagaaagagctgaacaaaaagctagaagattcttgtaggaagaagctcgccgagtttgaagatgaactagatcacaccgtcgatagcctgacatggaacctcacaccaaaagctaaggaaaggacccgcgagccccttaagaaagcctcccagccacggaacaaaaactggatgaaccatctcagggtacctcaacgtgaactggatcgcctgctcttggcccgaatggagagtagaaaccacttcttgaaaaacccacggtttttcccccctaatacccgctatgggggtaaaagcctagtttttcccccgaagaaacccgcacctatcggcgagttccagtctacagaacctgagcagagctgtgccgatacaccagtttttctcgcaaaacccccgatcgggttttttaccgattatgagatagggcccgtgtacgagatggtcatcgctcttcagaatactacgacaacctccagatacctgcgggtgcttcctccttctaccccttatttcgcgttaggattaggtatgttcccaggaaaaggtggaatggtggccccgggcatgacctgtcaatatattgtacagttttttcccgattgtctgggcgacttcgacgactttattctggtagagactcagtcggctcacacactcctcataccgctgcaggctagaagaccgccaccagtacttactttgtcacctgtactcgattgcggctactgccttattggaggcgttaagatgacaagattcatttgcaagaatgtgggtttcagcgttggccgattctgcatcatgcccaaaacttcatggccgccactatccttcaaagccatcgcaactgtcggcttcgttgagcagccaccctttggcatccttcccagcgtcttcgaacttgcgcccgggcatgcaatcctcgtggaagtattgttcagcccaaagtctttaggtaaggccgagcagacgttcataataatgtgtgataattgtcagatcaaggagcttgttacgatcggcatcgggcagctgatcgccctcgatcttatttacattagtggggaaaaatcacagcccgaccctggagagctgaccgacctcactgctcaacatttcatccgcttcgaacctgaaaaccttaggtcaacggctcgaaaacaattgatcattcgcaatgctacacatgtggagctcgccttttactggcagatcatgaagccaaacttacaaccactgatgccaggagagactttctcaatggacagtataaagtgctatccagacaaagaaaccgcctttagtatcatgccacgcaagggagtgctgagtccccatactgatcacgaattcattctcagctttagcccccatgaactgagagacttccattcagtccttcagatggtgctggaagaagtgcccgagcccgtctcttctgaggcagaatccctcgggcacagttcgtacagcgtagacgatgtaattgtgctggaaatcgaagtcaaaggttcagtcgaaccattccaggtgttattagagccgtacgctctcattattcctggcgagaattatatcggaattaacgtgaagaaagcctttaagatgtggaataatagtaagtcacctatccgatacctgtgggggaaaatcagtgactgccacatcatagaggtggagcccgggacaggtgtgatagaaccttcggaggtgggtgattttgaactgaactttacgggcggtgtgccaggacctacctctcaagatctgctttgcgagattgaggatagcccgtcacccgtggtcctgcacatcgaagccgtgttcaaaggtcctgcccttatcatcaatgtctcagccctgcagtttggtcttttgcgcctgggccaaaaagcaacaaacagtatacagattaggaacgttagtcagcttcctgccacctggcgcatgaaagagtctccggtgtccctgcaggagcgacctgaggatgttagtcccttcgatatcgaaccctctagcggccaactccactccttgggggaatgccgcgtggatataacgctggaagcccttcactgtcaacacctggagacagttttggaactggaggttgaaaatggggcttggtcttatctacctgtctatgccgaagttcaaaagccacacgtgtaccttcaaagttctcaagttgaggtgaggaatctgtacttgggcgtgcctactaagaccacaatcaccctgattaatggcactttgctccctacccagttccactggggaaagctgctgggacatcaggcagaattctgtatggtgactgtgtctccgaaacacggactactcgggcccagtgaagagtgccagctgaagctcgagttgactgcccacactcaggaagagcttacccacctggcattaccctgtcatgtgtcaggcatgaagaaaccactcgtattgggaatcagcggaaaacctcagggccttcaggtggcaataacgataagtaaagagtcatccgattgcagcacagagcaatggccagggcatcccaaggagctgcggcttgacttcgggagcgcagtgcctctgaggacgcgagtgactagacagctgattctgacaaataggagtcctattcggaccaggtttagtctaaagttcgagtattttgggagtccacaaaattccctcagtaaaaagacctcactgccaaatatgcctcctgcgctgctcaagacagtgcgcatgcaagaacacctggcgaaacgagagcaactcgattttatggagtctatgctgtcacacgggaaaggcgctgccttcttcccccacttctcccagggcatgctcgggccgtaccagcagctctgcatcgacatcaccgggtgcgcgaacatgtggggtgagtactgggataatctgatctgtacagttggcgacctgctgcctgaagtcatccccgtacacatggccgccgtaggctgtcccatcagctccctgcgaacaaccagctacaccatcgatcaggcccagaaagaaccagctatgagattcggaacccaggtcagcggcggtgataccgtcaccagaaccctccgactgaacaacagttcaccttgcgacattcgcctggattgggagacatacgtaccagaggacaaggaagataggctggtggagttactggtgttctatggccccccttttcccctgcgggaccaagccgggaatgagctggtttgcccagacacgcctgagggcgggtgtctgctgtggtcaccagggcccagctcttcaagcgagttctctcatgagaccgatagctcagtcgagggctcaagcagcgcgtcaaatcgcgtggcccagaaattaatcagcgttattctgcaagctcacgaaggcgtaccttccgggcatctgtactgtatttcccccaagcaggtggtagtgccagcaggaggtagcagtactatctacatcagcttcacacctatggtgctgtccccagagatcctgcacaaggtggagtgcaccggctatgccctcggatttatgtctctcgattcaaaggtggaaagagaaatccccggcaagcgccacagactgcaggactttgccgtcgggcccctcaagcttgatcttcacagctacgtgcgcccagcccagctcagtgtagagctggactatggtggaagcatggagttccagtgccaagccagtgatctgataccggagcagccatgttcaggcgtgttaagcgagcttgtcactacgcaccatctcaagctaaccaatacaactgagattcctcactatttcaggctgatggtgtcccggccattcagtgtgtctcaggacggggctagccaggaccacagggcaccaggacccggacagaagcaggagtgcgaagaagagaccgcctccgctgataagcagttggtacttcaggcgcaagagaatatgctcgttaatgtgtccttttcactttcactggagttactcagttatcagaagcttccagccgatcaaacactgcctggcgtagatattcagcagtcggcttccggcgaacgggagatggtcttcacgcaaaaccttttgttagaatatacgaatcagaccacgcaggttgtgccattgcgagccgttgtcgccgtccccgaactgcagctgtccacatcctgggtggacttcggcacgtgctttgtgtctcagcagagagtgagagaagtctacctgatgaacctgagcggatgtaggtcatattggaccatgctcatgggggtcgtgagctgtacaagcccaagatggtggtggaaagtgtgttccgtccgtagcccggcaccctgtggcagtggcgcgaaggcccccatgatgagagacacctgctgtctgacaagtccagaggccccccctcagcctagtgcgcctgggccctcttggcggaaaaacatagcccagggcctcggcgccgccctgcagcacaaggataccgacttggggacttggggcccactggggtcatcctggaatggaagaacccccttccataacggtctgtctctgggccctcacgacatgtctagtgagctgacttag

SEQ ID NO: 14867 - DNA, 5277 bp, synthetic construct
  misc_feature 1..5277: note = Description of Artificial Sequence: Synthetic coding sequence
  source 1..5277: mol_type = other DNA
atggagacacggtctagcaaaacccggagaagtctggcctccagaaccaacgagtgccagggtacaatgtgggcgccaacttcccccccagcaggttcatcctcccccagccaacctacttggaaaagttctctctacagcagtcttgcttactcagaggcttttcattatagtttcgccgcaagacctcgccggttaacccaattagccctggcacagcggcccgaaccacagcttctccggttgcggccctcatccctgagaacacaggacatttcccatctgctcacgggcgtgttcaggaacctgtacagcgcagaggttattggtgatgaagtgagtgcgtctctcattaaggccagggggagcgaaaacgagcgccacgaggaatttgtggaccagttgcagcagatacgcgagctttataaacagaggctggatgaatttgagatgctcgaaagacacattacccaggcacaggctagggccatcgctgagaacgagagggttatgtcacaggccggagtccaggatctggagtccttggtgcggctcccccctgtcaagtcagtgagtaggtggtgtatcgatagcgaacttctgaggaaacaccaccttatttcaccagaggactattatactgacacagttcctttccactctgcgccaaagggcatcagcctgcccggctgttcaaaattgacctttagttgcgaaaagagatctgtgcagaaaaaggagcttaataagaaattagaagatagttgccgcaagaagctggccgaattcgaagacgaactggaccataccgtggactccctgacctggaatcttaccccgaaagctaaagagcgcacacgagagccactcaagaaggcatcgcagccccgaaataagaactggatgaaccacttacgggtcccgcagcgcgagcttgacaggctgttgcttgcgcgcatggagagcaggaaccattttctcaagaatcccaggttctttcctccaaatacaagatatggagggaaatcactcgtgttccctcctaagaagccagcccctattggggagttccagtcaacggaacccgaacagtcttgcgctgatacacccgtcttccttgcaaaaccacctatcggctttttcaccgattatgagattggccccgtatacgagatggtaattgctttgcagaacacaactaccacctcacgctatttgagagtactcccaccaagtacgccctacttcgctctcgggttaggtatgtttccagggaagggagggatggtggctcctggcatgacttgtcagtatattgtccaattctttcctgactgccttggagattttgatgacttcatcctggtcgagactcagtctgctcataccttactgatccctctccaggcccggagaccgccaccagttttgaccttgagtccagtgctcgattgtggctactgtctcatcggtggcgtcaagatgacgcggttcatatgtaagaacgtgggattcagtgtcgggcgattttgcataatgcccaagacctcatggccacccctgagcttcaaagctatcgcaacggtgggatttgtcgagcagccgccctttggaatcctaccctccgtgttcgagttagcccctggacatgctatcctggtggaggtccttttttccccaaaatcactggggaaagcggagcagacattcataataatgtgcgataattgccagataaaagagctagtcacaattggcatcggtcagctcattgcgctcgacctgatttatatcagcggagaaaagtcccagccggacccaggtgagcttacagatctgaccgcccagcatttcatccggttcgagcctgagaacctgagatcaacagcccggaagcagctaatcattagaaatgctacccacgtggagctagccttttactggcagatcatgaagcccaatcttcagcctctaatgcctggcgagactttttcaatggattccataaagtgttatcccgataaggagacagcttttagtatcatgcctcggaaaggcgttctgtctccccatacagatcatgaatttattctgtctttcagcccccatgaactgcgcgatttccacagtgttttgcaaatggttctggaggaagttcccgagccggtcagttcggaggcagaatcgcttggtcactcatcgtactctgtggatgatgtcatcgtgctcgaaattgaagtgaagggaagtgtggagccattccaagtcctgttagaaccatacgcactgatcataccaggcgaaaattatattggcatcaatgtgaaaaaggcctttaagatgtggaacaactccaagagccccattaggtacttgtggggcaaaatttccgactgccacatcatcgaggtggagccgggtacaggcgtgatagagccctccgaggtgggagatttcgagctgaactttaccggtggagtgcctggtcctacaagccaagatctgttatgcgaaatagaggatagcccatcaccagtggtactgcatatcgaagccgtttttaagggccctgctttgatcataaatgtaagtgccctgcaattcgggctccttcgcctgggacaaaaggccactaactctatccagatccgcaatgtttctcaacttcccgccacttggaggatgaaggagtctccagtgtccctgcaggaacggcctgaggacgtgagtccatttgatatcgaacccagctctggacagctgcactcgctcggggaatgtagagtggacatcaccctggaggcactgcactgtcaacatctggaaaccgtccttgaactggaggttgagaacggtgcgtggtcatatctgcctgtgtacgccgaagtgcagaagccacatgtctatttgcagtcctcacaggtcgaagtgcgaaacctctacctcggggtccctacgaagaccaccataactctcatcaatggaaccttgctccctacgcagtttcattggggaaagctgctggggcaccaggctgagttctgtatggtgaccgtgagccccaaacacgggctccttggcccctcagaggagtgccagctgaaactcgaactcactgcgcatacgcaggaagagctgacacacttggccctcccttgtcatgtgtcaggcatgaaaaaacctctcgtgcttggcatcagcggcaaaccgcaggggttgcaggttgctataacaattagcaaggaatcaagcgattgctcagtgttctcaactgaacagtggcccgggcatccaaaggagttgcgactggacttcgggagcgctgtgcctctcagaacaagggtcacccgccagctcatactcactaatagatcccctatccgaacaagattctcactgaagtttgaatattttggctcaccgcagaatagcctatcaaagaagacctcattgcccaacatgcctcccgccctactaaagaccgttcggatgcaggagcatctggccaagagggagcagctcgattttatggaatcaatgttatcccacggcaaaggagctgcatttttcccacatttctctcagggcatgctcgggccataccagcagctatgtatcgatattaccggatgtgccaatatgtggggtgagtattgggataacctgatttgtactgtgggcgatttgttacctgaagtgatccctgtgcacatggcggccgtaggttgtcctatatctagcctgcgcacgacctcttataccatcgatcaggcgcagaaagaaccagcaatgcgttttggcacccaggtctcaggcggcgatacagttactaggacacttagactgaataacagttctccctgtgacattagactagattgggagacatatgtgccggaggacaaggaggaccgcctggtggaactcttagtgttttatggacccccttttcccctcagggaccaagctggtaatgagctggtgtgtcctgacactcctgaaggcggctgcctgttgtggagtccaggcccatcttcctcaagcgaatttagccatgagacagatagctctgtggagggctctagttccgcatctaatagagtagctcagaaacttattagcgttatcctgcaagcacacgagggcgtgccgtccgggcacctgtactgtatttcacccaaacaagtcgtggtgcctgccggcggatcatctactatttatatttccttcacaccgatggttctgagcccggaaattctacacaaagtcgagtgcacaggctatgccctagggtttatgagtctggattccaaggtcgaacgcgagattcccggaaaacgtcacaggctgcaggactttgcagtggggcccctgaaattagacttgcattcttacgtgagaccagcacagttgtcggtggaattagactatgggggatctatggagttccagtgtcaggcttctgatttgatcccggagcagccatgctctggcgtgctctctgagctggtgacaacccaccacctgaagcttacaaacactacagagatcccacactactttagactgatggttagcaggccctttagtgtatctcaggatggcgcttctcaggaccatagggcccctgggcctgggcagaaacaggaatgcgaggaggaaacagcatccgccgataagcagctggttttgcaagctcaggagaatatgcttgtgaatgtaagcttttctttgtcccttgagctcctgtcatatcagaagctgcctgctgatcagacgctgcctggcgtagacatacagcaaagtgcatctggagaaagggagatggtgttcacccagaatctcctcctcgagtacaccaaccagacaactcaggtggtgcctctgcgggcagtggttgctgtgcccgaactgcaattaagcaccagctgggtcgacttcggaacgtgcttcgtgtcgcagcagagagtgagagaagtatatctcatgaacctgagtggctgcaggagttactggactatgctgatgggtcagcaagagcccgctaaagctgctgtagcgtttcgggtgtcaccaaactccggactgcttgaagctcgcagcgccaacgccccccccaccagcattgcccttcaagtgttttttaccgcaagaagttcagagctctatgagtccacgatggtggtggagggagtgctcggtgaaaagtcttgtacgcttcgcttaagaggccagggcagttatgacgaaaggtacatgctgcctcaccagccttag

SEQ ID NO: 14868 - DNA, 237 bp, synthetic construct
  misc_feature 1..237: note = Description of Artificial Sequence: Synthetic coding sequence
  source 1..237: mol_type = other DNA
atgaggccttgcatttggatccatgtgcacctgaagcctccttgtcgcctcgtcgagttgctgcccttctcttccgccctgcagggcctttcgcaccttagccttggcaccactttgcctgtaatcttaccggagaggaacgaggaacaaaacttacaggagctgtctcataacgccgacaagtaccagatgggggattgctgtaaggaggagatagacgactccattttttactag

SEQ ID NO: 14869 - DNA, 2940 bp, synthetic construct
  misc_feature 1..2940: note = Description of Artificial Sequence: Synthetic coding sequence
  source 1..2940: mol_type = other DNA
atgcgcgggtatcatggggataggggctctcacccccgccctgcccggttcgctgaccagcagcacatggacgtaggccctgccgctcgagccccgtacttgctcggctctcgcgaggccttctctactgagcccagattctgcgcacctagagcaggactgggccacatcagcccagaaggaccattgagtctcagcgaaggaccatctgtgggacccgagggcggaccggctggcgctggggtgggcggtggcagttccacttttccacgcatgtacccaggacagggccctttcgatacctgtgaggattgcgtgggacatcctcagggaaaaggtgctccgcgtctgcctcccacattgctggaccagtttgagaagcagcttcctgtgcagcaggacggcttccacacgctcccctatcagcgggggcctgctggcgccggcccagggcccgcccctggaacaggaacggcccccgaaccgcgtagcgagagcccatctcgtatcagacatcttgtacactcggttcagaagctcttcgccaaaagccactcactggaggccccaggcaagagagactacaatgggcctaaagccgaggggcgaggcggttcgggcggcgattcctatcctggccctgggtctggagggcctcacacctcccaccatcaccatcatcaccaccaccaccatcaccatcagtctcgacacgggaagaggagtaagtccaaggaccgaaaaggcgatggcaggcatcaagccaagtccaccgggtggtggagtagcgacgacaatttggattctgactcggggttcctcgctgggggcaggccccccggcgagcccggcggtcccttttgcttagaggggcccgacggatcctacagagatctgtccttcaagggtaggtccggcgggtctgaaggacggtgcctcgcttgcaccggcatgagcatgtctctagatgggcagtctgtgaagaggtccgcctggcacactatgatggtttcccagggtcgcgatggttaccccggcgccgggccagggaaaggcctgctggggcccgagactaaagcgaaagcccgaacataccattatctccaggttccccaggacgattgggggggctaccccaccggcgggaaggatggcgaaatcccctgcaggcgcatgcggtcagggtcgtatattaaggctatgggagacgaagagagtggagacagcgacggatctccaaagacttccccaaaagcagtggccagaagatttacaacacgacggtccagtagtgtcgaccaggccaggatcaattgttgcgtaccccctagaattcacccccgcagctccattccaggctattcacggagcctgacaacaggccagcttagcgatgaattaaatcagcagctagaagccgtgtgtggaagcgtctttggcgaattggaaagccaggccgtggatgctttggacttacccgggtgcttccgaatgaggtctcatagttacctgcgcgcaatacaggccgggtgttcccaggacgatgattgcctgcctctcctcgcaacccccgcagccgtgagcgggcgcccagggagctctttcaatttcagaaaggcgccaccacctatacctccaggcagccaggcgcccccccgcatctcaattacagctcagtccagcacagacagcgcccatgaatcgtttaccgcggcggagggacccgccagacgctgttcgtcagcagacggccttgatggaccggccatgggggcccgcacgctcgagttggcaccggtccccccaagggcatctccaaaaccccccacccttatcattaaaaccataccgggccgcgaggagcttcggagcctggcaaggcagcgcaagtggagaccgagtattggcgtacaagttgagacaatttccgatagcgacaccgagaataggtcccgccgcgaatttcatagcatcggtgtccaggtagaagaggataagcgtagggcccgctttaagcgctccaactccgttacggctggggtacaagccgacttagaattagagggattagcagggctggcaaccgtcgctacagaggacaaggcccttcagtttgggcggtctttccagaggcatgccagcgagcctcagccaggcccgcgagctccaacttacagtgtgttccggacggtgcacacgcaaggccaatgggcgtacagagagggctaccccctcccttatgaacccccagccacggacggatcaccaggacccgcccctgcgcccacgcctgggccaggcgctggacgccgagattcttggatcgagcgcgggtctcgcagcctgccggattccgggcgcgctagcccatgtccaagggatggagaatggtttataaaaatgctccgcgcggaggtggagaagctggagcattggtgtcagcagatggaaagagaggccgaggactatgaactccccgaggagatcctggagaaaattcggtcggccgttggtagcacacagctgctcctcagtcagaaggtacagcagttcttccgcttgtgccaacagtctatggacccgactgcatttcccgtaccaactttccaggatctagctggtttctgggacctgctccaattatctatcgaagatgtcacactcaagtttctggagttacagcagttgaaggccaactcatggaaactgctggaaccaaaggaagagaaaaaagttccaccaccaatacctaaaaaaccactgcgaggccgcggcgtgccagtaaaagagcgcagccttgactcagtggaccgccaacggcaggaggcacgcaagcggcttctggctgctaaaagagccgcttcatttcggcactcttccgctacagaatccgctgacagcatcgagatctacatccccgaagcccagacacgactgtag

SEQ ID NO: 14870 - DNA, 5358 bp, synthetic construct
  misc_feature 1..5358: note = Description of Artificial Sequence: Synthetic coding sequence
  source 1..5358: mol_type = other DNA
atgggcatctctacggtcatccttgagatgtgtcttctttggggacaggtactaagtacaggcggctggattccccgaacaaccgactacgcctcactgattccaagcgaagtacctcttgatcctactgttgccgagggatcccccttccctagtgagtccaccttagaatccaccgttgccgaggggtcccctatctcacttgagtctaccctagaaagcaccgtggccgaaggatccctaataccaagtgagagtactttggaatccacagtggccgaaggatccgactctggactcgctctccgcctggtcaatggagacgggcggtgccagggcagagtggaaatactgtaccggggatcctggggcactgtctgtgacgatagctgggacaccaacgacgccaatgtggtgtgcaggcagcttggttgcggttgggcaatgagcgcacccggaaacgcctggttcgggcaggggagtggtcctattgctctggatgatgtgcgatgttcaggacatgaatcttacctgtggtcgtgcccacacaatggttggctctcccataattgcgggcacggagaagatgccggcgtgatttgcagcgcagctcagccacagtctaccctgcgcccagagagctggcctgtgcggatctctccccctgtgcccactgaagggagcgaatcgtcactggctctcaggctggtaaacgggggggacaggtgcagagggcgcgtcgaagtcttgtacaggggctcttggggtaccgtttgcgacgattattgggacaccaacgacgcaaacgtcgtttgccgacaacttggctgcggctgggctatgagtgcccccgggaacgcacagtttgggcagggaagcgggcctattgtcctggacgatgtcagatgtagtggacacgagtcctacctatggagttgcccgcataacggatggctgacccacaattgtggacactccgaagacgctggtgtcatttgctcagccccccaaagcagaccaacaccatcacctgacacttggcccactagccatgctagtaccgccggccccgaatcgtcactcgccctccgtctggtaaacggaggggacagatgtcaggggcgcgtagaagtcctgtatagaggaagttgggggaccgtatgcgacgactcatgggacacaagtgatgccaacgtggtatgccgccagctggggtgtggttgggcaacatccgctcctggaaacgcaagatttgggcaaggctcaggaccaatcgtactggacgatgtgaggtgttccggctatgagtcctacctgtggtcgtgcccccataacggttggctatcccacaactgccagcacagtgaagacgccggggtgatttgtagtgctgctcactcatggtccacaccgtcccctgacaccctgcccaccatcacacttcccgcatctaccgtcggcagtgagagtagcctagctttacggctcgttaacggcggagacaggtgtcagggacgcgtcgaggtactgtaccagggttcctgggggactgtttgtgacgattcctgggacactaatgacgcgaatgtcgtatgtcggcagctgggatgtggctgggccatgtccgctcccggcaatgcacgcttcggccagggctcgggtcccattgttctggacgatgtgcgatgtagtggccatgagagctacctttggagttgtccacacaacggctggttgagtcacaattgcggacactccgaggatgcaggagttatttgttctgcaagccagtcacgccctacccccagtccagatacttggcctaccagtcacgcttcaacagcgggttccgaatcgagtctggctctgagactggtgaacggcggggacaggtgccagggcagagtcgaggtgctgtaccggggatcttgggggaccgtgtgtgatgattactgggatactaatgatgctaatgtggtttgcagacagctgggatgtggctgggctatgtccgcacccggaaatgctcgtttcgggcagggctccggccctattgtcctcgacgacgtccggtgctcaggtcatgagtcttatctgtggtcctgtccacataatgggtggctctcgcataactgtggtcatcacgaagatgccggtgttatctgttctgccagccagtcccagcccacgccgagtcctgacacatggccaactagtcatgcgtctacagctggctcggagtcatctctggctctgcgtctcgtgaatggaggagacagatgtcaggggagagtagaagtactctacaggggcagctgggggacagtatgcgatgactattgggatacgaacgatgcgaacgtcgtttgcaggcagctcggctgtggttgggctacttccgccccgggaaacgcacggttcgggcagggctcaggacccatcgtcctagacgacgtcaggtgtagcggtcacgaatcctatctttggagctgtccgcataatggttggttgtcgcacaattgcgggcatcatgaagacgctggtgtgatttgttctgcttcacagagccagccgacaccaagccccgacacatggcccacttcacgggcctctaccgccgggtcagaatccactctggctctcaggttagtgaatggcggcgacaggtgtcgagggcgggttgaggtgctctaccaagggtcctggggaacagtttgtgatgactactgggatacaaacgatgccaatgtcgtgtgtcggcagctgggctgtggatgggccatgtccgcaccgggtaacgcccagttcgggcagggttctggtccgattgtcttagacgacgttcgttgcagcggccacgaaagttatttgtggtcctgcccacacaacggttggttatctcacaattgcggacaccacgaggatgctggggtgatttgcagtgctgctcaatcccagagcactccaagacccgacacttggctgacaacaaaccttcctgcactgaccgtcggctccgagtcgagtctggccttgcgccttgtgaatgggggagaccgctgccggggccgggtagaagttctgtaccgaggatcgtggggcacagtgtgtgacgattcgtgggacacgaacgacgcaaacgtggtgtgccgtcagctgggatgtggatgggctatgagcgcccccggaaatgctagattcggacagggttctgggccgattgtgcttgatgatgttagatgcagtggaaacgagagctatctctggtcttgtcctcataaaggctggcttacacacaattgcggccatcacgaggatgctggcgtgatttgcagcgctacccagataaattctaccaccactgattggtggcacccgactaccaccactaccgcccgccctagttccaactgcgggggtttcctgttctatgcctccggtactttctcttcgcctagctacccagcatactatcctaataatgccaaatgcgtgtgggagattgaggtgaattcaggatataggatcaatttaggttttagtaacctgaaattggaagctcaccacaattgtagcttcgactacgtggagatcttcgacggctctctgaattctagccttctgctcgggaagatttgtaatgacacgcgtcagatattcaccagtagttacaatagaatgacaatccacttcagatctgacatctctttccagaataccggatttctcgcttggtataactctttccccagtgatgccaccctacgactagtgaacttaaacagcagctatgggctgtgcgccggtcgcgtcgagatctatcacggaggcacatggggcactgtatgcgacgactcctggactattcaagaagccgaggtggtttgcagacagttgggctgcggaagggcagtctccgctttgggtaacgcttacttcggatctggaagtggacccattaccttggatgatgtggagtgtagcggaacagaaagcacgctgtggcagtgccggaatagaggttggttcagccacaattgtaaccacagggaggacgcaggcgtaatctgctcaggcaaccatctctctacaccagcccctttcctcaacatcactcggcctaatacagattactcctgcggtgggttcctgtcccagccgagcggcgacttctcttcgccattttaccccggaaactatcccaataatgcaaagtgcgtttgggatattgaggttcagaacaattatcgcgtcaccgttatcttccgggacgtgcagctggagggtgggtgcaactatgactacatcgaagtgttcgatggtccttaccggtcaagtcctctaatagcccgggtgtgtgacggggcgaggggatcttttacttctagttccaatttcatgtctattaggttcattagcgatcacagtattaccagaagaggattcagggcagaatactattcgagccctagtaacgattccactaacttgctctgcttacccaatcacatgcaggccagcgtatcacggtcctatctgcagagcctcgggttctccgcctctgacctggtgatatctacttggaacggctactacgaatgtaggcctcagattactcccaatctagtaattttcacaattccctatagtggctgtgggacattcaagcaggctgacaatgataccatcgattactcaaacttcttgaccgcagcggtatcaggggggataatcaagagaaggactgaccttaggattcatgtctcctgcagaatgctacaaaacacttgggtcgataccatgtatatcgctaacgataccattcacgtggcaaataacaccatacaggtagaggaggtccagtacggaaatttcgatgtgaacatcagcttctacaccagctccagctttctgtaccccgtgacatccaggccctactacgtggatcttaaccaggacctgtacgtgcaagctgaaatacttcattccgacgcagttcttacgctcttcgtcgatacatgcgttgcttctccctactctaatgatttcacaagcctcacctacgatttgatccgttccgggtgcgtcagagatgacacctacggaccatatagttccccttcactcagaatagcccggttccgttttcgtgctttccattttctcaacaggtttccgtccgtctaccttagatgcaaaatggtggtctgtcgtgcatatgatcccagctccagatgttacagggggtgcgtgctgcgcagtaagcgggacgtgggcagttatcaggagaaagtggacgttgtgctggggccaatccagctacagacccctccccgacgagaggaggagccacgctag

SEQ ID NO: 14871 - DNA, 5358 bp, synthetic construct
  misc_feature 1..5358: note = Description of Artificial Sequence: Synthetic coding sequence
  source 1..5358: mol_type = other DNA
atgggcatatctacagttatcttagagatgtgtctgttgtgggggcaggttctgagtaccggagggtggatcccgcggacgaccgactatgccagcctcatcccatccgaagtacctctggatcccaccgtggcagaaggaagtccttttccgtctgaatccactcttgagagcaccgtggccgagggaagccccatctcccttgagagcacacttgagagcactgtggcggagggtagccttattccaagtgagagcaccttggagtcaacggttgccgaaggctccgacagcggattggccctaagactggtcaacggagatggtcgctgtcaggggagagtggaaatactataccgggggtcctggggtaccgtatgcgatgattcttgggacactaatgacgccaacgtggtttgcaggcagctgggctgtggttgggcaatgagcgctcccggcaacgcttggttcggacagggtagtgggcctatcgctctggacgatgtgcgctgttcaggccatgaatcatatctctggtcttgtccccacaatggttggctctctcacaactgtggacacggagaggacgccggggtgatttgtagcgcagcccaaccccaaagtactcttcggcccgagtcctggcccgtgaggatctctcctccagttccgactgagggaagcgagagcagcctggccctgaggttggtgaacgggggagatcgatgtcgcggtcgtgtggaagtcctataccgtggaagttggggaaccgtgtgcgacgactattgggacacaaatgatgcgaatgtcgtttgcaggcagctcgggtgtggatgggccatgagcgcgcccggaaacgctcagtttggacaggggagtggtcctatcgtgttagacgatgtaagatgcagcgggcacgagtcctatctgtggtcatgccctcataatggatggctgacccacaattgcggccacagcgaggatgcgggggtaatctgttccgccccccagtcaaggcccacaccttcgcctgacacatggccgactagccacgcgtcaaccgcaggacctgagtccagcctggcattaagattggtaaatgggggagatagatgccaggggcgagtcgaagtgctgtaccgtgggtcttggggaaccgtatgcgatgatagctgggatacaagcgatgccaacgtcgtgtgtagacagttaggctgcggatgggccacttctgcccccggaaatgcaaggtttgggcagggtagcgggccaatcgtgttggatgatgtaagatgttcaggttacgaaagctatctttggtcttgcccacacaatggctggttgtctcataattgccaacacagtgaagatgcaggagtgatttgttccgcagcacatagttggagcactcccagccctgataccctgccaactataacactccccgctagcacagtcggttctgaatcatcgttagctctgagacttgtcaacggaggcgatcgctgccaggggagggtagaggttttgtatcaggggagttgggggactgtttgcgacgattcttgggacacgaacgacgcgaatgttgtgtgccgccagctgggatgcgggtgggccatgtcagcccccggcaatgccagattcggccaaggttcagggcctatagtgcttgatgatgtcagatgttctggacatgaatcttacctgtggtcgtgcccacacaacgggtggctttcacacaactgcggccattccgaggatgcgggtgtgatttgcagcgcttcccaatcccggcccaccccgagtccagacacatggcctaccagtcacgccagtactgccgggagcgaatccagcctcgcgttgagacttgtgaacggtggcgatcggtgccagggccgcgtggaggtactgtaccgagggagctgggggacggtttgcgatgactattgggataccaatgacgccaatgtggtgtgccggcaactggggtgcggatgggccatgagcgccccaggaaatgctcggttcggccagggctcaggaccaattgtgcttgatgacgttaggtgttcggggcacgagagctatctttggagttgtccacataatggctggttaagtcacaactgcgggcatcacgaggatgcaggtgtaatctgctcggcatcacagtcccagccaacccctagcccagatacctggcccacctcccacgcttcaacagcagggtccgaatcaagtttggcgctgcgcttggtgaacggcggcgatagatgccagggtcgagttgaagtgctttaccggggatcctgggggacagtctgtgatgattattgggacaccaacgacgctaatgtagtgtgtcggcagctggggtgcggttgggctacctcagctcctggcaatgctcggtttggacagggctcaggcccaatcgtgctggatgacgtgcggtgctctggccacgaaagttacctgtggtcttgtccccacaacggatggctatcacataactgcgggcaccatgaggatgcaggggtcatctgttcagcttctcagtctcagccgactccgagccccgacacttggcctaccagtcgtgcgtctactgccgggagtgaatccacccttgcactgcgcctcgtaaacggcggagatagatgccgcgggagggtggaagtgctgtatcagggtagttggggcaccgtgtgcgatgattactgggacaccaacgacgccaacgtcgtttgccgacagttgggctgcgggtgggcgatgtccgccccagggaatgcccagttcggccaaggtagcggcccaattgtcctggatgacgttcgctgttccgggcatgaatcttacctctggtcctgcccccacaacggctggttatcccacaattgcgggcaccatgaggacgctggcgtgatctgtagcgctgcccagtcacagtctaccccaagaccagatacatggctcactaccaacctgcctgcccttaccgtggggtccgagtccagcctggccttgcgcctggtcaacggcggcgacaggtgcaggggtcgcgttgaggtcttgtacagaggctcctggggtactgtgtgtgacgacagttgggatacaaacgacgcgaacgtagtttgcagacaattgggctgtgggtgggccatgtcagcacccgggaacgccaggttcgggcagggctctgggcccattgtactggacgatgtgcgatgttcgggcaatgagtcttatttgtggagttgccctcataagggctggctcacacacaactgtggacatcacgaagacgccggcgtaatctgctcagccactcagatcaattccacgactaccgattggtggcatcctacaactaccacaacggctcgaccctctagtaattgcggtggctttctgttctatgcatcaggaaccttctctagtcccagttaccctgcctactacccgaacaacgctaaatgcgtgtgggaaatagaagtcaatagcgggtaccgcatcaatttaggattcagcaatctcaaactggaagctcaccataactgctcctttgattacgtggaaatctttgatggatcactgaactcttcactactgctgggcaagatttgcaatgacacccggcaaatcttcaccagtagttacaacaggatgaccattcactttcgcagtgatatttcatttcagaacaccgggttcttagcgtggtataatagcttccccagtgacgctacccttcggcttgtgaacctcaatagtagctatggactctgtgccggccgtgtggaaatctatcacgggggtacttggggcactgtgtgcgacgatagttggaccatacaagaagctgaagtggtgtgtagacagctgggctgcgggcgggcggtatctgccctcgggaacgcttacttcggctccggaagtggcccaattacactggatgatgttgagtgtagtgggaccgaatccacactgtggcagtgccgtaaccggggatggttctcccacaactgtaaccatagagaagatgccggggtgatctgttccggtaaccatttatccacaccagcccccttcctaaatataaccaggcccaatacagactactcttgtggaggatttctgtcccaaccatccggcgatttctcttcccctttttaccctgggaactatcctaataacgcaaaatgcgtttgggatatcgaggtacagaataattatagggtcacggtcatatttcgagacgtgcaactggaaggcgggtgtaactacgactacattgaagtattcgacggtccttacagatcctcaccactgattgccagggtctgtgatggggctaggggaagcttcacttcaagctcgaactttatgtccattagattcataagtgaccatagtattactcgtaggggctttcgtgctgagtattattcctcaccatccaacgactctacaaacttgctatgtctgcctaaccacatgcaggcctccgtgagccgatcttacctccaatctctgggcttctccgccagtgatttagtcatatccacatggaatggatactacgagtgtcgcccccagataacccctaacttggtgatttttactatcccttactccggttgcggtactttcaaacaagctgacaatgataccattgattacagcaacttcctgactgccgccgtcagcggtggaatcattaaaaggcgtaccgacctgcggattcatgtgtcttgcaggatgctccagaacacgtgggttgacaccatgtatatcgcaaatgacactatacacgtagccaacaatactatacaagtggaagaggtccagtatggcaatttcgatgtcaatatttccttctacacatcgtctagtttcctgtatccagttacctcacgaccatactatgtcgacttgaatcaagatctgtatgtccaggcagagattttacactcggacgccgtgttgacactctttgtggatacatgtgtggcctctccttacagtaatgacttcacctcactgacctatgacctgatcagatccggatgtgtcagagatgacacatatggcccttactcttctccaagcctgcgcattgctagatttaggtttagagcatttcactttctgaaccgattcccgtcggtttacttgcggtgcaagatggtggtatgtcgtgcttacgaccccagcagcagatgctaccgaggctgtgtcctgcggtcaaagagagatgtcggatcctaccaggagaaagtggatgttgttctgggacctatccagcttcagaccccacccagaagagaagaagagccaagatag

SEQ ID NO: 14872 - DNA, 7242 bp, synthetic construct
  misc_feature 1..7242: note = Description of Artificial Sequence: Synthetic coding sequence
  source 1..7242: mol_type = other DNA
atgggcatttccacagtgatcctggaaatgtgcctgttgtggggccaggtcctgtctactggcggatggattccaaggactactgactacgcaagcctgatcccgtccgaagttcctcttgaccccaccgttgccgaaggcagcccattcccttccgaatccactctggagtccacagtggccgaggggagccccatctcgctcgagtccactcttgaaagtactgtggcggaggggtctctgattccaagcgagagcactctcgagtctaccgtcgcagagggctctgacagtggtttagcactccggttagtgaacggcgacggcaggtgtcagggacgagtcgaaattctgtatcgcggaagttggggcacggtatgcgatgactcctgggatacaaatgacgcgaatgtcgtgtgcagacagctcggctgcgggtgggctatgagtgctcctggtaatgcctggtttggacagggatctgggcccatcgccctggacgatgtgcgttgttccggccacgagagttacctatggagctgcccgcacaacgggtggttgtctcacaattgcggtcacggggaagacgcgggcgtcatctgttccgccgcacaaccacagtccacccttagaccagagtcgtggccagtgcggattagcccacccgtgcccacagagggcagtgagagctctctggccctccgcctcgttaatggcggggataggtgtcgcggtcgagtggaggtactgtatagagggtcctgggggacggtctgtgatgattactgggatacgaacgatgcaaacgtggtgtgccggcagctggggtgcggttgggcgatgtcagctcctgggaatgcgcagttcggacaggggagtggtccaatcgttttagatgatgtacgctgtagtggccacgaaagttatctgtggagctgcccacataacggctggctgacacacaattgtggccacagcgaagatgccggcgtgatctgtagtgccccgcaaagtagacccactccttctcccgatacctggcctacgagccacgccagcactgcaggccctgaatcaagtttagccctgaggctcgtgaacgggggagaccggtgccaagggcgcgtggaagtactttatcgcgggtcctggggcactgtgtgtgatgattcctgggacacgagtgacgcgaacgtggtgtgtaggcagctgggatgtgggtgggccacgagcgcccccggaaatgctcgtttcggacagggctctggtcccattgttttagacgacgtgaggtgttcagggtacgaatcctacctttggagctgtccacacaacggctggctgtcccacaactgccagcactccgaggatgccggagtcatctgtagtgccgcacactcatggtcgactccatcacccgatactctccccacgatcactctccccgccagcaccgtgggcagcgagtctagccttgcactgcggctcgtcaatggtggcgacagatgccagggcagggtcgaagtactttacagagggtcatggggcacggtctgcgacgatagctgggatacaaatgatgccaacgtggtttgtaggcagctcggatgcggatgggccatgttagcacccggtaacgctcgcttcggacagggctcagggcccatagtactggatgacgtgcgatgctccggcaatgagtcctacttatggtcctgcccccacaatggctggctctcgcacaactgcgggcattccgaggatgcgggtgtgatttgttcgggccccgagtcctctttggcgttgagactggtcaatgggggggataggtgccagggcagggtggaggtgctttaccgcggttcgtggggaaccgtctgtgatgatagttgggacaccaatgacgccaatgtggtgtgcaggcagttagggtgcgggtgggctacaagcgcacccgggaatgcacgctttggccagggcagtgggcccatcgtgctggacgacgtcagatgtagcggccacgagtcatacttgtggtcctgcccaaataatgggtggttgtcacataattgcggacatcacgaagacgctggagtgatttgttcagccgcgcagtctaggagtactcctcgacctgatactctgagcaccattaccctccctcccagtactgttggatcagaatcatccctgacactgagactcgtgaatggatcagatagatgccagggccgagtggaagttctttacagagggtcgtggggcacagtctgtgacgattcttgggacactaacgatgcaaatgtggtgtgtcgacagctggggtgtgggtgggcaactagcgccccaggaaacgcccggttcggccagggttccgggcccatcgtgctggatgacgttaggtgcagcggccacgagtcatacctatggtcctgtccgcacaatgggtggcttagccataactgcggccatcatgaggacgccggtgtgatatgttcggtgtctcagtctcgaccaaccccatctcctgatacctggccaacaagccatgccagtaccgcaggtcccgaatcatccttggccctgcgattagtgaacggaggagatagatgtcaggggcgggtagaggtattgtatagaggtagttggggcaccgtctgcgatgacagctgggacactagcgacgccaacgtcgtgtgtcgacaactcggatgtggctgggctacttccgcgcccggcaacgcacggtttgggcagggctctggaccaatcgtgcttgacgatgtgcggtgctcgggctacgagtcctatctgtggagttgcccccataacggatggctttcccataactgtcagcatagcgaagatgctggagtgatctgttctgcagcacactcttggtcgactcctagccccgacacacttcctacaatcacactccctgcttcaaccgttggctctgagtcatcattggcactgaggctggtgaatgggggcgatcggtgccagggtcgagtggaagtactttatcaagggagttgggggacggtgtgtgacgatagctgggacactaacgatgcaaatgtggtttgtcggcagctcgggtgcggttgggcaatgtccgcccctggcaatgctagattcggtcagggctctggtcctattgttctggacgacgttcggtgttccggccatgagagctacctgtggagctgcccacacaacggatggctgagccataactgtggccacagcgaagatgcaggagtaatctgctcagcatcgcagtctagacccacaccatcgcccgacacttggccgacaagccatgctagtactgctggatctgagtccagcctggccttgaggttggtaaatggcggggaccggtgccaaggacgggtagaagtcctttatcggggcagttggggtacagtctgcgacgactattgggacaccaatgatgccaacgtggtctgtcgccaactggggtgtggatgggcgatgtcggctcctggcaacgctagattcgggcagggctcagggcccatcgtccttgatgatgttagatgttccggccacgagtcctatctgtggtcttgcccacataatgggtggttgagccacaactgcggccaccacgaagacgctggcgtaatctgctcggcctcacagtctcaaccgaccccctctccagacacttggccaacaagccacgcttcaactgccggatcagagtcaagcctcgctctccgcttagtaaacggaggcgatagatgccaggggcgggtagaggtcctctacagaggttcttgggggacagtgtgtgacgattattgggacaccaatgacgccaatgtggtgtgccggcaattaggttgtggatgggcaacgtccgcccccggcaacgctcgcttcggacagggatcaggacccatcgtgttggatgatgtccggtgcagcgggcatgaatcctacctgtggtcttgcccccacaacggatggttatctcataactgcggccatcacgaggacgccggtgtgatctgttctgcgagccagtcacagccaacaccctcacccgacacttggcctacttcacatgcctctacagccgggtccgaaagcagtctggcactgcgcctggtcaacgggggagatcgatgccagggaagagtggaggtgctatacaggggctcgtggggaacagtgtgtgacgattattgggacactaacgatgctaacgtcgtgtgccgacagctgggatgtggctgggcaacctctgcacccggaaatgctaggttcggacaggggtctggaccgatcgtgctggatgacgtccgctgctcaggccacgaaagctatctgtggtcgtgtccacataacggctggttgtcgcacaactgcgggcatcatgaggacgctggcgtgatctgctccgcatctcagagtcaacccacccccagccctgatacttggcctacttccagagcctctacagcgggtagcgagtccacgctcgctttgaggctcgtcaacggcggagatcgttgccgcggcagagtggaggtgctatatcagggaagttggggcactgtatgtgacgattattgggacaccaatgatgccaacgtggtgtgccgtcagctgggatgtggctgggcaatgtccgccccgggaaatgcccaattcggacaggggtccggacctattgttctggacgacgtgcgttgcagtgggcacgaatcttatttatggtcttgtccacataacggatggctctctcacaattgcggccaccacgaagatgctggggtcatctgctcggctgcccaaagtcagagcaccccgcggcccgacacctggctgacaactaatttgcctgccttgactgtcgggtctgaatccagtctggctctgcgcctggtgaatggcggtgacagatgtagagggcgggtcgaagtgctataccgcgggtcttgggggacagtgtgcgacgacagttgggacactaatgatgcaaacgttgtgtgtcggcagctgggatgcgggtgggccatgtccgcccctggtaacgctcggttcggccagggatccgggcctattgtccttgatgatgttaggtgtagcgggaacgaatcttacctgtggagttgccctcacaaggggtggctcacacataattgtggccaccatgaggatgctggagtgatctgttcagcaactcagatcaatagtaccacaacagattggtggcatcccacaactaccacaacagcccggccgtcgagtaattgtgggggattccttttttatgcatctgggacattcagcagcccttcctaccctgcatattaccccaataacgctaaatgtgtgtgggagattgaggttaatagcggctatcgcatcaacctgggatttagcaacttaaaacttgaggctcaccataattgcagctttgactacgtagagatttttgatggtagtcttaactccagtctgctgctcgggaagatctgcaatgatacccggcagatctttacttcttcttataacaggatgacgatacattttagaagtgacataagtttccagaatacaggtttcctggcctggtacaatagtttcccttcagatgccaccctccgcctagtgaacctgaactcctcctatgggctttgcgcgggtcgtgtggaaatctatcacgggggaacatgggggactgtatgcgatgattcttggacaattcaggaggcagaggtcgtgtgcagacagctgggatgcgggagggccgtgtctgcacttggtaatgcgtactttgggtcgggctcagggccaattaccctggacgatgtggagtgctccggcaccgaaagcacattatggcagtgtaggaaccggggttggttctcacataactgtaatcatcgagaggacgctggtgtgatttgtagcggaaaccacctgtctacacccgcaccatttctaaacatcaccaggccgaatactgattacagttgcggtggctttctctctcagcccagcggggacttctccagtccgttttaccctggcaactacccgaacaatgcgaaatgcgtgtgggatattgaggttcagaataattatcgggtcaccgtgatctttcgtgatgtacagctggaaggggggtgtaactatgattacattgaggtttttgacgggccatacaggagcagtcctctaatcgctagagtttgtgatggagcgcgggggtctttcacgagtagcagcaactttatgtctattcggttcatcagcgatcattctatcaccaggcgaggcttccgggccgagtactactcctcaccctccaatgactccaccaatctcctgtgcctccccaaccatatgcaggccagtgtgtctcgaagctacctgcagagtcttggctttagcgcatctgatctagtgatttctacttggaatggctactacgaatgcagaccacagattacacctaatctggtcatcttcactatcccttacagcggctgtggaaccttcaagcaagccgacaacgacactatcgactatagcaactttttgaccgcggccgtgagtggcggcattataaagaggcggaccgacctgcggatacatgttagttgtaggatgctgcagaacacctgggtcgatacaatgtatattgcgaacgatacaattcacgtcgctaacaatactatccaggtcgaggaggtgcagtatgggaactttgacgtgaatatctctttttacacctctagtagcttcctgtaccccgtgacttctcgtccttactacgtggatctgaatcaggacctgtacgtccaggctgagatcctccatagcgacgctgttctgactctgttcgtcgacacatgtgtggctagcccctatagcaacgatttcacctcccttacatatgaccttatccggtctgggtgtgtgagggatgacacatatggcccctattcatctccatctctcaggatcgctagattccgctttagagcttttcactttctgaacaggtttccttctgtctacctgaggtgtaagatggttgtctgtcgcgcctacgacccttctagtagatgctaccgtggctgcgtgctgcgctccaagagggatgttggcagctaccaagagaaggtggacgtcgtcctgggaccaatacagctccaaaccccaccccggagagaagaggaacctcggtag

SEQ ID NO: 14873 - DNA, 5358 bp, synthetic construct
  misc_feature 1..5358: note = Description of Artificial Sequence: Synthetic coding sequence
  source 1..5358: mol_type = other DNA
atgggaatatcaaccgtgatattagagatgtgcttattgtgggggcaggtgctgtccactggcggctggatcccccggacgacggattatgcatctctcattcccagtgaagtcccccttgatcccacagtggccgagggatcacccttcccttcagaaagcacccttgagtcaactgtggccgagggctccccgatctctctggaatccactctcgaaagcactgttgccgaaggtagtctcatcccctctgagtctactctggagagtaccgtagccgaggggagtgactccggcctggcactcagactggtgaacggtgacggaagatgccagggcagggtggaaatattataccgcggcagctggggaacagtttgcgatgatagttgggacaccaatgatgcgaatgtggtgtgtagacagctggggtgtgggtgggccatgtcagcccctgggaatgcttggtttggacagggcagcggccctatcgccctggatgacgtgcgatgctcaggacacgaatcttatctctggagctgcccacacaatggctggttgtcccataattgcggacatggcgaagacgccggcgtgatttgttccgccgctcaacctcagagtactttaaggccggagtcttggcccgtccgaatcagccccccggtacccactgagggcagcgagtcatcactcgcccttcgactagtcaatggcggcgatcggtgtcgtgggcgtgtggaggtgctgtaccgagggagctggggaactgtctgtgatgattactgggatacaaacgacgccaacgttgtgtgtcgacagttagggtgcgggtgggccatgtccgctccaggaaatgcgcagtttggtcagggcagcggcccgatcgtgctggacgacgttcgatgtagcggccacgaatcttacttgtggagctgtccgcacaatggatggctgactcacaactgtggccatagcgaggacgccggggtcatttgtagcgccccacagtcccgcccaacaccttctcccgacacttggcctacttcacatgcttcaactgcgggaccagaatctagtcttgcactccggttggtcaatgggggcgataggtgtcagggacgggtggaggtgttatatcgcgggtcatgggggactgtttgtgatgactcttgggatacaagtgatgccaatgtggtttgccgacagttaggatgtggctgggccacttcggcccctggcaacgcaagattcggtcaaggctctggccccatagtgctggatgacgtgagatgttcgggctacgaaagctacttatggtcatgtccccacaatggatggctgtctcacaactgtcaacatagtgaggatgccggcgtaatctgcagcgccgcgcacagctggtctactccttcccctgacacactcccgacaattaccctgccggccagcaccgttggatctgagagctccctggcactaaggctggtcaacggcggcgatagatgtcaaggacgagtagaagtactctaccagggtagttggggaactgtgtgcgatgacagctgggacactaacgacgcaaacgtggtgtgccggcagctgggatgcggttgggcgatgtctgcacccggcaatgcgcgcttcggccaaggaagcggccctatagttctggacgacgtccgctgcagtgggcacgagtcttacttgtggtcttgtcctcataatgggtggttgtcgcataattgtgggcactccgaagacgctggcgtcatatgttcagctagtcagagcaggcccaccccttctcctgatacttggcctacttctcacgcaagcacagccggtagcgaatctagtctggccctcagactggttaacgggggtgatcggtgccagggtagggttgaggtgctatacagaggctcttggggcactgtgtgcgatgactactgggacactaatgacgccaatgtagtctgtcgacagctgggctgcggctgggccatgtcagcaccaggcaacgctagatttggtcagggctccggtcccatcgtactggacgacgttcggtgttctggacacgagtcttacctctggtcctgtccacacaacggatggctgtcccataactgcgggcatcacgaagatgctggggtgatctgctccgcctcgcagtcccaacctaccccttccccagacacttggcccacctctcatgcttccaccgcggggtctgagtcctctctggcattgagactcgtcaatggcggagacagatgccagggtagggtggaggtgctatatagggggagttgggggaccgtatgtgacgactattgggatactaatgatgccaatgtagtgtgccgccaactggggtgcggatgggctacatctgctcctggtaatgcacgatttggacagggctctggacccatcgtcctggatgatgtaaggtgttctggacacgagagctacttatggagttgtccacacaacggttggctgagtcacaactgcgggcatcacgaagatgctggtgtgatttgttccgcctcccagtcacagccaaccccctctcctgatacttggcctacttcacgtgcaagcaccgctggaagtgaaagtaccttagccctcagactggtgaatggaggggacaggtgccgagggcgggttgaagtgctataccaaggctcctggggaactgtgtgtgacgactattgggataccaatgacgcaaatgtagtttgtcgccagttgggctgtggctgggctatgagtgcgcctggtaacgctcagtttggacagggcagcggacccattgtgttggacgatgtcaggtgttctgggcacgaaagctatctgtggtcctgcccacacaacggttggctgagtcacaattgtgggcaccacgaggatgccggagttatttgtagcgcagcacaatctcagagcaccccaaggccagatacctggctgacaaccaatttgcccgccctgaccgtgggtagcgaaagtagcctggctttacgcttggttaacggcggcgataggtgtcgcggacgcgtagaggttctgtatcgcggcagttggggaacggtttgcgacgatagctgggacactaacgacgccaatgttgtctgtagacagctcggttgtggatgggctatgtctgcccctggtaatgccagattcgggcaaggcagtgggccaatcgtactggatgacgttaggtgctcagggaatgaaagctatttatggtcctgtccacacaaagggtggctgactcacaattgtgggcatcacgaggatgcgggagtgatttgcagcgctacacaaatcaacagcacaaccaccgactggtggcaccctactacaacaaccacagcgcggccatctagcaattgtggcgggttcctattctacgcttccggtacatttagcagcccatcataccccgcctactatccaaataacgcaaaatgtgtctgggagatcgaagttaatagcggataccgtatcaatctggggttctcgaacctgaagctggaggcgcatcataattgttctttcgattacgtcgaaatatttgatggtagtctgaatagtagcttacttctggggaaaatatgtaacgatacccgtcagatctttacctccagttataatcgtatgacaatccactttcgatcagacatctcattccagaataccggcttcctagcttggtataacagcttcccgagtgacgcaactctcagattagtgaatctgaattcctcctatggattgtgcgccggccgggttgagatataccacggtggcacctggggtacagtgtgcgacgattcctggacaatccaggaggcggaagtggtctgtaggcagctcggctgcggccgggccgtttccgctcttggtaatgcatattttggctctgggtccggtcccatcaccctggacgatgtggagtgtagtggaacagaatctaccttgtggcagtgcagaaatagagggtggttcagccataactgcaatcatcgcgaggacgcaggagtgatttgttccgggaatcatctctcgacccccgccccctttctcaacataacccgtcctaacacagattattcttgtggcggattcttgagtcagccaagcggcgatttcagcagcccattttatccaggcaattacccaaataacgccaagtgtgtgtgggatattgaggtgcagaacaattaccgggtgaccgtgatcttccgcgacgtccagttagagggcggatgtaattacgattatatcgaggtattcgatggaccttatcggtcttccccactaatagccagagtatgcgacggagcaagaggatccttcactagttcgtcaaacttcatgagtattaggttcatcagcgatcatagtataacgcgtagaggatttagagccgaatattatagtagtccaagtaacgattccacaaacctgctgtgcctccctaatcacatgcaggctagtgtgagtagaagttacctgcaaagcttagggttcagcgcaagcgacctagtgatcagcacttggaatggctattacgagtgtaggccacagataacccctaacctggtgatctttaccatcccctactccggctgcggaaccttcaagcaagccgacaatgatactatagactactcgaattttctcaccgctgccgtcagcggcgggattattaaaaggagaactgacctcagaattcatgtctcttgtcggatgctccagaatacctgggtggataccatgtatatagccaacgatacaatacatgtggcaaacaataccatccaagtggaggaggtgcagtatggtaattttgatgtgaatatctcattttacacaagttcaagcttcttgtacccagtaacttcaaggccatactacgtcgacctgaatcaagacttgtatgttcaggcagagattctccattccgacgccgtgcttactcttttcgtggacacgtgtgtagccagtccttactctaacgatttcacttctcttacttatgacttgattagatcaggttgcgtgagagacgatacttacggcccatactctagccctagcctgagaattgcacgtttccgcttcagagcctttcacttcctgaaccgcttcccgagcgtgtacctacgctgtaagatggtcgtctgcagagcctacgatccctcttcaagatgctatcggggttgtgtcctgagaagcaaaagggacgtggggtcttaccaagaaaaagtggacgtagttctgggcccaatccagctgcagacacccccccgtagagaggaggagccacgctag

SEQ ID NO: 14874 - DNA, 7242 bp, synthetic construct
  misc_feature 1..7242: note = Description of Artificial Sequence: Synthetic coding sequence
  source 1..7242: mol_type = other DNA
atgggcatctcgacagtaatcctggagatgtgcctgctttggggacaggtcttgagtaccggaggatggatcccacggactaccgattatgcgtccctgatcccaagtgaggtgccactggatcccacagtcgctgagggctctccctttccttccgagtctactctcgaatccacagtcgcggaaggcagtccaatttccttagagagtacactggagtcaactgtggccgagggctcacttataccttcagagtcgaccctggaatcgacagtggccgaggggtctgacagtggattagcattgcgattagtcaatggcgacgggcgctgtcaagggagagtcgagatcctgtatcgtggatcgtggggaaccgtctgcgatgacagctgggacacaaatgatgcgaacgtagtgtgccggcaactcggatgtgggtgggctatgagcgcccctggcaatgcatggttcggtcagggttctgggcccattgcattggatgatgtgagatgttctggacacgaaagctatttgtggtcatgtccccacaacgggtggctgagccataactgtgggcatggtgaagatgccggcgtgatttgctcagcagcccaaccacagagtacgctacggccagagagctggcccgtgcgaatcagtccaccagttcctacagaagggtctgagtcaagtctcgccttgcggctggtgaatggtggcgaccggtgtcggggacgggttgaggtcttataccggggttcctgggggactgtctgtgacgactactgggataccaatgacgcaaatgtcgtctgccggcagctaggttgcggctgggccatgtcggctcccggcaatgcccaattcggccagggctctggtcccatcgtgctcgacgatgtgcgctgcagtggtcacgaatcgtacctgtggtcctgcccccacaacggctggctgacacacaattgtggtcactctgaagacgccggggtcatttgctcggctccacagtcaaggcccaccccttccccggatacatggcccacctctcatgctagcacagctggacctgaatcaagccttgcgcttcgtctggttaatggcggtgaccgatgccagggccgggtggaagttctttaccgcggatcatggggcacggtttgtgatgactcatgggacaccagcgacgccaacgtagtatgtcggcagctaggttgtggctgggcgaccagcgccccggggaatgccagatttgggcagggttccggcccaattgtgctggacgacgtcagatgctcagggtatgaatcttacctctggagctgtccacacaacgggtggctttcccacaactgccagcattcagaagacgctggtgttatatgcagcgcagcccattcgtggtcaaccccaagccccgacacactgccaactataaccctgccggcttcaacggtgggcagcgagtcaagtctcgccttgcggctcgtaaacggcggtgaccggtgtcaggggcgggtagaagtgctgtacagggggagctgggggacagtgtgtgatgacagttgggacacaaatgacgccaacgtcgtctgtagacagctcggatgcggatgggccatgctggctccagggaacgcccgcttcggccaaggttccggacctatcgttctggatgatgtgagatgcagcggaaacgaatcttacttatggtcatgcccccacaatggttggctatcccacaactgtgggcattctgaggatgcgggagtgatatgtagcggacccgaatcctccttagcactccgactggttaacggtggggaccgctgccaaggcagagtggaagtgctgtatcgaggctcttggggtaccgtctgcgatgatagctgggatacaaatgacgccaacgtcgtgtgtcgacaactgggctgcggctgggccacatcagcccccgggaacgcccgattcggccaggggagtggaccgatcgtcttagacgacgtaagatgtagtggacatgagagctacctgtggtcatgtcccaataatggctggttatctcacaattgtggccaccacgaagacgccggcgtgatttgttccgctgcccagtccagatcaactccccgaccagacaccttgagtactataactcttccaccatcaaccgttggctccgagagcagcttaacgctccggctcgtcaacggctctgacaggtgccaagggcgcgttgaagtactataccgtggcagttggggcacggtatgcgacgattcttgggacactaacgacgcaaacgtcgtttgtagacagttaggatgcggctgggccacatccgcgcctgggaacgctcgcttcggccaaggtagtgggcctatcgttttggacgatgttcgctgttccggccacgagtcatacctttggtcttgcccacacaatggttggctgagccacaattgcggccaccatgaggacgccggcgtgatctgtagtgtgtcccagtctagaccgacaccgagcccggatacctggccaacatcccatgccagtacggctggacctgaatctagtctggcgctccggcttgtgaacgggggagaccgctgccagggacgcgttgaggtgttataccggggttcttggggcactgtgtgtgatgatagttgggacacttcagatgcgaacgtggtttgtcggcaattgggatgcgggtgggctaccagtgcccccggcaacgcgaggttcggccaagggagcggtcctattgtgctggacgacgttagatgtagtggatacgagtcctatttatggtcttgccctcacaacggctggctctcacacaattgtcaacatagcgaggacgcgggtgttatctgtagcgcagcacacagctggtccactccttctcccgacactcttcccaccataacactaccagcctctaccgtgggatccgaatcatccctggctctgcggctggttaatggcggagatcgatgccaaggcagggtagaagtgttatatcaggggtcgtgggggaccgtgtgcgacgactcctgggatacaaatgacgccaacgtcgtctgccggcaattgggatgcggatgggctatgtctgctccaggaaatgctcgctttggtcaaggttctggaccgatcgtattagacgatgtgcgctgctcaggacatgagtcttacctgtggagctgcccacacaacggttggctgtcacacaattgcgggcactccgaggatgccggagtaatctgcagcgcctcccagtctcgtcctaccccaagtcctgacacatggcccacctcacatgcctcgactgccgggagcgagagctctctggccctgaggttagtgaatggaggagacaggtgccaaggacgtgtcgaagtgttgtatcgcggaagttggggcactgtctgtgacgattactgggacacaaatgatgcaaacgtggtctgtcggcagctaggctgtggctgggcaatgagcgcccccgggaacgctaggtttggccagggatcggggcctatagtgttggacgatgtacgctgttccgggcacgaatcatacctgtggtcttgcccgcataacgggtggctgtctcacaactgcggccaccacgaagacgctggcgtgatctgttccgcatctcagtcccagcccactccttcccctgatacatggcccacgtcccacgctagcaccgctggctctgaatcatccctggccctgagactggtcaatgggggggatcgctgccagggacgtgtggaggtgctctaccgtggatcttggggcaccgtttgtgatgactactgggatacaaatgatgctaacgtcgtgtgccgccaattgggctgcggctgggccaccagtgctccagggaacgccagatttggccagggcagtggtcctatcgttttggacgatgtgagatgttccggacacgagtcttacctgtggagctgtccccacaacggctggctgagccataactgtggccaccatgaggatgcaggtgtgatctgcagcgctagccaatctcagcctacaccaagccctgatacctggcctacaagccacgcctctactgcaggttccgaatcaagccttgcgctccggctggttaatggcggtgaccgatgccagggtcgggtcgaagtattataccgcgggagctggggtacagtttgcgacgattattgggacaccaatgacgccaatgttgtttgccggcagttggggtgcggttgggccacgagtgcacccggcaatgctagatttggccagggcagcgggcccattgtgttggacgacgtgcgatgttctggccacgagagctacctctggtcatgcccgcacaacggctggctgagccataactgcggtcaccatgaggacgcaggcgtgatctgttcagcttctcaaagccagccaactccttcccccgatacttggcctacctcccgggcttccacagccggttcagagtccacactggccctgcggctggtgaatgggggcgatcgatgtcgcggacgggtggaagttctctaccagggcagttggggcactgtgtgtgacgattattgggatacaaatgacgccaatgtcgtctgcaggcaactcgggtgcggatgggccatgtcagcccctggtaacgcacaatttgggcaaggcagcggacctatagttctggatgacgttcggtgttcggggcacgagagctacctgtggtcttgtccacacaacggatggctgtcacataactgcggacaccatgaagacgccggcgtgatttgttctgctgcgcagagccaatcgacaccacgtccagatacttggctgacgaccaatctcccggccctgacggtgggatcagagagtagtctggctctgcgtcttgtcaatggcggtgacagatgtaggggccgtgtggaagtgctttaccggggctcatggggcaccgtgtgcgacgactcgtgggataccaacgatgccaacgtcgtctgccgccaactgggctgtggttgggccatgtcggcacctggcaacgcacgcttcgggcagggaagtggtcccattgtgctggatgatgtgaggtgtagcggaaacgagagctacctgtggtcttgcccacacaaaggatggctaacacacaactgtggtcaccatgaagacgctggggtcatctgttccgccactcaaattaattctaccactacagattggtggcatcctaccacaacgactactgctagaccttcctcaaactgcggaggatttctgttctacgccagtggcactttctctagtccctcctaccccgcgtattaccctaataacgcaaagtgcgtgtgggagatagaggtgaactcagggtatcgcataaacttgggcttcagtaacctgaaactggaagcccaccataattgcagctttgattatgtagaaatttttgacggttctttaaacagcagcctcctcctgggcaaaatctgtaacgatactagacagattttcacttcttcctataaccgcatgactatacattttcgtagcgatatatcttttcagaataccggcttcctggcttggtataacagctttccctcagacgctacactccggctagtcaacctgaactccagttacggtctgtgtgcggggagagtggaaatttatcatggcgggacttggggcaccgtgtgtgacgactcatggactatccaggaggccgaggttgtatgtcgccaactgggatgcggccgtgccgtcagtgcccttggcaatgcgtatttcggctcaggctcggggcctattactctagatgatgtcgagtgttctgggactgaatcgacactgtggcagtgccgcaatcgagggtggttttcccacaactgcaatcatagggaagacgcaggggtgatttgtagcggcaaccatcttagcactccagctcccttcttgaatatcacccgcccgaacaccgattatagctgtggcggcttcctgtcacagccaagcggtgattttagctctccattctatcccggaaactatcccaacaatgcaaagtgcgtctgggatatcgaagtgcaaaacaactatcgcgtgaccgtcatatttagggacgttcagctggaaggagggtgcaactacgattatatagaggtatttgatggtccttaccgatcttccccactgattgcccgcgtctgtgacggcgcgaggggatcattcacctcatcctccaatttcatgtcaattaggttcatctcagaccacagtatcacgcggcggggcttcagagccgaatattactcaagtccaagcaacgatagcacaaacctactttgcttacctaaccacatgcaggcatctgtttctagatcatacttgcagtctctgggattctcagcctctgacctggtcatcagtacatggaatggctattatgaatgcagacctcagatcacgcctaacctggtgatcttcaccattccctattccggctgcggcactttcaagcaggccgacaacgacacaatcgactactccaattttcttaccgctgccgtgagtggtggcattattaaacgcagaacagatttacggatccatgtcagctgtcggatgctgcagaatacttgggtggatacaatgtatatcgccaacgacacaatccacgtggctaacaatactatccaggtggaagaggttcaatatggcaatttcgacgtcaatatttccttttacactagcagctcattcctgtatcctgtcacgtcccggccatattacgtggatctcaaccaagatctgtacgtgcaggccgagatccttcatagcgacgccgtgcttacactgttcgtggatacctgtgtagcgtcaccatacagcaacgacttcaccagccttacatatgatttgattcgttctggttgcgtgagggatgatacatacggcccttattcttccccaagcctgcgaatagctcggttccgcttcagagcattccatttcctaaaccggttcccatccgtgtacctgaggtgcaaaatggttgtgtgtcgagcttacgatccgagctcgagatgttataggggatgtgtgctgcgctccaagagagatgtgggcagctaccaagaaaaagttgatgtggtgctgggacctattcagctgcagactcctcctagaagagaagaggagccacggtag

SEQ ID NO: 14875 - DNA, 7242 bp, synthetic construct
  misc_feature 1..7242: note = Description of Artificial Sequence: Synthetic coding sequence
  source 1..7242: mol_type = other DNA
atgggcattagtaccgtgattttagaaatgtgccttctttggggtcaggtgttatcaactggcggttggataccaaggactaccgactacgcctcactcattccatccgaagtgccattggacccaacagtggctgaaggatccccctttccatcagagtcaacccttgaaagcaccgtcgcagaaggctccccgatcagccttgagagcacgctagaatcaaccgtcgccgaaggtagcctgatcccgtccgagtctacgctagagagcaccgtggccgagggctctgacagcgggctcgctttaagactggtgaacggcgacgggaggtgccagggtagggtagagattctgtatagagggtcatggggtactgtctgcgatgattcgtgggacacaaatgatgcgaatgtggtgtgccgacaactgggctgtggctgggccatgagtgctccaggtaacgcctggttcgggcaaggatcagggccaatcgccttagacgatgtgaggtgttccgggcacgaatcctatctctggagttgtccccataatggctggctttcacataattgtggccatggagaggacgcaggcgttatctgttccgccgcccagccacagagcacattgcggcctgagtcatggcccgtccggatttcacctccagtgcccactgaaggtagtgagagcagtctagcgctgagactcgtcaatggcggcgacaggtgcagaggaagagttgaggtcttatacaggggcagctgggggactgtgtgtgacgactattgggacacaaatgatgctaacgtggtttgtaggcaactcggttgcggatgggctatgtccgcccccggcaacgctcagtttgggcagggctcgggaccaatcgtcttagacgacgtccggtgcagcgggcacgagtcctacctgtggtcctgccctcacaacggatggttgactcataactgtgggcatagcgaggacgcgggggtcatttgcagtgccccccagagtaggccaacgccgtccccagacacatggccgacatctcacgcatccactgccggtccagagtcctctttggctctacgcctggtgaacggaggggacaggtgtcagggacgagtagaagtgttgtacaggggctcttgggggactgtgtgtgatgatagttgggacacgagcgacgctaatgtggtatgccgccagctgggttgcgggtgggccacctcagcccccgggaatgcgaggtttgggcaagggtcaggtcccatcgtcctggatgatgtccgctgtagtgggtatgagagctatttgtggtcatgccctcataatgggtggctctctcacaattgccaacactctgaagatgccggggtcatttgtagtgcagctcactcatggagcacaccaagtcctgatacccttcccaccatcaccttgccggcgagcacagttggctccgagagttccctggcacttcgactggtgaatggtggcgatcgctgccagggaagagttgaggttttatatcgggggtcctggggcaccgtgtgcgatgatagctgggacactaacgatgccaacgtcgtatgtagacagctgggctgtggttgggctatgctggccccgggaaatgcccgcttcggtcagggatctggcccgatcgtgctcgatgacgtgcgctgcagcggcaacgaatcctatctttggagctgtccccataacggctggctgagtcataattgcggccattctgaagacgcgggggtgatatgttctgggcccgaaagctctctggcattgagactggtgaacggcggggatcgctgtcagggccgtgtcgaagtcttatatagggggtcatggggcacagtttgcgacgacagctgggatacgaacgacgcaaatgtggtgtgccggcagcttggctgtgggtgggcgacctccgcgcctggaaacgctcgcttcggtcagggctcagggccaatagtgctcgatgatgtcagatgttcgggtcacgagtcttatctgtggtcctgtcccaataacggctggttgagccacaactgcggtcatcatgaggacgctggggtgatctgttccgcagctcagagccgttcaacgccaagacctgacacgctgagtacgattacactgcccccttccacagtgggctccgagagctccctgacactgcgcctggtaaacgggagcgacaggtgccaagggagagtcgaagtgctgtacaggggaagctggggaaccgtctgcgacgactcttgggatacaaatgacgccaatgttgtttgccgccagctcgggtgcggatgggcaacttcagcccccggaaatgccaggtttgggcagggcagtggacccattgttttagatgacgtgcggtgctcagggcacgaaagttacctgtggtcttgtccacacaatggttggctctcacataactgtggccaccacgaagacgccggcgtgatctgctctgtgagccagagccggccaaccccgagcccagacacttggcctacttcacacgcctcgactgcgggccccgaatcatccctggctctcaggctggtgaatggcggcgacaggtgtcagggcagggtggaggtgctgtaccgaggttcgtggggaacagtgtgcgatgacagctgggacaccagcgacgcgaatgtcgtttgccgacaattaggttgcggttgggctacgagcgctccagggaatgctcgcttcgggcagggctccggaccaatagtgctggacgacgtgagatgtagcggttacgagtcctatctttggtcttgtcctcacaacggctggttgagccataattgtcagcactccgaggatgctggcgtgatttgttctgcagctcattcatggtccacgccatctcctgacacactgccaaccatcactttacccgccagcactgtcggcagcgaatcctcactggcccttaggctggttaacgggggggacagatgccagggccgcgtcgaggtcttataccagggatcttggggcacggtctgtgacgacagctgggatacaaatgacgccaatgtggtgtgtaggcagctgggctgtggttgggcaatgagcgcacccggaaacgcgaggtttgggcaaggatccggtccgatcgtgctggacgacgttaggtgctccgggcatgagagttatttgtggtcttgtccgcataatggttggctgtcccacaactgcggccactcggaggacgctggagtcatctgcagcgcctctcagtcacggcccaccccttctccagatacatggccgacttcgcatgcctcaaccgccggcagcgagagctcactggccctgcgcctcgtgaatgggggagaccgctgtcaaggccgtgtcgaagttttatacagggggtcctggggaacggtctgtgatgactactgggataccaacgacgctaacgtcgtgtgcaggcagctggggtgcgggtgggctatgtccgctcctggcaacgctcgattcggccagggcagcggacctattgtgttagatgatgtcagatgttccggccacgagagctacctctggtcatgtccacacaacggttggctgagtcataactgcggtcatcacgaggacgcaggtgtaatctgcagcgcttcccaaagccagcccacacccagcccagacacttggcctacctcgcatgcctccactgctgggagcgaatcttccctcgccctacgactggtcaacgggggcgataggtgtcagggccgcgttgaagtactgtataggggttcgtggggtaccgtgtgtgacgactactgggacactaacgatgccaacgttgtatgccggcagctgggatgcggttgggcaacgtctgcccccggcaacgccaggtttggtcagggttcgggccctattgtattggacgatgtgcggtgcagcgggcacgaaagctatctgtggtcttgtccacataacgggtggctttcccacaattgtggacatcacgaggatgcaggggtcatctgctcggcttcacaatctcagccaacacccagccctgatacatggcccactagtcatgcaagcaccgcaggatctgagagctcacttgcgctgagacttgtcaatggcggtgatcgctgccaaggaagggtggaagtgctctaccgtgggtcctgggggactgtgtgcgacgattattgggatacaaacgacgccaatgtggtgtgccggcagctgggttgcggatgggcaaccagcgccccagggaacgcccggtttggtcaggggtcaggacccatcgtactggacgatgtaaggtgttccggccatgaatcctatctatggtcctgcccccataacgggtggctcagccacaattgcggccatcacgaagacgcaggtgtgatttgttctgcctcccagtcacagcccacgccatccccagatacctggcccactagtagggcttctacagcaggcagcgaatctactctggcattacggctggtgaacggcggcgatcgttgtaggggccgagtcgaagtcctgtaccaagggtcatgggggaccgtatgcgatgattattgggacactaatgacgcaaacgtcgtgtgccgacagctgggatgcggatgggccatgtctgccccgggtaacgctcagttcgggcagggttccggacccatcgtattagatgacgtgagatgcagtggtcacgaatcgtacctttggagctgtccccacaacgggtggctgtcgcataactgtgggcaccatgaagacgcaggagttatctgctcagccgctcagtctcagtccacgcctcgacccgacacttggttgaccacaaatctgcccgcactgaccgtcggcagcgagtcctccctggccctgaggctggtgaacggaggcgatagatgtagagggcgtgtcgaggttttatacagaggcagttggggaaccgtctgcgatgactcatgggacacgaacgatgcaaatgtcgtatgcagacagctcggatgtgggtgggcaatgagcgccccaggaaacgcacggtttggacagggctcaggtccaatagtgctagatgatgtcaggtgcagtggcaacgagtcatatctgtggagctgcccacataaggggtggctcacccataattgcggccaccacgaagacgcgggggtcatttgcagtgccacacaaattaattcgactacgaccgactggtggcatccaacaaccactaccacggctcggccctcatctaattgcggggggtttttgttttatgccagcggcactttttccagtccaagctatcccgcctattacccaaacaacgcaaagtgcgtgtgggaaatcgaggtgaattcaggatacagaattaacctgggcttctccaacctgaaactggaggcccaccataattgctcctttgactacgtggagatctttgacggctccctgaactcatctctgctactcggcaagatctgtaatgacactagacagatcttcacctcctcctataaccggatgacaattcacttcaggtcagacattagtttccaaaacaccggctttttggcatggtacaattccttcccaagcgatgccacactgcgtctcgtcaatctgaattcctcctatggactgtgcgccggacgagtcgagatctaccacgggggaacctggggaacagtttgcgatgattcttggacgatacaggaggcggaggtcgtgtgccggcagctgggttgtggaagggcagtgtccgctcttggcaatgcttatttcggatcaggcagtggaccaatcactctggacgatgtcgagtgttctggaaccgagtctactctgtggcagtgccgtaacagaggctggtttagccataattgcaaccaccgtgaagatgctggcgtaatctgtagtgggaaccacttatctaccccagcgcctttcttgaacatcactcggccaaacactgactattcctgtggcgggttcctctctcagcctagcggggatttcagtagcccgttctaccctggcaattacccaaacaatgccaagtgcgtctgggacatcgaggtgcagaataattatcgagttaccgtcatctttagggacgtacagctggagggtgggtgtaactatgattatatcgaggtgtttgacgggccttatcggtccagtccacttatagctagagtatgcgacggggcgcggggaagtttcacctcgagcagcaatttcatgagtattcggtttatctcagaccactccatcacccgcaggggcttccgcgcagaatactactccagcccaagtaatgattctactaatttactgtgtctgcccaaccacatgcaggcgagcgtttccagatcctatctgcagtcccttggcttttccgcctctgacctggttatctctacctggaatggatattatgagtgccggccacagataactcctaacctggtcatctttaccattccttattcggggtgcggcaccttcaagcaagcggataacgacacaatcgactattctaacttcctaacggccgccgtatcgggaggtataatcaaacgccgaaccgacctgagaatccacgtttcatgccgcatgttgcagaacacgtgggtggacacgatgtatatcgcaaacgatactattcacgtggcaaataacaccatccaggtggaagaagtgcagtacggcaactttgatgttaacatttccttttatacatctagctcattcctttatccggtcaccagccggccttattacgtagatcttaatcaggacctgtacgttcaagctgagatcctacattcagacgccgtgttaaccttgttcgtggacacctgtgttgcttctccttactccaacgacttcacatctctaacctatgacttgatccgctctggttgcgttagggacgacacatacgggccttattctagccctagccttagaatcgcacgtttcaggtttcgtgctttccacttcctgaatcggtttccaagcgtttacctgcggtgtaagatggtggtgtgtcgcgcgtatgacccaagctcacgatgttaccggggatgcgtgctgcggagcaagcgcgatgttggcagctaccaggagaaagtggacgttgtactgggccctatccagttgcaaacaccccctcgcagggaagaggagcctcggtag

SEQ ID NO: 14876 - DNA, 7212 bp, synthetic construct
  misc_feature 1..7212: note = Description of Artificial Sequence: Synthetic coding sequence
  source 1..7212: mol_type = other DNA
atgggaatttccactgtgattctggaaatgtgcctcctttggggacaagtcctgtccaccggtggttggatccctcgcacgactgattatgcttcgctaatcccctctgaggtgccgctggatcccacggtagcagaaggctctccctttccctcggaaagcacactggaatcaactgtggccgaaggaagccccatcagcctcgagtccaccctggagtctacggtcgctgaaggatccttaatcccctcagagtccacgctcgaatccaccgtggccgaagggagtgattcagggctggcactccgactggtcaacggagacgggcgttgtcaagggcgcgtggagatcctgtataggggatcttggggcactgtctgcgatgactcatgggacacaaacgacgccaatgtcgtctgtcggcagctgggctgtggctgggcaatgtctgcacccggaaacgcctggttcggacagggatctggccctatcgctctggacgacgtcaggtgttctggccacgaaagctatctatggagctgccctcataacgggtggctgtctcataactgtgggcacggggaggacgccggcgtaatctgcagcgcggctcaaccccagtcaacccttagacccgaatcctggcccgttcgcataagcccgcccgtgcctactgagggaagcgaaagctcactggccctgcggctggttaatgggggggaccgttgcagaggcagggtggaagttctctataggggctcttggggcaccgtgtgcgatgactactgggataccaacgatgctaatgtggtctgtcggcaactcggatgtggatgggctatgagtgcaccagggaatgcccagttcggccaggggagcggcccaattgtgttggacgatgtcaggtgttcaggacacgagtcatatctgtggagctgcccgcataatggctggcttactcacaattgtgggcactccgaggatgcaggggtgatttgtagcgcacctcagagtcggcccactccaagccccgacacctggcccacctctcacgcctccacagccggccctgagtcctccctcgccctgagattggtgaatggaggcgacagatgtcagggaagagtggaagtgctctaccgcgggtcctggggaaccgtgtgcgacgattcttgggacacctcagacgctaacgtggtgtgtagacagctgggctgtggctgggctacatccgctccaggaaatgctcggttcgggcagggtagtggtcctattgtcctagacgatgtgcgatgcagtgggtacgagtcttacctgtggtcatgcccacacaatggatggttaagtcacaattgtcagcatagcgaagatgccggcgtgatttgttccgacaccctgccaaccatcacgttaccagccagtaccgtgggttcggaatctagtctcgcacttcgattagttaacggtggcgacaggtgtcagggtagagtagaagtactctaccgcggatcctggggcacggtctgtgatgactcctgggacacgaatgatgccaacgtggtgtgcaggcagctgggctgtggatgggcaatgctggcccccggcaatgctcggttcggtcagggaagtggacccatcgtgctggacgacgtgaggtgttcaggtaacgaaagctacttatggagctgccctcataacggatggctgagtcataactgtggtcattctgaggacgctggggttatttgttctggacccgaaagctccttagcactcagattggtgaatgggggagacagatgccaaggaagggtcgaagtgctgtatcgaggttcttgggggaccgtgtgtgacgatagctgggacactaatgatgctaacgtggtgtgcagacagttggggtgtggctgggccactagtgcgcccggcaacgcacgctttggccaaggctccgggccaatcgttttggatgatgtacggtgcagtgggcacgaaagctatttatggagctgtcccaataacggctggctcagtcacaattgcggccaccatgaggacgcaggcgtcatctgctccgcagcacagagtcggagcaccccacgtccagacaccctctcaaccatcacactgcccccaagcacagtcggctcagagagcagtctaacactgcggctagtgaacggatccgataggtgccagggtagggtagaggtgctgtatcggggtagctggggcaccgtgtgcgatgattcttgggatactaatgacgctaatgtggtgtgtagacagttgggctgtggctgggcgacatccgccccaggaaacgcacgctttggccagggcagcggcccgattgtgttggatgacgtacggtgctctgggcatgaatcttatctgtggagctgcccccataacggctggctgtcacacaattgtggacaccatgaggatgcgggggtgatttgctccgtgtcgcagagcaggccgacccccagtcctgatacctggcctacttctcacgcaagcactgccggtccagaaagctcactggcgttgaggttggtcaatggaggcgatcgctgtcaggggagagtcgaagtgctctatagagggtcatggggtacggtctgcgacgattcctgggatacctctgacgctaatgtggtctgtcggcagctgggatgcggttgggccacttcagcaccggggaatgctaggttcggacagggaagcggtcctatcgtgctagacgatgttagatgttccggatacgaatcctatctatggagttgtccacacaacggttggctgagtcacaattgtcaacacagcgaggatgcaggtgtaatttgctctgcagcccattcttggtccactccatctcctgacacgctccctaccattactctccccgcctccacagtggggtccgaatcctcactcgccctccggctggtcaacggaggtgatcgatgccagggcagggtggaggtgctctaccagggatcttgggggactgtgtgcgacgatagctgggatacaaatgatgcaaacgtggtgtgcagacaactcggttgcgggtgggctatgagtgctccggggaacgcaagatttggtcagggttcaggacccattgtgctggacgacgtccgctgcagcgggcacgagagctacctttggtcgtgtccccacaacggttggttgagccataattgcggccattcggaggacgcaggagtcatctgcagcgcaagtcagtcccgcccgactcctagtcctgacacctggcctaccagccacgcctccactgctggttcagaaagtagcctggccctgaggctcgtcaatggcggagatagatgccaaggacgagtggaggttctttaccgggggagttggggcactgtctgcgatgattattgggacacgaatgatgcaaacgtggtgtgtcgccagctgggatgtggctgggccatgagtgctccaggtaacgctcgcttcgggcagggctcagggcccattgtgcttgacgacgtgcggtgcagcgggcacgagtcttatctctggtcatgccctcacaacggatggttaagccataattgtggacatcacgaagacgcaggcgttatctgttctgcaagccagagtcaaccgacaccgagccctgacacttggccaaccagccacgccagcacagctggaagtgagagttcgctggccctcaggcttgtgaacggcggcgatcggtgccagggtcgagtggaagtgttgtataggggttcttggggaacagtctgtgatgattattgggacaccaatgacgccaatgtagtctgccgtcagttaggctgcggctgggctaccagcgcaccgggaaatgcccggtttggacagggaagcggaccaattgtgttggacgatgtgcgttgctccgggcacgaatcttacctttggtcgtgtccccacaatgggtggcttagccacaattgtgggcatcatgaagatgccggggtcatctgttcggccagtcagagccagccgaccccctcccctgatacctggccgacatcccatgcctccacagccggaagcgagtccagtttagctctgcggctggtgaatggtggcgaccggtgtcaagggcgtgtggaagttttgtaccgggggtcatggggcaccgtgtgtgacgactactgggatactaatgacgctaacgtcgtgtgcaggcaactggggtgcggctgggccacatctgcaccaggtaacgcccggtttggtcaagggagcggccccatcgtcctcgatgacgtgagatgcagcggacacgaatcatacctgtggtcctgcccgcataacggctggctttctcataattgtggacatcacgaggacgcaggagtgatctgcagcgcctcccaatcacagcctaccccatcaccagacacgtggccaacatcccgcgcctccactgctgggagtgaatccaccctggcacttcgccttgtgaatgggggtgatagatgtagggggcgggtggaggtgctgtaccaaggcagttggggtactgtttgtgatgattattgggataccaacgatgccaatgtggtctgtcgtcagctgggatgcgggtgggccatgtccgccccagggaacgctcagttcggtcagggttccgggccaatcgtccttgatgatgtccgttgctcaggacacgagagttacctgtggagctgcccccacaacggatggctttcacacaactgtggacaccacgaggacgccggtgtgatttgctccgccgcccaaagccaatctactccgcggccggacacatggctgactacgaatctccctgcgctgaccgtgggttctgaatcttccctggcattaagactggtcaacgggggcgacaggtgtagaggccgcgtggaggtgctttaccgcggaagctggggcaccgtttgcgacgactcatgggacactaacgatgcgaacgtcgtctgtcggcagctcggctgtggttgggctatgtcagcccccggcaatgccaggttcggccagggtagcggccccatcgttttggatgatgttaggtgctcgggcaacgaaagctacctatggagttgccctcataagggatggctaactcacaactgtggccatcacgaggatgctggcgttatctgctccgcaacacaaattaattctacaacaacggactggtggcatcctaccaccaccactacagcccgtccttcatccaactgcggggggtttcttttttatgccagtgggacatttagttctccatcttatcccgcttattaccctaataacgcaaagtgcgtgtgggaaatagaagtcaacagcgggtacagaatcaacctggggttctccaacttgaagctggaagctcatcacaactgctcgtttgattacgtcgaaatcttcgacggcagtctgaacagctctctactgttaggcaaaatctgtaacgacacccgccagatattcacctcatcatataaccggatgacaattcactttagatccgatatttctttccagaacacagggtttcttgcttggtacaactcctttccttctgacgctactctgcgtttggtgaacctgaattcgagctatggcctttgcgccggcagagtcgaaatctatcatggcggcacttggggcaccgtttgcgatgacagctggaccatccaggaagccgaggtagtctgtcggcagcttggctgcggaagggctgtaagcgccctcgggaacgcttactttgggtcgggttcaggtccgataactttagacgacgtggagtgtagtggcaccgaaagcactctgtggcagtgccggaatcggggctggtttagccacaattgtaaccaccgggaggatgcgggtgtgatctgctcaggaaatcacttgtctacaccagcgccctttttgaacattactagaccaaacactgactattcctgtggggggttcctcagccaacctagcggtgacttctcctccccattctatccgggaaactatcctaataacgctaagtgcgtgtgggacatcgaagtgcagaataactatcgggtgaccgtcatctttagagatgttcagctggaaggtggatgtaactacgactatattgaggtgtttgatggtccctataggtcctctccgcttatagcccgggtgtgtgacggcgcccgcggttcattcacgagctcctccaactttatgtcaattcgcttcatttctgatcacagtattacgaggagaggattcagggccgagtactattctagtcccagcaacgactctactaaccttctctgcctgcctaaccacatgcaagctagcgtgtcaaggtcatatctgcagagcctaggattttctgcaagtgatctcgtgatctcgacctggaacggttattacgagtgtcgccctcagataaccccaaacctcgtgatatttacaataccgtacagcggatgtgggacattcaagcaagcggataacgacacaatagattactctaatttcctgaccgccgcggtcagcggcggcataatcaagcgccgcactgatttaaggatccacgttagctgtcgcatgctccagaatacctgggtagacactatgtacatagcaaacgacacaatccatgtggctaacaacacaatacaagtcgaagaggttcagtatggcaattttgacgtgaacatttcattctacacctcttcatcatttctttacccagtaacatctaggccctattacgtggatctgaatcaggacctttacgtgcaggctgagatccttcatagcgacgcagtgttgacactgttcgttgatacatgcgtggcttctccgtacagcaatgacttcacctccctgacttatgatctgatccgatccggatgtgtgcgagatgatacctacgggccctattcttctccatctctccgaattgccaggtttcggttcagggctttccatttcttgaacaggtttccctctgtctatttgagatgtaagatggtggtctgccgcgcgtatgacccaagttctcggtgttaccggggctgcgtattgaggtccaagagggacgtcgggtcctaccaggaaaaagtagacgtcgtcctcggccccattcagctccaaactccaccccgccgggaggaggagccgaggtag

SEQ ID NO: 14877 - DNA, 1680 bp, synthetic construct
  misc_feature 1..1680: note = Description of Artificial Sequence: Synthetic coding sequence
  source 1..1680: mol_type = other DNA
atgaccattcatttcaggagcgacattagctttcaaaacacgggtttccttgcttggtacaactcattcccctccgatgcgacactgcgcctggtgaaccttaactcttcctacggactgtgtgctggccgagtggaaatttaccacggagggacttggggaaccgtatgcgacgattcatggacaatccaggaagctgaggtagtttgccggcaattaggctgtggtcgggccgtgagtgccttgggcaatgcctactttggcagtgggagcggaccaattaccttggatgacgttgaatgttcgggcaccgaaagtacgctgtggcaatgccgcaaccgaggttggtttagtcataactgtaaccaccgggaggatgccggcgtgatttgctccggcaaccacctcagtacgccggcaccgttcctcaacattacccgcccaaatactgactacagctgcggcgggttccttagtcagccctcaggagacttcagctctccattctaccctgggaactaccctaacaatgctaagtgtgtttgggacatcgaggtgcagaataactacagggtgacagtcatatttcgagacgtccagctggaagggggctgtaattatgactacatcgaagtgtttgacggaccataccgttcatccccactgattgctcgagtgtgcgacggtgctcgcgggagtttcacttctagtagcaacttcatgtctattaggttcatatccgatcattccatcacaaggaggggcttccgggcagaatactattcatctccatccaacgattctaccaacctgctgtgtctgcccaatcatatgcaggcctcggtgtctcggagctacttacaaagtctcggcttcagcgcgagcgatcttgtaattagcacctggaatggttactatgagtgtcgcccgcagataactccgaatctggtcatattcacaattccgtacagtggatgtggtaccttcaagcaggcagataacgacacaattgactacagcaatttcctgacagcggccgtgagcggtgggattatcaaacggcgcaccgacctgcgaatccatgtttcatgtcgcatgttacagaatacctgggtggacacgatgtacatcgccaacgatactatccatgttgctaataacacaatccaggtggaggaagtccaatatgggaacttcgatgtgaacatatccttctatactagtagttcttttctgtacccagtgaccagcagaccctattacgtggacttaaatcaggatttatacgttcaggcagaaattctgcatagcgacgccgtcctcaccttatttgtggatacctgcgtcgcttctccatactcaaatgatttcacaagcctgacctacgacctcatcaggtccgggtgcgtgagggatgatacctacggcccatactcaagtccctctctgaggatcgcaaggtttcgttttcgcgccttccatttcttaaaccgctttccctccgtgtaccttcggtgcaaaatggtcgtctgtcgggcctatgaccccagttctaggtgctacagaggatgtgtgctccggtccaaacgagatgtcggatcttatcaggaaaaggtggatgttgtcctcggacctatacagctgcaaactcctcctaggagggaggaggagccgagatag

SEQ ID NO: 14878 - DNA, 3402 bp, synthetic construct
  misc_feature 1..3402: note = Description of Artificial Sequence: Synthetic coding sequence
  source 1..3402: mol_type = other DNA
atggggataagcactgtgattctggagatgtgcctcctttgggggcaggttctgtcaaccggcggatggataccccggactacggactatgcctcgctgatcccaagcgaagtcccccttgaccccacggtagccgaaggatccccatttcctagcgaaagtacccttgaatctaccgtggccgagggtagcccaatatcattagaatccacactggaatcgaccgttgccgaggggtctcttattcccagcgaaagtacgttagagagtactgtggccgagggctctgatagcggtctggcactcagattagttaacggagacggccgttgccagggcagggttgaaattctttacaggggctcctggggtacagtgtgtgatgatagttgggacactaacgatgcgaacgttgtctgtcgtcagctgggctgtggctgggctatgtcagcacctggaaatgcttggttcgggcaggggagtggtcctatcgccctggacgatgtgcgctgtagtgggcacgaatcctacttatggtcctgcccccacaacgggtggctgagtcacaattgcggccacggggaggatgcgggcgtgatatgctcagcaccgcagagtcggcctacacccagtcccgacacgtggcctactagccacgccagcacggcaggaagcgaatcatctctcgcgctccgcttggtgaacggtggtgacaggtgccaggggcgtgttgaggttctctaccgcgggtcctggggcaccgtctgtgatgactattgggataccaatgacgccaatgtggtgtgccgacaactgggctgcgggtgggccacctcggctcctggcaacgcaaggttcggacaggggtctggtcctatcgtcctggatgacgtgcgctgcagcggtcatgaaagctatctttggtcttgcccacacaacggctggctgtctcacaactgtggacatcacgaggatgccggtgtcatttgctcagcatcccagtcccagcctacaccatccccagacacgtggccaacttctcgcgcatccaccgccggctcggagtccacattagcccttcgcttggtgaatggcggagaccgctgccgaggacgggtggaggtgctgtaccaggggagttggggaacagtatgtgatgactactgggacacgaacgacgcaaacgtcgtgtgccggcagctggggtgcggttgggcgatgtccgctcctgggaacgcccagttcggtcagggtagcggacctattgtgctggacgatgtgaggtgctcggggcatgaaagctatctgtggtcctgcccacataacggttggctttcccacaactgcgggcatcatgaagacgctggtgtgatctgtagcgcaactcagatcaacagcacaactacagattggtggcaccctacgaccaccactacagcacgccctagttctaactgcgggggctttctgttctacgctagcggcaccttctcctctccctcgtatcccgcctactaccccaataatgccaagtgcgtgtgggagatcgaggtgaactccggctataggatcaacctgggatttagcaacctaaagctggaggcacaccacaattgttctttcgactacgtggaaatatttgacggatcgctcaactcgtccctgttattaggtaagatctgcaacgacacaaggcagatttttacatccagctacaataggatgaccattcactttcgttctgacatctcatttcagaatacgggattcctggcatggtataactcctttccaagcgacgccacattgcggctggtcaacttgaattctagctatggtctctgtgctggccgcgtcgagatataccacgggggaacatggggcaccgtatgcgacgatagttggacgatccaggaagccgaggtggtctgccgccagttagggtgtggaagagctgtgtccgcattggggaacgcatactttggctccggtagtggacccataaccctcgacgacgtggaatgtagtggaacagagtctactctgtggcaatgtcgcaacagaggctggtttagtcataactgcaaccaccgcgaggatgccggagtgatttgtagcggtaatcatctgtcgactcccgcccctttcctcaacattacacgacccaacacagattactcttgcgggggctttctgagccaaccctccggcgattttagctcccctttttaccctggaaactaccccaataacgctaagtgtgtgtgggacattgaggttcagaataattatcgtgtgactgtgattttcagagatgtacagctagaagggggctgtaactacgactacatcgaagtgttcgacggcccttatagatcaagcccacttattgcgcgggtatgcgatggcgcacggggatcctttacaagcagctctaatttcatgagtatacgctttatctctgatcatagcattacgcgccgtgggttcagggctgagtattattcttctccatccaatgactctaccaatctattgtgcctgccaaaccatatgcaggccagtgtctcaagaagctatttgcagagcctgggctttagcgcctctgatctcgttataagcacctggaatgggtactatgaatgtcgcccacaaattaccccaaacctagttatcttcaccatcccctatagcggatgcggtacctttaaacaggctgacaacgatacaatcgattactccaacttcctaaccgccgcagtgtcagggggaattattaagcgcaggaccgacctgagaatccatgtcagctgtaggatgttacaaaacacatgggttgatacaatgtacattgctaatgacaccattcacgtggcaaataatacaattcaagtggaggaggtgcaatatggcaattttgatgtgaatatcagtttttatacatcatccagcttcctctaccccgtgactagcaggccctactatgtggaccttaaccaagatttatatgtgcaggctgagatcctgcatagcgacgccgtactaacgctgtttgtcgacacatgtgtggccagtccctatagtaacgatttcacttcattgacttacgatttaatcaggtcaggatgtgttcgcgatgacacctacggcccttattccagcccttcacttcgtatagctcgcttcagattcagagcctttcacttcctcaaccggtttccatccgtgtatctgagatgcaaaatggtcgtgtgcagagcctatgacccttcctcccgctgttaccggggctgtgtactacgcagtaaacgagatgtaggatcctatcaggagaaggtcgacgtggtgctgggccctatccagcttcagactccaccaagacgcgaggaagaacccaggtag

SEQ ID NO: 14879 - DNA, 7242 bp, synthetic construct
  misc_feature 1..7242: note = Description of Artificial Sequence: Synthetic coding sequence
  source 1..7242: mol_type = other DNA
atggggataagcactgttattctggagatgtgtcttctctggggccaggtgctgtccaccggaggctggatacctcgtacaaccgactacgccagtctaatcccctccgaagtacccctggacccaaccgtagctgagggatcaccattcccatctgaaagcacactggagagcacagtggctgaaggctcacctattagcttagaaagtacccttgaaagtactgtggctgagggctccttaatcccatccgaatcaacactggagtctaccgttgcagagggctctgacagtggtctcgcacttcgactagtgaacggtgacggacggtgtcagggcagggtggaaattctttaccggggctcatggggaacagtctgcgacgacagctgggataccaatgacgccaatgtagtgtgtcgtcagttaggatgcggatgggccatgtccgcccccggcaacgcgtggttcgggcagggctctggtccgatcgcgctagacgatgtgagatgctccggccacgaaagctacctgtggtcatgccctcacaacggctggttgtcccacaattgcggccatggggaggacgccggggtgatttgctctgctgcccagccgcagtcaacgttgcggcctgaaagttggccagttagaatctccccccccgtgccaacagagggctccgagtctagcttggcgctcaggctggtgaacgggggagatagatgtaggggccgcgtagaggtattgtaccggggcagctggggaactgtgtgtgatgattattgggatacgaacgacgccaatgtggtttgcagacagctggggtgtggatgggcaatgtcggcccctggtaacgctcagtttggtcagggcagcgggccgatcgtgctggatgatgtgcgttgttccgggcacgaatcgtatctgtggtcttgtcctcacaatggttggctgactcacaactgtgggcatagtgaggatgccggtgtcatctgttcagccccccagtcgcggccaaccccctctccggacacttggccaacatcacacgcgtcgaccgccggacccgaatcaagcctcgccctcaggctggttaacggcggtgaccggtgccagggccgggtcgaagttttgtacaggggaagctggggcacagtttgtgatgatagttgggatactagtgacgcaaatgtggtgtgtcgtcagctcggctgtgggtgggccacctctgcaccggggaacgcccgctttggccaaggatccggccccatcgtcctcgatgatgtaagatgcagtggctatgaatcctacctgtggagctgtcctcacaacgggtggctgtcccataattgccagcactccgaggatgcaggagtgatctgtagtgcggcccacagttggagcactccaagccctgataccttgccgactatcacactgcccgcctccactgttgggtccgaatcatctctggccctgagactggtaaatggcggtgatagatgtcaggggagagttgaagtcctatatcgaggcagctggggtaccgtatgtgatgacagctgggataccaacgatgctaatgtggtctgcagacagctggggtgcgggtgggcgatgctcgcgcctggaaacgcgagatttgggcagggtagcggtccaatcgtgttggatgacgttcgatgttcaggaaacgaatcgtatctgtggtcttgtccgcacaacgggtggctttcacacaattgtggtcatagtgaagatgctggcgtgatatgctctggccccgagagctcactggctttaaggctggtcaacggtggtgaccggtgtcagggtcgagtagaagtcctttatagggggtcttggggcacagtatgcgatgattcttgggacacgaatgacgccaacgtggtttgccggcagctgggatgcgggtgggccacatcagcgcctggcaacgcacgatttggccagggatctggcccgatagtattggacgatgtgcgatgtagcggccacgagagctatctgtggagttgtccgaataacggatggctctctcacaattgcggacaccacgaggatgccggggtcatctgcagcgccgctcagtctagatcaactcctaggcccgataccctgtccactatcactctacccccctcaaccgtgggatcagagtcgagcctgaccttgcgcttagttaacggctccgatcggtgtcaaggtagggtggaggtgctctatagaggcagctgggggacggtctgtgacgactcgtgggacaccaatgacgctaacgtggtttgtagacagttgggctgcgggtgggcaacaagtgcccccggaaacgcgcgattcggacagggcagtggacccattgtcctggacgacgtcagatgctcaggccatgaatcatatctgtggtcatgccctcacaatggctggctgtctcataattgcgggcaccatgaagatgccggtgtgatctgcagtgtaagccagtcccgcccaaccccatcacccgacacctggccgacatcacacgctagtacagccggccccgaatccagcctcgctcttcgactggtgaatgggggcgatcgttgtcagggccgtgtggaggtcctgtatcgcggcagttggggcacagtgtgcgacgactcatgggacacgtccgacgccaatgtggtgtgccgccagcttgggtgtggatgggctacatctgctccggggaacgctcggtttgggcagggctctggacccattgttctggacgatgtgaggtgttcaggttatgagtcctacctgtggtcctgcccccataatggatggctatcacataactgtcaacattccgaggacgctggggtaatctgttccgcagcccatagttggagcacacccagtccagataccctgcccaccatcacacttcccgcatccacagttggcagcgaatccagcctcgcactgcgacttgtcaatggcggagatcggtgccagggccgcgtcgaggtcttgtaccaaggaagctggggaaccgtgtgcgatgactcctgggacaccaacgacgcaaacgttgtgtgccggcagctgggatgtggctgggctatgagtgccccgggcaatgcgaggtttggacaaggaagcgggccgatagtgctggacgatgtacggtgtagtggccatgagagttacctgtggagctgcccccacaatggatggctgtcccataactgcggccacagcgaggatgcgggggtcatttgctctgcctctcagtctaggcctacaccgtcccccgacacctggcccaccagccatgcctccacggcaggctcagagtcctcattagccttgagactggttaacggcggggaccgatgccaaggtcgcgtggaagttttatatcggggttcatggggcacagtgtgtgatgactattgggacacaaacgatgccaacgtggtgtgccgccagctgggatgtggatgggcaatgtcggcaccgggcaacgctaggtttgggcaagggtcaggccctatcgtcctcgatgacgttagatgcagcggccacgagtcctacctctggagctgcccgcataacggttggcttagccacaattgcggtcaccatgaagacgccggcgtgatctgcagcgcctctcagagtcagcctactcctagcccagacacctggcccactagtcacgcctctaccgcaggctctgagtcctctctggccttgagactggtcaacggtggcgatagatgtcaggggcgggtggaagtgctgtaccgcggctcttggggaacggtgtgtgacgattactgggataccaatgacgctaacgtagtctgtaggcagctgggttgcgggtgggcaacctctgcacctgggaatgctcgcttcggccaggggtccggcccaattgttcttgacgatgtccgctgtagcggccatgagtcctacctgtggtcctgcccccacaacggctggctgagtcataactgcggtcatcacgaggacgccggggttatttgcagcgcctcccagtctcagcctacaccatctcccgatacatggccaacatcacacgcatcaaccgcgggaagtgagtcctctcttgccctgagactcgtgaacgggggtgataggtgtcaggggcgggtagaggtgctgtacagagggagctgggggacggtgtgcgatgactactgggacactaacgacgctaatgttgtgtgtaggcagctgggatgtggatgggcaacatccgctccagggaacgcccgttttggccagggttccgggccaatcgtgctagatgatgtccggtgctcaggccatgaatcatatctatggtcttgcccccacaacggttggttatctcataattgcgggcaccatgaggatgccggcgtcatttgtagtgcttcgcaatcccagcccacgccttcacctgatacctggccgacctcacgcgccagcacagccggctcagagagtacccttgcactgaggctcgtgaacggcggagatcgctgccgcggacgagttgaggtcctttaccagggtagctggggcactgtatgcgatgactattgggatacaaatgatgcgaatgttgtttgtcggcagctcggttgcggatgggcaatgagcgctcctggcaacgcccagttcggacaagggtccggtcccatcgtcctcgacgatgtgcggtgctctgggcatgagtcatatttatggtcatgcccacataatggctggctgagtcacaactgtgggcaccatgaggatgctggcgtgatttgttccgccgctcaaagtcagtcaacaccacggcccgacacatggctgacaaccaacctccctgccctcaccgtcgggtcagaatcttcacttgccctcaggctggtgaacggaggagataggtgtcgaggacgtgttgaggtcctgtacaggggctcctggggcactgtttgcgatgacagctgggatactaacgacgccaatgtggtgtgcaggcaattaggatgcgggtgggcgatgtctgcgcctggtaacgcacggttcggccaaggctccggacctatcgtgttggacgatgtgcggtgcagtggcaacgagtcatacctctggtcatgcccacacaaggggtggctgacacataactgcgggcaccatgaggatgcaggagtcatatgctccgcaacgcaaattaatagcacaacgacagattggtggcatcccacaaccacgacaacggctcgacctagcagtaactgtggagggttcttattctatgcaagtggaaccttttcctctcccagttatcctgcctactatcccaataacgccaagtgtgtctgggagatcgaagtcaacagcgggtaccgcatcaacctggggttcagcaatctgaaactggaggcacaccacaactgtagtttcgattacgtcgagatcttcgacgggagtctaaattccagtttgctgctgggcaaaatctgcaacgacacccgtcagatttttacatccagctataataggatgaccatacacttcagatctgacataagctttcagaacacaggcttcctcgcctggtacaactccttccccagcgacgcaactctcagactggtgaatttaaactcatcttacggactttgtgcgggtcgcgtggagatatatcacggggggacatggggcaccgtatgcgacgactcctggacaattcaagaggccgaggttgtatgtcgtcagttggggtgcgggcgggccgtgtccgctcttggcaacgcctattttggcagcggctctgggccaattaccctggatgacgtagagtgttcagggacggagagtactctatggcagtgccgaaatagaggctggttctcccataattgcaaccacagggaggacgcgggagtcatttgctccggaaatcatttatctacccctgcacccttcctgaacattacacgccccaacaccgattacagctgtgggggatttttgagtcagccatcgggcgatttttcgtctccattttaccccggcaactaccccaataatgctaagtgtgtttgggatattgaggtgcaaaataactaccgagtgaccgtcatctttcgggatgtccagcttgaggggggttgcaactacgattacattgaagtcttcgatggcccctatcggtctagcccgctgatcgcgcgggtgtgtgatggtgctagaggatcttttacgagtagctcaaactttatgagcatcaggttcatctcagatcattccatcacccggaggggattccgggcagagtattactccagtccatcaaacgatagcaccaacttactgtgcttgcctaaccatatgcaggcctctgtgtccagaagttaccttcagagcttgggcttttcagcctccgacctggtaattagtacctggaacgggtactacgagtgccggccgcaaattacgcccaacctagttatcttcaccatcccctatagcgggtgcgggacattcaagcaagcagacaacgatactatagattatagtaacttcctcacagccgctgtgagtggcggaattattaagaggcggactgatttgcgtattcatgtgtcatgcaggatgttgcagaacacgtgggtggacacaatgtatatcgccaacgatacaatccacgtggctaacaacaccatacaggtggaagaagtgcagtacggcaatttcgatgtgaacatttctttctatacatcatcttctttcctgtaccccgttaccagtaggccctactatgtggacctgaatcaagatctttacgtccaggccgagatcttacactccgacgctgttttaaccctttttgtcgatacctgcgtggcttctccctattccaacgacttcactagcttaacctatgacctgatcagatcagggtgcgtgcgggacgacacatacggaccctatagctccccatcgttacggatcgctcgttttaggtttcgcgccttccatttcctaaatcggtttccatctgtgtatctaaggtgcaagatggttgtctgccgtgcatacgacccctcatctaggtgctacaggggatgcgtgcttaggtctaagagagacgtagggagttaccaagagaaggtagatgtcgtgctcggtcctatccagctccagaccccaccccgtcgagaggaagaacccagatag

SEQ ID NO: 14880 - DNA, 7629 bp, synthetic construct
  misc_feature 1..7629: note = Description of Artificial Sequence: Synthetic coding sequence
  source 1..7629: mol_type = other DNA
atggggattagtaccgttatcctggagatgtgtttgctttggggacaagtgctctccaccgggggttggatcccaagaacaaccgattacgcaagtcttattccctccgaagtccctctggacccaaccgtggctgaggggtcgcccttcccctccgagagcacattggagagcacggtggcggaaggatctcctatatctctggagtcaactctggagtcaactgttgcagagggtagcctcatcccgagtgagtctaccctggaatccaccgtagcagagggctccgactcgggtctggccctgcgccttgtgaatggcgacggccggtgtcaggggcgggtggaaatcctctatagaggctcttggggtactgtctgtgacgattcttgggacactaacgatgcaaacgtggtttgcagacaactgggttgtggatgggccatgagcgcacccggcaacgcgtggtttggccaggggtccggtcccatcgccctggatgatgttcggtgcagcggtcacgaatcttacctgtggtcctgtccgcataacggctggctgtcccataattgtgggcacggcgaggatgccggggttatctgcagcgctgctcagcctcagagcacactgcggccggagtcatggcccgtgcgcatctccccaccagtgcccacagaaggtagtgagagcagcttggccctaaggttggtgaacggaggggataggtgtcgcgggagggtcgaagtgctgtaccgcggcagctggggaaccgtgtgcgacgactattgggacactaatgacgcaaacgtcgtgtgccggcagctaggctgtggttgggctatgtccgctcccgggaacgcacagttcggacagggaagcgggccaattgtgctcgacgatgtgagatgctcaggccacgagtcgtacctatggtcttgtccccacaatggttggctgactcataattgcggtcactcagaagacgccggggtgatctgctccgcaccacaatcaagaccaacgccttcaccggatacgtggccaacttctcatgcttctacggccggtccggagagttcactggccctgcgattagtgaatgggggggaccgatgccagggacgtgttgaagtgctctaccgtgggtcctgggggacggtctgcgacgactcatgggacactagcgatgcgaacgtggtttgccggcagctgggctgtggctgggccacatccgcacccggaaacgctcgctttggccaaggctccgggccgatcgtgcttgacgatgtcaggtgtagcggttatgagagttacttgtggagttgcccgcacaatgggtggcttagtcataattgccagcactcagaggacgccggggtgatatgctccgccgcacattcctggagcactccatctcctgacactctccccaccattacactccctgcctcaaccgttgggagcgaatctagtttggccctacggctggtgaatggcggagaccgttgccagggtcgcgttgaggtgctatatagagggtcatggggcacggtgtgcgatgacagttgggacacgaacgatgccaacgtggtgtgcaggcagctcggatgtggctgggctatgcttgccccaggcaatgcgaggtttggacaaggaagtggaccaatcgtgcttgacgatgtcagatgctcgggaaatgagtcttatctgtggtcttgtccccacaatgggtggttatcgcacaactgcggacatagcgaagacgccggggttatttgcagtgggccagagtcatctctggcccttcggctcgtcaatggcggcgataggtgccagggaagagtggaagttttgtatcgcggctcctggggcacagtctgtgacgactcttgggacaccaacgacgccaatgttgtgtgccgacagctgggctgtgggtgggcaacttccgcaccaggcaacgccaggtttgggcaaggaagtgggcccatcgtcttggacgacgtccgttgttcaggtcatgagtcttatctctggtcatgtcccaacaatgggtggctctcccacaactgcgggcaccacgaggacgccggagtcatttgttccgccgctcagtctagaagtacgcccagacctgatacactctccaccattaccttgccgccgagcaccgtggggagtgaatctagcctgacattaagattggtcaacgggtctgatcgatgccaggggcgcgttgaagtgctgtatcgcgggtcttggggcaccgtgtgtgacgatagttgggataccaatgacgcgaatgtggtttgtcgtcagctcggttgtggctgggccacttcagcgccaggcaatgctcggttcggccagggctccggaccgattgtcctggacgacgttcgttgctcaggacatgaatcttatctgtggagttgcccccacaacggctggctatcacataactgtggtcatcacgaggacgcaggtgtgatatgtagtgtctctcagtctaggcctaccccgagccccgacacttggccaacctcacacgcaagcactgcaggccctgaatcgagcctcgccttgcgactcgttaacggaggcgaccgctgtcagggacgcgtagaagtattatatcgtggcagctgggggacagtctgcgatgatagctgggatacatctgacgccaatgtagtgtgcagacaactggggtgtggctgggccacgtctgcaccaggcaacgctcgcttcggccagggctccggacccatcgtgctcgatgacgttcgctgtagcgggtacgagtcttacctttggagctgcccccataatgggtggctgagtcacaattgccagcattcggaagatgctggggtaatctgtagcgcggcacactcctggtccaccccgtccccagacaccctgccgacaatcactctgccagccagcaccgtgggctcagaaagctccttagctctgcgacttgtgaatggcggggatcgctgccagggccgcgtggaagtgctatatcaggggagttggggcacagtgtgtgacgattcgtgggatacgaatgatgctaatgttgtgtgccgtcaactgggatgcggctgggctatgagcgcacctgggaacgcccgatttggacagggttctggtcccattgttctggatgacgtcagatgctccggccatgaatcctacctgtggtcttgcccacacaacggctggctgtcgcacaattgcggacactcggaagacgcaggcgtaatctgtagcgcttctcagtcccggcctacaccaagtccagatacatggcccacctcacacgcgtcgactgcaggaagtgagtcttcgctggccctacgcctcgtgaacggaggagaccgttgccagggccgcgtggaagtcttgtataggggttcctggggaaccgtttgtgacgactattgggacaccaatgatgcgaatgtagtctgtcggcagttgggatgtggctgggccatgagcgctcctgggaacgcgagattcggccaagggtctggacctatcgtattggacgatgttcggtgttctgggcacgagtcttatctgtggagctgtccccataatggctggctgtcacacaactgcgggcaccacgaggacgccggggttatctgttctgcgtcgcagagccagccaacaccatcccccgacacgtggcctacctctcatgcatctacagctggctctgaatcttctttagctctcaggctcgtgaacggtggggaccgctgtcagggacgagtcgaggtcctctacagaggtagctggggcaccgtgtgtgacgattactgggatacgaacgatgcaaatgtggtgtgcaggcaactgggctgtggatgggctacctcagctccagggaacgcccgtttcggccaaggatccgggcctatagttctggacgatgtcaggtgcagcggacatgaatcatatctctggtcatgcccccacaatggttggctgtcccacaactgtgggcaccatgaggacgcaggcgtcatctgctctgctagtcaaagccaaccgacaccaagcccagacacctggcccacgagccatgcttccacagccggcagtgagagctccctcgcgctgcgcctggttaatggaggagatcgctgccagggccgggtggaagtcttgtacagaggctcttggggcaccgtgtgtgatgattactgggacaccaacgacgcaaacgttgtctgcaggcagttagggtgtggatgggcaacctccgcaccgggaaacgcgagattcggtcagggaagcggaccaatcgttctcgacgacgtgcgttgctccggtcatgagtcatatctatggtcatgtccccataacggttggctcagccacaactgcggccaccacgaagacgccggggttatctgttcagcaagccaaagccagcctactccgagcccagacacatggcctactagtcatgccagcacagcaggaagtgagagttcccttgcactcaggctggtaaatggcggcgataggtgtcagggccgggtcgaagtgctctaccgcgggtcctggggcacagtctgcgacgattactgggacactaacgacgcaaatgttgtatgcagacaactcggctgcgggtgggccacatcagctcctggcaatgcacgttttggccaaggctctgggcctatcgtgttagatgatgtgcgctgctccggtcacgaatcttacttatggtcttgcccccacaacggatggctttcccataattgtggccaccacgaggatgccggtgttatttgttcggcaagccagagccagccaacaccctcccccgatacctggccgacttccagagcctccacagccggttcagaaagcacattggcactgcgccttgtcaacggcggggaccggtgcaggggcagagtagaggttctctaccaggggagctggggcacggtatgcgatgactactgggatactaacgatgctaacgtggtgtgccgccagcttgggtgcggatgggctatgtctgcccctgggaacgctcagttcggacaggggtccggccccatcgtgttagatgacgtgaggtgttcaggtcacgagtcatatttatggagttgcccgcacaatggctggctgtcacataattgtggtcaccacgaagacgctggggttatctgtagcgcagcccagtctcagagcacaccacggcccgatacctggctgacaacgaatttgccggcactcacagtaggcagcgagtccagtctggcacttaggcttgtgaacgggggcgatcggtgtagaggcagagtagaggtactgtatcgggggagctggggcaccgtgtgcgatgactcctgggacacaaacgacgccaatgtggtgtgccgacagttggggtgcggttgggctatgagcgccccaggaaatgcacgttttgggcaaggcagcggaccaatcgtgctcgacgatgtgcgatgcagtgggaacgagtcatacctctggtcttgtccccataaagggtggctgactcataattgtggccaccacgaagatgctggcgttatctgctctgctacgcagatcaattctactaccactgactggtggcaccctactaccaccacaaccgcaagacccagctcaaactgcggtggatttttgttctacgctagcggcacattttccagcccatcttatcccgcctactatcctaacaacgccaaatgcgtgtgggaaatagaggtgaattcgggctacaggattaacctggggttcagtaaccttaagctggaagcccatcataattgcagcttcgactacgttgagatcttcgacggcagcctaaattcctccctactcctaggaaagatatgcaatgatacgcggcagattttcacttcaagctacaaccggatgaccatccactttaggagcgatattagttttcagaatactgggttcctggcctggtacaactcatttccatctgacgctactctgaggcttgtaaacttaaattcaagctacggcctttgcgccggtcgcgtggagatataccacggcggtacctggggtaccgtctgcgatgattcttggaccattcaagaagcagaagtcgtttgccgtcagcttgggtgcggaagagcagtgtcagccctaggtaacgcttactttgggagcggaagcggacccattacactggatgatgtagagtgcagtggaactgaatccacactatggcagtgtcgaaaccgcggctggttctcgcataactgcaaccatcgggaggacgctggcgtcatttgctcgggaaatcacttatctacccccgcaccattccttaacatcaccaggcctaacactgattactcatgtggcggtttcctgtcacagccaagcggagacttttcgagccccttttaccccgggaactacccgaacaacgctaaatgtgtttgggacatcgaggtccaaaacaattatagagtgacagtgatcttcagagatgttcagctcgaaggcgggtgcaactatgactatattgaggtgttcgatggcccgtatcggtcttcgcctctgattgcccgcgtctgcgacggagctaggggatcatttacctcatcaagtaattttatgtcaattcgcttcatatccgatcattctataacgaggaggggcttccgagccgagtactacagctctcctagtaatgatagcactaacctgctgtgcctgcccaatcacatgcaggctagtgtgtctcggagctacttgcagtcactgggcttctctgcctctgacctagtcatctctacgtggaatgggtactatgagtgcaggcctcaaattaccccaaacctcgtcatttttacaatcccttactctgggtgtggcacatttaagcaggccgacaatgataccattgattatagcaactttctgaccgccgccgtaagtggcggcataatcaaacggagaaccgacctgcggattcacgttagctgtcggatgctgcagaatacttgggtggacaccatgtacattgccaacgacaccattcatgttgcgaataacaccatacaggtggaggaggtccagtatggcaattttgacgttaatatctcgttctatacctctagcagctttttatatcctgttacgtcccggccatactacgtcgacctgaatcaagatttgtatgtgcaggctgaaatcctgcacagcgatgccgtgctcaccttatttgtagacacctgcgtggcttctccttacagtaacgacttcacctcgctgacctacgaccttattcgcagtggctgtgtcagggacgacacatatggcccatactctagcccatctctccgtatcgctcgttttcggtttagggcatttcactttctgaataggtttccctctgtctatctgaggtgtaagatggtggtgtgccgcgcatacgatcccagctctaggtgctatcggggctgtgtgcttcggagcaagagagatgttgggagttatcaggaaaaggtggacgtagtgttagggcctatccagctgcagactccccctaggagggaggaggagccccgatag

SEQ ID NO: 14881 - DNA, 7239 bp, synthetic construct
  misc_feature 1..7239: note = Description of Artificial Sequence: Synthetic coding sequence
  source 1..7239: mol_type = other DNA
atgggaatcagtacagtcatcctcgaaatgtgtctgctgtggggtcaggtcctgtccacaggtggctggataccacgcactactgactatgcatccctgataccatcagaagttcccttagatccaacggttgccgagggctcacctttcccatccgaatcaacacttgagagcacagttgccgaaggctcacccatctcactggagagtactctcgagtccacagttgcagagggcagtctgatacctagtgaatcgacactggaaagcaccgtggccgagggctctgacagtgggttggccctgagactggtcaacggagacggacggtgtcagggcagggttgaaatcctgtataggggaagttgggggacggtgtgtgacgacagctgggatacaaatgatgccaatgtggtatgtagacagctgggctgcgggtgggcgatgtctgcccccggcaacgcctggtttggccagggcagcggcccaattgctttggacgatgtgcgctgtagcgggcacgagagctacctgtggtcatgcccacataatgggtggctatcccataactgtggccatggagaagacgcaggagttatttgctctgcagcccagccgcagagcacactgcggccggaatcatggccagtgcggatcagtccacctgtgcccacggaaggaagcgagtctagtttggctctgagactggtgaacggtggtgacagatgccgggggagggtagaagtcttgtatagaggctcatgggggactgtctgtgacgactattgggatacaaatgacgcgaatgtcgtgtgccgacagctcgggtgtggttgggctatgtccgctcccggcaacgcccagtttggccagggatctggcccaatcgtgctggacgatgtccggtgtagcggacacgaatcctacttgtggtcatgtcctcacaatgggtggcttacccataattgtgggcactctgaagacgccggagttatctgctctgccccccagagccgccccactccatcacctgacacttggccaaccagccatgcgagtaccgccggccccgagtcttctttggcgctgcggctggtgaacggcggagataggtgccagggacgcgtggaagttctctacaggggcagctgggggaccgtttgtgacgatagctgggatacatccgacgctaatgtggtgtgccggcaactcggatgcggatgggctacctcggcacctggaaacgccaggtttggacaagggtcggggccaatagtactggacgatgtgagatgctccgggtatgaaagctacctttggagctgcccacataacggatggctgtcgcacaactgccagcacagtgaagacgctggtgtcatctgttccgctgcacactcttggtctaccccctcaccagataccctgccaactattaccttacccgcgtccacggtcggcagcgaaagcagtctcgctctgcgtcttgtcaacgggggcgaccggtgtcagggtagagtagaggtcctatatcggggttcttggggcacggtgtgcgatgatagctgggatacgaatgatgctaatgtggtatgtcgacagctgggctgcggttgggccatgctcgcaccagggaatgctaggttcggacagggttctggtcctatcgtcctggatgatgtgcgctgcagtggtaacgagagctacctgtggtcctgccctcataacggctggttaagtcataattgtggccatagtgaagatgctggtgtgatttgctccggtccagagtcttctctggccctgaggctcgttaatgggggtgacagatgtcaggggagagtagaagtgctttatcgcggaagttggggaacagtttgtgacgactcttgggacaccaacgacgcaaacgtggtatgtcggcagcttggctgcggatgggctaccagcgctccaggaaacgccagattcggacaaggatcaggtccaattgtcctggatgatgtcagatgcagcggacacgagtcctacctctggtcgtgccccaataatgggtggctgagtcacaattgcgggcatcacgaggatgcaggagtgatatgctccgcagctcagagtcgctctactcctagacccgacactctgagcactatcacactgccgccgtcaaccgtgggctccgaatcatcgcttactctccgtctggtgaacggcagcgatagatgccaaggaagagtggaagtcttatatcgagggagctggggaactgtttgcgacgacagctgggacactaacgatgctaacgtagtatgtaggcaactgggatgtggatgggctactagcgcaccaggcaacgctaggtttgggcagggctctgggccaatagtgctggacgatgttcgttgcagcggccatgagagctacctgtggtcttgcccccacaacgggtggctttcccataattgcggacatcatgaagatgccggcgtcatttgttcagtctcccagagccggccaactccaagcccggacacatggccaacttcacacgccagcaccgctggacctgagtcctcactggcacttcggttggtgaatggaggcgatcggtgtcagggccgagtggaggtgctgtacagggggagctggggaacagtctgcgacgactcttgggatacctcagacgccaacgtagtctgtcggcagcttggttgcggctgggctacgtcggctccagggaatgcccggttcggccagggcagtggtcctattgttcttgacgacgtgagatgctctgggtatgagtcatacctgtggtcctgtccccacaatggatggctttcacataactgccagcacagcgaagacgccggggtgatctgcagtgcagctcattcttggtccacccccagtccagataccctgcccaccattacattgcctgccagcaccgtcggctctgaaagtagcttggcattgcggcttgtgaacggcggggaccgatgtcaggggcgggtcgaggtgctataccagggttcctggggcacagtgtgtgacgactcctgggacactaatgacgccaacgttgtgtgtagacaactgggatgcgggtgggcaatgtctgcccctgggaacgcaaggtttgggcaaggcagtgggcctattgtcctcgacgatgtcaggtgctccggccacgagagctatctatggagctgtcctcataacggctggctatcacataattgtggccactccgaggatgccggagtcatctgttcggcttcccagtcgcggcccacaccatctcccgacacttggcccaccagccacgcctctactgccggctctgaatcctcacttgcattacgcctggtgaacggtggtgaccgatgtcagggacgagtcgaagtgctgtatcgaggatcatggggcactgtttgtgacgattattgggacaccaacgacgcgaacgttgtctgtagacagctcggctgtggttgggccatgtcagcccccggcaacgccagattcggtcagggaagtggaccaattgtgttagacgatgtgcgctgctcgggtcacgaatcctacctgtggtcctgtcctcataatggttggctgagtcataactgcggacatcatgaagatgctggagttatctgctctgcatcccagagtcaacccactccatctcccgatacatggccgacgtcgcatgcgagtactgctggaagcgaaagctcgcttgccctgaggctcgttaacggcggtgatcgctgtcagggtcgggtagaagtcctttacagggggagctgggggacagtatgcgacgattattgggacacaaacgacgctaatgtggtatgccgacagctggggtgtggctgggccaccagcgccccaggaaacgcacgttttggccaggggagtggccctatcgtcttggatgacgtaaggtgtagcggccacgaatcctacctttggtcttgtccgcacaacggctggctctcacataactgcgggcaccatgaagatgctggggttatctgctccgcctctcaaagccagccaactccctctccagatacatggcctacctcccacgcatctactgccggaagtgaatcttccctggccctgcgcttagtgaatggcggcgatagatgtcagggcagagtagaggtgctttaccgagggtcttggggaacagtgtgcgacgattactgggacaccaacgatgctaacgtggtatgtagacagctgggctgcggatgggccacaagcgctccaggaaatgcccgtttcggtcaaggaagcggacctatcgtgcttgatgatgtgcgatgttctggccacgagagctacctgtggtcttgtccccataacggttggcttagtcacaactgtggccatcatgaagacgccggggtaatttgcagcgcctcacagtcgcaaccaacaccgagtccagacacgtggccaacgagcagagccagcactgccgggagcgaatccacacttgcgcttcgcctggtgaatggtggcgacagatgcaggggccgggtcgaagtgttgtaccagggcagttggggcaccgtgtgtgatgactactgggatactaacgacgcaaacgtggtgtgccgacagctgggatgcggatgggctatgtccgcgcccggtaacgcccagtttggacaaggctccggacccatcgtcctcgacgacgtgagatgtagtgggcatgaatcctacctgtggtcgtgcccacacaatggatggttgagccataactgtggccatcacgaagacgcaggagttatctgttccgcagcccagagtcaatccactcctagaccagatacgtggttgactacgaacctgcctgccctgaccgttggcagtgagtctagtctagcactgcggctcgtcaacggcggcgacagatgtaggggtcgggtcgaagtgctgtaccgtggctcttggggcaccgtttgtgatgatagttgggacactaacgatgccaacgtggtatgccgccaacttggttgcgggtgggccatgagtgcacctggaaatgccagattcgggcaaggcagcggccctattgttctggatgatgtaagatgctcaggcaacgagagctacttatggtcatgccctcacaaaggatggctgacacacaattgcggtcatcacgaagacgctggcgtgatatgcagtgccacccagatcaatagcactaccaccgattggtggcatcctaccaccaccacaacagccaggccgtcctctaattgcggggggttcttattctacgcgagtggcaccttctcgagtccttcctatccggcctactatcctaacaacgccaaatgtgtgtgggagattgaagtgaattccggttaccggattaatctggggtttagcaacctcaaactggaggcgcatcacaattgttccttcgattacgtggaaatcttcgacggctccctaaattcttcactgcttctgggcaagatctgtaatgacacaaggcagatcttcacctcatcgtacaaccggatgaccatccactttagatcagatatctctttccagaacacagggttcctggcttggtacaatagtttcccctccgacgccaccctgcgactggtcaatctaaactcatcctatgggctgtgtgccggccgggtggagatttatcacgggggcacctggggcactgtctgcgacgatagctggacaatacaggaagccgaggtggtgtgtcgccagctggggtgtgggcgggcagtgagcgcgctaggaaatgcatacttcggaagcggatccggcccaattacactggatgacgtcgaatgttcaggaactgagtcaacattatggcagtgtagaaacagggggtggttttcccataattgtaatcacagagaggatgctggagtgatatgcagcggaaatcacctctccacacctgccccttttttaaacattacaaggcccaacaattacagttgcgggggttttctgagtcagccttccggcgacttctctagccccttctaccctgggaactacccaaataacgcaaagtgtgtatgggatattgaagtacagaacaattaccgtgtcacagtgatatttagggacgtccagcttgaaggggggtgcaattatgactatatcgaagttttcgacggaccataccggagctccccactaatcgcacgggtctgtgatggggcacggggctcctttactagtagttccaactttatgagcattaggttcatttccgaccacagcatcactcgtcggggctttagggcagaatactatagtagcccttccaatgacagtactaacctgctgtgtctacctaaccatatgcaggcatctgtgtctaggagctacctgcagagcctcggtttctcggcttcagatctggtgattagtacctggaacggctactatgaatgcaggcctcagattacccctaacctggtgatctttacaattccctactctggttgtggcacttttaaacaggccgacaatgatactatcgactactctaacttcctcaccgccgctgtgagtggaggaatcatcaaacgccggaccgaccttaggatccatgtcagctgtagaatgttgcaaaacacctgggtggataccatgtatattgccaacgacacgatccatgtggcaaacaatacgattcaggtggaagaagtgcagtacggtaattttgatgtcaatatctccttctatacatccagctcattcttgtaccctgttacctctagaccctactacgtggatctcaatcaggacctctacgtacaagccgagatcctgcactcagatgccgtccttaccctcttcgtcgacacgtgcgtggcaagtccctatagcaacgactttacctcacttacgtatgacctgatccgaagtggctgcgtgcgcgacgacacatacgggccctactcttcaccgtcattaaggatagcacgcttccggttccgggccttccactttctcaacagatttccgtctgtttaccttagatgcaaaatggtggtgtgtcgggcctacgatccatccagccgttgctatcgaggctgtgtcctcagaagcaagagggacgtgggcagctatcaggagaaggtagacgtggttctggggcctatccagctccagacgccccccagacgtgaggaggagccccgctag

SEQ ID NO: 14882 - DNA, 7242 bp, synthetic construct
  misc_feature 1..7242: note = Description of Artificial Sequence: Synthetic coding sequence
  source 1..7242: mol_type = other DNA
atgggtattagtactgtaattcttgaaatgtgtctgctttgggggcaagttctgtcgacaggggggtggatcccccggaccacagactatgcttccctaattccttctgaggtgcccctcgaccccacagtggctgaaggaagccccttcccgagcgagtcaaccttagagtctacagtcgcagaaggctcccccatatcacttgagagcacgctggagagcacagtggctgagggcagcctcataccttctgagtcaacactcgagagtaccgttgctgagggctctgattcgggattggccctacgtctcgtaaatggggacggccgttgccagggcagagtggaaattctctaccgaggatcctgggggaccgtatgtgacgactcatgggatacaaatgatgcaaatgttgtgtgtcgacagctagggtgtggttgggcgatgtctgcccccggcaatgcctggtttggtcagggctcaggacctatcgcgctcgatgatgtgagatgtagtggacacgagtcatatctgtggagctgtccccacaatggttggttatcacataattgtggacacggcgaagatgcaggagtgatctgttccgccgctcagccacagtcaactttgcgcccagaatcctggccagtgcgaatcagtccaccagtgccaacggaaggatccgagtcatcgttggcccttaggttagttaatgggggtgaccgctgtagaggcagggtcgaggtgttgtatcgcggatcatggggaactgtctgtgatgattactgggacaccaacgacgctaatgttgtttgtcgtcagcttggctgcgggtgggccatgagtgctccgggaaatgcccagttcggacaaggaagcggacctattgtgctcgatgatgtgagatgtagtggccatgaaagctatctttggtcatgtccgcacaacggttggctgacacacaactgtggacattctgaggacgccggagtaatttgctccgcccctcaatcccgccctaccccctctcccgatacctggcccacctcccatgcgtcaacggcaggccccgagtcttctttggccctccgcctggtcaacggaggggacagatgtcagggacgggtagaggttctgtaccgtgggtcatggggaaccgtctgcgacgatagttgggacaccagcgacgcaaacgtggtatgccggcagttaggctgcgggtgggcgactagtgctcccggtaatgctaggttcggccaggggagcgggcccattgtccttgacgatgtccgctgcagcggctatgagtcatacctttggtcttgtccgcataacggctggttatcacacaactgccagcacagtgaagacgcaggcgtcatatgctccgctgcccacagttggtccacaccaagccccgatacgctaccaactattacactacctgcatctaccgtcggaagcgagtcaagcctggccctgcgactcgtaaacggcggcgacaggtgccagggccgtgtggaagtgctgtaccgaggttcgtggggaactgtctgtgatgactcctgggatacaaacgacgccaatgtagtctgccggcaactgggctgcggctgggctatgctggccccaggcaacgccagattcgggcagggttctgggccaattgtcctggatgatgtcaggtgctcaggtaacgagagttatctgtggagctgcccccataatggatggctgtcacacaactgcggtcactcagaggatgctggagtcatttgttccggacccgaaagctcgctcgccttgcggctggtaaatggcggcgaccgatgccaaggcagagttgaggtgctatacagaggctcttggggaactgtgtgtgacgactcttgggacaccaacgatgcgaatgtggtgtgtcgccagctgggttgcggttgggctacaagcgctcctggcaatgcacggtttggccaggggtcaggacctatagttctggatgatgttaggtgttccggacatgagtcgtacttgtggtcgtgccccaataacggctggctcagccataactgcggccaccacgaagatgccggtgtgatatgctcggcagcccagtctagatctactccacgcccagacactctctctactattactctgcctccgagcactgtgggtagcgaatccagcctgactctgaggcttgtgaatggctctgacaggtgccagggtagagtcgaggtgctgtaccgtggctcatggggaactgtttgtgatgattcctgggatacaaatgacgccaacgtcgtgtgcagacaactaggttgcggttgggcgacgtcagcgcctggcaatgcacgcttcgggcagggcagcgggcccatcgttttggacgatgtccgttgtagtgggcacgagagttacctgtggagctgcccgcacaatggctggctaagccataattgcggccatcatgaggacgccggagttatatgttcagtgtctcagagccgtcctacaccatcccctgacacctggcctaccagccatgccagcacggctgggcccgaatcctctctagcactgagactggtcaacggcggtgaccggtgccagggaagagttgaagtcctctacagggggagttgggggactgtctgtgatgattcctgggatacatcagacgctaatgtggtctgcagacaactcggctgtggctgggcaacctccgcccctggcaacgccaggtttggccagggaagcggaccaatcgtgctggacgacgtgagatgttctggatacgaaagctatctctggtcatgtccccataacggatggctttctcacaactgccaacacagtgaagatgcaggcgtcatctgttccgccgctcacagttggtcaacaccatccccagacacacttcctaccataacccttcccgctagcacagtggggagtgaatctagtttagctctaagactcgtaaacggtggagatcggtgccaggggcgtgtggaagtgctgtatcagggttcctggggtaccgtttgtgacgatagctgggatacaaatgacgccaacgtcgtgtgcagacaactggggtgcgggtgggccatgagtgcccctgggaatgcgcgctttggtcagggttcagggcccattgtgctggacgacgtgcgctgttcagggcacgaatcctacctgtggtcgtgtccacataacggctggctgagtcataactgtggccatagcgaagatgccggcgtaatttgctcggcttctcaatcaaggcctacaccaagccccgacacttggcccacctcacatgcgtccaccgccggaagtgagagcagcctggccctgcgcctagttaacgggggggaccgatgccagggaagagtcgaggtcttgtaccgtggtagttggggcactgtgtgcgacgattactgggataccaacgacgccaacgtcgtgtgtagacaactggggtgtgggtgggcaatgtctgccccgggaaacgccagatttggacagggttctggccctatagtcctagacgatgtgcggtgttcaggacacgaaagctatctctggtcttgtcctcacaacggctggttgagccacaattgtggtcatcacgaggacgccggcgtgatctgcagcgccagtcaaagccagcccaccccctcccctgacacctggcctacgtcacatgctagcactgcggggtcagagagcagcctcgcgctgcgacttgttaacggcggcgaccggtgccaaggtcgcgtggaggttctgtaccggggtagttggggcactgtgtgtgatgactactgggacactaatgacgccaacgtggtgtgccgacagctgggttgcggctgggccacctcagccccaggaaatgcgaggtttgggcagggatcagggccaatagtgctcgatgatgtgagatgtagcgggcacgaaagttacctgtggtcttgcccacacaatggttggctgagccataactgtgggcatcatgaggatgccggtgttatctgtagtgcgagccaaagtcaaccaactccctcgcccgatacatggccaacctcccatgctagcaccgcaggttccgaatcaagcctggcactgcgtttggtgaacgggggcgatcgctgccagggccgcgttgaagtactctataggggttcttggggaaccgtgtgtgatgactattgggacactaatgatgctaacgtggtgtgtaggcagctcgggtgtggttgggctaccagtgccccgggcaacgctcgatttggacagggttctggccccatcgttctggacgacgttagatgctccggccacgagagctacctttggtcctgtcctcataacggttggctgtcgcacaattgcggacatcatgaagacgccggcgtgatatgctccgcctcgcagagccagcctactccaagcccagacacgtggcccacctctagggcctccaccgccggaagcgaaagtactctggccctgcgtctggtgaacggtggagataggtgcaggggtcgcgttgaagtcctctatcaaggatcgtggggcacagtgtgcgacgactattgggacacaaacgacgcaaacgtggtgtgcaggcaacttggatgcggctgggctatgagtgctcccgggaatgctcagttcggacaggggagcggacccatcgtcctagatgatgtgagatgctctgggcacgagtcgtacctttggtcctgtccacacaatggttggttaagccacaattgtggccatcacgaagacgcaggagtcatctgttctgccgctcagtctcagtcaacccccagaccagatacgtggctgactaccaacttgccagccctcacagtcggcagtgagtcatcccttgcccttaggcttgtgaacggaggcgaccgatgcagaggacgagtggaggtcctgtatcgcggaagctggggcaccgtgtgtgacgatagctgggacacgaatgatgccaatgtcgtgtgtcgccaattaggttgcgggtgggccatgtccgcacctggaaacgccaggtttggtcagggctccgggcccatcgtgctcgatgatgtgcgttgtagcggaaatgaaagctatctctggagctgcccgcacaaaggctggcttactcataattgcggtcatcatgaggatgctggggtgatttgtagcgcgacccagataaattctacgacaacagattggtggcatccgaccactactacaacagctcggccaagctcaaactgtggtggattcttattttatgcttcgggcactttttcgtcacctagctatcctgcctattacccaaacaacgccaaatgcgtctgggagatcgaggtgaactccggctatcgaataaacctaggattttccaatctcaagctcgaggctcaccacaactgctcgttcgattacgtcgagatttttgatggatctctcaacagttcgcttctccttggaaagatctgtaatgacacgagacagatctttacatcttcctacaaccggatgaccatccacttccgatcagacatctctttccagaacacggggttcctcgcatggtacaactccttcccttccgatgccaccctccgccttgtcaacctaaactcatcttacggcctgtgtgccggccgggtagagatctaccatgggggaacctggggaactgtgtgcgacgacagttggaccattcaggaagccgaagtagtgtgtcggcagctcggctgtggacgtgccgtgtccgctctggggaatgcctacttcgggagcgggtctggacccataacactggacgacgttgagtgctccggaacagagagtacactgtggcaatgcagaaatcgcggttggttttcccataactgtaaccatagggaggacgctggcgtgatctgctccggcaatcacttatcaacaccggcgccattcctgaatatcacaagaccaaatactgattacagttgcggaggcttcctgtcacaacctagtggggacttttcctccccgttttacccgggcaactatccaaataacgccaaatgcgtctgggatatagaggtgcaaaacaactatagggtgaccgtaatttttagagacgtacagctggaggggggctgtaattatgactacatcgaagtcttcgatggaccttatagatcatcaccactgatcgcccgggtatgcgatggtgctcggggctcctttacaagctcatccaacttcatgagtatacgattcatctcagatcattccataaccaggcgcgggtttcgtgcagaatattactcaagccctagtaacgactcgactaacctgttatgtctgcctaaccatatgcaggccagcgtcagccgctcttatcttcaaagtctcggctttagcgcatccgacctggtcatatccacatggaacgggtactatgaatgccgcccccagatcacgcctaaccttgtgatatttaccattccctattctggatgcggtacgtttaagcaagctgacaacgacaccattgattatagtaattttctgaccgcagctgtgagtggcggcatcatcaagcggcgcactgatctccgaatccacgttagctgccgaatgttgcagaacacatgggtggacacaatgtatatagccaatgacacgatccatgtggcaaataatacaatacaggtggaagaggtccagtacggaaacttcgacgttaacatctccttttacacctcctcttcatttctgtacccggtgacctccagaccttactatgtggacctgaatcaggacctctacgtccaagctgaaattcttcactcagacgctgtccttaccttgttcgtggacacatgtgtggccagcccctactccaacgactttacatcactaacctatgatctgataaggtcgggatgtgtgcgggatgacacctatgggccatatagcagcccatccttacgcatcgctcgttttagatttagagcttttcacttcttgaacaggtttccaagtgtgtacttgcgctgcaaaatggtggtgtgcagggcctacgaccctagctcccgctgctatcgcggatgcgtcctacggtccaagagggatgtcggctcctatcaagaaaaggtagatgtggtgcttggacccatccagctgcaaactccaccccgaagggaggaagagccaaggtag

SEQ ID NO: 14883 - DNA, 7212 bp, synthetic construct
  misc_feature 1..7212: note = Description of Artificial Sequence: Synthetic coding sequence
  source 1..7212: mol_type = other DNA
atggggatctcaactgttatcctggagatgtgcctgctatggggccaggtgctgtcaactggaggatggatcccccggaccacagactacgcttccttgatcccctccgaggtccccctggatcccaccgtcgctgaaggatctccattcccctcagagagtacacttgaaagcacagtcgcagagggctctccaatctctttggaatccacactcgagagtacggttgccgaaggcagcctgatacctagcgagtccaccctggaaagtaccgttgcggaggggtccgactccggcctcgcactcaggctggtgaacggagatggccgctgccagggtagagtggagattctttatcgcgggtcatggggaactgtatgtgatgattcatgggatactaacgacgcgaacgttgtctgtagacaacttgggtgtgggtgggccatgtccgctcccgggaacgcctggtttggtcaggggagcggacctattgcccttgatgatgtgcggtgttccggccacgagagttacctgtggagctgccctcataacggatggctgtcccataactgcgggcatggtgaagacgccggggtcatttgcagcgccgctcaaccacagtcgactctgcgccccgagagctggccggtgagaatctcaccgcctgtcccaaccgagggatcggagagttccctcgcccttcgcctcgtgaacggtggggatcgttgtagagggcgtgtcgaggttctgtataggggcagttggggcactgtgtgtgatgactattgggatactaatgacgccaatgttgtatgtaggcagcttgggtgtggatgggccatgtcagcgccaggtaatgctcagttcggacagggtagcggccctatcgtgctcgatgatgtgaggtgttctggacacgagagttacctctggtcctgtccccacaatggatggttgacccataactgtgggcacagtgaggacgcgggagttatttgttccgcacctcagtcacggcccaccccgtcccccgatacttggccaacctcacacgcctctaccgcaggaccagaaagctctctggctctgaggctggtaaatggcggagaccggtgccaggggcgggtcgaagtcctttatagagggtcttggggaactgtgtgcgatgactcctgggacaccagcgatgccaacgtagtatgtcgacagttgggatgtggttgggctacctccgctccagggaatgctaggtttggacagggttcaggccctatcgtgctggatgatgtgcgctgctcaggttatgagtcatatctgtggagttgtcctcacaatggatggctaagccataactgccagcactcggaggacgctggagtcatatgctcagataccctgcccactattacactcccagcatccactgtgggctcggagtcctcccttgccctgaggctagtgaacggaggggatagatgtcaaggacgcgtggaagtcttatatcgcggaagctgggggacagtgtgtgacgactcatgggatactaacgacgccaacgtcgtttgccgccaactgggctgtggctgggccatgctggcccctgggaatgcccggttcggacagggctctgggcctatcgttctagacgacgtccggtgttctggaaacgaatcctacctttggtcttgtccgcacaacgggtggctcagccacaactgtgggcactcggaggacgcaggcgttatttgttcgggacccgagtcctctctcgcacttcgcttagtgaacggtggtgaccgttgccagggacgcgttgaggtactttaccggggaagctggggaactgtctgtgacgattcctgggacaccaatgacgcaaacgtcgtttgccgacagctggggtgtgggtgggccacaagtgcaccaggcaatgctcggttcggccagggtagtggacctattgttcttgacgatgtacggtgttcaggccacgagagctatctctggtcttgtcccaacaatgggtggctctcccacaactgtggtcatcacgaagacgctggcgtgatatgtagcgctgcccagagcagatcaacccccaggcctgacactctttctaccatcacattgccaccgtccacagttgggtcagagagtagccttacccttagactggtcaatggatccgacagatgtcagggaagggtcgaagttctttatcgagggagctgggggactgtctgtgacgactcatgggatactaacgatgcaaatgtggtgtgccggcagctgggatgtggttgggctacctctgctccaggcaatgcgaggtttggccagggtagcggtccaatcgttctcgacgacgtaagatgcagcggtcacgagagctacctgtggagctgtccacacaacggttggttgtcccacaactgcggccatcacgaagatgcaggcgttatatgctctgtcagccagagccgcccgacaccttccccagatacatggcccacgtctcacgctagcacagccggaccagagagctctctcgccctgagactggtcaacgggggagaccggtgccaaggacgggttgaagtgctgtatcgtggatcttggggtactgtatgtgatgattcatgggataccagcgatgcgaacgtggtgtgcaggcagctgggttgtggatgggccacctcggcaccaggcaacgcacgcttcggccagggctctggtccaatcgttttagacgacgtgcgctgctcgggttacgagagctacctctggtcgtgcccgcataatgggtggctgtcacacaattgccagcactcggaggacgcaggagtgatatgcagtgcagcacattcttggtctaccccttctcccgacacattgcctacaatcacattaccggcttcaactgtggggtcggagtccagcttagcccttaggctagtgaatggtggtgaccgctgccaaggccgggtcgaggtgctctatcagggtagctggggcactgtgtgcgacgattcctgggacacaaacgacgctaatgtcgtgtgccgccagctcggctgcggttgggctatgtcagctcccggaaacgcccgctttggccaggggtccggccctatcgttctggatgatgtgaggtgtagtggccacgagagttatctctggtcctgcccccacaatggatggctgtcccacaactgtgggcacagcgaagacgcgggcgtaatctgcagcgcttcacaatctcgccccacgccatcccctgatacctggcccaccagtcatgccagcactgctggatcggaatcttccctggcactccgcttggtgaatggaggagaccgatgccagggccgggtcgaagttttgtatagagggagctggggtaccgtgtgtgatgactactgggacacaaatgacgcaaatgttgtttgcagacagctcggatgtggctgggctatgtctgcccctggcaacgcccggtttggtcagggctcgggaccaattgtactggacgacgtgcggtgttctgggcatgaatcatacctctggtcatgtccccataatggctggctgtcacataactgtggacaccacgaggacgccggagtcatctgttctgcatctcagtcacagcctacacctagtccggacacttggccaacatcacacgccagtacagcgggttctgagagctctctggccctgcggttagttaacggtggcgacaggtgccagggaagggttgaagtgctatacaggggtagctggggtacagtgtgtgatgactattgggatactaacgatgcaaatgtcgtgtgtaggcagctggggtgtggatgggcaacaagtgccccgggaaatgccagatttggtcagggctctggtcccatcgtcttggatgatgtgcgttgttctggccatgaatcctacctgtggtcttgtcctcacaacggctggctttcccacaactgcgggcatcacgaagacgctggtgtcatttgttctgcttctcagtcgcagccaaccccaagtccggacacttggcctacttctcacgccagtaccgccggctccgagtcaagtctcgcactccgcctggtgaacggaggagatcgatgtcaaggcagggtagaggtgctgtatcgtggcagttggggaaccgtttgtgacgattactgggacaccaacgatgcgaacgtagtctgtcggcagttgggctgcggctgggcaacaagtgccccaggtaatgcccgcttcggccagggaagcggtccaatcgtgcttgacgacgtgcgctgtagcgggcatgaatcatatttatggtcatgcccccataacgggtggctctcacataactgcggccaccatgaagacgctggggtcatctgttcagcatctcagtcccagcccacgccttcacccgacacctggccaaccagtcgtgcttcgactgcaggctctgagagtacactcgcattgaggctggtaaatggcggcgatcgctgtaggggacgggttgaggtcctctatcagggaagctgggggacagtctgtgatgattattgggacactaatgatgccaatgtggtctgccgccagttaggttgcggctgggccatgagtgctcccggtaatgcacagttcgggcagggcagcgggcccatcgtgctcgatgatgtccgatgttctggccatgagtcatatttatggtcctgccctcacaacggctggctgagccataattgtggacaccacgaagatgcaggtgtcatctgttcggccgctcaaagccagtccacccccaggcccgacacctggctgactaccaacctgcccgccctcactgttggttcagagtctagcttggccctccggctggtgaacgggggggaccggtgccgtggccgggttgaggtcctgtatagaggaagttgggggacggtttgtgacgactcctgggataccaacgatgcaaatgtggtgtgccgccagctcgggtgtggatgggcgatgagcgctccaggaaacgctaggttcggacagggcagcggtccgatcgttcttgatgatgttaggtgcagtggcaacgaaagctatttatggtcttgtccccataaggggtggctgacacataattgcggacaccacgaggacgcaggtgtgatttgttccgcaacgcaaattaactccactactacggattggtggcatccgacaactaccacgaccgctcgcccttcctccaattgcggagggttcctgttctacgcgtctggcactttttcttccccctcctatcccgcctactaccccaacaatgccaagtgtgtgtgggagatcgaggtgaattcagggtatcggattaatctgggattttcgaatctgaaattagaggcccaccataactgcagctttgactacgtggagattttcgacggaagcctcaattcgtccctccttcttggaaagatttgtaatgatacaaggcagatctttacctcctcatataaccggatgaccatacattttcggagtgacatatcctttcaaaacactggatttcttgcatggtataatagttttccatctgacgcaacattacgtcttgttaatctgaactcgagctacggcttgtgcgccggacgagtggagatataccatggggggacctggggcacagtctgtgacgactcatggacaatccaggaggcggaggtggtttgcagacagctcggatgcggtagggcagtgagtgccctgggcaatgcgtattttggaagcggcagcggcccaataactctggacgacgtagaatgcagcggcaccgagagcactctctggcagtgtaggaacaggggctggttcagccacaattgcaatcatcgggaagacgctggcgttatttgctccggcaatcatctgagcacccccgcccccttcctcaacatcacgaggcccaataccgattactcttgtggaggattcctgtcccaaccttcaggggatttctctagtcccttctatcccggaaactatccaaataatgccaagtgtgtttgggacatcgaagtgcagaacaattacagagtcacagtgattttccgcgacgtccagctggaaggcggctgcaactacgattacatcgaggtattcgacggcccctataggtcttcacctctgatcgctcgggtctgcgatggggcccggggaagcttcacgtcctcttccaactttatgagcatccgtttcatatcagatcattcaatcacccggagaggcttcagagctgagtactattcttcaccatcaaacgattctacaaatctgctttgcttgccaaatcacatgcaggcaagcgtatcacgtagctacctccagagccttggcttctctgcttctgatttagtgatcagcacctggaatggttactacgaatgtcggccccagattacacctaatttagtgatttttactattccatattctgggtgtggcaccttcaaacaggcagataatgacaccattgactacagcaatttcctcaccgccgcagtgagtggaggaattatcaaaaggcgcaccgacctgcgaattcacgtgtcctgtaggatgctgcaaaatacatgggttgacaccatgtatatcgccaatgatacaatccatgtcgccaacaatacgatccaggtggaggaagtgcagtacggcaactttgacgttaacatcagcttttatacctcttctagcttcttgtacccagtgactagccgtccgtactacgtggacttgaatcaggatctgtatgtgcaggcagagatcctccacagcgatgcggtccttactctcttcgtggatacatgtgtggctagcccttatagcaatgactttacctcactcacctatgatctcattcgttcaggatgtgttcgggacgacacgtatggcccctactcatccccttctctgcgaatcgcacgctttagattccgcgcctttcacttcttaaatagattcccgtcggtgtacttgcgctgtaaaatggtcgtgtgcagagcctacgacccctcctcacgctgttacaggggttgcgtgttgcgcagtaaaagagatgttgggagttaccaagagaaggtcgacgtcgtcctgggccccatccagctgcagacgccacctcgccgggaagaagagcctaggtag

SEQ ID NO: 14884 - DNA, 5358 bp, synthetic construct
  misc_feature 1..5358: note = Description of Artificial Sequence: Synthetic coding sequence
  source 1..5358: mol_type = other DNA
atgggaatctctactgttatcctcgagatgtgtttactgtggggccaggtgttgagtactggcggatggataccacggaccactgattatgctagcctgattcccagcgaggtgccattggatcctaccgtagctgaaggtagtccctttccttcagaaagtactctggaatccacggtggccgagggcagccccatcagtcttgaatctactctggagtcaaccgtggccgaaggtagcctcatcccaagtgagagtacactcgaaagcacggtggctgaggggtcggacagtggactcgccctccggcttgtcaacggcgacggccgatgtcagggtagggttgagatcctgtacagaggctcatggggcactgtgtgcgatgacagctgggatacaaatgatgcgaatgtggtttgccggcagctgggttgtggatgggccatgagtgctccaggtaatgcctggttcggacagggctccggccccattgctctggatgacgtgaggtgctcaggccatgagtcctacttatggagctgcccccataacgggtggctcagccataattgcggccatggcgaggatgctggcgtgatttgctcagccgcccaacctcagagcaccctccgccccgagagctggcccgtgcggatctctcctcccgtacccactgaggggagcgagtcgtcattggcgctgaggctggtcaacggcggggacaggtgcagaggtcgagtagaggtgctgtatcgaggaagctggggtacggtatgcgatgattattgggatacaaacgacgcaaatgtagtctgccgccagctcggatgtggctgggcgatgagcgcgccaggtaatgcccagtttggccaggggtcgggtccaattgtcctagatgacgtccgctgctccggacacgagagctatctgtggtcatgcccgcataatggatggctcacccataactgcggacactcagaggacgctggagtgatatgttcggcacctcagtcccggccaaccccctccccagatacctggcccacatctcatgcatccacggccggtcccgaatcatcgcttgccctgcgtctcgtcaatgggggggaccggtgccagggccgcgtcgaggtgttgtataggggctcttgggggaccgtctgcgatgactcttgggatacatcagacgccaatgtggtatgtaggcaattaggttgtggctgggccacatccgcccctggaaatgcccggttcgggcaggggagtggccccatcgtattggacgacgtgagatgctctggctatgaaagttatctttggtcctgccctcataatggctggctgtcccacaattgtcaacactctgaggatgccggtgtcatctgctccgccgcccactcctggtctacaccatctccggacactctccccaccattaccctgcctgctagcaccgtgggatccgagtcctccctggccctgaggttggtaaacggcggcgatcgatgtcaggggagagtcgaagtgctttatcaaggtagttggggaacggtgtgcgacgacagctgggacacaaacgatgcaaacgtagtatgccggcagctcggctgtgggtgggccatgtcggcccccgggaatgctcgatttggccaggggtcggggcctattgtcttagatgacgtacgttgcagcgggcatgaaagttatctgtggagttgcccacataacggttggctgagccataactgtggccactcagaagacgcgggggtgatatgtagcgcgagtcagtctagacccacaccttcaccagacacctggcccacatcacatgctagtactgctgggtctgaatcatcactggctctacgtctcgtcaacggtggagatcggtgtcaaggcagggtggaggtgctataccggggcagctggggaactgtatgtgacgactattgggacactaatgatgctaacgtggtgtgtagacagcttgggtgtggttgggctatgtccgcccctggaaacgccagatttgggcagggctccggccccatcgtgcttgatgacgtccgatgcagcggtcatgaaagctacctctggtcctgccctcataacgggtggctgtcacacaactgtgggcaccacgaggatgccggcgtaatctgctccgcctcacagagccagcccaccccgtcaccggatacctggccaacttcccatgccagtactgccggctccgaaagctctctggccctgcggctggtaaatggaggcgatcgttgtcaaggccgcgtagaggtcctgtacagaggaagctggggcactgtctgcgacgattactgggataccaacgatgctaacgtagtatgccggcaactggggtgtggatgggctacctcagcccctgggaatgcaaggttcgggcagggtagcggacctattgtgctggatgacgttagatgttccggacacgagtcctacctgtggtcctgcccccataacggatggctgagccataattgcggccaccatgaagacgctggtgttatctgctccgcctctcagagtcagccaaccccatcccccgacacttggccaacctctagagcttccacagccggatccgagtccaccctcgcgttgcgtctagtcaatggcggggaccgctgtaggggtcgcgtggaggttctttaccaggggagctggggcacagtctgcgacgattattgggacaccaatgatgccaacgttgtatgcaggcagcttggatgtggttgggccatgtccgcccctggaaacgcgcagttcggccaggggtctggcccaatcgtcctggacgatgtgcgatgtagtgggcacgagagctacctgtggtcatgcccccacaacggatggttgagccacaattgtggacatcacgaggatgccggtgtaatttgtagcgctgcacaaagccagtctacaccacgtccggacacatggctgaccacaaacttgccagccctcactgtcggcagcgaatccagcctggctctgaggctcgtcaatggaggagaccgctgccgcggtagggtcgaagtgctgtaccgaggtagctgggggaccgtatgcgatgattcttgggacacaaatgacgcaaatgtcgtgtgcaggcagcttggctgcgggtgggccatgagcgcccctgggaacgcccggttcggccaaggcagcggaccaatagtgttagatgatgtgcgttgcagcggtaacgaatcatacctctggagttgtccccacaaaggttggctaactcacaactgcggtcaccacgaggatgccggagttatctgttccgccacgcaaattaactccactacaaccgattggtggcacccgacaaccaccactactgcccgcccatcgagtaactgcgggggcttccttttttatgcctccgggacgttctcatcacccagctaccccgcatactaccctaataatgcgaagtgtgtttgggagatcgaggtgaattctggctatagaataaatctggggttctcgaacctgaaactggaggcccatcataattgttcctttgactatgtggagatctttgacggttccttaaacagctcgttgctgctcggaaagatatgcaacgatacgagacaaatttttactagttcttataaccgaatgactattcacttcaggtcggacatttctttccagaatacagggttccttgcttggtataatagtttcccaagcgacgcgacccttcggcttgtgaatctaaattcatcttatgggctctgcgcaggcagagtagaaatatatcacggcggaacctggggcaccgtatgcgatgactcttggacaattcaagaagccgaggtcgtatgccggcaactcggctgcggcagagctgtgtcagcccttggcaatgcctactttggctccgggagtggcccaataaccctggatgacgtagagtgttccggcacagaaagcactctttggcaatgccggaacaggggatggttttcgcacaactgcaaccaccgcgaggacgccggtgtcatttgtagcggaaaccatctgagcacacccgcaccattcctgaatatcacaaggccaaataccgattattcctgtggcgggttcctttcccagcctagcggcgacttctcaagtccgttctatcccggcaactatccgaataatgctaaatgcgtatgggacatcgaggtgcaaaacaattaccgcgtcacggtgattttccgagacgtccagctagaagggggctgcaattatgattacatcgaggttttcgacggtccatatcgaagctcgcctctgattgccagagtttgcgacggagcccgaggctccttcacctctagctctaactttatgtcaatccggttcatttctgatcacagcattacaaggcgaggattcagggcagagtactattcctcaccctccaatgattcaacaaacctgctgtgcttgcctaatcacatgcaggctagcgtgtcacgctcctacctgcagtctttgggattctcagccagtgacctcgttatctctacgtggaatgggtactatgagtgtcgcccccagatcactccgaacctcgtgatttttaccatcccctactcgggttgcggcacgtttaagcaggcagacaatgatacaattgactactcaaactttcttacagcagccgtctccggcggaatcatcaaaaggcgaacagacctgcggattcacgtgagttgtagaatgctccaaaacacgtgggtggataccatgtacattgcgaacgataccatccacgtcgcaaacaacacgatccaggtggaagaggttcaatacgggaacttcgacgtgaacatcagtttctatacctctagctccttcctgtatcctgtgacttctcgcccctactacgtggacttgaaccaggacctgtatgtgcaggctgaaattctgcatagtgacgcggtacttaccctctttgtagacacgtgcgtggccagtccatacagtaatgacttcacaagtctaacgtatgacttaatacgcagcgggtgtgtcagagacgacacttatgggccctatagctcgccctctctgaggatagctagatttaggtttagagcattccacttcctcaatagatttcccagcgtctacttacgctgcaaaatggttgtgtgtcgtgcctacgaccctagcagccgatgctaccggggctgcgtcctaaggtctaaaagggatgtgggctcctaccaggagaaagtcgacgtggtattgggaccaattcagctgcaaacgcctccccggagggaggaggagccccgctag

SEQ ID NO: 14885 - DNA, 597 bp, synthetic construct
  misc_feature 1..597: note = Description of Artificial Sequence: Synthetic coding sequence
  source 1..597: mol_type = other DNA
atggctgcggacatatcagaatcttctggggctgactgtaagggcgaccccagaaattctgctaagctcgacgcagattatccccttcgcgtcctgtattgcggcgtgtgttcattaccaactgagtattgtgagtatatgcccgatgtcgctaagtgccggcagtggcttgagaaaaattttcccaatgagtttgccaagctcacggtggagaattccccgaagcaggaggctgggatttctgaggggcaggggactgctggagaggaagaggagaagaagaagcagaaacgcgggggccggggtcaaatcaaacagaagaagaaaactgtgccccagaaagtcacaattgctaagattccccgcgcaaaaaagaagtatgttactagagtctgcggacttgctacattcgaaatcgatctgaaggaggcccagcggttcttcgcccagaagttctcctgcggggctagtgtgacaggggaagacgagataataatccagggcgacttcaccgacgatatcattgacgtgattcaggagaagtggcctgaggtggacgacgattccatcgaggacctcggcgaagtcaaaaagtag

SEQ ID NO: 14886 - DNA, 1530 bp, synthetic construct
  misc_feature 1..1530: note = Description of Artificial Sequence: Synthetic coding sequence
  source 1..1530: mol_type = other DNA
atggaccctccacgcgcctcccacctgtctccacgaaaaaaacgccctagacagaccggcgcccttatggccagcagccctcaggatatcaaattccaggatctggtagtgttcattttggagaaaaagatgggcaccacacgacgagccttcctgatggagctggccaggcggaaggggttcagggtggagaatgagctctctgattcagtgacccatatcgtcgctgagaacaactccgggtccgatgtcttggagtggctccaggcacaaaaagtacaggtgtcatcacagcctgagctgttggatgtcagctggttgatcgagtgtattcgagcaggaaagcccgttgaaatgaccggcaaacaccagctcgtggtcaggcgggactacagtgattctaccaatcccggcccgcctaagacaccccctatcgctgttcagaagatttcacagtatgcttgccagcgccgcacaaccctcaataactgtaaccagatctttaccgacgccttcgatatcctggccgagaattgtgaatttagggagaatgaggacagctgtgtgacgttcatgcgcgcagctagcgtacttaaaagtctgccattcactatcatctccatgaaagacacagagggaattccatgtttgggatccaaagttaaagggatcatagaggagatcattgaggacggtgagagcagcgaggtcaaggccgtcttaaatgacgagaggtaccagtccttcaaactgtttactagcgtgttcggcgtcgggttaaagactagcgaaaagtggtttcggatggggttccggacactgtcgaaagtcaggtctgacaagagtctcaagttcacccggatgcagaaggccggcttcctgtattacgaggacttagtctcctgtgtgacacgggccgaggccgaagctgtgtcagttctggtgaaagaagcggtttgggcgttcttgccagacgcattcgtgaccatgacggggggctttagaaggggcaaaaagatggggcatgatgtggactttttgattacctcccccggctctaccgaagacgaggaacaactgcttcagaaagttatgaacctatgggaaaagaaagggctgctcttgtactacgatttagtcgagtcaacctttgagaaacttaggctgccatcacgcaaggtagatgctctagatcactttcagaaatgtttcttgatcttcaagctcccccgccagagggtggacagtgaccagtcatcttggcaggaaggtaagacgtggaaggcgattagagtcgacctcgttctctgtccttacgagcgcagagccttcgctctcctgggctggacaggatcccggcagtttgagcgtgatttgcgtcgatatgccacacatgagaggaagatgatcctggataaccatgccctgtacgataaaacaaaaaggatattcttaaaggctgaaagcgaagaggagatatttgcccatctcggcttggactacatagaaccttgggaaagaaacgcgtag

SEQ ID NO: 14887 - DNA, 1527 bp, synthetic construct
  misc_feature 1..1527: note = Description of Artificial Sequence: Synthetic coding sequence
  source 1..1527: mol_type = other DNA
atggatccccccagagcctcccatctctctccccgaaagaagcgcccacggcagacaggggcgctcatggcaagctctcctcaggatatcaaattccaggacctcgtggtgtttatcctagagaaaaagatgggcacaacccgccgcgcattccttatggagctcgctcgcagaaaaggcttccgggtcgagaacgagctttctgactccgtgacccatatagtggcagagaataattccggcagtgacgtcttggagtggctccaggctcagaaggtgcaagttagctcacagccagagctgcttgatgtgagttggctgatcgaatgtatccgcgcagggaagcccgtggaaatgaccgggaaacaccaacttgtggttcgccgcgactattctgactccaccaaccccgggcctcccaagacaccaccaatagctgtacaaaaaatttcccagtatgcctgccaaaggagaaccactttgaacaactgcaatcaaattttcacagatgccttcgacatcctcgctgagaactgcgagttccgggagaacgaggatagctgcgtcacttttatgagagccgcctctgtattgaagagcctacccttcacaatcatttccatgaaagacacggaaggaatcccatgcctgggttccaaagtaaaggggataattgaagagatcattgaagatggagagtccagcgaggtcaaggctgtgttgaatgatgaaagatatcaatcatttaaattgtttacttctgtgttcggcgtgggcctcaaaacgagcgagaagtggttcaggatgggctttaggactctgtccaaggtgaggtcagacaagtccctgaagtttacacggatgcagaaagcaggctttttgtattacgaggacttggtgtcatgtgtgacccgcgcagaagccgaggctgtgagtgtgttggtcaaagaggctgtctgggcctttctgcctgacgctttcgtaactatgacagggggatttagacgcggaaaaaaaatgggacacgatgtcgatttcctgataactagcccagggtccaccgaagacgaggaacagcttctccaaaaagtcatgaacctctgggaaaaaaaagggctcctgttatattatgacctggttgagagcaccttcgagaaactaaggctcccctctcggaaagtggatgcattagatcatttccagaagtgttttttgatattcaaacttccaaggcagcgcgtggactctgatcagagctcatggcaggaggggaagacctggaaggctataagggttgaccttgtgctctgtccgtatgagcgacgagccttcgcactcctgggctggacaggcagtcggtttgagcgcgatctcagaaggtatgccacacacgaacgcaaaatgatcctggacaatcacgcactgtacgacaagacaaaacgcattttcctaaaagccgagagcgaagaagagatcttcgcccacttgggtcttgattacatcgagccatgggaaagaaatgcttag

SEQ ID NO: 14888 - DNA, 2544 bp, synthetic construct
  misc_feature 1..2544: note = Description of Artificial Sequence: Synthetic coding sequence
  source 1..2544: mol_type = other DNA
atggaagccgccaggccttccgggtcgtggaacggcgcgttgtgccgattgctcctgctgaccctcgcgattctaattttcgctagcgatgcttgcaaaaacgtgaccctgcacgtgcccagcaaattggatgcggagaagctcgtgggccgggtcaacttaaaggagtgctttactgcagctaatctaatccatagttcagaccccgactttcaaattctggaggatggtagtgtctatactactaacactattctgctgtccagtgagaaaaggtcgttcacaatactgctctctaacaccgagaatcaagaaaagaagaagatctttgtgttcttggagcatcagacgaaagtcctgaagaagaggcatacaaaagagaaggtcctgcgcagggctaagagacgctgggcccccatcccctgttctatgttggagaatagtctgggtcctttcccgctgttcctgcaacaagtgcagtctgacacagcccagaactatactatttactattccatccgcggcccaggggtagaccaagagcctcgcaacttgttttacgttgagcgggacaccggtaacctgtattgtacgagacctgttgaccgcgagcagtatgagagttttgagatcatcgcctttgctaccactcctgatggatatacacccgaactgccgctgcctttgataatcaagattgaagacgaaaacgataattatccaatattcaccgaggagacgtacacctttactatctttgaaaattgtcgcgtggggacaactgttggccaggtctgtgccaccgataaggatgaacccgacaccatgcacactagattgaagtacagcattattgggcaggtgcctccgagtccgacacttttcagcatgcacccaactaccggtgtcatcactactacttcatcacaattagacagggaactcattgataaataccagttgaaaatcaaggtccaagacatggatgggcagtatttcgggctccagaccacgagcacatgcatcatcaatatcgacgacgttaacgatcatctccccactttcaccaggacatcctacgtgaccagcgtcgaggagaacacagtagacgtagagattttacgagttacagtagaggacaaggacctggtgaacaccgcaaattggagggcaaactataccatccttaaaggcaatgagaacggcaacttcaagatcgtcaccgatgccaagactaatgaaggcgtgctctgtgtggtgaaacccttgaactacgaagagaagcagcaaatgatactgcagatcggggttgtgaacgaagccccattttcaagagaggcctctccccgctctgctatgagcactgcgaccgtcacagtaaatgtagaggaccaggacgaggggcccgagtgcaatccgcctatccagacagtgcggatgaaagaaaacgccgaagtgggaacgaccagcaatgggtacaaggcctatgaccctgaaacccgttcctcttctgggatccgatataagaaactgacagaccctacgggatgggtgacaattgatgagaacaccggaagcatcaaagtattccgttctctggaccgcgaagccgagacgatcaagaacggtatttacaatataactgtgctggcttccgatcagggaggacgcacctgtacagggacactgggcatcatcctgcaggatgtcaacgacaactctcctttcattcccaagaagacggtgatcatttgcaagccaactatgtctagtgctgagattgtcgctgttgacccagatgagccaattcatggaccacccttcgatttttccttagaatcttccacatcagaagtacagaggatgtggagactcaaagccatcaacgatactgcggcccgcttatcataccagaacgatcctccctttggcagttacgtggtccctataacagtgcgggatcgtttaggaatgtcctcagtgaccagcctcgacgttaccctgtgcgattgcatcactgaaaacgactgcactcacagagttgacccccggatcggaggaggaggcgtgcaactgggcaagtgggccatcctagctatcctgcttggtatcgccctccttttctgtatactcttcaccttggtgtgcggagccagtggtacatccaaacagcccaaagtgataccagacgacctggcccaacagaacttgatcgtgtcaaacacagaggcgcccggagacgataaggtctatagtgcaaatgggtttaccacacagacggtgggcgcgagcgcacagggcgtctgtgggaccgtcggcagtggcattaagaatggggggcaggagaccattgaaatggtgaaaggtggtcatcaaacatccgagtcatgcaggggcgccggccaccaccacacattggattcctgtcgtggcgggcacaccgaggtagataattgtaggtacacatacagcgagtggcactcctttacacaacctcggctgggcgaggagtccatacgcggtcacacgcttatcaaaaactag

SEQ ID NO: 14889 - DNA, 2706 bp, synthetic construct
  misc_feature 1..2706: note = Description of Artificial Sequence: Synthetic coding sequence
  source 1..2706: mol_type = other DNA
atggaagctgctcggcctagcggtagctggaacggagcgttgtgcaggctccttctactgaccctggccattctaatttttgcgtctgacgcatgcaagaatgtgactctgcatgttccctccaaactggatgctgaaaagctcgtcggcagagtgaatctgaaggaatgtttcaccgcggcgaaccttattcactcgtctgacccagattttcagattcttgaagacggaagtgtgtacacgaccaataccatcctgctaagctctgagaagcggtcctttaccatcttgctatccaacacagaaaaccaggagaaaaaaaagatttttgtctttttggagcaccagaccaaggtcctgaaaaaaaggcacaccaaagagaaggtcctaaggcgcgcaaagaggcgttgggctcctattccctgctctatgctggaaaactccctggggccgttcccactcttcctgcagcaagttcaaagcgatactgctcagaattataccatatattatagcattcgtggccccggagtggatcaggaacccaggaatctgttttacgtggagcgcgacactggaaacctgtactgcaccagacccgtcgatcgcgagcaatacgaaagctttgaaatcatcgcgtttgccaccacacctgatggctacacgcctgaactcccactgccgcttatcattaaaattgaagatgagaacgacaactatcctatctttactgaagaaacttataccttcacaatatttgaaaactgccgagtgggcaccacagtgggccaagtctgcgctactgataaggatgagcccgacaccatgcatacccgccttaaatactctattattggacaggtaccaccttcacctacattgttcagcatgcatccaacaaccggagtaataaccacaacttcttctcagctcgaccgcgagctcattgataaatatcagctgaaaatcaaggtccaggatatggatggacagtacttcgggttacaaactacctcaacctgcattatcaacatagacgatgtcaacgaccacttacctacattcaccagaacctcatacgtaacctctgttgaggagaatactgtcgacgtggaaatactccgggtgacagtagaagataaagatctggtaaatactgccaattggcgcgctaattacacaatccttaaggggaatgaaaatggaaatttcaagatcgtgacagatgctaagactaatgaaggagtgttatgcgtcgtgaaacctctgaattatgaagagaagcagcagatgatcctccaaatcggtgtggtgaacgaggcaccattctctcgcgaggcaagccctcgcagtgctatgtctactgcaacagtcacagtgaacgtagaggatcaagatgaagggcccgagtgtaacccaccaatccaaacagttaggatgaaagaaaacgctgaggttggcacaacttctaacggctacaaggcgtatgaccccgaaacaagaagcagtagtggtattcgttataaaaagctgacggatccaaccgggtgggtcaccattgacgaaaacaccggatcaattaaagtattccgcagtctcgatagagaagctgaaactattaagaatggcatttataatataactgtgctggcatcagaccagggcgggcggacatgcactggtaccctgggaattattctgcaggacgtcaacgataactctccattcattccaaaaaagaccgtgattatatgtaagcctaccatgtccagtgctgaaattgttgcagtggatcccgacgaacccatacatggcccccctttcgacttcagcctggaaagcagcacctctgaggtccagaggatgtggagactgaaagcaataaacgacaccgcggccaggctaagctaccagaatgatcctccatttggcagttacgtcgtccccatcacggtgcgggatagactgggaatgagcagcgtcactagccttgacgtgacactgtgcgactgtatcactgaaaatgattgtacccatcgggtcgatccgcggattggggggggcggtgtgcagctaggcaagtgggcaatattggcaatattgctcggcatcgcactgctcttttgcatactctttactttggtttgcggcgcttcagggacgtccaaacagcccaaagtgattcctgacgatctcgcccagcagaacctaatcgtgagtaacactgaggccccgggtgacgacaaagtctacagcgcaaacggcttcactacccagactgtcggggcatccgctcagggcgtgtgcggaacagtgggcagcgggattaaaaacggcggacaagagacaattgagatggttaaggggggtcatcagacatccgagtcgtgtagaggagcaggacaccaccacactttagactcatgccgtgggggccacacagaggtggacaactgccggtacacctattcagagtggcactccttcacccagccgagattgggtgaaaaggtgtacctgtgcaatcaagatgagaatcataaacatgcccaggactacgtgctgacctataactacgaaggcagaggctccgtggcagggagcgttggctgttgctctgagcgccaggaggaggatggcctggagttcctggacaatcttgagcccaagtttcgcacgctggccgaggcctgcatgaagcggtag

SEQ ID NO: 14890 - DNA, 2745 bp, synthetic construct
  misc_feature 1..2745: note = Description of Artificial Sequence: Synthetic coding sequence
  source 1..2745: mol_type = other DNA
atggaagcagctcgtccatccggtagttggaacggcgccctctgtcggctactcctgctgacactggcaattctgattttcgcatcagacgcgtgcaagaacgtcaccctgcatgtgcccagcaaactggatgctgaaaagctcgtcggcagggtgaacctcaaggagtgtttcaccgcagctaatctgattcatagtagtgatcctgacttccagatcctagaggacggctcagtatacaccacgaatacaatactgctttcttcagaaaaacggtctttcaccattctgctttccaatacagaaaatcaagagaagaaaaaaattttcgtctttcttgagcaccaaacaaaaattagtctgctggtgccctggctgtgccttgtagccgaggttctgaagaagcgccataccaaggagaaggtgctgcgtcgggctaagcgcagatgggctcctatcccctgttccatgttagaaaatagccttggcccctttcctctgtttctgcaacaggtacagagtgacacagcgcagaattacactatttattatagcatccggggccccggcgtagatcaagaaccaaggaatctgttctacgtcgaaagagacaccggtaacttatattgcacccggccggtggacagggaacagtatgaatctttcgagattatcgctttcgcaactacacccgatggatacaccccagagctacctctgccactcataatcaagatagaggacgagaatgacaactatccaatctttaccgaggaaacatatacattcactattttcgaaaactgcagagttggtaccacggtgggccaggtgtgtgccaccgataaagacgagccagatacaatgcacaccaggctgaagtacagcattatcggccaggtcccgccatctcctacgcttttcagcatgcacccaacgaccggcgtgataactacaacctcctctcagttggatagagaactgatcgataagtaccaattaaaaatcaaggttcaggatatggacggacagtatttcgggctgcagacaacatctacatgcatcattaacattgacgacgtgaacgaccatctgcctacctttacccgaacttcttatgtgacgtcagtggaggaaaatacagtggatgttgaaatactcagagtcacggtggaggacaaggatctggtgaacaccgctaactggcgggctaattataccattctaaaaggaaatgaaaatggaaatttcaaaatcgttactgacgcaaagactaacgaaggagtcctgtgtgtggtgaaaccgcttaattacgaggagaagcaacagatgatcttacaaatcggcgttgtgaatgaggcacctttctctcgagaggctagcccaaggtccgctatgagcacagctacagtaactgtgaatgtggaggatcaggatgaagggccggagtgcaacccgcccattcagacagttcgcatgaaggaaaacgccgaggtcggcactacatccaacggctataaagcttacgaccccgaaacacggagcagctccgggattagatacaaaaagctgaccgatccaaccggctgggtgacaattgatgaaaatacaggatcaatcaaagtatttcgctcactggacagggaagcagagaccattaaaaacggaatttacaatattactgtccttgcatctgatcagggaggaagaacctgtacaggcaccctgggaattatcctgcaagatgtcaatgataactcaccctttattcccaaaaaaacagtgatcatttgtaagcccacgatgtcctccgccgagattgtagctgtagacccagatgagccaatccacggtccacctttcgacttcagccttgagagttccacctctgaagttcagcgtatgtggaggctcaaagccatcaatgacacagccgcacgcttgtcatatcaaaacgatccccccttcggctcgtatgttgtgccaataactgttagagatagactgggaatgtcgagcgtcacttcattagacgttacactgtgcgactgcatcactgaaaatgactgcacacatcgtgtggacccgcgcattggcggcggcggggtgcaattgggaaaatgggctatcctggccatactgctggggatcgccttactgttttgcatcctctttactctcgtttgcggagcttcgggcacctccaaacagcctaaagtcattcctgatgacctggcacagcaaaatttgatcgtgagcaataccgaagcacccggggacgataaagtgtactcagcaaacggattcaccacccagaccgtcggcgcaagtgctcagggtgtttgcgggacagtggggtcaggcattaaaaatgggggccaggagaccattgagatggtaaaaggcggccaccagacttcagagtcatgcagaggcgccgggcaccatcacaccctcgatagctgccgaggcggccacactgaggttgacaattgcaggtacacctacagtgagtggcactcatttactcaacccaggctaggggaaaaagtctatctatgtaatcaagatgagaatcacaagcatgctcaggattatgtactgacctacaattatgagggacggggaagcgtggcaggcagcgttggatgctgcagcgaacgccaggaggaagatggactcgagtttctggataacctcgagccgaagtttcgtacactagccgaagcgtgtatgaagcggtag

SEQ ID NO: 14891 - DNA, 2004 bp, synthetic construct
  misc_feature 1..2004: note = Description of Artificial Sequence: Synthetic coding sequence
  source 1..2004: mol_type = other DNA
atgaagatgatcacaacccagttcctgcagaaaaaactaatattgctccagttcctgaagatcgccgagtggggcaccacagtcggacaggtgtgcgccaccgacaaggatgagcccgatactatgcacacaaggctaaaatacagcattattggacaagttcctccgtcccctaccttatttagtatgcatccgactactggtgtcatcactactacttcttcacagctcgacagagagcttatcgataaataccagctaaagataaaagtccaggatatggacggacagtactttgggctgcagacaacaagcacttgcatcatcaacattgacgacgtgaacgatcatttgcctactttcacaagaacaagctacgtgacatccgtggaggagaatacagtggacgtagaaatattacgagtgactgttgaagataaggatcttgtgaatactgctaattggcgggccaattatacgatccttaagggcaatgagaacggaaattttaaaatagtaaccgatgcgaaaaccaacgagggcgtcctttgcgtggtcaaacccctcaattatgaggagaagcagcagatgatactccagataggtgtggtgaacgaggctccctttagccgggaggcttcgccgcggagtgccatgagtactgccaccgtcacagtgaatgtcgaggaccaggacgagggcccagagtgcaaccctcctattcagaccgttcggatgaaggaaaacgcagaagttggcacaaccagtaacgggtataaggcctacgatcccgagacacgtagttcgagcgggattagatataaaaagctgaccgaccccaccggatgggtaacaatagacgaaaacaccggatccatcaaagtttttcgctccttagacagagaggcagaaactattaagaatggtatctacaacataaccgtgctggcatccgatcagggagggaggacctgtacaggcacacttggcataattctgcaggacgttaatgacaacagtccatttatccccaagaagactgtaatcatctgcaagcccacaatgagcagcgccgaaatcgtggctgtcgaccccgacgaacccatccacgggcccccttttgatttttcactcgagtcttccacaagtgaggtccagaggatgtggcgactgaaagctattaacgacaccgctgctcgcctctcctaccagaacgaccccccctttgggtcatatgtcgttcctataactgtgagggatagattgggcatgtctagtgtgacttcactggatgtcaccctttgcgactgcattactgagaacgattgcacccacagggtcgacccccggatcgggggtggaggagtgcagctagggaagtgggccattctggccatcctgctgggaatcgcgctgttattttgtatccttttcacactggtttgtggcgcctcaggcaccagcaagcagcccaaggtaatacctgacgacctggctcagcaaaacctcatagtttccaatacagaggcaccaggagacgataaggtctattcggccaatgggttcacgacccagaccgtcggcgcctccgcccagggggtatgtggaactgtaggaagtggtattaagaatggtgggcaagagaccatcgaaatggtcaaagggggccaccagaccagtgagtcttgtcgaggcgcggggcaccatcacacactagattcatgtaggggtgggcacacagaggtggataactgccggtacacttatagtgaatggcatagcttcactcagccccgactcggagaaaaagtctatctgtgtaaccaagacgaaaaccacaagcacgcccaggactacgtgctgacctacaattatgaggggcggggctcagtcgcaggatctgttggatgctgttcagaacgccaagaggaggatgggctcgagtttttagataatctggaaccaaaatttaggacattggccgaggcttgtatgaagcggtag

SEQ ID NO: 14892 - DNA, 3000 bp, synthetic construct
  misc_feature 1..3000: note = Description of Artificial Sequence: Synthetic coding sequence
  source 1..3000: mol_type = other DNA
atgatgggcctgttcccaaggacgacaggagctttggccatttttgtggttgtgattcttgtacatggcgagctgagaatagagaccaagggacagtacgatgaggaagagatgaccatgcaacaggctaagcgtagacagaaacgggagtgggtgaagttcgccaagccttgtcgggagggagaagacaacagcaaaagaaatcccatagctaaaatcacctccgactatcaggccacacagaaaatcacataccgaatttcaggggtgggaatcgatcagcccccttttggcatctttgtagtagacaagaatactggcgatatcaatataaccgcaatcgtggacagagaagagaccccttccttcttaatcacctgtcgggccttgaatgcacaaggtctggatgtcgagaaacccctgatcctaacagttaagatactggatataaacgacaacccgcctgttttctctcagcagatatttatgggggaaattgaggagaactcagcaagtaattctctggtaatgattctgaacgccacagacgcagatgagcccaaccacctgaattcgaaaatcgcctttaagatcgtgagccaagagcctgctgggactcccatgttccttctgagcagaaacacgggcgaagtgaggactttaactaattcactggatcgcgaacaggcttccagttaccggcttgtcgtgtcgggggcagataaggacggcgagggacttagcactcagtgtgaatgtaacataaaagtgaaggatgtcaatgataactttcctatgttccgcgatagccagtattcagcccggatagaagaaaacatcttgtcctcggagctgctcaggttccaggtgactgatcttgatgaagaatacactgataattggctagccgtctacttctttacatccggaaacgagggaaactggttcgaaattcaaacggaccctaggacgaacgaaggcatattaaaagttgttaaggctctcgactacgagcagctgcaaagcgttaaactatcaatcgcagtcaagaataaagcggaattccaccagtccgttatctcaaggtatcgggtccaatctacgcctgtgactatacaggtcatcaatgtccgtgagggaattgcgttcaggccagcaagcaagaccttcaccgttcagaaggggattagcagcaaaaaactggtcgattacattctggggacttatcaggcaatcgatgaagatactaataaggccgcttccaacgtgaagtatgttatggggcgcaacgacggaggctaccttatgattgattcgaagacggccgaaatcaaatttgtgaagaacatgaatcgagactctacgtttattgtcaataagaccattactgccgaggtgctcgcaatcgatgagtataccggcaaaactagtacaggcacagtgtacgtgcgagtcccagatttcaacgataactgccctactgctgttctcgagaaagatgccgtttgctcttccagtccgagcgtggtcgtttccgccagaacactgaacaatcgatatactggcccttatactttcgctctggaagaccagcccgtgaagctccctgccgtgtggtcgataacgactctgaacgccacctctgcactgttacgagcacaggagcaaattcctcccggagtttatcacatcagtttggtgttgacagacagccagaataatagatgcgagatgcctcggtcattaacgctggaggtgtgtcagtgtgacaaccgtgggatttgcggcacctcctatcccaccacatctccaggcaccaggtacggcaggccccactctggtcgattgggccccgcagcaattggcttgctgcttctggggctccttttgcttcttctggcgccattactgctgctgacatgcgattgtggagccggctccactggaggagtgaccggagggttcataccagtgccagacggctcggagggaaccatccaccaatggggtatagaaggcgcgcatcctgaagacaaagaaattactaatatatgtgtgccaccggtcacagcaaatggtgcagatttcatggagagtagcgaagtgtgcacgaatacctacgccaggggaaccgcggtggaaggaacatctgggatggaaatgacgactaaactgggggcggcaacagagagtggcggggctgccggatttgcgaccggcactgtttccggagcggccagcggctttggcgcagctaccggcgtgggaatctgttcttctggccagagtggcactatgcggacgcgccacagcactggggggacgaataaggactacgccgacggggctatttccatgaacttcctcgatagctacttttcccagaaggcttttgcatgcgcggaggaagatgatgggcaagaggcgaatgattgcttactcatatatgacaatgagggcgccgacgcaacaggatctcccgtcggcagcgtggggtgttgtagctttatcgccgacgacctggacgactctttcttggactcccttggacccaaattcaaaaaattggctgaaatatctctgggagtcgacggggagggtaaggaagtccagcctccctccaaagactctggatacggcatagaatcttgcgggcacccaatcgaagttcagcagacaggattcgttaaatgccagacgctcagcggctcacagggggcaagtgctttgagcacctccgggtccgtgcagcctgctgtatccatacccgaccctttgcagcacggtaattatttggtgaccgagacatatagcgccagtggttccttagtgcaaccctcaaccgcaggcttcgaccctctattaacccagaacgttattgtcactgagcgggtgatctgccccatctcaagtgtcccggggaatctggctggcccgacccagttgagaggatcacataccatgttgtgtaccgaggacccttgcagccgactgatatag

SEQ ID NO: 14893 - DNA, 8616 bp, synthetic construct
  misc_feature 1..8616: note = Description of Artificial Sequence: Synthetic coding sequence
  source 1..8616: mol_type = other DNA
atgagttgtaatggcggctcacacccccgcataaacacattaggacgtatgatcagggccgagtccgggcctgacctgaggtacgaagtgacgtccggcggaggggggacctcccgcatgtactattcccgcagaggcgtcatcacagatcagaatagtgacggatactgccagacaggaaccatgagccgccaccagaatcagaacactattcaggagctactgcagaattgctcggattgcctgatgcgggccgaactgatcgtgcaaccagagctcaagtacggtgacggcatacaattaacacgatcacgggagctggatgagtgctttgcccaggccaacgatcagatggagatcctggacagtttgattcgggaaatgcgccagatgggccagccctgtgacgcgtaccagaagcgtctgttgcagctgcaagagcaaatgagagccctgtataaggctatctccgttccaagagtccggcgggcctcaagcaagggaggcggcgggtatacctgtcagtctggttccggatgggacgagtttacaaaacatgttacaagcgagtgtctgggctggatgcggcaacagcgcgccgagatggacatggtcgcttggggcgtggacttggcctccgtggagcaacacatcaactcccatcgaggcattcacaactccattggcgactacaggtggcagcttgacaaaatcaaggccgacctgcgcgaaaagtccgcgatctaccaactggaagaggagtatgagaacctgttgaaagccagctttgagcgaatggaccacttaaggcagttgcagaatatcatacaggccacttctagggagataatgtggattaatgattgtgaggaggaagagctcctgtacgattggagcgataagaacactaacatcgctcagaaacaagaggccttcagcatcaggatgtcacagctcgaagttaaggaaaaggagttgaataagctgaaacaagaaagtgaccaactggtgttgaatcagcaccccgcctcagacaagatcgaggcctatatggatacccttcaaacccagtggagttggatcttacagattaccaaatgcattgacgtccatctcaaggagaatgccgcttatttccagtttttcgaggaggcccagtctacagaggcatacctgaaaggactccaggacagtattcgtaaaaagtacccctgcgacaagaatatgccccttcagcatttgctggagcagatcaaggagctagagaaagaaagggaaaagattttagaatacaaaaggcaggtgcagaaccttgtcaacaagagcaaaaagatcgtacagctcaagccacgaaatcctgactatcggtccaataaacctattatacttagggctttatgcgactataaacaggatcagaagatcgtgcacaagggggatgagtgtatcttgaaagacaataacgagcgcagcaaatggtacgtcaccggtcccggaggagtagacatgctggtgcctagtgttggtctcattattcctccccccaatcccttggctgttgatttatcatgcaagattgaacagtattatgaggccatcctggcactgtggaatcagttgtatattaatatgaaatctttggtttcttggcactactgtatgatcgacatcgagaaaatccgcgccatgactatcgccaagctaaagactatgagacaggaggactatatgaaaacgattgctgacttggaactacactaccaggagttcatacgtaactctcagggctctgagatgtttggggacgatgataaacggaagatccagagccaattcactgatgcccaaaagcactatcagacactggtgatacaattgccaggctatcctcagcatcaaacggtgactaccacagagattactcaccatggaacatgccaagacgtgaaccataacaaagtgatcgagactaatagagagaacgataaacaggaaacctggatgctcatggagttgcagaaaataaggcgacagattgagcattgcgaaggacggatgaccctgaagaatctgccactggctgaccagggtagttcccaccatattactgtcaaaattaatgaattgaagtcagtccaaaacgattcccaggctatagccgaggtgctcaatcagttgaaagacatgttagcaaacttccgaggatccgagaaatactgttatctgcagaatgaggtttttggactgttccaaaagctggaaaacattaacggtgtaacagatggatacctcaattctctgtgcacggtaagggcactccttcaggcgatcctgcaaaccgaagatatgttgaaggtctatgaggctaggctgaccgaagaagaaacagtctgtttggatctcgataaagtggaagcctatcgctgtggcctgaagaaaataaagaatgatttaaacctgaaaaaatcactgctggccactatgaagaccgagctacaaaaggcccagcagatccatagccagacgtcccagcagtatccactatacgatctggatctgggaaagttcggagaaaaggttacccagctgactgaccggtggcaacggattgataagcagatcgacttccgactctgggacctggagaaacaaatcaagcagttgcgaaattaccgagacaattaccaggccttctgtaagtggctgtatgatgctaaaagaagacaggatagtctcgagtcaatgaaattcggggactctaatactgtgatgagatttctgaatgaacagaaaaaccttcactctgaaatctccggaaaacgcgataagtcagaggaggtccaaaagatagcagagctgtgcgcgaatagtataaaggattatgaattacagctggcatcgtacacatcgggtttggagacccttctgaatatcccgatcaagaggaccatgattcagagtccaagtggagtgatccttcaagaagctgccgatgttcatgctaggtacattgaattgcttacccggagtggtgactattatagatttttgtctgagatgttgaaatctctggaagacctcaaactgaaaaacaccaagattgaggtgctcgaagaggaactacgccttgcacgagatgcgaattccgagaattgcaataagaacaagtttctcgaccagaatttgcaaaaatatcaggcggaatgctcccaattcaaagccaaactcgcttcactggaggagcttaagaggcaggccgagctggacggaaaaagcgctaagcagaacctggacaaatgctatggccagatcaaggaactaaatgaaaaaatcactcgcttgacgtatgagatagaggacgagaaaaggcggcgcaaatccgtggaggatagatttgatcagcagaagaatgattacgatcaattgcagaaagcgcgtcagtgtgagaaagagaacttggggtggcaaaaacttgagtccgaaaaagccatcaaggaaaaggaatacgaaatcgagaggctgcgggtgttgctgcaggaagaggggacccggaagcgagagtatgaaaacgaactcgcgaaggtgagaaatcactataatgaggaaatgtctaacttgcgcaacaagtatgagacagaaattaatataaccaaaacaacaattaaggaaatcagtatgcaaaaggaagacgatagtaaaaacttgaggaatcaactagatcgcctatctcgagagaatcgggatctaaaagacgagattgtacggctgaatgattctattctgcaagcgactgaacaaagacggagagccgaggagaacgctctgcaacagaaagcgtgcggcagcgagatcatgcagaaaaagcagcacctggagattgagttgaaacaggtgatgcaacagcggagtgaggataacgctaggcataagcaaagtttggaagaggccgcaaagacaatccaggacaaaaataaagagatcgagcggttgaaagccgaattccaggaagaggctaaacgacggtgggagtacgaaaatgagctctcaaaggttcgcaataactacgacgaggaaataattagtctcaagaatcagttcgaaaccgaaattaatatcacaaagactacaatccaccagctgactatgcaaaaggaagaggatacctccggttatcgtgctcagatagataatctgaccagggagaatcggtcgttatccgaggagattaaacggcttaaaaatacactgactcagacgacggaaaatctgcggcgtgtcgaagaggacattcagcagcagaaggctactggaagtgaggtgtcccaacgaaaacaacagctcgaggtggaactgagacaggtgacacagatgcgcactgaagaatctgtcaggtataagcagtcacttgatgatgccgccaaaaccatccaggacaaaaataaggagattgagaggctgaagcaactgatagacaaggagaccaacgacagaaagtgcctggaagacgagaatgcaaggctccagcgcgtgcagtacgatcttcaaaaagctaactcctccgccacagagaccatcaataagctgaaggtccaggaacaggaactgacacgactcaggattgactacgaacgagtgtcccaagaaagaacggtgaaggatcaggacatcacacggtttcagaactcactgaaagagctccagctgcagaagcagaaagtggaggaggagttgaaccgcctcaagagaaccgcctccgaggactcttgcaaaagaaagaaattagaggaagaattggagggcatgcggaggtccctcaaggagcaggccattaagataaccaatctgacccaacaattagaacaggcatcaattgtcaaaaagagatcagaagacgacctccgccagcagcgggacgttctggatggacacctgcgggagaagcagcggacccaggaggaacttagacgcctgagcagcgaggtggaggccctccggaggcagcttctccaggaacaggaatcagttaagcaggctcatcttcgcaatgagcacttccaaaaagctattgaggacaaaagcagaagcttgaacgaatctaaaattgagatcgagaggttgcagtctcttaccgagaacctgaccaaagaacatctgatgctcgaagaggaactgcgaaaccttcgacttgagtatgatgatctccgacggggtagatctgaggccgacagcgataaaaatgctacgattttggagcttaggagtcaactacaaatcagcaacaatcgcactctggagctccagggcctgattaacgacctccagcgggagagagaaaacctgcgtcaagaaatcgaaaagtttcaaaaacaggcgctcgaggccagtaaccggatccaggagtctaagaaccagtgcacgcaggtcgtgcaggagcgggaatctttattggttaagatcaaagtcctggagcaggataaagcccggctgcaaaggctggaagacgagctgaacagagcaaagagtacgcttgaagcagaaacgagagtcaagcaaaggctggagtgcgagaaacagcagatccagaatgatctgaatcaatggaaaacccaatattccaggaaggaggaggctataaggaagattgagagtgaacgagaaaaatcagagcgggagaagaatagcctgcggagcgagatagagaggctgcaagccgaaataaaacgcatcgaggagcgatgtcgacgcaagctggaagactccactagagagactcaatcgcagttagaaactgaacgctcccggtatcagcgtgaaattgataaattgcgccagcgcccctatggatcccaccgtgagacgcaaacggaatgtgagtggacagtggacacaagtaaattggtctttgatggactgagaaaaaaagtaactgccatgcagctctacgaatgtcaattaatagacaaaaccacactggataagctcttgaaaggaaaaaagtctgtggaggaggtagcaagcgagatccaaccctttctgaggggtgccggctccattgccggcgcatcggcgagtccaaaggagaaatacagcctcgttgaagccaaacgcaaaaagctgataagcccagagagcaccgtcatgctgctagaggctcaagccgcaacgggcgggatcatagatccgcaccgcaacgagaagttaactgtagacagtgccattgcccgggatctgatcgacttcgacgacagacagcagatatatgcagccgagaaagccatcacaggttttgacgaccccttttcaggaaagacagttagcgtgagtgaggcgattaagaaaaacctcatagatcgggagactgggatgcgactccttgaagcccaaatcgcctcaggcggggtagttgacccagttaattcagtctttttacctaaggacgtcgccttggctagaggactgatcgatagagacctgtatcgaagcctgaacgacccccgggatagccaaaagaatttcgtggaccccgtgacaaaaaaaaaagtttcatacgtacagctgaaagaacgctgccgtatcgaaccccacacagggctgctcctgttgtcagtgcagaaaaggagcatgagcttccaaggcattcgacagccggtgactgtgactgaactggtggatagcggaatacttcggccaagcactgtaaatgaactcgagtctggccagattagctacgacgaagttggcgagcggattaaggactttcttcaaggaagctcgtgtatcgcggggatttacaacgagacaaccaagcaaaagctggggatatacgaggccatgaaaatcggactggtccgtcccggtacggccctggaactcctggaagcacaggccgccacaggctttattgtcgatcctgtctccaacttgaggcttccggtggaagaggcatacaaacgaggtctggttggcattgagtttaaggaaaagcttctcagtgctgagcgggcagtgacgggatataacgacccggagacgggcaatatcatcagcttgttccaggcaatgaataaagagttaatcgaaaagggacacgggatccgactgctggaagcccagattgcaactggcggcatcatcgacccaaaagaaagccatcggctccctgtcgacatcgcttataaaagaggctacttcaacgaggagctctcagaaatcttgtccgacccatctgacgacacgaagggcttcttcgacccaaatacagaggaaaatcttacttacctgcaacttaaggagagatgcatcaaagatgaagagaccggactgtgcctgcttcctctgaaagaaaaaaagaagcaggtgcagacctcccagaaaaatacactacgaaagcgccgagtggtgatcgtagacccagagacaaataaggagatgtctgtccaggaagcgtacaagaagggacttatcgattacgagaccttcaaagagctctgcgagcaggagtgtgagtgggaggaaataaccatcactgggtccgacggcagcactcgagttgtgctggtggaccgcaaaaccgggtcacagtatgacatccaggatgcgatagacaaaggactggtcgatcgaaagtttttcgaccagtataggtccgggagcctgagcctgacacagtttgccgacatgatatccttgaagaatggggttgggacttctagctctatgggtagcggcgtcagcgatgatgttttctcatcctcgcggcacgagagcgtgagtaagatctccactattagctcagtgagaaacctgacaatccgctcttcgtcttttagtgacactctcgaagagtcttcccccatagcagccattttcgacactgaaaacctcgagaagatatctattacggagggaattgaacgcggcattgtggactcaatcaccggtcagcggcttttggaggcacaggcctgcaccggtggcatcattcatcccaccaccggccaaaagctgtccctgcaggatgccgtgtctcagggtgtaatcgaccaagacatggcaacaagactgaagcccgctcagaaggcattcattggattcgagggcgtcaaaggtaagaagaaaatgtctgcagccgaagcagttaaggaaaagtggctcccttatgaggctggccaacggttcttggagttccagtacttaacaggtggactggtggacccagaagtgcatggtagaatctctaccgaagaagccatccgtaagggattcattgacggacgagcagcccagcgcttacaggacacaagtagttatgccaaaatcctgacatgcccaaagacaaagctcaagattagctacaaggatgccatcaacaggagcatggtggaggatattacggggctgagactgctggaggcagctagcgtctcaagcaaaggcctgcctagcccatacaatatgtcttcagctcctggtagtagaagtggatcacggtccggtagccgctctggttcacgctccgggagcaggagcggctcccgacggggtagctttgatgcaaccggcaactcttcttatagctacagctatagtttttcctcctcttctattggccactag

SEQ ID NO: 14894 - DNA, 2862 bp, synthetic construct
  misc_feature 1..2862: note = Description of Artificial Sequence: Synthetic coding sequence
  source 1..2862: mol_type = other DNA
caacaacagcgcgccgagatggatatggtagcgtggggcgtcgatctagcatccgttgagcagcacatcaacagtcaccgaggcatccataactccatcggtgattacagatggcaactggataaaataaaggcagatcttagagagaagtcagccatctatcaactcgaggaggagtatgagaacctgctcaaggctagctttgagcgcatggatcatcttcgacagctccaaaatatcattcaggcaacgtcaagagagatcatgtggataaatgattgtgaggaagaggaactcctgtacgactggagcgataaaaacacaaatatcgctcaaaagcaggaggcgttttctatccgtatgtcacaactggaagtaaaggagaaggagctgaacaaacttaaacaggaatccgaccagcttgtgctcaatcagcaccctgctagtgataaaattgaggcctacatggatacactgcagacccaatggtcctggatcctgcaaataactaagtgtatcgacgttcatttaaaagagaatgccgcgtattttcagtttttcgaagaagcccagtcaaccgaggcctaccttaagggactgcaagatagcattcgtaaaaaatatccttgcgataaaaacatgcccctccagcacctgcttgaacagataaaggaattagagaaggaacgggaaaagattctggaatacaagcgccaagtgcagaatcttgttaataaatcaaaaaagatcgtccagttaaagccccggaacccagattatagatccaataagcctatcatcctgagggccctgtgtgactacaaacaggatcagaagattgtgcacaagggagatgaatgtatcctgaaggataacaatgaaagatcaaaatggtacgtaacaggcccaggaggggtcgacatgctggtcccgtccgtgggcctgatcatacctcctcctaacccactggctgtcgacctgtcatgcaagatcgagcagtactatgaggccattctcgctttatggaaccagctgtacatcaatatgaaaagtctggtgagttggcactattgcatgattgatattgagaaaattcgagctatgacaatagctaagctgaagaccatgcgacaagaggattacatgaagaccattgccgatttagaactgcactatcaggagttcatcaggaacagccagggaagcgaaatgttcggcgatgacgacaagcgaaagatacagagtcaatttaccgatgcccaaaagcactaccaaacactcgtcattcaactgcccggttacccacagcaccagaccgttactacaaccgaaattacccatcacggcacctgccaggacgttaaccataacaaggtgattgaaaccaatagagaaaatgacaagcaggagacatggatgctcatggaactgcagaagattcgaaggcagatagagcactgtgaggggcgaatgaccctgaaaaatctccccctggcagatcagggctcctcccatcacattactgttaagatcaatgaactgaaatctgtccagaacgattcacaggctattgccgaggtgcttaaccagctgaaagacatgctggccaacttcagaggttccgaaaagtactgttacctccaaaacgaggtcttcgggctctttcagaagctcgaaaacatcaacggggtcacagacggctacctgaactctctttgcacagttcgtgccctgttacaggcgatcctccaaaccgaagatatgttgaaagtgtatgaagccagactcacagaagaggagaccgtctgtctcgatttagacaaagttgaggcttaccgttgcggactgaagaaaattaaaaatgatttgaatcttaaaaagagcttgctggctacaatgaaaactgaattacagaaggcgcagcagatccacagtcagacgagccaacagtacccattgtacgacctggatctggggaaattcggagagaaagttacccagctcacggatagatggcaacgaattgacaagcaaatagacttccggctatgggatctcgaaaaacagataaagcagttgaggaactatagagacaactatcaggcattctgcaaatggctgtatgatgcaaaacgtaggcaagatagcctggagagcatgaaattcggcgattcaaataccgtgatgcgattcttgaacgagcagaagaacctccacagtgagatctctggtaaaagagacaagtccgaggaagtgcagaagatcgccgagctgtgtgcgaactcaattaaagactatgaactgcagcttgcttcctatacctcaggactggagaccttgcttaatataccaatcaaacggactatgattcagtccccatctggggtgatattacaggaagctgcagatgtacacgctaggtatattgagttactgacacggagcggggattactaccggtttttgtctgagatgttgaagtccctggaagatctgaagcttaaaaataccaaaatcgaagtgctcgaggaagaacttcggctggcacgcgatgcgaatagcgagaactgtaacaaaaacaagtttctggaccaaaacctccaaaagtaccaagccgagtgttcccagttcaaagctaagctcgcttccctggaagagctgaaaagacaggcagagctggatggcaagtccgcaaaacagaatctggataagtgctacgggcagatcaaggagcttaatgaaaagattacccggctgacatatgagatcgaggacgaaaagcgaaggaggaagtcagtggaagatcgttttgaccagcaaaagaatgactatgatcagcttcagaaggcccggcagtgttag

SEQ ID NO: 14895 - DNA, 6819 bp, synthetic construct
  misc_feature 1..6819: note = Description of Artificial Sequence: Synthetic coding sequence
  source 1..6819: mol_type = other DNA
atgtcgtgcaatggaggatcgcaccctagaattaatacacttggaagaatgattagagctgagtctgggccagacctgcggtacgaggtgacatctggcgggggcggaacgtcaaggatgtactacagccggcggggggtgattaccgatcagaactcagatggttactgtcagacgggtacaatgagtcgtcaccagaatcagaacacaatccaggagctcctccagaattgttcagactgcctgatgagagcggagctaattgttcagcctgagctgaagtacggggacggtatccagctaactcggtcccgagaattagatgaatgctttgcacaggctaacgatcagatggagatcctcgatagcttgataagggagatgaggcaaatgggccagccatgtgatgcttatcagaagagactattacaactgcaggagcagatgagagctctctataaggccatttctgtgcctcgcgtgaggcgtgcctcatcaaaagggggtgggggctacacatgtcagtcaggatcaggatgggacgaatttacaaagcacgtcacttcggagtgcctcggttggatgagacagcagagggctgagatggacatggttgcttggggtgtggacttagcttcagtggaacagcatatcaatagccacagaggtatccacaatagtatcggagactaccgatggcagctcgataagatcaaggctgatctcagggagaagtccgccatataccagttagaagaggaatatgaaaacttgctcaaggcttctttcgaacgaatggatcatttgcggcagctgcagaatattatccaagccactagcagagagataatgtggattaacgactgtgaagaggaggaactcctctatgactggtcagacaaaaataccaatatcgcccagaaacaggaggcctttagtataagaatgtcccagttggaggtaaaggaaaaagaactgaataagctgaagcaggaaagtgatcagcttgtccttaatcagcaccccgccagtgataagatcgaggcctatatggacacgctgcagacccagtggtcctggatactccagataaccaagtgtattgacgttcacttgaaagaaaacgctgcgtactttcagttcttcgaggaggcccaaagcacggaggcctaccttaagggtctgcaagattccattcgcaagaagtacccctgtgacaagaacatgcccctacagcacctcctagagcaaataaaagaactggagaaagagcgcgagaagatcctggaatataagcgacaggtgcagaacttagtaaataagagcaaaaagatagttcagctgaagcctcggaaccccgactacagatccaataaacccatcattttaagagcactgtgcgactataagcaagatcagaaaatcgtccacaaaggtgacgaatgcattctcaaagataacaatgagcgatctaagtggtacgttacaggtccgggcggggtggacatgttggtgccatctgtcgggctaataatacccccgcccaatcccctcgctgtggatctgtcctgcaaaatagagcagtattatgaagcgatcctcgccctatggaaccagttgtatatcaacatgaaaagtctggtttcctggcattactgcatgattgatatcgaaaagattagggctatgaccatcgcaaagctaaagactatgcgccaggaggactacatgaagacaatcgctgatctggagctgcactaccaggagtttatccggaactcacagggatctgagatgtttggcgatgatgataagcggaagattcagtcccagttcacagacgctcagaagcactaccagacgctggtcattcagctgcccggatatccccaacaccaaacggtcaccacaacagagataacgcatcatgggacttgccaggacgtcaatcacaacaaggtgatagaaaccaatcgcgaaaatgacaagcaagaaacctggatgctcatggaactccagaagatacggcggcagatcgaacactgtgaggggcggatgacactcaagaatttgcccctggccgatcaagggtcttcccatcacattaccgtgaaaattaacgaacttaagagcgtgcagaatgacagccaagcaatcgccgaggtgttaaaccaactgaaagatatgctggccaatttcaggggctccgaaaaatactgctacctccagaacgaagtgtttgggttgttccagaagctcgagaacattaatggcgtcactgacggatacttgaattcattgtgtaccgtgagggcgctgctgcaggccatactgcagaccgaagacatgctgaaggtttacgaagcgaggttaaccgaagaagagactgtgtgcctagacctggataaagttgaagcttatcgctgcgggttgaaaaagattaaaaacgacctgaacctcaagaagtcattactggcgactatgaaaaccgaactgcagaaggcccagcaaatacactcacaaacaagccagcagtatcctctgtacgatttagatttagggaagtttggggagaaggttacacagctaacggatagatggcagcggatagacaagcagattgactttagactatgggaccttgaaaagcagattaagcaattgcggaactacagggacaactaccaggctttttgcaaatggctctatgatgctaagcgtaggcaggacagcctcgaatccatgaagtttggcgacagtaacactgtaatgcgctttctcaacgaacagaaaaaccttcactctgagatctccgggaagcgggacaagagcgaagaagtgcagaaaatcgccgagttgtgtgctaactccatcaaagactatgaactgcagcttgcctcttacacatccgggctggagacactcctcaatattcccattaaacgcactatgattcagtctccatctggcgttatcctgcaggaagcagccgacgtccacgcgaggtatattgagctgctgaccaggtctggagattactaccgctttctgtccgagatgctgaaaagtctggaggacctcaagctcaagaacacaaagattgaggttttagaggaggaactccggttggctagggatgccaattcagagaattgtaataagaacaagtttctcgaccagaacctgcagaaatatcaagctgagtgttctcagtttaaggctaagctcgcaagtttggaagagctgaagcgccaggcggagttagacggcaaaagcgccaagcaaaatctggataagtgctacggtcagatcaaagagctgaacgagaaaattacaagacttacatacgaaattgaggacgagaaaaggcgtaggaaatctgtggaggaccgcttcgaccaacagaagaacgactacgaccagctgcagaaagcccgccagtgtgaaaaagagaatctcggatggcagaagctagaatccgaaaaagccataaaagagaaggagtacgaaattgaacgccttagagtgctgctccaggaagaggggacgagaaagagggaatacgagaatgagctggcaaaagcctctaaccggattcaggaatccaaaaaccagtgtacccaggtggtgcaagaaagagaatcactgctcgtgaaaattaaggtgctagagcaagataaggcacgtcttcagcgcctcgaggatgagctgaatcgagcgaagtcgacgctcgaggctgaaacccgagtaaaacagcgacttgagtgcgagaagcagcaaatccaaaacgatctcaaccagtggaaaacccagtacagccgcaaggaagaagccattcgcaagatcgaaagcgaacgcgaaaagtccgaaagggaaaaaaattcccttcgtagcgaaatcgagcgcctacaggccgaaattaaaagaattgaagaaagatgccgcagaaaattggaggattccacccgcgaaacgcagtctcagttagagactgaacgaagcaggtaccagagggaaattgataaattacgccaacgcccatacgggagtcaccgggagacacagaccgagtgtgaatggacggtcgatacgtccaagctagtgtttgacgggttacggaagaaagtgactgcaatgcagctgtatgaatgtcagctgatcgacaagacaactctggacaagctcctcaaaggaaaaaagagcgtggaagaggtagcatcagagatccaaccattccttcggggagccggcagtattgccggggccagcgcgagtcccaaggagaagtatagtttggtggaggccaagcggaagaaactgatcagccctgaaagcaccgtgatgctcctcgaagcccaggccgccactggcgggatcatagacccacatcggaatgaaaaactaactgtggattctgcaatagcaagagacctgattgatttcgatgaccgtcagcagatatatgccgccgaaaaggccattactgggtttgacgatccatttagcgggaagacagtctctgtgtcggaagcaatcaaaaaaaatctcatcgaccgggagacaggaatgcggttgcttgaagcgcagatagcttcaggaggagtagtcgacccagtgaattccgtattcttgcctaaggacgtagctcttgctagaggtttaattgatcgggacttgtaccggtccttgaatgacccgagagactcccagaaaaactttgtcgacccggtgactaaaaagaaagtgtcttatgtacagctgaaggagagatgccgaatcgagccacatacgggattgctgctcttaagtgtgcagaagcggagtatgtcgttccagggaattcgccagcccgtgacagtgactgagttagtcgacagcggtattctgaggccatctacagttaatgagctggaatcaggtcagatttcatatgatgaagtgggggagaggatcaaagattttttgcaggggagctcctgcatagccggcatctataacgaaacaactaaacagaagctggggatatacgaggcaatgaaaatcggcctggttcgacctggcacagccctggaactcctcgaggcgcaagctgcaacaggctttatcgttgacccagtgtctaatcttcgtctcccagtcgaagaggcttacaagaggggtcttgttggcatcgaattcaaggaaaagctccttagcgccgaaagagccgtgaccggatacaatgaccccgagacgggcaacatcatctctctgttccaagctatgaacaaggagttaattgagaaaggtcatggcattcgattattggaggcacaaattgctacggggggcattatcgatcctaaagagtcacataggctcccagtggacatcgcctacaagaggggctatttcaatgaagagctgagtgagatcttgtctgatccatcagatgacacaaaaggtttcttcgacccgaacactgaagaaaacctgacttatcttcaactgaaagaacgctgtataaaggacgaggaaacaggtctatgcttgctgcccttgaaggagaagaagaaacaagtccagacatctcagaagaatacattacgcaagaggagagtggttattgtcgatccagagacaaacaaagaaatgtcagttcaggaggcctacaaaaagggcttaatcgactatgaaaccttcaaagagctgtgtgagcaggaatgcgagtgggaggaaatcactatcactggtagcgatggatctactcgggtcgtgctggtagaccgcaagacaggaagtcagtatgacatacaagatgcgatcgataagggcctggtggacaggaagttcttcgatcagtatcggtcaggctcattgtcactgactcaatttgccgatatgatctcccttaaaaatggggtcggcacgtcctcctctatgggctcaggcgtatcagacgatgtgtttagctcgtcgaggcacgagtccgtctctaaaattagcaccattagctccgtccgcaatctcactatcagaagctcttcgtttagtgacaccttagaggagagctcacccatcgctgcgatatttgacacagagaatctggaaaaaattagtattaccgagggtatcgagcgcggcatagttgattccatcaccggccaaagactactggaagctcaggcctgcacaggcggcatcatccatcccacgacgggccagaagctgagcctccaagatgctgtgagtcagggggtaattgaccaggacatggccactcggctgaaacccgcccagaaagcattcattggcttcgagggcgtgaagggaaaaaagaaaatgagcgccgcagaggccgtgaaagaaaagtggcttccttacgaggccggccagcggttcctcgagttccagtacctgaccggcggcctcgtcgatcccgaagtgcacggacggatctctacagaggaagctatcagaaagggatttattgacgggagagctgcacagaggctacaggacacgtcctcctacgccaaaatcttgacatgccccaaaaccaagctgaagatatcgtacaaggacgcgatcaacagaagcatggttgaggacattactggcttgagattactggaagccgcctccgtatcctccaagggtttgccaagcccatacaatatgagctcagcccctgggagccgatccgggtctcgcagtggctcacgaagtggctctaggtccggcagccgatcaggcagcaggagagggagtttcgacgccactggaaactcctcatattcctattcatactccttttccagctcaagcatcggacactag

SEQ ID NO: 14896 - DNA, 507 bp, synthetic construct
  misc_feature 1..507: note = Description of Artificial Sequence: Synthetic coding sequence
  source 1..507: mol_type = other DNA
atggaaccacctaacctgtacccggtcaaactgtacgtttacgatctctccaagggattagcccgacggctgagtccaatcatgttgggaaaacaactggaaggcatctggcatactagcattgttgtccacaaggacgagtttttttttgggtctggggggatctccagttgccctccaggggggaccctcctcggaccccccgacagtgttgttgatgtcggttctaccgaagttaccgaggaaattttccttgagtacctgtcctcactcggagagtcgctgtttcgtggagaggcctataatctgttcgaacataactgcaacactttctccaatgaggtggcgcagttcctaactggcagaaagataccaagctacattacagacctgccgtcagaggttctgtcaacacctttcgggcaggccctgagaccactgctagattctattcaaatacagccacccggcggaagtagtgtaggtaggcccaacggacagtcttag

SEQ ID NO: 14897 - DNA, 561 bp, synthetic construct
  misc_feature 1..561: note = Description of Artificial Sequence: Synthetic coding sequence
  source 1..561: mol_type = other DNA
atgaagtccgacttttacttccaaaaatccgaacctcatagcctatctagcgaagctctaatgcgccgtgctgtgagcctcgtaactgactctacctctacctttctatcacagaccacatatgcactgatcgaagccatcacagagtacaccaaagctgtttatactctgacaagcttgtacaggcagtacacatctctgctcgggaagatgaatagcgaggaggaagacgaagtctggcaggttatcattggggcaagagctgagatgactagtaaacaccaagaatatctgaagttggagaccacatggatgacggctgtcggtttatccgaaatggctgctgaggccgcctaccagactggcgctgatcaggccagtattacagctaggaatcacatacagctggtgaaattgcaggtggaggaagtgcaccaactgtctaggaaagcagagactaaacttgcagaggcccagatagaagaactgcgccagaagacccaggaggaaggagaggagcgcgctgaaagcgaacaggaggcctacctgcgcgaggattag

SEQ ID NO: 14898 - DNA, 588 bp, synthetic construct
  misc_feature 1..588: note = Description of Artificial Sequence: Synthetic coding sequence
  source 1..588: mol_type = other DNA
atggcagctctaaagagttggttgtccaggtctgtcacttccttcttcaggtaccgacagtgcctttgtgtccctgtagttgcaaatttcaaaaagcgttgcttttctgagctgattagaccatggcacaaaacagtaacaattggattcggcgtcacgctctgcgcggtccccatcgcacaggccgtttatactctgacttctttgtatcgccaatacacgtctcttctcggcaaaatgaactctgaggaggaggacgaagtctggcaggtgatcatcggtgcacgcgccgagatgacatccaagcatcaggagtatctcaagctcgagaccacttggatgaccgctgtgggattatcagaaatggccgccgaggcggcataccagacaggggccgatcaggccagcatcactgctcgaaaccacatccagctggtaaagcttcaggtcgaggaagtccatcagttgtctcgcaaggccgaaacaaaacttgctgaggctcaaatcgaggaactccgtcagaaaacccaggaagagggcgaagagagagctgaaagtgaacaggaagcctaccttagggaggactag

SEQ ID NO: 14899 - DNA, 588 bp, synthetic construct
  misc_feature 1..588: note = Description of Artificial Sequence: Synthetic coding sequence
  source 1..588: mol_type = other DNA
atggccgccttaaagagttggttgtccaggtctgtgaccagtttctttcggtatcgccagtgcctttgcgttcccgttgtggccaattttaaaaaaaggtgtttcagtgaattgatacgcccctggcacaagacggttacgatcggatttggcgtgacgctgtgcgctgtgccgatcgcccaggcagtgtacaccctcacatcgctgtaccggcagtatacttcattattaggcaaaatgaattctgaggaagaagacgaggtctggcaagtcatcattggcgccagagcagagatgaccagcaagcaccaggaatatctaaaattagagaccacttggatgacagcggtaggtttatcagaaatggcagccgaagccgcataccagactggtgccgatcaggcctccattaccgcccggaaccacatacagcttgtgaagcttcaagtcgaggaagtgcaccagctcagcaggaaagctgaaaccaagttagcagaagcccagatcgaagagttacgccagaagacacaggaagagggcgaagaaagagcggaatctgagcaagaagcctacctcagggaggattag

SEQ ID NO: 14900 - DNA, 720 bp, synthetic construct
  misc_feature 1..720: note = Description of Artificial Sequence: Synthetic coding sequence
  source 1..720: mol_type = other DNA
atggctgcactgaaaagctggctgagtcgaagtgtgacctccttctttcgctataggcagtgcctatgcgtgcctgtggtcgcaaattttaaaaaacgctgcttcagcgagctcataagaccatggcataagaccgtcaccattggtttcggggtcactctttgtgccgtgcctatcgcccagaagtccgagcctcactctctaagcagcgaagccctgatgcgcagggctgtatccttggtgaccgactccacctcaactttcctgtcacaaacaacttatgcactgatagaagcaatcactgaatataccaaagccgtgtacacactgacgtccttataccgtcagtacacttccctcttgggcaagatgaatagcgaggaagaggatgaagtctggcaggtgattattggcgccagggccgagatgacgagcaagcaccaagagtacctcaagctggaaaccacatggatgaccgctgtgggactgtctgagatggcagccgaagctgcctaccaaaccggcgccgatcaggcctctatcacagcgaggaatcatatacaactggtcaagctgcaggttgaggaagtgcaccagctcagccgaaaagccgagactaaactggccgaggcacagatcgaggagctgcgccaaaagacccaggaggaaggcgaagagcgggcagagtcggagcaagaggcatacctgcgtgaagattag

SEQ ID NO: 14901 - DNA, 561 bp, synthetic construct
  misc_feature 1..561: note = Description of Artificial Sequence: Synthetic coding sequence
  source 1..561: mol_type = other DNA
atgaagagtgatttctatttccagaagagtgagccccactctttgtccagcgaagccctaatgagaagagccgtgagtctggtgactgatagcaccagcacattcctcagtcaaacaacttatgcactgattgaggcgattacggagtatacaaaagcagtgtatactctgactagtttatatcgccagtatacttctttgctggggaaaatgaattccgaggaggaggacgaagtgtggcaggtgataatcggcgcacgcgctgagatgactagtaagcatcaggagtatctgaagctggaaactacttggatgactgccgtaggactctctgaaatggcggccgaggccgcctaccagaccggcgccgatcaggcttctattaccgcaaggaaccacattcagctggtgaagctgcaggtagaggaggttcaccagctttcgagaaaggccgagaccaagctggctgaggcacagatcgaggagcttaggcagaagacccaggaagagggcgaggaacgggccgagagtgagcaggaggcctatctgagggaggattag

SEQ ID NO: 14902 - DNA, 3822 bp, synthetic construct
  misc_feature 1..3822: note = Description of Artificial Sequence: Synthetic coding sequence
  source 1..3822: mol_type = other DNA
atggagcccccagggggatccctcggacctggacggggtactcgcgacaaaaaaaagggccggtctccggacgaactgccttccgctggcggagacggcgggaaatctaagaaattcacactgaaacggctgatggccgacgaattagagagattcacgtctatgaggatcaaaaaggaaaaagaaaaacccaactcagctcacaggaatagctccgcctcttatggcgatgacccaactgcacagtctttgcaagatgtctccgacgaacaagttctagtcctctttgaacagatgctgctggacatgaacttgaatgaagaaaagcaacaaccactgcgagaaaaggatatcataattaagcgagaaatggttagtcagtatctgtatacctccaaagcaggaatgagccaaaaagaatcctcaaaaagcgccatgatgtatattcaggagttacggtcaggcttacgggatatgcccctcctgagttgccttgagagcctgcgagtgtcacttaataacaatccggtctcgtgggtacagacattcggagccgaaggacttgctagcctccttgacatcttaaagagactgcacgacgaaaaggaggaaaccgcaggatcatatgactcccgcaacaagcacgagataatccgatgcctgaaggcgtttatgaataataaatttggaataaagacaatgctggagacagaagaaggcattctcctcctggtccgtgctatggatcctgccgtgcccaacatgatgattgacgctgcaaagctgctgtcagccttgtgcattctcccacaaccagaagatatgaacgaacgcgttcttgaggccatgacagaacgggctgagatggatgaggtggagcggttccagcctctgttggacgggctgaagtcgggcaccactatcgcccttaaagtcgggtgtttgcagctgattaatgccttgataacacccgctgaggagctcgatttccgcgtccacatcagatccgagctgatgagactgggactccatcaggtcctccaggacctgcgagagatcgagaacgaggacatgagggtccagctgaacgttttcgatgaacagggggaagaggactcttacgatctgaagggccggctagacgacattcgcatggagatggacgacttcaatgaggtctttcaaatcctgctgaacactgtgaaagattcgaaggccgagccacattttctttctattttacaacacctgctgttagtgcgaaatgactacgaagctaggccacagtactacaaactgattgaggagtgtatatctcagatagttctgcataagaatggtgcagatcccgactttaaatgccgtcatctccagatcgaaattgagggccttatagatcagatgattgacaagacaaaggtcgagaagagcgaggcgaaagcagccgagctcgaaaaaaaactcgattctgaactgactgccaggcacgagctgcaggttgagatgaagaagatggaatctgactttgaacagaaactgcaggacttgcagggggagaaggatgcacttcactccgagaagcagcaaatcgccaccgaaaagcaggacctcgaggctgaggtgtcacagctgactggcgaggtcgctaagctgactaaggaactggaagacgccaaaaaggagatggcatccttatcagccgctgccatcaccgtgcctcctagcgttccatccagggcacctgtccctccagccccccctttgcccggcgattccggaaccataatacctccaccccccgcaccaggagattcgactacacctccccctccaccccctccacctcctcccccccctcctttgcccgggggtgtgtgcatcagctctcctccgagcctgcccggaggaaccgcaatttctccccccccacccttgagcggggacgccacgattcctcccccgccccccttgccagagggtgtgggcatacccagtcctagttcactgccaggaggaaccgctatccccccacctccccccctgcccggatctgccagaatccctccacccccacccccgttaccgggcagtgcggggattccccctccacctcctccactccccggcgaagctggtatgccgcccccccctccccctctgccaggcggaccagggataccccccccacctccattccctggcgggcccgggattccaccaccaccgcctggcatgggaatgcctcctccacctcccttcggattcggtgtcccagcagcccccgtactgcctttcggcctgacgccaaagaagctatacaagccagaggtgcagctcagacgtcctaactggtctaagctagtcgctgaggacctttcacaagactgtttttggaccaaggtcaaagaagatcgtttcgaaaacaacgagctgttcgcgaaactcactctgaccttcagtgcacagacaaagagaacaaaaaaagcaaagaaggatcaggaaggtggagaggagaaaaaatcagtgcaaaaaaagaaggtgaaagaacttaaggtcctggactccaagacagctcaaaacctgtccatctttttggggtcattcaggatgccgtaccaggaaataaaaaatgtgattcttgaagtaaatgaggcggtgcttacagaaagtatgatccaaaatctgataaagcagatgcctgaacctgaacagctaaagatgctgtccgagttgaaagatgagtatgacgacttggccgagtccgaacaattcggcgtcgtgatgggcaccgtcccccgcttgagaccaaggttgaacgctatattattcaaactgcagtttagtgaacaggtggagaacattaaacccgagatcgtgagcgttactgcagcatgcgaagagctgaggaagagcgaatccttcagtaacttgttggagataaccctgcttgtcggcaattacatgaacgctggatcccgcaatgctggagcttttgggtttaacattagctttctgtgcaagttacgcgataccaagagcaccgatcagaagatgacgttgctgcatttcctcgctgaactgtgtgagaacgactatcccgacgttctgaaattccccgatgagttggcgcacgtggaaaaggcttcccgggtgagtgctgaaaatttgcagaagaatctggaccagatgaaaaaacagatcagtgacgtagagcgggacgtgcagaacttccccgccgcgactgacgagaaagataaattcgtggagaaaatgactatatttgtgaaggacgcccaggagcaatacaataaactaagaatgatgcactctaacatggaaacactgtacaaggaactcggtgagtacttccttttcgatcctaaaaagttatctgtggaagagtttttcatggacctgcataattttcgaaatatgttcctacaggctgtcaaagagaatcagaagcgccgtgaaactgaagagaagatgagaagagctaagttagcgaaagagaaggccgaaaaggaacgtctcgagaagcagcagaagagggagcagctcatagacatgaacgctgaaggggatgaaacaggcgtgatggactcccttcttgaagctctgcagtcaggcgccgcctttcgccgtaagagaggaccaaggcaggctaacagaaaggcaggatgcgctgtgaccagcctcctggctagtgagctgaccaaggacgacgctatggcggcagtacccgccaaggtgagcaagaactccgagaccttccctactatcctcgaagaagcgaaggagctcgtcggaagggcctcctag

SEQ ID NO: 14903 - DNA, 3810 bp, synthetic construct
  misc_feature 1..3810: note = Description of Artificial Sequence: Synthetic coding sequence
  source 1..3810: mol_type = other DNA
atggagccccctgggggtagcctcgggccaggcaggggaactagagacaagaaaaagggccgcagcccagacgaactgccaagtgcaggaggcgatggaggcaagagtaagaagttcactcttaaaagactaatggctgacgaactcgagcgattcaccagtatgcgaattaagaaggagaaggaaaaacctaatagcgcacaccggaactcttctgcttcttacggagatgacccgacggctcagtcactgcaggatgtgtccgacgagcaggttctggttctattcgaacaaatgctgcttgacatgaacttaaatgaggaaaagcagcaaccactgcgggaaaaggacatcattattaagagagaaatggtgtcccagtatctctatacttccaaggcagggatgagtcagaaagaatcttctaaatcggctatgatgtatattcaggagctacgatcaggactgcgcgatatgccgcttctgtcatgcttggaaagcctgcgcgttagcttgaacaacaacccagtgtcctgggttcagaccttcggcgccgaaggattggccagcctgctggatatcctcaagcggcttcacgacgagaaggaggagaccgctgggtcatatgatagccgcaacaagcacgagatcatccgctgtctcaaggcattcatgaataataaatttgggatcaaaacaatgctggagaccgaagaaggaatactactcctcgtgcgagctatggatccagctgtgccgaatatgatgattgatgctgccaagttgctgtctgccctatgtatcctaccccagcccgaagacatgaatgaacgggtattggaggccatgacggagcgggccgagatggatgaagtcgagaggtttcaaccactgcttgacggactcaagtcaggtaccaccatcgccctgaaggtaggatgcctgcagttgataaatgctctaataactccagccgaggaactggactttcgggttcatataagatccgaattgatgcggctcggcctccatcaggtgcttcaggacctgagagaaatcgagaatgaagatatgcgcgtacagctcaacgtcttcgatgagcaaggggaggaggactcctacgacttaaaagggaggctggatgacatcagaatggaaatggatgatttcaatgaggtcttccagatacttctgaataccgtcaaagattcaaaagctgagcctcactttctcagtattttgcagcacttattgttagtccggaacgattacgaagctcggccccagtactacaaactgatcgaagaatgcatttcccagattgtgctgcataagaatggggctgatccagacttcaaatgccggcaccttcaaatcgagattgagggcttaatagaccagatgattgacaagactaaagtcgaaaaaagcgaggcaaaagcggcagagctggagaagaaattggacagcgaactcacggcccggcatgagctgcaggtagagatgaaaaaaatggaaagtgacttcgagcagaagctgcaggatcttcaaggagaaaaagacgcgctccattccgagaagcagcaaatagcaaccgagaagcaggacctggaagcagaggtgtctcagcttaccggagaggtggctaaactgacaaaggaactggaagatgccaagaaagagatggcaagtctgtctgccgccgccattacggtgccaccgagtgtgccatctcgagcccccgtgcctcccgctccaccacttccaggagattccggaacaataatcccaccaccaccagctccaggtgattccacgacacctccccctccacctccaccaccccctccacccccaccattacctggcggagtctgcatcagttctcccccttctctacctggcgggaccgccatctcacctcctccacccctgtctggggacgctaccatcccccccccccccccgttgcccgagggagtcggcatccccagcccttcgagcctgcctgggggcaccgccattcctcccccccctccactccctggctccgctagaatccctcctccaccgccccctttaccagggagcgctgggatccccccaccaccacctccactgcccggggaagcgggcatgcccccgcctcccccccctctgccaggggggcccggaatccctcccccaccccccttccctgggggacccggcattccccccccacctcccggtatgggtatgccacctccccccccgttcggttttggcgtgcccgccgcgccggttctcccattcggactcacaccaaaaaaactctacaagcccgaagtgcagctgaggagaccgaattggagcaaactggtggccgaggacctcagtcaggattgcttttggacaaaggtgaaagaagataggtttgagaacaatgaattattcgccaaacttacactgacctttagcgcgcaaactaaaaccaagaaggaccaggaggggggggaggagaaaaagagcgtacagaaaaaaaaggtgaaagagctgaaggtgctggacagcaaaaccgcccagaacctgtccatcttcttgggctcatttcgcatgccataccaagagataaagaatgtgatccttgaggtcaacgaagcagtgctgaccgaatcaatgatccaaaatctgatcaaacaaatgcctgaacccgaacagcttaagatgctcagtgagctgaaagatgaatatgacgacctggctgaaagcgaacagttcggggtggtgatggggaccgtacctcgactcagacctaggttgaatgctatcttgttcaaactgcagttcagtgaacaagtcgagaatattaaaccagagatcgtttcggttacggcagcatgcgaagagcttcgaaaaagcgaatctttctcaaatctcctggagatcacactgctggtcggaaactatatgaacgcgggcagtagaaatgccggcgcttttggattcaacataagcttcctttgtaaacttcgggacacaaaaagcacagatcagaagatgacactgttgcacttcctggccgaattgtgcgaaaacgattaccctgacgtgctcaaatttcccgacgagttggcgcatgtggagaaagcaagccgagtttctgccgaaaatctgcagaagaacctagatcagatgaagaagcagatttcagatgtggagcgggacgtacagaacttccctgctgctacggacgagaaagataagttcgtagagaagatgacatcgttcgtgaaagacgcacaggagcagtataataagctgaggatgatgcactctaatatggagacactctataaagagctgggggagtacttcctttttgaccctaaaaagttgagtgtagaggagttttttatggatttacataacttccgcaatatgttcctgcaggccgtcaaggaaaaccaaaagcgtcgcgaaacagaagaaaagatgcgccgcgccaagctggcgaaagaaaaggccgaaaaagaaagattggagaaacagcagaagagagaacagctgatcgacatgaacgcagaaggtgacgagactggggtgatggattccctgcttgaagctctgcagagcggcgccgcatttcgacggaagagaggtcctcgccaggctaacagaaaagcgggctgtgcggtgacttctctgctggcctcagagctgaccaaggatgacgcaatggctgctgtgcctgccaaggtctctaaaaactccgaaacattccccacaatcctcgaggaggccaaagagctggtggggagagcttcctag

SEQ ID NO: 14904 - DNA, 3792 bp, synthetic construct
  misc_feature 1..3792: note = Description of Artificial Sequence: Synthetic coding sequence
  source 1..3792: mol_type = other DNA
atggagcccccaggaggcagcctagggcccggtaggggcactcgggataagaagaaagggcgctcccccgacgagctgccttctgcagggggtgacggcggcaaatctaagaaatttctggaacgttttacctctatgcgcattaagaaggagaaagaaaagccaaactccgcgcacaggaacagctctgcttcttacggagatgaccccactgcgcagagcttgcaagatgtgtctgatgagcaggttctcgtcctcttcgagcaaatgcttctagacatgaacttaaacgaggaaaagcaacagcccctgagagagaaggatataataattaaaagagaaatggtttcacagtatctgtacacaagtaaagctggaatgagccagaaggaatcttccaaaagcgcgatgatgtatatccaggagctccgatcaggccttcgagacatgcctctgttgagctgccttgaatcgcttagagtgagcctcaacaataatccagtaagctgggtgcagacattcggcgccgaggggctagccagcttgctggacatactgaaacggctccatgatgaaaaggaggagaccgccgggagttacgactctagaaataagcatgagatcattagatgcctgaaagcattcatgaacaacaaatttgggattaaaactatgctcgaaactgaggaaggaatcctgctcctagttagagctatggacccagcagtgcctaacatgatgatagatgccgccaaacttctttccgcactgtgtattctgcctcaacctgaggatatgaacgaaagggtgctggaggctatgaccgagagggccgagatggacgaggtggaacgttttcagccacttctcgacggccttaaatccggaacaactatcgccctcaaggtaggatgtctgcagcttatcaatgccctcatcacacccgctgaggagctcgacttcagagttcatatccgtagcgagctgatgaggctaggactccaccaggtgttgcaagatctccgcgagattgaaaacgaggacatgcgggttcagttgaacgtgttcgatgaacaaggcgaggaggactcttatgatttaaagggaaggctggacgatatccggatggaaatggatgattttaatgaagtatttcagatcctattaaataccgttaaagatagcaaagccgagccacactttctttcaattctgcaacatctgctgctggtacggaacgattacgaagcccgcccgcagtactacaaacttatcgaggagtgcatcagtcagatcgtgctgcataagaacggagctgatccggacttcaagtgtcgacacctgcagatcgagattgaggggctgattgaccagatgattgataaaacaaaggtggagaagagtgaggcaaaggccgcggagctggaaaaaaagctggactccgaattgactgcccgccacgagttgcaggtggaaatgaagaagatggagtccgactttgagcagaaacttcaggacctgcaaggcgagaaggatgcactgcacagtgaaaaacagcaaattgccaccgaaaaacaggacctggaagccgaagtgtcccaactcaccggtgaggttgcaaagctgaccaaagagttagaagatgcaaagaaagaaatggcttccctgagcgcagctgcgatcacggtgccaccctccgtgccatcccgggcccctgtgccgccggctcctccactccccggagattcagggacaatcatcccccccccaccagcccctggcgactcaaccacgcccccaccacctccaccccccccgccaccacctcctccactcccaggcggagtctgtatcagctcgcctccttcccttcctggtggaaccgccataagtcctccacctccactgagcggtgacgccaccattcccccccctccccctcttcctgagggggtgggcataccatcaccatcgtctcttccgggaggcacagcaatacctccgccacccccccttcctggtagcgctcggatccctccccctcctcctccactgcccgggagcgccgggatcccacctcccccaccccccttgcccggggaggccggcatgccgccccctcccccgcccctacccggagggcccggcattcccccgccaccgcctttccccggcggccccgggatcccgccaccaccacccggcatgggaatgcctcccccacctcccttcggtttcggtgtgcctgcagctccagtgctcccctttggacttacccctaagaaactgtacaagccagaagttcagcttagacggccaaactggtccaagctggtggccgaggatctgtcacaggactgcttttggacaaaggtcaaagaggacagattcgagaataacgagctgttcgcgaagctgaccctgaccttttcggcgcagaccaagacaagtaaggctaagaaggatcaggaaggaggagaggagaagaaatccgttcagaaaaagaaagtgaaggagctgaaggtactggattctaagactgcccagaacctgtctatcttcctggggagttttagaatgccgtaccaagagataaagaatgtgatactcgaggtgaacgaagccgtgctaactgagtccatgatccagaacctcattaagcaaatgccagagcccgagcagcttaaaatgctgtcagaactcaaggatgaatatgatgacctggccgaatccgaacaattcggcgtagtcatggggactgttcctaggctgaggcccaggcttaacgctattctgtttaagttgcagttttcagagcaggtcgagaacatcaagcctgagatcgtttcagtaactgcagcctgcgaagagctgaggaagagtgaatcgttcagcaacctgctcgagataacattacttgtgggcaactatatgaacgctgggtctcgcaatgctggagcatttggatttaatattagttttttgtgcaagcttcgggacacaaaatctacagatcagaaaatgacattgttgcattttctggctgagctgtgtgaaaacgactatcctgacgtccttaaattccccgacgaattagcccatgtcgagaaggccagtcgggtttccgcagaaaacttacagaaaaacttggatcagatgaagaaacagatcagcgacgttgagcgcgatgtgcagaatttccctgctgcaacggatgagaaggacaaatttgtcgagaaaatgacctccttcgtgaaggatgcacaagagcaatacaataaacttcggatgatgcactctaatatggaaacgctctacaaagagctcggcgagtatttcctgttcgacccaaaaaagctgtcagtggaagagttctttatggacctgcataacttccgtaatatgttcctgcaggccgtgaaggagaatcaaaaaagaagggaaactgaagaaaagatgagaagagccaagctggctaaagaaaaagcagagaaagaacggttagaaaaacagcagaagcgggagcagctgatcgacatgaatgctgagggagacgagacaggtgtgatggacagccttctcgaggcactccagtcaggcgcagccttccgccgcaagaggggccctaggcaggccaatagaaaagctgggtgtgccgtcaccagcctattggcaagtgaactcactaaggacgatgccatggcagccgtgcccgctaaggtatcaaagaatagtgagaccttccctacaattctcgaggaggctaaagagctggtggggagggcctcttag

SEQ ID NO: 14905 - DNA, 3819 bp, synthetic construct
  misc_feature 1..3819: note = Description of Artificial Sequence: Synthetic coding sequence
  source 1..3819: mol_type = other DNA
atggaaccgcccggtggaagtctgggaccaggccgagggacccgggataagaaaaaagggcgctcccctgacgagttgccaagcgctgggggggatggaggcaaatctaagaagttcactctgaaacgtctcatggccgacgaactagagcggtttacttccatgcggataaagaaggagaaggaaaagccaaactccgcccaccgtaactcctccgcctcttatggtgacgaccctactgcacagagcctccaggacgtctctgatgagcaagtcctggtcctcttcgagcagatgctgctcgatatgaacctgaacgaggaaaaacagcaacctctgcgagagaaggatatcataattaagagggaaatggtttcacagtatctgtacacatccaaggccggaatgtctcagaaggaatcttccaaatcggccatgatgtatatccaggaactaaggtcaggtttgagggatatgccattgcttagctgtctggaatccctccgggtgagtctcaacaataatccagtctcatgggttcaaaccttcggggccgagggcctggcctcacttctcgatatactgaagcgcctgcacgatgagaaagaggagacagccggcagctacgactcacgaaacaagcatgagatcatcaggtgcctaaaggcctttatgaacaacaaatttggtatcaaaacaatgctggaaaccgaggaaggtatcttgctgttagtgcgggcaatggatcccgccgttcccaacatgatgattgacgcagcaaagctcctgtccgctctgtgcatactgccccagccagaggatatgaacgaaagagtccttgaggccatgacagagcgggctgaaatggacgaggtagaaagattccagcccttgctcgacggcttgaaatccggcacaactatagctcttaaggtcggttgcctccagctgataaacgctctcataacccctgccgaggagctggactttagagtccacattcgctccgagctgatgcggctaggacttcaccaggtgctccaggatctccgggaaattgaaaatgaggatatgcgagtccagctaaatgtctttgatgagcagggcgaagaagacagctatgacctgaaaggaaggcttgacgacatccggatggaaatggatgacttcaacgaagttttccagatactgctgaatactgtgaaggattccaaggccgagccccattttctcagcatcttgcagcacctgctgctcgtgaggaatgactatgaagcacggcctcaatattacaaactgatcgaagaatgtatttcccagattgtgctccacaagaacggcgcagatccagatttcaaatgtcgacatctgcagatcgagatagaagggctgatcgatcagatgattgacaagactaaagtcgaaaaaagcgaagctaaagccgcggaactggagaaaaaactcgacagcgagctgaccgccagacatgagctacaagtagaaatgaagaaaatggagagcgacttcgagcagaaactgcaggatttacagggcgagaaggatgctctacacagcgagaagcaacaaattgctaccgagaagcaggacttggaggccgaagtgtcccagctaacaggggaggtagctaagttgaccaaggagctggaagacgctaagaaggagatggcctccctgtctgccgcagccattactgttcccccatccgtgccttcccgggctccagtgccacctgcacctccacttcctggagacagcggaacaatcatcccacctccccccgcgccaggtgacagtaccactccgccaccccccccccctcctccccccccacctccacccttgccaggtggtgtttgcataagtagtcctccaagcctgcctggcggtacagcgatcagccctccccccccactgtctggtgacgctacgatccctcccccaccccctttgcctgaaggggtcggaatcccctctcccagttcactccccgggggaacggcaatcccccctcctcccccccttccgggcagtgccagaatcccgccccctccaccacccctgcccggatctgctggaatccctcctcccccacctccgctgccaggggaagcaggcatgcctcccccacccccgcccctgcccggcggcccaggcataccccctccccctcccttccccggaggccccggtatacctccgcctcctccggggatgggcatgccacctccgcctccttttggcttcggagttccagcagctccagtgttaccttttggcctgacgcctaagaagttgtataaaccagaggttcagctgaggagaccaaattggtctaaactggtggcagaagacctctctcaggattgtttctggacaaaggtcaaggaagatcgattcgaaaataatgaactgtttgcgaaactcactctgaccttttctgcccagactaagacctccaaagcaaaaaaggatcaagaaggtggcgaggaaaaaaaatctgttcagaagaagaaggtcaaggagttaaaagtgctagacagtaagactgctcagaatcttagtattttcctgggcagcttcaggatgccttaccaggaaatcaagaacgtgatcttagaagtgaatgaggccgtgctgactgagagtatgattcagaacctcattaagcaaatgcccgaacctgagcaattgaagatgctgtccgagcttaaagatgaatacgatgatctggcagaatccgagcagtttggggtggtgatggggacagtcccaagacttcgccctcgattgaatgcgatcctgttcaagctgcagttcagcgagcaggtggagaatattaagccagaaattgtgagcgttactgccgcgtgcgaggaactccgtaagagtgagagcttctcaaacctgctcgagattaccctgctggtgggaaattatatgaacgctggctcccgaaacgcaggcgcttttggctttaatatctcctttctctgtaagctgcgggacactaagtccacagatcagaaaatgacacttctgcactttctcgctgaactgtgcgaaaacgattaccccgacgtgctgaagttccctgatgagctggctcatgtcgagaaagcatcacgggtgtcagcagagaatctgcaaaaaaacctggaccagatgaagaagcagatttccgacgtcgaaagagacgtccaaaactttccggctgctacggacgagaaggataagttcgtcgaaaagatgacgagctttgtgaaggatgcccaggaacagtacaataagctcagaatgatgcattccaacatggagaccctgtataaggaactgggagagtactttctgttcgatcctaagaaactgtctgtggaggagttcttcatggatctgcacaatttcagaaacatgttcctgcaagctgttaaggagaaccagaagcgaagagagactgaggaaaagatgaggcgcgcaaaactggccaaagaaaaagccgagaaagagcggctggagaagcaacaaaaaagagagcagttaattgatatgaatgctgagggagatgagaccggggttatggacagcctgctggaggccctccagtccggggctgctttccgtagaaagcgcgggccccggcaggcaaaccgtaaggccggatgtgcagtcacaagcctgctggcaagcgaactgaccaaggatgacgccatggctgccgtgccagcaaaggtctctaagaattccgagactttcccgaccattcttgaggaggcaaaagagctagtcggccgcgcatcctag

SEQ ID NO: 14906 - DNA, 3747 bp, synthetic construct
  misc_feature 1..3747: note = Description of Artificial Sequence: Synthetic coding sequence
  source 1..3747: mol_type = other DNA
atggagcctcctgggggctcccttggaccagggcgcgggacacgcgataaaaagaaggggaggagtccagacgaactccccagcgccggcggcgatgggggaaagtccaaaaagtttctggagaggttcacttccatgcggataaagaaagagaaggagaaacccaattccgcacaccgcaatagctcagcaagctatggtgacgatcccacagcgcagagcctgcaggatgtgagtgatgagcaagtgttggtgctgttcgaacaaatgttgttggacatgaatctgaacgaagagaagcagcagcctctcagagagaaggacatcattataaaacgtgagatggtctcacagtatttatatacttcaaaggcgggtatgtcccagaaggaatcatccaaaagcgctatgatgtacattcaggagctgcgttccggcttgcgcgacatgcccttactctcctgcctggagagcctccgggtcagtctgaataataacccggtaagttgggtgcagacatttggagcagagggattggcatcgctgctcgacattttgaaaagactgcatgacgaaaaagaagagactgctggaagctacgacagcagaaacaagcatgaaattattagatgcctcaaggcattcatgaacaataagtttggtatcaagaccatgctggagacagaagaagggattctgctattggtgagggctatggaccccgctgttcctaacatgatgattgacgccgcaaagctcctgagtgctctatgcatactcccacagcccgaggacatgaacgagagggttctggaggcaatgacagaacgggcagaaatggacgaagtggagcggtttcagccactgctggacggcctgaaatctggcaccacgattgctttaaaggtgggatgtcttcagctaatcaatgccttaataactccggctgaagaactggactttagggtgcacattcgctcagagcttatgcgactcggcctacatcaggtactgcaggacctgagggaaatcgaaaacgaggacatgcgggtccagttgaacgtgtttgatgagcaaggagaagaggacagttacgacctgaaggggcggctggacgacatccggatggaaatggatgacttcaacgaggtgttccagatcctgttgaatacagtgaaagactccaaagccgagccacactttcttagcattttgcaacatctgctgctcgtgagaaacgactacgaggcccgaccacagtattataaactgatcgaggagtgcatttctcagatcgtgttgcataagaacggagctgatcccgattttaagtgccgccatctgcaaatcgaaatcgaggggcttatagatcagatgattgacaaaacaaaagtcgaaaagtccgaagctaaagctgcagagctcgagaagaagctggacagtgagcttacagcacgacacgagcttcaggtcgagatgaagaaaatggaaagcgattttgaacaaaagctgcaggatctgcaaggagagaaggatgctctccactccgaaaaacagcagatcgctactgaaaaacaggatcttgaggccgaggtgtcccagctgaccggggaggtggcaaagctcacaaaggagctagaggatgccaagaaggagatggcctctttgtccgcggcggccatcaccgtcccaccttctgtaccttcccgggcccccgtgccacctgccccgcccctccccggtgacagtggaaccattatcccgcccccaccggcccccggagactctactacacctccaccccctcccccccctccaccccccccaccaccccttcccggaggaaccgctatttctcccccacccccactgtctggagacgcgaccatccccccaccccctccgcttcctgagggagtcggaatcccatctccatcgtctcttcctggcggcacagcaatccctccccctccacccctgcccggctcggctcggatccccccaccacccccccctctgccagggagcgcgggtatccctccaccccccccccccttacctggcgaggccggaatgccaccacctccacccccattaccgggagggcccggtatcccacccccccctcctttcccgggcggcccgggaattcccccaccacctccaggcatgggcatgcctccgcctccaccctttggatttggtgtccctgctgcacccgtgcttccattcggactgacccctaagaaactctacaagcccgaggtgcagctgcggcgacccaattggagcaaactggtagctgaagacctcagtcaggattgcttctggaccaaagttaaagaggatcgctttgagaacaacgaacttttcgctaagctcactttaacgttcagtgcgcagacaaagactaagaaggatcaagaaggaggcgaggagaaaaagtcagtccaaaaaaagaaagtaaaagagcttaaggtgctagacagcaagacagcccaaaatttgtcaatctttcttggcagtttccgtatgccctatcaggaaataaaaaacgtcatcctcgaagtcaacgaggccgtcctgactgaatcaatgatccagaacctgatcaaacagatgccagaacccgaacagctgaagatgctgagcgagctgaaggatgaatatgatgacctggcggaaagcgagcagttcggggtcgtaatgggaactgttccccgcctgcgcccacggttgaacgcaattttattcaagctccagttttccgaacaggtggagaacattaaacccgagatcgtctcggtaacggctgcctgcgaggagctgagaaaatctgagtcattctccaaccttctcgagatcaccttgctagttggcaactacatgaatgccggtagtcgtaacgccggcgcttttggcttcaacatatccttcctgtgtaagctgagagacacaaaatcaactgaccagaagatgacactcctccactttctggcagaactgtgtgagaacgactaccctgacgtgctcaagttccctgacgaactcgcgcacgtcgagaaggctagtagagtgtctgctgagaacctccagaagaatcttgatcaaatgaagaaacagattagcgacgtcgagcgggatgtgcagaactttccggctgccacagatgaaaaagataaattcgtcgagaagatgacaatcttcgtgaaggatgctcaggagcaatataataaactgagaatgatgcactccaatatggaaaccttgtacaaagaattgggcgagtatttcctctttgatcccaaaaaactttccgtggaggagttcttcatggacctgcataactttaggaacatgttcttacaagcagttaaagagaatcagaaacgtcgcgagactgaagaaaagatgagaagggccaaactcgcaaaagaaaaagccgaaaaagagaggctggaaaagcaacagaaaagagaacagctaatcgacatgaacgctgaaggggacgagaccggagtgatggacagcctccttgaggcactccagtctggggctgccttcagacggaaacgggggccgaggcaggcaaataggaaagctggctgcgctgtaacaagcttgctggcgtccgaactcactaaggatgatgccatggcagcggttccggcgaaggttagtaagaacagtgagacctttcccaccatattggaggaagccaaagaactggtgggtcgtgcgtcctag

SEQ ID NO: 14907 - DNA, 3795 bp, synthetic construct
  misc_feature 1..3795: note = Description of Artificial Sequence: Synthetic coding sequence
  source 1..3795: mol_type = other DNA
atggaaccacccggcgggagcctaggccccggccgtggcacaagggataagaaaaagggtcggagtccagacgagctcccgagcgccggtggcgacgggggcaagagcaaaaagttcctcgagcggttcacctctatgcgcattaagaaagaaaaagagaagccaaattcagcgcatagaaattcctccgcaagctacggtgatgatcctacggcccagagtctgcaagacgtgtcggacgagcaagtccttgtcttgttcgaacagatgttactggacatgaaccttaatgaagagaagcagcagccactgagagagaaggatataataatcaagcgggaaatggtgagccagtatttgtacacctccaaggccggaatgtctcagaaagaatctagtaaaagtgctatgatgtacattcaggagctcagaagtggcctgagagatatgccactactgtcttgtctcgagtccctccgcgtctctctgaataataaccccgtaagctgggtgcagacctttggtgccgaagggctggcgagcctgctcgatatactgaaaagactgcatgatgagaaggaggaaaccgctggctcctacgattcccgaaataagcacgagattataagatgtctgaaggcattcatgaataacaaattcgggatcaaaactatgcttgagaccgaagagggaatcctgctgttggtgcgggccatggatcctgccgtccccaatatgatgatcgatgctgcaaaactgctcagcgctctatgtatactgccccagcccgaagacatgaatgagcgggtgctagaggccatgacggaaagggcggaaatggacgaggtggagagattccagcctctgctcgacgggttgaagagcggtaccaccatagccctgaaagtgggatgcttgcagctgattaatgccctgataacccccgctgaggaactggattttagagtccatataagatccgaactgatgcgcctcggactacatcaggtgcttcaagacctgagagagatcgaaaacgaggatatgagagttcagcttaacgtcttcgatgaacagggcgaggaggactcatacgacctaaagggccgcctggacgacataagaatggagatggatgatttcaatgaggtgtttcagatcttactgaatactgtgaaagactccaaagctgagccccacttcttgtcgatcctgcagcacctacttctggtccggaacgattacgaggcaaggcctcagtactacaagcttattgaggagtgcatatcacaaattgtactgcataaaaatggtgccgaccccgactttaagtgtcgccatttgcaaatcgagatcgagggtttgatagatcagatgattgacaaaaccaaagttgagaaatctgaggctaaggctgccgaattggagaagaagctggatagcgaactcactgcaagacacgagctgcaggtcgagatgaaaaaaatggagagcgatttcgagcagaagctccaggatttgcagggagagaaggatgcactgcactctgaaaaacagcagattgctactgagaagcaagacctggaggccgaagttagccagcttaccggggaagtcgccaagctgaccaaggaactggaagatgcaaaaaaagaaatggcttccctttcagccgccgccattactgtccctccctcagtgccctcacgggcccctgtgccaccggctccgcccctgccgggtgactctggtactattatccctccgccgccagctcccggggatagcacaacccctcctccccctcctcccccacccccaccacccccgccacttcccgggggagtgtgcatttcctcacctcctagcctgccagggggcacagctattagccctcctccacctttaagtggggatgctactattccgccccccccccccttgccagagggcgtaggtattccttccccaagctctctgcccggcggcaccgcaattcctccccccccacctctgcccgggtctgccaggataccacccccgcccccccctctaccgggaagcgcgggaattccacctccacctccacccctcccgggcgaggcggggatgcccccaccacctccgcccctcccgggtgggccaggaatcccccctcccccacctttccctgggggccctggcatccctcctcctcctcccgggatggggatgcctccccctcccccgttcggcttcggggtgcccgctgcccccgtgctcccctttgggctgacccccaagaaactttataaaccggaggtccagctccgccgccctaactggagtaaattagtggccgaggacctgagtcaggactgcttctggactaaagtgaaagaggatcgtttcgagaataacgaactgttcgccaagctgaccttgactttctcagcccagacaaagagaaccaagaaggctaagaaggaccaggagggaggagaggagaagaaatcagtccaaaaaaaaaaggttaaggaactgaaggttttggatagtaaaaccgctcagaatttatcaattttcctcggtagttttcggatgccctatcaggagataaagaatgtcatactcgaagttaacgaggccgtgctgaccgaatccatgatccagaatcttatcaagcaaatgcccgagcccgaacaacttaagatgctcagtgagttgaaagacgaatacgatgacctcgctgaaagtgagcagttcggcgtggtgatgggcactgtaccaaggttgagaccaaggctgaacgcgattttgttcaaactgcaattttcagagcaggtcgaaaacattaagccagaaattgttagcgttacagcagcctgtgaagagctcagaaagagcgagtcgttctccaacctgttggaaattaccctactagtaggaaattacatgaatgctggctccaggaacgccggtgccttcggttttaacattagctttctctgcaaacttagggataccaagtctaccgatcagaaaatgaccctgctgcacttcctcgctgaactatgtgagaatgattatccagatgtgctgaagttccctgatgagttggctcatgtcgaaaaagcatccagagtgagtgcagaaaacctccagaagaatctggatcaaatgaagaagcaaatcagtgacgtggaacgcgacgtccaaaattttcccgcagccaccgacgaaaaagataagttcgtcgaaaaaatgaccattttcgtcaaggacgcgcaagaacaatataacaagctgagaatgatgcattcaaatatggaaaccctctataaagagcttggcgagtacttcttattcgatccaaaaaagcttagcgttgaggagttcttcatggatctgcacaactttcggaacatgttcctgcaggccgtgaaggagaaccaaaaacgaagggagaccgaagaaaagatgagacgggccaaattagcaaaggagaaggccgagaaggaacggctggaaaagcagcagaagagggagcagttaattgacatgaatgctgaaggcgacgaaaccggtgtgatggacagcctgctggaagcccttcaatcaggagcggcatttcgtaggaagaggggccccaggcaggccaacagaaaggctggctgtgctgttacgagtctcctggccagcgaactcaccaaggacgacgcaatggccgccgtgccagccaaagttagcaagaactccgagacctttcccaccatcttagaggaggccaaggagctggtaggccgcgcatcctag

SEQ ID NO: 14908 - DNA, 855 bp, synthetic construct
  misc_feature 1..855: note = Description of Artificial Sequence: Synthetic coding sequence
  source 1..855: mol_type = other DNA
atggccagcttgtccgcagcagcaatcacagtcccccctagcgtcccctcccgggctccagtgcctcccgctccaccactgcctggcgacagcggaacaatcatacctccgccacctgctccgggagattccacaacccccccacccccccctccaccaccgccacccccaccccccctgccggggggcgtctgtatttcgtcccccccttcgctccccgggggaacagctattagccctccaccgccactttcaggcgacgccaccattcctcctcccccccccctgcccgagggagtcgggattccatctccatcctccctgccaggcggtactgccattcctcctcctcctccgttgcctggtagcgccaggatcccacctcctccaccccctctcccagggtccgctggtatccctccacctcccccaccactgcccggagaggccggaatgccacctccccctccccccctccccggaggaccggggattcccccaccaccgcccttccccggaggtccaggtataccaccccctcctcccggcatggggatgcccccgccgcctccttttggattcggagtgccagcagcccccgttcttccatttggtctgacaccaaagaagctgtacaagcccgaagtccaactgcgaaggcctaactggtctaaactagtggccgaggatctgtcacaagactgtttctggacaaaagtgaaggaagatcgttttgaaaacaatgagttatttgcgaaactcacacttacattttctgcgcagactaaatctgaaaaggccaagaaagaccaagaggggggcgaggagaagaagtctgtgcagaagaagaagtag

SEQ ID NO: 14909 - DNA, 513 bp, synthetic construct
  misc_feature 1..513: note = Description of Artificial Sequence: Synthetic coding sequence
  source 1..513: mol_type = other DNA
atgtactgccagttcgccagttttcagtacacatgccagccatgccgggggcagcgaatgttgtgcacccgggattcggagtgctgtggcgatcaactgtgcgtctggggacactgcaccaagatggctacaagaggctccaacggcaccatctgcgataatcagcgagactgccagccaggcctgtgctgtgcttttcagcgaggcctgctttttccagtctgtacccccctgccagtagaaggcgagctgtgccatgaccccgcctcgcgtctcctggatctgattacttgggaactggaaccggacggagcactcgaccgctgcccttgtgcatccggtcttctgtgtcaaccgcatagtcactccctcgtgtacgtatgtaaacccaccttcgtggggagcagggaccaggatggggaaatactgttgcccagggaggtgcctgatgaatacctggccgctagttggagacgctgtgcaagatcttggaggacttggcgcggcgcctag

SEQ ID NO: 14910 - DNA, 1053 bp, synthetic construct
  misc_feature 1..1053: note = Description of Artificial Sequence: Synthetic coding sequence
  source 1..1053: mol_type = other DNA
atgcaacggctcggggcaactctgctatgcctgctccttgcagccgcggttcccacagccccggctcctgctccgaccgccacttctgccccagttaagcccggccctgccctctcatatccccaagaagaggccactcttaatgagatgttccgggaggtcgaggagttgatggaagatacacaacacaagctaaggagtgcagtcgaagaaatggaagccgaggaagcggccgcgaaagcatcttcggaagtgaacctcgctaacctgcctccttcttaccataacgagacaaacactgacaccaaggtcggcaataatacgatccatgttcaccgagaaatccataagattaccaacaatcagaccggccagatggtgttttcagagacagtgattactagtgtgggagatgaagaggggcggcgctctcatgagtgcataatagacgaggactgcggaccgagcatgtactgccagtttgcatccttccagtacacttgccaaccgtgcagaggccagcgaatgttgtgcacacgagacagcgaatgttgcggggatcagctgtgcgtctgggggcactgtaccaagatggccacccgtgggagcaacggaactatctgcgacaatcagcgggattgccagcccggcctgtgctgtgccttccagagagggctgttgtttcccgtgtgcactcccctgcctgtggagggagaactttgtcatgatcctgcgtcccgactgttggacttaattacttgggaactggagcctgacggcgctcttgataggtgtccgtgcgcaagcggcctcctctgtcagcctcacagtcacagcttagtgtacgtgtgtaagcctaccttcgtcggttcacgggaccaggacggtgagattctgcttccgagagaagttcccgatgagtacgaggtggggtcttttatggaagaagtgcgtcaagaattagaagacctcgaacgctcattaaccgaggagatggcattaagggagcctgccgccgccgcagcggccctgttggggggcgaagagatttag

SEQ ID NO: 14911 - DNA, 882 bp, synthetic construct
  misc_feature 1..882: note = Description of Artificial Sequence: Synthetic coding sequence
  source 1..882: mol_type = other DNA
atggaagatactcagcacaagctgagatctgcagtggaagaaatggaagccgaggaggccgccgccaaggcaagttccgaggtgaacttggctaatctcccgccgagctaccataacgaaactaacactgatactaaggttggaaataataccatacacgtacaccgggaaattcacaagattacaaataaccagaccggccaaatggtgttttccgaaactgtgattacttcagtgggggacgaagagggtcgcagaagccacgagtgtatcatcgatgaggattgcggcccctccatgtactgtcagtttgcctcctttcaatatacatgccaaccatgccgaggccagcggatgctgtgtactcgagatagcgaatgttgcggcgaccaactatgcgtgtgggggcactgcactaaaatggccactaggggatccaacgggacgatctgtgacaaccaaagagattgccagcctggcctatgttgtgccttccaacggggcttgctgttccccgtgtgtactccattgcccgtggaaggtgaattgtgtcacgaccctgcatctcgtctcttagatttaatcacatgggagctggaacccgatggagccctggatagatgcccgtgtgcctccgggctgctatgtcagcctcactcgcacagtttagtgtacgtctgtaagccaacctttgtcggaagtagagaccaggatggcgagattcttttgccaagggaggttcccgatgagtacgaagtgggatcattcatggaggaagtgagacaagaactagaagatctggagcgtagtctgactgaggagatggccttgagggagcccgcggccgccgccgcggctctactgggaggggaagagatttag

SEQ ID NO: 14912 - DNA, 1053 bp, synthetic construct
  misc_feature 1..1053: note = Description of Artificial Sequence: Synthetic coding sequence
  source 1..1053: mol_type = other DNA
atgcaacgtttaggcgctaccctcctgtgtctcctactggctgccgcagtgcccactgcaccagcacccgcacccaccgcaacgtcggcgcccgtgaagccgggacctgcactatcttacccccaggaggaagccactctcaacgaaatgttcagagaggttgaggaactgatggaagatacgcaacataaactgcgaagcgccgtagaggaaatggaggcagaggaggccgctgcaaaagctagctcagaggtgaatctcgcgaacctgcccccttcatatcataatgagacaaataccgataccaaggtgggaaacaacaccatccatgtacacagggaaatccacaagattacgaataaccaaactggccaaatggtgtttagtgagaccgtgatcacctccgtgggtgatgaggagggaaggagatcccatgaatgcatcatcgacgaagactgcggcccatcaatgtactgtcagttcgcgagtttccaatacacctgccagccctgccgcggacagagaatgttatgcacccgggacagtgaatgttgcggagaccagttgtgcgtatggggccactgcacaaagatggcaacacggggctccaacggaaccatttgtgacaaccagagggattgccagccaggcctgtgctgcgcctttcagcgcggcttgctcttccccgtgtgtacccccctgcccgtggagggtgaattatgccacgacccagcttcgaggctgttagacctcataacatgggagcttgaacctgacggggcactagatcgttgtccatgcgcttccggactgctttgccagccccattctcattctcttgtatatgtttgcaagcccactttcgttggaagccgcgatcaggatggcgaaatccttctgcccagggaagtgcccgatgagtacgaggttgggagtttcatggaagaggtccgtcaagagctagaggacttggagcgaagtctcactgaagaaatggcactgcgcgaacctgccgcagctgctgcagctctgctagggggcgaagaaatctag

SEQ ID NO: 14913 - DNA, 969 bp, synthetic construct
  misc_feature 1..969: note = Description of Artificial Sequence: Synthetic coding sequence
  source 1..969: mol_type = other DNA
atgcagcgcctgggggccacccttctatgtctcctgctcgctgcagctgtgcccacggcccccgccccagctcccaccgctacttcagcccctgtgaagcccggcccagccctgagctatcctcaagaagaagctaccctgaacgagatgttcagagaggtggaggaactcatggaggatactcagcacaagttgcgcagcgccgtggaggagatggaggccgaggaggcagcagcaaaagcctcttcagaggtgaacctggctaacctccctccgtcctatcacaacgagaccaacacagatacaaaggttgggaacaataccatccacgtccaccgagaaattcacaaggagtgcattatcgacgaagactgcggtccaagcatgtattgtcagttcgccagctttcagtacacctgtcagccgtgtagggggcagaggatgctgtgtacacgcgatagcgagtgctgtggtgaccagctatgcgtgtgggggcattgcaccaaaatggctacacgcggttctaatggaacaatctgcgacaatcagagagactgccaaccaggactctgttgtgctttccagcgaggacttctatttccagtgtgtactccgctgcccgtagagggcgaactgtgtcatgacccggctagccggctgttggacctgattacttgggagctcgaacccgatggtgctctggatcgatgtccatgcgccagtggactactatgccagcctcactcccacagccttgtttatgtctgtaagccgacttttgtggggtccagagaccaggatggcgagatcctacttccacgcgaggtccctgacgagtatgaagtgggctccttcatggaggaggtcaggcaggagctggaagatctcgaaagatccctgaccgaggagatggccctcagagagcccgccgctgccgcagcggctctcttaggcggcgaagaaatctag

SEQ ID NO: 14914 - DNA, 708 bp, synthetic construct
  misc_feature 1..708: note = Description of Artificial Sequence: Synthetic coding sequence
  source 1..708: mol_type = other DNA
atgcagagattgggtgcgactctgctatgtcttttgcttgccgcagctgtgccaaccgctccagcccccgcaccaacagccacgagcgcgcctgtgaagcctggccccgcactgtcctatccgcaggaagaagccacattaaacgaaatgttccgagaagtggaagagctgatggaagatacgcagcacaaactgcggtccgcagtggaggaaatggaagctgaggaggccgccgcaaaggccagttctgaagtcaacttggccaacttgcctccaagctaccacaacgagactaacacagatacaaaagttggcaataacaccattcacgtccaccgagaaatccataagatcactaacaaccagacgggacagatggttttctcagagaccgttatcacctctgtgggcgatgaagaaggaagaagatcgcacgagtgcatcattgatgaggactgcggccctagtatgtactgccagtttgctagtttccagtatacctgtcaaccctgtcggggccaaaggatgctgtgcacacgtgactccgagtgttgcggagatcaactttgcgtctggggccattgcaccaagatggccaccaggggctccaacggcaccatttgtgacaatcagcgagactgccagcccggcctgtgctgtgcgtttcaaagggggctgctgtttcccgtttgtacaccactcccctag

SEQ ID NO: 14915 - DNA, 2301 bp, synthetic construct
  misc_feature 1..2301: note = Description of Artificial Sequence: Synthetic coding sequence
  source 1..2301: mol_type = other DNA
atgaaaaccccttggaaggttcttctcgggctactcggtgcagccgccttggtgacaatcatcaccgtgcctgtggttctgctgaataaaggtaccgatgacgccacagcagacagcaggaaaacatacacactgacagattatctcaagaatacctacaggctgaaactgtattctcttcgttggatatccgaccatgagtatctttataaacaagaaaacaacatcctggtattcaatgccgaatatgggaattcatccgtctttttggaaaactcaactttcgatgaattcggacattctatcaacgactactccatttctccggatggccagttcattctgctggaatataattatgtcaaacagtggagacacagctacaccgctagctatgatatctacgatctgaacaagcggcagttgataaccgaggagagaatcccaaataatacgcaatgggtgacatggtcccctgtaggacacaagttggcctatgtgtggaataatgacatctatgttaaaatcgaacctaacctgccaagttacaggatcacttggacaggaaaggaggacatcatctataatggaataactgactgggtctacgaagaagaagtgtttagtgcttattccgccctttggtggtcaccaaatgggacatttcttgcctacgctcagttcaatgacacagaggtgcctctgatagagtacagcttctactctgacgaatcacttcagtatcctaagaccgtgcgcgttccatatccaaaagcgggagcagttaatccaaccgtgaagtttttcgtcgtcaacaccgatagtctgagttcggtcacaaacgccactagcatacagatcactgctcctgcttccatgcttattggcgatcactatctgtgtgacgtaacttgggcaacgcaggagcggatcagccttcagtggttgagacgtattcagaattactcagtcatggacatttgtgactacgatgagtctagcggaagatggaactgtctagtggcacggcagcacattgagatgagtactacaggctgggtcggcaggtttcgcccgagcgagcctcacttcaccctggacgggaactctttttacaagataatctctaacgaggagggatatcgtcacatctgttatttccagatcgacaagaaagattgcacatttattacgaagggaacttgggaggtcatcggtatcgaggctctgactagcgattatctctattatatatctaacgaatataagggcatgccgggaggtcgaaatctgtacaaaatccagctgagcgactatactaaagtcacttgtttatcttgcgagctcaatccagaacgatgtcagtactatagcgtgtcctttagtaaggaggcgaaatattaccagttgcgctgctccgggccaggcctccccttatacacactgcacagcagcgtgaatgacaaaggactgcgcgttctcgaagacaattctgctctggacaaaatgttgcagaacgtgcagatgccatcaaaaaaactggacttcatcattctcaatgaaactaagttttggtatcagatgatactccccccccattttgacaagagtaaaaaatacccactcttgctggacgtttacgctgggccctgttcccagaaggccgacacagtgtttcggctcaattgggcaacgtaccttgcctctactgagaatatcatcgtcgcatcctttgacgggcgcggatccggatatcagggagacaagattatgcacgccatcaatcgtaggctcggcactttcgaggtcgaagatcagattgaggcagccagacagttcagtaagatgggattcgtggacaataaacgcatagcaatatggggttggagttatggcggctacgtgacttccatggtcctggggtctggaagcggcgtctttaaatgcggcattgctgtggcacctgtctcccgatgggagtattatgactcagtgtacaccgagcgatacatgggcctgccaacgccagaagacaatttggaccactaccgcaacagcacagtcatgtctagggccgagaattttaaacaggtggagtatctccttatacacggtaccgcggatgacaacgttcacttccaacagtcagcgcagatttccaaggcccttgtggacgtcggcgtggatttccaagcaatgtggtacacagatgaggaccatggtatcgcctcatcaaccgcgcaccagcatatatacacccacatgtctcatttcatcaagcagtgtttcagtttgccgtag

SEQ ID NO: 14916 - DNA, 645 bp, synthetic construct
  misc_feature 1..645: note = Description of Artificial Sequence: Synthetic coding sequence
  source 1..645: mol_type = other DNA
atgaacgtctttcgtattctcggagatttatcccacctactggctatgattctcttactgggtaagatctggcgctccaaatgttgcaaagggatatccggcaagtcacagattcttttcgcgctcgtgtttacaacgcgatacctggatctgtttactaacttcataagtatatataatacagtgatgaaggttgtgtttttgttgtgtgcatacgttacggtctacatgatttacggaaaattcagaaagacctttgattccgagaacgataccttcaggttggagtttctgctggttccagtgatcgggctctcgttcctggagaactacagcttcaccctgttagaaatcttatggacattctccatatatttggagtcagtcgcaatacttcctcaactatttatgatctccaagactggggaggcggaaacgatcacaacccactatttgttcttcctgggactttatagagctttgtacctggccaattggatacggaggtaccagacggagaacttctatgatcaaatagctgtcgtgagcggagtggtccagaccatcttctactgtgactttttctatctctacgttacaaaggtcctgaaaggcaaaaaactgtccctacccatgcccatttag

SEQ ID NO: 14917 - DNA, 498 bp, synthetic construct
  misc_feature 1..498: note = Description of Artificial Sequence: Synthetic coding sequence
  source 1..498: mol_type = other DNA
atgaaagaggaccaggtggtcgcagaggagcctggttttcaggatgaagaagagagccttttccaggacatagatctcctccagaagcatggcatcaacgtagctgacatcaagaagctgaagagcgtggggatctgtacaatcaaaggcattcagatgacaacacgtcgcgccctgtgcaacgtgaaggggttaagtgaggcgaaggtggacaagattaaggaggccgccaacaagctaatcgagcccgggttccttacggccttcgagtacagcgaaaagcggaaaatggtatttcatatcactacgggatcccaagaattcgacaagttgttaggaggagggatcgaatcaatggcgatcaccgaagcgtttggtgagttccggacagggaagacacagctgtctcacactctatgcgtcacggctcaattgccaggcgcgggagggtaccccggcggaaagatcatctttatcgacactgagaacaccctgtag

SEQ ID NO: 14918 - DNA, 420 bp, synthetic construct
  misc_feature 1..420: note = Description of Artificial Sequence: Synthetic coding sequence
  source 1..420: mol_type = other DNA
atgaaagaagatcaggttgttgctgaggagcccggcttccaggacgaggaggaatccttgttccaggatatcgatctgctccagaaacatggaataaatgtggctgatattaagaaattgaagagcgtgggaatctgcaccatcaagggcatccagatgacaactcgacgcgccctatgcaacgtgaaaggcctgtctgaagcgaaagttgacaaaatcaaggaggctgctaacaaactaattgagcctggcttcctaactgcttttgagtacagtgagaagcgaaagatggtgttccatatcaccactggcagccaggagttcgataaactcctgggcggtggtatcgaaagcatggccataacggaagcctttggcgaatttcggaccggaaaaactcagctctcgcacacactgtag

SEQ ID NO: 14919 - DNA, 858 bp, synthetic construct
  misc_feature 1..858: note = Description of Artificial Sequence: Synthetic coding sequence
  source 1..858: mol_type = other DNA
atgaaggaagaccaggttgtcgccgaggagcctggctttcaggatgaagaggaatctcttttccaggatatcgatctcctccagaaacatggtatcaatgtggctgatatcaagaagctgaagtcagtcggtatctgtacgattaagggaatacaaatgaccactcgccgcgccctctgcaacgtcaagggtctgagtgaagcaaaagtcgacaaaattaaggaggccgccaacaagctgatagagccaggattcctgactgcgtttgaatattcagagaagcggaaaatggtcttccacattaccacaggtagccaggagttcgacaaactgcttggggggggcatcgagagtatggctatcaccgaagctttcggcgaattccggacgggaaagactcagctgtcccacacattgtgtggagagcatcagatggaactgctagattacgtcgcggcgaaatttcacgaagaagccggaattttcaagctcctaatcatcgacagtatcatggccctttttagggtggatttctcaggacgcggggagctggccgagaggcaacaaaagctcgcccaaatgctttccagactgcagaagatcagtgaggagtacaacgtggccgtctttgtgactaatcagatgactgccgaccccggcgctacaatgacattccaggccgatcccaaaaaaccaatcggaggacacatactcgctcacgctagtacaactcgcatatccctgcgcaaagggaggggcgagctccgaattgccaagatatacgactctcctgagatgcctgagaacgaggccaccttcgctatcactgccgggggcatcggggacgcaaaagagtag

SEQ ID NO: 14920 - DNA, 612 bp, synthetic construct
  misc_feature 1..612: note = Description of Artificial Sequence: Synthetic coding sequence
  source 1..612: mol_type = other DNA
atgaaggaagaccaggtggttgccgaagaacctgggttccaagacgaagaggaaagcctctttcaggatatcgacctgttacaaaaacatggtattaacgtcgcagacatcaaaaaactgaagtctgtgggtatttgtaccattaaagggatacaaatgaccactcgtcgtgccttgtgcaacgtgaaaggactgtcagaggccaaggtcgataaaattaaggaagcggctaataagcttatagaacctggctttctaaccgctttcgagtattctgagaagaggaaaatggtgtttcacatcaccactggctctcaagagtttgataaactgcttgggggcgggatcgaaagtatggctataaccgaggcctttggcgaattcaggacgggcaagacacagctgtcccacacactgtgcggtgagcaccagatggaactgctggattatgtcgccgctaagtttcacgaggaggctggaatttttaaactactaatcatcgactctatcatggcccttttccgcgtagatttttccgggcgcggggaactcgcagaacgccaacagaagctcgcccaaatgttgtcccgcctccagaaaatctccgagtag

SEQ ID NO: 14921 - DNA, 1599 bp, synthetic construct
  misc_feature 1..1599: note = Description of Artificial Sequence: Synthetic coding sequence
  source 1..1599: mol_type = other DNA
atgaacggagttctgatacctcacacccccatagctgtcgatttctggagtctcaggcgggcagggactgcgagactctttttcctttcccatatgcactctgaccacaccgtgggtttgtcctctacgtgggctagacccctgtattgcagccccattacggctcatcttctgcatcggcatcttcaagtgagtaaacaatggatccaggcattggaggttggtgaaagtcacgttcttccgctggacgaaattggccaggagacgatgaccgtcactctcctggacgccaaccattgtccaggcagtgtaatgtttctgttcgaaggttacttcggaactatcctgtacaccggcgattttcgctacacccctagcatgctgaaggaaccggctctgacccttggaaagcagattcataccctctatctagataacaccaactgcaatcctgcactcgtcttgccgtcaaggcaggaggcggcacatcagattgtgcagttgatccgtaagcacccgcaacacaacatcaaaattggactttactccctaggcaaagaaagccttctggaacagctggcactagaatttcagacctgggtggtgctctctccgagacggctggaacttgtgcagcttttaggactcgcagacgtcttcacagtcgaggaaaaagcgggaagaattcacgcagtcgatcacatggagatctgccacagcaatatgttacggtggaatcagacccatcccacgattgccatactgcctacatccaggaagatccattccagccacccagatattcatgttattccatatagtgaccactcctcatacagcgaactgagagcctttgtcgctgccctaaagccctgccaggtggttcccatcgtgtccagacgtccgtgtggtggctttcaagattctctgtcccctcgcatctctgtgcctctcatcccagactctgttcaacagtacatgtcaagctcatctcgcaagcctagtttgctttggcttctggaaaggcgattaaaacgtccacggactcagggtgtggtcttcgagtctcccgaggagagcgcagaccagtctcaagctgatagagactccaagaaagctaagaaagagaagctgtctccatggccagctgatctcgagaaacagccttcccatcaccccttacggattaaaaagcagctttttccagatctgtactcaaaggagtggaataaagccgtgcccttttgtgagtcacagaaacgggtgaccatgctcacagctcccctgggcttctcagtgcatctgcggtccaccgatgaagaattcatctcacaaaagacgcgcgaggagataggcctgggttcacccttggtcccgatgggcgacgatgatggggggcccgaggccacgggcaaccagagtgcatggatggggcatgggagccctctgtctcattcctcaaaaggcacaccattactagccaccgagttccgaggccttgcgctgaagtacctgttgacacctgtgaacttttttcaagcaggctattcctctcgccgcttcgaccagcaggtagaaaagtaccataaaccctgctag

SEQ ID NO: 14922 - DNA, 1734 bp, synthetic construct
  misc_feature 1..1734: note = Description of Artificial Sequence: Synthetic coding sequence
  source 1..1734: mol_type = other DNA
atgaaacaccaggagagattcctcttccagggcaataatggcactgttctgtacacgggcgactttagattggctcaaggagaggctgcacggatggaactgttacactcaggcgggcgggtaaaggatatccagtcagtgtacctcgacacaactttttgcgatcctcgcttttaccagatcccaagccgagaggaatgtctgagtggggtgctggagcttgtccgatcctggatcactagatcgccttatcacgttgtgtggctgaactgtaaggcggcatacggctatgaatatctgtttaccaacctgagcgaggaactcggagtgcaagtgcatgtcaataagctggacatgtttcgtaacatgcccgaaatcctccaccatttgaccacggacagaaatactcagattcacgcatgcagacaccctaaagcggaggaatacttccagtggtccaaactgccttgcggcattacatcccgaaaccggatacccctccatatcatctctatcaagccttccacaatgtggttcggagagcgctcaaggaagaccaacgttatcgtgcgcaccggtgagtcctcttaccgcgcttgctttagcttccacagtagttatagcgagataaaggactttctgtcctatctctgtcctgtaaacgcttatcccaatgtaattcccgtcggtacaactatggataaagtagttgaaatcttgaaacccttatgtcggtcctcccagtccacggaacccaagtataagcccttagggaaacttaaacgagcacgcaccgtgcaccgggattccgaagaggaggacgattatttatttgatgatccactgccaatcccgctacgccacaaggtcccctatccagaaacctttcacccagaggtattctccatgacagctgtgtctgagaagcagccagagaagctgcgccagacccccgggtgttgtcgcgcagagtgcatgcagtcttccaggttcacaaattttgtggattgcgaggagtcaaactcagagtctgaagaggaagtcgggataccagcctcactgcagggcgacctagggtccgtgctgcacctccaaaaggcagacggtgatgtgccacaatgggaagtatttttcaagcgtaatgacgaaatcacagacgagagcctggagaactttccttctagcacggtggcaggagggtcacagagtcctaagctattctcagattctgatggggaaagcacccatattagctctcagaacagctcacagtccacccacatcaccgaacaagggtcccagggctgggatagccagagtgacactgtgctcctcagttcccaggaaaggaattctggcgatatcacctccctggataaggcagactatagaccaaccatcaaggagaacatccccgcatccctgatggagcaaaatgtcatctgtcctaaggatacttattctgacttaaaaagtagggacaaggacgtgacaatcgtgccgtctacaggcgaaccaaccacccttagtagtgagacgcatatcccagaagaaaagtcactgctgaatttgagcaccaatgccgatagccagagttcctctgattttgaagtacccagcaccccagaggcagaactccccaagagagaacatctccagtacctctacgagaagttggccacaggcgaaagcatagctgtcaagaagagaaagtgttcactgcttgacacttag

SEQ ID NO: 14923 - DNA, 255 bp, synthetic construct
  misc_feature 1..255: note = Description of Artificial Sequence: Synthetic coding sequence
  source 1..255: mol_type = other DNA
atgttcttattccagggtaataacgggaccgtgctgtatacaggtgatttccgcttagcccagggggaggcagccaggatggagctgttgcattcaggcggtagggtgaaagatattcagtctgtttatcttgatacaacgttctgtgatccaaggttctatcagatccctagccgcgaggagtgtctgtctggcgtgctggagctagtgcggagctggataactaggtccccataccacgtggtgtggttatag

SEQ ID NO: 14924 - DNA, 1038 bp, synthetic construct
  misc_feature 1..1038: note = Description of Artificial Sequence: Synthetic coding sequence
  source 1..1038: mol_type = other DNA
atggacaaagtggtcgagatactgaagccgctgtgcagatcctcacaatccactgagccgaaatataagcccctcggcaaacttaagcgagcgaggacagttcatcgggactcagaggaggaagacgactatctttttgacgaccccctaccgattcccctaagacacaaggtgccataccccgagacgttccacccagaggtgttctctatgacagccgtgagtgaaaaacaacctgagaaactccggcagaccccggggtgttgtcgcgcagaatgcatgcagtcaagtcgctttacaaattttgtggactgtgaggagtccaattctgaatcagaagaggaggtggggattcctgcaagcctgcaaggtgatctcggatccgttctccacctgcaaaaagccgacggtgatgttccccagtgggaagttttctttaagcggaatgacgagatcaccgacgagtctctggaaaatttcccttcctccacagtggcaggaggcagtcagagtccaaaactcttctccgattcagacggggagtctacccatataagctctcagaactcgtcacagtctacacacataaccgaacaaggaagccagggctgggacagccagtctgatacagtgctcctttctagtcaggagcggaattcaggagacatcacttccttagacaaagctgactaccgccctactataaaagagaatatccccgcatcgctcatggaacagaatgtcatctgccccaaggatacttactcagatctcaaaagcagagataaagacgtcactattgttccatcgactggcgaacctaccacactgagtagcgagacccacattcctgaagagaaaagcctcctcaacctgtctacgaacgccgatagccagagcagtagcgattttgaggttcccagtactccagaagccgagctacctaagagggaacatctgcagtatctctatgagaagctggcaacaggggagtcgattgcagtaaagaaacgaaagtgctctctgctcgatacatag

SEQ ID NO: 14925 - DNA, 1734 bp, synthetic construct
  misc_feature 1..1734: note = Description of Artificial Sequence: Synthetic coding sequence
  source 1..1734: mol_type = other DNA
atgaagcatcaggaacggtttctgtttcagggcaataatggtactgtgttgtacacaggagactttcgacttgctcaaggagaggctgccaggatggagctgttgcactcaggcggtcgggtaaaggacattcagagcgtgtatttggacaccaccttctgtgacccccggttttatcagattccatcaagagaggaatgcctgtccggcgtgctggaacttgtgcggtcttggattacacgctctccctaccatgtagtgtggctcaactgtaaggccgcgtacggctacgaatacctgttcaccaacttgagcgaagagttaggcgtccaagtccatgtcaacaaactggacatgtttcgtaacatgccagagatcttgcaccatctcacaacggataggaacacccagattcatgcttgtcgccaccctaaggccgaggagtactttcagtggtcgaaacttccatgtgggatcacatcaaggaaccggatccctctgcatatcatatctataaaaccatctaccatgtggtttggggagcgcagccggaagacaaatgtcatagttcgaacaggtgagtcttcgtatagggcctgctttagttttcattcatcatattcggagatcaaagacttccttagctacctgtgtcccgtgaacgcttatcccaatgtgatccctgtcgggacaaccatggataaggtcgttgagattctcaagcctctgtgtcgcagctctcagtctactgaaccaaagtataaaccattaggtaagcttaaaagggcccggactgttcaccgggattctgaggaagaagacgattatctgttcgacgatcctcttcccataccattgcggcacaaggtcccttaccccgaaactttccaccccgaggtgttcagcatgaccgccgtcagcgagaaacagcctgagaaactccggcagaccccgggatgctgccgggctgagtgcatgcagtcaagcaggttcactaacttcgtggattgcgaggaatcaaactcggagagtgaggaggaggtgggaattccagcttcgttgcagggcgacctgggtagcgtgctccatctgcaaaaggccgatggggacgtgccacaatgggaagtgttcttcaaacggaacgatgagatcactgatgaaagtctagagaacttcccctcaagcactgtagcaggcggctcccagtcgcctaaattattctcggacagtgatggggaatccacgcatatatccagccagaatagctcccaatcaacccacatcactgagcagggcagccaggggtgggactcacagtctgacactgtgttgctgtcttcccaggaacggaattctggtgacatcacaagtttggataaggcagactatcgccctacaatcaaggagaacattcctgcgagcctgatggagcaaaacgtgatttgccctaaggatacctattctgatttaaaaagccgggacaaggatgtgacaattgtgccgtcgactggtgagcctactacactgtcctccgagacccatatcccggaggagaagtctctcctaaatttgagtactaatgccgactcacaatcaagctccgatttcgaggtcccctccacccccgaggccgaactgcccaaaagggaacacctgcagtatctgtatgaaaagctggcaaccggggaatccatcgccgtcaaaaaacggaaatgctctttgttggatacctag

SEQ ID NO: 14926 - DNA, 1734 bp, synthetic construct
  misc_feature 1..1734: note = Description of Artificial Sequence: Synthetic coding sequence
  source 1..1734: mol_type = other DNA
atgaaacaccaggaacgctttctcttccaagggaataacggaactgtgctgtataccggggactttaggctcgcccagggggaggccgctcgaatggaattgttacacagcggaggccgagtaaaggacattcaaagcgtgtacctggacacaacgttctgtgaccctaggttttatcagatcccatctcgggaagaatgtcttagcggtgtgctagaacttgttcggtcctggataacccgctctccatatcacgtggtctggctaaattgcaaagctgcgtatggttacgagtacttgtttactaacctgtcagaagaactcggagtgcaggtgcatgttaacaagctcgacatgttccggaatatgccagagattctgcaccacctaaccactgacaggaatacacagatccacgcttgcaggcatcccaaggcagaagagtactttcagtggtcaaagctcccgtgcggaatcaccagtcgtaacaggatacccctgcacatcatcagtattaagccctccaccatgtggtttggagaaagatctcgcaaaactaacgtgatcgtgaggacgggcgagagcagttacagggcctgcttctcctttcattccagttattcagaaatcaaggatttcttaagctatctgtgccccgtgaacgcctatcctaacgtgatccccgttgggacgaccatggacaaggtcgtggaaattctaaaacccctatgccgctcatcacagtcaactgagcctaagtataaaccactgggcaagctgaaacgggctcgtacagtgcaccgggactcggaagaagaggatgactatctctttgatgaccccctgcccatccctctccgccacaaggtcccatatcccgaaactttccaccccgaggtcttttccatgactgcagtgtccgagaagcaacccgagaaactgcggcaaactcccggatgctgccgtgcggagtgtatgcagtcctcaagattcacaaattttgtcgattgcgaagaatcaaactccgaatccgaagaggaggtgggcatacccgccagcctgcagggcgatttgggttcagtgctgcacctccagaaggctgatggggacgttccccagtgggaggtattctttaagcgcaacgacgagattactgatgaaagtctggaaaatttcccaagctcgaccgtcgctggtggttcgcaatcccccaagctatttagcgacagcgacggcgagtctacccacataagcagccagaactccagtcaatccactcacattacagaacaagggtcacagggctgggactctcaaagcgacaccgtgttgctgtccagccaagagcgcaattccggggacatcacttcccttgacaaggcagattatcgccccactataaaagagaacatccccgcatctttaatggagcagaatgtgatttgccccaaagatacatattccgacctcaagtcccgtgacaaggacgtgacaattgtgccttctaccggagagcctacaaccttaagttctgagacccacattcctgaagagaaaagtttgctgaatctgtcaaccaatgctgatagccagtctagttcagatttcgaggtaccctcaactccagaggccgagttgcctaaacgcgaacacctgcagtacctttacgagaaactggctactggggaaagcatcgccgtgaaaaagaggaaatgtagtctcttggacacttag

SEQ ID NO: 14927 - DNA, 1719 bp, synthetic construct
  misc_feature 1..1719: note = Description of Artificial Sequence: Synthetic coding sequence
  source 1..1719: mol_type = other DNA
atgtttctcttccagggaaataatggaaccgtgttgtatacaggagactttcgcctggcccagggcgaggctgccaggatggaattactgcattctgggggccgcgttaaggatatccaaagtgtctatttggacaccaccttctgcgacccacgcttctaccagatcccaagcagagaagagtgtctgtccggggtgctagagctggtgcgctcatggatcacaaggtcaccttaccacgtggtttggcttaactgtaaggccgcctatggatacgaatatctgttcacgaatctgtcagaagagctgggggtgcaggtccacgtcaataaactggacatgttcagaaacatgcctgagatccttcaccaccttaccacagaccgaaatactcagattcatgcctgccggcaccccaaggccgaggagtattttcaatggtctaagctgccctgtggcatcacatccaggaatcggatcccattgcatattatttctatcaagccctctaccatgtggtttggagaacgctcaagaaagaccaatgtgatcgtaagaacaggcgagagttcctaccgtgcatgcttttctttccattctagttatagtgaaattaaggacttcctgagctatctctgtcctgtgaatgcatacccaaatgtgatcccagtgggaaccacaatggataaagtggtcgaaatcctgaaacctctgtgtcgatcctctcagagcaccgaaccaaagtataagcccctggggaagttaaaaagggccaggacggtccacagggattctgaggaggaggacgattacctctttgatgaccccttgccgattcctctacggcacaaggtaccttatcccgagaccttccatccagaagttttttccatgacagcagtgtccgagaagcagccggaaaaattgcgtcaaaccccaggatgttgtcgagccgaatgtatgcagtccagtagattcactaatttcgtcgactgcgaggaatccaattcagaatccgaggaagaggtaggcatcccagcttccctacagggggacttaggctccgtgttgcatttacaaaaagcagacggcgacgttccgcaatgggaagtattcttcaaacgcaatgatgaaatcaccgacgaaagtctagagaatttccctagctcaaccgtagcagggggttctcagtcgcccaagctgttctctgacagcgatggcgagagtacacatattagctcccaaaattcaagccagagtacccatatcacagagcaaggttctcagggctgggatagccagagcgatactgtgttacttagttcacaggagcggaatagtggggacatcaccagtctggataaggccgattatagacccactatcaaggagaacatccccgctagtttgatggaacaaaatgttatctgcccaaaggatacatatagtgatctcaagagccgggacaaggatgttacgatcgtgccgtccacaggtgaacctacaaccctgtctagcgaaacacacatcccagaggagaagagtctgctcaacctgtccactaatgcagactcgcaatcctcctctgacttcgaggttcccagcacacctgaggccgaactgcctaaacgcgagcacctgcagtatctgtatgaaaaacttgccaccggtgaaagtatagccgtcaagaaaaggaagtgcagcctgctggatacctag

SEQ ID NO: 14928 - DNA, 1719 bp, synthetic construct
  misc_feature 1..1719: note = Description of Artificial Sequence: Synthetic coding sequence
  source 1..1719: mol_type = other DNA
atgttcctgtttcaaggtaataatggcactgttttgtacaccggagattttaggctggcgcagggtgaggccgcccggatggagctgttgcatagcggagggcgtgtgaaggacatccagagtgtttacctggatacaaccttttgtgatccaaggttttaccagatcccttcaagggaagagtgtctgtcaggggtcctggagcttgtgcggtcatggatcacaaggtccccataccatgtggtgtggctgaactgtaaggccgcatacgggtatgaatatttgtttactaatctctccgaggagctgggtgtgcaggtgcatgttaacaagcttgacatgttcaggaacatgcccgagatcctgcaccacctcacaaccgaccggaacacacagatacacgcctgcagacacccaaaggccgaagagtactttcagtggagtaagctgccatgtggcatcactagtcgaaaccgaattcctctccacatcatcagtataaaacctagtacaatgtggttcggcgagcggtccagaaaaacgaatgtgatagttagaacaggggagtcctcctacagagcctgtttctccttccattcctcctactctgagatcaaagattttttgtcatacctttgcccagtgaatgcctacccaaacgtgattcctgtgggcacaacgatggacaaggtggtggaaattcttaaaccactatgccgttcctctcagtctaccgaacccaagtacaagcccttgggcaagctcaaaagggctagaactgtccatagagactctgaggaagaggatgactacctgttcgatgacccccttcccatccccttacggcataaggtcccctacccggagacttttcaccctgaggttttttcaatgacagcagtcagcgagaagcaacccgagaagcttcgacagacacccgggtgctgtagggccgagtgcatgcaaagcagcaggtttaccaacttcgtggactgtgaagagagcaattcagaatctgaagaggaggtagggataccagcatctctgcaaggagacctgggtagcgtgcttcatttgcaaaaggccgatggtgatgtaccacagtgggaagtattcttcaagcggaacgacgaaattacggatgaaagtttggaaaattttcccagcagtacagtggcgggcgggagtcagagtcccaagcttttttctgatagtgatggagaatccacacacatttccagtcagaacagctctcagtcaacccatataacagagcagggtagccagggctgggattctcagagtgataccgttctcctaagttctcaagaacggaacagcggggatatcacatccctcgacaaggccgactatagacccactattaaagagaatattcctgctagcctgatggagcagaatgtgatctgccccaaggacacttacagtgatctgaagtccagggacaaggatgtgactattgtccctagcactggcgagccaaccacactcagctcagagacacacattccagaggaaaagagcctgctgaacttgtccacaaacgccgacagccagtccagctccgacttcgaagttcctagtacgcccgaagccgaacttccaaaacgcgaacacttgcaatatttgtatgaaaaattagccaccggagaaagcatcgctgtgaaaaagcgcaagtgctcccttctggatacatag

SEQ ID NO: 14929 - DNA, 1719 bp, synthetic construct
  misc_feature 1..1719: note = Description of Artificial Sequence: Synthetic coding sequence
  source 1..1719: mol_type = other DNA
atgtttctttttcaaggaaacaatggaactgtactatacaccggcgatttcagattggctcaaggcgaggcggcccgcatggaactgctgcattccggcggtcgtgtaaaagatattcagtctgtctatctggacacaaccttctgcgatccacgcttttatcagatccctagcagggaggagtgtctttccggggtgcttgagctggttcgcagctggatcacgcggtcaccatatcacgtggtctggctgaattgtaaggccgcgtatggatatgagtacctttttaccaacctgagcgaggaactgggcgtgcaggttcatgttaacaaactggatatgtttaggaacatgcccgagatcctgcaccacctcaccacagaccgcaacacccagattcacgcttgcaggcaccccaaagcggaggagtattttcagtggtccaagctgccttgcggcattacatccagaaaccgaattccgctccatatcatctctatcaaaccatcgacaatgtggtttggagagcggagtagaaaaactaacgtaattgtacgaacgggggaatcaagttaccgagcatgtttttcatttcatagctcatacagcgagatcaaggattttctgtcttatctgtgccccgtaaatgcctaccctaatgttattcctgttggcacaacaatggacaaagtggttgagatcttgaaaccactctgtcggagtagtcaatcaacagagcctaagtacaagccactgggaaaattaaagcgagcacgtaccgtgcacagggactctgaagaagaggatgattatctttttgacgatcccctgcctatcccactccggcacaaagtgccctacccagaaacgtttcacccggaagtgttcagtatgaccgcggtaagtgaaaagcaaccggagaagctccggcagacccctgggtgctgcagggcggagtgcatgcagtctagtcgctttacaaattttgtcgattgcgaggagagtaattcggaaagcgaagaggaagttggaattccagcctctcttcagggagatcttggatccgtgctccacctccagaaagcagatggcgatgttccccagtgggaagtgttttttaagcggaacgacgaaataaccgatgaatctctggaaaatttccccagcagcacagtcgccggtgggagtcagagtcctaagctgtttagcgacagcgacggcgagtccactcacattagcagtcaaaatagcagccagtccactcacattacagagcaggggtctcagggctgggattcgcagagtgatactgtgttgctgtcatcacaggaacggaattccggggacattacctctctggacaaggctgactaccgtccaacgataaaggagaacatacccgcaagcttaatggaacaaaacgttatctgccctaaagatacctattcagacttaaagagccgcgacaaggatgtgacaatagtaccctcaacaggtgagcctaccacgctctcctcagagacccatattcccgaggaaaagagcctgttaaacctcagtaccaatgccgattcgcagtctagctctgacttcgaagtgccctcaacccctgaggcagaactgcccaagagggagcatctgcaatatctctatgaaaaactggctactggcgaaagtatcgccgtgaaaaaacggaagtgcagccttctggacacgtag

SEQ ID NO: 14930 - DNA, 2079 bp, synthetic construct
  misc_feature 1..2079: note = Description of Artificial Sequence: Synthetic coding sequence
  source 1..2079: mol_type = other DNA
atgtccagcttcgagggtcagatggccgagtatcctaccatctcaattgacaggttcgatagagaaaatttgcgggctagagcctacttcctcagccattgtcataaggaccatatgaagggactgcgggctccaaccttgaaacgccgcttggaatgcagcctgaaagtctacttatattgcagccccgtcacgaaggaactccttctcacatctccgaagtacaggttctggaaaaaacgaatcatctccatagaaatagaaaccccaacgcagatcagcctggtcgacgaagcatctggggaaaaggaagagattgtggtcacactattacccgcaggacactgtcctgggtcggtgatgttcctgtttcagggaaacaacgggaccgtcctgtacacaggtgacttccggcttgcccagggcgaagccgctagaatggagttgctgcattccgggggtcgcgtcaaggatattcagtctgtgtacctggacactaccttctgcgatccacgtttctatcaaatcccttctcgagaagagtgcttaagtggcgtgctggagttggtgcggtcatggatcacgaggagtccataccatgtggtctggctaaactgcaaggctgcctatgggtacgagtatctgtttaccaacctgagtgaggaactcggtgtccaggtgcatgtgaacaagctcgacatgttccgaaatatgcccgagatcctgcatcatcttaccacagatagaaatacgcaaatccacgcctgtaggcaccccaaggcggaagagtatttccaatggtccaaactgccctgcggcatcacttctcgaaaccggattccgttgcacatcatctctattaagccttccacaatgtggttcggcgagagatccaggaagacaaatgtcatcgtgcggactggtgaatcatcatatcgagcatgtttcagctttcattccagttacagtgaaatcaaggatttcctctcctatctgtgtccggtgaatgcctacccaaacgtgattcctgtgggaaccacaatggacaaagttgtggagatcttgaaacccctctgtaggagctctcagagcacagagcctaaatacaagcctcttgggaaactaaaacgcgcacgaactgtacacagggactcggaggaagaagatgattatctgttcgatgatccactgcccatccccttgcggcataaggtcccttatcccgagacctttcatccagaagtcttttcaatgacggccgtgagtgagaagcaacctgagaagctcagacagactccaggctgctgtcgggctgagtgcatgcagagcagccggttcactaattttgtggattgcgaggagtccaatagcgagagtgaggaggaagtggggatcccggcatccctgcagggcgatctgggcagcgtgctgcatctgcaaaaagccgacggcgacgtacctcaatgggaagtatttttcaagcgaaatgatgagattaccgacgagtctctggagaattttccttcttccacggtggcgggcggttcacagtctcctaaattattttctgactccgatggggagagcactcacatttctagtcagaactcctctcagtcgacacacatcactgagcaggggtctcaggggtgggattctcaatccgatacagtccttctctcttcgcaagaacggaattccggcgacattacctcgctggacaaggccgactatcgtccaaccatcaaggagaatatcccggcctcccttatggagcaaaatgttatttgcccaaaagatacctattctgacctaaaaagtagggacaaggatgtgaccattgttccctctaccggggagccaacaaccctgagctccgagacacacattccagaagagaaatctttgttgaacctgtcaactaatgcagactcccagagctcatccgacttcgaggtgcccagtaccccagaggccgagctgccgaagagagagcatcttcagtacctgtatgagaagctcgcaactggggaatcgattgctgtgaagaaaagaaaatgttctctgctcgacacctag

SEQ ID NO: 14931 - DNA, 1305 bp, synthetic construct
  misc_feature 1..1305: note = Description of Artificial Sequence: Synthetic coding sequence
  source 1..1305: mol_type = other DNA
atgagttcctttgaaggccaaatggccgagtacccaacaattagcatcgacaggtttgaccgagagaaccttcgcgctagggcctattttctgagccactgtcacaaagaccatatgaaaggcctgcgcgcaccaactctgaaacggcgccttgaatgctccctgaaggtgtacttatactgcagccccgtcacgaaagagctgctcttgacatctcccaagtaccggttctggaaaaagaggattatcagtatcgagatcgaaaccccgacacagatctccctggtggatgaggccagcggggagaaggaggaaatagtggtgacactgctcccagccggccactgtcctggaagtgtaatgtttcttttccaagggaataacggcactgtcctctatacgggagacttcagacttgcgcaaggcgaagcagcaaggatggaactgttgcattctggaggtagagtcaaggacatccaaagtgtgtaccttgatactacattctgtgacccaaggttctatcaaatccccagtcgcgaggagtgtctctccggcgtcctcgaactggtacgatcttggattactcgttcaccctaccatgtcgtgtggctgaactgcaaggctgcttatggctacgagtatctgtttaccaacttgagtgaggagctgggggttcaggtgcacgtcaataaactcgatatgtttcggaatatgccagaaattctgcaccatttaacaactgacaggaacacacagatccatgcctgtagacatccaaaggctgaagaatatttccagtggagtaagctgccctgtggcatcacttctcgcaacaggatacccctacacatcatctccataaagccgagtaccatgtggttcggggaacgctccagaaaaaccaacgtgattgtgaggaccggcgagtcttcgtaccgggcctgtttctcattccattcatcatatagcgaaattaaagatttcctgagctacctctgtccagtgaatgcctatccaaatgtgatcccagtgggcactacgatggacaaggttgtggaaatcctgaagccactgtgccgctccagccagagtacagaaccaaaatataagccgctgggcaagttaaagcgcgcgcgaactgtacatagggactccggtagccattccgtaacccaggccaggatgagatggtgccaccatgactccctctacccccttacccctggcatcaaaagatcatcctgcttgtcactgctcacgagctggatcacaggtgcctaccggcacgcccagctcatgatctag

SEQ ID NO: 14932 - DNA, 1719 bp, synthetic construct
  misc_feature 1..1719: note = Description of Artificial Sequence: Synthetic coding sequence
  source 1..1719: mol_type = other DNA
atgttcctgttccagggtaacaatggcaccgttctctacaccggggatttcagactcgcgcagggcgaggccgcaaggatggaattgctgcacagcggaggccgcgtgaaagacattcagtcagtttatctggacactaccttctgtgacccccgattttaccagatccctagccgtgaagaatgtctgtcaggcgtgctggagctggtgcgttcttggataacacgaagtccctaccatgtggtctggctgaactgcaaggctgcctacgggtacgaatacctgttcaccaatctgtcagaagagctcggagtacaggttcatgttaataaactagacatgttccgcaacatgcctgaaattttacatcacttaacaactgacagaaacacacaaatccacgcgtgtagacatcccaaagccgaagaatatttccagtggtccaagctcccctgcggtatcacatctaggaaccgtattcctctccacattatcagcatcaaaccctctacaatgtggttcggggagcgatcccggaagaccaacgtgatcgtgaggactggtgagtctagttatagggcttgtttctcctttcactcgagctattctgagatcaaggatttcctctcatatctttgtcctgtaaacgcatatccaaacgtgattccagttggtactaccatggataaggtggtggagatcctgaaacccctttgtcgatcaagtcagtctacagaaccaaagtataaacctctcggaaagctgaaacgcgcccgaactgtgcatagagattccgaggaggaagacgattacttgttcgacgatccacttcccatccctttgcggcacaaagtcccctatcccgagacctttcatcctgaagtattctctatgactgcagttagcgaaaaacaacccgaaaagctacggcagacaccaggatgctgcagggccgagtgcatgcagagctcccgctttaccaacttcgtagactgtgaagaaagcaatagtgagagcgaagaagaagtaggaatccccgcaagcctgcagggggacttgggatctgttctgcatctgcagaaagctgatggggatgtgcctcagtgggaagtttttttcaaacgaaacgacgagattacagatgaaagtctagagaacttcccatcaagtacagtggccggcgggagtcagtcccctaagttgttttccgatagtgatggagagtctacacacatatcaagtcagaacagcagccagagtacacatattaccgagcagggatctcagggatgggactcccagagcgacacggtgctactgtcttctcaggagaggaactctggcgatataacctccctggataaggccgattacaggcctacgataaaagagaatatccctgcttcactgatggagcagaacgttatttgtcccaaagatacttactcagacctaaaatcgagagataaagacgttaccatcgtacctagcactggggaaccgaccacgttgtcatccgagacacacatccctgaggagaagagcctgctgaacctttccactaacgcagactcccagagctcatcagacttcgaagtgccttcgacccccgaggcagagctgcctaagagagaacatctccaatatctttacgagaagctggcaacaggagaatctatagcggtgaagaagcggaagtgtagcttacttgacacctag

SEQ ID NO: 14933 - DNA, 354 bp, synthetic construct
  misc_feature 1..354: note = Description of Artificial Sequence: Synthetic coding sequence
  source 1..354: mol_type = other DNA
atggagctactgcattctggggggcgcgtcaaggacatccaatctgtttatttagacactacgttctgtgacccgcgattttatcagatccccagcagagaggaatgcctttccggggtactcgagctggtccggtcttggatcacccgttctccctaccatgtggtttggttaaactgtaaggccgcctatgggtatgaatacttgttcaccaatctgagcgaggagctgggggttcaggttcacgtgaataagctggacatgttcaggaacatgccagagatcctgcaccatctcacaactgatcgtaatactcagatccatgcctgtcgccatccaaaagctgaggagtag

SEQ ID NO: 14934 - DNA, 1719 bp, synthetic construct
  misc_feature 1..1719: note = Description of Artificial Sequence: Synthetic coding sequence
  source 1..1719: mol_type = other DNA
atgttcctgtttcagggtaataacggcaccgtgctgtatactggagatttccggctagcccaaggggaagccgctagaatggaactactgcactcaggagggagggtgaaggacattcagtcagtgtacctggacaccaccttttgtgatcctcgattttaccaaatcccgtcccgggaagagtgcctgtcaggggtgctagaactagttaggtcatggatcacccgctctccgtaccatgttgtgtggttaaactgcaaagccgcatatgggtacgagtacctgttcacgaacttaagcgaagaactgggagtgcaggtccacgtgaataagcttgatatgtttcgtaatatgccagagatcttacaccaccttacgacagataggaacacacagatccatgcatgccgccaccctaaggcagaagagtatttccaatggagtaagctgccgtgtggcatcacatcccggaacaggattcctctccacattatcagtataaaaccctcaactatgtggtttggcgagagaagccggaaaaccaatgtcattgtgcgaactggcgagtcaagctaccgggcctgtttcagctttcacagcagctatagcgagattaaagatttcctttcctacttgtgtccagtgaatgcttaccctaacgtcattccagtcggcaccactatggacaaagtggtagaaatcctcaagcccttatgccgcagttcgcagagcactgagccgaagtacaagcccctcggaaaactgaagcgcgcccggacggtccatcgggactccgaggaggaggatgattatctgtttgacgaccctctgccgattcctctcagacacaaggttccataccccgagaccttccacccagaagtgttttccatgacagctgtttcggaaaaacagcctgaaaagcttcgacagacacccgggtgttgcagagcagaatgcatgcagagtagccgtttcaccaatttcgtagattgtgaggagagcaacagcgaaagcgaggaagaagtaggaattcccgcgtctctccagggcgacctgggatcagtccttcacctccagaaagctgatggagatgttccacagtgggaggtgttcttcaagaggaatgacgaaatcacagacgagtccctcgaaaattttccatcctctacagtggccggcggatcgcaaagccctaagctattcagtgattctgatggtgagtcaacacacatctcctctcaaaactcatctcagagcacacacatcacggagcaggggagccaaggatgggactcacaatcagataccgtgctcttaagttctcaagagcggaactctggtgatatcacgtccttggacaaagcagattatagacccacgatcaaagaaaatattccagcatctttaatggaacagaacgtgatctgtccaaaggatacatattctgacctcaagtccagggacaaggatgtaaccatcgtgcccagcactggcgagcccaccaccctgagttctgagacacacataccggaggagaagtcccttctgaatctttcgacgaacgctgactcccagtcctccagtgattttgaggttccctccaccccagaggcagaactgcccaaacgtgaacacctgcagtacttgtacgagaaactggctactggggaaagcatcgcagtcaaaaaacggaaatgttccctgctcgatacatag

SEQ ID NO: 14935 - DNA, 174 bp, synthetic construct
  misc_feature 1..174: note = Description of Artificial Sequence: Synthetic coding sequence
  source 1..174: mol_type = other DNA
atgaagcaccaagaacgcttcctgttccagggcaacaacggtacagtcctttatactggggacttcagactagcgcagggggaagctgctaggatggagctgctgcatagtgggggccgggtgaaagatatccaatctgtttatcttgacacgactttttgtgaccccaggtag

SEQ ID NO: 14936 - DNA, 807 bp, synthetic construct
  misc_feature 1..807: note = Description of Artificial Sequence: Synthetic coding sequence
  source 1..807: mol_type = other DNA
atggaggtcacaggggacgctggggtgcctgagtctggagagatccgcacgctgaaaccttgcctcctaagacggaattactcacgggaacagcatggggtggccgcctcatgcctggaagatcttaggtccaaggcttgtgacattcttgccattgataaatcgctgacccctgttaccctggtgctcgcagaagatggcactatagtggacgatgacgattactttctctgcctgccgtctaatactaagttcgtggcactcgcaagcaatgaaaaatgggcatacaataactccgatggcgggacggcgtggatcagccaagaatccttcgatgtggatgaaacagattctggagctggtctgaaatggaagaatgttgcgcgccagctcaaggaagacctgagttctatcatattgctgtcagaggaagatctgcagatgcttgtggacgcaccttgcagcgatcttgctcaagagttgcgacagtcctgcgcgacagtgcagcggctgcagcacactcttcaacaagtacttgatcagcgggaggaggtccgacagagtaagcaattgctgcaactctacttgcaggcactcgaaaaggaggggtctctcctcagcaagcaggaagagtctaaagctgccttcggggaggaggttgatgctgtcgacacgggaatttcacgggaaactagcagtgacgtggccctggccagccacattctgacagcgctgagggagaagcaagcccctgagttgagcctcagcagccaggacctcgaagttggcggaaaccaaggtcactag

SEQ ID NO: 14937 - DNA, 996 bp, synthetic construct
  misc_feature 1..996: note = Description of Artificial Sequence: Synthetic coding sequence
  source 1..996: mol_type = other DNA
atggaagttaccggtgatgcaggcgtgcctgagtctggcgaaattagaacccttaagccctgccttcttcggcggaattattccagggaacagcacggcgtcgccgcatcctgtctagaggacctccgttcgaaagcttgcgacatcctggctatcgacaagagccttaccccggtgactttagtgctggctgaagacggtacgattgttgatgacgatgattacttcctgtgcctgccctctaacactaagttcgtagcgcttgcctctaatgaaaagtgggcgtacaataactctgacggtggaacggcgtggatttctcaggagtcttttgatgtggatgagaccgatagcggagcgggactcaaatggaaaaatgttgcacggcaacttaaggaggacctgagttctataattctcctatccgaggaagatctgcagatgctcgtcgacgcgccttgtagcgatctcgcccaggagctgcgccagagctgtgcaaccgtgcaacgcttacaacatacactccagcaggttttggaccaaagggaagaggttagacaaagtaaacagctgctgcagctgtatctacaagccctcgagaaagaaggaagcctcctttcaaagcaggaagaatccaaagctgcttttggggaagaagtggatgccgtggatactggcatttctagggagacatcaagcgacgtggcacttgcaagtcatatcctcactgccctgcgggagaagcaggctcctgaactctcgctgtccagtcaggacctcgagctcgtgacaaaggaagaccccaaggctcttgcggtcgcacttaattgggacatcaaaaagactgaaacggtgcaagaagcatgtgaaagagagctggccttacgtctgcagcaaacacagagtctccactctctgcgcagtatcagcgccagtaaggcctctccgccaggagaccttcaaaaccccaagcgggcgaggcaagatccgacatag

SEQ ID NO: 14938 - DNA, 510 bp, synthetic construct
  misc_feature 1..510: note = Description of Artificial Sequence: Synthetic coding sequence
  source 1..510: mol_type = other DNA
atggccgctgagagtctaccattcagttttggtaccctttctagttgggagctggaggcctggtacgaggacctgcaggaggttttgtccagtgatgagaacggtgggacctatgttagccctcccggtaatgaggaagaagagagcaagatcttcaccaccctcgatcctgctagcctggcttggttaactgaggaagagcccgagcccgcggaggtcacatccacgtcacagagccctcactctccagatagtagccagtcttcccttgcccaggaagaggaggaggaggaccaaggtagaaccagaaaacgcaaacaatcaggtcactctcctgcccgcgctggcaagcaacgcatgaaggagaaggagcaagagaacgaacgcaaggttgcccaacttgccgaagagaacgaacgcttgaagcaggagattgaacgactcactcgagaggttgaggccacccggcgcgcccttatcgacaggatggttaatctgcaccaagcttag

SEQ ID NO: 14939 - DNA, 510 bp, synthetic construct
  misc_feature 1..510: note = Description of Artificial Sequence: Synthetic coding sequence
  source 1..510: mol_type = other DNA
atggcagccgagagcctgccatttagtttcgggaccctgagtagctgggagctcgaggcctggtacgaggacctccaagaggtccttagctccgacgagaacggtggtacgtacgtaagcccccctggaaatgaggaggaagaatccaagattttcacaacactcgacccagcttcgcttgcttggcttacggaggaggagccagaaccagccgaggtgacttcaacttcccagagcccgcactcacccgatagcagccagtcttctctagcacaggaagaagaggaggaagatcaggggagaacgcgcaagcgcaaacagtcgggccattcccccgccagagcgggaaaacagcggatgaaggaaaaagagcaagaaaatgagcgtaaagtggcccagttggccgaagagaacgagcgattaaagcaggaaatcgagagactcacccgcgaggtcgaagctaccagacgggctctgatcgatcgcatggtgaacttacaccaggcctag

SEQ ID NO: 14940 - DNA, 438 bp, synthetic construct
  misc_feature 1..438: note = Description of Artificial Sequence: Synthetic coding sequence
  source 1..438: mol_type = other DNA
atggaacttgtgcctgcgaccccccattatcccgccgatgtcctttttcagaccgatcccacggctgagatggctgctgaatcactccccttttcatttggcacactgtcctcctgggaactggaggcatggtacgaagaccttcaagaggtcctgagtagcgacgagaacggaggaacgtacgtgagcccccctgggaatgaggaggaggaaagtaaaattttcactactcttgacccagcatctctggcttggctgacagaggaggaacccgaaccagccgaggtgacgagcacaagtcaatcgccacacagcccagattcctctcagtcttcattagcgcaagaagaggaggaagaagaccagggccgaacccggaagaggaagcagtccgggcattcgcccgctcgtgctggtaagcaacgcatgaaagaatag

SEQ ID NO: 14941 - DNA, 579 bp, synthetic construct
  misc_feature 1..579: note = Description of Artificial Sequence: Synthetic coding sequence
  source 1..579: mol_type = other DNA
atggagttggtgcccgcaactcctcattatcccgcagatgtgctgttccaaaccgaccccacagccgaaatggcagctgagagcctgccatttagcttcggaaccctgtcgagctgggagctcgaggcctggtatgaggacctgcaggaagtgctgagttctgacgaaaacgggggaacctatgtgtcaccaccagggaatgaggaagaagaatctaaaattttcaccactctggatcccgcttctctcgcatggttaacagaagaggagcccgagcctgctgaggtgactagcacctcacagtcaccacacagccctgatagcagccaatcgagtctcgctcaggaggaggaagaagaggaccaagggcggaccagaaagaggaaacagtccgggcattcccctgccagagctgggaagcagaggatgaaagagaaggaacaggagaatgaaaggaaagtagcacaattggctgaagagaatgaacggcttaagcaggaaatcgaaagactcacgcgcgaagtggaagccacccggcgggctctcatcgatcgcatggtgaacctccaccaggcatag

SEQ ID NO: 14942 - DNA, 579 bp, synthetic construct
  misc_feature 1..579: note = Description of Artificial Sequence: Synthetic coding sequence
  source 1..579: mol_type = other DNA
atggagttagtgcctgctacaccacattaccctgccgatgtcctgttccaaactgatccaacagccgagatggcggcagagtccctcccattctctttcgggactctgtcgtcgtgggagttagaggcctggtatgaggatctccaagaggttttaagctcagacgaaaatgggggtacttacgtgtctccccctggaaacgaggaagaagaaagcaagatcttcacgacgctggacccagcaagtctggcctggctgacagaggaagaacctgaacctgcagaggttacaagtacctcgcagagccctcatagcccggattcgtctcagtcgagcctggcgcaggaagaggaggaagaggaccagggacgaactcggaagcgcaaacaaagtggccattcgcctgcgcgtgccggcaaacaacggatgaaggagaaggagcaagagaacgagcgcaaagtggcacagctggccgaagagaatgagaggctgaagcaagaaattgagcgcttaacaagggaggttgaggctacaaggagggcactgattgacaggatggtgaatttgcatcaggcctag

SEQ ID NO: 14943 - DNA, 864 bp, synthetic construct
  misc_feature 1..864: note = Description of Artificial Sequence: Synthetic coding sequence
  source 1..864: mol_type = other DNA
atggcctccctggaggtctccagaagccccagaaggtcacgccgcgagctcgaagttcgctcaccacgacagaataagtactccgtccttctgcccacatacaacgagagagaaaatctgcctctgattgtatggctgctagtcaagtcattctctgagagtgggatcaactatgaaatcatcattattgatgatggaagtccagatggaacccgagacgtagccgagcagcttgaaaagatttacggctccgatcggattctcttgaggccgcgggaaaaaaagctcgggttgggcactgcgtatatccatggtatgaaacatgcgactggtaattatatcattattatggacgccgatctgtcccaccacccaaaatttattccagagttcattaggaagcaaaaggaggggaattttgacattgtgagcgggacccggtacaaagggaatgggggtgtgtacgggtgggaccttaaacgaaagattatctctgatggcgtgctgccttgttgccccggctggagtttattgggatcatctgaccccgccattctcgctagctgggactattcccgtggcgcaaattttctgacacagattttgctgcggcctggagcttcagacctcaccggttccttccgcctgtacagaaaggaggtactggaaaaattgatcgagaaatgcgtgtccaaaggatatgtcttccagatggagatgatcgttcgggcacgtcagctgaattatactattggcgaagtgcctatttcatttgtcgatagagtgtatggtgagtcaaaacttggaggcaacgagatcgtatccttcctgaaaggcttgcttacattgtttgcaaccacctag

SEQ ID NO: 14944 - DNA, 768 bp, synthetic construct
  misc_feature 1..768: note = Description of Artificial Sequence: Synthetic coding sequence
  source 1..768: mol_type = other DNA
atggcatcactcgaggttagccgaagccctcgtcgttctagaagagaactggaagtacgctctcctagacaaaacaaatattctgtcttgctgcccacgtataatgagagagaaaatttacccctaatcgtgtggctgctggttaagagtttctcagaaagcggaatcaattatgaaataattatcattgacgacggcagccctgatggaacccgagacgtggctgagcagcttgaaaaaatctacggctcagataggatcttacttcgacctcgcgaaaagaagcttggcctggggacggcttacattcacggcatgaaacacgctacaggaaattatattattatcatggacgccgatctctctcaccacccaaaattcattccagagtttatctccgatggagtgctcccctgctgccctggctggtcactactgggtagctctgacccagccattctagcctcatgggattactcccggggagcaaatttcctcacacagattttactgaggcctggcgcgtcagatttaacgggctcttttaggctgtatcggaaagaagtacttgaaaagcttattgaaaagtgcgtgtcaaaggggtacgtgttccagatggagatgatcgtgcgggctaggcaactgaattacaccatcggcgaggtgccaatctcatttgtggatcgggtgtacggtgagagtaaattggggggaaacgagatcgtcagcttcctgaaaggccttctgacgctgttcgctaccacatag

SEQ ID NO: 14945 - DNA, 888 bp, synthetic construct
  misc_feature 1..888: note = Description of Artificial Sequence: Synthetic coding sequence
  source 1..888: mol_type = other DNA
tgagcaagcctggaagtcagtcgttccccacgaagatcgcgaagggaattagaagtccggtctcctcggcagaataaatactccgtcctgctgccaacttacaatgaaagagagaatcttcctcttatagtgtggttacttgtgaaatcattcagcgagtccggcatcaactacgagataatcatcatcgatgacggcagtccagacggaacacgtgacgttgccgagcagctggagaaaatctatggttccgatcgcatactgctccggccacgagagaagaagctgggcttagggaccgcatatattcacggaatgaagcatgcaactggcaactatattattatcatggacgccgatcttagccatcaccctaaattcattccggagtttattcgcaagcagaaggaggggaacttcgatatcgtaagtggtactaggtacaagggcaatgggggtgtctacggttgggacctgaaaagaaagattatctccgacggggtgctcccatgctgccctggctggagcctcctggggtcatctgacccggctattctggctagctgggactatcggtgcgagccccctagactggcttctaggggagcgaattttctgactcagattctgctcaggcctggcgcttccgacctcacgggttcatttcgtctgtatcgtaaggaggtgctggagaagttaatagaaaaatgcgtgagtaaaggctacgtgtttcaaatggagatgatagtacgcgccaggcagctgaattataccattggagaggtcccaatctcatttgtggacagggtgtacggcgagtctaagcttggtggtaacgagattgtgagtttccttaaaggcctgcttaccctgttcgccacaacttag

SEQ ID NO: 14946 - DNA, 783 bp, synthetic construct
  misc_feature 1..783: note = Description of Artificial Sequence: Synthetic coding sequence
  source 1..783: mol_type = other DNA
atggctagcttggaagttagccgcagccctaggcgcagcagacgcgaactggaggtaagatcaccacggcagaataagtattccgttttactcccgacttataacgaacgcgaaaatttaccgttgatagtgtggcttcttgtgaaaagcttcagtgagagtggcattaattacgaaattatcatcatcgatgacggctctcccgatggaactcgggacgtagcagaacagttggaaaaaatttatgggtctgatcgtatcctgctgcggcctcgggaaaagaaactcgggttgggtaccgcctacatccacggcatgaagcacgctactggtaactatatcattatcatggatgcggacctctcacaccacccaaagtttatccctgaatttattagaaaacagaaggaaggcaactttgatattgtctctgggactaggtataagggcaatggaggagtctacgggtgggaccttaagcgaaagattattagtcggggtgctaatttcctgacacagatcctgctccggcccggtgccagtgacttaaccggctcatttcgcctgtacagaaaggaagtgctggagaagttgattgaaaaatgtgtgtccaaaggatacgtatttcaaatggagatgatcgtaagagcaagacagctgaattacacaataggggaagtaccaatatcattcgtcgatagagtgtacggggagagtaaactcggtggcaacgagattgtgtcctttcttaagggactgcttacgctattcgccaccacttag

SEQ ID NO: 14947 - DNA, 666 bp, synthetic construct
  misc_feature 1..666: note = Description of Artificial Sequence: Synthetic coding sequence
  source 1..666: mol_type = other DNA
atggccagtctggaagtttctagatcccctcgcagatcccgacgagaacttgaagtgcgatccccccgccaaaacaaatacagcgtacttctaccgacttataatgagagggaaaacttacctctcattgtgtggctgctagtcaagtccttttctgagtcaggcatcaactacgagataatcattatcgatgacggcagtcctgatggtacccgtgacgtggccgaacaactcgaaaaaatctacggttccgacaggattttgcttagacctagagagaaaaaactggggctcggcacagcgtacatccatggaatgaagcatgctacaggaaactatatcattataatggatgcagatctgtcccaccacccaaagttcatccccgaatttatctccgatggggtgctcccctgctgtccaggatggagcttactaggcagctctgatcccgccatactggcatcctgggactactcaagaggtgcgaactttctaacccagatccttttacgtccaggtgctagcgatttgacgggttccttccgtctgtatagaaaagaagtcctggagaagttgattgagaagtgtgttagcaaaggttatgtgtttcagatggagatgatagtgcgagccaggcagctcaactacacaattggagagtag

SEQ ID NO: 14948 - DNA, 888 bp, synthetic construct
  misc_feature 1..888: note = Description of Artificial Sequence: Synthetic coding sequence
  source 1..888: mol_type = other DNA
atggcgagccttgaagtgtcaagatccccccggcggtcacgacgggagttggaggtccgatcgcctagacagaacaagtattccgtcctgcttccaacctataatgagagggaaaacctacccttgatcgtttggttgctggtcaaaagttttagcgaaagtggaatcaactacgaaattatcatcattgatgatgggtctcccgacggaactagggatgtggccgagcagctggagaagatctatggctcggataggattcttctccgccccagagaaaagaagctgggcctaggcaccgcttacattcacggtatgaagcacgctaccggaaactacattattataatggacgccgatctgtcccatcatccaaagttcattcccgagtttatacggaagcagaaggagggtaactttgatattgtttctggcacacgctacaagggaaacggcggggtgtatgggtgggatctgaaacggaagatcatttctgatggggtccttccatgctgtcctggatggtctttgctcggttccagcgatcctgcaatattagccagctgggactatcgctgcgagcccccaagactcgcatcacgaggagccaattttctgactcagattctcctaagaccaggggcctccgatttgacaggctcttttagactgtacagaaaagaggtgttggagaagctcattgaaaaatgcgtgtccaaaggctacgtgttccagatggaaatgattgtgcgggcgaggcagcttaactacacaattggggaggtacctatctcatttgtggaccgcgtctatggcgagagcaaattgggcgggaatgagatcgtttcttttctgaaggggttattaacccttttcgcaaccacatag

SEQ ID NO: 14949 - DNA, 1332 bp, synthetic construct
  misc_feature 1..1332: note = Description of Artificial Sequence: Synthetic coding sequence
  source 1..1332: mol_type = other DNA
atgcggcgccaggttatggctgccctggttgtttctggtgccgccgagcagggcggccgcgatggcccaggccggggacgggcgccccgggggcgggtggcgaaccagatccctcctgaaatactcaagaacccccaactgcaagctgccatcagagttttgccaagcaattataatttcgaaattccaaagaccatttggcgcattcagcaggcccaggcaaagaaggtagcactgcaaatgcctgagggtttgctgctttttgcctgcacgatagtcgacattctggaacgtttcactgaggctgaggtgatggttatgggggatgtgacctacggtgcctgttgcgtggacgactttactgcccgtgcccttggcgccgatttcctggtccactacgggcatagctgtcttattccaatggacaccagcgcccaggatttccgggtcttatatgtgttcgttgatatccgcattgacactactcacctattggattcccttagattgacttttccacccgccaccgcccttgcactggtgtccactattcagtttgtatccactctccaggccgccgcccaggagctaaaggcagagtaccgtgtcagcgtcccccaatgtaaacccctatctccgggcgagattttgggctgtacaagccctaggctgtccaaagaggtggaggcagttgtctacctgggcgacggtcgcttccatctggagtctgtgatgatcgccaaccccaacgttcccgcataccggtatgacccttactcaaaggtcctatcaagagaacactacgatcatcagagaatgcaagctgcccgccaggaggcaatcgccaccgctcgcagcgctaaaagctgggggctgatccttggtacattgggcaggcagggtagccccaaaatcctggaacatctggaatcacgactgagagccctcgggctcagttttgtcaggctgcttctgagcgagatcttcccttcaaaactttccctgcttcctgaagtcgacgtttgggtccaagtggcttgcccccgtctgtcaatagactggggtaccgcttttcccaagcctctcttaaccccttacgaggccgctgtggccctccgggacatctcctggcagcaaccctacccaatggacttttatgcgggctcgagcttaggtccttggactgtcaatcacggccaggatagaaggcctcacgccccgggccggcctgccaggggcaaagtacaggagggatccgcccggcctccgtctgcagtggcgtgtgaggattgttcatgcagggatgagaaagttgctcctctagctccttag

SEQ ID NO: 14950 - DNA, 1146 bp, synthetic construct
  misc_feature 1..1146: note = Description of Artificial Sequence: Synthetic coding sequence
  source 1..1146: mol_type = other DNA
atgattgatactcttaggccggtcccgtttgcatcagaaatggcaatctcgaagaccgttgcgtggcttaacgagcaacttgaattgggaaacgagagacttctgctgatggactgtagaccacaggaattgtatgaaagttcccacatagaaagcgccatcaacgtggccatcccaggcattatgctgcgcaggttacagaaaggtaacctcccagtcagagcactattcaccagaggagaagatagggacaggtttacacgccgatgtggtacagatacagttgttttatatgatgagtctagctccgattggaacgagaacaccggcggggagtctgttctgggcctgttgcttaaaaaactcaaggatgagggttgtagagcattctatcttgagggcggctttagcaaatttcaggccgagttttctttgcattgtgagacgaacctagacggctcgtgcagcagcagcagtccccccctgccagtcctcggtctgggcgggttacggatcagctccgattcatccagtgacatcgaatcagacctcgaccgagatccgaattctgcaacggattccgacggatcccccctgtccaactcgcagccgagcttccctgtggaaattctgccatttctgtaccttggctgtgccaaagatagcacaaacttagacgtactggaagagttcggtatcaaatatatcctgaatgtcacccccaacttaccaaacctgtttgagaatgctggggaattcaaatataaacagattcccatctctgatcactggtcccagaacttgagtcagttttttccagaggccatatcctttattgatgaggccaggggcaagaactgcggcgtgttggtgcactgtctggcaggcatttccaggagtgtgactgttaccgtggcatacctcatgcagaagttaaacctctcgatgaacgacgcctatgatattgtgaagatgaagaaatctaatattagccctaacttcaattttatgggccaattattagatttcgagcgaacgttggggctgagctcgccatgtgacaatcgcgtccccgctcagcagctgtactttacgacaccctccaaccagaatgtttatcaagttgattcgcttcagagcacctag

SEQ ID NO: 14951 - DNA, 708 bp, synthetic construct
  misc_feature 1..708: note = Description of Artificial Sequence: Synthetic coding sequence
  source 1..708: mol_type = other DNA
atgattgatactctacgtcctgtgcctttcgctagcgaaatggcaatttcgaagacggtggcctggctgaatgagcagctcgaactcgggaacgagcgcctgctgttgatggactgtcgacctcaggagctctatgaaagttctcacatagagtctgcaattaatgtagctatccccggtattatgctccgccgtctccagaagggcaacttaccagtgcgggcactgtttacccgaggagaggacagagatcgcttcaccaggcggtgtggaactgatactgtggtcctgtatgacgagtctagctctgattggaacgaaaacactggcggcgaatctgtgctaggcctcctgctgaaaaaacttaaggacgaaggatgcagagccttttaccttgaggacgaagctcgggggaaaaactgcggtgtgctcgtccactgccttgctggaatttctaggagcgtcacagtcacagtcgcatatctgatgcaaaaattgaacttaagcatgaacgatgcttacgatattgtgaagatgaagaaaagtaacatctctcctaattttaacttcatgggacaactgctcgacttcgagaggacactgggcctctcatctccatgcgataatagggttcctgcccaacagctatacttcacaacgccatccaatcagaatgtgtaccaggttgattccttgcagtctacctag

SEQ ID NO: 14952 - DNA, 354 bp, synthetic construct
  misc_feature 1..354: note = Description of Artificial Sequence: Synthetic coding sequence
  source 1..354: mol_type = other DNA
atgatcgatacgttacgaccggtcccctttgcctcagagatggccatttctaagacagtggcatggctgaatgagcaactggaactcgggaacgaaaggttgctactgatggattgtcggccgcaggaactttatgagagtagccatattgaatctgcaatcaatgttgccattccgggtatcatgttacgtcgtctgcaaaagggtaatcttcctgtgcgcgcactgttcacccgaggcgaagaccgcgatcgtttcacacgaagatgcggcactgacacggttgtgctttatgatgagagctcatccgactggaacgaaaacactggcggggagagcgtactggggctgtag

SEQ ID NO: 14953 - DNA, 1545 bp, synthetic construct
  misc_feature 1..1545: note = Description of Artificial Sequence: Synthetic coding sequence
  source 1..1545: mol_type = other DNA
atggccgacgccgaggtaatcatccttccgaaaaagcacaaaaagaaaaaggagcgcaaatccctgcccgaagaggacgtggccgaaatccagcatgccgaggagtttttgatcaagccggaatccaaagtggctaagctggatacgagccaatggcccctgctcctgaagaattttgataaactgaatgtcaggacgacccactatacaccactcgcctgcggcagcaatcctctgaagcgtgagatcggcgattatattagaacaggcttcattaacctcgataagccttcaaatccatctagtcacgaggtcgtggcctggataaggcgtatattgagggttgaaaaaacaggccattccggtactctcgaccccaaagttacgggatgcctaattgtgtgtatcgagcgggccacacgacttgttaagtctcagcaaagtgccgggaaggaatatgtggggatcgtgaggctccacaatgcgatcgagggggggactcagttgtcacgcgcccttgaaacactgaccggagctttatttcaacggcctccactcatagccgctgtcaagcgacagctgcgcgttcggaccatctacgagtccaagatgatcgagtacgacccagagcgtagactaggcattttttgggtttcttgcgaggccggcacgtacatccgaaccctttgcgttcacctgggcttactgctgggcgttgggggccaaatgcaggaactgagaagggtgcgctccggagtcatgtccgaaaaggatcacatggtcacaatgcacgacgtgttggacgcccaatggctgtatgacaaccataaggacgagtcttatctcaggcgcgttgtctaccccctcgagaaactgttgacatcacataagcggcttgttatgaaggatagtgcagtcaatgccatttgctatggtgccaagataatgcttcccggggtgctgcgttatgaggatgggatcgaagtgaatcaagagattgtggtcattaccaccaagggggaggcaatctgtatggccatcgccctgatgacaacagctgtgatatctacctgcgaccacggaatagtggccaaaattaaacgagtaatcatggaaagggacacatatcccaggaagtgggggctgggcccaaaggcaagtcaaaaaaagctcatgattaagcaggggctgctcgataagcatggcaaacccacagatagcacccctgccacctggaagcaggaatacgtggattactcagaaagcgccaagaaggaagtggtcgcggaggtcgtgaaagctccgcaggtggtggccgaggccgctaagactgctaagcggaagcgggagtctgaaagcgagagcgatgagacaccacccgcagctccccagcttatcaagaaggagaagaagaaatccaaaaaggacaaaaaggccaaggctgggctggagagcggcgcggagcccggggacggggatagtgataccaccaagaaaaaaaagaagaaaaaaaaggctaaagaagtggagctggtttcagagtag

SEQ ID NO: 14954 - DNA, 7245 bp, synthetic construct
  misc_feature 1..7245: note = Description of Artificial Sequence: Synthetic coding sequence
  source 1..7245: mol_type = other DNA
atggctgaaaacgtggtagaaccgggtccgccatctgccaagcgtccaaaactatcttccccagccctctccgccagtgcttccgacggcaccgatttcggctccctatttgacctggagcacgaccttcccgatgagctgattaattccacggagttggggctgaccaatggaggtgacattaatcagctccagacgtccctcgggatggtgcaggatgcggcatccaagcacaaacagctgagtgagcttctgcgctccgggagctcacctaacctgaatatgggggtgggaggccccggccaggttatggccagccaggcccagcagtcctcccctggcctcggcttgattaatagcatggtaaaatcccccatgacccaggccgggcttactagtccaaatatgggaatgggaacctccggccctaatcagggccctactcaatcgacaggaatgatgaatagccccgtaaaccagcccgccatgggtatgaacaccgggatgaatgcaggtatgaatcctggaatgctggcagctggcaacggccagggtattatgcctaatcaggtgatgaatggatccatcggcgcagggaggggaagacaaaacatgcagtatcctaaccccggaatggggtccgcaggcaacctgctcacggaacctttgcaacaggggagcccacaaatgggcggccagacaggcctcagagggccacagccactgaaaatgggtatgatgaacaaccccaacccttatggctccccatatactcagaaccccgggcagcagataggagcctcaggcctgggtttacaaatacaaactaagactgtgctctccaacaacctttctcctttcgcaatggacaaaaaggcagtacctggcggaggaatgcccaacatgggccagcagcccgcccctcaggtacagcagcccggcctggtgactcctgtggcgcagggcatgggatcgggagcgcacaccgcggatcctgagaaaagaaaactcattcagcaacagttagtcctgttgttgcatgctcataagtgccagcggcgtgaacaggccaatggtgaggttagacagtgtaacctgccacattgcaggacgatgaagaacgtcctgaaccacatgactcactgtcaatccgggaaaagctgccaagtggctcactgtgcaagcagccgccagatcatctcacattggaaaaattgcacacgccacgattgtccagtttgcctgcccttgaaaaacgccggggacaaaagaaaccagcagccaatcctgaccggtgctcccgtgggattaggaaatccctctagtttgggagtgggacagcagagtgcacccaacctgtcgacagtttcccagatagaccccagcagcatagagcgcgcctatgccgccttaggcctcccatatcaggtcaatcaaatgccaactcagccccaggtccaggccaaaaatcagcagaaccagcaacccggtcagtcaccccaggggatgcggcccatgagtaacatgtcagcaagtcctatgggcgtgaatggcggtgtaggtgtgcaaacgccctcactcttgtctgacagtatgctacattccgcaataaacagtcagaatcccatgatgagtgagaacgcaagtgtaccaagcttgggcccaatgccaaccgccgcccagcccagcaccactggcatccgcaagcaatggcacgaagatatcacacaggatttgagaaatcatctggtccacaaactggtgcaagcaatttttcctacgccagatccggccgcccttaaggacagacgaatggagaatttggtggcatacgcaaggaaggtggagggcgacatgtatgagagcgcaaacaatcgagccgaatactaccacctgctggcggaaaaaatttataaaatacaaaaggaactcgaggaaaagcgccgcactagattacagaaacagaatatgctgcctaacgctgccggtatggtgccggtatctatgaacccagggccaaacatggggcagcctcagccagggatgaccagcaacggcccccttcctgacccctcgatgatcagaggcagcgttcccaaccagatgatgccccgcatcactccccagtcgggccttaaccagtttggacagatgtcaatggctcagcctcccatcgttccaagacagacccctcctctgcaacaccatggacagctggcacagcccggtgctctgaatcctccaatgggatatgggcctaggatgcagcagccatcaaatcagggacagttccttcctcagacccaattcccatcgcaggggatgaacgtcaccaacatcccgctcgcaccctcaagtgggcaggctccagtatcacaggcgcaaatgtcctcctctagttgccccgtgaactcccctattatgcctccaggaagccaggggtctcacattcactgtccacagcttccccagccagcattgcaccaaaattctccgagtccagtgccttcacgcacccctacccctcaccatacccctccctccatcggtgcccaacagcctcctgcaacaaccatcccggcgcctgtgcccaccccgcctgcaatgccacctggcccacagtcccaggccttacatccacccccgcggcaaactcctacccctccaacaacccaacttccccagcaggttcagccctccctgccagcagcacccagcgccgaccagccccagcaacaaccaaggtcacaacagtccactgctgcttctgtgcctactcctaccgcaccgcttttgccaccccagccagctaccccactctcccagccagctgtctccatagagggacaggtatctaatcccccaagcacatcttccacggaagttaactcacaggcaattgccgagaagcagccaagtcaagaggtcaagatggaagccaaaatggaggtcgaccaaccggagcccgccgatactcaacctgaggacatttcggaatccaaggttgaggactgtaaaatggagagcactgaaaccgaagaacggagtacagagcttaaaacggaaattaaggaagaggaagatcagcccagcacctcagccacccagtcatcccctgccccgggtcaaagcaaaaagaaaattttcaaacccgaggagttaagacaggctcttatgcccaccctggaggcactgtacagacaggaccccgagtccctgccattccgacaacccgtcgatccccaattgttgggcatacctgactacttcgatatagtaaagagtccgatggacctctcaaccatcaagcgaaagcttgacaccgggcagtaccaggaaccatggcagtatgtggatgacatctggcttatgttcaataatgcatggctgtacaacaggaagaccagcagagtgtataagtactgttcaaaactgagtgaggtttttgagcaggagatcgatcctgtgatgcaaagtttggggtactgttgtggacgcaaattagagttcagtcctcaaactttgtgttgttacggcaagcagttgtgcacgatccctcgggacgcgacctattacagctatcagaatagatatcacttctgcgagaaatgcttcaatgagatacagggagaatccgtgagccttggagacgacccaagccagcctcaaactaccattaataaagaacagttcagcaagcgcaaaaatgacactctggacccagaattattcgtggagtgtacagagtgtggcaggaagatgcaccagatctgtgttctgcatcacgagatcatttggcctgccggattcgtgtgcgacggatgtctcaagaaatctgctcggacacgtaaagaaaacaagttttcagcaaaacgactcccatcaacccgtttaggaacttttttggagaacagagtcaatgacttcctccgccgccagaaccatcccgaaagcggggaagtcaccgttagggtggtccatgcttcggacaagaccgtcgaggtcaagccaggcatgaaagctagattcgtggactcaggtgaaatggcggagtcatttccatataggaccaaggcgctgttcgctttcgaagaaatcgatggagttgacctgtgcttctttggcatgcacgtccaggaatatggttccgactgccccccaccgaaccagcgaagagtctatatttcctacttggacagcgtccattttttccgccccaagtgtctgaggaccgctgtgtatcacgagatcctaattggatatctggagtatgtcaagaaattgggctacacaacaggtcatatatgggcttgtcccccctccgagggtgatgactacatcttccactgccatcccccagaccagaagattcctaaacctaaacggctgcaggagtggtacaaaaagatgcttgacaaggcggtgtccgagcgcattgtgcacgattacaaagatatctttaagcaggcaacggaggaccgactgacgagcgctaaagaacttccctattttgaaggagacttttggccaaatgtcctggaggaatccattaaagagctggagcaggaggaagaggagaggaagagggaggagaatacgtccaatgaaagcactgacgtgaccaaaggggatagtaagaatgccaaaaagaaaaacaacaaaaaaacttcgaaaaacaaatcatcactgtcaaggggcaataagaagaaacccggcatgccgaatgtatctaacgacctgagtcagaaactctatgctacaatggaaaaacacaaggaggtattctttgtgatacggctgatagctggacccgcagcaaacagcttgccacccattgtggacccagaccccttgatcccctgcgatctgatggatggccgcgatgccttcctgacacttgccagggacaaacatctagaattctctagcctgaggcgggcacagtggtctacgatgtgtatgctagtggagcttcacactcaatcccaggacaggtttgtttacacatgtaacgaatgtaaacaccatgtggagacacggtggcattgcactgtgtgtgaggattatgatttgtgtattacgtgttataacacaaagaatcacgaccataagatggaaaaattgggcctgggccttgatgatgaatctaataaccaacaggctgccgcaactcagagcccaggagacagcaggaggttgagtatacagaggtgtattcagagcttagtccacgcatgccaatgccgaaatgccaattgcagtctgccctcctgccagaagatgaaacgagttgtgcagcacacgaaggggtgtaaaaggaaaaccaacggaggatgtcccatctgcaaacagttgatagctctctgctgctatcatgcaaagcattgtcaggagaataaatgccccgttcctttctgtctgaatataaaacagaaactcaggcagcagcagttgcagcacaggctgcagcaagctcagatgctgaggcgtcgcatggcatcaatgcagcgaactggcgtcgttggtcaacagcaagggttgccatcccccaccccagcaacgccgactacacccactgggcagcaacctacgactcctcaaacgccccagcctacttcccagccccagcccaccccacctaatagtatgcctccatacctcccgagaacacaggcagccggtcctgtgtcacaagggaaggccgccggccaggttacaccacccacgcctccacaaacggcgcaaccccctctgcctgggcccccacccgccgctgtggagatggccatgcagattcagcgcgccgcagaaacccagagacagatggctcacgtgcaaatttttcaacgcccgatccagcatcagatgcccccaatgacccctatggcacccatgggcatgaatcctccccctatgacaagagggccaagcggacacctggaacccggtatgggaccaaccggtatgcagcagcagcccccatggtctcagggagggctgccccagccccagcagttgcaatccgggatgcccaggccagcgatgatgagtgtggcacagcacggacagccactcaatatggctccacagcctggcctcggccaggtgggcatcagtcccctaaagcccggcacagtctcacagcaggcgctgcaaaatctgttacgtacattaagatcccctagttcacccctgcagcagcagcaagtcctgtcaatcttgcatgcaaacccgcaactcctcgctgcatttatcaaacaaagagcagccaagtacgcaaactcaaatcctcagccaatcccagggcaaccaggaatgccgcagggccagccgggcttacaaccccccacaatgccggggcagcagggagtacatagcaacccagcaatgcaaaacatgaacccgatgcaagccggggtgcagagagctggcctaccgcagcagcagccccagcagcagttgcagccgcccatgggaggaatgtccccccaagcgcaacagatgaatatgaatcataacaccatgccatcccagtttcgggatattcttagaaggcagcagatgatgcaacagcagcagcagcagggggccggacccgggatagggcctggtatggctaaccataaccaatttcagcaaccacagggggtgggctatccaccccagcaacaacagagaatgcagcatcatatgcagcaaatgcagcaggggaacatgggccagatcggccagcttccacaagccctgggcgccgaggcaggtgcaagcctgcaggcatatcagcagaggttgctgcagcaacagatgggatctccagtacagcccaaccctatgtcacctcagcagcacatgctgccaaatcaagcacaaagcccccacctgcaggggcagcagatccccaatagcctcagcaatcaggtgcgcagccctcagcctgtccccagtccgcggccccagtcccagccaccccactccagtccaagcccccggatgcagcctcagcctagcccccaccatgtgtcgccgcagacgtccagcccacacccaggcctcgtggccgctcaggccaaccctatggaacagggacattttgcctcaccagatcagaatagtatgctttcccagctggcctcaaatcctggaatggcgaacctccacggcgcaagcgccactgatctcggcctttcaactgataattctgacctaaacagtaatctgtcacagtctacactcgacatccattag

SEQ ID NO: 14955 - DNA, 1314 bp, synthetic construct
  misc_feature 1..1314: note = Description of Artificial Sequence: Synthetic coding sequence
  source 1..1314: mol_type = other DNA
atggcactggccggggcaccagccggcgggccctgcgccccagccttagaagctctgctcggcgctggagctctaaggctcctggattctagccaaatcgtgattatttcagccgcccaagacgcttccgcccctcctgccccgacaggtccggcagcaccagctgccgggccatgcgatcccgacttgctactgttcgctacacctcaggccccccgccccaccccaagcgcccctagaccagctctcggcaggccccctgtaaagaggaggctagacctcgaaacagaccaccagtacctggctgagtcgtcaggaccggcgagagggcggggccgacaccccggtaagggagtcaagtcgcccggcgagaagtctagatacgagacctccttgaacctgacgaccaaacgattcctcgaattactgtcacatagcgcggacggagtcgttgacctcaactgggctgctgaggtgctgaaggtgcagaaacggcgcatttatgacattactaatgtcctggaaggaattcagttgattgccaagaagtcgaagaatcatattcagtggctggggtctcacaccacagtgggggttggtggtcgcctggagggactgacacaagatctgagacagctgcaggagtctgaacagcagcttgaccacctgatgaacatctgtacaactcagctcaggctgctcagcgaggacacagattcacagaggctggcctacgttacgtgccaggatctgcgctctatcgccgatcccgcagagcaaatggttatggtcattaaggcaccgcctgagacacagttacaggccgtcgatagttccgagaactttcagataagcctcaaaagcaaacagggtcccatcgatgtgtttctctgtccagaagagacggtcggaggcatttcccccggcaagaccccatcccaggaggtgacttctgaagaggaaaatcgggctactgattccgctacaatcgtgtctccgccccctagctcccctccatcttcccttacaaccgacccttcccaatccctgctttccttggaacaagaaccactgctgagcagaatgggctccctcagagccccggtagacgaggatcgattgtccccccttgtggccgcagactccctgctggaacacgtcagagaggatttttccgggctcctgccagaagagttcatatccctttctcccccacacgaggctcttgactaccacttcggcctagaggagggggagggaatcagagatctgttcgattgtgatttcggggacttgaccccgctcgacttctag

SEQ ID NO: 14956 - DNA, 1242 bp, synthetic construct
  misc_feature 1..1242: note = Description of Artificial Sequence: Synthetic coding sequence
  source 1..1242: mol_type = other DNA
atggcagaggcaggccctcaggcccctccacctccaggtaccccctctcggcatgaaaagtccctcggactgctgactacgaagtttgtatccttacttcaggaggccaaagacggagttttggacctgaagttagctgcagatactctcgctgtccggcaaaagaggcgcatttacgacataacaaatgtgctagaggggataggtttgatcgaaaaaaagtcaaagaactctatccagtggaagggtgtcggcccggggtgcaacactcgagagatagccgataagctgatcgaactgaaagctgagatcgaagagctgcagcagagggagcaggaacttgaccaacataaagtatgggtccagcagtctatccggaacgtgacggaggacgtgcagaacagctgtctcgcatacgttacacacgaggatatctgccggtgctttgctggggatacattactcgcaatacgcgctccgtcaggaacgtcacttgaggtccccatccccgaggggctgaatggacagaagaagtaccagattcacctcaaatcagtctctgggccgattgaggtactccttgtcaataaggaggcttggagcagtccgccagtagccgttcctgtaccaccacccgaggatctcttacagagtccgtcagccgtgtccacccccccccccctccccaagccggccctggcacagagtcaggaagcctcacgccccaattctcctcagttaacccccacggccgtcccgggctccgcagaagtgcagggcatggcgggaccggcagctgagattacggtgagcggcgggcccgggacagactccaaggactccggcgagctgtcgagtctgccactggggcctaccacactcgacacacgacccctgcagtccagcgcactgctggactcctcctccagctcatcctcttcgtcctcatcctctagcaactcgaattcgtcctccagcagcggccccaacccaagtacaagcttcgagcctatcaaggctgaccctactggggtgctggaactacccaaagaattgagcgaaatcttcgacccgactagagagtgcatgagtagtgaactgctcgaggaactgatgtcttccgaggtatttgcaccattgttgcgtctttcccccccaccgggggaccatgactacatctacaatctcgatgaaagcgagggggtgtgtgatcttttcgatgtcccggtcttaaatctgtag

SEQ ID NO: 14957 - DNA, 1164 bp, synthetic construct
  misc_feature 1..1164: note = Description of Artificial Sequence: Synthetic coding sequence
  source 1..1164: mol_type = other DNA
atgacagggaaactggcagagaagttgcctgtgacgatgtcctccctgttgaaccagctcccggacaatctctatcctgaagaaattccatctgccctgaatttgttcagtggcagctccgatagcgttgtgcattataatcagatggccacggaaaatgtgatggatatcgggttgacgaacgaaaaacccaaccccgagctgtcatattctgggagcttccaacccgcgccaggcaacaagaccgtcacttatcttggaaagttcgccttcgatagcccttctaactggtgtcaagacaatattatatcactgatgtcggcggggatactaggagtgcctcccgcctccggagccctcagcacccagacatcaaccgcgtcgatggtgcagcctccccagggcgatgtagaggcgatgtaccctgctctgcccccttatagtaactgcggcgatttgtactcggagcccgtgagcttccacgatccgcagggaaatcctgggcttgcatatagtccacaggactaccagtcggccaagccagcactcgacagtaacctgttccccatgattcctgactacaatctgtaccatcatcctaacgatatggggtccatccccgaacacaaaccttttcagggcatggatcccatccgggtgaatccacctcctataacccctttggaaacaatcaaggccttcaaggacaagcagatccatccagggttcggaagcctgccccagccccctctcacactgaagcccatccgtccgcggaaatatccaaatcggccatccaaaactccattacatgagcgaccccacgcttgtccggcagaggggtgcgatcgtcggttttcgcgcagcgatgagcttacaaggcatctccgtattcatactggacataagcccttccagtgtcggatttgtatgcgatccttctcccggagtgaccatctgacaacacatattcgcacccatactggcgagaaacctttcgcttgcgagttttgtgggcgcaaattcgctagaagcgatgagcggaaaaggcatgcaaaaatccacctgaagcagaaggaaaaaaaggctgagaagggcggcgccccctctgcttcctctgcaccacccgtgtccctggcaccggtagtgacaacatgcgcgtag

SEQ ID NO: 14958 - DNA, 687 bp, synthetic construct
  misc_feature 1..687: note = Description of Artificial Sequence: Synthetic coding sequence
  source 1..687: mol_type = other DNA
atggacattggtcttactaacgaaaagcctaatccggaactttcttacagtggatcctttcagcccgctccgggcaacaagaccgttacaatgatcccagattataatttgtaccatcaccctaacgatatgggatcaatccccgagcacaaaccgtttcagggcatggatcccattcgggttaaccccccaccaataactccccttgagaccatcaaagcttttaaggacaagcagatacaccctggtttcggaagccttcctcagccaccactgacacttaaacccattcgtcctagaaaataccctaatcggccctcgaaaacccctctgcatgaacgaccccatgcttgccccgccgaagggtgcgacaggcgattcagccgcagtgacgaactcaccaggcacctacgcatccacaccggacacaagccctttcagtgtagaatttgtatgcggtcattctcccgctccgaccacctgaccactcatatccgcactcataccggtgaaaagccgtttgcctgtgagttttgtgggcggaaattcgctagaagcgacgagcgcaagcgtcacgcaaaaatccatctgaaacagaaagaaaaaaaggctgagaaagggggggcaccttccgcctcttctgccccaccggtgagcctggctcccgtggtcacaacctgcgcatag

SEQ ID NO: 14959 - DNA, 1050 bp, synthetic construct
  misc_feature 1..1050: note = Description of Artificial Sequence: Synthetic coding sequence
  source 1..1050: mol_type = other DNA
atggaaccttgcgccgcctggtcaccccgcggcgggagggaaaatgtgatggatatcggcctcacgaatgagaagccaaatccagaactctcctattccggatcatttcagccagccccaggaaataagactgtgacctacttggggaaatttgccttcgacagcccgtcgaattggtgtcaggataatatcattagcctgatgtcagcagggattctgggggtgccccctgcttctggggcacttagcacccaaactagtaccgcgagtatggttcagcctcctcagggagacgttgaggctatgtaccctgccctccccccctacagcaactgcggggatttatactctgaaccggtcagcttccacgacccacaaggcaaccccggccttgcctacagtccacaggactaccagtccgctaagcccgccctcgatagcaatcttttcccaatgattcccgattacaatttatatcatcatccaaacgatatgggaagcatccccgaacataaacctttccagggtatggacccaatacgggttaatcctccccctatcacgcctcttgagaccataaaggctttcaaagataagcagatccaccccggatttgggtcattgcctcaaccgccactaactttgaaacccatcaggccaaggaagtatcctaaccggccttccaaaactcctctgcatgagaggcctcatgcatgcccggctgagggatgcgaccggcgctttagtaggtcagatgaacttactcggcatctgaggattcatacaggccataagccctttcagtgtcgaatatgcatgcgctcctttagtagaagtgaccatctgactacacacatcaggacacataccggtgagaaaccttttgcctgtgaattctgtggtcgaaagtttgctcgttccgacgagcgaaagcgccacgctaaaatccacctcaagcagaaagaaaagaaggctgagaagggtggggccccctctgccagcagcgcgccccctgttagtctagctcctgtggtcacaacatgcgcctag

SEQ ID NO: 14960 - DNA, 3696 bp, synthetic construct
  misc_feature 1..3696: note = Description of Artificial Sequence: Synthetic coding sequence
  source 1..3696: mol_type = other DNA
atggctagcgtgtggaagagacttcagcgtgtcgggaaacacgctagtaagttccagtttgtagcttcataccaggagctgatggtggagtgcaccaagaagtggcagcccgacaaattggtggtggtctggacgcggcggtctcggcgcaagtcctctaaggcccactcctggcagcccgggatcaagaatccatatcggggcgtcgtggtttggccggtgcctgagaacatcgagatcacagtgacactgtttaaggatcctcacgcggaggaatttgaagacaaggagtggacgtttgttattgaaaatgagtcaccttccgggagaagaaaagccctggccaccagcagcatcaatatgaaacaatacgcatccccaatgccaacacaaaccgacgtgaagctgaagtttaaacccttatctaagaaggtggtgtccgcggcacttcagttctccctgtcctgtattttcttgagggaggggaaggctacagacgaagatatgcagagtctggcgtctctgatgagcatgaagcaggcggatatcggtaacctggatgactttgaggaagacaatgaggacgatgacgaaaaccgcgtgaaccaggaggaaaaggccgccaagataacagaaatcgtgaatcagctcaatgcgctcagtagcctggacgaggaccaggatgactgcataaagcaggccaacatgcggagcgcaaagtctgcttcctcatcggaggaattgattaacaagcttaatttcttggatgaggctgagaaggatctggcaactgttaacagcaatcctttcgatgacccagacgccgctgagctgaatcccttcggtgaccctgatagtgaagaacccatcaccgaaactgccagcccgcgcaagactgaagattctttttacaacaattcatataacccattcaaggaggttcagactccccaatacttgaacccattcgacgagcccgaggcctttgttaccatcaaggactccccaccgcagtcaacaaagaggaaaaatattagaccagtggatatgtcgaaatacctgtacgctgactcctcgaagacggaggaagaggaacttgatgaaagtaaccccttttatgaacctaagtcgaccccgcctcctaacaacttagttaacccagtgcaggaactggagactgaaagacgcgttaagagaaaagcccccgcaccgccagtcctgtctcccaagacaggagtcctcaacgaaaatacggtgtctgctggtaaggatctgagcacctcaccgaaaccatcacctataccaagccctgtgctgggcagaaagcctaacgcgagccagtcattgctcgtgtggtgtaaggaagtgaccaagaattacaggggcgtgaagattacgaacttcacaacaagttggcgcaacggtttatcgttctgcgctatactgcatcatttcaggccagatctcattgattacaagtctctaaacccccaggacatcaaggagaataacaagaaagcttacgacgggtttgcctcaattggcattagtagattgctggagccatctgacatggtccttttagcaatccccgacaaactgactgtcatgacatatctttatcagattcgtgcacatttctccggacaggagttaaacgtggttcaaatagaggagaactccagcaagagcacatacaaggtgggcaactacgagacagacaccaactccagcgtggaccaggaaaagttctacgccgagctctcggacttaaagcgagaacctgaacttcagcagcctatcagcggcgccgtcgacttcctgagtcaggacgattccgtgtttgtgaatgactccggagtcggagaaagcgagagtgagcaccaaaccccggatgatcacttgagcccgagcacagcaagcccctactgtcgccggacgaaaagtgacaccgaaccccagaaatcccaacaaagctcaggccggaccagtgggagcgacgatccggggatttgctcgaacacagacagcacccaggcccaagttctgttgggtaagaaacgattgctgaaagccgaaacactggaactcagcgatctctatgtttccgacaaaaagaaggacatgtcaccgcctttcatttgtgaagaaaccgatgagcagaagcttcagactctcgacatcggatctaacctggaaaaagaaaagctggaaaactcacggtccctcgaatgccgctctgacccagagtccccaatcaagaaaacttcgctgtctccaacttctaagcttggttactcatattcccgcgatctggacctggcaaagaagaagcacgcgagtttgcggcagaccgaatctgaccccgatgcagatcggactacactgaaccacgctgatcactcgtccaagatagttcaacaccggcttttgtcccgacaggaagagcttaaagaacgggcaagagtgctcttggaacaggcacggagagatgctgccctcaaggcaggcaacaaacataatactaacaccgccacacccttctgcaataggcagctgtcagatcagcaagatgaagagcgaagacgccaactaagagagagagctcgccagctgatcgcagaggcgaggagcggggtgaaaatgtccgagctgccttcgtatggcgaaatggccgccgagaagctgaaagagaggtctaaggccagcggagatgagaacgacaacatcgagatagacaccaacgaggagatccctgagggctttgtggtgggaggaggggacgagctgactaaccttgagaacgacttggacacccccgaacagaactcaaagctggtagacctgaagctaaagaagctgttggaggtccagccacaggtggcgaactccccatcatccgctgctcagaaggccgtcaccgagtcaagtgaacaggatatgaaaagtgggacagaagacctgaggaccgagagactgcagaaaacaactgagaggttccgcaaccctgtcgtgttctctaaagacagcacggtccggaagacccagctgcaatctttctctcagtacatcgaaaaccggcccgagatgaaaaggcaaaggagcatacaggaagataccaagaagggaaatgaggaaaaagcagccattacggaaacacaaaggaaaccttcagaggacgaagtgttaaataaaggattcaaggatacttcccagtacgtggtcggagagttagcagcactggaaaacgagcaaaagcagatcgatacacgcgctgccctagtggagaaacggttacgctaccttatggatactggaaggaatactgaggaggaggaagccatgatgcaggagtggtttatgcttgttaataaaaaaaacgcacttatcaggcgaatgaatcagctctctctcttagagaaggaacacgatctggagagacgatacgaattactcaacagagagctccgtgctatgctcgccatagaggattggcaaaaaaccgaggcgcagaaacgccgggaacagctgctactcgacgagcttgtggccctagtgaataagcgggatgcgctggtgcgggatctagacgcacaagagaaacaggccgaagaggaagacgaacacttggagcgcactctcgaacagaataaaggcaaaatggctaaaaaagaagaaaaatgtgtactgcagtag

SEQ ID NO: 14961 - DNA, 3591 bp, synthetic construct
  misc_feature 1..3591: note = Description of Artificial Sequence: Synthetic coding sequence
  source 1..3591: mol_type = other DNA
atggcgtccgtctggaaacgcctccaaagagtaggcaagcacgcctcgaaattccaattcgtggcatcatatcaggagctcatggtggagtgtaccaaaaaatggcagccggacaaactggtggtcgtatggacccggaggtcacgaaggaaaagcagtaaagcccactcatggcagccaggcattaaaaatccatacagaggggtggtggtttggcccgtccccgagaacatcgagatcacagtgacgctgtttaaagacccccacgccgaagagtttgaggacaaagaatggaccttcgtcatcgaaaatgagtctccctcaggacgcaggaaagcgctggcgacgtcttccataaacatgaagcaatacgcaagccccatgcctactcagacagatgtcaaactcaaattcaaacccctttcaaagaaagttgttagtgctgcgctgcagtttagcctcagctgcatattcctccgcgaaggcaaagcaacagacgaggacatgcaatccctggcgagcctcatgtcaatgaaacaggcggatatagggaatctcgacgattttgaggaagacaatgaagatgacgacgagaatcgagtcaatcaggaagaaaaagccgccaagattaccgaactcataaataagttaaactttttggatgaggcagaaaaggacctcgccaccgttaactctaacccatttgacgaccctgacgctgccgagctcaacccctttggcgatcccgatagtgaggagccaataacagaaacggcttctccccggaaaacagaagactctttctacaacaactcctataaccctttcaaggaagtgcagacaccccagtacctcaatcctttcgacgaacccgaggctttcgtcaccataaaagactcacccccccagtctacgaagcgaaagaatatccggcctgtggatatgtcgaagtatctgtatgcagactcctccaagactgaggaggaggagttggatgaaagcaaccctttctacgagccaaaatccacccctccacccaataaccttgtcaatccggtacaggagctcgagaccgagcgacgtgtgaagaggaaggctcccgccccaccagtactcagtcctaaaacgggcgtgctgaatgaaaacacagtctcggcagggaaagatctctcaacctcccccaaaccttcacccattcccagcccagtgcttggacgcaagcccaacgcctctcagtccttactcgtgtggtgtaaagaggtcacaaagaattatcggggggtgaagataaccaatttcactacttcctggcgcaacgggttgagcttttgcgcaattttacatcacttcaggccagatctgattgattataagtccttgaatccccaagatatcaaagagaataataagaaggcctatgacggctttgccagcataggaatctccaggcttttggaacccagcgacatggttctgcttgcaatccctgacaagcttaccgtcatgacttatctgtatcagattcgagctcatttctctggtcaggaactcaatgttgtgcaaatcgaagaaaacagctctaagtctacctataaggtgggcaattacgaaaccgacaccaatagctcagtcgaccaggagaaattctacgccgaattgtcagatctaaaacgtgagccggagcttcaacaacctatcagcggagccgtcgattttctctcgcaggacgattctgttttcgtaaatgattcaggggtgggagaatcggaaagcgaacatcaaaccccagatgatcatctctctcccagcactgccagcccctattgtagacggaccaagtctgatactgaaccccagaagtctcagcaaagtagcgggagaacgtctgggtctgatgatcctggaatttgttctaacacagattcaactcaggcccaggtcttgttgggcaagaaacgtctactcaaagccgagaccttggagctgtccgacctttatgtatctgacaaaaaaaaagacatgagcccaccctttatttgcgaagagaccgatgaacaaaagctgcagaccctggatatcgggtcaaacttagaaaaagagaagctggaaaacagcaggtcattggaatgccggagcgatcccgagtcccctatcaaaaagacatcactctcccccacctctaagctgggatactcatacagcagggacctggacttagcgaagaaaaaacatgcgagtctgcgccaaaccgagagtgatcccgacgcagataggacaacattgaaccacgccgaccatagctcgaagattgtgcagcaccgtctactgagccggcaggaggagctgaaagaacgtgccagagttctacttgagcaagcacggcgcgacgcggccctgaaggccggtaataaacacaatactaacacagccacacctttctgcaataggcaactgagcgatcaacaggacgaagaacgccgccgccagctcagggagcgggccagacagctgattgctgaagcacgttcaggcgtgaaaatgtctgagctgcccagctacggagaaatggccgcagaaaagctgaaggaaaggagtaaagccagcggcgacgaaaatgacaatatagagattgacacaaatgaggagatcccggaagggttcgtcgtaggaggtggggatgaattgacaaacctagaaaatgatctggatacaccagaacagaatagtaagctggtggacctcaaactcaagaagctgctcgaagtgcaaccacaagtggccaactcaccaagctccgctgcccaaaaggcagttactgaatcaagtgagcaggatatgaaaagtgggaccgaagacctccgtactgaacggctgcagaaaaccactgaaaggtttagaaaccctgtcgtgtttagcaaagatagcactgtccgtaagacacagttacagagtttctctcaatatatagaaaacaggcctgaaatgaagaggcaaagatccatccaggaggacaccaagaaggggaatgaggaaaaagcagccatcacagagactcagagaaagccatccgaagacgaggtgctgaataaaggctttaaagatactagccagtacgtggtgggggagctggccgccctagaaaacgagcagaagcagattgatacccgtgcagcactcgtcgaaaaacgcctgcggtacctgatggataccggacgcaatacggaagaggaagaagccatgatgcaggagtggttcatgctcgtgaataagaagaacgcactcatccgccgtatgaaccagctatcactgctggagaaggaacacgatttggaacgccgctacgagctgctaaacagggaactccgagcaatgctcgcaatagaagattggcagaaaacagaagcccagaagcggcgagaacaattgctcctggatgaactcgtagcactcgttaataagcgcgatgcgttggtgagagatctggatgctcaggaaaagcaggcagaggaagaggatgaacatcttgagaggactctcgagcagaacaagggaaaaatggccaaaaaagaggaaaagtgcgtattacagtag

SEQ ID NO: 14962 - DNA, 3483 bp, synthetic construct
  misc_feature 1..3483: note = Description of Artificial Sequence: Synthetic coding sequence
  source 1..3483: mol_type = other DNA
atggcgagcgtgtggaaaaggctgcagagagtggggaaacatgccagcaaattccagttcgttgcctcgtaccaagaactgatggtggaatgcactaagaaatggcagccagacaagcttgtagtggtgtggactcgcaggagcagacggaagtcgtcaaaggctcattcttggcagcccggcatcaaaaatccgtatcgaggcgtcgttgtgtggccagttccagagaatatcgaaattacagtaactctgttcaaggatccccacgctgaagaatttgaggacaaggaatggaccttcgtcattgagaatgagtcgccatcgggcaggaggaaggcactcgccacgagctccattaacatgaaacaatatgcctcaccaatgccgacccagaccgacgtgaagctcaagttcaaaccgctgagcaagaaagtcgtgtccgcggcactccagttctctctctcatgcatcttcttgcgggagggtaaagccacagacgaggacatgcagtccctggcaagcctgatgagtatgaaacaggccgatatcggtaatctagatgattttgaggaagataatgaggatgatgatgagaacagagtgaatcaggaggagaaggccgctaaaatcaccgaattaataaacaaactcaatttcctagatgaggcggaaaaagatctggcaactgttaattcgaaccctttcgatgatcctgacgcagcagaactcaacccctttggcgaccctgactccgaggaaccgatcactgagaccgcgtcccccagaaaaacagaagatagcttctataataactcctataacccatttaaagaagtacaaacgcctcagtatcttaacccttttgatgagcccgaggcctttgtgaccattaaagacagtcccccacaaagtaccaagaggaaaaacattaggcctgtcgacatgagcaagtatctgtatgcagacagctccaagacggaggaggaggaactggatgaatccaatcccttctatgagcctaagtccacccccccccctaataatctggtcaaccctgtccaagagctggagaccgaacggagagtgaagcgaaaagcccccgcacccccggttctgagtcccaagacgggcgtcctcaatgaaaacactgtaagcgccggaaaggatctgtcgacaagtccgaagcccagtcccattccatctccggtcctggggcgtaagcccaacgctagccaatccctgttggtgtggtgtaaagaagttacgaaaaactacagaggagtaaaaattaccaatttcacaacctcatggagaaacggcttgtctttctgtgcgattctgcatcattttagaccagatctcatcgattataaatctcttaatccacaggacatcaaggaaaacaacaagaaagcctacgacgggttcgcgtctataggcataagtcgactgctggagccctccgacatggtacttctggccattcctgacaagttgacagtaatgacatacctgtaccagatccgggcccacttctccggccaggaattgaacgttgtgcagattgaggagaatagctccaaatcaacctataaggtagggaattatgagacagataccaacagctccgttgatcaggagaaattttacgctgagctcagcgacctcaagagggaaccagagctgcagcagccaattagtggggccgtcgattttctctctcaggacgactcagtgttcgtcaatgatagtggggtcggtgaaagcgagtcggaacaccagacccctgacgaccacctgagcccatcaacagcctctccatattgccgacgcactaaatctgacacagaaccgcaaaaatcgcaacagtcaagtgggcgcactagcggctcagatgatcctggtatctgttccaatacagactcaacgcaggctcaggtcctgctgggaaaaaagaggttgcttaaagcagagacgttagagctgagcgacctgtacgtatccgataagaaaaaagatatgtcccctccttttatatgtgaggaaactgatgaacaaaaattgcagacattggacatcggctctaacctcgagaaagaaaaactcgagaactctcggtccttggaatgccgctccgacccggagtcacctatcaagaagacatctctttcccctaccagcaaattggggtactcatactcaagggatctggatctggcaaaaaagaaacatgcttccctacggcagactgaaagcgatccggatgccgaccgtactaccctaaaccacgcggatcattcctcaaagatcgttcagcaccggctcctaagtaggcaggaagagctgaaggagcgggctcgcgtgttactggaacaagcccggcgggacgctgcccttaaagcaggcaataaacataacacaaacacagcaacacccttctgtaatcggcaactgagcgatcagcaagatgaggagaggagacggcagctgcgagagagggctagacagctcatcgcagaggcgcgctctggcgtgaagatgagtgaactgcctagctatggggaaatggccgccgaaaagcttaaggagagatctaaagcatctggcgagcaaaacagcaagctcgtggatctcaaactcaagaaattgttagaggtccagccccaagttgctaacagtcctagcagcgccgcccagaaggccgtcaccgaatctagcgagcaggatatgaagagtggcaccgaggatttgaggacagaacgcttgcaaaaaacaacagaaagatttcgaaatcccgtggtgttctcaaaggactctaccgttcgaaagacccagctgcaaagtttcagtcagtacattgaaaatagacccgaaatgaagcgtcagcggtctatccaggaggatacgaagaagggaaacgaggaaaaagccgctattacagaaacacagcgcaagcccagtgaagacgaagtcctcaataaaggattcaaggacacgagtcagtacgtggtcggagaactcgccgcactggaaaacgaacagaagcaaattgacaccagagccgcccttgtggagaaaaggcttaggtatcttatggacaccggaagaaacactgaagaggaggaggccatgatgcaggaatggtttatgctcgtgaacaagaagaacgcgctcataaggcggatgaaccagctcagcttactggagaaagagcacgacctcgaacgccgatatgagctcctgaatcgcgaactcagagcgatgctggcgattgaagattggcaaaagaccgaggcgcaaaaacggcgagagcagctattactagatgaattggtcgctctggtgaataaacgggatgctctggtgcgggatctggacgcccaggagaaacaggctgaggaggaggatgaacatctcgagcggaccctggagcagaataaaggtaagatggccaagaaggaagagaaatgtgttctacagtag

SEQ ID NO: 14963 - DNA, 3591 bp, synthetic construct
  misc_feature 1..3591: note = Description of Artificial Sequence: Synthetic coding sequence
  source 1..3591: mol_type = other DNA
atggcatccgtgtggaagcgcctgcagagggtgggtaagcacgcatctaaattccagtttgtcgccagctaccaggaattaatggtggagtgtaccaaaaaatggcagccggacaagctggttgtagtatggaccaggcgaagccggcggaagagcagcaaagcgcacagctggcagcccggcatcaagaacccttacaggggcgtcgtggtctggccagttcccgagaatatcgagattaccgtcacactatttaaggatccgcacgctgaagagttcgaggataaagaatggacattcgtgattgaaaacgaaagtccatccggtcgcagaaaagctctggctacttcaagcatcaatatgaaacagtacgcgagcccaatgccaacccagactgacgtgaaattgaaattcaagccgttgtccaaaaaagtggtatccgctgcactccagttctcactgtcttgcatttttctgagagaggggaaggcaaccgatgaagatatgcagtccctagcaagcttgatgtccatgaaacaggctgacattgggaatcttgatgacttcgaagaggataatgaagacgatgacgagaaccgggtaaaccaggaggagaaggccgccaagatcaccgagctcatcaacaagttgaattttctggatgaagcagaaaaggacctggccaccgtcaactccaacccgtttgacgaccctgacgccgcggaattaaacccttttggggatccagactccgaagagcctatcacggagacggcgagccctcggaaaactgaggacagcttttacaataactcatacaatcccttcaaagaggtacaaacgccgcaatacctgaatccgttcgatgaacccgaagccttcgttactatcaaggactcccccccccagagcaccaagaggaagaatatccgcccagtggatatgtcaaagtacctatacgccgactccagcaaaactgaggaggaggaactggatgagagcaatcctttctatgagcctaaatctactccaccaccgaacaatttagtgaatcccgtgcaggaactcgaaaccgaacgcagagtgaagcgcaaagcacccgccccacctgttctgtcaccaaagacgggcgtactgaacgaaaatacggtgtcagctggtaaagacctgagcacctcaccgaagccaagccctatcccaagcccagtgctggggcgaaagccgaacgccagccagagcctgctcgtgtggtgcaaagaggtgactaaaaactaccgcggcgtcaaaattactaactttactacttcttggaggaatggcctgtctttttgcgcaattctgcatcacttccgccctgatttgattgattacaaatccctgaaccctcaggacattaaggagaataacaagaaggcctacgacgggttcgcttcaatcggcatcagcaggttgcttgaaccctctgacatggtgctccttgcaatccctgataagctgaccgtgatgacttacctgtaccaaattagagcccatttcagtggtcaggagctgaatgtggtacagatcgaagaaaattccagcaagtccacctacaaggtgggaaattacgaaactgacaccaattcctccgtcgatcaagaaaaattttacgctgaactgtccgatcttaagagggagcctgaacttcagcagccgatctcaggcgctgttgatttcctgagccaggatgattcggtgttcgttaacgattcaggtgtgggggaaagtgaatccgaacatcagactccagatgaccacctgtctccatccactgcctccccatactgccgccgcacgaaatccgacactgagcctcagaagtcccagcaatcgtccggtagaacatctggatccgacgacccagggatctgtagtaataccgactctacacaggctcaggtgttgctcgggaaaaagagactcctgaaggctgagaccctagaattaagcgatctctacgtgtcggataagaaaaaagacatgtctcccccatttatctgcgaggaaactgacgagcagaaactgcaaaccctagacattgggagcaacctggagaaagagaaactggagaacagtcgcagtttggaatgccgttcagacccagagagcccgattaagaagacaagcctctctcccacaagcaaattgggctactcatacagccgagatctcgacctggcaaagaaaaaacacgccagtctgcgtcaaacggaaagcgatccagacgccgacagaaccactttaaaccacgcagatcactcctctaagatcgtgcagcaccggctgcttagccgccaggaagaattgaaggagcgggctcgcgtgctcctagagcaggcaagaagggatgctgccttaaaagctggcaataaacataatacaaacaccgcgacacccttctgcaatcggcagctctctgatcaacaggatgaggagagacgtcggcagttgagagaaagggcacggcagctcatcgcagaagccagaagcggcgtgaaaatgtcagagttgccctcatatggcgaaatggccgctgagaagcttaaggaacgatcgaaggcatccggcgatgaaaatgataacattgaaattgacacgaacgaggagattccagaggggtttgtcgtcggaggtggggatgagcttactaacttggagaacgacttggatacccctgagcagaactccaaacttgtagacctcaagctgaagaagctccttgaggtacaacctcaggtggctaatagccccagtagtgccgcacagaaggcagttacggagagttccgagcaggacatgaagagtgggacagaggatttacgcactgagaggctgcaaaagaccaccgaacgcttccgcaacccagtggtctttagtaaggatagcaccgtgagaaagactcagttacaatcattctcccaatacatcgagaataggccagagatgaaaagacaacggtctatccaagaggacactaagaaggggaacgaggaaaaagctgccattacagagacgcagagaaaaccttcagaggatgaggtgctgaataaaggctttaaggatacctcccagtacgttgtaggagagcttgccgcactggaaaatgaacagaaacagatcgatacaagggcagctctggtcgagaagcgcctgcgatacctgatggacacggggagaaataccgaagaggaggaagcaatgatgcaggagtggttcatgctggtgaacaagaagaacgccctgatacgcagaatgaatcagttgagtctattagagaaggaacatgacctcgaacgcagatacgaattgctgaacagagaactgagagctatgctagctatagaggactggcagaagactgaggcccagaaacggcgtgagcagctcctgttggatgagctcgtggccctagtgaacaagagagacgcattagtaagagatctcgacgctcaggaaaagcaggccgaagaagaagatgaacatctagagcggaccttggaacagaataagggcaaaatggccaagaaggaggagaaatgcgttctgcagtag

SEQ ID NO: 14964 - DNA, 933 bp, synthetic construct
  misc_feature 1..933: note = Description of Artificial Sequence: Synthetic coding sequence
  source 1..933: mol_type = other DNA
atggctagtgtctggaagaggttgcagcgagttggcaaacatgcctctaagtttcagtttgtcgcctcttaccaggagctcatggtggaatgcacaaaaaagtggcagcccgataaactggtggttgtctggacacgcaggagcagacggaagtcatcaaaggcgcacagttggcaaccgggtataaagaacccttacagaggagttgtagtgtggcctgtgccagaaaatattgagattactgtgaccttatttaaagacccccatgctgaagaattcgaagacaaggaatggacatttgtgatcgagaacgagtccccttccgggaggcgcaaagccctcgcgacctcctctatcaacatgaagcagtatgcatctcccatgcctacacaaactgacgttaaattgaaattcaaaccattgtccaagaaggtagttagtgcagctctgcagttttctctgagttgtatcttcctccgcgagggaaaggccacagacgaagacatgcagagtctagcatcactgatgagcatgaaacaggccgacatcggcaacctggatgacttcgaagaggacaacgaggacgatgacgagaaccgggttaaccaggaggaaaaggcagccaaaattaccgagctgattaataaactcaactttctggatgaagccgaaaaggatttggccacggtgaattcgaacccctttgacgaccccgacgctgcagaactgaacccattcggggaccctgattctgaggaaccaattacagagacagcaagcccacgcaaaacagaagactccttctacaacaatagctacaacccatttaaagaagtgcagaccccacagtacctaaaccctttcgacgagcccgaggccttcgtcactattaaggattcccccccgcagagcacaaagcggaagaacatttag

SEQ ID NO: 14965 - DNA, 234 bp, synthetic construct
  misc_feature 1..234: note = Description of Artificial Sequence: Synthetic coding sequence
  source 1..234: mol_type = other DNA
atggcctcggtgtggaagcgtctgcaaagagtgggaaaacacgccagtaagtttcaattcgtagccagctaccaagaactgatggtggaatgtaccaagaagtggcagccagacaaattagtggtcgtatggactagaagaagccgcaggaaaagtagcaaagctcacagctggcagccaggcatcaaaaacccctatcggggagtggtcgtctggccagtgcccgagaattag

SEQ ID NO: 14966 - DNA, 3483 bp, synthetic construct
  misc_feature 1..3483: note = Description of Artificial Sequence: Synthetic coding sequence
  source 1..3483: mol_type = other DNA
atggcatccgtttggaaacgactccaaagagttggaaagcacgcctcaaagttccaatttgtagcgtcgtatcaagagctgatggtggagtgcactaaaaagtggcagccggacaaactggtggttgtctggactcgccgttcccgtcggaaatcatcaaaggcgcacagttggcagcctggaatcaagaatccttaccgaggggtggttgtgtggcctgttccagaaaatattgagatcacagttacactctttaaggacccccatgctgaagaatttgaggataaagaatggacgttcgtaatcgaaaatgagtccccgagcggcaggagaaaggcactggcgacttcatcaatcaacatgaagcaatatgcctcgcccatgccgacccagacagatgtgaaattgaagttcaaacctctgagcaagaaggtcgtaagtgctgccttacagttctccttgtcgtgtatttttctgcgggagggtaaggcaactgatgaagacatgcagtctcttgcatcactgatgagcatgaaacaggcggacatcggaaatctggacgacttcgaggaggataacgaagacgacgacgaaaaccgcgtcaaccaagaagaaaaggctgctaaaatcaccgaacttattaacaagcttaattttctagatgaggctgagaaggacctggccacagtgaacagcaatccatttgacgaccccgatgcagccgagttgaaccccttcggagaccctgacagcgaagaaccgatcacagaaaccgcgtccccaagaaaaacagaggacagcttttacaataatagctataatcccttcaaggaggtccagaccccccagtatctcaatccattcgacgagcccgaagctttcgttactatcaaagactcccccccacagtctactaagcgcaagaacattagacctgttgacatgagtaagtacctgtatgccgattcctctaaaactgaagaagaggagttagacgaatctaatcctttttacgagccgaaatcgaccccacctccaaacaatctcgttaatcctgtgcaggaactggaaaccgaacgacgggtaaagcgtaaggcaccagcaccacccgtactctcgccaaagacaggggtgctcaacgaaaacaccgtctcagctggaaaagatctgagtacctcaccaaagccttcacccattcccagtccggttctgggtagaaagccaaacgcatcacaatctctgctagtgtggtgtaaggaagttacaaaaaactatcgcggagtcaagataacaaatttcactacgagctggcgcaatggcctttctttttgtgctattttgcatcactttaggcctgatttgattgattacaaaagtctgaatccccaggacatcaaagagaacaataagaaggcctacgatggattcgcatctatcggaatctctcggctgctagagccgtctgacatggtgctgttggcgatccctgataaacttaccgttatgacctatttgtaccagatcagggcacattttagtggccaggaacttaacgttgttcagatcgaggagaatagctcaaagtccacctataaagtgggcaactatgaaacagatacaaactcaagcgtagaccaggagaaattttacgcagaactgtccgaccttaagcgcgaacctgagctgcaacagcctatcagcggggcagtggactttctgtctcaagatgactctgtgtttgtaaacgattccggcgtcggcgaaagcgagtcagagcatcagacgcccgacgaccacctgtccccaagtaccgcgtctccttactgccgtagaacaaagagcgacaccgagcctcagaaatctcaacaaagttccggcagaacatctggctccgatgaccccggaatttgctctaataccgactcaactcaagcacaagttttgctgggcaaaaagagactgctgaaggccgagaccctggaactgtcagacctgtacgtgagcgataaaaagaaagatatgtctccccccttcatctgcgaagagacggacgagcaaaaactccagaccctggacatcggctctaatctcgagaaggagaagctggagaactcaaggagcctggagtgccgttcagaccctgagtccccgataaagaagactagcctttcgccaacttccaagctggggtatagctacagccgcgatctggatcttgcaaaaaagaagcacgccagtctgcgccagaccgagtctgatcccgatgccgacaggacgactctcaaccacgccgaccatagtagcaagattgtccaacaccggttgctgagccgccaagaagagctcaaagagcgcgcacgcgtgctgctggagcaggcccgcagagacgccgctttgaaagccggaaataaacataatacgaacacagccactccattctgcaaccgccaactttccgaccaacaggatgaggagcgaagacggcaactgagagagagagcacgccagctcattgccgaggccagatcaggggtgaaaatgtcggagttacctagctatggcgagatggctgccgaaaagctgaaagagcggtctaaggcttcaggagaacagaattccaagcttgttgacctgaagctcaaaaaactcctcgaggtccagccccaggtagcaaattccccatcctctgcagcccagaaggcggtaacagagagctccgagcaagacatgaagagcggtacggaggacttacggacggagaggctgcagaagacaaccgaaaggtttagaaaccccgtggttttctctaaagatagcaccgttaggaaaacccaattacagagcttctcccagtatattgaaaacagaccagaaatgaagcgccaaagaagcatacaagaggacactaaaaaggggaatgaggaaaaagccgcaattaccgaaacccagcgaaaaccttcagaggacgaggtcctgaacaaagggttcaaggacacctcccagtacgtggtcggcgagctggctgccctagagaatgagcagaagcagatagatacacgtgctgccctggttgaaaaacggttgcggtacctcatggacactggaagaaacacagaggaggaggaagcgatgatgcaggaatggttcatgttggtgaataagaaaaacgccttgatcagaaggatgaaccagctcagtcttctggagaaggaacatgaccttgaacggaggtacgagctgctcaatcgggaactgagagctatgctggccattgaagattggcagaagacagaagcacagaagaggagggagcaactcctgctcgacgagctcgtggctctcgtgaacaagcgggacgcacttgtgcgggacctcgacgcccaggagaaacaagctgaagaagaagacgagcatcttgagcggacactcgagcagaataaaggaaaaatggctaaaaaggaagagaaatgcgttctacagtag

SEQ ID NO: 14967 - DNA, 609 bp, synthetic construct
  misc_feature 1..609: note = Description of Artificial Sequence: Synthetic coding sequence
  source 1..609: mol_type = other DNA
atgaagcgccagagaagtattcaggaggatacgaaaaaaggtaacgaggagaaggcggcaatcaccgaaacacagcgtaagccctctgaagacgaggtcctgaacaagggcttcaaggacacatcacagtacgtagttggcgagctcgctgcccttgaaaacgaacagaagcagatagatacccgagctgcactcgtggagaaacgccttcggtacttgatggacaccgggagaaatacagaggaggaggaggcaatgatgcaggaatggttcatgctcgtcaacaagaaaaatgcactgatacggcgcatgaatcagctatccttacttgagaaggagcatgacctcgagaggcggtacgagctcctgaatagagaactaagggccatgttagcaatcgaagattggcaaaaaacagaggcccaaaagcggcgggaacagctattgcttgacgagctcgtcgccctcgtgaataaacgcgatgcactggtccgtgatctggacgctcaagaaaaacaggctgaagaagaagacgagcatcttgaacggactcttgaacagaataaggggaaaatggcaaaaaaggaggagaagtgcgtactgcaatag

SEQ ID NO: 14968 - DNA, 1287 bp, synthetic construct
  misc_feature 1..1287: note = Description of Artificial Sequence: Synthetic coding sequence
  source 1..1287: mol_type = other DNA
atggatcctagtgtgaccctgtggcagttcctgttgcagctactccgcgaacaggggaacggccacatcatctcgtggacctccagggacggtggcgaatttaaacttgtcgatgctgaggaggtggcaagattgtgggggttgcggaagaacaagaccaacatgaattacgacaagctgagcagagctctgaggtattattatgataagaacattataagaaaggtgagcggccagaaattcgtgtataagttcgtttcctaccctgaggtagctggctgcagcactgaagattgccctccacagcctgaggtgagtgtaacttctaccatgcccaacgtcgctccagccgccatacacgcggcaccaggggataccgtttctggtaagcctggaactcccaagggggctggcatggccggtccgggtggcctagctcggtcttcaagaaacgagtacatgcggtccggtctctatagcacatttacaatacagtcccttcaacctcaacccccaccgcacccccgacctgcggtggtgctcccttctgctgccccggccggggccgccgcaccaccttctgggtctagaagtactagtccctccccactcgaggcctgtctggaggcggaggaagccgggcttcccctgcaggttatcctgactcccccagaggcaccaaacctcaagtctgaagagttgaacgtggagcctgggctgggcagagccttgcccccagaggtgaaagtcgaaggccccaaggaggaactcgaggtagccggagagcgtggtttcgtgcccgaaacgacgaaggcagagccagaggtgcccccacaagagggggtgccagcccgtctgcctgcggtcgtcatggacactgcaggccaggccggcggccacgcggcaagctctccagagatctctcagccccagaagggcagaaagccgcgcgacctcgaactccccctcagtccaagccttctaggaggccccggtccagaacgcacacccggaagcggatccgggtctggactgcaagcgcccggaccggctctcacgccatcattgcttccaacgcacaccctgacacccgtgttactgactccttcttcactccctcccagcattcacttctggtccactctgtcaccaatcgcccctaggagccccgcaaaactgagtttccagttcccttctagcggttctgcccaggttcacatcccctccatctcagtagacgggcttagcacaccagtcgtgctcagccctggaccacagaagccttag

SEQ ID NO: 14969 - DNA, 288 bp, synthetic construct
  misc_feature 1..288: note = Description of Artificial Sequence: Synthetic coding sequence
  source 1..288: mol_type = other DNA
atggacccatcggttacgctgtggcaatttctcctccagctgctgagagaacagggcaacgggcatatcatctcctggaccagtcgagacgggggcgaattcaagctagtagatgcagaggaggtggctaggctctgggggctgaggaagaacaagaccaacatgaattacgataaactctccagagcacttagatactactatgacaaaaatatcattcgcaaagtgagtgggcagaagttcgtctataagttcgtctcttatccagaatcccactgcgctccatag

SEQ ID NO: 14970 - DNA, 1287 bp, synthetic construct
  misc_feature 1..1287: note = Description of Artificial Sequence: Synthetic coding sequence
  source 1..1287: mol_type = other DNA
atggatcccagtgtgaccctgtggcaattcctgctgcagctactccgggagcagggcaacgggcacatcatctcgtggacttcccgggacggtggcgaattcaaactggtggacgcggaggaagtagctcgtttgtggggacttaggaagaacaagactaacatgaattacgataaactgtctagagcactgagatattactatgataaaaacataatccggaaagtttcgggccagaaatttgtgtacaagtttgtcagttatcctgaggtagcaggttgtagcaccgaagattgcccacctcagcctgaagtttccgtcacctctactatgcccaatgtggctcctgccgcaattcacgccgcccctggagatacagtgtccggcaagccaggcacccctaagggagccggaatggccggacccggcggccttgcaaggtccagccgtaacgagtatatgaggtccggactttacagtacattcacaattcagagtctccaacctcagccgccaccacatccccgcccggccgttgttttgccttcagccgctccggccggtgcagcagctccaccttctggctcaagaagcacaagcccatcccctcttgaggcatgtttagaggccgaggaggcaggcctgccactgcaggttatcctcacccctcctgaagcgccaaacttaaaatctgaggagctcaacgttgagcctggcctgggtcgcgcgttgccacccgaagttaaggttgaaggaccaaaagaagagctggaggtcgctggggagcggggctttgtgcccgagaccacaaaggcagaaccagaggtgccccctcaggagggggtacccgctcgcctccctgccgtggtgatggacactgcgggacaggccggtggacatgctgcatcttccccagagatctctcaaccacaaaaagggcggaagccgagggatttggaattacccctgtctccctccctgctgggtgggcccggtccagaaagaacccctggatccggatctggctcagggttacaggccccgggcccggctcttacgcctagcctattgcccacccacaccctgaccccagtgctcctcacaccctcaagcctgcctccttccatccacttctggtcaactttatctccaatagctcctagatctccagctaaacttagcttccagtttccctcaagtggaagcgctcaagtgcatattcccagcatctctgtggacggattgagcactcccgtagtactgtctccaggcccacagaaaccttag

SEQ ID NO: 14971 - DNA, 366 bp, synthetic construct
  misc_feature 1..366: note = Description of Artificial Sequence: Synthetic coding sequence
  source 1..366: mol_type = other DNA
atggatacggccggccaggcaggaggccatgccgcctcctcaccagagatcagtcaaccccagaaaggccgcaaacccagggatcttgaactccccctgagtcctagtctgcttggagggcctggtccagagcggacccccgccctccttcctacacacactttgactcccgtactgctcacaccttcatccctcccaccttctatacatttctggtcaaccctgagtccaattgctccgcggagtcctgcaaagctgagcttccagttcccctcctctggctcggcacaggtccacattccctcaatctcagttgacggcctctccaccccagtggtgctgagcccaggccctcagaaaccctag

SEQ ID NO: 14972 - DNA, 1713 bp, synthetic construct
  misc_feature 1..1713: note = Description of Artificial Sequence: Synthetic coding sequence
  source 1..1713: mol_type = other DNA
atgagtgagcagagtatctgtcaggcacgagcagcggttatggtgtacgacgacgccaataagaaatgggtgcccgcgggtgggagtactgggttttctcgcgtgcacatctaccaccacacgggaaataatacattcagggtggtcggaagaaaaattcaggatcatcaggtagtgatcaattgcgccatcccaaaagggctaaagtataatcaggcaactcagaccttccatcagtggagggatgcgcgtcaagtttacggccttaactttggttccaaggaggatgcaaacgttttcgcctccgctatgatgcacgctctggaggtcctcaactcgcaagaaaccgggcccacactcccacgccagaattcccagctgcctgcgcaggttcaaaacgggccaagccaggaggagctggaaattcagagacgtcagcttcaggagcagcaacggcagaaagagcttgaacgggaacgacttgagcgagagcggatggaaagggagcgtctcgagagggagcgactggaacgggagcgcctcgagcgggagaggctggaacaagagcagctcgaaagggagcgacaggaacgggaacggcaggagcggctggaaaggcaagaacgtctggagcggcaggaacggttagagagacaagagagacttgaccgagaacggcaggaaagacaggaacgcgagcgtctcgaaaggctcgagcgagagaggcaagagcgggaaagacaagagcagcttgaaagagagcagctcgaatgggagagggaaagaagaatctcctctgccgcagcacctgccagcgtggaaacccctctgaacagcgtgctcggcgactcgtctgcaagcgagccaggcctccaggctgcatcccaaccggctgaaacacctagtcaacagggcattgtcttgggcccactagctccaccaccccctcccccgttgcctcccggtccggcccaagccagcgtggctctgccaccccctcctggacccccaccgcccccccccctgcccagcacaggccctcctcctccaccaccgccaccccccctaccgaatcaggtccctccaccacccccaccccctccggcgccccctcttccagccagtggttttttcctggcttctatgtcggaggataatcggcccctaaccgggttggcagcggccatcgccggcgcaaaactgagaaaggtgagtcggatggaagacaccagcttcccaagcggaggaaacgctattggagttaactctgctagctccaaaaccgacactggtcgcggcaacgggccactgcccctgggcggcagcggattaatggaagaaatgtctgctttgcttgctcggcgccggcgtattgcggaaaagggatccaccatcgaaaccgaacagaaagaagacaaaggcgaggactcagagcccgttactagcaaagcctcttcaacaagtactcccgaaccaaccagaaagccatgggagaggaccaacactatgaatggatctaagtctcccgtcatatcacggccaaagtctacccctctctctcagccttccgctaatggagtgcagaccgaaggcctcgattatgaccgtcttaaacaggatatacttgacgagatgagaaaggaactaaccaaactgaaagaggagcttatcgacgccataaggcaggaactatcaaagtcgaacaccgcctag

SEQ ID NO: 14973 - DNA, 1776 bp, synthetic construct
  misc_feature 1..1776: note = Description of Artificial Sequence: Synthetic coding sequence
  source 1..1776: mol_type = other DNA
atgtctgagcagagcatctgccaggcaagagctgccgtgatggtgtatgacgatgctaataagaagtgggttccagccggaggttccacagggtttagccgcgtccacatctatcatcacacgggaaacaacacctttcgggtcgtgggcagaaagatccaggaccatcaggtcgttatcaactgtgctatcccaaaaggcctaaagtataaccaggctacccaaacttttcatcagtggcgcgacgccagacaagtctacggattgaactttggaagcaaggaggacgcaaatgttttcgccagcgctatgatgcatgcgctcgaagtgctcaactctcaggagacagggccaaccctgccacgccagaacagccaactcccggctcaagtacagaacgggccgtcccaagaggagctcgagatccagaggcggcagctccaggagcagcagcgccaaaaagagctggagcgggaaaggctggagcgcgagaggatggagagggagaggctggaacgcgagagactggagagggaacggctagagagagagcggctcgagcaggagcagctagagagagaacgccaggagcgcgagaggcaggagaggctcgaacggcaagaacggctcgaaagacaggagcgattagagcggcaagagagactggatagggagcggcaggaaagacaggagcgggagaggctcgaaaggctggagagagaaagacaagagagggagcggcaggagcagcttgaacgggaacaactcgagtgggagcgggaacggcggatcagttctgcagcagcccctgcctccgtcgagacccctctgaatagtgtcttgggcgattccagtgcgtccgaacctggcctccaggcagccagccaaccagctgagactccgtcccagcagggaattgtcctggggcccctggctcctcctcctcccccaccactgcctcctggtcctgctcaggcaagcgttgcactgcccccaccgcctggtcctcccccacctccgcccttgccatcaactggaccacctcccccccccccgccgccccctctgcccaatcaggtcccaccgcctccccctccgccacccgccccaccattgcccgcatctggtttcttcctagcttcaatgagcgaggataataggcccctaactggtctggctgccgcaatcgccggagccaagctaaggaaggtatcccggatggaagataccagctttccatccgggggcaatgccatcggcgtcaacagtgcatcatcaaagaccgacaccggacgcgggaacggaccgttgccattgggggggtcaggtctaatggaggagatgtccgctttactagccagacgcaggcgcattgccgaaaaagggagcaccattgagactgagcagaaggaggacaaaggcgaagactcggagcctgttacatccaaagcctcgagtacgagcacccccgaacccaccaggaaaccttgggagagaaccaatactatgaacggctcgaagagcccagtcatatctagacgtgactccccgcggaaaaaccagatagtgtttgacaacaggtcttatgactctttgcatcggccaaaaagcacacctctctcccagcctagtgctaatggcgttcaaactgagggtctcgactacgaccgcctgaaacaggatatcctggacgagatgcggaaggagcttacaaaattgaaagaggaattaatcgatgcaattcggcaagaactcagcaagtcaaacaccgcgtag

SEQ ID NO: 14974 - DNA, 1599 bp, synthetic construct
  misc_feature 1..1599: note = Description of Artificial Sequence: Synthetic coding sequence
  source 1..1599: mol_type = other DNA
tccgagcagagcatctgtcaggcccgcgcagctgtgatggtgtatgatgacgccaacaagaaatgggtgcccgcagggggaagcacagggttcagcagagttcacatttatcaccacaccggtaacaataccttccgggtggtaggtagaaaaatccaggatcaccaggtcgtgattaattgcgccattccaaaaggactgaagtacaaccaagcaacacagactttccatcagtggcgcgacgcgcggcaggtgtacgggctgaactttggctccaaagaggatgcgaacgtcttcgcttcagccatgatgcatgcccttgaggtgctgaactcacaggagactggccccacactgcctcgccagaactcccaactgccagctcaggtgcagaacggtccatctcaggaggagcttgagattcaaaggaggcagctgcaagagcaacagcggcagaaggagctagagcgtgaacggctggaacgcgagcgtatggaacgggagcggctggaaagagagagacttgagcgggagcggctcgagcgcgagaggctggagcaggagcagctggaaagagagcggcaagaacgggaacgccaagagcggctggagcggcaggaaagattagagcgtcaggaacggctcgagaggcaggaacgcctggatcgggagcgacaggagagacaagagcgtgagaggctggagcggctcgagcgcgagcggcaggagcgcgaaagacaggaacagttagagagggagcagctcgagtgggagcgggagcggcgcattagttccgccggtattgtgctcgggcccctcgccccgccacccccaccaccccttccccctggtcctgcccaggcaagtgtggctctgccgcctccccccggtcctcctcccccgccgcctctcccttcaacaggaccaccccccccccctccgccaccgcccttgccaaatcaggttcccccgcctccaccaccaccacccgctccacccctcccagcatcaggattcttcctggctagtatgtctgaggacaaccgacccttgacaggactggctgcagctattgcaggcgctaagctgcggaaagtgtctcgcatggaggatacttctttcccctccggggggaatgccattggtgtgaacagtgcctcctccaagactgataccggaagaggaaacgggcccctgccgctcggggggtcaggtttaatggaggaaatgagcgctctgttggccagaaggaggcgcattgccgaaaaaggtagcaccatcgaaaccgaacagaaggaagataagggagaagattcggagccagtgacatcaaaagctagcagcacctccaccccagagcctacccgtaagccttgggaacggaccaataccatgaatggaagtaagtcgcctgtaataagcagaccaaagtcaacccctctgtcacagccatctgccaacggcgtgcagacagagggcctggactatgatagactgaaacaggatatactggatgaaatgaggaaagaacttaccaagctgaaggaggagttgattgacgccatccggcaggagttgtccaagtcaaacacggcttag

SEQ ID NO: 14975 - DNA, 1878 bp, synthetic construct
  misc_feature 1..1878: note = Description of Artificial Sequence: Synthetic coding sequence
  source 1..1878: mol_type = other DNA
atggacaggggaacactccctctcgctgtggccctcctgctggccagctgcagcctgtctcccacatcccttgctgagaccgttcattgcgatctgcagccagttggtccagagcggggtgaagtcacctatactacatcacaagtttcaaaaggctgcgtcgcccaggcgcccaatgcgattttggaagtgcacgtcctgttccttgaatttcctaccggaccttctcaacttgaactgaccctccaggcctctaagcagaacggaacgtggccccgggaggtgctgctggtgctgtccgttaactcatcagtgttcctgcacctgcaggccctcggcatacccctgcatctggcatacaattcgagcttggtgactttccaggaacccccgggcgtgaatacaactgaactgccatcgtttccgaagactcagattctggaatgggctgccgaacgcggacctataacctccgctgcagagctgaacgaccctcagtctatcctcttgagactgggtcaggcccaggggagcctctccttttgcatgctggaagcctcgcaggacatgggccgaaccttagagtggaggccacggacgccagcccttgtgagaggttgtcacttagagggagtggcgggccacaaggaagctcacattctgagggttttacccggacacagcgccgggccgaggaccgtcacggtcaaagtcgagctgtcttgcgcacctggggacctcgacgctgtgctcatactgcaggggcctccctacgtctcctggttgatagacgccaaccataacatgcagatctggacgaccggcgagtacagtttcaaaattttccccgagaagaatattaggggcttcaagctgcctgacaccccccagggactcctgggcgaagcccgcatgctgaacgcaagtattgtggctagctttgtagaattgcctctcgcttccattgtctcactgcatgcttcctcgtgcggtggccggctgcagacgtcccccgcgcctatccaaacaactccccccaaagacacttgttcccccgaactactgatgtccctgatacagacaaagtgtgccgatgatgctatgaccctggttcttaaaaaagaactggtagcccatctgaaatgtactatcaccggactgaccttctgggacccatcttgtgaggccgaggaccggggagacaagtttgtgctcagatcggcttacagcagttgtggaatgcaggtgtccgcatccatgattagtaacgaggcagtggtgaatatattgtcctccagttcaccccagcggaagaaggtgcattgtctcaacatggactcattgagcttccaactggggctgtatctgtccccacacttcttacaggcctccaataccatcgagccaggccagcagtcattcgtgcaggtgcgtgtgagtccttcggtatcggaatttctgctgcaattggattcgtgccacttggaccttgggccagagggaggaaccgtggaactgattcaggggcgggccgcgaaagggaactgtgtgagtcttctcagtccgtcacccgagggcgacccccgctttagtttcttactgcatttttacactgtgccaatcccgaaaacagggactctgtcttgtaccgttgccttacggccaaaaaccggttcacaggaccaggaggtgcatcgcacagtcttcatgcgactgaatataattagtcctgatctctctggctgcactagcaagggtctggtgctccctgctgtcttaggtatcactttcggcgccttcctcatcggtgccctgctgacagccgctctttggtatatatactcccataccagggagtaccctcgccctccacaatag

SEQ ID NO: 14976 - DNA, 1977 bp, synthetic construct
  misc_feature 1..1977: note = Description of Artificial Sequence: Synthetic coding sequence
  source 1..1977: mol_type = other DNA
atggataggggaaccttacctttggccgttgctctgcttctcgcttcctgttcgctttcccccacctctctggccgagactgtccattgcgacttgcagcccgtaggacctgaaaggggggaggtcacgtataccacttctcaggtgagcaaaggctgtgtggcgcaagctccgaatgccatactcgaggtgcacgtgctgttcctggagttcccaacagggccatctcagctagagctgactttgcaggcctctaagcaaaacggcacgtggccaagagaggtgctcttagtgttaagcgtgaacagctccgtatttctccacctgcaagctctaggaattcctctccatctggcatacaatagttctctggtcaccttccaggagcctccgggggtgaataccactgaactgccgtcttttcctaagacccaaatcctggagtgggccgccgagaggggccccatcacgagcgctgcggagctaaacgatccccagtcaattctgctgcggctgggccaggcccaaggaagcctgtctttctgcatgctggaggccagtcaggatatgggaagaaccttagagtggcgtccgagaactcccgcactggtgcgcgggtgccacctggagggggtagccggccataaggaagctcacatcctgagagtgctcccgggacactccgctgggccaaggacggtgacagtgaaggtggagttgtcctgcgcccctggcgatctcgacgccgtcctcatcctacagggccccccctatgtcagctggctaatagatgcaaaccataacatgcaaatctggaccaccggagaatactccttcaaaatcttccccgaaaaaaacatccgcgggttcaagctgcctgacacccctcagggcttgctcggcgaggctcggatgctaaatgccagcatagttgcttcctttgtggagctgccattagcaagcatcgtgagcttacacgcctcctcatgtgggggccgactgcagacatcgccagctccaatccaaaccacccctcctaaggatacctgtagccccgagctactgatgtcccttatacaaaccaagtgtgcagacgatgctatgaccctggtgctcaaaaaggagctggtggctcatctgaagtgtaccatcaccggactcactttttgggatccgtcgtgtgaggccgaggaccgcggagataaattcgtcctacgttccgcttatagctcctgtggaatgcaggtctcagcttccatgattagtaatgaggctgtcgtgaacatactttctagtagctctccccagcggaaaaaagtgcattgcctgaatatggactcactctcctttcagttagggctgtatctttcacctcattttcttcaggcctcaaatacaattgagcctgggcaacagagttttgtccaagtgagggtttccccatccgtgagtgagttcctcttgcagctcgatagctgtcacttagatctgggcccagaaggtggcacagtggaactgattcagggacgggctgctaaagggaattgtgtgtcactattatcaccctcgcctgaaggagaccctagatttagtttcttgctccacttctatacagtcccaattccgaaaacgggtactctcagctgcactgtcgcactcaggcctaagaccggttcacaggaccaggaagtccatcggacagtatttatgcggctaaatatcatatccccagatttgtcagggtgcacaagcaaggggctcgtgctgccagccgtgctgggcatcaccttcggcgccttcctaattggcgcattgctgacagcagccctgtggtatatttactcccacacccggagcccctcaaagcgggagccagtggtcgctgtggctgccccggcctcttctgagagctccagtactaaccactctattgggtctactcagagtactccatgcagcacctcctcgatggcatag

SEQ ID NO: 14977 - DNA, 1977 bp, synthetic construct
  misc_feature 1..1977: note = Description of Artificial Sequence: Synthetic coding sequence
  source 1..1977: mol_type = other DNA
atggacaggggcaccttacccctcgccgttgcattattactggcaagctgttctttgagcccaacgtccctcgccgaaactgtgcactgcgatttgcagccagtcggccccgagcggggcgaggtgacgtacacaacttcgcaggtttccaaggggtgtgtagcccaggcccctaatgcaatcttagaggtgcacgtcttatttctcgaattccctacaggtccttcccagctggagctgacattacaggcgtccaaacagaacgggacgtggcctagagaggtactgctagtgctctccgtgaattcaagcgttttcctgcacttgcaggctcttggcattcccttacacctagcttataatagtagcctcgtgacatttcaagaacctcccggtgtgaatactactgaactgccatcgtttcccaagacacagatcctggagtgggctgcggagaggggtcctataacttcagccgccgagctgaatgatcctcagtcaattttattgcggctggggcaggcccaaggcagtctgtcattttgcatgctggaggctagccaagacatgggccgaaccctggaatggcgtcctcgcacaccagcgttagtacgaggttgccacctcgaaggcgtggcaggtcataaggaggcccacatactcagagtcttaccaggccatagtgcaggccccagaacggtgactgtcaaggtcgaattgagctgtgctcctggggacctcgatgcagtcctaatcctgcagggccctccttacgtgagttggctgatagatgctaatcacaatatgcagatctggaccaccggggaatacagcttcaagatcttcccagaaaaaaatattcgggggttcaagttgcccgacactccccagggactgctaggagaagcacggatgctgaacgcctctattgttgcgtcattcgtcgagctgccccttgcgagcatcgtatctctccacgctagtagctgcggggggcgcctgcagacaagtccagccccaattcagacaacacctcccaaagacacatgctctccagagttattgatgtcactcattcagacaaaatgcgctgatgacgctatgacacttgtcctaaaaaaagagctcgtcgctcatctgaagtgcacaatcaccggcctgaccttctgggatccctcctgcgaggctgaggataggggagacaaatttgtcttgagatcagcatactcaagctgcggaatgcaggtgagcgcatcaatgataagcaatgaggccgtggttaacatcctcagtagtagctcccctcagaggaagaaggtccactgtctcaacatggattcgcttagtttccaactcggactgtatctgtcaccccactttctgcaagccagcaatacaatcgaacccggccaacagtcctttgtccaggtcagggtttccccaagcgtatcagaattcctgttgcagttggactcctgccacctggacctggggccggagggcggcacagtagaactaatccaaggcagggccgcaaagggaaattgcgtctctctgctgtcaccttctccggaaggggatcctagattttctttcctgctgcacttctataccgtgccaatacctaagacaggaactcttagctgtactgtggcgctgagacccaagaccggcagccaggatcaagaggttcaccgcacagtgttcatgcggttgaatatcatttctccagatttgagcggctgcacatcaaaaggtctggtccttcctgcggtgctggggataacttttggcgccttcctcattggcgccctgctgactgccgccctgtggtatatctattcacacactcgctcacccagtaagcgtgaaccagttgtggcagtggcagcacctgccagtagcgaaagctcttctacaaatcactccattggttccactcagtcaaccccctgtagcacttccagcatggcgtag

SEQ ID NO: 14978 - DNA, 1431 bp, synthetic construct
  misc_feature 1..1431: note = Description of Artificial Sequence: Synthetic coding sequence
  source 1..1431: mol_type = other DNA
atgcttgaggctagccaggacatgggcaggactctagagtggcgcccacgcacccctgcccttgtccgcgggtgccaccttgagggtgtggctggccataaagaggcacacattctgcgcgtccttccagggcactccgccggcccacgcaccgtaaccgtcaaggttgaactgtcctgtgcccccggggatctcgacgccgtgcttatcctccagggccctccttatgtatcctggttgatcgatgctaaccataacatgcagatctggacaaccggggaatactcctttaaaatctttccggagaagaatattagggggtttaagctgcccgataccccccagggtctcctgggcgaggcgagaatgctcaacgcttcaattgtggcctcgttcgtcgaattgcccctcgcttccatagtcagcctgcacgccagctcttgtggtggacggctccagacttcgccagccccaatccagacaactccgccgaaagacacttgttcacccgagctacttatgtcgttgattcagacaaagtgcgcagacgacgccatgacactggtcctaaaaaaagagctggtggcccatttaaagtgcacaatcactgggctgaccttctgggaccctagttgcgaggccgaagacaggggcgataagttcgtgctgcgtagcgcctactcgagctgtgggatgcaggtctccgcctctatgatctctaacgaggctgtcgttaacatcctttctagttcatctccccagcgcaagaaggtccattgcctgaatatggattcccttagcttccaactgggcctgtacctttccccacatttcttgcaggcatcaaataccattgaaccagggcagcaaagcttcgtgcaggtgagggtgtcgcctagtgtgagcgaattcctcctgcagctggatagctgtcatctggacctgggcccagagggtggcactgtggaactcattcagggccgcgccgcgaagggtaactgcgtgagcctgctgtcaccctcaccagaaggggacccacgtttttccttcctcctgcatttttacaccgtcccaattcctaagaccggcacactgagttgcaccgtggcactgagacctaagacaggctcgcaggaccaggaagtacataggacagtctttatgaggttaaatatcattagtcccgatctgagcggatgcacctccaaagggctggtccttccagccgtgctagggatcaccttcggcgcctttttgatcggagcgctgctgaccgctgccctgtggtacatatacagtcacacccgctctcccagcaagagagagcctgtggtcgctgttgcagcccccgcatcctcggaatccagctcgaccaaccactcgataggttcaacccagagtactccctgctctacttccagcatggcctag

SEQ ID NO: 14979 - DNA, 639 bp, synthetic construct
  misc_feature 1..639: note = Description of Artificial Sequence: Synthetic coding sequence
  source 1..639: mol_type = other DNA
atggactatctgctcatgatcttctctctgctcttcgtcgcttgccaaggcgcacccgagacagctgttctcggcgccgaactgtcagccgtgggcgagaatggcggcgagaagcctacccccagccccccttggaggctgcggcgttccaagaggtgctcttgtagctcactcatggataaggagtgcgtgtacttctgccacttagacattatctgggtgaacactcccgaacacgtcgtcccttatggactggggtcaccaaggagcaaacgcgccttagagaacctgctgcctaccaaagccactgaccgcgaaaacaggtgccaatgtgccagtcagaaggataagaaatgttggaatttctgccaggcaggtaaagaacttagggctgaagacattatggaaaaagactggaacaaccacaagaaaggaaaggactgctctaagttaggcaaaaaatgtatttatcagcagttagttaggggccgcaagataaggcggtcttctgaggaacaccttaggcagactaggagcgagacaatgaggaactctgtgaagtccagttttcacgatcccaagctgaaaggaaagccctcccgcgaacgttatgtgactcataatcgcgcacactggtag

SEQ ID NO: 14980 - DNA, 1329 bp, synthetic construct
  misc_feature 1..1329: note = Description of Artificial Sequence: Synthetic coding sequence
  source 1..1329: mol_type = other DNA
atgcagccaccgccgtctctctgcgggagagctctcgtggcattggtcctcgcatgcggcctctctaggatatggggcgaggagcggggcttcccacctgatagggcaaccccccttctccagaccgcagagatcatgacacctcctacaaagaccctgtggccgaaaggtagtaacgcatccctcgctcggtcattagcacccgcagaggtgcctaagggggatagaacagctggctcccctccccgaacaattagcccccctccttgtcaagggcctatcgaaatcaaagagacttttaagtacatcaacactgtggtgtcttgccttgtcttcgtgctcggcatcatcgggaactccacactgctccggatcatctacaaaaacaaatgtatgcgcaacggtcctaacattctgatcgccagtctggccctgggcgacctgttgcacatcgtgatcgacattcccattaatgtgtacaagctcctcgctgaagactggcccttcggcgcagaaatgtgcaaactggtaccttttatacagaaagcatccgtcggaattacggtcttaagcctgtgtgccttgtccatcgatcgctaccgcgcggtggccagctggagtagaatcaaaggtataggcgtgcctaaatggaccgctgtagagatcgtgctaatctgggtcgttagtgtggtgctagcggttccagaggcaattggatttgatattattaccatggactacaagggcagctacctgaggatctgtctgctccatcctgttcaaaagaccgcatttatgcagttttataaaacggctaaggactggtggctgttcagtttctatttctgcttgcccctggctatcacagcctttttttataccctaatgacatgcgaaatgctccgcaaaaaaagcgggatgcagattgcactgaacgatcatttgaaacagagaagagaggtcgctaagacagtcttctgtctggtacttgtgttcgccctttgctggcttccactccatttgtcacggatcctcaaactcacgctttataaccagaacgaccctaacaggtgcgagcttctgagtttcctcctggtgcttgattatattgggattaatatggctagcttaaacagttgcatcaatccgattgcgctgtatctagtgtcaaaacgattcaagaactgtttcaaatcatgtctgtgctgctggtgccagtcctttgaagagaaacagtcccttgaggaaaaacagtcctgcctgaagtttaaggccaacgatcatggctatgataattttaggagttctaataagtactcctcctcctag

SEQ ID NO: 14981 - DNA, 1599 bp, synthetic construct
  misc_feature 1..1599: note = Description of Artificial Sequence: Synthetic coding sequence
  source 1..1599: mol_type = other DNA
atgaacaagagcacctgtctgatggcggccgagacgccttccaagagatggagattgcattgtcttgcatttagtcaacgctttgtgagagctggccccgcatgctcctccagggaggcctgcagtagtccacgcgcaggctggaaccccgctggctttcgcctcccaggccggtggtccccgttcgtggccctccatctggtttgccagattagggaagccttgaagcttcggagcggacacagaaccccgtcgggtgctggcagcagtatgcagccccctccgtccctgtgcgggcgcgccctcgttgcattggtactggcctgtggactctccaggatttggggggaggaaagaggctttccccccgatagagcgacccccttgctccagactgcagaaattatgactccgcccactaagaccctgtggcctaagggctctaacgctagcctggctaggtccctcgctccggcagaagtccctaaaggggaccgtactgcagggagccccccacgaacgattagccctcccccatgtcagggaccaatcgagatcaaggaaacgttcaagtatataaacacagtggtctcttgtcttgtgttcgtgttgggcatcatcggcaactctacactgctgcgcattatctacaaaaataagtgcatgaggaacgggcccaacattctgatcgcgagcctggctctgggggacttactccacattgtcatagacatccccatcaatgtatacaagctgctggccgaggactggccatttggagccgagatgtgtaagctcgtaccattcatccagaaggcatccgtggggatcaccgttctatctctctgcgcattatccatcgaccggtaccgcgccgtcgcaagttggtcccgcatcaaggggatcggtgtgccaaagtggaccgccgtggaaattgttttgatctgggtggtgtcggtagtgctcgccgtacctgaggccatcgggttcgatatcattaccatggactacaaagggagctatctgagaatctgtttactgcatcccgtacaaaaaaccgcattcatgcaattctataagaccgctaaagactggtggctctttagtttctacttctgtctgcctctggctataaccgctttcttctacacactgatgacttgtgaaatgctacggaaaaagtccggaatgcagattgcattgaatgaccatttaaagcagcggcgagaggtcgccaagacagtgttctgtctggtgctggttttcgcgctgtgctggctacctttacacctgagccgaattctgaaacttacattgtataatcagaatgaccctaacagatgtgaactcctatccttccttttagtgcttgactatatcgggatcaatatggctagtcttaattcttgtataaatccgatcgctttgtatctcgtatccaagcggttcaagaattgctttaagagttgtctatgctgctggtgccagtcttttgaggagaaacagtctctcgaggagaaacagtcttgcctgaaatttaaggcaaatgatcatggctatgacaactttagatcatctaataaatatagcagttcttag

SEQ ID NO: 14982 - DNA, 1311 bp, synthetic construct
  misc_feature 1..1311: note = Description of Artificial Sequence: Synthetic coding sequence
  source 1..1311: mol_type = other DNA
atgcagccccctccatccctctgcggaagggccctggttgctctggttctggcatgtggccttagtcgcatctggggcgaagaaagggggttcccacccgaccgggccacgccgttacttcagactgctgagatcatgacccctccgaccaagactctatggccaaaaggctccaatgccagccttgctagatcccttgcccccgccgaggtgcctaaaggggaccggactgccggaagtccaccaagaactatctcaccaccgccctgccaaggacctatagagatcaaggaaaccttcaaatacatcaataccgtggtaagttgtttggtcttcgtcctcggaatcataggtaatagcactctgctgcggatcatctataagaacaaatgcatgaggaacggccccaatattctgattgcgtcacttgcactcggtgacctgcttcatatcgtgatcgatattcctatcaacgtttacaagctgctggccgaagactggccctttggagccgagatgtgcaagctcgttccattcattcaaaaagcatcagtcggtatcactgtgttgagcctgtgtgcactgtctattgataggtatagggctgtcgccagctggagtcggattaagggtataggggttcctaagtggactgctgtcgagattgtcctcatttgggtggtgagtgtggtgctcgctgtgccggaggcaataggctttgacattatcaccatggactataagggctcttatctgcggatttgccttcttcatcccgtgcaaaagactgcttttatgcagttttataaaacagctaaagactggtggttgttcagcttttatttttgcttacctctggcgattaccgctttcttttatacccttatgacctgtgaaatgctgcgtaagaaaagcggaatgcagatagcactgaatgatcacctaaaacagcgccgagaggtggccaaaacggtcttctgcttggtcttagtgttcgcgctgtgctggctaccattgcatctgagtagaattttgaagttaaccctctacaatcaaaatgaccccaatcgttgcgaattgcttagtttccttctggtgctggactatattggcattaatatggcaagtttaaactcttgtatcaatccaattgctctgtatctggtgtccaaacggtttaaaaattgtttcaaagccggaccacatgttggaaacaagctagttatgctcttcagtgtgaatatagagtgcgacgggaccgtgaatcaaaatccaacaatgtggccggagcggaaaagcaacaataattag

SEQ ID NO: 14983 - DNA, 2787 bp, synthetic construct
  misc_feature 1..2787: note = Description of Artificial Sequence: Synthetic coding sequence
  source 1..2787: mol_type = other DNA
atggccctacggcggctgggcgccgccctgctgctgcttccactgttggctgcagtagaggaaacactgatggacagtacaacagccacagctgagcttggctggatggttcacccaccctccggatgggaggaggtgtctggatatgacgaaaatatgaacaccatcagaacatatcaggtgtgtaatgtgttcgaatcttcccagaataattggctgcggactaaattcattcgacggagaggtgctcatcgcattcacgtagagatgaagttctctgtcagggattgtagcagcatccctagcgtacccggctcctgtaaagaaactttcaatctgtactactatgaagccgattttgatagtgctaccaaaacattcccaaactggatggaaaacccatgggtgaaggtcgatactattgctgcagatgaatccttctcgcaggtggacttgggaggtcgggtgatgaaaatcaacacagaggtgcgctctttcggcccagtttcccgctccggtttctatctggccttccaggattacgggggctgtatgtccctcatcgccgttagagtcttctatcgaaagtgtcctcgcattattcaaaatggtgctatcttccaagagaccttgtctggggccgaatctacctctttagtggccgcaaggggaagctgtatcgccaatgccgaggaagtggacgtaccaataaagctctactgcaatggagatggagagtggctggtcccaatcggccgctgtatgtgcaaggcgggtttcgaggcagtggagaacggcaccgtgtgtagaggatgcccgtcaggcacctttaaggctaaccaaggagatgaagcttgtacacattgtcctatcaattctcggactacgtctgaaggtgccaccaattgtgtctgtagaaatggctactatagggctgatctcgatcctctggacatgccctgcacgaccattccatctgcccctcaggccgtgatctctagcgttaatgagacttctttaatgctcgagtggacgccccctagggattccggaggtcgtgaggacttggtgtacaacattatatgcaaatcatgtggctctggccgcggggcctgcacccggtgcggagataatgtacagtatgctccacgtcagctaggactcactgaaccccgcatttacatatctgaccttttggcccacacacagtacaccttcgagattcaggccgtgaatggcgtaaccgatcagagcccctttagtccccagtttgcgtccgtcaatatcaccactaatcaggctgcgccaagtgctgtgtcaatcatgcaccaggtgtctcggaccgtggactcaatcaccctatcttggtcacaacctgatcaacctaacggtgtgatattagattacgagttgcagtactatgagaaagagctgtcagagtacaatgctactgcaatcaaatctccaacaaatactgtcaccgttcaagggctgaaagccggtgctatttatgttttccaagtgagggcgcggaccgtcgctgggtatggcagatactccggcaagatgtattttcagacaatgactgaagtgactccgggcatgaagatttatatcgatccctttacatatgaggacccgaatgaggctgtgcgcgaatttgctaaggaaatcgacattagctgtgtgaagatagagcaggtcattggagcaggagaatttggggaggtatgctcggggcatctcaaattgcccggcaagcgcgaaatttttgtagcgattaaaaccctaaaatcagggtacacagagaaacaaaggagggattttctctcagaggcctcaattatgggtcagttcgaccacccaaacgtgatacacttggagggcgtggtgacaaagtccacccccgtcatgatcatcaccgagtttatggagaatgggagtctggattctttcttaaggcagaacgatgggcaattcaccgtgattcagcttgtcggaatgctgagggggatcgccgctggtatgaagtacctagcggacatgaattacgtacaccgcgatctcgctgcccggaatattcttgttaactccaatttggtgtgcaaagtaagcgactttgggttatcccgattccttgaagacgatacatctgatcctacttatacaagcgctctggggggcaagataccaattcgctggactgccccggaagccatccaatacagaaagtttacctctgcatccgacgtctggagctatgggatagtgatgtgggaagtaatgagctatggcgagagaccgtactgggacatgaccaaccaggacgtcattaatgccatagagcaggattatcgactccctcctcccatggactgcccatctgccctgcaccagttgatgcttgattgctggcagaaagatcggaaccaccggccgaagttcggacagatcgtcaacactcttgacaagatgattagaaaccccaactcattgaaggctatggcacctttgtcgtccggaatcaacttgcccctattggatcggaccataccagactacaccagttttaacaccgtggatgagtggctggaggccatcaagatgggtcagtataaagagtcatttgccaatgcagggtttacaagtttcgatgtggtgtcccaaatgatgatggaagacatcctgcgggttggtgtcactctggcagggcatcaaaaaaagatcctcaattctattcaggtgatgagggcccagatgaaccagatccagagtgtggaagtatag

SEQ ID NO: 14984 - DNA, 2841 bp, synthetic construct
  misc_feature 1..2841: note = Description of Artificial Sequence: Synthetic coding sequence
  source 1..2841: mol_type = other DNA
atgtgggtgcctgtcctggcactccctgtatgcacttatgccgaaacacttatggattctaccactgctactgcagaactgggctggatggtgcaccctccctcaggctgggaagaggtatccgggtacgacgagaacatgaatacaattagaacataccaagtctgtaacgtgttcgagtcatcccagaataactggcttaggacgaagtttatacggcgccggggagcccacagaattcatgtggagatgaagttctccgtccgtgattgctcatcaattccttcggtcccaggcagttgtaaggaaacctttaatttgtattactacgaggcagacttcgattctgctactaagacttttcccaattggatggaaaacccatgggtgaaggtggacacaatcgctgctgacgagagtttttcacaggtggacctcggggggcgggtgatgaaaattaatacagaggtcaggtctttcggcccggtttcccgctctggattctacctggctttccaggactacggcggatgcatgagcctgatagctgtacgcgtgttttatcggaaatgtccaaggataatccaaaacggggccatcttccaggaaaccctgtcaggcgcagaatctacaagtctcgtagctgctcgtgggtcctgcattgctaatgctgaggaagtggatgtcccgatcaaactttattgcaatggagacggtgagtggctggtccctatcggccgctgtatgtgcaaggctggcttcgaagccgttgaaaacggcaccgtctgtcgtgggtgtcccagcgggaccttcaaggccaatcagggagatgaagcctgcactcactgcccaatcaattcaaggacaacctccgaaggagcaactaattgcgtgtgtagaaatggctactatagagccgacctggatcctttagacatgccctgcactacaatcccgtccgccccacaagccgtgatctcatccgtaaatgaaacttcccttatgctggaatggacacccccacgggattctggtggtagggaggacctagtgtataatattatctgtaaatcttgcgggtctggacgcggcgcctgcaccagatgcggggacaacgtccagtacgccccccgccagttgggcctgaccgagccaagaatatatatcagcgacctgctcgcgcacacacagtacaccttcgagatccaggccgtgaacggtgtaacagaccaatcccctttctctccccaattcgcctcagtgaatattacaactaaccaggccgctccgtctgccgtcagtatcatgcaccaggtatccagaacagtagattccatcactctgagttggtctcagcccgaccagccaaatggggtcatactggactacgagttgcagtactatgagaaacaagagctatctgagtataatgccacggcaattaagtcaccgactaatacggtgactgttcagggcttgaaggctggcgctatctacgttttccaggtgcgggcaaggacggtcgctgggtatggtaggtactcaggcaaaatgtattttcaaaccatgactgaagctgagtaccagacctcgattcaggagaaattgccattgatcatcgggtcctccgccgctggcctggtctttctgattgcagttgtggttatcgcaattgtgtgtaatcggcgaggtttcgagcgagcagattccgaatatactgacaaactgcagcactacacaagcggacatatgacccctggaatgaaaatatacatcgaccccttcacttacgaagatccaaacgaggctgttcgcgaatttgcaaaagagatcgacatctcttgtgtgaagatcgaacaggtgatcggggccggagaattcggggaggtctgctcagggcaccttaagttgccaggcaagcgggaaatatttgtcgccataaaaacactcaagtcaggctacaccgaaaagcaacggcgagactttctgagcgaggcatctatcatgggacaatttgaccacccaaacgtgatccatctcgagggcgttgtcacaaaatccacacccgtgatgatcattaccgagttcatggagaacggctctctggacagcttcttgcggcagaacgacgggcaatttactgtcatacagttggtgggtatgcttaggggcatcgccgccggaatgaaatatttagcagacatgaactacgtccacagggatttagccgccagaaatattctggtgaattcgaacttagtctgcaaggtctccgattttggtttgagccgctttctcgaagacgataccagcgaccctacatacacctccgccttgggcggcaaaattcctattcgttggaccgcccccgaggccatacaataccgtaaattcaccagtgctagcgatgtatggagttacggcatcgtcatgtgggaggtgatgtcttatggtgaaaggccttattgggacatgacaaatcaggacgtgattaatgctatagagcaggactataggctaccaccaccaatggattgtccctctgccctgcaccagctgatgttggattgttggcagaaagatagaaaccacaggcccaagttcggtcagatcgtcaacacacttgacaaaatgatccggaacccgaactctcttaaggctatggcgcctctttctagtgggatcaatttaccattattggataggacaatacccgattatacatcatttaacacggtcgatgaatggctcgaagcaatcaagatgggtcagtacaaggagagctttgccaacgctgggtttacttccttcgatgtggtgtcacagatgatgatggagtag

SEQ ID NO: 14985 - DNA, 2961 bp, synthetic construct
  misc_feature 1..2961: note = Description of Artificial Sequence: Synthetic coding sequence
  source 1..2961: mol_type = other DNA
atggctcttcgcagacttggcgcggcactgctgctgctgcccttgttagcagcagtggaggaaaccttaatggattccactaccgctactgccgagcttggctggatggtacacccaccctccgggtgggaggaagtcagcggatacgacgaaaacatgaataccattcgcacatatcaggtttgtaacgtgtttgagagttctcagaacaactggttaagaactaagttcatcagaagacggggagctcacaggattcacgtggagatgaaattctccgtgcgcgactgttctagtattccatctgtgcccgggagctgcaaggaaaccttcaacctgtactactacgaagctgattttgattctgcaaccaaaacctttcccaactggatggaaaacccatgggttaaagtcgatacaatcgcggctgacgaatcattctctcaggtggacttgggtggccgggtgatgaaaatcaatactgaagtccgatcatttggcccggtttcacggagcgggttttatttagcttttcaagattacggaggctgcatgtccctgattgccgttagagtcttctaccgcaagtgtccgaggatcatccaaaacggtgctatctttcaagagaccctctccggggccgagagcactagccttgtcgctgcaagagggagttgcatcgccaatgcggaagaggttgacgtcccaataaagctgtattgcaacggcgatggcgagtggctcgtgcccattggccgctgtatgtgcaaggccgggttcgaggccgtcgagaatgggaccgtctgcagggggtgtcctagcggcacctttaaagccaatcagggagacgaggcctgcactcactgccccatcaacagccgaactaccagcgagggagccaccaattgcgtgtgtcgcaacggttactaccgagccgacttggatcccctcgatatgccttgtaccactatcccgagtgcgccccaggcagtgataagctcggtgaacgagaccagcctcatgctggaatggacacctcccagagactccggaggcagggaggatcttgtgtacaacatcatctgcaaatcctgcggtagcggcaggggtgcatgtaccagatgcggagacaacgtccagtatgctcccaggcaattgggattgactgagccaaggatttatatctccgacctgctagcccatactcagtacacctttgagatccaagccgttaacggtgtgaccgaccaaagtcccttttccccccaatttgccagcgtgaatattactacaaatcaggctgctccatccgcagtttctatcatgcaccaggtgtcaaggaccgtagattcgatcaccctctcctggtcccagcctgatcaacccaatggtgtgatcctcgattacgagctacagtactacgagaaggagctctcagagtacaatgctaccgccattaagtcacccactaataccgtgacggttcagggacttaaagcaggagcaatctacgtgtttcaggtccgggcccgaactgtggctggatacgggaggtatagcgggaagatgtatttccagaccatgacagaggccgagtaccagacaagcatccaggagaagctgcctctgataattggttcctccgctgcagggctcgtgttcctcatagccgtggtggtcattgccatcgtatgtaatcgacgtgggtttgaacgcgctgattcagagtataccgacaaacttcagcactatacgagcgggcatatgacacccggcatgaagatttatatcgaccctttcacctatgaagatcccaacgaggccgttcgcgagttcgctaaggagattgacatctcttgcgtgaagatcgagcaagtgataggggcgggggagtttggagaagtctgcagcggtcatttgaaattgcccgggaaacgcgagatctttgtcgccataaagacgcttaaaagcggctacactgagaagcagagaagggacttcctgtcggaagccagcattatgggccagttcgaccatccaaatgtcattcatctcgaaggcgtggtgaccaagtctactcctgttatgatcatcacagagttcatggaaaacgggtccctggactcctttttacggcaaaacgacggacagttcaccgtgattcaactcgtgggcatgttgagaggtatcgcagccggaatgaagtatctagcggatatgaattatgtgcaccgggatctggccgccagaaatattctggtgaattcaaatttagtttgcaaagtgtctgactttgggctttcacggttcttggaggatgacaccagcgacccaacctacacctctgctctcggggggaaaattcctatccgttggaccgcccccgaagcaattcagtataggaagttcacctcagcctccgacgtctggtcttatggaatagtcatgtgggaggttatgtcatatggagagcgcccatattgggacatgactaatcaggatgtaattaacgctattgaacaggactaccgccttccgcccccaatggactgtccgtcagcactccaccaattgatgttggattgttggcagaaagatcgcaaccataggcccaagtttgggcaaatcgtcaacaccctggacaaaatgatacggaacccaaactcactgaaggccatggcacctctgagttctggtattaatcttcccttgctggatcggacaattcccgattacactagttttaacaccgtggatgagtggctggaggccatcaagatgggccagtacaaggaatcattcgcaaacgcaggatttacctccttcgatgtggtcagccaaatgatgatggaggatatcctgagggttggggtgacactggctggacaccagaagaagatcctaaattcaatacaggtgatgcgagcccagatgaaccagatccagagcgtcgaggtctag

SEQ ID NO: 14986 - DNA, 2964 bp, synthetic construct
  misc_feature 1..2964: note = Description of Artificial Sequence: Synthetic coding sequence
  source 1..2964: mol_type = other DNA
atggctcttagaagattgggagccgctctgcttctgctgcctttgttggccgccgtcgaggagacactcatggactcaaccactgccaccgccgagctagggtggatggtgcacccccccagtggatgggaagaagtgagcgggtacgatgagaacatgaacactatacggacttaccaagtttgcaatgtgttcgagtcttcccaaaacaactggcttaggactaaatttatccggcgccggggggctcacagaattcacgtggagatgaagttcagtgtgagagactgctcttccatcccctctgtgccagggtcctgtaaagaaactttcaacctgtactattacgaagcggatttcgactctgctacaaaaacgtttccgaattggatggaaaatccatgggttaaagtggatacgatagccgcggacgaatcttttagccaggtagatcttggaggccgcgtgatgaagataaacacggaggtgagaagttttggacctgtctctcgatccgggttctacctagccttccaagactacgggggctgcatgagcctcattgcagtcagggtcttttatagaaaatgtcctagaatcatccagaacggagccatcttccaggagaccttatccggagcagagagtaccagcctggttgcagccagaggatcgtgtatcgctaacgctgaggaggtggatgtgcccattaagctttactgcaacggtgatggagagtggcttgtcccaattggccgttgcatgtgtaaggcgggctttgaggcagttgaaaacggcacagtatgccgaggttgcccatctgggacctttaaggctaaccagggcgatgaggcttgtacccactgtccaattaattcgcggaccacgtccgagggcgccactaactgcgtctgccggaatggatactaccgggctgacctggaccctctggatatgccctgcactacgattccgtcagccccccaggcagtgatatcctccgtcaacgaaacttccctgatgctggaatggacgcccccaagagatagcgggggccgggaggatttagtttacaacatcatttgcaaaagctgtgggtctggacgcggagcctgtacccggtgcggggacaacgtacagtacgcccctcgccagctcggcctgacagagcccaggatttacatctccgatctgctggcacatacccagtataccttcgaaattcaagcggttaacggcgtaacagaccagtcccctttctccccacagtttgctagcgtgaatattaccacgaaccaagctgcaccgtctgccgtgtctattatgcaccaggtgtcccgaacagtggatagcataactctcagttggtcacagcctgaccagcccaatggcgtaattttagactacgagttgcagtattacgagaaggaactgtctgaatataatgccacagctatcaagtctcctacaaatactgtgaccgtgcagggcttaaaagctggagctatctacgtatttcaagttcgagcccgcaccgtggctggctacggacgttatagcgggaagatgtacttccagaccatgacggaggcagaataccagaccagtatacaggagaagctcccactgatcatcgggagtagcgctgccgggctggtctttctgatagctgttgtagtgatagctattgtctgtaaccgaaggcggggcttcgagcgcgcagatagcgaatacaccgataagttgcagcactacacctcgggccacatgacgcctggcatgaaaatctacattgatccatttacttacgaagatcctaatgaggctgtcagagaattcgcaaaggaaatagatattagctgcgtgaagattgagcaagtcatcggagccggagaattcggggaggtgtgctcgggtcacctgaagctgccagggaagcgcgagatttttgtagcaatcaaaacactcaagagcgggtacacagagaaacagaggcgagatttcctgtccgaagcgagcatcatgggtcagttcgaccacccaaatgtgattcacctcgaaggagttgttacgaaatcaacaccggtcatgatcattacggaattcatggagaacgggagcttggacagctttctgaggcagaatgatggtcagtttaccgtgattcagcttgtgggcatgcttagaggcatcgccgcagggatgaagtacctggctgatatgaattatgtgcaccgcgacctggccgcccgcaatatcctcgtgaattcaaatctggtctgcaaagtctctgactttggcctgagcaggttcctcgaagacgataccagcgaccccacctatacatccgccctgggcgggaagatcccaatcagatggacagcccccgaggcaatccagtaccgtaagttcacatccgcttccgacgtttggagttacgggatcgtgatgtgggaagtaatgtcttacggggagcgtccttactgggatatgactaatcaggacgtcatcaatgccattgaacaggattatcgtctcccacctcctatggactgcccgtctgccctgcaccagttgatgctggactgctggcagaaggacaggaatcaccgacctaagttcggacaaatcgtgaacacactggataaaatgataaggaatcccaactctctaaaagccatggcccccctgagctcaggaatcaatctcccacttctggatcgaaccattccggactacacttcattcaacacagtggacgagtggctcgaagccattaagatggggcagtacaaagaatccttcgcgaacgctggattcacatcctttgatgtggtgagtcagatgatgatggaagacattctgagggtaggtgtgacactggcaggccaccaaaaaaaaatactgaacagcattcaagtgatgcgagctcagatgaaccagattcaatctgtagaagtgtag

SEQ ID NO: 14987 - DNA, 3168 bp, synthetic construct
  misc_feature 1..3168: note = Description of Artificial Sequence: Synthetic coding sequence
  source 1..3168: mol_type = other DNA
atggctttgcgtcgcctcggagcagctctactgctattgcccctgctggctgcggttgaggagacactcatggatagcacaaccgctaccgccgagctgggctggatggtacatccgcccagcggatgggaagaggtgtccggctacgatgagaacatgaatacaattcgcacctaccaagtgtgtaatgtgtttgagagctctcagaacaattggctacgcactaaattcattaggcgtcgaggggctcaccggatccacgtggagatgaagttctccgttcgggactgctcatctattccaagcgtgccaggctcctgcaaggagaccttcaatctgtattattatgaggccgactttgacagcgctacaaaaacgttccccaactggatggaaaatccctgggtgaaggttgacaccatcgccgccgatgagtcattttcccaggtggacctggggggtagggtcatgaaaattaatactgaggtgcgatctttcgggccagtgagtcggtcgggcttctatctcgcatttcaagattatgggggatgtatgtctctaatcgcagtgagagtattctaccgcaaatgtccaaggatcatacagaatggggcgattttccaggaaacgctgagcggggcagaaagcacaagtctggtggcagcccgggggagttgtatcgctaacgctgaggaggtggatgtacctatcaagctctactgtaatggcgacggggagtggttggttccaatcggaaggtgtatgtgcaaagctggcttcgaagccgtcgagaatgggacggtgtgtcgaggttgtccatcgggtacatttaaggccaaccaaggagatgaggcttgtacccactgccctattaactctcgaacaacttctgaaggtgcaacaaattgtgtgtgtcgcaatggatactatagagctgatctggaccctcttgacatgccctgtaccaccattccttccgcccctcaggcagtaataagtagcgttaatgagacaagcctgatgttagaatggaccccaccccgggacagcggaggacgcgaagacctggtgtataacataatctgcaaatcttgtggaagtggccggggggcttgcactcgctgtggcgataatgtccagtacgcaccgagacagctcggcttaacagaacccaggatctacatctctgacttgttagcccacactcagtatacgtttgagatccaggccgtaaacggagtgaccgaccagtcccccttctctccgcaattcgccagcgttaacatcacaactaatcaggccgcaccatccgccgtctctatcatgcatcaggtgagcagaactgttgactcaattaccctaagctggagccaacccgaccagcccaatggggtgatactggattacgagctacagtactatgaaaaggagttgtctgagtacaacgcaacggcaattaagtcaccaaccaacactgtgaccgtccagggcctcaaggccggggcgatctacgtctttcaggtgcgcgcaaggacagtggccgggtatggccgttattccggaaagatgtacttccagacaatgacagaggcggagtaccagacatctattcaggagaagctgcctctgatcattgggtcatccgccgctgggctggtgttccttatagcggtggtcgttatagcgatcgtttgcaatcggaggggattcgagcgagccgattccgaatatacagacaagttacaacattacactagcggccatatgacccccgggatgaaaatctatattgaccccttcacctatgaggacccaaatgaagcagtgagggaatttgccaaagagatcgatatctcttgcgtgaaaatcgaacaggtaatcggggccggagagttcggggaagtatgtagcggtcacttgaaacttcctggcaaacgggagatctttgtggcaatcaagaccctcaaaagtgggtacacagaaaaacaaaggcgagactttttatctgaagcttcaatcatggggcagtttgatcaccctaacgtaatccacttggaaggagttgttaccaaatctacccctgttatgatcattacagagttcatggaaaatggctcattggatagttttttgcgccagaacgatggtcagttcaccgtcattcaattggtcgggatgctccgaggaattgcagcgggaatgaagtacctagccgacatgaattacgtgcatcgagatctggcagctcgcaatattctagtcaatagtaatcttgtgtgcaaggtgtctgattttggcctctcacgcttcctggaggacgacacctcagaccccacctacacatcggcgctgggaggaaagattcctattcggtggaccgctcctgaggccatacaatatagaaagtttaccagtgcctcagacgtctggtcttatggcattgttatgtgggaagtgatgagttatggagagcgcccatactgggacatgactaaccaagacgtaatcaacgcgatagagcaagactatcgcctgcccccacctatggactgtccctctgcccttcaccagttgatgcttgactgctggcagaaagatcgcaaccaccgccccaaatttggccagattgtgaacacactggacaagatgatcaggaatcctaactcattgaaagctatggcacctttgtccagtggaattaaccttccgttgttggaccgaacaatccccgactatacttccttcaatactgtggacgaatggttggaagccatcaaaatgggacagtataaagagtcattcgccaacgccgggttcacatcgttcgacgtcgtctcacaaatgatgatggaagatatattaagagtgggtgtcaccctcgctggacaccagaagaagatactgaacagtatccaggtgatgcgtgcccagatgaatcagatccagagtgtggagggccagcccctggcccgcagaccgagggctactgggcggactaagcgatgtcagccaagggatgtaaccaagaagacctgtaacagtaacgacgggaaaaaaaaagggatgggaaagaaaaaaacggatcccggacgagggcgagagattcagggaatcttttttaaagaagatagccacaaagaaagcaatgactgcagttgtggtggctag

SEQ ID NO: 14988 - DNA, 1449 bp, synthetic construct
  misc_feature 1..1449: note = Description of Artificial Sequence: Synthetic coding sequence
  source 1..1449: mol_type = other DNA
atggcgctcagacgtcttggcgctgccctgctgctattacctctgctcgcagctgtggaggagaccttgatggactccaccacagctactgcagaactcgggtggatggtgcatcccccaagcggatgggaggaagtgtcagggtatgacgagaatatgaataccattcgaacgtaccaggtgtgcaacgtgttcgagagctcgcagaacaattggcttaggaccaagtttatcagaaggcgcggagcacaccgcattcatgtcgaaatgaaattttcagtgagagattgctcctccatcccatccgttcctggtagctgcaaagagacattcaacctctattactacgaggctgacttcgatagcgcaactaaaacattcccaaattggatggaaaacccctgggtaaaggtcgatacaatagctgccgatgagtctttctctcaggtagatcttggcggcagagtgatgaagattaatacagaggttcggagttttggccccgtatcccgctctggattttatttggcatttcaagattatggcgggtgcatgagcctgatcgcagttagagtattctatcgcaagtgccccagaatcatccagaacggcgcgatcttccaagagaccctcagcggggctgagtccacatccctggttgccgccagaggttcatgcatagcgaacgccgaggaagtcgacgtgcccatcaagctttattgtaacggggatggtgagtggctggtgccaattggacgctgcatgtgtaaagccggcttcgaagctgtggagaacgggaccgtttgccgaggttgtcccagcggtacatttaaagcgaatcagggagatgaggcctgcacccattgccccattaatagcaggaccacttctgaaggcgccacaaactgcgtgtgccggaatggatactatcgggctgacctggaccccttagacatgccctgtacaactattccctccgcaccacaggccgtcattagctctgtgaatgagactagcctgatgttggagtggacaccgcctcgcgactcagggggcagagaagacctagtgtacaatattatttgtaagtcatgcggctctggcagaggggcctgtacaagatgtggtgataacgtgcagtacgcaccacgacaactaggcctgaccgaaccacggatttatatctcggacctgctggctcatactcagtatacattcgagattcaggccgttaatggggttacagatcagtctccattcagcccccagttcgcctctgtcaacattaccacaaatcaggccgcccccagcgcagttagcatcatgcaccaggtgtccagaacagtcgactccattaccctcagctggagccaacctgaccagcctaacggagttatcctcgactatgagctgcagtattacgagaagatgaagactcagcggtcttag

SEQ ID NO: 14989 - DNA, 2964 bp, synthetic construct
  misc_feature 1..2964: note = Description of Artificial Sequence: Synthetic coding sequence
  source 1..2964: mol_type = other DNA
atggagctgcgggtccttttgtgctgggcgtccctcgcggctgcactggaggagaccttgttgaacacaaagttagagacggccgatctgaagtgggtgactttcccacaagtggatggtcagtgggaggaattgtcagggctggacgaggaacagcatagcgttagaacctatgaggtgtgcgacgttcaacgcgcccccggacaggcccactggctcaggaccggatgggtgccaagacggggcgccgtgcacgtatacgctacccttagatttacaatgctagaatgtctttccttaccaagggcgggcagaagctgtaaggagacctttacagtcttctattacgagtctgacgctgataccgctaccgctctaacccctgcttggatggaaaacccttatatcaaggttgacaccgtagctgccgaacatttgaccaggaaacgccccggggccgaagctaccggcaaggttaatgtgaagaccttaagactgggtcccttgtccaaggctggattttacttggccttccaggatcagggtgcatgcatggcgctgctcagcctgcacctgttctataaaaaatgtgcacagcttacagtgaatctcactcgttttcccgaaactgtaccccgggagcttgttgtgccagttgccgggagctgcgtcgtggatgccgtcccggcacccggcccaagtccgtccctctattgcagagaagacgggcagtgggccgagcagcctgtgaccggatgcagctgcgcccccggattcgaggcagctgagggcaatacaaagtgtagggcttgcgcacagggcacctttaagcccctgtccggcgaaggaagctgtcagccgtgcccagctaattcccactccaacacaatagggtctgccgtgtgtcagtgccgagtgggttatttccgcgcccgcacagacccccgaggtgccccatgtacaactccccccagtgcaccgcggtcggtcgtctcaagactcaacgggagctctcttcatctggaatggtccgcccctttggaatctggaggtagggaagacctgacttatgccctccggtgtcgggaatgtcgacccggagggtcatgtgctccttgtggcggcgatcttacatttgatccaggcccaagagacctagtggagccatgggtggtggtcagaggccttaggcctgactttacatatacattcgaggtcacggccctcaacggggttagctcccttgctactggccctgtgcccttcgagccggttaacgtgacaacagatagagaggtccctccagccgtgtcagacattcgggtgactaggagttccccttcctcacttagtctcgcttgggcagtaccccgcgccccttctggcgccgtcttggattatgaagtgaagtaccatgagaagggcgcagaaggaccctcttcagtgcggttcctgaagactagtgaaaatagagcagagctgaggggattgaaacgtggcgcttcctacttagtccaagtgcgagcaagatcagaggcaggctacggaccattcggccaggaacaccattctcagacacagctggacgagtcggaaggctggcgcgagcaattagctcttatcgctggcaccgccgtagtgggggtcgtgcttgtgttagtagtcatcgtggtggcggtactgtgcctgaggaagcagtctaatgggcgcgaggcagaatactccgataagcatggacagtacctcatcgggcacggcaccaaagtgtacatcgatccttttacttacgaagatcccaacgaagcagtaagggaattcgccaaagaaatcgatgtctcatatgtgaagatcgaggaggttatcggagccggggagtttggagaagtatgtaggggacgactgaaggccccaggcaagaaggaatcttgcgtcgccataaagaccttgaagggtggatacactgaacggcaacgccgggagtttctgtctgaggcgtccattatgggccagtttgagcaccccaatatcatcaggctggaaggagttgtgaccaacagtatgccagtgatgatcctaacagaattcatggagaatggagcactcgatagtttcctgcgcctcaatgatgggcagttcactgtgatccagctggtgggaatgttacgaggcatcgcatcaggtatgagatacctggctgaaatgagctacgttcaccgcgatctagcagcccggaacattctggtgaatagcaatctggtgtgcaaggtgtcggatttcggcctctccaggttcctcgaagaaaatagcagcgaccctacttatacttcttcacttggtggtaagatccctattaggtggacagccccagaagcaattgcgttccgaaagttcacttccgcatcagacgcttggagctatggcatagtaatgtgggaggttatgagctttggcgaacgcccctattgggacatgagcaaccaggacgtgatcaatgcaattgagcaggactaccgtcttccaccaccccccgattgccccacatccctgcatcagcttatgctggactgctggcagaaggatcgaaacgctcggccacggtttccacaggtggttagtgccttagacaagatgattcgaaaccccgcctcattgaagattgtagccagagagaacgggggggcatctcatccgctgctggaccagagacagccccactattctgcatttggctccgttggcgaatggctcagagcgataaagatggggcgctacgaagagtcatttgctgctgccggattcggtagctttgagcttgtgagccagatcagcgcggaagaccttcttcggatcggcgtgactctggcagggcaccaaaagaagatcttagcttctgtgcaacatatgaaatcccaagccaaacccggtacaccgggtggtactggggggccggctcctcagtactag

SEQ ID NO: 14990 - DNA, 2808 bp, synthetic construct
  misc_feature 1..2808: note = Description of Artificial Sequence: Synthetic coding sequence
  source 1..2808: mol_type = other DNA
atggaactgcgcgtgttgctttgctgggcttctctggccgcagccctggaagaaacactgctgaatactaagttggaaacagcagacctcaaatgggtgacgtttccccaggtggatggccaatgggaagagctatccggcctggatgaagagcaacactcagtcagaacttacgaggtgtgcgatgttcagcgtgctcctgggcaggctcattggctcaggaccggatgggtgccacgtcgtggagctgtacacgtttacgcgactctgaggttcactatgttagaatgtctctccctgcctcgcgctgggcggagctgcaaggagacttttaccgttttctactacgaatcagatgccgacacagccactgcactgacacccgcgtggatggaaaacccatatatcaaggttgacacagtggccgcagaacaccttacacgcaaacgtccgggcgctgaagcaactggcaaagtgaacgtgaaaaccctgagactgggtccactgagcaaagcaggattttacctggcattccaggatcaaggcgcctgcatggccctgctgtccctccaccttttctataaaaagtgtgctcaacttaccgtgaatctgactaggttcccagaaaccgtcccaagagagctcgtagtccctgtagctgggtcgtgtgtcgtggacgccgttcccgctccaggccccagcccatcactctactgtagggaggacggacaatgggccgagcagcccgtaacagggtgctcctgcgcgcccgggttcgaagcggccgaggggaacacgaagtgccgcgcttgcgcccaagggacgttcaaaccactgagcggcgaaggcagttgtcagccctgtcccgccaactcacactccaatactattggatcagccgtttgccaatgccgggtgggatacttccgggctcgcacagaccctagaggagcaccctgcactactcctcccagtgctcctagaagtgtggtgagccggttgaatggttctagcctccatttagaatggtccgctcccttggagtccggtggaagggaggacctgacctacgccttgcgctgccgcgagtgcaggcccgggggcagttgtgccccgtgtggtggggatctcacattcgacccgggccccagagatcttgttgagccttgggtcgttgtgcgagggcttaggccagacttcacctacactttcgaagtgacggctcttaatggagtgagtagcctagccaccggtccagtgccatttgagccagtcaacgtgaccaccgatcgggaagtgccaccagcagtctcagatatccgcgtgaccaggtcttccccatcttcgctgagccttgcttgggcagtcccgagagcccctagcggggctgtcctcgattacgaagtaaagtaccatgaaaaaggtgccgaaggaccttcaagcgttaggtttctcaaaacttctgaaaaccgagctgaattgagaggcttaaaacgcggcgcatcgtacctggtccaggtgagagcgcggagcgaagcaggttacgggcccttcggtcaggaacatcattcccagactcagttggacgaaagcgagggatggagagaacagttggcactgattgccggaacagccgtcgtgggggtggttctggtgttagtagttatcgttgtggctgtcctttgccttcgcaaacagtccaacgggagggaggctgaatattctgacaagcatgggcaatacctgatcgggcatgggacgaaggtgtacattgacccttttacttacgaagacccaaatgaagcagttagagagttcgcaaaggagatcgacgtgtcatacgtgaaaatcgaagaagtcattggtgcaggtgagtttggcgaggtgtgcaggggacgtttaaaggctccgggaaagaaagagtcctgtgtggccatcaagacactgaagggtggttacaccgaacggcagcggagggagttcctgtccgaagcatccattatgggtcagttcgagcatccaaacatcattcggctggagggagtggttactaactcaatgccagtaatgatcctgaccgaatttatggaaaatggcgcactggatagctttctccgcctcaacgacgggcaattcactgtgatccagttagtgggaatgttaagaggaatcgccagcgggatgcggtatctcgcagaaatgtcttacgtgcatcgggacttggcagcacgtaacatccttgtgaattctaatttagtttgcaaagtgtctgacttcggtctctcaaggtttctggaagagaattcgagtgatcccacgtacaccagctccctgggtggaaaaatacccatacggtggacggcacccgaagcgattgcctttaggaagtttacgtccgcgtcggatgcatggagctatggaattgtgatgtgggaggtcatgtccttcggcgaaagaccctattgggatatgtcgaaccaggatgtgattaacgcgatcgagcaggattaccgactgcctccaccacccgactgtcccaccagcctgcatcagttgatgctagattgctggcagaaagatagaaacgctagacctcggttcccacaagtggtgagcgccctggacaagatgatcagaaatccggcatcactaaagatcgttgcccgagagaatggcggtgatctgctccggataggagtgaccctcgctgggcaccagaaaaagattctggccagcgtgcagcacatgaaaagccaggccaagcctggcacccctggaggtactgggggacctgcacctcagtattag

SEQ ID NO: 14991 - DNA, 552 bp, synthetic construct
  misc_feature 1..552: note = Description of Artificial Sequence: Synthetic coding sequence
  source 1..552: mol_type = other DNA
atggagttcctgtgggccccacttctgggactttgctgctccttggcagccgccgatcggcataccgtgttttggaattctagtaatcctaaattcagaaatgaggactatacaatccacgtccagctcaacgactatgtggatattatctgtccccattacgaggaccattccgtcgccgatgccgctatggaacaatatatactgtatcttgtggaacatgaagagtaccagctctgtcagcctcagagcaaagaccaagttcggtggcagtgcaatagacccagcgctaagcacggacccgagaagttgtccgaaaaatttcagagatttaccccttttacgttgggtaaagaatttaaagaggggcattcctattattacataagccattctccccaggcacacgacaaccctcaggagaagagactggccgctgatgaccccgaagtgcgcgtcctgcattcaatcggccactccgctgcccccagactttttccgttggcctggacggtgctgctgttgcctttgctgcttttgcagaccccctag

SEQ ID NO: 14992 - DNA, 618 bp, synthetic construct
  misc_feature 1..618: note = Description of Artificial Sequence: Synthetic coding sequence
  source 1..618: mol_type = other DNA
atggagtttctgtgggccccacttctggggttatgttgctctttagcagccgccgacaggcatactgtcttttggaactccagcaatccaaagttcagaaacgaagactacaccattcacgttcagctgaatgattacgtggacataatctgtccacattacgaggaccattcagtagccgatgccgccatggaacagtacatcctctacttggtcgagcacgaagagtaccagctgtgccagccgcagagtaaggatcaggtgcgatggcagtgtaatcgccctagcgccaagcacgggcccgaaaagctctctgagaagtttcagaggtttacccccttcacccttggcaaggaattcaaggagggacacagctactattacatttccaagcccatacatcagcatgaagaccgttgtctgaggttgaaagttaccgtgtccgggaaaattacacattctcctcaggcacatgataacccccaggagaagcggctggcagccgatgaccccgaggtacgggtgctgcacagtatcggtcattcagctgctccacggctgtttccactggcatggaccgtcctgctcctccctttgttattactgcaaactccctag

SEQ ID NO: 14993 - DNA, 1002 bp, synthetic construct
  misc_feature 1..1002: note = Description of Artificial Sequence: Synthetic coding sequence
  source 1..1002: mol_type = other DNA
atggctgtaaggcgagacagcgtttggaagtattgctggggcgtgcttatggtgctgtgtcgtactgccatcagcaagtcaattgtgcttgagccgatttattggaacagctctaacagtaagtttctgcctggccagggcctagtgctatatcctcaaatcggggacaagttagacattatctgcccgaaagttgattcaaagacagtaggacaatatgaatactataaggtgtatatggtagacaaggatcaagctgatagatgtacgatcaaaaaagagaacacacccctgcttaattgtgctaaaccagatcaagacattaagttcacgattaaatttcaggaattttcaccaaacctgtggggcctggagttccaaaagaataaagactactatatcatctcaacgtccaatggctccttggaggggctggataaccaggagggtggcgtatgccagacaagggccatgaagatattaatgaaggtcgggcaagacgctagctccgcagggtcaacaagaaataaggaccccaccagaagacccgaactggaggccggcactaacggacgctcctcaactacaagcccctttgtcaagccaaatcctggcagctctaccgacgggaattccgctgggcattctgggaataatatcctgggatctgaggtggcattatttgcgggaatcgcttctggctgcattatttttatcgtcatcatcattacccttgtagtgctgttgctgaagtatagaagaaggcaccgcaagcatagccctcagcacaccacaacactgtccctgagcactctggctactccaaagcggagcggtaataataacggatcagaaccatcggacatcattataccactgcgaacggccgatagtgtgttctgtcctcactatgagaaagtatccggggattatgggcaccccgtgtatatcgtgcaggaaatgccaccacaatcacccgctaacatctattacaaagtgtag

SEQ ID NO: 14994 - DNA, 3624 bp, synthetic construct
  misc_feature 1..3624: note = Description of Artificial Sequence: Synthetic coding sequence
  source 1..3624: mol_type = other DNA
atgctgttaacccttattatcctcctgcccgtggtgtccaagttttcgtttgtgagtctgagtgctccccaacactggtcttgtcctgaggggactctcgccggtaatgggaattccacctgcgtgggcccagctccattcttgatcttttctcacgggaattcgatcttccggatagacaccgaaggcactaactacgagcagctggtggtggacgccggcgtatccgtcatcatggactttcactataacgaaaagaggatctactgggttgaccttgagaggcagctgctccagcgggtgttcctgaatggatctcgccaggagcgagtgtgcaacatcgagaagaatgtgtcggggatggccattaactggataaacgaggaagtcatatggagcaatcagcaggaaggaatcataacggttaccgacatgaaaggaaataacagccacattctgctgtcagccttgaagtaccccgccaacgtggccgtcgaccccgtggaacggtttatattctggtcgagtgaggtggctggcagcctgtaccgagcggacttggatggggtcggcgtcaaggcgttactcgaaacctcagagaaaattaccgccgtctccctggatgtgttggacaagcgattgttttggatccagtacaatcgagagggatctaatagtttaatctgttcatgcgattatgatggcggcagcgtccacatttcgaaacaccccacacagcacaacctatttgctatgtcactctttggcgatcgaatattttatagcacctggaaaatgaagactatatggattgctaacaaacacacagggaaagatatggtgcggatcaacctgcatagcagcttcgtcccattgggcgagcttaaggtcgtgcatcccctggcccagcccaaggcagaagatgatacgtgggaacctgagcagaagctctgtaagttgcgtaaagggaattgcagttctacagtgtgcggccaggatttgcagtcacatctttgcatgtgtgcggagggctatgctctaagtagggatcggaaatattgcgaagatgtgaacgaatgcgctttctggaaccacgggtgtacgctgggctgcaaaaacacaccaggtagctactactgtacatgtcccgttggctttgtcctgttaccagacggaaagcgctgccaccagttggttagttgcccacggaatgtcagtgagtgctctcacgactgcgtactcactagcgaaggtcctctctgcttttgtcctgagggaagcgtgcttgagcgagatgggaagacttgctcagggtgctcgtcccctgataacggaggatgctcccagctttgtgttcctctgagtccggtgagttgggaatgtgactgttttcctggctatgacttgcagttggacgagaaaagttgcgcagcttcaggtcctcagccattcttgctgttcgcgaattctcaggacattcgacatatgcatttcgacggtactgattacggcaccctgctatctcaacaaatgggcatggtctacgccctcgaccatgaccccgtcgaaaacaaaatctacttcgcacataccgcgttaaaatggattgaacgggctaatatggacggtagtcaaagggaaagattaattgaggagggagtcgacgtacctgagggtttggccgtggactggattgggcggcggttctattggacagaccgggggaagagtctaatcggccgatcagatctgaatgggaagcgctccaaaatcattactaaggagaatatctctcagccaagagggatcgctgtccaccctatggctaaacgcttgttctggacggacaccggtatcaaccctcgtattgagagtagctccttgcaggggctggggcggcttgtgattgctagctccgacctaatatggcccagcggaatcactattgactttctgactgataagttgtattggtgcgatgccaaacaatccgtaatcgagatggccaacctcgacggatcgaagagaaggagattgacccagaatgatgtgggccatccctttgccgtagctgtgtttgaagactatgtctggtttagcgattgggccatgccctccgtgatgcgggtcaataaacgcacagggaaggatcgagtgaggctgcagggaagcatgctgaagccctcttcgctcgtagtggtccatcccctcgccaaaccaggggctgacccttgtctgtatcagaacggaggttgtgagcatatttgcaagaagcgacttggcaccgcctggtgcagctgccgcgagggttttatgaaagccagcgatggcaaaacatgccttgctctcgacggacaccagttactggcggggggtgaagttgacctgaaaaaccaggttacaccgctcgacatcctgagcaagaccagggttagtgaggataatattaccgagtcccagcacatgctcgtcgctgaaatcatggtcagtgatcaggacgactgtgcccctgtgggctgctctatgtacgcccggtgcatctcggaaggagaggacgcgacgtgtcagtgtctgaaggggtttgccggagacggaaagttatgtagcgatatcgacgagtgtgaaatgggggtgccggtgtgtcccccagcctcatcaaagtgcatcaatacagaggggggatacgtgtgtagatgctccgaggggtaccaaggtgatggaattcactgtctcgacatcgatgagtgccaattgggcgagcactcttgcggcgagaatgctagttgcactaataccgaaggtggctacacctgcatgtgcgctggacgtctgtccgagcctgggctcatctgccctgattccactcctccacctcatctgcgggaagacgaccaccactattctgtgcggaatagcgactcagagtgccccttgagtcatgatggctattgtctgcacgacggcgtgtgcatgtacatcgaggcgctcgacaagtacgcctgcaactgtgttgttggatatatcggtgaacgttgtcagtaccgagacctgaaatggtgggaactgcgacacgccgggcatggacagcagcagaaggtgatcgtcgtcgcagtatgcgtcgtggtgcttgtgatgctgctgctgttaagcctctggggcgcacactactatagaacacaaaagctgctctctaaaaatcccaaaaatccttacgaagagagtagtcgtgatgtgaggtcgagaaggcccgccgacaccgaagacggaatgtccagctgtccacaaccttggttcgttgtaataaaggagcaccaggatctgaagaatggcggacagccggtagctggggaggatgggcaggctgcagatggatccatgcagcctacaagctggcggcaagaaccacagctttgtgggatggggaccgaacagggctgttggatccccgtgagctccgacaagggcagttgccctcaggtcatggagagatcattccatatgcccagttatggcactcaaaccttagaagggggggtggagaaaccccactctctcttgagtgccaacccactatggcaacagagggccttggatccaccccatcaaatggagctcacccaatag

SEQ ID NO: 14995 - DNA, 3501 bp, synthetic construct
  misc_feature 1..3501: note = Description of Artificial Sequence: Synthetic coding sequence
  source 1..3501: mol_type = other DNA
atgctcttgacgctaatcatcctgttgcctgtggtgtcaaagtttagttttgtcagcctgtcagccccccaacattggagctgccccgagggaaccttagcgggtaatggcaatagcacgtgtgtagggcccgcaccctttctcatcttctcacacggtaattcaattttcaggatcgacaccgaagggaccaactacgaacagctagttgtggatgccggcgtcagcgtgattatggacttccactacaacgaaaagcggatatattgggtagatctggaacggcaactgctgcagcgggtttttctgaacggaagccgccaagagcgggtgtgcaacatcgaaaagaatgtatcaggtatggcaataaactggattaacgaggaagtgatttggagtaaccagcaggaaggcatcattacagtgaccgatatgaaaggaaacaacagccatatccttttatcagctttgaaatatcccgctaatgtggcagttgatccagtggaacgctttatcttctggagttcagaagtggccggcagtctctatagggcagatctcgacggggtgggtgtgaaagcactcctcgaaacctcagagaaaatcactgctgtgagtctggatgttctcgataagcggctgttctggatccagtataatagagagggttctaacagtcttatctgctcctgtgactacgacggcggatccgttcatatcagtaaacatccaacccaacacaacctattcgcgatgagcttgttcggtgacagaattttttacagtacctggaaaatgaaaacaatttggatagccaataaacacactggcaaagacatggtaagaatcaacctccatagttcttttgttcccctgggagaactcaaggtcgtccatcctctcgctcaaccaaaggccgaggacgacacgtgggaaccagaacagaaactgtgcaagctaaggaagggcaactgcagctccaccgtgtgcggccaagacctgcagtcacatttgtgcatgtgcgcagaaggctacgcgctgtctcgagatagaaagtattgcgaagacgtaaatgagtgcgccttttggaatcatgggtgcactctgggctgtaaaaatacccccggatcatattactgtacctgccctgtcggcttcgtgctcctgcctgacggaaaacgctgtcaccagttggtctcttgcccaaggaacgtgagtgaatgcagtcatgattgcgtgttgacatccgagggtcccctatgtttctgcccggagggatctgtccttgagagggacggcaaaacttgctctggttgctcttcgccagataatggcgggtgctcccaactgtgcgtccccctgagccctgtgagctgggaatgtgactgcttcccaggatacgatctccaacttgatgaaaagagctgtgcggcctccggtccacagccattcctcctgtttgcgaactcccaggatatccgacacatgcactttgatggaactgactatgggaccttgttatcccaacagatgggaatggtatacgctctagatcatgatcccgtggagaataagatatattttgctcatacggctctgaaatggattgagcgtgcgaacatggatggcagccaaagagagcgtctgatcgaagagggtgttgacgtccccgaaggcttggccgtggattggattggcaggagattctactggacagatcgaggaaaatccttaataggaagaagcgacctgaatggaaagcgatctaaaatcattaccaaagagaacatcagtcaaccacggggaatcgcagtccatcccatggccaaacgacttttttggaccgatacgggcatcaacccacgcattgagtcctcatctcttcagggactcggtcgcctcgtcattgcttcctcagatctcatctggcccagcgggattacaatcgatttcctgacggataagctgtattggtgtgacgccaagcagtcagtaatcgagatggctaacttggacggatctaaacgcagacgcctgacacagaacgacgtgggccacccattcgccgttgcagtgttcgaagactacgtttggttttccgattgggccatgccctccgttatgagagtgaacaaaagaacggggaaggatagagtgcgccttcagggcagtatgttaaaaccaagttcactcgtggtggtccatcccttggccaagcctggagccgatccctgtctgtatcagaatggcggctgcgagcacatttgcaaaaaaagattgggaaccgcctggtgctcatgtagagaaggttttatgaaggcatccgacggcaaaacgtgcttggccctggacggtcaccagcttctggcaggaggggaagttgaccttaaaaaccaggtgaccccgttggacatcctttctaagacaagggtctccgaggacaatattactgaaagccagcacatgctggtggcagaaattatggtctccgaccaggatgactgcgcaccagtgggatgttctatgtacgcccgctgcatatcagaaggcgaagacgccacatgtcagtgcctgaaaggattcgcaggagacggcaagctatgctcagacatagacgagtgtgagatgggagtacctgtgtgcccaccggcttctagcaagtgcattaataccgaaggcggctacgtgtgtcgctgttccgaagggtatcagggagatgggatccactgtctcgatagcacacctccgcctcatctacgagaggatgatcatcactactccgtcagaaactcagattctgaatgtcctctgagccatgacggatactgtctccatgacggagtatgtatgtatatcgaagccctagacaaatatgcttgcaattgtgttgtcgggtatatcggcgagcgctgccaatatagagatctcaagtggtgggagctccgtcacgcgggccatggacaacagcagaaggtcattgtggtggccgtttgtgtggtagtcttggtgatgttacttctgctctcactgtggggtgctcattattaccggacacagaagctactaagtaagaacccaaagaacccctacgaagagagctctcgcgacgttaggagccgaaggcccgccgatacagaggatggcatgtcttcttgtccgcagccatggttcgtggtgataaaggagcaccaggacctcaagaatggtggtcagcctgtagctggggaggacggtcaggccgctgatggaagtatgcagcccacgagctggagacaggagccacagctctgcggcatgggcaccgaacagggctgctggattccagtgagctctgataaggggagctgcccccaggtgatggagaggagttttcacatgcctagttacgggacccaaacgctggagggcggagtggaaaagccccactcactgctgtccgccaatccactgtggcaacaaagggccctggatcctcctcatcagatggaattgacacagtag

SEQ ID NO: 14996 - DNA, 3498 bp, synthetic construct
  misc_feature 1..3498: note = Description of Artificial Sequence: Synthetic coding sequence
  source 1..3498: mol_type = other DNA
atgctgctgacattaatcattctgttacctgtggtctccaagtttagttttgtgagcctgtctgccccccagcactggagctgtcccgaaggcaccctcgctgggaatggcaactcgacctgcgtcggccctgcaccttttttgatatttagccatggtaattctatttttcgcattgacaccgagggcaccaattacgaacagcttgttgtggatgcgggagtttccgtgatcatggattttcattacaatgaaaagagaatttactgggtagacctggagcggcagctcctgcagagggttttcctcaatggttcaaggcaggagcgcgtgtgcaacatcgaaaagaacgtgagtgggatggcaattaattggattaacgaggaggtgatatggtcaaatcagcaggagggaatcattaccgtcacagacatgaagggaaacaatagtcacatcctgctgagtgctctgaagtatcccgccaatgttgccgtagatcccgtggaaagatttattttctggtcgagtgaagtcgccggatccctgtaccgggccgaccttgatggggtgggggtgaaagctctgctggagaccagcgagaaaatcacagccgtttcactggatgtcctcgacaagaggctgttttggatccaatataatcgggagggcagcaactcgttaatttgctcctgtgactacgatgggggctccgtgcacatcagcaagcaccctacccaacataatctgttcgctatgagcctgtttggggatcgaatcttttactccacttggaaaatgaagacaatttggatagcaaataaacacaccgggaaagatatggtgcgcattaatctgcattcttcctttgtgcctctgggagagctcaaggtggtgcaccctcttgcacaaccgaaagctgaggatgatacctgggaacctgacgtgaatgaatgtgcattttggaaccatggatgcaccctgggctgtaaaaacaccccaggctcctattattgtacatgcccagtgggattcgtgcttctgcccgatggcaaaagatgccaccagttggtgagctgcccccggaacgtatcggagtgttcccacgactgcgtgctaacctccgaaggtccactgtgtttttgccccgagggtagcgtcctggagagagacggcaagacctgctccggatgctcaagtcccgataacggggggtgtagtcagctgtgcgtgccactcagccccgtgtcttgggagtgcgactgtttccccggctacgacctgcagttagatgaaaaatcctgcgctgctagcggcccccaaccgttccttctgttcgctaacagccaagacattaggcacatgcacttcgatggcaccgactacggcacactgctcagccaacagatggggatggtatacgctctggatcatgatccagtcgagaacaaaatttacttcgcccataccgcccttaaatggatagagcgggcaaacatggacgggtcacaacgggagcggctcatagaggagggtgtcgacgtcccagaaggcctggccgttgactggatagggagaaggttctactggacggatagaggcaagtctcttattggccgttctgatctgaatgggaaacgttcaaagatcattactaaagaaaatatatcccagccacggggaattgcagtgcatcctatggctaagcgactgttttggacagatacagggatcaatccccggatcgagtccagcagcctccagggtctggggcggctcgtgattgctagcagcgatttaatatggccttctggcataaccatcgactttttaaccgataagttatattggtgcgacgctaaacagagtgttattgaaatggcgaaccttgacgggtctaagcgacgccggcttacccagaacgatgttggccacccatttgccgttgccgtgttcgaggattacgtgtggttctctgactgggcgatgcccagcgtcatgcgcgttaacaagcggacgggaaaggatcgggtacggctgcagggaagcatgctgaaaccttccagcttggtcgttgtgcatcccttggccaagcctggcgctgatccctgcctttatcagaacggcggttgcgaacatatttgcaagaagcggctgggcactgcatggtgctcctgccgagagggcttcatgaaggcaagcgatggcaaaacctgcttggccttggatggccaccaactcttggctggaggggaggtggatctgaagaatcaggtcactcccctagacatcctgagtaagacccgggtgtccgaggacaacatcacagagagccagcacatgctggttgccgagatcatggtctccgatcaggatgattgcgctcctgtgggctgttcgatgtatgccagatgtatcagcgaaggcgaggacgccacctgtcagtgcttgaaagggtttgcaggagacggtaaactgtgttcggatattgatgagtgcgagatgggggtgcctgtgtgtccacctgcctctagtaaatgtatcaacactgaaggaggatatgtgtgtcgatgttccgaaggctaccagggagacggtattcactgcctagacattgatgagtgtcagttaggggagcattcttgcggcgagaatgcttcttgcacaaacacggaggggggttatacttgtatgtgcgccggcaggctgagcgagcctggactaatttgccctgacagtacccctccaccgcatctacgcgaagatgaccaccattacagcgtccggaactctgacagtgagtgccccctatcacatgatggttattgcttacatgacggagtatgtatgtacattgaagcccttgacaaatacgcttgcaactgtgtggtcggctatattggagaacgctgccagtaccgggatcttaaatggtgggagctacgacacgcaggtcacggtcagcaacagaaggtaattgtcgtcgcggtgtgcgtggtcgttttggtaatgctgcttctgttgtcactatggggcgcacattactatcggacccagaagctactctcaaagaatcccaaaaacccctacgaggaatcctcaagagatgtgaggtccaggaggcccgcagataccgaagatggcatgtcaagctgcccccagccttggttcgtagtgattaaagaacaccaggaccttaagaatggcggccagcctgtggccggtgaagatggacaggccgctgatggatccatgcagcccacaagttggcgccaagagccacagctgtgtgggatgggtactgaacagggctgttggatacccgtgagttctgacaagggctcttgcccacaagtgatggagcgctcatttcatatgccttcctatggtactcagacactggaggggggcgtcgagaagcctcattccctgcttagtgccaacccactttggcagcagagagctttagatccccctcaccagatggagctgacccagtag

SEQ ID NO: 14997 - DNA, 3633 bp, synthetic construct
  misc_feature 1..3633: note = Description of Artificial Sequence: Synthetic coding sequence
  source 1..3633: mol_type = other DNA
atgcgcccaagtggaacagctggcgccgcccttctggcattgctagctgctttgtgccctgcctccagagccctggaggaaaagaaggtgtgccagggcacatccaataaattgacacagctcgggactttcgaagaccatttcttgtcactgcagcgcatgtttaataattgcgaggttgtgctgggaaacctggagatcacctacgtgcagagaaattatgacctgagcttcctcaaaactatacaagaagttgccggatatgtgctgattgccttgaacacagttgagcgtattcccctggagaatctgcagatcatacggggcaacatgtattacgagaatagctatgcgctggcggtgctatccaactatgatgctaataaaacaggactaaaggagctgccgatgcgcaacctgcaggagattctgcacggtgctgtgagatttagcaacaacccagccctttgtaatgtggaaagtattcagtggcgtgatattgtgagctctgattttttatctaatatgtctatggatttccagaatcatctaggcagctgccagaaatgcgacccgtcttgccccaacggtagctgttggggagccggagaagagaattgccagaaattgaccaagattatatgcgcccaacagtgctcagggaggtgccgtggcaaatccccttccgactgctgtcacaaccagtgcgctgccgggtgtacaggcccaagggaatccgattgcctagtatgtcgcaagttcagggacgaagctacttgtaaggatacatgccccccactgatgctgtataatccaaccacctaccagatggacgtgaatcctgaggggaagtactcattcggcgccacctgcgtgaaaaagtgcccaaggaattatgtggtgacggaccatgggtcgtgtgtgcgagcctgcggggccgacagttatgagatggaagaggatggcgtgagaaagtgtaagaagtgtgaggggccctgccgaaaagtatgcaatggcatcgggattggcgagtttaaagactctctgtctatcaacgcaacaaatattaaacacttcaagaactgtacatctatttctggagacctgcacattctgccagtcgccttcagaggcgactcttttacccatacaccgcccttggatccgcaggagttagacatcctcaaaactgtcaaagagatcaccggattcctgctaatccaggcctggcccgagaaccgaactgatctgcacgcttttgagaatttggagattattagaggcagaacaaaacaacatgggcagttcagtctggccgtcgtgagtctcaacatcactagcctcggcctgagatctttgaaagaaatctccgatggggacgtgatcatttctggcaacaaaaatctgtgttatgccaacaccatcaactggaaaaagctgtttggcaccagcggtcagaaaaccaagatcatatcaaatcggggcgagaactcctgcaaagctactggacaggtgtgccacgccctgtgctcaccagaaggatgttgggggcccgaaccacgggactgtgtgtcttgtcggaacgtctccaggggccgggagtgtgtcgataagtgcaatctgctggagggcgaacctcgggagttcgtggagaacagcgagtgtatccagtgtcaccccgagtgtctgcctcaggccatgaacatcacctgtacagggagaggacctgataattgcatccaatgtgctcattacatagatggtccacactgcgtaaaaacctgccctgccggcgtgatgggagagaataacactctggtatggaagtatgcggacgccggacatgtgtgccatctttgccatccaaattgcacctacggttgcacaggcccaggactcgaaggctgtcctacaaatggcccaaagatcccttctattgccactggcatggtgggcgcactgttactcctcctggttgtggctttggggattgggctgttcatgcgccggcgccatatcgttcggaaacggactctgcggcgtctcctgcaagaaagagagttagtggagccccttacccctagtggggaggcgccaaatcaggccctcctgcgcatcctgaaagagaccgagtttaaaaagatcaaagtactcggcagtggtgctttcggcaccgtttacaaggggctatggatccctgaaggagagaaagtcaaaatacccgtcgccatcaaagaactgcgcgaggcaacctctcccaaggcgaacaaagaaattttggacgaggcgtacgtcatggcctcagtcgacaatccccacgtctgtaggcttctaggaatctgcctcacttcgacagttcagctcatcactcagctgatgccctttgggtgcctcctcgactatgtgcgcgagcacaaggacaatatcgggtcacagtacttgctgaattggtgcgtgcaaatcgccaagggaatgaactacctggaggaccggcgcctagttcaccgcgatcttgcagcccggaacgtgcttgtgaagacaccccagcatgttaagatcacagatttcggcctggccaagctgctgggagcagaagaaaaagaataccatgctgaagggggaaaagtgcccataaagtggatggctctggagtctattctgcacaggatctacacccaccagagcgatgtctggagctatggtgtcaccgtttgggagctgatgactttcgggtccaaaccttatgacgggattccagcctcagagatcagctcgatattagagaaaggagagagactcccccagcctccaatctgcaccatcgacgtgtatatgattatggtcaagtgttggatgatcgacgccgactctcggccaaagtttagggagttgatcatcgaattttccaaaatggctcgggacccgcaaaggtacctggtcattcagggggacgagcggatgcacctgccatcaccaactgacagtaatttttatcgagcactgatggacgaggaggatatggacgacgttgtcgacgccgatgagtacctgattccacaacagggatttttcagctcaccatcaacaagtaggacaccattgttgtcatccctctctgcaacatccaataatagtaccgtggcgtgtatagatcgaaatggccttcaatcctgccctattaaggaggattctttcctgcaacgatattccagtgacccaaccggagcactgacggaggactctatcgatgacacctttctgcccgtacccgagtacatcaatcagtcggtgccgaagcggcccgccggcagcgttcagaaccccgtgtatcacaaccagccactgaatcctgccccttccagggatccacactaccaggacccgcattctacagctgttggaaaccccgaatatttaaacaccgttcaacccacctgcgtaaattccacatttgacagccctgctcactgggcccaaaagggctcacaccagatctccctggataacccagattaccaacaggatttcttccccaaggaggccaaacccaacggcatattcaagggatcgaccgccgagaacgctgaatatctgagggttgccccccagtcttctgagtttattggagcgtag

SEQ ID NO: 14998 - DNA, 1887 bp, synthetic construct
  misc_feature 1..1887: note = Description of Artificial Sequence: Synthetic coding sequence
  source 1..1887: mol_type = other DNA
atgcgcccttccgggaccgcaggcgctgctctgctcgccctgttggcagcgctgtgcccggcctctagggctttggaagagaaaaaagtgtgccagggaacatctaataagctcacgcaacttggtaccttcgaggatcattttctatccctgcaaaggatgttcaacaactgcgaagttgtgctcggaaatctcgagatcacttacgttcagagaaattatgacctcagcttcttaaaaaccattcaggaggtggcgggctatgtcctgattgctctaaatacggtcgagcgcattcccctggagaatctacagatcatcagaggaaacatgtattacgaaaactcgtacgcgctggcggttctctccaactacgatgccaacaaaactggcctgaaggagcttccaatgcgcaatctgcaggaaatactccacggggctgtgaggttctcaaataatccagccctgtgtaatgtcgaatccatccagtggcgggatattgtatctagcgattttctgtccaacatgtctatggactttcaaaaccacctcggcagctgccagaagtgcgatccatcatgcccaaacggaagctgttggggcgccggtgaagagaattgtcagaagctgaccaaaatcatctgtgcccaacagtgctccggaaggtgtcggggaaaatcaccctccgactgctgtcacaaccagtgtgccgctggctgcacgggcccccgggagagtgattgcctagtatgccgtaagtttcgagacgaagctacttgtaaggatacatgcccacccttaatgttatacaacccgacaacctaccagatggatgtgaacccggaaggtaagtatagtttcggcgcaacttgcgttaaaaaatgcccgcgtaactatgtagtaaccgaccacggaagctgcgtgagagcttgtggagcagattcgtatgaaatggaggaggacggggtgcgcaagtgcaagaaatgcgaaggtccgtgcaggaaggtttgcaatggcatcggaattggcgaattcaaggattcactctcgataaacgcaactaacatcaagcactttaaaaattgtacttcgatcagcggcgacctccacattcttcccgttgccttcagaggggatagcttcacccacactccaccgttggatccgcaggaattagatatcctgaagactgtgaaggagattactggctttcttctgatccaggcctggcccgagaaccgaaccgaccttcatgccttcgagaatcttgagattattcgagggagaacaaagcagcacggacagttctccctcgccgtggtgtcactgaacattaccagtctggggctgcgatctctcaaggaaatctcagacggggatgtgataatctctggcaacaaaaatctgtgctacgctaataccataaactggaaaaagctgttcggcacctctggccagaagaccaaaatcatctcaaataggggcgagaactcttgtaaggcaacaggccaggtctgtcacgctctctgcagccctgagggttgttggggcccagaaccccgggactgcgttagttgccgcaacgtgtcaagaggcagggagtgcgttgacaagtgtaacctgctggagggtgagccccgggaattcgttgagaattcagaatgcatccagtgccatcctgaatgcctccctcaagcgatgaatatcacttgtacaggcagaggtcccgacaattgcatccaatgcgcccactatatcgatggcccccattgcgtgaagacttgccccgccggggtcatgggggagaataacaccctggtctggaagtatgcagacgccggacacgtgtgtcacctctgccatccaaactgcacctatggatcgtag

SEQ ID NO: 14999 - DNA, 2118 bp, synthetic construct
  misc_feature 1..2118: note = Description of Artificial Sequence: Synthetic coding sequence
  source 1..2118: mol_type = other DNA
atgcggccgtccggaactgctggcgcggctttacttgctctcctggcggccctgtgccccgcgtctcgcgccctggaggaaaagaaagtatgccaaggcacctccaacaaactcacacagctggggacgtttgaagatcatttcctgtcactgcaaagaatgttcaataactgtgaagtagtgctgggtaatctggagatcacctatgtgcaaagaaattacgacctttcctttttaaagaccatccaggaggtggcaggatatgtattgatcgctctgaatacagtggagcgaataccactggaaaaccttcagataattagggggaatatgtactacgagaactcttatgcactggccgtgctttcgaactacgacgccaacaaaactggactcaaggagctcccaatgaggaacttgcaagaaattctgcacggggccgtcaggtttagcaacaatccggccttgtgtaatgtagagtcaattcagtggcgcgacatcgtcagttctgacttcctctctaacatgtctatggattttcagaaccatctcggatcatgccagaagtgtgatccaagttgtcccaatggtagctgctggggagctggggaagagaattgtcaaaagctcactaagattatctgcgctcagcaatgttccggtaggtgtagaggcaagtccccaagcgactgttgccacaaccagtgcgccgcaggctgcaccggaccaagggagtctgattgcctcgtctgtagaaagttccgagatgaggctacctgcaaggacacatgcccaccactcatgctttacaatccaacaacataccagatggacgtcaatccggagggaaagtattcctttggcgccacatgcgtgaagaaatgtccccggaactatgtggtgacagatcatggatcttgtgtgcgggcctgtggagctgacagttacgagatggaagaggacggtgtccgcaaatgtaagaagtgtgagggtccctgtcgcaaggtttgtaatggcattggcatcggggagtttaaggattccctctcgatcaacgcaaccaacataaagcatttcaagaattgcacttcgatttcaggggatcttcatatcttacccgtggcattcagaggagattccttcacacacacccccccgctcgaccctcaggagttagacatcctcaaaacggtgaaggaaattactggctttctgctcattcaggcctggcccgagaacagaaccgatcttcatgcctttgaaaatctggagattatacgcggtaggactaagcaacacggccagttcagccttgcggttgtctccctgaacatcacatctctgggtctgaggagcctgaaagagattagtgacggtgacgtgattatcagcggtaataagaacctctgctacgccaacacgataaattggaaaaaattattcggtacctcggggcagaaaacaaaaatcatctccaaccggggtgagaattcctgcaaagctacaggacaagtgtgccacgccctatgcagccccgaaggatgttggggcccagagccacgtgattgtgtttcttgtcgcaacgtatctcgcgggcgtgagtgtgtagacaaatgcaaccttctggaaggagaacctagggagtttgttgagaattcagagtgcatccagtgccatcctgagtgtcttcctcaagccatgaatatcacttgcacggggcggggcccagataattgtatccagtgtgctcactatattgacgggccccattgcgtaaaaacatgtcccgcgggcgtcatgggtgaaaacaatacattggtttggaaatacgctgatgctggccacgtatgccacctgtgtcatccaaactgcacctacgggcccgggaatgaatctttaaaggctatgctcttctgtctgtttaagctgtctagctgcaaccagtcaaacgacggctccgttagtcaccagtctggctctcccgccgcccaagagtcttgcctcggctggataccttcacttctgccctccgagttccaactcggatggggtggttgttctcatctgcatgcatggcccagcgcttcagtaataattacggcctcaagctgtcactag

SEQ ID NO: 15000 - DNA, 3243 bp, synthetic construct
  misc_feature 1..3243: note = Description of Artificial Sequence: Synthetic coding sequence
  source 1..3243: mol_type = other DNA
aaccgcaccgagggagcagcccatgaaaagtttacgggtaaccccgcctggcggcgcgctgtacagcaacaaccgtgtccggttgtggagtctattcaatggagggatatagtttcaagcgattttctgagcaacatgtccatggattttcaaaaccacctaggatcttgccagaagtgtgatccatcctgccccaatggaagttgctggggcgcgggagaagaaaactgccagaagctcaccaagattatttgtgcccagcagtgtagtgggcgatgtcggggaaaatctcccagtgattgctgtcacaaccagtgcgccgcaggctgtactggccctcgtgaatctgattgtctggtttgccggaagtttagggatgaagccacttgtaaggacacctgccctccactgatgctgtataacccaactacgtatcagatggacgttaatcctgaggggaagtactctttcggtgccacatgtgtgaagaagtgccctcgcaactacgtagtcacggaccatggaagctgcgtccgggcctgcggagccgattcctatgaaatggaggaggacggggtccgaaaatgtaaaaagtgcgaagggccctgtcggaaggtttgtaatggaattgggattggagagttcaaggattcactgtcaatcaatgccacaaacattaaacattttaaaaactgcacctcaatttccggggatctgcatatcctccctgttgcatttaggggcgatagctttacccacacgccacctttggacccacaggagctggacatccttaagacagtcaaagagattacgggatttctcttaatccaagcctggcctgagaaccgtacggacctgcatgctttcgaaaacctggagataatcagaggtcggacaaaacagcacggccagttctctttggccgtagtgtctctgaatattacatctctcggtttgagaagcctgaaggaaatctcagatggagacgttattatatcaggaaataagaacctgtgctacgctaataccatcaactggaagaagttgttcggcacgtcaggacagaagactaaaatcatatctaaccgtggcgagaattcctgtaaggccaccggacaggtatgtcacgcactgtgtagcccggagggctgctgggggcctgaacccagagactgcgtttcttgtcggaacgtttcgagaggacgcgagtgtgtggacaaatgtaacctccttgaaggggagccccgggagttcgttgaaaatagcgagtgtatccagtgtcaccccgaatgtctgccgcaggctatgaatattacctgcaccggacgcggaccagataattgtatccagtgtgcacactatattgatggaccccactgtgtcaagacgtgccctgccggcgtgatgggagagaacaacacactcgtctggaagtatgctgacgccggacacgtgtgtcatctgtgccatccaaactgcacatatggttgcaccggtccagggctagaggggtgccccacaaatggtcctaaaattcccagcatagctactggaatggtgggcgccctgctgctgttgctggtggtggccctcggaatcggcctgttcatgcgccgtagacacattgtccgcaaaagaacactgagaagactgcttcaggagagggaactggttgaacccttgactccatctggggaggcaccgaatcaagctttgctccgaatccttaaagaaacagaattcaagaaaattaaggtcctcggttctggcgcattcggcaccgtctacaagggactgtggataccagagggagaaaaggttaagattcctgtggccataaaggagctgagagaggcaacctcacctaaggcaaacaaggagatcctagacgaggcttacgtgatggcgtcagtcgacaatcctcacgtctgccgattgttaggcatttgcctgacttccacagtccagctgattacgcaactcatgccatttgggtgtctgttggattatgtgcgggaacacaaagacaacataggttcacaatacctcctgaattggtgcgtgcagattgctaagggaatgaactacctcgaagataggcgtttggtgcacagggaccttgcagcgaggaatgtgctggtgaagaccccacagcacgttaagatcaccgacttcggtctggcaaagttgctgggcgctgaagagaaagaataccacgccgaagggggtaaggtgcctataaagtggatggccctcgagagcatccttcatcgaatatatactcatcagagtgatgtctggagctatggagtgacagtctgggagctcatgacctttgggtcgaaaccttacgacggtatccccgcaagcgagatctcctccatactggaaaagggcgaacggctaccacagccccctatatgtactatcgacgtttatatgattatggttaaatgctggatgatcgatgcagattcacgccccaaatttcgggagctaatcatcgagtttagcaaaatggctagggatcctcaaagatacctggttatccagggtgacgagagaatgcacctccccagcccaaccgattcgaacttctaccgagcgctgatggatgaagaagatatggatgatgttgtagatgcagatgagtatctcatcccacagcagggctttttttcgtcaccatccaccagtaggactcccctcctgtcttcgctatccgccacgtcaaataatagtactgtggcctgtatcgacaggaatggactgcagtcctgtccaattaaggaggactccttcctgcagagatactccagtgatcccacgggagccctcactgaggactcaatagacgatacatttcttccagtcccagaatatatcaatcagtccgtgcccaagcgtcccgccggttcagtgcagaatccagtctatcacaaccagcctctgaatccggcaccttctagagatccacactaccaggatccacacagcaccgctgtgggaaatccggagtacctgaacacagtgcagcccacctgcgtgaattcaacatttgatagtccggcccattgggcccagaagggcagccaccaaatttcacttgataatccagactaccaacaggatttcttccctaaggaggccaagccaaatggtatattcaaggggtctactgccgaaaacgcggagtacctacgcgttgctcctcagagcagtgagtttataggagcttag

SEQ ID NO: 15001 - DNA, 1218 bp, synthetic construct
  misc_feature 1..1218: note = Description of Artificial Sequence: Synthetic coding sequence
  source 1..1218: mol_type = other DNA
atgcggccgtcaggaacagcaggcgcagctctgctggctcttctggcggccctgtgccctgctagcagagctctcgaggagaagaaggtgtgtcaaggaacctcaaacaagctgacgcagcttgggactttcgaggaccatttcttgtctttgcaacggatgttcaataactgtgaggttgtgctgggaaaccttgagattacttatgtccagcgcaactacgatctctcttttctgaagaccatacaggaggtggcaggatatgtgctgattgccttgaatacggtggagcggatccccctcgagaacctgcagatcattaggggaaatatgtactatgagaactcatacgccctcgccgtattatcaaactatgatgccaataagaccggtttgaaagagcttcctatgcggaatctgcaagagattttgcacggggccgtcaggttttccaataatcctgccctttgcaacgttgagagcatccagtggcgggatatagttagctctgattttctttcaaatatgagcatggacttccagaatcacctcgggtcttgtcagaagtgcgaccccagctgtcctaatggatcttgctggggagctggagaggaaaactgccagaagctgacaaagatcatctgcgctcagcagtgtagtggtcgatgtcgcggaaaatcgccttccgactgttgtcacaatcagtgtgctgcagggtgtacgggcccccgcgaaagcgattgtttagtgtgtagaaagttccgggacgaggccacgtgtaaagatacatgtccacctctcatgctgtacaacccaacaacataccagatggatgtcaatcctgagggtaaatatagcttcggagccacatgtgttaagaagtgccctaggaattacgtggtgactgaccacggcagctgcgtgagggcatgtggtgcagactcatatgaaatggaggaggacggagtacgtaaatgcaaaaaatgtgagggcccctgcaggaaagtgtgtaacggaatcggaattggagaatttaaggattccctctccatcaacgctacaaacatcaagcacttcaagaactgcacctcaatctccggcgatttacatattctacctgtggcctttaggggggattcttttacgcacacccccccgctggaccctcaggagctcgatatactgaaaaccgtgaaagagattacaggactcagttag

SEQ ID NO: 15002 - DNA, 1974 bp, synthetic construct
  misc_feature 1..1974: note = Description of Artificial Sequence: Synthetic coding sequence
  source 1..1974: mol_type = other DNA
atgcgtccatccggtactgcgggagcagcactcttagcgttgctggcagcactgtgccccgctagcagagctctggaggaaaaaaaggtctgccagggcactagtaataaactgacgcagctgggtactttcgaggaccacttcctcagcttgcagcgcatgttcaacaattgtgaagtcgtgctgggcaacctggaaatcacctacgtccagaggaattatgacctgtcatttttgaaaacaatacaagaagtcgccggttatgtgctgatcgctttgaacacggtggagaggattccattggagaatcttcaaattattcggggcaacatgtactatgagaattcctacgcactggccgtgctgagcaactacgacgccaacaagactgggctgaaggagctacccatgcgtaatcttcaggaaatactccatggagcagtcaggttctccaacaaccctgccttgtgtaacgtggagtcaatccaatggcgggatatcgtgagttcagacttcttgtctaatatgtcaatggatttccagaaccacctgggatcctgccagaagtgcgacccttcctgtcctaacggttcttgctggggggcgggcgaggagaactgccagaagctcactaaaattatatgcgcgcaacagtgttccggaagatgccgcggcaagtcccctagcgactgttgccataatcaatgtgcagcaggctgtacgggaccgcgggaaagcgactgtcttgtgtgccgtaagtttagagacgaagccacatgcaaagatacatgcccccccctgatgctgtacaatccaacgacataccaaatggacgttaatccagagggcaagtactctttcggagcaacctgcgtcaagaagtgcccgcgcaactacgttgttacagaccacgggtcgtgcgtccgggcctgcggagctgatagttacgaaatggaggaagatggagtgagaaagtgcaagaaatgtgagggcccatgtcggaaagtgtgcaacggtatcggcattggagagttcaaagattccctgtccatcaatgctactaacattaaacacttcaagaactgcacctcgatttccggagaccttcatatcctcccagtggccttccggggcgactcctttacacacacccctccattggatccacaagagttggacatcttgaagactgtgaaggagatcacgggtttcctcctgattcaggcctggcctgagaatcggacagatctgcacgcgtttgagaatttggagatcatcagaggacgcacaaagcagcatggccagtttagccttgccgttgttagtctcaatattacatccctggggcttcggtccctgaaagagatttccgacggagacgtgatcatcagcggcaacaagaacctgtgctacgctaacacaataaactggaagaagctctttggcacctccggccaaaaaacaaagataatctccaacaggggagaaaattcttgcaaggccaccggacaagtctgccatgctttatgttccccagaagggtgttgggggcccgaaccaagggactgtgtgtcctgtcgaaatgtgtcaaggggcagagagtgtgtcgataaatgcaatctgcttgagggcgagccacgcgagtttgtggaaaatagcgaatgcatccagtgtcatccagagtgccttccacaagccatgaatattacgtgcacaggcagaggtccggacaactgcatccagtgcgcccactatatagacggtccacattgcgtcaaaacctgtcccgccggagttatgggcgagaacaacacacttgtgtggaagtatgccgacgccgggcatgtgtgtcatctttgtcatcctaactgcacctatggatgtactgggcccgggctggaaggatgccccactaacggctcttacattgtaagtcactttccgcgcagcttctacaagatgtccgtccactag

SEQ ID NO: 15003 - DNA, 3474 bp, synthetic construct
  misc_feature 1..3474: note = Description of Artificial Sequence: Synthetic coding sequence
  source 1..3474: mol_type = other DNA
atgtttaataattgcgaggtggtcctgggaaatttggaaattacctatgtgcagagaaattacgatctctcattcctaaagaccattcaagaagtagccgggtatgtgctcatagctctgaacaccgtggaaaggattccgcttgaaaacttacagatcattcgtggaaatatgtattatgaaaattcttacgctttagccgttttgtctaattacgatgcaaataaaactgggcttaaagaattgccgatgcgcaacttgcaagaaatattacatggagctgtaagatttagtaacaatcccgccctctgtaatgtcgaaagcatccagtggagggacatagtttcctcagactttctgtctaacatgagtatggattttcagaaccacctcggctcctgtcagaagtgtgatcctagctgccctaatggctcatgttggggagctggcgaagagaattgccagaagcttacaaagatcatctgtgcacagcagtgctccggccggtgccggggtaaaagtccctccgattgctgtcataaccagtgcgccgctggatgcaccggcccacgggagagtgattgccttgtgtgtcggaaatttagggacgaagccacctgtaaggatacctgtcctccactgatgctttataaccccacaacttatcagatggacgtgaatcccgaaggtaagtatagctttggtgccacttgcgtgaagaagtgcccccggaactacgtggtgaccgaccacgggtcttgtgtgcgggcttgtggagctgacagctatgaaatggaagaggacggcgtacgcaaatgtaagaagtgcgaaggcccgtgtcgcaaggtgtgcaatggtatcggaattggcgagttcaaagattcactcagcataaatgcaacaaatatcaagcacttcaagaactgtacgtcaatttcaggcgaccttcatattctccccgtggcttttaggggggatagcttcacccacactcccccgctggaccctcaggaactcgatatcctgaagacagtgaaagagatcacagggtttttactgatccaggcttggcctgagaatcgaactgatctacatgcgtttgaaaacctcgaaatcatcaggggcagaacaaagcagcatggccagttcagccttgccgtggtctcactgaacatcacaagcctggggctccgcagcctaaaggaaatctccgacggcgacgtcattatctcgggcaataaaaatttatgctatgccaacacaattaactggaagaaactttttgggacaagcggacagaaaaccaagatcattagtaaccgaggggaaaacagttgcaaggctacagggcaagtgtgccatgctctatgctcacctgagggctgttgggggccggagccccgagattgcgtgtcctgccggaacgtgtctaggggccgcgaatgcgtagacaaatgtaatctcctagagggcgagcccagggaatttgttgagaacagtgagtgcatacagtgtcacccagaatgtctgccccaggcgatgaatattacttgcaccggccgtggcccggataactgcatccagtgcgctcactacatcgacggcccacactgcgtaaagacttgcccagctggagtgatgggagagaacaacaccctggtatggaagtacgcagacgccggccacgtgtgccacctgtgccacccaaactgtacctatggatgcaccggcccaggactcgagggatgccccaccaatggccccaagattccatcaatagcaacgggcatggtgggcgccttgttgctgcttctggtggtggcacttggcatcggattgtttatgcgcaggcgtcacatcgtgcgaaagagaacactccggaggctattacaagagcgggaactagtggagcccctgaccccaagtggtgaggcgcccaatcaggcactgctgagaatcttgaaagagacagaatttaagaagatcaaagtgctgggatctggtgcatttgggaccgtgtacaagggcctctggattccggagggcgaaaaagtcaagatcccagtagccatcaaggaactgagagaagcaacatcccctaaggccaacaaagagatactggacgaggcttacgtaatggcttcagtcgacaacccacacgtttgtcgactcttgggtatctgtctgacgtctaccgtccagttaataacccagctgatgccattcggctgtctgctggattacgtcagagaacataaggacaacataggatcacaatacctgctgaactggtgcgtgcaaatagccaagggcatgaactacctggaagacagaagattagtccaccgtgatttagccgctcgtaatgtactcgtgaagactccacagcatgtgaaaataacggattttggcctggctaagctgctcggagccgaggaaaaagagtatcacgccgagggcggcaaggtgcccattaagtggatggctctggaaagcattctacatcggatttacactcaccagagcgatgtctggtcgtacggggtcacagtttgggaattaatgacctttggctctaaaccgtacgacggcatccctgctagtgagatttccagtatcctggagaagggcgagagactcccacagcctccaatctgcacgatagacgtatatatgatcatggtgaaatgctggatgattgacgcagacagtcgaccaaaatttcgtgagctcatcatagagttttctaagatggctcgggatccacaaaggtacttagtcatccagggagatgagagaatgcacctgccatccccgaccgactctaatttttaccgagctctgatggatgaggaggatatggacgatgtcgtcgatgctgacgagtacctcatacctcagcagggctttttcagttctcctagtacttcccggactcccttattatccagcctctcagctacgagcaacaatagtaccgtagcatgcatcgatagaaacgggctccaaagctgccccattaaagaggacagctttttgcaaagatattcttcggatcctacaggagcgttgactgaggactctattgatgacacgtttttaccggttcctgagtatatcaaccaatcagtgccaaaacgaccagccggatctgttcagaatccagtgtaccacaatcagcctctcaatccagctccgtctagggacccacactaccaagacccacattccactgccgtggggaaccctgaatacctgaatactgtccagcccacctgtgtgaattctacgttcgactcccctgcccactgggcccagaagggctctcaccagatttcattagacaatcctgattaccagcaggacttctttccaaaggaagcaaagcctaacgggatctttaaaggcagtacagcagagaatgcggagtatctgagggtggctccacagagctcagaattcataggggcttag

SEQ ID NO: 15004 - DNA, 3276 bp, synthetic construct
  misc_feature 1..3276: note = Description of Artificial Sequence: Synthetic coding sequence
  source 1..3276: mol_type = other DNA
atgagaccaagcggcaccgccggtgctgcgttgctcgctctcctagctgctctatgcccagcctctagggcccttgaagaaaagaaggtgtgccagggtacaagcaacaaacttacccagctgggtacgttcgaagatcacttcctgtcgttacagagaatgttcaacaattgtgaagtggttctcgggaacctcgaaattacatatgtccaacggaattatgacctgtcttttcttaagaccatccaggaggttgccggatacgttctcatagctctgaacaccgtagagcgcatcccccttgagaatttacagattattaggggcaacatgtattatgaaaactcctacgccttggccgttctgtccaactacgacgccaacaaaactggactcaaagaactaccaatgcgcaatttgcagggtcagaagtgcgatccctcttgccctaatggaagctgttggggcgcaggggaggaaaactgtcagaagctcactaaaatcatatgcgctcagcagtgcagcggccggtgcagaggcaagtcccccagcgattgctgtcataaccaatgcgcagccgggtgtaccggaccacgggaaagcgactgcttggtgtgtcgcaagtttagagacgaggctacatgtaaagatacatgccccccattaatgctgtacaatcccaccacctaccagatggacgtgaatccagaggggaagtactcgtttggggcaacttgcgtgaaaaagtgcccaaggaactacgtggtcacggaccatgggagctgcgttcgcgcctgcggtgcagactcatacgaaatggaagaggatggggtcagaaagtgtaaaaagtgcgagggcccatgccgtaaagtttgcaacggaatcgggatcggagagttcaaagattctttatctattaacgctacgaatatcaagcacttcaagaattgtacatccatcagtggtgacctgcacattttgcctgtggcattccggggtgattctttcacacatacacccccactggatcctcaagagctggacatcctcaaaaccgtgaaggaaatcactggattcctactaatccaggcctggcccgagaatagaactgatttgcatgcgtttgaaaacttagagatcattcgcggacgcacaaagcagcatgggcaattctctcttgctgtggttagtctgaacataacaagtctgggtctccggagcctgaaagagatctctgatggtgacgtcatcatatcaggcaacaagaacttatgttatgccaatactattaattggaaaaaactcttcggcacatcaggccagaagactaagatcatttccaatcgcggcgagaacagctgtaaagcaaccggccaggtgtgtcacgcactgtgttcacccgaaggctgctgggggccagaaccaagggactgtgtgagctgcagaaatgtgagccggggccgcgagtgcgtggataaatgtaatctcctggagggagagcctcgggagtttgtggagaattcggaatgcatccagtgtcatccggagtgtctgccccaggccatgaacattacctgcactggaagagggccagacaactgtattcagtgtgctcactacatcgatggtccacattgcgtgaaaacctgcccggccggggtgatgggtgagaacaacaccctggtctggaaatacgctgatgcaggacacgtttgccacctctgccatccgaattgcacctacggatgcactgggcccggccttgagggttgtcccacgaacggccctaagattcccagtatcgccacagggatggtgggagccctgctgctactgctcgttgtggcgctgggcatcgggctgtttatgaggcgccgtcacatcgtgcgcaagagaacccttcgccgcctcctgcaggagcgggagcttgtagaacccttaaccccctccggggaggctcctaatcaggcgctcttgagaatactaaaggagactgaatttaagaaaattaaggttctcggatcgggagccttcgggaccgtgtacaagggcctgtggataccagagggggagaaagtgaaaatccccgtggcaattaaagagctccgggaagcgaccagtcctaaggcaaataaggagatccttgatgaggcatatgtgatggccagcgtagacaatcctcacgtgtgcagactgctgggaatttgtctcaccagcaccgtgcagctgatcacccaactcatgcccttcggttgtttgctggactatgtgagggagcataaggacaatattggctctcagtatctcctgaattggtgtgttcagatcgcaaaaggaatgaattatctggaggaccgacgactcgtgcaccgtgacctcgctgcaagaaatgttctggttaagaccccccagcacgttaagataaccgattttggactggctaaacttctcggggctgaggaaaaagaataccacgccgaaggcggtaaggtgcctatcaagtggatggcactcgaatctatcctgcaccggatttacacacatcagagtgacgtctggtcctatggtgtgaccgtctgggaacttatgacctttggatcaaagccatatgatggcatcccggcatcagagatctcatctatcctggagaagggcgagcgcctccctcaacctccaatatgcacaattgacgtttatatgataatggtgaaatgctggatgatcgatgctgattctagaccaaagtttcgcgaactgattattgagtttagcaagatggctagagatccccagcgatacttggtaatacaaggtgacgaaaggatgcacctgccatcccccacagatagcaatttttatagagctctgatggacgaagaggatatggatgatgtggtcgatgccgatgaatatttgatcccccagcaaggcttcttttctagtccctccacctcacgtacacctctgctgtcatccctctctgccacaagcaataattctaccgtggcttgcattgaccggaatggcctccagtcttgtccaataaaagaggatagcttcctgcagcgctattccagtgaccccaccggcgcactgaccgaagactctattgacgacaccttcctgcccgtcccaggtgagtggctggtctggaaacaatcctgctcatcaaccagctccactcattctgccgccgcatctctgcaatgccccagtcaggtgctcccacctgcttctccagagggcgaaacagtggcagatctacagacccaatag

SEQ ID NO: 15005 - DNA, 1395 bp, synthetic construct
  misc_feature 1..1395: note = Description of Artificial Sequence: Synthetic coding sequence
  source 1..1395: mol_type = other DNA
atgtcaagtctcacgaaaattatctgtgcccagcagtgcagtggtagatgtagggggaaatctcccagcgactgttgtcacaaccagtgcgccgcaggatgcaccgggccaagagaaagcgattgcttggtctgtcgaaagttccgtgacgaggcaacgtgcaaggacacctgccctccacttatgttatacaatcccacaacctaccagatggatgtgaaccccgaagggaaatactcgtttggggctacctgcgttaagaaatgcccacggaactacgtggtcaccgaccatgggagttgcgtccgagcctgcggtgccgattcttacgagatggaggaggatggggtacggaagtgtaagaaatgcgaggggccctgtcgtaaagtgtgcaatggcatcgggatcggcgagttcaaagactctttatccataaacgctactaatattaagcactttaaaaactgcacatcgattagtggggacttgcatatactgcccgtcgctttccgcggagacagcttcactcatacaccgccactcgacccccaagagcttgatattttaaagacagttaaagagatcaccggattcctgctgatacaggcatggccagagaatcgcacggatttgcacgctttcgaaaacctcgaaataatccggggtcgaactaagcagcatggccagttcagcctggccgtggtgagcttaaacatcacctcgctcgggcttaggtcacttaaggagatctctgacggagacgtgataatcagcggcaacaaaaatctatgctacgccaacacaatcaattggaaaaaactgttcgggacatccggccaaaagaccaaaatcatctctaacaggggcgagaattcttgtaaggcgactggccaggtttgccacgccttatgctcccccgaaggctgctggggccctgagcctcgcgactgcgtgtcttgcagaaatgtgtccagaggccgggaatgcgttgataaatgcaaccttctcgaaggtgaaccacgggagttcgtcgaaaatagcgagtgcattcaatgtcatccggagtgtctgccacaggcaatgaacatcacctgtacaggaagaggccccgataattgtatccaatgcgcgcactacatagacggccctcattgcgtaaagacgtgccctgccggcgtaatgggagaaaacaacacgctggtatggaagtatgcagatgccggccatgtttgccatctgtgtcaccccaactgtacctatggttgtaccggccccggattggaggggtgtcctacaaacggtcctaagattccaagtatagcaaccggaatggtgggtgctctcttgctactgttagtggtagctctggggatcggtctcttcatgcgtaggtag

SEQ ID NO: 15006 - DNA, 843 bp, synthetic construct
  misc_feature 1..843: note = Description of Artificial Sequence: Synthetic coding sequence
  source 1..843: mol_type = other DNA
atgcctgcagacattatggagaaaaacagctctagtcccgttgctgctactcctgcttcagtgaacacaaccccagacaagccaaagacggccagcgagcataggaagtcatccaaaccaatcatggagaagcggcgccgagctaggatcaatgaaagcctgtcccagctgaagacactgattcttgatgcgctcaaaaaagactctagtcgacactcaaaactggagaaggctgacatcctggaaatgacggtgaagcaccttcggaatctgcagcgcgcgcagatgactgccgcactgtctaccgaccctagtgtgctgggaaagtaccgggctggctttagcgagtgcatgaatgaggtgacgcgctttttgtccacatgcgagggtgtgaatactgaagtcaggaccaggttgcttggacaccttgccaattgtatgactcagattaatgccatgacctacccgggccagccccatcctgccctccaggctccaccaccccccccacctggccccggtgggccgcagcatgcaccctttgcgcctccccctcctctggtgccgatcccaggtggcgctgccccaccgccaggtggagctccctgtaagttaggatcccaggccggggaggccgctaaagtatttggggggtttcaggtagtgcctgcccctgacggccagttcgccttcctgatcccaaatggagcttttgcccacagcgggccggtgatccccgtgtatacctccaactccggaacttctgtcggccctaatgcagtctctcccagtagtggtccatcattaacagcggactctatgtggcgcccctggagaaactag

SEQ ID NO: 15007 - DNA, 57 bp, synthetic construct
  misc_feature 1..57: note = Description of Artificial Sequence: Synthetic coding sequence
  source 1..57: mol_type = other DNA
atggcggagaatagcgtattaacctctacaaccgggcgaacctcattagctgactag

SEQ ID NO: 15008 - DNA, 2745 bp, synthetic construct
  misc_feature 1..2745: note = Description of Artificial Sequence: Synthetic coding sequence
  source 1..2745: mol_type = other DNA
atggcagagaattcggtccttacctccacaaccggcaggaccagccttgcagactccagtatcttcgattctaaggtgaccgaaatttccaaggagaacttattgattggcagcaccagctatgtcgaagaagagatgcctcagatcgaaacccgcgtcattctcgtgcaggaagctggaaagcaggaagagctcatcaaggcgctgaagactatcaagattatggaagtccccgtgattaaaatcaaggaaagttgtccaggcaagagcgacgagaaactcatcaaatccgtaattaacatggatataaaggtgggatttgtgaagatggaatccgtcgaagaatttgagggcctggattctcctgagtttgaaaacgttttcgtcgtcaccgattttcaagattccgtgttcaacgacctgtataaggcagattgtagggttattggcccccctgtagtgctcaactgttcacagaaaggcgaacccttgcctttctcttgcagaccattgtactgcaccagcatgatgaatttggtcctgtgcttcacgggctttcgtaagaaggaggagctggtgaggctcgtgacactggtccaccacatgggcggagtcattcgcaaagactttaactccaaggtgacccaccttgtggccaactgtacacagggcgagaagttccgagtcgccgtgtcactggggactccaattatgaaaccagagtggatctacaaggcctgggagcgtcggaacgaacaggatttttacgccgcggttgatgattttaggaacgagttcaaagtgcctcctttccaggattgcattttgtccttcctgggcttttcggatgaagagaaaacgaacatggaggagatgactgaaatgcaaggaggaaagtatctgccactgggagatgaacgctgtacccacctcgtcgttgaagagaatattgtcaaggacctgccctttgagccctccaaaaaactatacgtggtgaagcaagaatggttttgggggtctatccaaatggacgctcgggccggtgagacaatgtacctgtacgagaaagccaacaccccagaattaaagaagagcgtgtctatgctctccctgaacacaccaaactccaacagaaagcgcagacggctcaaggaaaccttagctcagctgagtcgggaaacagatgtcagcccctttccccctcgcaagcgcccgtccgcagagcattcactgagcattggcagccttctggatatttctaacacgccagagtctagcattaattacggggacacccccaaaagctgcacgaaaagttccaagtcctctactccagtgcctagtaaacagtcagctagatggcaagtggctaaggagctgtatcagacagagtctaactacgttaatatcctcgcaaccattatccagctctttcaagttccgctggaagaagaaggccaacggggcggccctattctggccccagaagaaatcaagactatttttggatccatccccgatattttcgacgtgcacacaaagattaaggacgaccttgaggacctcatcgtaaactgggacgaaagcaagtccataggagatatcttcttaaagtactccaaggaccttgttaaaacctaccccccctttgttaattttttcgagatgagtaaagagacaattataaaatgcgaaaagcaaaagcctagattccacgcttttttgaaaataaatcaagctaagccagagtgtggtcgccaatctctggtggagcttttgattagacccgtgcaaagactgccgagtgtggctctgctcctgaatgacctgaagaagcataccgccgacgaaaatcccgacaagagcaccttggaaaaagccatcgggagcttaaaggaagtaatgacacacatcaatgaagacaagcgaaaaactgaggcccagaagcagatcttcgatgtggtgtatgaggtggacggctgtcctgctaacctgctttcaagccatagaagtctggttcaaagggtggagactatttctttgggggagcacccatgcgatagaggcgagcaggtgaccctgttcctgttcaacgattgcctggaaatcgctaggaaacggcacaaggttatcggcactttcagaagccctcacgggcagacaaggcctccagccagtcttaagcacatccacctgatgcctctttctcaaattaaaaaggttttggacatccgagagacagaggactgccataatgccttcgcactgctggttagacctcctaccgaacaggcaaacgtactgttgtccttccagatgacctctgatgaattaccgaaagagaactggctcaaaatgctgtgccgacacgtcgcaaataccatctgtaaggcagatgccgaaaacctgatctataccgcggatccggagtcctttgaggtaaacacaaaggatatggattcaacactgtcacgggcatctagagctattaagaaaacatccaagaaagtgacccgggcattctccttctccaagactcctaagagagcattgagacgggcccttatgacttcacatgggtctgtcgaaggcagaagccccagtagtaatgataagcacgtgatgtcccgcctgagctctacaagttctctggccggtatcccatcaccaagtctggtgtccctgccttcattttttgagaggcgaagtcacaccctcagcagaagcactacacacctgatctag

SEQ ID NO: 15009 - DNA, 480 bp, synthetic construct
  misc_feature 1..480: note = Description of Artificial Sequence: Synthetic coding sequence
  source 1..480: mol_type = other DNA
atggcagagaacagcgttctgaccagtaccacaggacgcacgtcactcgccgatagcagcatctttgactctaaagtcacagagatttccaaagagaacctgctaattgggtcaacaagctacgtggaagaagagatgccacaaattgagacacgggtcatactggttcaagaagctggaaagcaagaggaactcataaaagctctgaaagatattaaggtcggatttgtaaaaatggaatcagtcgaggagtttgagggattggatagtccggagtttgagaatgtgttcgttgtgaccgattttcaagacagtgtctttaacgatctgtacaaggccgattgtcgtgtcatcggtcctcctgtcgtccttaactgctcacagaaaggagagcctctccccttctcttgccggccgttgtactgtacctccatgatgaatctggtcctgtgcttcaccgggttccgtaaaaaagagtag

SEQ ID NO: 15010 - DNA, 2649 bp, synthetic construct
  misc_feature 1..2649: note = Description of Artificial Sequence: Synthetic coding sequence
  source 1..2649: mol_type = other DNA
atggcagagaactccgtgttgacttcgaccacaggaaggacttccctggccgactcctctatctttgactccaaggtcactgagatatccaaggaaaatttgctcatcggatcaacttcatacgtagaggagatgcctcaaatagagacgcgagtcatcctcgtccaggaggcaggcaaacaggaggagttaatcaaagcactcaaagatattaaggtgggctttgtgaagatggagagtgtagaggagttcgaggggcttgatagtccggaattcgagaacgtgttcgtggtgacagatttccaggattccgtgtttaacgatctctataaggctgactgcagagtgattgggcccccagtagtattaaactgtagccagaaaggcgagcccttgcctttttcctgtaggccattgtattgtacatctatgatgaaccttgtcctgtgctttactgggttccgcaagaaggaggaactggtgaggctggtaaccctcgtacatcacatgggaggcgtgatccggaaagatttcaactcgaaggtgacccacctcgttgctaattgcacacagggcgagaagttcagggtagcagtgtccttgggtacccccattatgaagcccgagtggatttataaggcttgggaacgccggaatgagcaagatttctatgccgcagtagatgattttcgaaacgaattcaaggtccccccatttcaagactgtatcctatcattcctaggcttctctgatgaagagaaaacaaacatggaagagatgactgagatgcagggtggaaaatacttgcctctgggcgacgagagatgtacacatttggttgtcgaggagaacatcgttaaagatttgccttttgaaccaagcaagaaattatatgtggtcaaacaggagtggttctggggatctattcagatggacgcacgagctggagagaccatgtacctttacgaaaaagccaatacacctgagctgaagaaatccgtgtccatgcttagtctgaacacacctaattcaaataggaaaaggaggagacttaaagaaacactggctcagttgagccgcgagactgatgtaagcccctttccgccccgcaaaagaccttccgctgaacacagtttgagcatcggaagcctcctcgacatcagtaacacccccgaatcatctatcaactacggtgacacacctaagtcatgcaccaaatcatccaagagcagtactccagttccttcgaagcaaagtgctagatggcaggtggccaaagagctctatcagacggagtccaattatgtcaatatactcgcgactataatccagctgttccaggtgcccttggaggaggagggtcagcgcggagggcctatcctcgctcccgaggaaataaagacaatctttgggtcgatccccgatatttttgacgtccataccaagatcaaggacgatctcgaggacctgatcgtcaactgggatgagtcgaaatccataggggacatcttcctgaaatattccaaagacttggtaaagacctatcccccattcgtgaactttttcgagatgagcaaggagactatcatcaagtgcgagaaacagaagccgcgatttcacgcgtttttgaaaattaaccaagctaagcccgagtgtggtcggcagtctctggtggagctactgatacggccagtacagcggcttccttccgtcgctcttctcttaaatgacttaaaaaaacacactgccgatgagaacccggacaaaagtaccttggagaaagccatcggatccctgaaagaggtgatgacccacatcaatgaagacaaaagaaagactgaggctcagaagcaaattttcgacgtcgtatatgaggtggacggttgtcctgctaatctgcttagctcccatcgctcactcgttcagcgggtagaaacaatctctctcggggagcatccatgcgatcgcggcgagcaggtgacgctctttcttttcaatgattgtctggagatcgccagaaagcggcataaagtaataggaaccttccgttctccccatggccagactcgcccaccagcttccttgaaacacattcacctcatgcccctgtcccagattaagaaagttctggatatacgggagaccgaggactgtcacaacgcatttgcccttttggtcaggcccccaacagagcaagccaacgtcctattaagcttccagatgacctcagatgagctgcccaaggagaactggttgaagatgctgtgccgccatgtggccaataccatctgtaaagccgatgcagagaatctgatctacacagctgaccctgagtcttttgaggttaatacaaaggatatggactccaccctcagtagagcgagtagagctattaagaagacctctaaaaaggtcaccagagcattttccttttctaaaacccctaagcgtgcgctgcgcagggccctcatgactagccacgggagcgtagagggccggtccccaagctccaacgataaacacgttatgagccgcctttcctccaccagttccttggcaggaatccctagtccgtccctcgtgtcactgccttccttttttgaacgaagaagccatacactgtcccgtagcaccacgcatttaatctag

SEQ ID NO: 15011 - DNA, 321 bp, synthetic construct
  misc_feature 1..321: note = Description of Artificial Sequence: Synthetic coding sequence
  source 1..321: mol_type = other DNA
atggcggagaattccgttctgaccagcactacaggccggacaagcctggctgattcaagtatctttgattcaaaggtgaccgagatcagcaaggagaacctcctgattggatccacaagctacgtggaagaggagatgcctcagattgagacccgcgtaatcttggtgcaggaggcagggaaacaggaggaactgatcaaggctctgaaggatatcaaggtagggttcgtgaaaatggagtctgtggaagaattcgagggccttgacagcccagaattcgaaaacgtgtttgtggtgaccgatttccaggactcagtctag

SEQ ID NO: 15012 - DNA, 2784 bp, synthetic construct
  misc_feature 1..2784: note = Description of Artificial Sequence: Synthetic coding sequence
  source 1..2784: mol_type = other DNA
atggccgagaactccgttctgacatccacgacaggccggacatccctcgcagactcctcaatcttcgattctaaggtaactgaaattagtaaggaaaatctcctgatcggctccacctcttacgtggaagaagaaatgcctcagatagaaactcgggtgattctggtccaggaggcggggaagcaggaggaacttataaaagccctcaaggacataaaagtgggcttcgtaaagatggaatcagtggaggagttcgaggggcttgatagccctgaattcgagaatgtgtttgtggtgactgatttccaggatagcgtgtttaacgacctgtacaaagctgactgcagggtcatcggtccacccgtcgtgctgaattgctcacagaagggtgaaccactgccatttagctgcaggccgctgtactgtactagcatgatgaatctggtgctatgcttcaccgggttccggaagaaagaagaattagtgcgtctggtaaccctggtgcatcatatgggcggcgtcatcaggaaggactttaattcaaaagtgacacacttagttgccaactgtacccagggcgagaaattcagagtggctgtgtcactgggtactccaatcatgaagccggagtggatttataaagcgtgggaaagacgtaatgaacaggatttttacgctgccgtcgatgacttccggaacgagtttaaagtgccgcctttccaagactgcattctgtccttcctgggattcagcgatgaagagaagacaaacatggaagagatgaccgagatgcagggcggaaagtacctcccgttgggcgatgagcggtgtacccacctggtggtggaagaaaatattgtgaaagatctgccatttgaaccgagcaagaaactgtacgtggtcaagcaagagtggttctggggcagcatccaaatggacgcacgcgcaggggaaaccatgtatctttacgagaaggccaataccccggagcttaagaagtctgtaagtatgctttctctcaatactcctaacagtaatcgaaagcgccggagactgaaggaaacgctggcgcaactttccagagaaactgacgttagccccttccccccacgcaaaaggcccagtgccgagcattcgctctcaattggctccctgctggacatttcgaatactccagagtctagcatcaattatggtgatactcccaaaagctgcacaaaatccagcaagagctcaacccccgtaccgtccaaacaatccgcgagatggcaagtcgcaaaggagctctaccagactgaaagtaactacgtaaatatattggctacaattatccagctgtttcaggtcccactggaagaggagggacagcgggggggacctatactcgctccagaggagatcaaaacaattttcggaagcattcctgacatatttgacgtgcataccaagatcaaagacgacctggaggacctgatcgtgaattgggacgaaagcaagagcattggcgatatctttctcaaatattcgaaagacttggtcaaaacatatcccccctttgtgaacttctttgaaatgtctaaagaaaccataattaaatgcgaaaaacaaaagccccgttttcatgccttcctgaagatcaaccaggccaagcctgagtgcgggagacagtcgctagtggagcttctgatccggcccgttcagcgcctgccatctgtagccctgctacttaatgatctgaagaaacacactgccgacgaaaaccctgacaaatccaccttagaaaaggcaattggctcgctaaaggaggtgatgacccatataaatgaagataaaagaaagacagaagcccaaaaacaaattttcgatgtggtatacgaagtggatgggtgtccggccaatttactatcttctcatcgatccctcgtgcagagggtcgagacaatatcattaggcgagcatccctgtgatagaggagagcaggtgaccttgttcctctttaatgattgtctggagatcgctcggaaacggcataaggtaatcggtacctttcgctctcctcacggtcaaaccagaccccccgcctctcttaaacacatccacctgatgccactttcacagatcaaaaaggtactggacattcgcgaaaccgaagactgccacaacgcattcgcccttttggtaagacctccaacagagcaggctaatgtgctgctgtcgttccaaatgacatcggatgagctgcctaaggaaaactggctgaagatgctctgcagacatgtggcaaatacgatatgtaaggcggatgcagaaaacctgatatatactgccgaccctgagagtttcgaagtcaacacaaaggatatggattctaccctgagtcgggcctctcgcgcaatcaagaagactagcaagaaagttacacgggcctttagcttctcaaagacaccaaaacgagcgcttcgccgggcccttatgacctcccacggcagcgtcgaaggccggtcccctagctccaatgacaaacacgtgatgagccgactgtcttctacttcgagtctggctattacacattccgtcagtacttccaacgttatcggattcacaaagcacgtgtacgtgcagcgcctcaacagtacaggcggacgttctcaatattcttggtttcagagtgtgcggcatagtgcttttcgagcctccttctccgaaatattggagggtaacacagatttttcaaatttcaaaaaggtcctctcaaagtcaagtttgaccttcgtgaagaattag

SEQ ID NO: 15013 - DNA, 2652 bp, synthetic construct
  misc_feature 1..2652: note = Description of Artificial Sequence: Synthetic coding sequence
  source 1..2652: mol_type = other DNA
atggcagagaattctgtgcttactagtacaaccggtcgtacgagtcttgcagatagttcaatatttgacagtaaggtgactgagatttctaaggaaaatctgctcattggctccacttcttacgttgaggaagagatgccacagatcgagacacgcgtgatcttggtccaagaggccggaaagcaggaagagttaatcaaggctcttaaggacatcaaggtggggtttgttaaaatggagtccgtcgaagaattcgagggattggacagcccagaattcgagaacgtatttgttgtcaccgattttcaggattctgtcttcaatgacctgtataaggccgactgtcgggtgataggccctcccgtggtgctgaattgcagtcagaagggggagccattgccatttagctgtaggcctctgtactgtaccagcatgatgaatttggtgctttgcttcacggggtttcgcaaaaaggaagaactcgtgcgcctggtgaccctggttcaccatatggggggggtcatacgtaaggacttcaacagcaaggtaacacatcttgtggccaattgcacccagggcgagaagttccgtgtggctgtgtccctcggtacgcctattatgaagcccgaatggatttataaagcctgggaacggagaaatgagcaggatttctatgcagccgtcgatgatttcagaaacgaattcaaagtgccgccgttccaggactgcatccttagcttccttggcttttcagatgaagagaagacaaacatggaagaaatgactgagatgcaaggcgggaaatacttgcccctgggggacgagcggtgcactcacctggtggtggaggagaacatcgtaaaagacttgccatttgagccctcaaagaagctgtatgtggtaaagcaagagtggttctggggctctatccaaatggatgccagggcaggagagactatgtatctgtatgagaaggctaacaccccagagctgaaaaagagtgtcagcatgctctctctgaatacacccaatagcaaccgcaaaagacgccggctcaaagagacgcttgcccagctgagccgagagacagatgtgtctccattccctccccgaaagcgaccctccgcggaacatagcctatccatcgggagccttctggatatttctaacacacccgagtcctctattaactatggcgacacaccaaaaagctgcacgaagagctctaagtcaagcactcccgttccttcaaaacagtcggcccgatggcaagtcgcgaaggaactttatcagacagagtccaactacgtgaacattcttgccacaataatccagctttttcaggtcccgctggaggaggagggtcagcgtggtggccctatcctggcccccgaagagattaagaccatcttcgggtcaatacctgacattttcgatgtgcacacaaaaattaaggacgatttagaggaccttatcgttaactgggatgaatcaaaatccattggcgatatcttcttaaagtactccaaggatctcgtgaaaacatatcctccatttgtcaactttttcgagatgtcaaaggagaccattatcaagtgcgaaaagcagaaacctcggttccacgcctttttgaagatcaaccaggccaagcccgagtgtggacggcagagcctggtggagcttctgatccggcctgtgcagcgcttaccatccgtggctttactgctcaatgatctgaagaaacacacagcggacgagaacccggataagagcaccctcgagaaagccatcgggagtctgaaggaggttatgacacacattaacgaggataagaggaagaccgaggctcagaaacagatattcgatgtggtatacgaagtcgacggttgccccgccaatctgctatcgtcacaccgatcactcgtccaacgtgtcgaaacaatctcgcttggagaacacccctgtgatcggggcgaacaagttacacttttcctgttcaacgattgccttgaaatcgcgcggaaaagacataaggtgatcggcactttcagatctcctcacgggcagactaggcccccagcgtccctgaaacacattcacctgatgcccttatctcagatcaagaaagtgctggatatacgggagacagaggattgccacaacgcattcgctttattggtcagaccccctacagagcaggctaacgttctcctgagtttccagatgacctcggatgaattgccgaaagaaaattggctgaagatgctatgtcgacacgtggccaacactatttgcaaggcggacgccgaaaatctgatctataccgccgacccagagtcatttgaagttaacacaaaagatatggacagcaccctatctagagcctccagggccatcaagaaaacctccaaaaaggtgacccgcgcattcagcttctcaaagacccccaaacgggccctgaggcgggccctcatgacatcccatggatcagtggaagggcgctcgccctcttcaaatgataaacacgtgatgtctcgactctcctccacctcgagcttagcagggatcccctccccctccctggtttcactcccttctttttttgagcgcagatcccatacactctctcggagcactacgcacctgatctag

SEQ ID NO: 15014 - DNA, 2745 bp, synthetic construct
  misc_feature 1..2745: note = Description of Artificial Sequence: Synthetic coding sequence
  source 1..2745: mol_type = other DNA
atggcagagaactctgttttgactagcactaccggcaggacatcattagccgattctagtatttttgatagcaaggtgacagagatcagcaaggaaaatctgttgatcggttcaacgtcttatgtggaggaggaaatgccacagatcgaaacacgcgtgatcttggtgcaggaagccgggaagcaggaggaactgatcaaagcacttaaaacgattaagatcatggaagtgccagttataaagatcaaggagtcttgtccggggaagtctgacgaaaagttgatcaagtccgtgataaacatggatatcaaagttggttttgttaagatggagtccgtagaagagttcgaagggctggattctcccgaatttgagaatgtcttcgtggttactgatttccaagacagtgtattcaatgatttgtataaggcagattgtcgcgtgattggaccacccgtcgtactgaactgctctcagaaaggcgaaccgttgccattttcctgcagacccctttactgcacctcaatgatgaacctcgtgctgtgtttcacagggtttaggaagaaggaggagctggttcgtctcgtcaccctggtccaccatatgggaggggtgattcggaaggactttaacagcaaggtcacccacctagtggcaaactgtacacagggcgagaagttccgtgttgcggtgtcacttggtactccgatcatgaaacccgagtggatatacaaggcctgggaacgaagaaatgaacaggacttctacgcggctgtcgatgactttaggaacgaattcaaagtcccaccctttcaagactgcatactatcatttttggggttttctgacgaggagaaaaccaacatggaggagatgaccgagatgcaagggggtaagtacctcccacttggagatgagagatgtactcaccttgtggtagaagagaacattgtcaaggacctgcctttcgagcctagtaaaaagctgtacgtggtgaagcaggagtggttttggggatctattcagatggacgcaagagcgggcgaaacaatgtacctgtatgagaaagccaatactcccgaactgaagaagtccgtgtccatgctgtcactcaatacacctaattcaaaccgcaaacggagaagactgaaagagaccttagcgcagcttagtcgcgagactgacgtttcccctttccctccccggaagagaccctcggcagaacatagcctcagcatcgggtcactgctggatataagtaacactccggagtcgagtatcaactatggcgatacacctaagtcatgcaccaaaagcagcaaaagtagcacacccgttccctcaaagcaatctgctcgctggcaggtggctaaggagctgtatcagacagagtccaactatgtgaatatactcgccacaatcattcaactgttccaggtgcccttggaagaagagggtcagcgaggagggccgatcctggcaccagaggagattaagacaatctttggtagcattcccgacatattcgacgtccatacaaagatcaaagacgacttggaagacttgattgtgaattgggatgaaagtaagagtataggcgacatcttcctgaaatattctaaagatctagtcaagacttaccccccatttgttaattttttcgaaatgtccaaagagacaataataaagtgcgagaagcagaagcctagatttcatgctttccttaagatcaatcaggccaagcccgaatgcggacgccaatccctcgtggagctgctgatccggcctgttcagcgactgccctcggttgcactcctgctgaatgatctcaaaaaacacaccgcagacgagaatcccgacaagtctaccctcgagaaagccatcggaagcctcaaagaagtaatgacacatattaacgaagataaacggaagacagaagcccaaaagcaaatcttcgatgtcgtgtatgaagtggacgggtgtcccgccaatctactgtcgtcgcacagatcgctggtgcagagggtagagacaatctcactcggcgaacatccatgcgataggggtgagcaggtgaccctatttctttttaacgattgcctcgagattgcccggaaaaggcataaggtcattggaactttcagatcacctcatggacagaccaggcctccagcttccctcaaacatatccacctcatgcccctctcccagatcaaaaaggtgcttgacatacgggaaactgaagattgtcataatgcatttgccttgttggtgcgacctccaacagagcaggctaatgtcttattgtcatttcagatgacctcagatgaactccctaaggaaaattggcttaagatgctgtgcaggcatgtggctaacaccatctgtaaggccgacgctgaaaaccttatctacacagccgacccagagagctttgaagtcaacaccaaagatatggattcaaccctcagtagggcctcaagagctattaagaaaacctcaaaaaaggtaacaagagctttttctttttctaaaacccccaaaagagccctaagaagggcattgatgacttctcacggctccgtcgaagggagatccccaagtagtaatgataagcacgtgatgagtaggctcagcagcacctctagtttggctggaataccttctccctcccttgtctccctgccttcattttttgaaagaaggtctcataccttgtcccgctccaccactcatttgatctag

SEQ ID NO: 15015 - DNA, 1389 bp, synthetic construct
  misc_feature 1..1389: note = Description of Artificial Sequence: Synthetic coding sequence
  source 1..1389: mol_type = other DNA
atgagcattgccggagtggcagcccaggagatcagagtgccattgaagaccgggtttttgcacaatggtcgggccatgggcaacatgcgcaagacatactggtcttcgaggtcagagttcaagaataactttttaaacatagatcccataaccatggcctacagcctgaactcctctgcacaggaacggttgattccactaggccacgcatcgaagagtgcgccaatgaacgggcactgtttcgcagagaacggaccatcccagaaaagttccctgccccccctgcttatcccaccttccgagaatcttggccctcacgaggaggatcaggtggtgtgtggtttcaagaagctgaccgttaacggtgtctgcgcttcaaccccccctctgacccctattaaaaattccccaagcttgttcccgtgtgcgcctttgtgtgagcggggatccagacccctgcctcccctaccaattagtgaggcgctctcattggatgacactgactgtgaagtcgaatttttgacctcatccgatacagacttcctgttggaggatagcacactttcagatttcaaatatgacgtcccaggcaggaggtctttccgggggtgtggccaaataaactacgcatacttcgacactcccgcagtcagcgctgctgacctctcgtatgtgtctgatcagaacggtggagtgcctgaccccaacccacctcctccacagacccatcgcagactgcgccgttctcacagcggacctgccggatccttcaataagccagccatacggatctctaattgctgtatccatcgggctagtcctaatagcgatgaggataaaccggaggtgccccccagggtcccgatccccccacggccagtcaagcccgattacagaaggtggtctgctgaggtgaccagtagcacatactcagacgaggacaggcccccaaaggtgccgccccgagagcctctgagtccgtcaaactcaagaactccaagcccaaaatctttaccttcgtacttgaatggcgtgatgccgccgacacagtcatttgccccagaccccaaatatgtctctagtaaagctctccaacgtcagaattctgaaggtagcgcttcaaaggtaccctgcatcctgccaatcatagagaacggaaaaaaagtgtcttccacccattattacttgctccctgagaggcccccttatctagacaaatatgaaaaattcttccgcgaagcagaagaaaccaatggaggcgctcagatacagcctctgccggctgactgcggcatttcaagcgcaacagagaaaccggattctaagactaaaatggacctgggtggacatgtgaagcgtaagcacttgagttatgtggtttcaccgtag

SEQ ID NO: 15016 - DNA, 1713 bp, synthetic construct
  misc_feature 1..1713: note = Description of Artificial Sequence: Synthetic coding sequence
  source 1..1713: mol_type = other DNA
atggctctcaagaaatcttcaccctccttagactccggggatagcgactctgaagaactacccacgttcgcctttctgaagaaagaaccttcctctaccaagcggaggcagcctgaacgggaagaaaagattgttgttgttgatatctctgattgcgaagctagctgtcccccagctcccgaactcttttcacccccagtccctgaaatcgctgagaccgttacccagacccagcctgttcggttgcttagctctgagagcgaggatgaggaagaattcatccccttggctcagcgccttacgtgcaaatttcttactcataaacagctgagcccagaggatagcagctcacctgtgaaatctgtcctggaccaccagaataatgaaggtgcatcttgtgattggaaaaaacctttcccaaagattcccgaggtcccacttcacgacacgccagagagaagcgcagctgacaacaaagacctgatactggatccctgttgccaactgccagcttacctttccacctgtccggggcagtcttcttccttggccgtcactaaaacgaactccgatatcctgcctccacagaaaaagactaaaccctcacagaaagtgcagggcagaggctcccacggctgtcgtcagcagcgacaagccagacagaaggaaagtaccctgcgaaggcaggaaagaaaaaacgccgctctcgtcactagaatgaaagctcagcggcctgaggagtgccttaagcacataatcgtcgttttagaccccgtattgctgcagatggaagggggcggccaactcctaggagctctgcaaacaatggagtgtcgatgcgttatcgaagcccaggctgtgccatgctccgtgacatggagacggagggccggtccatcagaagatagggaagactgggtggaagagccaactgtcttggtcttactgagggccgaagcatttgtttctatgatcgacaatggcaagcaaggcagcttggatagtaccatgaaaggtaaagagaccttacagggtttcgtgaccgatatcacagccaagaccgccggtaaggccctatcgcttgtgatcgttgatcaggagaagtgcttcagcgctcagaatccaccacgcagggggaaacagggagccaacaagcaaacaaaaaagcagcaacaaagacagcctgaagcttccatcgggtccatggttagccgggtggatgccgaagaggctctggtggacctacagctccatacagaagcccaggcccagatcgtgcagtcgtggaaggaactggccgacttcacatgtgcgtttactaaggcagtggccgaggcccccttcaagaaacttagagacgagactaccttttctttttgcctcgaaagtgactgggccgggggcgtgaaagtcgatctggcaggccgaggtttggcgctcgtgtggagacgccaaattcagcaactcaatcgagtttccctggaaatggcaagcgctgtggttaatgcgtaccctagcccacagcttctggtccaagcgtaccagcagtgcttttccgataaagaaagacagaatctgcttgccgacatccaggtcaggcggggtgagggcgtgacgagcacaagccgcaggatcggcccggaactgtcaaggcgcatctatctacagatgactaccttacagccgcatctgtctctcgactccgctgactag

SEQ ID NO: 15017 - DNA, 1752 bp, synthetic construct
  misc_feature 1..1752: note = Description of Artificial Sequence: Synthetic coding sequence
  source 1..1752: mol_type = other DNA
atggcattgaagaagagctcacctagcctggactccggcgactctgacagtgaggaactgcccacgtttgccttcctgaaaaaggagccctctagtaccaaacgaagacaacctgaaagagaggaaaagatagtagtggttgatatctcagactgtgaggccagttgtccccctgctcctgagctgttttcaccacccgtgcccgaaatagcagagaccgttacacagactcagcccgttcggctattgagctccgagtccgaagacgaggaggaattcatccctctggcccaaagactaacctgcaagttcttaacacacaaacaattgtcacctgaagactcatccagtcccgtgaaaagtgtattggatcatcaaaataatgagggagcttcctgtgattggaagaaaccattccccaagatccctgaggtgcctctgcatgatacaccagagcgaagcgccgccgataacaaggaccttattctggatccctgttgtcagcttcccgcatatctctctacttgccccgggcaatcttctagcctcgccgttactaagaccaattctgacatcctcccaccacagaagaaaaccaaaccaagccagaaggtccagggccgcggatcccatgggtgccgccagcagagacaagccaggcagaaagaaagtaccctacggcgtcaagaaagaaagaacgccgctctagttacacgcatgaaggcccagaggccggaagaatgtctaaagcacattattgtcgtactggacccagtattgctgcaaatggaggggggcgggcagctcttgggcgctctgcaaacaatggaatgccgctgtgtgatagaggcccaggctgtgccttgcagtgtgacatggcgccggcgtgctggcccgtccgaggaccgcgaagattgggtggaagagccaaccgtgctggttctccttcgcgcagaagcttttgtcagtatgatcgataacggcaagcaaggaagtttggattccacaatgaaaggaaaagagacgctgcaaggcttcgtcacggatatcaccgcaaaaaccgcgggcaaagccctctcacttgtgatcgtcgatcaggagaagtgcttctcacttgaactgttatttttcgacttcctgccatgtacgagcgctcagaaccctccccggcgagggaagcagggcgccaacaagcagacgaagaagcagcagcagagacagccagaggccagcatcggctcaatggtgagcagggtggacgccgaggaggccctcgtggatctacagctccatacagaggcacaggcgcagatagttcagtcttggaaggagctggccgactttacatgtgcctttacaaaagctgtcgctgaggcccctttcaagaagctgagggatgagaccactttttctttctgccttgagagcgactgggctggaggcgtgaaagttgacttagctggacgtggcctggcattagtgtggcgccgacagattcagcagctcaacagggtttccttggagatggcctccgcagtcgttaatgcctatccgtcacctcagctgctcgtgcaggcgtatcaacagtgcttctcagataaggaaaggcaaaatctgttggcagatattcaggtccgacggggcgaaggggtcaccagcactagccggagaatcggtcctgaactctctcggaggatctatctccagatgaccaccctgcaacctcacctgagcttggattctgcggattag

SEQ ID NO: 15018 - DNA, 1752 bp, synthetic construct
  misc_feature 1..1752: note = Description of Artificial Sequence: Synthetic coding sequence
  source 1..1752: mol_type = other DNA
atggctttaaaaaaatcttcacccagcttagactccggtgactcagacagtgaagagctgccgacttttgcattcctgaaaaaggagccttcatcaactaagcggcgtcagcccgaaagagaggaaaagatcgtcgtggtcgatattagcgattgtgaggcatcttgtccaccagcaccagaactgttttctcctcctgtcccagaaattgcggaaaccgtgacacagactcagcccgtgcgcctcctctcatctgagagtgaagacgaggaggaattcattcctcttgcccagcgcttaacctgcaagttccttacgcacaagcaactctctccggaagatagctcatcaccggtaaagtcagtgctggaccaccaaaacaacgagggtgcgtcatgcgactggaaaaaaccgtttcccaaaattcccgaagtgcccctgcacgacaccccggagcggtcagccgccgataacaaggatctgatcctcgacccttgctgtcagctgcccgcctatctttctacatgcccaggccagtccagttcacttgctgtaacaaagaccaattcagatattctgccaccccagaagaaaaccaaaccttctcagaaggtacagggacggggatcacacggatgccggcagcaaagacaggcccggcaaaaggagagcaccctacgaaggcaggagcggaagaatgctgcactggttacgcggatgaaggcacagcggcccgaggaatgtctcaaacatataatcgtggtcctggaccctgtactactccagatggagggcggcggacaactgctgggggccctacagacgatggaatgtcgctgcgtgattgaagcccaggcagtgccttgttctgtgacttggagaaggcgagccggcccctctgaggaccgcgaagattgggtagaagagcccacggtgctcgtgttgctgcgcgcggaggcatttgtgtctatgattgataacggcaagcaaggtagtctcgattctaccatgaagggcaaagagacattgcagggttttgtgacagacatcactgctaaaacagccggcaaggcgttgtccctggtgatcgtggatcaggaaaagtgtttctctctggagctactgtttttcgactttctcccatgcacctctgcgcagaatccacccaggcgcgggaagcagggcgctaacaagcagacaaagaagcagcagcagcgccaaccagaggcaagcattggctctatggtgtcaagggtcgatgctgaagaggcgctggtggaccttcagctccataccgaggcacaagctcagatcgtccaaagttggaaggagttagccgattttacctgcgcattcacaaaggccgtcgcagaggccccatttaaaaaactgcgcgacgaaacaaccttctctttttgtttagaatctgactgggccggaggcgtcaaagtcgacctcgccggacgagggcttgcattggtttggagacggcagatacaacagctgaaccgtgtcagcctggagatggcctcagcagtcgtgaacgcttacccttctccccagctgctggtgcaggcttaccagcagtgttttagcgataaagaaaggcaaaacctcttggccgatattcaggtgaggcggggtgagggagtgacatctactagccgaagaatcggtcctgagttatccaggaggatctacctgcaaatgactaccctgcagccacacctcagtctcgactcggccgactag

SEQ ID NO: 15019 - DNA, 684 bp, synthetic construct
  misc_feature 1..684: note = Description of Artificial Sequence: Synthetic coding sequence
  source 1..684: mol_type = other DNA
atggctgatctcctgggttcaattctcagcagcatggagaagcccccaagtttgggggaccaggaaacccggcgcaaggcccgtgagcaggctgcacggctcaaaaagttacaggaacaggagaaacagcaaaaagtcgagttccgcaagaggatggagaaggaggtgagtgatttcatccaagacagcggccaaattaagaaaaaatttcagcctatgaacaaaatcgaacgttctatactacacgatgttgtcgaagtggccggactcacttcctttagctttggggaggatgatgattgccggtacgtcatgatctttaaaaaggaattcgccccaagcgatgaggagctagacagttatagacgtggagaggagtgggatccgcagaaggccgaagagaagcgcaaactcaaggaacttgctcagcgtcaggaggaggaagcagcccagcagggccccgttgtagtgagtcctgcttccgactacaaggataagtattcacacctcatcggaaagggcgcagcaaaagatgcagcccacatgctgcaggcaaacaagacatacgggtgcgttcccgttgcaaacaagagggacacgcgctctatcgaggaggccatgaacgagatcagagctaagaaacggctgcgccagagcggtgaggaacttcctcccaccagctag

SEQ ID NO: 15020 - DNA, 1788 bp, synthetic construct
  misc_feature 1..1788: note = Description of Artificial Sequence: Synthetic coding sequence
  source 1..1788: mol_type = other DNA
atgacaatgaccttgcatactaaggctagcgggatggctctgctacaccagattcagggtaacgaactagagcctctcaatcggccacagcttaagattcccctggagcgcccgctgggcgaggtgtaccttgattcaagtaagcccgcagtctacaactaccctgagggagcggcgtacgagtttaacgctgccgctgccgcaaacgctcaagtttatgggcagaccgggctaccctacggccccgggagcgaggcggccgccttcggaagcaatggcttggggggtttcccacccctgaactcagtgtctccatcaccactgatgctcctacacccccctccgcagctatctcctttcctgcagccccacggccagcaggttccttattatttggaaaatgaaccctcgggatacactgtacgggaggccggacccccagcattttaccgaccaaattcagataataggcggcaaggtggacgggagcgtctcgcttcgacgaacgataaaggaagcatggcaatggagagtgccaaggagacaaggtactgtgccgtgtgcaacgactacgccagcggctaccattatggagtctggtcatgcgaggggtgcaaggccttctttaaacgcagcatacagggtcacaacgattacatgtgccctgctacgaaccagtgcacaatcgacaaaaataggcggaaaagttgtcaggcctgtcgcctcagaaaatgttatgaggtgggaatgatgaaaggtggcattcgcaaagaccgccggggcggtaggatgttaaagcacaagaggcagcgcgacgacggggaagggagaggtgaggtcgggagcgctggggacatgcgcgctgccaacctgtggccatcccctcttatgataaaaaggtccaaaaaaaattccctcgccctgtcactgacagcagaccagatggtatctgctctcctggacgccgaaccccccatcctgtatagcgaatacgatccaacacgtccttttagcgaggcgtctatgatgggattactgacaaatctggcggatcgcgaactcgtgcacatgattaattgggccaaacgggtgcccgggtttgtagaccttaccttgcacgatcaggtgcacctgctggagtgtgcttggttggagatcctgatgatagggcttgtctggcggtctatggagcaccctggaaaactgttgtttgccccaaatcttctgctggatcgcaaccagggcaagtgtgtagagggtatggtcgaaatcttcgacatgctcctggccacaagctcgaggtttcggatgatgaatctgcagggcgaggagtttgtgtgtctgaagagtatcatcttgttaaacagcggagtgtatacctttttgagcagcaccctaaagagccttgaggaaaaagaccatattcacagggtgctcgataagatcactgacaccttaatccacctgatggcgaaagctgggctgaccctacaacaacagcatcaacggctcgcccaacttctcctgattttgagccatattcgacatatgagcaacaagggaatggagcacttgtatagcatgaagtgcaaaaacgtcgtcccattatatgatctgctcctggagatgctggacgctcacaggttgcacgcccctacctcgcggggtggagcgagcgtggaagagaccgatcaaagccacctcgcaaccgctgggtccaccagttcccactcattgcagaaatattacatcacgggcgaggccgagggatttccagcgacggtttag

SEQ ID NO: 15021 - DNA, 549 bp, synthetic construct
  misc_feature 1..549: note = Description of Artificial Sequence: Synthetic coding sequence
  source 1..549: mol_type = other DNA
atggaatctgccaaagagacgcgttactgtgcggtctgcaatgattatgcttctgggtaccattacggagtctggtcttgtgaggggtgcaaagctttttttaaacgctcaattcagggacacaacgactatatgtgtccagccactaatcagtgtaccattgacaagaacagacgtaaatcgtgccaagcatgcaggctcagaaagtgttacgaggtgggcatgatgaagggtggaattcgaaaagatcggcgcggcggtcgcatgctgaagcacaaactgctacttatcctatcacacatcagacacatgtctaacaaaggtatggaacacttgtatagtatgaaatgcaaaaacgtggtgcccctgtatgacttgttgttggaaatgctggatgcgcacaggctgcacgctcctacctctcgagggggggcctccgtggaagaaactgaccagtctcatctggcgaccgccggctcaaccagctctcatagcctgcagaagtactacattacaggggaggctgagggtttccccgctacagtctag

SEQ ID NO: 15022 - DNA, 255 bp, synthetic construct
  misc_feature 1..255: note = Description of Artificial Sequence: Synthetic coding sequence
  source 1..255: mol_type = other DNA
atgaccatgaccttacatactaaggcctccggcatggcactcctccatcagatccagggtaatgagctcgaaccattgaatcgaccccagcttaagatccctctggagcgccctctcggggaagtctatcttgattcatccaagcctgccgtgtacaattatcctgaaggagccgcatatgaatttaacgccgctgccgcagcaaacgcccaggtttacggccaaacaggactgccctacggacctggatcatag

SEQ ID NO: 15023 - DNA, 1005 bp, synthetic construct
  misc_feature 1..1005: note = Description of Artificial Sequence: Synthetic coding sequence
  source 1..1005: mol_type = other DNA
atgaccatgacactacatacaaaagcctcaggcatggcattgctgcaccagattcagggaaatgaactggagcctttaaacaggccccagctgaaaataccactggagcggcccctgggcgaggtataccttgatagcagtaaacccgcagtctataattatccggagggtgccgcgtacgaattcaatgcagcggccgcagcaaatgcacaggtgtacggccagaccggccttccatatggccctgggagtgaagcagccgcttttggatcaaacggactcggcggcttccctccgctcaacagcgtctcccctagcccactgatgttgttacatccgccaccccagctgtctccatttcttcaaccacacggtcaacaggtcccatattacttggagaatgagccttctgggtatacagtcagggaggctggtccccccgcattttaccgaaaccagggcaagtgcgtagaaggcatggtggagatctttgacatgctcctggccactagctcgagatttagaatgatgaacttacaaggagaggagtttgtctgtctgaagtccattatcttactgaacagcggcgtttacacattcttaagcagtaccctaaagtccctagaggagaaagatcatatacaccgggtcctcgacaaaatcaccgacactttaatccaccttatggctaaggccggcctgactttacagcagcagcaccagcgtctggcccaactcctcttgattttgagtcatatcaggcatatgtccaacaagggcatggaacacctctatagcatgaagtgtaaaaacgtggtgccactgtatgatttgctcctagaaatgttagatgcgcatcgcctgcatgcacccactagccgaggcggagcaagcgtggaggaaacagatcagagccatctagccaccgccggttccactagttcacattctctccaaaagtactatatcacaggcgaagctgaagggttcccagctacggtgtag

SEQ ID NO: 15024 - DNA, 324 bp, synthetic construct
  misc_feature 1..324: note = Description of Artificial Sequence: Synthetic coding sequence
  source 1..324: mol_type = other DNA
cacaatgattatatgtgtccagccacgaatcaatgtaccattgataaaaatagaagaaaatcatgtcaggcctgccggctgcgcaaatgctacgaggtaggaatgatgaaaggtggatttgtggatctgaccctgcacgaccaggtccatctcctcgaatgcgcctggctagaaatcctaatgattggtcttgtttggaggtcgatggagcatcccggtaaactcctgttcgcgcccaacctcctcctcgaccgcaaccaaggcaagtgcgttgaggggatggtcgaaattttcgacatgctccttgccaccagcagcagatag

SEQ ID NO: 15025 - DNA, 1167 bp, synthetic construct
  misc_feature 1..1167: note = Description of Artificial Sequence: Synthetic coding sequence
  source 1..1167: mol_type = other DNA
tagctgaagattatcagttgccagccatcggacaagcctgtgcccccaggcgagaatgccccagaatggcgcgctgggcagccaggcagtgcgcctcgctctcactgcggcaggtccgccgctggaccaggacaccggcggccactttgtgatttcaatggcgagggacctaactccgataataggcggcagggcggccgggaacgtctcgctagcacaaacgataaaggaagtatggcaatggagtcagctaaagaaacaaggtactgtgctgtttgcaacgactacgcctctgggtatcattatggggtgtggtcttgcgagggatgcaaagcctttttcaagcggagcatacaagggcataacgactacatgtgtcccgcaaccaaccagtgtactattgacaagaatcggaggaaatcctgccaggcctgcaggctgcgcaagtgctacgaagtgggaatgatgaagggcgggatcagaaaggatagacgaggaggaagaatgctcaagcacaaaaggcagcgtgacgatggtgaagggagaggggaggtgggcagcgccggcgatatgagagctgcaaatctatggccttcacccctcatgattaaaaggagcaagaagaactccctggcgctgtcattgacggcagatcagatggtgtccgccctactagacgctgaaccccccatcctctactccgagtacgatccgacccgccctttctcagaggcgtcgatgatgggcttactgacaaatctggccgatagagagctcgtgcatatgatcaattgggcgaagagagtcccagggttcgtggatttgacactccacgaccaggtgcacctcctcgagtgcgcctggctcgaaattcttatgattggcctggtgtggcgcagtatggagcaccctggcaaactcttgttcgcccccaacctccttctggatcgcaaccagggtaagtgtgtggaggggatggtggagatcttcgatatgcttcttgccacctctagtcgctttcgcatgatgaacctgcagggagaagaattcgtgtgcctcaaaagtatcatactgcttaatagcggtatttcacatgtggaagctaaaaagcgcatattgaatttgcaccctaaaatttttggaaacaagtggttccctcgcgtatag

SEQ ID NO: 15026 - DNA, 813 bp, synthetic construct
  misc_feature 1..813: note = Description of Artificial Sequence: Synthetic coding sequence
  source 1..813: mol_type = other DNA
atgtgccctgccactaaccagtgcacaatagataagaataggagaaagagctgccaagcctgtagactgaggaagtgctacgaagtgggaatgatgaaagggggcattaggaaagatcgccgcggaggaagaatgttaaagcacaaaaggcagagagatgacggggaaggaaggggcgaggtcggatcggcaggagatatgagggcagccaacctgtggccatcaccactgatgatcaagcggagcaagaaaaattctctagcactttcccttactgcggatcaaatggtaagcgctctgctcgatgccgaaccgcccatcctctactccgagtacgatccgacgaggccctttagcgaggcctcgatgatgggcctcctaacaaatctcgctgatcgcgagctagtgcacatgattaactgggcaaagcgggtgccaggctttgtcgatcttacactgcacgatcaggttcatctgttagaatgcgcctggctggagattctgatgatcgggcttgtatggcgctccatggaacatcccggcaaactattatttgctcccaacttattgctggattcaaataaaggaatggagcatctatattccatgaagtgtaagaatgtggttccgctctatgacctgctcctggaaatgcttgatgcccaccggctgcacgctcctacctccagaggcggggcgtccgtcgaggagacagatcagtcacatctggctaccgccggatccacatcttcacactcactgcagaaatattacatcaccggagaggctgaaggtttcccagcaaccgtatag

SEQ ID NO: 15027 - DNA, 1572 bp, synthetic construct
  misc_feature 1..1572: note = Description of Artificial Sequence: Synthetic coding sequence
  source 1..1572: mol_type = other DNA
atgactatgactctccataccaaggccagcggaatggcactgttgcaccaaatccaggggaacgaactggagcctccacctttaaactcagtctctccttctcccctcatgctgctccatcccccaccccaactcagtccattcctgcagccacatggacagcaagtcccatattacctagagaacgaacctagcggatatactgtccgtgaggcgggtcccccggcattctataggcctaactctgacaacagaagacagggtggcagagaaagactggcttccaccaatgacaagggcagcatggccatggaaagtgcaaaggaaaccaggtactgcgccgtctgcaatgattatgcaagcgggtaccactacggtgtctggagttgcgaaggctgtaaagctttttttaagaggtccatccagggacataatgactatatgtgccccgctacaaaccaatgcacaattgacaagaatagaagaaagtcttgtcaggcttgccgactgcggaagtgctacgaggtgggcatgatgaagggcggaattcgtaaagacaggcgcggggggcggatgttgaagcataaacggcagcgggacgacggggagggccggggggaagtagggagcgctggggacatgcgcgccgcaaacctgtggcctagcccccttatgataaaacgcagtaagaagaactctctggcccttagcctgactgccgaccagatggtctctgcactcttagacgccgaaccccctattctatactccgaatacgatcccacgcgcccattcagcgaggcctcgatgatgggcctcctgacgaatcttgccgatcgcgaactcgttcatatgatcaactgggctaaaagggtacccggttttgtggatctcacactgcatgatcaggttcatctgctggagtgtgcatggcttgaaatcctgatgatcgggctggtgtggcggagcatggagcatccaggaaaacttctgtttgctcccaacctgctcctcgatcggaatcagggaaaatgtgtggagggcatggtcgaaatctttgacatgctactggcgacttctagcagattcagaatgatgaatctccagggagaagagtttgtctgcctgaaaagtattatcttactgaattcaggagtatacacgtttctttcctctacactgaaaagtctggaggaaaaagaccatatccatagggtgctcgataaaattacagacactctcatccatctgatggccaaggcaggattgacccttcagcagcagcatcaaagactggcccagctgctcctgatcctttctcacattagacacatgagcaacaagggcatggaacatctgtacagcatgaaatgcaaaaacgttgtgcctctgtacgatctattgcttgagatgctcgatgcacatcggctgcacgctcccacaagcaggggcggtgcctcggtggaagagaccgatcagagccacttagccaccgcaggctcaacgtcttcccattctctacagaagtactacattaccggagaagcagaagggtttcctgccactgtttag

SEQ ID NO: 15028 - DNA, 1788 bp, synthetic construct
  misc_feature 1..1788: note = Description of Artificial Sequence: Synthetic coding sequence
  source 1..1788: mol_type = other DNA
atgacaatgacattacacaccaaagcatccggaatggcccttctgcatcagatccaagggaatgagcttgaacctcttaaccggcctcaactgaagataccgctggagcggcccttgggcgaggtgtacctcgactccagtaagcctgctgtctacaattaccctgagggcgctgcctacgagttcaacgctgctgcagccgctaacgcacaagtctacgggcagactggcctcccctacggaccgggctcagaagctgccgcattcggatccaacggactgggcggcttccctccactcaactctgtgtctccatctccactgatgctgctccaccctcctccacagctgtcgccctttctgcaaccacacggtcaacaggtcccatactatctggaaaacgagccctctgggtataccgtgagggaggccggtcctcctgccttctacaggcccaactcagataacagaaggcagggcggcagggagcgtctggccagcacaaatgataagggctcaatggccatggagagcgcaaaagaaacccggtattgcgctgtctgcaatgactacgcaagcgggtatcactacggggtgtggtcctgcgagggatgcaaagcgttttttaaacggtccattcagggacacaatgactatatgtgtcctgctacaaaccagtgtactatcgacaaaaaccgccgcaagtcttgccaagcatgcagactgaggaagtgttatgaagtcggcatgatgaaagggggaatccggaaggatagaagaggtggccgcatgttaaagcacaagcggcagcgcgacgacggggaagggagaggagaggtgggctctgctggggatatgcgcgcagctaatctgtggccaagccctctgatgatcaaaagaagcaaaaagaactccctagccttgagcctgactgctgaccagatggtcagcgccctgcttgacgcagagcctcccatcttgtactccgagtatgaccctacgcggcctttcagcgaggcgtcgatgatggggctcctcaccaacttggcagacagggaactcgtgcacatgattaactgggcaaaaagggtacctgggttcgtggaccttacactccacgatcaggtgcacctgctcgaatgtgcttggctggagatactgatgatagggttagtgtggagaagtatggagcacccaggtaaactcctgttcgcccccaatctcctcttggacaggaaccagggcaagtgcgtggaagggatggttgagatctttgacatgctgctggctacgtcctcacgcttcaggatgatgaatttgcagggggaggagtttgtgtgtttaaaatccatcattctgctgaattccggcgtgtacaccttcttgtcaagtaccctgaaatccttggaagagaaggaccatatccacagggtattggataagatcacggacactttgatccatctcatggccaaggctggcttgaccctgcaacaacagcatcagcggctcgcacagcttttactcatcctgtcccacatccgacatatgtctaacaaggggatggaacacctgtatagcatgaagtgcaagaacgtggtccccttgtatgacctactccttgaaatgctggatgcgcatcgcttgcacgccccaacaagtagaggcggggcttctgtcgaagagactgatcagtctcatcttgccacagctggctccacgtcttcccattctttacagaagtactatatcacaggggaggccgagggttttcctgcaaccgtgtag

SEQ ID NO: 15029 - DNA, 1788 bp, synthetic construct
  misc_feature 1..1788: note = Description of Artificial Sequence: Synthetic coding sequence
  source 1..1788: mol_type = other DNA
atgacaatgaccctgcacactaaagcttctggcatggccctgcttcaccaaatccaaggtaacgaactggagccgttgaacaggccccagctgaaaattcccttggaacggccactcggcgaggtctacttggacagctcgaagcctgccgtctacaactaccccgaaggcgccgcctacgagttcaatgctgctgccgctgctaatgcacaggtgtatggccagaccggcctgccatatggacctggatctgaagctgccgccttcggttcgaatgggcttgggggctttcccccactcaactctgtctctccatccccactcatgctcctgcacccaccgccccaactcagccccttcctgcagccccatggacagcaagttccgtattatctggagaatgagccatccggatacacagtgcgggaggcaggacccccagccttttacagacctaactcggacaaccgtagacagggcgggagagaacgactagcctctactaacgataaggggtccatggcaatggagtctgccaaggagacccgctactgtgctgtatgcaacgactacgcatccggatatcactatggcgtgtggtcctgtgaaggatgcaaagcgttttttaagcgctctattcagggtcacaacgattacatgtgccctgccactaaccagtgtaccattgataaaaatcggcggaaaagctgtcaggcttgccgcctgcgcaagtgttacgaagtgggaatgatgaagggcggtattagaaaagatagaagaggcggaaggatgctaaaacataaaaggcagcgcgatgacggcgaaggccgtggtgaagtgggcagtgcgggcgacatgagagcagctaatttgtggccctctccattgatgatcaaaagaagcaaaaagaacagtctcgcactcagcctgacagcagatcagatggtatccgccctcttagatgccgaaccacccattctgtatagcgagtacgaccctacaagaccgttctcggaggcaagtatgatgggactgctgacaaatctcgctgatagagagcttgttcacatgatcaactgggcgaaacgcgtccccggcttcgttgacctgacactacacgatcaggtgcacctgctggaatgtgcatggcttgaaattctgatgatcgggttggtttggcggtccatggagcatcctggcaaactgctgttcgctcccaacctactgctcgatcgtaatcagggcaaatgcgttgaaggaatggtcgaaatcttcgatatgctcttggccacaagctcccgctttaggatgatgaatttacagggagaagaatttgtatgcctaaagtccatcattttgcttaactctggcgtgtatacattcctatcttccacacttaagtccttggaggagaaggaccatattcatagagtactggataaaatcaccgatactcttattcacttaatggctaaggcgggccttactttgcagcagcagcaccagaggctcgcccagttactgctgatattgtcacacatacggcatatgagcaataaaggaatggagcatctgtactccatgaagtgtaaaaatgtggtccccctctacgacctgttactcgagatgctggatgcacatcgacttcacgctccaacaagccgcggcggagctagtgtggaggaaacggaccagagccacttggccaccgccggctccactagctctcactcactgcagaaatactacatcaccggagaggcagaaggctttcccgctactgtctag

SEQ ID NO: 15030 - DNA, 348 bp, synthetic construct
  misc_feature 1..348: note = Description of Artificial Sequence: Synthetic coding sequence
  source 1..348: mol_type = other DNA
atgacaatgacattgcacaccaaagcatccggcatggccctgctgcaccaaatacagggcaacgagctggagcccctgaatcggccacagctcaagatacccctggaacgtcctttgggcgaggtgtatctggattctagcaaacccgcagtgtataattatcccgaaggtgccgcctacgaatttaatgcggctgcagccgccaacgctcaggtgtacgggcaaactgggctcccttatggaccaggttctgaagcggctgcgttcggctcaaacggtctgggaggctttccccccctgaactctgtgagccccagtccccttatgctcctgcatcccccaccatag

SEQ ID NO: 15031 - DNA, 1452 bp, synthetic construct
  misc_feature 1..1452: note = Description of Artificial Sequence: Synthetic coding sequence
  source 1..1452: mol_type = other DNA
atgacaatgactcttcacacaaaggcttccggaatggccctcctgcaccagattcagggaaatgaactggaaccattgaaccgacctcagctcaagatacccctggagcgccctcttggagaggtgtacctcgattccagtaagccagcagtgtacaattacccagaaggggctgcctacgaatttaacgcagccgccgccgccaacgcacaggtgtacgggcaaaccgggctaccctacgggcccgggagcgaagccgcagctttcggaagtaatggtctggggggctttcctcctctgaattccgtttccccttccccattaatgttgcttcacccaccaccccagctgtccccattcctgcagccgcacggccagcaggtgccttactacctggagaacgagccgtcaggatatacagtgcgcgaagcggggccccccgccttttacagaccaaactcagacaacagaagacagggagggcgagaaaggctagctagcacaaacgataaaggaagcatggctatggaatccgccaaggagactagatactgcgcggtgtgcaacgattacgcatcagggtaccattacggcgtttggagctgcgaaggctgtaaggccttttttaagcgctcaatacaaggacacaatgattacatgtgtcctgccacaaaccagtgcaccatcgacaaaaaccggcggaagtcttgtcaagcatgcaggctacgtaagtgctacgaggtgggcatgatgaaaggcgggtttgtagacctgacactccatgatcaggttcacctgctggaatgcgcatggctcgagattcttatgataggcttagtttggcggtctatggagcaccctggcaagctgctgttcgctcccaatttgcttctagacaggaatcagggaaaatgcgtagagggcatggttgaaatcttcgatatgttgcttgcgaccagctcccggttccgcatgatgaatcttcagggtgaggaattcgtctgcctgaagagtataattctgttgaactccggcgtttacacgttcttgtcctcaaccctaaaatctttagaggagaaagatcatatccacagagtgcttgataaaataacagatacattaatccacctgatggctaaggctggcttgactctccaacagcagcatcagcggctggcacaactcttgctgattttgtcccacatccgacatatgtctaataaaggaatggagcacctgtacagcatgaagtgtaagaatgttgtccccctctatgatcttctgcttgagatgctggacgctcatcgcctgcatgcaccgacttctagggggggcgcctcagttgaagagaccgatcagagtcacctagcgaccgcgggctcaacttcctcccacagcttacagaagtactacatcacaggcgaagccgaaggcttcccagccacagtgtag

SEQ ID NO: 15032 - DNA, 933 bp, synthetic construct
  misc_feature 1..933: note = Description of Artificial Sequence: Synthetic coding sequence
  source 1..933: mol_type = other DNA
atggctatggagagcgcaaaagaaactcggtattgtgccgtctgtaacgattacgcctccggataccactatggcgtgtggtcatgcgaagggtgcaaggctttcttcaaacggagcattcaaggacataacgactacatgtgccctgctaccaatcagtgtaccatcgacaagaacaggagaaaatcctgccaagcatgcaggcttagaaagtgctatgaggtcggcatgatgaaggggggaattaggaaggataggagaggtggtagaatgcttaagcataaaagacagcgagacgatggagagggtagaggcgaggtggggagcgctggggatatgcgggccgctaacctgtggccaagccctctgatgatcaaaaggtcaaaaaagaatagcctggcactgtccctaactgccgaccagatggtgtctgctctccttgatgccgagccccctatactgtatagtgagtacgatcctacccgcccattctctgaggcctccatgatggggctgctgactaacctagctgatcgggagttggtccacatgatcaactgggctaaaagagtccccggattcgtggatctgaccttgcatgaccaagtccacttgctggagtgtgcttggttggaaatcctcatgattggcttagtctggcgcagtatggaacaccccggtaagttgcttttcgcccccaaccttctactggataggaaccaaggaaaatgcgtggagggcatggtggagatcttcgacatgctgcttgcaacaagctctaggtttaggatgatgaacctacagggagaggagttcgtttgcctgaaaagcattatcctgcttaattccggaatctcccatgtggaggccaaaaagagaatcctaaacttgcacccgaagatttttgggaacaaatggttcccacgcgtctag

SEQ ID NO: 15033 - DNA, 1320 bp, synthetic construct
  misc_feature 1..1320: note = Description of Artificial Sequence: Synthetic coding sequence
  source 1..1320: mol_type = other DNA
atggatattaagaattctccaagtagtctgaacagcccttcttcttacaactgtagccagagtattttacccctagagcacggctctatctatattcctagctcatatgtcgattctcaccacgaatatcctgctatgactttttactctccagccgtgatgaactattcaatcccgtccaatgtgaccaatctcgaaggcggtcctggccggcagaccacgagcccaaacgtactgtggccaactcctggacacttgtcacctcttgtggtgcaccgccagttgtcacacctgtacgccgaaccccagaaatctccgtggtgcgaggcccggagcctggaacacaccctgcccgtcaaccgggaaaccttaaagcgaaaggtttcgggcaaccggtgtgcgagcccagtgacagggccgggcagcaaacgcgacgcccatttctgtgccgtgtgctcggattacgccagcgggtatcattatggggtgtggtcctgcgagggatgcaaggcgtttttcaagcggtcaatccagggccacaatgactacatctgccccgcaactaatcagtgcaccattgataaaaatcgaaggaagtcttgccaggcatgtcgccttagaaagtgctatgaagtcggaatggtgaagtgcggctcgcgccgcgagcgttgtggataccggctggtccgcaggcagaggagcgctgatgagcaattgcactgtgccgggaaagccaagcgttcgggggggcatgccccgcgagtccgagaacttctgttggacgccctgtcccctgagcagcttgttctcactctgctagaagctgaaccacctcatgtgctgatctctcgtcctagcgccccttttactgaggcttcaatgatgatgagcctgacaaagctcgcagacaaggagctggtgcacatgatttcatgggccaagaagatccctggaatgtaccccctggttacagctacccaggatgctgacagctcacgaaaattggcccacctgctcaatgctgtcacagacgcactagtgtgggttatagcgaaatctgggatctcatcacagcaacaaagtatgcggcttgccaacctgctcatgctgttatctcatgtccgccatgcctccaataaagggatggaacacctacttaacatgaaatgcaagaacgtagtcccagtctacgatctcctactcgagatgttaaacgcacatgttctgcggggttgcaaatcttcaattactggatctgagtgttcaccagctgaggactcgaagtcaaaggaggggtctcagaatccccaatcacagtag

SEQ ID NO: 15034 - DNA, 1593 bp, synthetic construct
  misc_feature 1..1593: note = Description of Artificial Sequence: Synthetic coding sequence
  source 1..1593: mol_type = other DNA
atggacatcaaaaactctccatccagcttgaactccccaagtagctataactgcagccaatccatcttgcccttagaacacggcagtatttatattccttcctcatacgtggacagtcaccacgagtatcctgccatgaccttctactctcctgccgtgatgaactactctattcctagcaacgtgaccaatctggagggcggccctgggcgacagaccacttcacctaacgttctttggccaacacccggtcacctgagcccacttgtggttcaccggcagctttcccatctgtatgcggaaccgcagaagtccccctggtgcgaagcaagatccttggaacacactctgcctgtgaaccgtgagacgctgaaacgcaaggtatccgggaaccgatgcgcgagccctgtcaccgggcctggttctaagcgggacgcgcacttctgcgcagtgtgctcagactacgcatccggataccactatggcgtgtggtcttgcgagggttgcaaggctttctttaagcggagcatccaggggcataacgactacatctgtccagcaaccaaccaatgtaccattgacaagaatcgacgcaagtcatgccaggcgtgtagactccgcaagtgttatgaagtgggaatggtaaagtgtggctcccggcgcgaaaggtgtggctataggctggtccgacgccagagaagcgccgatgagcagttgcactgtgctggcaaagctaaacggagcggtgggcacgctccaagggttcgagagctgcttctcgatgcgctgagtccagagcagcttgtactgaccctgctggaggccgagcctccccacgtgctgatatcgagaccaagcgctccatttacagaggcatcaatgatgatgtccttaactaaattggccgacaaggagctggtccacatgatttcttgggctaaaaagatacctggttttgtggagctgagtctgttcgatcaggtgcgattgctcgagtcttgttggatggaagttctgatgatggggctgatgtggcgaagtatagatcacccgggcaagctaatttttgcccctgatctcgtcttagatcgggatgagggcaagtgcgtggaaggcatcctggagatctttgacatgctgctcgcaactacttcccgattcagggagctgaaactgcaacacaaggaatatctctgcgtgaaggctatgattctcttaaactcatccatgtatccccttgtgacggcaacccaggacgcggacagctcaaggaaacttgcccacctgctgaacgctgttaccgacgcactcgtgtgggtgatagccaaaagcggtatcagcagccagcagcagtccatgcggctggccaacctcctgatgcttctcagccacgtacgtcacgcgagtaataaagggatggagcaccttttgaatatgaagtgcaaaaatgtggtgcctgtgtatgatctccttcttgagatgcttaatgcccatgtgcttagaggctgcaaatcctccattaccggcagtgagtgtagcccggccgaagactctaagagcaaggaagggtcacagaacccacagtcacagtag

SEQ ID NO: 15035 - DNA, 1488 bp, synthetic construct
  misc_feature 1..1488: note = Description of Artificial Sequence: Synthetic coding sequence
  source 1..1488: mol_type = other DNA
atggacatcaaaaattcccctagctcattgaactccccatcttcgtataactgctcccaatcgatccttccgctggagcatggatccatctatattccatctagctacgtggacagccatcacgagtatcctgctatgaccttttattcacctgcagtaatgaactatagcattccatccaatgtcactaacctcgaaggcggtcccggacgccagaccacaagccccaatgtcctgtggcccacccctggtcatttgagtcctcttgtagtgcatcgacagttgtcgcacttatatgccgaaccccaaaaatccccatggtgtgaggcccgcagtctagagcacacactgcccgtgaatagagagactctgaaacgaaaggtctcaggtaatagatgtgcgtctcccgttactggcccagggagcaagagggatgctcacttttgtgctgtctgttcagactatgcgtcagggtaccactacggagtgtggagctgcgagggctgcaaggcctttttcaagcggagtatacagggacacaatgattatatatgccccgccacaaaccagtgtacgattgacaagaacaggaggaagtcttgccaggcctgtagacttcgaaaatgttatgaggtggggatggtgaagtgcggaagccgcagggagcgctgcgggtatcgcctggtgcgacggcagagaagcgccgatgaacaattgcactgtgccgggaaggcaaagagatctgggggacatgcccctagagtgagagagcttcttctggatgcactgtcccccgagcagctcgtgctgaccctcctggaagcggaacccccgcacgtgctgattagtagaccatccgctccgtttacggaggctagcatgatgatgagcttgacaaaactcgccgacaaggaacttgtccatatgattagctgggctaagaagattcccggctttgttgagctatctctgtttgaccaggtgagattgctcgagtcgtgttggatggaagtgcttatgatgggtctgatgtggcgatcaatagaccatcctgggaaactcatctttgcaccggatctcgtcttggatcgcgacgagggcaaatgcgtggagggaattctggaaatctttgacatgctgctggctaccacttcgcgttttcgcgagcttaaactgcagcacaaggaatatctgtgcgtaaaagccatgatcctcctaaacagctcgatgtatcctctagtgacggctactcaggacgctgactcttcccggaaattagctcacttgcttaacgctgtcaccgatgccctcgtgtgggtcatagctaaatcaggaatctccagtcaacagcagagcatgagactcgccaatttactcatgctgctttctcatgtcagacacgcaagagctgagaaagctagtcagacgctcacatcgttcggaatgaagatggaaacacttctccccgaggccacgatggaacagtag

SEQ ID NO: 15036 - DNA, 1446 bp, synthetic construct
  misc_feature 1..1446: note = Description of Artificial Sequence: Synthetic coding sequence
  source 1..1446: mol_type = other DNA
atggatattaagaattctccctcaagtctgaattcaccaagttcttacaattgcagtcagtccattctccctctcgagcacggcagcatttatattccctcatcgtacgtagactcacatcatgaatatcccgctatgactttctacagcccggccgttatgaattatagcatcccctccaatgtgacaaatttggagggcgggcctgggcgtcagacaacgtctcctaatgtgctttggccaacaccaggtcatctctcacccttggtagtacataggcagcttagtcacctttacgcagaaccccagaagtcaccatggtgcgaagctcgcagcctggaacacaccttgccagtgaacagggagactctgaaacgaaaggtctccgggaaccgatgcgcgagtccggtaaccggccccggcagtaagagggacgcccatttctgcgcagtgtgcagcgattatgcgagcggctatcactacggcgtgtggtcttgtgagggttgtaaagctttttttaagaggtcgatccaaggacacaacgattatatctgtccagcaacaaatcagtgtacgattgacaaaaaccggcgcaaaagttgtcaagcatgcaggctaagaaagtgctatgaagtcggaatggtcaaatgtggtagcaggcgggagcggtgcgggtaccggttggtacgaagacagcggtcagccgatgaacagctgcattgcgcgggcaaggccaaaaggtctggggggcatgccccgcgcgtccgggagttgttgctcgacgcattgtcccccgagcaattggtcctcacccttcttgaagcagaacccccccatgtgctgatttcaagaccgagcgccccatttactgaagctagtatgatgatgagtcttaccaagctagcagacaaagagctggtgcacatgatcagttgggcgaaaaaaattcccggattcgtggaactctctctgtttgatcaggtccgcctgctggagtcctgctggatggaagtcctcatgatgggcttaatgtggcgtagtattgaccacccaggcaagcttattttcgctcctgatttggtgctggaccgcgatgagggcaagtgcgtggaggggattcttgagatattcgacatgttactggcaacaactagccgcttcagggaactgaaacttcagcataaggagtacctgtgtgtgaaggccatgattctgcttaatagctctatgtatcccctagtgactgctacacaagacgcagattcatctcggaaactggcacacctccttaacgcagtcaccgacgcccttgtttgggtaatcgcgaaatccggtatcagttcccagcaacagtctatgaggctggctaatctactcatgctcttgtcccacgttagacatgcccgctggggagaaaagcagtttatccatcttaaactgtcatag

SEQ ID NO: 15037 - DNA, 1488 bp, synthetic construct
  misc_feature 1..1488: note = Description of Artificial Sequence: Synthetic coding sequence
  source 1..1488: mol_type = other DNA
atggacatcaaaaactctccctcctccctcaactctccttctagctataattgctcacaatcaatcctacctcttgagcatggctctatctacatccctagctcctacgtggatagccatcacgaatatcccgccatgaccttttatagcccagccgttatgaattactcaatcccgtcaaacgtgacaaatcttgagggaggcccgggtaggcagactaccagtccaaacgtactgtggccgacgcctggacatctttcccctttggtggtgcaccgacagctaagtcacctgtacgctgaacctcaaaaaagcccttggtgcgaagccaggtcacttgagcacacccttccagttaaccgggagacactaaaacggaaagtgtcgggcaatcggtgtgccagtcctgttacagggcccggttccaagcgtgacgcccacttctgtgctgtctgttccgactacgcttcaggataccattatggcgtgtggtcttgcgaaggttgtaaggcgttttttaagcgctccatccaagggcacaacgattatatctgtcctgctacaaaccagtgtaccatcgataaaaatcgaaggaaatcctgccaggcctgccggctgcgcaagtgttatgaagtggggatggtcaagtgcggatcccgtagggaacgctgcggctataggctcgtgagacggcaaaggtccgccgacgagcagctgcattgcgccgggaaagccaaaaggtccggcggtcatgccccccgtgtcagggagctgctactggatgctttgtccccagaacagttagtgcttactctgttggaggctgagcctccgcacgtacttatttcccgcccttcagcgccctttaccgaagcctctatgatgatgagtttaaccaaactggctgacaaggagcttgttcacatgatttcctgggccaagaaaatcccaggctttgtagaattgagccttttcgaccaagtgcgtctgttggagagttgttggatggaggtcttgatgatgggactgatgtggcggtccatcgaccatccaggaaaactgatcttcgccccagacctagtactggacagagatgagggcaagtgcgttgagggtattctggagatttttgacatgcttctcgcgactacttcacgtttccgggaactcaaactacagcacaaggaatatctctgcgttaaagccatgatacttttgaatagtagcatgtaccccctggtaaccgctacgcaggatgcagatagttctagaaaactggcgcacctactgaacgccgtcacagacgcactggtgtgggtaatcgcgaagtctggcatatctagccagcagcagtccatgcgcctcgcaaacctcttgatgctgctgagccacgtgagacacgccagggcagagaaggccagccagacactcacatccttcggcatgaagatggagaccctgctgccggaggccacgatggagcagtag

SEQ ID NO: 15038 - DNA, 1542 bp, synthetic construct
  misc_feature 1..1542: note = Description of Artificial Sequence: Synthetic coding sequence
  source 1..1542: mol_type = other DNA
atggacatcaagaattcgccatccagccttaactcgccgagctcttataattgcagccagtctatcctgcctctggagcacggctctatttatatcccttcaagttatgttgattcacatcatgaatatccagcaatgacattctattcaccggctgttatgaactattccatcccatcaaatgtcacgaacctcgaaggaggccctggccggcagacaactagcccaaacgtgttgtggcccactcccggtcacctgtcaccacttgtggtccataggcaactcagccatctctacgcggaaccccagaagtccccatggtgcgaagcaaggtcgctcgaacacactctgcctgtaaatcgtgagaccctcaagcggaaagtttccggcaataggtgcgcctcacccgtgaccggcccagggtctaaaagggacgcccatttctgtgcagtttgttcagactatgcgtctggttaccactacggggtgtggtcctgtgaggggtgtaaagctttcttcaagcggtcgattcaggggcacaatgactacatctgtcctgctacaaaccaatgcacgatagataaaaatcgtaggaaaagttgtcaggcatgcaggctccggaaatgttatgaggtaggcatggtgaagtgcgggtcccgtagggagcgctgtgggtataggctggtgcgtaggcagcggtcggctgacgaacagctccactgcgcaggcaaagctaagagaagtggtgggcatgcgcctcgggttcgggagcttttgctggatgcactgagccccgaacaactggtgcttacactgctagaggcagagccacctcacgtgttaatctcacgcccgtccgcgccttttacagaagcgagcatgatgatgagtcttaccaaactcgcggacaaggagctcgttcacatgatttcatgggccaaaaagattccagggtttgtcgagctctcactgttcgatcaagtccgacttttagagtcgtgttggatggaagtgttaatgatggggttgatgtggagaagcatcgatcaccccggaaagttaatcttcgcccccgacttagtacttgatcgggacgagggcaagtgtgtcgaaggaatcctggaaatatttgacatgctgctcgcaactacatcccgctttcgcgagctcaaattacagcacaaggaatacctctgtgtgaaggcaatgatactactcaattcctcaatgtaccctctcgtgactgctacacaagatgctgattcgtcaaggaaactcgcacacctgctgaatgctgtgacagacgcactcgtatgggtgattgctaagtcgggaataagttcccagcaacaaagcatgagactggctaatctgctaatgctcctgagtcacgtccggcacgcatcgtccctctcactttcttggaggctcttcatgctcagagaagcgtcttgccacggcgtgcgccaaacgcctggtggggcacacgtttccgttagccgaagtcggtcgttcgaagcctgtcaacagcctcgcgagtag

SEQ ID NO: 15039 - DNA, 1488 bp, synthetic construct
  misc_feature 1..1488: note = Description of Artificial Sequence: Synthetic coding sequence
  source 1..1488: mol_type = other DNA
atggatattaagaactcaccaagcagcctaaattcaccaagctcctacaactgctctcagtccatactccctctagaacacggaagcatctacatacccagcagctacgtggattctcaccacgagtacccagccatgactttttattctcccgccgtcatgaactacagcatcccctcaaacgtgacaaacttggaaggagggccggggcgccagactactagtcccaacgtactttggccgacccctggccacctctcacccctggttgttcatcggcagctgtcccatctatacgcagagccacaaaaatcaccctggtgtgaggccagaagcctggagcatacgttacccgtgaatagggaaaccctcaaaaggaaggtgtcaggtaaccgctgtgcgagccctgtgacagggcctggatccaagcgagacgcccacttctgtgctgtgtgctctgactatgcatccggctaccactacggggtgtggtcgtgcgaaggttgtaaggctttttttaagcggtcaatccaaggacacaatgactacatctgccctgctacaaaccagtgcacgatcgataagaacagaaggaagagctgtcaggcttgccgactgcgaaagtgttacgaagtcggtatggtcaagtgcggttcgcgtcgcgagcggtgtggctatcgattggtgcgacggcagaggagcgcagacgaacaactgcattgcgcaggaaaagccaagaggagtggcgggcacgccccgcgagtgcgcgagctgttactagacgctctcagccccgagcaacttgttctcaccctgctggaggctgagccccctcacgtgttgatttcgcgacctagtgccccttttacagaggccagcatgatgatgtccctcaccaaacttgctgacaaggaattggtccacatgatatcttgggccaaaaagattccggggtttgtggagttaagtctgtttgaccaggttcggttgcttgaaagctgctggatggaggtcctgatgatgggcctgatgtggagatcaatcgatcaccctggaaaacttattttcgccccagatctagtcctggaccgagacgaaggtaagtgcgttgaggggatacttgaaatcttcgacatgctcctcgctaccactagtaggtttcgcgaacttaaattacagcataaagaatatctttgcgttaaagccatgatcctactgaattcctccatgtaccccctcgtgacggccacacaggatgcagactcttccagaaagttggctcacctgctgaatgctgtgacagacgccctagtctgggtgattgccaagagtggtattagttcccaacaacagagcatgagactggccaacctgcttatgctgctgagccacgtgaggcacgcccgagcggagaaagccagccagacattaactagctttggaatgaaaatggagacccttctgcctgaagccacgatggaacaatag

SEQ ID NO: 15040 - DNA, 1419 bp, synthetic construct
  misc_feature 1..1419: note = Description of Artificial Sequence: Synthetic coding sequence
  source 1..1419: mol_type = other DNA
atggatattaagaactcgccttcaagccttaactctcccagcagttacaattgttcccagtctatcttgccactggaacacgggtcaatctatattccttcgtcttacgtggactctcaccatgagtatcccgcaatgacattttattcgccagcagtaatgaactattcgattccatctaacgttactaatcttgaaggcgggcctggccgccagaccaccagcccaaatgtattgtggccaaccccgggccatctctcacccctggtggttcaccggcagctgtcacacctgtacgctgaacctcaaaagtctccgtggtgcgaggcacggagtttagaacatacgctacccgtgaatcgggagaccctgaaaagaaaagtaagcggcaaccgctgtgcttcaccagttaccggaccagggtcaaagcgagacgcacatttttgtgcggtatgttctgattacgcctcgggttaccattatggagtctggtcctgtgagggctgcaaggccttcttcaagaggtctatccaaggccacaatgactacatctgccccgctacaaatcagtgtactatcgacaaaaaccgtcggaagtcctgccaggcatgtcgattgcgtaaatgttacgaggtggggatggttaaatgcgggagcagacgtgagcgctgcggctacaggctggtccggcgacagcgaagcgcggacgagcagctgcactgcgcgggcaaggccaagcgctccggggggcacgcgcccagggtaagagaactccttttggacgccctgagccctgagcaattagtgttgactctgctggaggccgaaccccctcatgtcctcatcagccgccctagtgcgcctttcacagaagcatctatgatgatgtcactgactaaacttgccgataaggaattagttcatatgattagctgggcaaagaaaatccccgggtttgtggagctaagcctattcgatcaggtgcggctgctcgaatcctgttggatggaagtgttgatgatgggcttaatgtggaggtcaattgatcacccaggcaagcttatctttgccccagatctggttcttgacagggacgaaggcaagtgtgtagagggtatcttagaaatctttgatatgctcctggccaccacttcgagattccgcgagctgaagttgcagcataaggagtacttatgcgtcaaggcgatgattctcctgaacagcagtatgtatcctttggtcacagctacacaagacgccgactcaagccgcaagctcgcacacctcctaaacgcagtgacggatgcactggtgtgggttatagccaaatccggaatcagttctcagcagcagagcatgcggcttgccaatttattgatgctgttgtcccacgtacgtcacgccagatacgctccatag

SEQ ID NO: 15041 - DNA, 1446 bp, synthetic construct
  misc_feature 1..1446: note = Description of Artificial Sequence: Synthetic coding sequence
  source 1..1446: mol_type = other DNA
atggatatcaagaattctccctcctccctgaactcaccttcaagctataattgctcacagagcattctcccacttgaacacggctccatctacattccctcttcgtacgtagacagccaccatgagtacccagctatgaccttctactctcccgctgtcatgaactactctataccctctaacgtaactaacctcgagggcggcccgggacgacagaccacgagcccaaacgtgctgtggccaacccccggccatctgtcacccttggtcgtgcacagacagttgtcacacctctacgccgagccacaaaaaagcccttggtgcgaagccaggagtttggagcatacgctcccagttaatagggagactttgaaacggaaagtgtctgggaaccggtgcgccagtcccgttactggaccaggatccaaaagagatgcacatttttgcgccgtatgtagcgattatgcctctggataccactacggtgtgtggagctgcgagggctgcaaagcctttttcaagcgatcaatacagggccacaacgactatatctgtcccgctactaaccagtgtacaatcgacaagaatagacggaagagctgccaggcctgccgccttcgtaaatgctacgaggtgggcatggtcaagtgtggatcccggagagagcggtgtggatacagactcgtgagacgccagagatctgccgatgagcagttgcactgtgccggaaaagcaaaacgatccggcggacacgctcctagagtgagagaattgcttcttgatgcattatctcctgaacagctcgtgctgactctccttgaagccgagcctcctcacgtgctgatttctcgcccctcagccccgtttaccgaggcttcgatgatgatgtctctgacaaaattagcggataaggaactcgtgcatatgatttcatgggcgaagaaaatcccggggttcgtggaactgagcctatttgatcaggtgcggctgcttgagagctgttggatggaggttctcatgatgggcttaatgtggaggtctatcgaccacccaggcaaattaatcttcgcacccgatctcgtgctggatagggatgagggtaagtgcgtcgaaggcattctcgaaattttcgatatgctactggccacaaccagtcggttccgcgagctgaaattacaacataaagagtacctgtgcgtgaaggccatgatcttgctgaattcgagtatgtaccctctggtgacagcaacccaggacgcagacagctcgaggaagcttgcacatctcctaaatgcagttacggatgctcttgtttgggtaatcgccaagtccggcatttcctcccagcagcagtctatgcgtctggccaatctgctcatgttgctgagtcatgtgaggcacgctaggtggggggaaaagcagttcatccacttaaaactgagctag

SEQ ID NO: 15042 - DNA, 1380 bp, synthetic construct
  misc_feature 1..1380: note = Description of Artificial Sequence: Synthetic coding sequence
  source 1..1380: mol_type = other DNA
atggacggtttctatgaccaacaggtcccctatatggtgacgaattcccagagaggaaggaattgcaacgagaagcctaccaacgtgcgcaaacgcaaattcatcaaccgcgaccttgctcacgattcggaagagttattccaggatctgtctcagctccaagagacatggctggccgaggtcgctttccacggactccctttgaaaatcaaaaaggagcctcactccccctgttccgaaattagctccgcgtgttcccaggaacagccttttaaattctcatatggagaaaagtgcctgtataatgtgagtgcatacgaccaaaagcctcaggtgggaatgcgccctagtaatccaccgaccccatctagtaccccagtgtctcctctgcatcacgcctcacctaacagcactcacactccgaagcccgaccgggcctttcccgcgcatttgcctccctcccagtccataccagattcttcctatccaatggatcatcgattcaggcggcagctgagcgagccctgcaactccttcccacctctgcccaccatgccccgggaagggcggcccatgtatcagaggcaaatgtccgagcccaacatccctttcccaccccaggggtttaaacaggaataccatgatcccgtgtacgaacacaacaccatggttggaagcgcggcctcacagtcttttccaccccccctcatgataaagcaggagcctcgcgacttcgcatacgattctgaagttccctcctgccattccatctacatgcggcaagaagggttcctcgctcacccaagccggacggaagggtgtatgttcgaaaagggccccagacagttctacgacgacacatgtgtggtgccggagaaatttgatggagatattaaacaggagcccggcatgtacagggaaggccccacatatcagcgccgaggtagccttcaactttggcagttccttgtggcattgttggacgacccctccaatagtcactttattgcatggacgggcaggggcatggagtttaagctgattgaaccggaagaggtcgctaggaggtgggggatccagaagaacagaccagcaatgaattatgataagctgtcccgttcattgcgctactattacgaaaaagggatcatgcagaaagtggcaggagagagatatgtttacaagttcgtgtgcgaccccgaagcattattcagtatggcttttccagataatcagaggcccctcctgaagactgatatggaacgccacatcaacgaggaggacacggtgcctctatctcatttcgacgagtccatggcttatatgccagagggcgggtgttgtaatcctcatccctacaatgaagggtacgtatactag

SEQ ID NO: 15043 - DNA, 1380 bp, synthetic construct
  misc_feature 1..1380: note = Description of Artificial Sequence: Synthetic coding sequence
  source 1..1380: mol_type = other DNA
atggacggtttttacgaccagcaggtaccctatatggtgaccaattcccagcgagggcgcaactgcaacgaaaagccaacgaatgtacgcaaacggaaatttattaatcgagacttagcccatgactctgaggaactgtttcaggatctttcacagctccaggaaacgtggttagccgaggttgcgtttcacgggctgcccctgaaaatcaagaaagaaccccacagcccttgtagcgaaatctcaagcgcctgttcccaggagcaacccttcaaattcagttatggagagaaatgtctgtacaacgtgtccgcatacgaccagaagccacaagtagggatgcgcccctctaacccacctacaccaagctcgacaccagtttctcctttgcaccacgcctcacctaattctacccacactcccaagccggatcgtgcgtttcctgcgcacttgcccccctctcagtcgatccccgacagtagctacccaatggaccataggttccgtcggcagcttagtgaaccctgcaattctttcccccccctgccgactatgccgagggaaggacggccaatgtaccagcggcagatgtccgaacctaatatcccctttccaccccaggggttcaaacaggagtaccatgaccccgtgtatgagcacaacactatggtgggcagtgccgcatcacagtctttccccccacccctaatgatcaaacaggaaccgagggactttgcgtacgactccgaagtaccatcctgtcattcgatttatatgaggcaggaaggattcttagcccatccaagtagaacggaaggatgcatgtttgagaaggggccgaggcagttctacgacgatacttgcgttgtgccagagaaattcgatggcgatatcaaacaggagccaggaatgtatcgggagggacctacataccagagacgaggttcactccaactgtggcagtttctcgtcgctctgctcgatgacccctctaacagtcactttatcgcctggaccgggagaggcatggaattcaagttgatcgagcccgaggaggtggccagacgatggggcattcagaaaaatcgaccggctatgaattatgacaagcttagtaggagtctccgctactactacgaaaagggaatcatgcagaaggtcgccggagaacgctatgtctataagttcgtgtgcgaccctgaagcactgttctctatggcctttcccgacaaccagagacccctgctgaagacggatatggaaagacacatcaatgaggaggacactgttccactgtcacattttgacgaatccatggcttacatgcccgaagggggctgctgcaatcctcacccatataatgaggggtatgtgtactag

SEQ ID NO: 15044 - DNA, 1125 bp, synthetic construct
  misc_feature 1..1125: note = Description of Artificial Sequence: Synthetic coding sequence
  source 1..1125: mol_type = other DNA
atgcttcaggacctgtctgccagcgttttcttcccaccttgctcacagcacagaacattagctcaagtcccagataatgatgaacaattcgtacccgactatcaagcagaaagcctagcttttcatgggctccccctgaagatcaaaaaggagccacattccccttgtagtgagatctcctctgcttgctctcaagaacagccattcaagtttagttatggcgagaagtgtctgtacaacgttcggtttagaagacagttgagtgaaccctgtaactcattcccacctctcccaaccatgcccagggaagggcgccccatgtaccagagacagatgagcgagcctaatatacccttcccaccgcaggggtttaagcaagaatatcacgatcccgtgtatgagcacaacacaatggtcgggtctgccgctagtcagagctttccaccaccgctgatgatcaagcaagaacctcgggatttcgcatatgatagtgaggttcctagctgtcattcaatttacatgcgccaggaagggtttttggcccacccatcccgtactgagggctgcatgtttgagaagggcccacggcagttctacgacgacacctgcgtggtcccagaaaaatttgacggagacattaagcaggagccaggaatgtaccgggaggggccaacatatcagcggcggggctctctccagctgtggcagtttctagtcgctctcctggacgaccccagcaattctcacttcatcgcctggaccgggagagggatggagtttaagcttattgaacctgaagaggtcgctagacgatgggggattcagaaaaaccgcccggccatgaattacgataagttgtccagaagtcttcgctactattatgagaaagggattatgcagaaggtcgccggagagagatatgtctataaattcgtgtgcgatcctgaagccttattcagtatggcctttccagacaatcaaaggcccctcctgaagactgacatggaacgacacatcaacgaggaggacaccgtgcctctctcccactttgacgagtcaatggcttacatgcctgaaggcgggtgttgcaatcctcatccgtacaacgaagggtacgtgtattag

SEQ ID NO: 15045 - DNA, 1380 bp, synthetic construct
  misc_feature 1..1380: note = Description of Artificial Sequence: Synthetic coding sequence
  source 1..1380: mol_type = other DNA
atggacggcttctatgatcagcaggtcccttatatggttactaattcacagcgaggtcggaactgtaatgaaaaaccaacaaatgttaggaaacgaaaattcataaatagagaccttgctcacgattcggaagagttattccaggacttaagtcagctccaagagacttggttggccgaagtggcgttccacggccttccactaaagatcaagaaggaacctcactctccatgcagtgaaatctctagcgcctgtagccaggaacagcccttcaaatttagttatggagagaagtgcctatacaatgtttccgcatacgatcagaagccccaagtgggtatgcgtccctccaatccacctacaccatcttccacaccggtgtcacccctgcaccatgccagccctaactccactcacacccctaaaccagacagagcctttcctgctcacctgcctccaagccagtccattcccgattcaagctaccccatggatcatcggtttagacgccagctgagtgaaccatgcaacagttttccacctctgcccacaatgcctcgcgaaggaagaccgatgtaccagaggcagatgtcagaaccgaacatcccgtttccacctcagggcttcaaacaagagtatcatgatcctgtgtatgagcataatactatggttggatctgctgcatctcaaagtttccctccccctctgatgatcaaacaggagccacgcgacttcgcatacgatagcgaagtgccttcctgccactccatctatatgcggcaagaaggtttcttggcacatcccagcaggaccgagggctgcatgttcgaaaaaggtccccggcaattttatgacgatacctgtgtcgtacccgagaagtttgatggtgatataaaacaggagcctgggatgtacagggagggccctacctaccaacgaagaggctcattgcaactgtggcaattcctagtagctctgctggacgatccaagcaattcacattttatcgcttggacagggcgggggatggagtttaagctgattgagcctgaagaggtggctcgccggtggggtatccagaagaatagacccgccatgaactacgataaattatctcgcagcctgaggtattattacgagaagggtattatgcaaaaggtcgccggtgagcggtatgtgtataaatttgtgtgtgatccggaggccctttttagtatggcttttcccgacaaccagcggcctctcctgaagactgacatggagagacacataaatgaggaggacactgtgcctttatctcactttgacgaatctatggcctacatgcccgaaggcggatgttgcaatccccacccctataacgaggggtacgtgtattag

SEQ ID NO: 15046 - DNA, 1434 bp, synthetic construct
  misc_feature 1..1434: note = Description of Artificial Sequence: Synthetic coding sequence
  source 1..1434: mol_type = other DNA
atggacggattttatgaccagcaggtgccatatatggttaccaattcccagagggggagaaactgcaatgagaagcccacgaatgtgaggaagcgcaaatttattaatcgcgacctggctcacgacagcgaagaactctttcaggacctgagccagctacaggagacatggttggccgaggcccaggtccctgataacgacgagcagttcgtgcctgattaccaagcggaaagcctggccttccatggtctgcctctgaagattaaaaaagagccgcactcaccatgcagtgagatctcatctgcgtgctctcaagagcaaccttttaagttcagttacggagaaaaatgtctgtacaacgtgagcgcctatgatcagaagccacaggtggggatgaggcctagtaacccccccaccccatcttccacacccgtctccccactgcaccatgcctctcctaacagtacgcacacccccaagcctgaccgggctttcccagctcacctgcccccatctcaatccattcccgacagctcctatcctatggatcatcgattccggagacaactttcagagccctgcaactcttttccgccattgccaactatgccacgggagggcaggcctatgtatcagcgtcagatgtccgagcctaacatcccattccctccacagggatttaagcaagagtaccatgacccagtgtacgagcacaatactatggtcgggagcgccgcaagccagtcattccctccccctttaatgatcaaacaggagccgagagacttcgcatacgattccgaagtaccctcctgtcactcaatttatatgcggcaggagggatttttagctcacccctcccgcactgaggggtgtatgttcgagaagggtccgaggcaattctatgatgacacatgcgtagtacccgagaaattcgatggcgacataaagcaggagcctggcatgtatagggagggacctacttatcagcggagagggtcattacaactctggcagttcttggttgccctactggacgatcctagtaactctcacttcatcgcttggacgggccggggaatggagttcaaattaatagagcctgaagaagtggcacgccgctgggggatccagaagaatcggccggccatgaattacgataagctatcccggagtcttcgatactattacgagaagggtattatgcagaaggtcgctggggaaaggtatgtgtataagtttgtctgtgatcctgaggcactgtttagtatggctttcccagacaatcaacgccctctcctgaagaccgatatggaacggcacattaatgaagaagacacggtacccctcagtcactttgatgagtcgatggcttacatgcctgaaggaggctgctgtaacccacacccttacaacgaagggtatgtgtactag

SEQ ID NO: 15047 - DNA, 1260 bp, synthetic construct
  misc_feature 1..1260: note = Description of Artificial Sequence: Synthetic coding sequence
  source 1..1260: mol_type = other DNA
atgctccaggacctttcagcatctgtgtttttcccaccatgcagtcagcaccgaacacttgtggctttccatgggctcccgctcaaaattaagaaagagcctcatagcccttgctcagaaatctcatccgcatgtagccaggagcagcctttcaagttttcttacggcgaaaagtgcctctacaacgtcagcgcctacgaccagaagccgcaggtgggaatgcgcccatcaaacccacccaccccttctagcacccctgtcagtccacttcaccatgcctctcctaactctacacacactcctaaacccgatagggccttccccgcccacctacctccctcccagagcatccccgactcatcgtatcctatggaccatcggttcagacggcagctatccgagccctgtaacagcttccccccgctgcctaccatgcctcgcgaaggcaggccgatgtatcaaagacaaatgtcagaacccaacatcccatttcctccccagggcttcaagcaagagtaccatgaccctgtctacgagcataatacaatggtcggatccgcagcttcgcagtcctttccaccacctttaatgattaagcaagaaccaagggattttgcttatgacagcgaggtgccgtcttgtcactccatttacatgaggcaagaagggttcctcgctcatccctccagaaccgagggctgcatgtttgaaaaggggccacgccagttctatgacgacacctgcgtggtacccgaaaaatttgacggcgatatcaagcaggaaccagggatgtacagggaggggcccacgtatcagaggcggggatccctgcaactttggcagtttctcgtcgccctgctggacgacccatcaaactcacactttatcgcatggaccggcaggggcatggagtttaagttgattgagcccgaagaagtagcacggcgctggggcattcagaagaacagaccagcaatgaattacgacaaactctctcggagcctccggtactactacgagaaaggaattatgcagaaggtggccggagaaagatacgtgtataagtttgtgtgcgaccctgaggcactcttctctatggcctttcctgacaaccagagacctctgctgaaaactgacatggaacggcatattaatgaggaagatacagtgccactgtcacatttcgatgagtccatggcctacatgccagaaggcggatgttgcaatccacatccttataatgaaggctatgtgtactag

SEQ ID NO: 15048 - DNA, 372 bp, synthetic construct
  misc_feature 1..372: note = Description of Artificial Sequence: Synthetic coding sequence
  source 1..372: mol_type = other DNA
atggatggcttctacgatcaacaggtcccctatatggtaaccaatagccagcgcggtagaaactgtaacgaaaagccgacaaatgtgaggaagagaaagttcattaatcgggacctagcccatgacagtgaagaacttttccaggacctgagccagctgcaggaaacatggctcgccgaggctcaggttccagacaatgatgagcagtttgtcccagactaccaagccgaaagtctggcttttcatgggttgccattaaagattaagaaagaaccacattccccgtgttcggagatttctagcgcatgcagtcaggaacagcccttcaaattcagctacggagagaagtgcctctacaatgtttcagcctag

SEQ ID NO: 15049 - DNA, 1434 bp, synthetic construct
  misc_feature 1..1434: note = Description of Artificial Sequence: Synthetic coding sequence
  source 1..1434: mol_type = other DNA
atggacggtttctacgaccagcaggttccatatatggtaacgaactctcagaggggtcgtaactgcaatgaaaaaccaaccaacgtgcggaaacgcaaatttatcaaccgggatctcgcgcacgatagcgaggagttattccaggacctttcgcagctgcaggaaacctggctggctgaagcccaggtgccagacaatgacgaacagtttgtgcctgattaccaggcagaaagtctggccttccacgggctacctcttaagatcaaaaaggaacctcattctccgtgttccgagatcagttccgcttgctcgcaagagcagcccttcaaattcagctacggcgaaaaatgcttgtacaacgtgtctgcttatgatcagaaacctcaggtcggaatgagacctagcaatcctcccaccccttccagtacacccgtgtctccactccaccatgcttcccccaactctactcacactccgaagcctgatagagcctttccagcccatctacccccaagccagagtatccctgattcctcctatcccatggatcataggttccgtagacagctctccgaaccttgtaactctttccccccattgccaacaatgccacgagagggccgtcctatgtatcagcgccagatgtcagagccgaacatacccttcccccctcagggcttcaagcaggaataccatgatcctgtgtatgagcacaacacgatggttggcagcgcagccagccagagttttccccccccgctcatgattaagcaggagccgcgggactttgcatacgactctgaggtgcctagctgccactcaatctacatgcgccaggagggtttcctcgcacaccctagccgaactgaggggtgcatgtttgagaaaggtcccaggcaattctacgatgacacctgtgtggtcccagagaagttcgacggtgacattaaacaggagcccggtatgtacagggaaggaccgacgtatcagcgcagggggtccctgcaattgtggcagttcctggttgctctccttgacgaccccagcaattcccatttcatcgcctggacagggcgcggcatggagtttaaacttatcgaacctgaggaggtcgccaggcgctggggaattcagaaaaaccggcccgctatgaactacgataagctgagccgttctctgagatactactacgagaagggcatcatgcaaaaggttgccggagagagatatgtctataagtttgtgtgcgatccagaggctctcttttccatggcctttcctgataaccagcggcccctgctgaagactgatatggaacgccacattaacgaagaagacactgtgccgttgtcccatttcgatgagagcatggcttatatgcctgaagggggctgctgcaacccacacccatacaatgaaggctacgtctactag

SEQ ID NO: 15050 - DNA, 288 bp, synthetic construct
  misc_feature 1..288: note = Description of Artificial Sequence: Synthetic coding sequence
  source 1..288: mol_type = other DNA
atggacggcttctacgatcaacaggtgccctacatggtgactaacagccaaagaggaagaaactgtaatgagaaacctactaacgtgcggaagagaaaattcatcaatagggatcttgcccacgactcagaagagctattccaggacctttcccaactgcaggagacatggctcgctgaggcccaagtcccggacaatgacgagcagtttgtgcccgactaccaggccgagtcacttgcttttcacggactgccacttaaaattaagaaagagccccactcaccttag

SEQ ID NO: 15051 - DNA, 63 bp, synthetic construct
  misc_feature 1..63: note = Description of Artificial Sequence: Synthetic coding sequence
  source 1..63: mol_type = other DNA
atggacggtttttacgatcagcaggtgccatacatggtcactaattcacagcggggcaggtag

SEQ ID NO: 15052 - DNA, 1314 bp, synthetic construct
  misc_feature 1..1314: note = Description of Artificial Sequence: Synthetic coding sequence
  source 1..1314: mol_type = other DNA
atgctccaggatctgtcagcttcagtattttttcccccttgctctcaacataggactctagcacaggtacccgataacgacgagcaatttgtcccggattatcaggccgaatccctggctttccatggcttgcccctcaaaatcaagaaggagccccacagcccttgttccgaaatatcttcagcttgctctcaggaacaacctttcaaattctcatatggcgagaaatgtctgtataacgtgtctgcctatgatcagaaaccacaggtgggaatgcggccttccaatccacctactcccagcagcacacctgtgtccccattgcatcatgcttcgccaaactccacacatacacccaagccagacagggcattccccgcacatcttccccctagtcagtcaatcccagattcctcatatcctatggatcacagattcagaagacagctgagcgagccctgcaacagctttccacccctcccaaccatgcctcgagagggccgaccaatgtaccagaggcaaatgtcggagcctaatatccctttccctccacaggggttcaagcaggagtaccacgaccccgtgtacgaacacaatactatggtcggcagcgctgcctcacagagctttccaccgccactgatgataaagcaagaaccccgtgattttgcatacgacagcgaggtgccgtcttgccactctatttatatgaggcaagaaggattcttagcgcatccgagtcggacagagggatgtatgtttgaaaaggggccccgccagttttacgacgacacttgcgttgtccctgagaaattcgatggtgatatcaaacaggagccgggaatgtaccgcgaaggccccacttatcaaaggaggggttcattgcagttgtggcagtttctagtcgccctgctagacgatcctagcaattctcactttatcgcatggaccggcagagggatggagttcaagctaattgaacctgaagaggtcgcccggaggtggggaatccagaagaatagacctgccatgaactatgacaagctctctcgcagtctgagatactattacgagaaggggatcatgcagaaggtggctggggaaaggtacgtgtataagttcgtgtgtgaccccgaggcgctatttagtatggcttttcctgacaatcagagaccacttttaaagacagacatggagaggcatattaacgaggaggatacggtgcccctgtcccatttcgacgaaagcatggcctatatgccagaaggcggctgttgcaatccgcacccgtacaacgaaggatatgtatactag

SEQ ID NO: 15053 - DNA, 1365 bp, synthetic construct
  misc_feature 1..1365: note = Description of Artificial Sequence: Synthetic coding sequence
  source 1..1365: mol_type = other DNA
atggacggattctatgaccagcaggttccttatatggtgaccaactcccagcggggccgcaattgtaatgagaaacccaccaacgtacgcaaacgaaagttcattaacagggatttggcccatgattccgaggagctcttccaggatctgagccagctgcaagagacctggctggccgaggcccaggttccagataatgatgagcagttcgtccccgattatcaggcagaaagcctggcattccacggtctcccgcttaaaatcaagaaggaaccccacagcccgtgttcggaaatctcaagtgcctgttctcaggagcagccctttaagttctcgtatggagagaagtgcctctacaacgttagcgcttatgaccaaaaaccgcaggttggaatgcgccccagtaacccccctactccgtcaagcacgcctgtcagccctctacatcatgcatcaccaaattctactcacactccaaagccagacagggcgtttcctgcacacctccccccttcgcagtctatccccgactcttcctaccctatggatcacaggttcagacggcagctcagtgaaccttgtaactcatttcccccactccctacaatgccacgcgagggtcgtccgatgtaccagagacagatgtcagaacctaatattccatttccaccccaggggttcaaacaagaataccacgaccccgtgtacgaacacaacacaatggttggatctgcggcgagccagtcatttcccccgcccttgatgattaaacaggaaccacgggatttcgcttacgactcagggtgcatgttcgaaaagggcccgaggcagttttacgatgatacgtgtgtcgttccggagaaattcgacggcgatatcaagcaggaaccaggcatgtaccgggaaggtcctacttatcagcggaggggttctcttcaattatggcagttcctggtggcactcctggacgacccgagtaactcacattttatcgcttggaccggacggggaatggaattcaaactgatcgagcctgaggaagtagccagaagatggggtatccagaagaaccgtccagcgatgaactatgacaagttgtcacgatcgcttaggtactactatgagaagggtattatgcaaaaagtggctggcgaaaggtacgtttataagtttgtgtgtgacccagaggctcttttctcaatggcgttccctgataaccagaggccactactgaagacagatatggaaagacacattaatgaagaggatactgtgcctctttcccattttgatgaatccatggcctatatgcccgagggagggtgctgtaatccccacccctacaacgaggggtacgtgtactag

SEQ ID NO: 15054 - DNA, 1455 bp, synthetic construct
  misc_feature 1..1455: note = Description of Artificial Sequence: Synthetic coding sequence
  source 1..1455: mol_type = other DNA
atggagcggaggatgaaagcagggtacttggatcagcaggtgccttacacattctcatctaagtcacccggcaacgggtcattgcgagaagcgctcatcggcccacttggaaaattgatggatcctggaagcctgccccctctggattcagaagacctgttccaggatctgagtcacttccaggagacttggctggctgaagcacaggtaccagacagtgacgaacaatttgtgcctgattttcattcagaaaatctggcatttcactcaccaacaactaggatcaagaaggagcctcagtctcctcggactgaccctgctctgagttgtagtagaaagcctccgctcccctaccatcacggcgagcagtgcctctacagctcggcctacgacccgccgaggcaaattgccatcaagtcacctgcgccgggtgcattgggacagtcgccgctgcagccttttcccagagcagagcagagaaattttctgcgatcttctggcacatcacagccacatcctggccatgggtacctcggggagcatagcagcgtctttcagcagcctcttgacatatgtcactcatttacctcacaaggaggtgggagggaaccattgcccgccccctaccagcatcaactgagtgagccttgccccccttacccacaacagtcttttaaacaagaataccatgatccactgtacgaacaggctggccagcctgccgtagaccaaggaggcgtcaatggccatcggtacccgggtgcaggcgttgtcattaaacaggaacagaccgactttgcctacgactccgatgtcactggatgtgcatctatgtatctccacaccgaggggttttctgggccatcccccggtgacggcgccatggggtatggctacgaaaagcccttacgcccatttccggacgatgtatgtgtcgttcccgagaaatttgagggggacataaaacaggaaggtgtgggtgccttccgagaggggccaccctatcagcgtcggggcgccctgcagctctggcagttccttgtcgccctccttgatgaccccaccaatgcccactttatcgcctggaccgggcggggaatggaattcaagctcatcgaacccgaagaggtggcacggctgtggggaatccagaaaaaccggccagctatgaattatgacaaattgagccggagcctaaggtattactacgaaaaggggataatgcagaaggtagccggggagcgatatgtgtacaagttcgtttgtgagccagaggcccttttctccttagcattccccgacaatcagcgccctgcacttaaggcggaattcgatcgtcccgtcagtgaggaggacaccgtacctctgtcccacttggatgaatcgccagcttatctacccgagctggccgggcccgcgcagccatttggaccaaagggcggatacagctattag

SEQ ID NO: 15055 - DNA, 1455 bp, synthetic construct
  misc_feature 1..1455: note = Description of Artificial Sequence: Synthetic coding sequence
  source 1..1455: mol_type = other DNA
atggagaggagaatgaaagccggatatctcgaccagcaggtcccatacacattcagctccaagagcccagggaatgggtcgttgcgagaagccctgatcggcccgctggggaagctgatggacccaggcagtctccccccactggacagcgaggacctgtttcaggatctatctcatttccaggaaacctggctcgccgaagctcaagtgccggacagtgacgaacagtttgtgcctgatttccacagcgaaaatctggcgttccattcgccaaccacacgaataaagaaggagccgcaaagccctcgcacagatcctgctctgagttgctcaaggaaaccccccctgccctaccaccacggtgagcaatgtctttacagctcagcatacgatccaccaagacaaattgccatcaagtcccctgctccaggcgcgctcggacagtccccactgcagccgttccctcgggcagaacaaaggaactttctcaggtcttctgggacatcacagccacacccaggacatggctatcttggggagcacagcagcgtgtttcagcagcctttggatatatgtcattcctttactagccagggcgggggaagagagcctctaccagccccataccagcatcaactctccgaaccatgtcccccctacccacagcagagtttcaaacaggagtatcacgacccactgtatgagcaggccggtcaaccagccgttgatcaggggggtgtgaacggacaccgatacccaggtgcgggcgttgtgatcaaacaggagcagacagatttcgcgtatgactctgacgtgacggggtgcgcctccatgtatcttcatacagagggcttctcaggcccgtcccctggagatggcgcgatgggatacgggtatgagaaacccttacgtcccttccccgatgatgtgtgcgtcgtgcccgaaaagtttgaaggagacattaaacaggagggcgtgggtgcatttcgagaagggccaccttatcagcggaggggggcgctgcaattatggcaatttctggttgcgctgctggacgacccgactaacgcacactttatcgcttggacaggaaggggaatggaatttaagttaatcgagcctgaggaagtggcccgtctttggggcattcagaaaaatcggccagcgatgaattacgataagctgagcagatcacttcggtactattacgagaagggcatcatgcagaaagttgcaggagaacggtacgtctataagttcgtgtgcgagccagaagccctcttctctctcgctttccccgacaaccagcggcccgctctcaaagctgagttcgacagaccagtatctgaggaggacacagtaccgctgagccacttggatgaaagccccgcttaccttcctgaattagcaggccctgcacagccatttgggcctaaaggcggctactcttattag

SEQ ID NO: 15056 - DNA, 1338 bp, synthetic construct
  misc_feature 1..1338: note = Description of Artificial Sequence: Synthetic coding sequence
  source 1..1338: mol_type = other DNA
atggaccccggatctctaccccccctggatagtgaggatctattccaggatctgagccacttccaggagacctggctggcagaagctcaagtccccgacagtgacgagcagtttgtacccgactttcacagcgagaacttggcgttccattcgcccaccactcgaatcaagaaggagccacaaagccctcgaacggatcccgcactaagctgcagtcgaaagccaccgctgccttaccaccatggtgagcagtgtctgtattcctcagcatacgatcctcctagacagatcgcaattaaaagccccgctcctggtgctttggggcagtcccctttgcagcccttcccacgcgccgaacagcgtaacttcctgcggagttctggcacaagtcagccccaccccgggcacggctaccttggcgagcacagcagcgtgttccagcaaccactggacatttgccattccttcacctcgcagggtgggggaagagaacccctgcctgctccgtaccaacaccaactttctgagccatgtcctccctatccccaacaaagctttaaacaagagtaccacgatccattgtacgagcaagcaggccagccagccgttgatcaaggcggcgtgaatggccaccgctaccccggcgcaggagtcgttatcaaacaggagcagacagactttgcctatgactctgacgtgacggggtgcgcttccatgtacctccacacggagggcttcagtgggccaagccccggtgacggggcaatgggttacggttacgagaaaccactccggccattccctgacgacgtctgtgtcgtacccgagaaattcgagggtgatattaagcaggaaggcgtgggagcttttcgcgaaggccccccataccagcgaaggggcgcgctccaactctggcagttcctcgttgccctcttggatgaccccaccaacgctcatttcatagcctggacaggcagaggcatggaattcaaactgatcgaacctgaagaggtggcacgcttgtggggtattcagaagaacagacccgcaatgaattacgacaaattaagcagatcgctccggtactactatgaaaagggtattatgcagaaagtcgcgggagaacgatatgtgtataagttcgtatgcgagccggaggcacttttttctctcgcctttcctgataatcagcggcccgctctgaaagctgaattcgatagacccgtgagtgaagaggatactgtcccactgtcccaccttgatgaaagcccggcttaccttcctgagctggccggaccggcccaacctttcggtcccaagggagggtatagctactag

SEQ ID NO: 15057 - DNA, 1293 bp, synthetic construct
  misc_feature 1..1293: note = Description of Artificial Sequence: Synthetic coding sequence
  source 1..1293: mol_type = other DNA
atggaacgcagaatgaaggccgggtatcttgatcaacaggtgccatatactttcagttcgaagtctccaggaaacgggtcactacgggaagcgctgatcggccctctggggaaactcatggatccaggtagccttccacccctcgatagtgaggacctcttccaggatttgtcccacttccaagagacgtggcttgctgaagcccaggtaccagacagcgatgagcaatttgttcccgatttccactctgagaacctcgctttccacagcccaacaaccagaatcaaaaaagagcctcagtcaccacgcactgacccagcgctgtcctgtagccgtaagccccctctgccttaccatcatggcgagcagtgcttatacagcagcagcgttttccaacagcccctggacatatgccattcatttacaagtcaggggggcggaagagaacctctccccgccccttaccagcaccaactcagtgagccctgccctccctatccccagcagtcttttaagcaggagtatcacgatcctctgtacgaacaggcaggccagcctgctgtggatcagggtggggtcaacggtcatcggtacccgggagccggcgtggtgattaaacaggaacagacagacttcgcctacgatagcgatgtgaccggttgcgcatctatgtacctgcacaccgagggcttctccggtccctcacctggcgatggggcgatggggtatggctacgagaaacctctgcgacctttccctgacgatgtttgcgtggtacctgagaaattcgagggcgatatcaagcaggaaggagtgggtgcattcagagaaggccctccatatcagcggaggggtgcactgcagctgtggcaatttcttgtggcactcttggatgacccgaccaatgcccacttcatcgcttggaccggacgggggatggaattcaagctaattgagccagaggaggttgctagattatggggtatccagaagaacagaccagctatgaactacgacaagttgtccagaagcttgcgttactattatgaaaaaggtattatgcagaaggtggcaggcgaacggtacgtctacaagttcgtttgtgagcccgaggctctgttctctctggcatttccagacaatcagcgccctgctctgaaggccgagttcgacagaccggtgtcagaggaagatacggtaccgctgagtcatttagatgagtctccagcatatcttcctgaacttgccggacccgcacagccctttggacccaaaggcggttacagctactag

SEQ ID NO: 15058 - DNA, 1338 bp, synthetic construct
  misc_feature 1..1338: note = Description of Artificial Sequence: Synthetic coding sequence
  source 1..1338: mol_type = other DNA
atggacccaggttcactgccccccctggactctgaggacctgtttcaggacctcagccacttccaggagacctggctagcggaggcccaggtgccggatagtgacgagcagttcgttccagatttccattctgaaaatttggctttccattcacccaccacacgcattaagaaggagcctcagagcccccgcacagaccccgccctgtcttgctcacgcaaaccacccctgccttatcatcacggagaacagtgcctatactctagcgcttacgatcccccccggcaaatagctattaaatctcccgcccccggagcactgggccaatcccccctgcagccgtttccacgggccgagcagcggaatttcctgcgcagctctggaaccagtcagccacaccctggccacggctatttgggtgaacattcttctgtgtttcaacaaccactggatatttgccactcattcaccagccagggcgggggacgggaaccgctccccgccccttatcagcaccagctctcagaaccctgtcccccatacccccagcagtcctttaagcaagagtaccatgaccctctctacgagcaggccggacagcctgccgtggatcaaggaggagtgaacggacataggtacccgggggccggcgtcgtaatcaaacaggagcagacagacttcgcttacgactccgatgtgactggctgcgcctccatgtatctccataccgagggattttctggccccagccctggagacggagccatgggttacgggtacgagaagcccctgcgaccatttccagacgatgtatgcgttgttccggaaaagtttgaaggagacatcaaacaggagggcgtgggcgcgttcagagagggacctccttaccagcggcggggcgcgctacagctgtggcagttcttggtggcactgttggatgaccctaccaatgcccattttatcgcctggacaggacgcggcatggagtttaagctcatcgagcctgaagaggtcgctcggttgtggggtatacaaaaaaatcggcccgccatgaattacgataagctgagtcgttctcttcgttactattacgagaagggtattatgcagaaagtcgcaggcgagaggtatgtgtacaagttcgtatgcgaacctgaagcactcttctctttggcctttccagataaccagcggcctgcactgaaggcagagttcgaccgcccagtgagcgaggaagatacagtgccgttatcccacctggacgaatcccccgcctacttgcccgaacttgccgggccagcgcagccgttcggtccaaaaggtggctactcgtattag

SEQ ID NO: 15059 - DNA, 1791 bp, synthetic construct
  misc_feature 1..1791: note = Description of Artificial Sequence: Synthetic coding sequence
  source 1..1791: mol_type = other DNA
atggccggtcggagggtgaatgtgaacgtgggcgtgctcgggcacatcgattctgggaagacagctcttgcgcgagccctgtctacaaccgcctcaacagctgcattcgacaagcaacctcaatcccgagaacgcggaataacgctcgatctgggtttttcctgtttctcagtaccgttgccagcccgactgcgttctagcctcccagaatttcaggctgccccagaagccgaaccagagcctggcgagccattgctacaggtgacattagtggactgtccaggtcacgctagtttgattcgaaccatcatcgggggcgcacagattatcgacctcatgatgctggttattgacgtcacaaagggcatgcagacccagtccgccgagtgcctggtgattgggcagattgcatgtcagaaactggtcgtggtcctgaataaaatcgacctgctgcctgaaggcaagaggcaagcagccatcgacaagatgacaaagaaaatgcagaaaaccttagaaaacaccaaattccgaggcgcccccattatcccggtcgctgcaaaacctgggggccctgaggccccagaaaccgaggctccacagggcatccctgaactgatcgagctcctgacatcccagatcagcatacctaccagagatccaagcgggccatttctcatgtccgtggatcactgtttcagcataaaagggcagggtacagtaatgacaggtacaatcctgagtggctccatatctctgggtgatagcgttgagatccccgcgctgaaagtcgtaaagaaggtcaaatctatgcagatgtttcacatgccaatcaccagtgccatgcagggagacagacttggcatctgtgtcacccaattcgatcccaaactcctggagagagggctcgtgtgtgctccggaaagcctacacacagtccacgccgcgctcatatccgtcgaaaagatcccctactttagggggcccctacagaccaaagcgaagttccatattactgtgggccatgagacggtcatggggcggctgatgttcttttccccagcacccgataacttcgaccaggaacccatcttagactcttttaactttagtcaggagtaccttttccaggagcagtacctatccaaagatttaacgcccgccgtcaccgataacgacgaggctgacaagaaggccggtcaggcgactgaagggcactgtcctagacagcaatgggcattagtagagttcgaaaaaccagtgacatgtcctagactgtgtctggtgattggtagcaggctggatgccgacatccacactaacacgtgtcgcctagcctttcacgggatcttgcttcacggattggaagataggaactatgcagacagctttctacctcgactgaaagtgtacaagctaaagcataagcacgggctggtagaacgtgccatggatgattattccgtgattggtagaagcttatttaagaaagagacgaacatacaactgtttgtcggccttaaggtgcacctgtcaaccggggagctggggatcattgacagcgccttcggacagtctggtaaatttaaaatccacatcccaggcgggctgtctcccgaatccaaaaaaatattaacgcctgcgctaaagaagcgggctcgagccggtcggggggaagctaccaggcaggaggaatcagcagaacgaagcgagccttcacagcacgtagtccttagtttgacattcaagaggtacgtgttcgatacccacaaacgaatggtgcagtcaccatag

SEQ ID NO: 15060 - DNA, 1233 bp, synthetic construct
  misc_feature 1..1233: note = Description of Artificial Sequence: Synthetic coding sequence
  source 1..1233: mol_type = other DNA
atggctgccgaaattcactcaagacctcagtcttctcgtcctgtgttgctgtcaaagattgaagggcatcaagatgccgttaccgctgctcttttgattcccaaagaagatggggtgattacagcaagcgaagatcggactatccgagtctggctaaagagagacagcggtcagtactggccatccatttaccacaccatggccagcccctgtagcgctatggcctatcaccacgacagtcgtcgaatttttgtgggccaggataatggggcagtgatggaatttcacgtttcggaagatttcaataagatgaattttattaaaacttacccagcacatcagaacagagtaagcgccatcatcttctcgctcgcgacagaatgggtcatcagcaccggacacgacaaatgcgtgtcttggatgtgtacacgcagtgggaatatgttaggccggcacttcttcacctcatgggcgtcatgcctgcaatatgactttgacacccagtatgctttcgtcggcgattatagcgggcagatcacgctgttgaaactggagcaaaacacatgctctgttattacgacactcaaagggcatgaagggagcgtggcgtgtctctggtgggaccccatccagagactgcttttttccggagcctccgataatagcatcatcatgtgggacattggcggaaggaagggtcgtacactactattgcagggccaccacgataaagtgcagtcattatgctacttgcagctgacccgtcagcttgtgtcctgttccagcgacggagggatcgctgtctggaacatggatgtgtcccgggaggaggccccacagtggctggagtccgactcttgtcaaaaatgcgagcagccctttttctggaatattaaacaaatgtgggatacaaaaacgttggggctgcgccagcaccattgccgcaagtgtggccaggccgtatgtggtaagtgttcctcaaagcgaagttcttaccccgtgatgggcttcgaattccaagttagggtatgcgattcttgttacgattccattaaggatgaggaccgcacgtcattggcaaccttccacgaaggaaagcacaacatatcacacatgtctatggacatcgcccgcggcctgatggtgacctgtggcacagaccgcatcgtgaaaatctgggatatgactcctgtagttgggtgtagcctggcaaccgggtttagtccacattag

SEQ ID NO: 15061 - DNA, 1092 bp, synthetic construct
  misc_feature 1..1092: note = Description of Artificial Sequence: Synthetic coding sequence
  source 1..1092: mol_type = other DNA
atggctggcgacttgtccgccggtttctttatggaggagctcaacacctaccgccagaagcagggcgtcgtattaaagtaccaggaactcccgaatagcgggccacctcacgatcgcaggtttaccttccaagtcataatcgatggacgcgagtttccagagggcgaagggcggagcaaaaaagaagctaaaaacgccgccgcaaaattagccgtcgaaatcctgaacaaagagaagaaggctgtttcccccctgctactcacaactaccaacagttcggagggtcttagtatgggaaactacattggcttgatcaaccggattgcccagaaaaaaaggctgactgtgaattatgagcagtgcgccagtggcgtgcacggaccggaaggatttcattacaaatgcaagatggggcagaaggagtactccatcgggacaggctcaactaagcaggaagcaaagcagctggccgcaaagttagcttatcttcagatcctgagcgaggagacgtctgttaagagcgactatctgagctctgggtctttcgctaccacatgtgagtcgcagtccaactctttagttacctcaacgttagccagtgagtcatcctcagagggggattttagtgccgacactagcgagattaacagtaacagtgacagcctgaactctagctcactgctcatgaatggtttacgaaataatcagcgtaaggctaaacgctcgctagctcccaggttcgacttaccggatatgaaagagactaagtacaccgtggacaaacgctttggtatggattttaaagagatagagttgattgggtccgggggatttgggcaggtgttcaaagccaagcatcggatcgacggaaagacttatgtgattaagcgggtgaagtacaacaatgagagtaagactaaatgtctgtttatccagatggagttttgtgacaaggggacactcgagcagtggattgagaagaggcgcggtgagaagctcgacaaggtgctggctctggaactgtttgagcagatcactaagggagtcgattacatccacagcaagaagaaaaaaaagaaaaaaaaaaaatag

SEQ ID NO: 15062 - DNA, 309 bp, synthetic construct
  misc_feature 1..309: note = Description of Artificial Sequence: Synthetic coding sequence
  source 1..309: mol_type = other DNA
atggctggcgacctttccgccggattcttcatggaggaacttaatacttaccggcaaaaacagggcgtggttttgaaatatcaggagctgcctaactccgggccaccccacgaccgacgcttcacttttcaagtgatcattgacgggcgagagtttccagagggcgaggggcgctccaagaaggaagcaaagaacgccgccgccaaactggccgtagaaatccttaataaagagaaaaaagctgtttctcctctgctgctaaccactacgaatagctcagagggcttgagcatgggcaattatatttag

SEQ ID NO: 15063 - DNA, 1656 bp, synthetic construct
  misc_feature 1..1656: note = Description of Artificial Sequence: Synthetic coding sequence
  source 1..1656: mol_type = other DNA
atggccggagacctgtccgccgggtttttcatggaggaactgaatacttaccggcagaaacagggagtggtcttaaaatatcaggagctacctaactccggccccccacatgacagacgctttacctttcaagttattattgatgggcgagagttccctgaaggagaaggaaggtctaaaaaagaagccaagaacgctgctgcaaaattagccgtagaaattctcaacaaggaaaaaaaagcagtgtcccctcttctgctgaccaccactaattcctctgaaggactatccatggggaactatattggccttattaacagaattgcccaaaagaaacgcctgacggtgaactatgaacagtgcgcatcaggtgtgcacgggcccgagggattccactacaaatgcaagatgggtcagaaggaatacagtataggcaccgggtctaccaagcaggaagccaagcaactcgctgcgaaactggcatacctgcagatactcagcgaggagacatcagtgaagagcgattacctgtctagtggaagttttgcgactacctgcgagtctcaaagcaactcacttgttacttcgacactggctagtgagtcctccagtgagggggacttctcagcggacacgtcagaaattaactccaactcagacagcctgaacagcagctctcttttgatgaacggcctgcgcaataaccagcgaaaagccaagcgaagtttggcaccccgctttgacctcccggacatgaaggaaacaaagtacactgtggacaagcgatttgggatggacttcaaggagatagagctcattggctcaggcggcttcggacaggtgtttaaagccaagcacagaatcgacggaaaaacatacgtgatcaagcgcgtgaagtataataacgagaaagctgagcgcgaggtgaaggcactcgccaagctcgatcacgtcaacattgtccattacaatggttgctgggacggatttgactacgacccagagacatccgatgattccctcgaaagttccgactacgaccccgaaaactccaaaaattcaagtcgcagcaagaccaagtgtctgtttatccagatggaattttgtgacaaaggcacacttgaacagtggatagagaagaggcgcggggaaaagctcgacaaagttctcgctctcgagctcttcgagcagattacaaagggcgtcgactatatacactccaagaagcttatccacagggatttaaaacctagtaatatcttcctggtcgacacgaagcaagtgaagataggagactttggactggtgacctcactgaaaaatgatggcaagcgaacccgaagcaagggaacactgcgctatatgagccctgagcagattagctcccaagattatggcaaagaggtagatctgtacgccctgggcctcatactcgcagagctgctgcatgtctgcgataccgctttcgagaccagtaagttttttacagaccttagagacggaatcattagtgacatctttgacaaaaaagagaagactctgctccagaagctcctatcaaagaaaccagaagaccggcctaacactagcgagattctgagaactctcaccgtgtggaaaaagtctccagagaagaacgagcggcacacatgctag

SEQ ID NO: 15064 - DNA, 351 bp, synthetic construct
  misc_feature 1..351: note = Description of Artificial Sequence: Synthetic coding sequence
  source 1..351: mol_type = other DNA
atggcaggcgacttgagtgcaggattttttatggaggagctcaatacctatcgtcaaaagcagggcgtggtcctcaagtaccaggagttacctaattcaggtcccccccatgacagacgtttcaccttccaggtcattatcgatgggcgcgaatttcccgaaggcgagggtagatcaaaaaaggaggctaaaaatgcagcagccaagttggctgtagaaatactcaataaggaaaagaaggccgtttctcccttactgttgacaactaccaactctagcgagggcctgtccatggggaattacattgggcttattaacagaatcgctcaaaaaaagcgtttgaccgtttag

SEQ ID NO: 15065 - DNA, 1533 bp, synthetic construct
  misc_feature 1..1533: note = Description of Artificial Sequence: Synthetic coding sequence
  source 1..1533: mol_type = other DNA
atggcgggtgatcttagcgccgggtttttcatggaagagttaaacacgtacagacagaagcagggcgtcgttctgaagtatcaggagttgccaaatagcggaccaccacacgatcggaggttcacctttcaggtcattatcgatggccgcgaatttccggaaggggaggggaggtcaaaaaaagaggctaagaacgcagccgccaagctggcagtggagattctaaacaaggaaaagaaggctgtgtccccgctgctcctgacgacaacaaatagttccgagggcttgagcatgggcaattatattgggctgatcaaccgcatagcccaaaaaaagagactgacagtgaactacgaacagtgtgctagtggggtacatggcccagaagggtttcactacaaatgcaagatgggtcagaaggagtattccattggcacaggttcaaccaaacaggaggctaaacagctcgcagctaaactggcctatctgcaaatcctgtccgaagaaacctctgtgaaaagtgactatctgtcgtcaggcagcttcgctacaacttgtgaatctcagtctaattctctggtgacgtctactctggcttcagagagtagcagcgaaggggacttttccgctgacacttcggaaattaatagcaattccgatagccttaactcatccagcctgttgatgaatggcctaaggaataaccagcgaaaagctaagcggagcctggctcccagatttgatctgccagacatgaaggagactaaatatactgtggataaaaggaaagccgagcgcgaagtaaaagctctcgcgaagctggaccacgtcaacattgtacactacaacgggtgttgggacggattcgactacgaccccgaaacaagcgatgacagtctggaatcctcagactatgaccccgagaactccaagaacagcagcaggtccaagacaaaatgtctgttcatacagatggagttctgtgataaaggaacgctggaacaatggatcgagaagcgccgcggcgaaaaactggataaggtcctggcactggagttgttcgagcagatcactaagggggttgactatattcatagcaagaaactgatccacagggacctgaagccttccaacatctttctcgtcgacactaagcaggttaaaatcggagatttcggtctcgttacaagtctgaaaaacgatggtaaaagaacaaggtctaaaggtactctgcgctacatgtcaccagaacagatatcttctcaggactacggtaaggaggttgatctgtacgcactggggttaatcctcgcagagctgctgcatgtgtgtgacaccgccttcgagactagcaagttttttactgatctccgagacggaatcataagcgatatcttcgataagaaagagaagacactgctgcagaaattactgagtaagaaaccagaagacaggcccaacacttctgagatcctgagaactctgaccgtgtggaagaagagccccgagaagaacgaaaggcacacttgttag

SEQ ID NO: 15066 - DNA, 4800 bp, synthetic construct
  misc_feature 1..4800: note = Description of Artificial Sequence: Synthetic coding sequence
  source 1..4800: mol_type = other DNA
atgaacaaggcaccacagtctaccggccccccaccggccccgtctcccgggctgccacaaccggccttcccccccggacagacagccccagtggtgttttctacaccccaggcgactcagatgaacacacctagtcagccgagacagcatttttaccctagtagagctcagccgccctcctccgccgctagccgggtgcagtcagccgctccggctaggcctggcccggcagcgcatgtgtacccagctggatctcaggtgatgatgatcccatcacagatcagctaccccgccagccagggggcctactacataccaggccagggaaggtcaacatatgtcgtgcccacccagcagtacccagtccagccaggcgctcccggattttaccctggcgcttcccccacggaatttggaacatacgctggtgcctactaccccgctcagggcgtacagcagtttcctaccggagtcgctcctaccccagtgcttatgaatcaacctcctcaaatcgctccaaaacgcgaaaggaaaacaattaggatcagggacccgaatcagggcggcaaggacatcacagaggaaattatgtcgggcgcaagaacagcttcaacgcctacccccccacagacaggtggtgggctggaacctcaggcaaacggtgagacaccacaggtggccgtcatcgttcgccccgatgatcgatctcagggagccatcatcgcggacagacctggcctccccggaccggagcactctccctctgaatcacagccctcctcgccaagtccaaccccttctccaagtcccgtgctggagccaggcagcgaacctaatttggccgtgctcagcattcccggcgataccatgactacgatccagatgtctgtggaagaatctacccctatttcccgggagaccggcgagccttatcgactgagccccgagccgacacctctggctgaacccatccttgaggttgaggttacgttgagcaagcctgtgcccgagtctgaatttagcagtagccctctgcaggctcctaccccgctggccagtcatactgtcgagatccatgagcccaatggtatggttccatccgaggacctggagccagaggtcgaaagcagccctgaactggcacccccaccggcgtgccctagcgaatccccagtgcctattgctcccactgcgcaaccagaggaactgttaaatggcgctccgagcccaccagccgtggatctaagcccagtcagcgagccagaagagcaggcaaaagaagtcactgcgtctatggcaccacccaccataccttccgctaccccagccacagcaccttccgccacttctccagcgcaggaagaagaaatggaggaggaagaagaggaggaagagggagaggctggcgaagcgggcgaggccgagagcgaaaaaggcggagaggaactgctgccaccggaatctacaccaattcccgctaatttaagccagaacctggaggctgctgcagccacacaggtggctgtctctgtccccaaaaggagacgcaaaattaaagagctgaacaagaaggaagccgtcggcgaccttcttgatgcgttcaaggaggcaaatcctgcagtgcctgaagtcgaaaatcagccacccgctggttctaacccggggcctgagagcgagggatctggggtacccccacgaccagaagaagccgatgaaacgtgggattccaaggaagacaaaattcataacgctgagaacatccagccaggggagcagaagtacgagtacaagtctgatcaatggaagccgctgaacttggaagaaaaaaagaggtatgatagggaattcttattaggctttcagttcatcttcgcttctatgcaaaagcctgagggactgccccacattagcgacgtagtgcttgacaaagctaacaaaacccccctcaggccactagaccctactcgcttgcagggcataaattgcgggcctgatttcaccccctcttttgccaatctggggagaacaactctaagtacccgcggcccacctagaggtggccctggcggggaactgccccgggggccggcgggactaggaccacggaggtcacagcagggacccagaaaagagccccggaagatcatcgcaaccgtgctcatgaccgaggatattaaattgaataaagccgaaaaggcctggaagccatcaagcaaacgcactgccgcagataaggatcggggcgaggaagacgctgacggatccaagacgcaagacttgtttaggagggtgcgctctattctcaacaagttgactcctcaaatgtttcaacaactgatgaagcaagtcactcagcttgctattgatactgaggagcgcctaaagggcgtcattgatttgatttttgagaaagcaatttccgagccaaactttagcgtggcctatgccaacatgtgccgctgtcttatggccctgaaggtgcccaccacggaaaagcctacagtgacggtgaattttcgcaaactcctgctcaaccggtgtcagaaggaatttgagaaggataaggacgacgacgaagttttcgaaaaaaagcagaaggagatggatgaggcggcgactgccgaggaacgcggcagactgaaggaggagctggaggaagcacgggatatcgccagacggaggtctcttggaaacatcaagtttattggggagttgttcaaactgaagatgctcaccgaagctattatgcacgattgtgtcgtgaagctgcttaaaaaccacgatgaagaatctctcgaatgtttgtgcaggctcctgaccactattgggaaggatctagacttcgagaaggccaagcctagaatggatcagtatttcaaccagatggaaaaaattattaaggaaaagaagactagtagcaggattcggtttatgctgcaggatgtgttggatctccgggggtctaattgggttccgaggcgcggagatcagggccctaaaacaattgaccagatccataaagaagccgagatggaggagcacagagagcacattaaagttcaacagctaatggctaagggtagtgataaaagaagaggaggaccacccggccccccaatatccagaggattgcccctggtggatgatggaggttggaacaccgtgcctatctccaaaggctctagaccaattgacactagtcggctaactaaaataaccaaacccggctcaatcgactcaaataaccaattgttcgctcccggtggccgcctttcatggggtaaaggatccagcggagggtctggggcaaaaccttctgacgccgccagcgaagctgcgcggccagccacatccaccctcaaccggttcagcgctcttcagcaagctgttcccactgaaagcactgataatcgtagagtggtccagcgcagttcactgagccgcgagaggggagagaaagccggcgacaggggcgatcgcctcgagagatctgaacggggcggcgaccgaggggatcggcttgatagagcccgaaccccagccacaaagagatctttcagtaaagaagtggaggaaagaagccgtgagcgcccttcccagccagaagggcttcgcaaggctgcttccctgaccgaggaccgggaccggggcagagacgctgtgaaacgagaggccgcactgccaccagttagccccctgaaggcagcgctctccgaggaggagctggagaaaaagtcaaaggccattattgaggagtacctgcatttaaatgatatgaaggaggccgtgcagtgtgtccaggagctcgcttcccctagccttttatttatttttgtgcgacacggcgtcgagtctaccctagagcggtctgcgatcgcaagagaacatatgggccagctgctacaccagctactgtgtgccgggcacctgtcgactgcacaatattaccaggggctgtatgaaatcctcgaactggcagaagatatggagattgatataccacatgtgtggttgtacctggccgagctggtgaccccaatattacaggaaggaggtgtccctatgggagagctgtttagagaaattacaaagcctctacgccctctgggaaaggcagctagcctcctgctggaaattctcggactgctgtgcaagtcaatggggcccaaaaaggtcgggaccctgtggcgcgaggcgggcctgtcttggaaggaatttctgcccgagggccaggacatcggagcgttcgtagccgaacaaaaagtggaatacactctcggggaagaaagcgaagctcctgggcagagagcacttccttctgaagagctgaatcgccagttagagaagctgctaaaagaagggtcatcaaatcagagggtgttcgactggatcgaggcgaacctgagcgagcagcagatcgtcagcaacacactggtccgcgctctgatgaccgcagtatgctactcggccatcatcttcgaaaccccactgagggtggacgtagctgtgctgaaagcgcgagctaaactgctgcagaaatatctgtgcgacgagcagaaagaacttcaggccctctacgcgctgcaggcactggtcgtcactttggaacagcctccgaacctcctgcggatgttttttgacgccctgtacgacgaggacgtggtcaaagaagatgcattttacagttgggagagctcaaaggacccggcggaacaacaggggaagggagtggcactgaaaagcgtgacagccttcttcaagtggctgcgggaagcagaagaggagagtgatcacaactag

SEQ ID NO: 15067 - DNA, 4803 bp, synthetic construct
  misc_feature 1..4803: note = Description of Artificial Sequence: Synthetic coding sequence
  source 1..4803: mol_type = other DNA
atgaataaggccccccagtctactggtccacctcctgccccatcacccggcctgccacagcctgcctttcctcctgggcagaccgctccggtagttttcagtacacctcaggctacacagatgaacactcctagtcagcccaggcagcacttctacccctccagggcccagcccccaagtagcgcagccagtcgcgtgcaatcggcagcccccgcgagaccaggtccggccgcccacgtgtatccagccggctctcaggtcatgatgatcccttcacagatctcttacccagcaagccagggagcatactatatccctggacaagggcgtagtacttatgtcgtgcccacgcagcagtatcccgttcaacccggagcaccaggattttatcctggcgcgtcccctaccgagtttgggacttatgctggtgcatactacccggctcagggggttcagcaatttcctacaggtgtggcccccacccccgtgcttatgaaccaacctccacagatcgcaccaaagcgagagcgaaagaccattaggatacgggaccctaatcagggtgggaaagatattactgaggagatcatgagcggtgccaggactgcttccacgcctactcctccacagactggaggtggattggagcctcaagccaacggcgagaccccccaggttgcagtgattgtccggcctgatgatagatcccaaggcgccataattgccgaccgaccagggctccctggccctgaacacagcccgtcagagtctcaaccaagttccccatctcctactccctctccatcacctgtgcttgagcctggttcagaacctaatctagccgtgctgagtataccaggggacaccatgacaaccatacagatgtctgtagaggaaagcacacccatcagccgggagaccggtgaaccgtaccggctcagccctgaacctacccctctggccgagccaattctggaggttgaagtgacactgtcaaaacctgtccctgagtcagaattctcttcttcacccctacaggcgccaacaccgttagcaagccacacagttgagattcacgagccaaatggtatggttcccagtgaggacttagaaccagaagtcgaaagcagtcccgaacttgctcccccccccgcctgcccgtcggagagcccagttcctatcgcaccaacggcacagcccgaagaactgctgaacggcgcgccctcccctccagcggttgatttgagcccagtttctgagccggaggagcaagctaaagaggtgactgccagcatggctcctcccactataccaagcgccacccctgccacggccccaagtgccactagccccgctcaagaggaagaaatggaagaggaagaagaggaagaggagggcgaggctggcgaggcaggtgaagcagaaagtgagaagggcggggaagaattgcttccacccgaaagtacccctatccccgctaacctatcgcagaatctcgaggctgctgccgccacgcaagtggcagtctccgtgcctaagaggcggaggaaaattaaagaactgaacaagaaggaggccgtgggtgatctgttagacgccttcaaggaagctaatccagccgtccctgaagtggagaaccagcctccggccgggtcgaaccccggaccagaaagcgagggcagcggtgtcccacccagacccgaagaagctgacgagacatgggattccaaagaggataagatacataatgccgagaacatccaacctggggaacagaaatatgagtataagtcagaccagtggaaaccattaaatctggaggagaagaaaaggtacgatagagaattcctgctgggcttccagttcatatttgcaagtatgcaaaagcccgagggactccctcatattagtgatgtagtcttagataaagctaataaaacgccccttcggcctctggacccaacccgcctgcagggcatcaattgtggtcccgatttcactcctagttttgcaaatcttggaagaaccactctgagcactagaggtcccccgaggggcggccccggcggcgagcttccccgcggccctcaagcaggcttgggccccaggagatcccaacaggggccccgtaaggagccacgcaagataatcgctacggtattgatgaccgaggatatcaagctcaacaaggctgaaaaggcatggaaaccatcaagtaaacgaaccgccgcagataaagatcggggagaagaggacgctgatgggagcaagacgcaggatctgttccggcgcgtcaggtccattctgaacaagctaaccccccagatgttccagcagctgatgaaacaggtgactcagttagctatcgacacagaagaacgtctgaagggagtgatcgatttaattttcgaaaaagccatcagtgaaccgaacttcagtgttgcctacgccaatatgtgccgctgcttgatggcacttaaagtccctacaacagagaagcccaccgttaccgtgaattttcgcaaactgcttctgaacagatgtcagaaagagtttgagaaagataaagacgacgacgaggtgtttgaaaagaaacagaaagagatggacgaggccgctaccgccgaggagaggggaagactgaaagaagaactcgaagaagctagggacattgctcgcaggagatccctaggaaacatcaagttcataggcgagctctttaaactgaaaatgctgaccgaagcaattatgcatgactgtgtggttaagttgctcaaaaaccatgatgaggaatcactggagtgcttatgtcgccttctcactactatcggtaaggatttagattttgagaaagccaagcctaggatggaccagtacttcaatcaaatggagaagataataaaggaaaagaagactagcagccggataaggttcatgcttcaggacgtactggacctgcgggggtctaactgggtacccaggagaggcgaccagggacccaagacgatcgaccagatccataaggaggcagagatggaggaacaccgcgagcacatcaaagtgcagcagttgatggccaagggatccgacaagcggcgtggcggcccgcccgggccgcccatttcaagaggactcccccttgttgacgacggaggatggaacaccgttccgatttccaaaggtagcaggcccatcgatacctcaaggctaaccaagattactaaaccaggatccattgattccaataaccaactgttcgcaccaggcggcagattaagctggggtaaggggagctccgggggaagtggagccaaaccctctgacgccgcctcagaggctgcaaggcctgccacctcaactctgaataggttcagtgcactgcagcaggctgtgcccaccgagtcaactgacaaccgccgtgtggtacaacgtagtagcctctctcgcgagcggggggaaaaggcaggagacagaggagaccgactcgagcggagcgaaagaggtggggaccggggggaccggctagatcgagcgcgcacaccagcgacaaagcggtccttctctaaggaggtcgaagaaagaagcagggagcggccatcacagcctgaaggtctgagaaaggcagcctctcttactgaggaccgggatcggggacgcgatgccgtgaagagggaagcagcgctgcctccagtgtctcccctcaaagccgccctctctgaagaagaactcgaaaaaaagagcaaagcaatcatagaggaatatctgcatctgaatgacatgaaagaagccgttcagtgcgtccaggagctcgcctccccctccctgctcttcatttttgttcggcatggggttgagagtaccttggaaaggtccgcaatcgccagagagcatatgggacaactgctccaccagctactctgtgctggccacctcagcaccgcccagtattatcaagggctgtacgaaatcttggagctcgccgaagatatggaaattgatattccccatgtttggctctatctggctgagctagtaactcccatcctccaggaggggggggtccccatgggggagctctttcgagagattacgaaaccacttcggccattaggtaaagcagcaagtcttctacttgaaatattgggcctgctttgcaaatccatggggccaaagaaggtgggtacactctggcgggaagccggactcagttggaaggagttcctcccagaagggcaggacattggggcgtttgtagcagaacagaaggttgagtataccttgggggaggaatccgaggcacccggccagagggccctcccgtctgaggagctcaatcgtcaattagagaagttactcaaggagggctctagcaaccagcgagttttcgactggatagaggcaaacctttctgagcagcagattgtcagtaacacactagttcgggctctgatgacagctgtgtgctacagtgccatcatttttgagactccgttacgcgtggacgtggctgtgctgaaggcacgagccaagttgctgcagaagtacttgtgtgatgaacaaaaagaactgcaggcactgtacgccctccaggcgctggtggtgactctggagcagcctccgaacttattgcgcatgttcttcgacgctctttatgatgaggacgtggttaaagaagatgcgttttatagctgggaatccagcaaggatcccgccgagcagcaagggaagggagtggctctgaagagtgtgacagcgttcttcaagtggctgagggaggccgaggaggagagtgatcataattag

SEQ ID NO: 15068 - DNA, 4800 bp, synthetic construct
  misc_feature 1..4800: note = Description of Artificial Sequence: Synthetic coding sequence
  source 1..4800: mol_type = other DNA
atgaacaaggctcctcagtctaccggcccgcctcccgccccttcacctgggttgccgcagcctgcattcccccccggccagacggcccccgtagtgttttccaccccccaggcaacccagatgaacactccatcacagccacggcagcacttctacccctcacgggcccagcctcccagctctgccgcttcacgtgtacaatctgctgcacccgcacgtccagggcccgcggcacacgtctacccggcagggagccaggtgatgatgattccctctcagatctcataccccgccagccaaggtgcctactacataccagggcagggaagatctacctacgtcgtgcctacacagcagtaccccgtacagcccggtgcccccggattttaccctggggcaagtccgacggaattcggtacttacgctggcgcctattatccggctcaaggcgtgcagcagtttcccaccggcgtagcaccaactcccgtactcatgaaccagcctccccaaatcgcccctaagcgtgagcgcaagacaatcaggatcagagacccaaatcagggcgggaaggacataacagaggaaattatgagtggcgcaaggaccgccagcacccctacacctccacaaacaggaggtggcctggagccccaagccaacggtgaaacaccgcaggtggcagtaattgttcgcccagacgacaggagccagggagctatcattgctgaccggcccgggctgcctgggccagagcacagtccatccgagtcccagccatcctcgccttcaccaactccaagcccgagccccgtgttggagcctggcagcgaacctaacctagccgttctaagcatcccaggcgacacaatgaccactatacagatgtctgttgaagaatccactcccatttctagggagacaggcgagccataccgtctatctcccgaacctactcccctggccgaacccattctcgaggtggaggtgaccctctctaagccagtcccagagtccgagtttagcagcagtcctctacaggcacccaccccacttgccagccacacggttgaaatccatgaacccaatgggatggtgccttcagaagatctggagccggaagtggagtcaagtccggaactggccccaccaccggcttgtccttccgaatctccagttcccatagcccctacggcccagccagaggagctgcttaatggtgccccgtctccacctgcggtggaccttagccctgtctcagagccggaagaacaagcaaaggaggtaaccgcctccatggcgccacctactatcccctccgccacaccagctacagcgccctcagccacctccccagctcaagaagaagagatggaggaagaggaggaagaggaagaaggcgaggccggagaggcaggcgaagccgagtccgagaaagggggagaagagctgctccctccagagagcacacctatccccgcaaaccttagccagaatctggaggctgcggccgctacgcaagttgccgtgtcggtgccaaaaaggaggcgcaagatcaaagagctgaacaaaaaagaagcggtcggtgatctgctggacgctttcaaagaggcgaatccagccgttcctgaagttgaaaatcaaccccctgccggatctaatccagggccagagtctgaggggagcggcgtgccacccaggccggaagaggccgacgagacatgggattccaaagaggacaagatacacaacgccgagaacattcaaccgggcgaacaaaaatacgaatacaagagcgatcagtggaaaccgcttaacctggaggaaaaaaaaagatacgacagagaatttttacttggattccaatttatctttgcctctatgcagaaaccagaagggctgcctcatatctctgatgtagtgctagacaaggccaataagacaccactgaggcccctggaccctacccgactgcaggggatcaactgtggcccagatttcaccccctcatttgctaacctgggaagaaccacactgtcgactcggggcccccctcgcggtggcccagggggtgagctgccccgcggtcctgccggtttgggcccacgaaggtctcagcagggacccaggaaagagccaagaaaaattattgccaccgtccttatgacggaggatatcaaactgaataaggccgaaaaggcctggaagccatcgagtaagcgcacggccgctgacaaagaccgcggtgaggaggacgcagacggctctaaaacccaggatctctttcgacgcgtacgctctatcctcaacaagttgactccccagatgttccagcagctgatgaaacaggtaactcagctggcaattgacactgaggagcggctaaaaggggtcatcgacttgatatttgagaaggccatcagcgagcctaacttctccgtggcttacgcaaacatgtgtcgctgtttgatggcgcttaaagtgccaaccactgagaaacctaccgtaacagtgaacttcaggaaattactgctgaataggtgccaaaaggagttcgaaaaggataaggacgatgatgaggtctttgagaagaagcagaaagagatggatgaggcagcaacagcagaggagcgaggcagactcaaagaagaacttgaggaagctagggatatcgcacggaggagatcccttggtaatatcaaattcattggcgagctctttaagctaaagatgcttacggaggccattatgcatgactgtgttgtcaagttgctgaagaatcacgatgaagagtccctagaatgcttatgcagactccttaccacaatcggtaaggacctcgactttgagaaggccaaaccgagaatggaccaatacttcaaccagatggagaagatcatcaaagagaaaaaaacctcttctaggattcgatttatgctccaggatgttttagatttaaggggctccaattgggtcccaaggcgcggggaccaagggccaaagaccattgaccagatccataaggaggccgagatggaggagcaccgcgagcatattaaggttcaacagctcatggcgaaaggtagtgataagcgacgcggaggcccgccaggcccacccattagcagaggccttcctctcgtggacgatggcgggtggaacacggttccgatctcaaagggttctagacccatcgataccagcaggttgactaagattaccaagccaggctccatcgactcgaataaccaactctttgcgcccggcgggcggctctcatggggaaaaggcagcagtggtggctccggggccaaaccatctgatgccgctagtgaagcggcccggccggcaacatcaaccctgaatcgcttttcagctctacagcaggccgtgcctaccgaaagcaccgacaatcgtcgcgtggtccaaaggtcttccctgagtagggaaagaggcgagaaggccggagataggggagacagactcgagcgatcagagaggggtggcgacaggggggatagactggacagggcacgaacaccagccaccaaacgcagtttttccaaggaggttgaggaacgttcacgcgaacgcccaagccagcctgaggggcttcggaaagccgcatcccttactgaagatagggatcgcgggagggacgcggttaagagggaggcggcgttgccaccagttagccctctcaaagccgctctctctgaggaagagctcgaaaagaagtccaaagctattatagaagaatatctgcatctcaacgacatgaaggaagccgtgcagtgcgtgcaggagctggcaagccctagtttgctctttattttcgtgcggcacggggtggagagtacacttgagcgcagcgccattgccagagaacacatgggacagctgctccaccagctgctctgcgccggacatctctccacggcacagtactatcaggggctgtatgagatcctggaactggctgaggacatggaaatcgatattccccacgtttggctgtacctcgcagagctagtgacccctatactgcaggaggggggggtgcccatgggcgagctgtttcgggaaatcacaaaacctctgagacccttgggcaaagcagcctctttgttattggaaattttgggtctgctgtgtaagtctatgggaccaaagaaggttgggactctgtggcgcgaggccggtctaagctggaaagagtttcttcctgagggtcaggacattggggcattcgttgccgaacagaaggttgaatacacactgggcgaggagtctgaggcacccgggcaacgggctttaccctcagaggaactgaatcggcaacttgagaaactactcaaggagggttcctccaaccagagggtctttgattggatcgaggcgaatcttagcgaacagcagattgtcagcaatactcttgtacgagcccttatgaccgcagtttgttactccgcaattattttcgaaacacctttaagggtggatgtagctgtgctgaaagccagggctaaactgctccagaaatatctctgcgatgagcagaaggagctccaggctttatatgcactccaggcgctcgtcgtgaccctcgagcagccgccaaaccttttacggatgttttttgacgccctgtacgacgaggatgtggtgaaagaagatgcattctactcatgggagagcagcaaagatcccgccgaacagcagggtaagggggtggctctgaagtccgtgaccgccttcttcaagtggttgcgtgaagcagaggaggagagcgaccacaactag

SEQ ID NO: 15069 - DNA, 4308 bp, synthetic construct
  misc_feature 1..4308: note = Description of Artificial Sequence: Synthetic coding sequence
  source 1..4308: mol_type = other DNA
atgaaccagccaccacagatcgcccccaaaagagaaagaaaaacaatccggatcagagacccaaatcagggcggaaaagatattacagaggagatcatgagcggtgctaggactgccagcacacccacccctccacagactggcggtggccttgaaccgcaggctaatggggaaacgcctcaggtcgcggtgattgtgaggcctgacgacagatctcagggagcaattatcgcagaccgcccgggcctgcccgggccagagcacagcccctctgagtcacagccttcaagtccatcaccaaccccatctccaagccctgtgttagagcccggctctgaaccgaatctcgctgtcttatccatccccggcgatacaatgaccaccatacagatgtccgtcgaggagtcgactcctatctcacgtgagacgggagaaccctaccggttgtctcctgagccaaccccactcgcagaacccatcctggaggtggaggtgacactctctaaacctgtccccgagtctgaattcagttcgtctccactacaagcccctacgcccctcgccagtcacactgtggaaatccatgagcctaacggtatggtaccatccgaggacctggaacctgaggttgagagcagtccggagctggccccaccgccagcatgtccaagtgagagtcctgtgcctatagcacccacagcacagccagaggaactgttgaacggagccccatccccgcccgcagtcgacctgtctcccgtgtcagaacccgaggaacaggcaaaggaagtgactgcctctatggcccctccaactattccctctgccacgccggctaccgcgcccagtgccacgtcaccagcccaggaagaggaaatggaggaggaagaggaagaagaggagggagaagccggggaagccggagaggctgagagtgagaaaggcggcgaagaactgctgccgcctgaatctactccaatccccgctaatctgtcccaaaatttagaagcagcggccgccactcaggtggccgtgagcgttcccaagagaagacggaagattaaggaattgaacaaaaaggaggcagttggcgacctcctcgatgccttcaaggaggccaatccagcagtccctgaagtggaaaaccagccgccagcaggctctaaccctggtcctgaatccgagggctcaggcgtgcccccccgtcctgaagaagcggacgaaacctgggattcaaaggaggataagatacataacgccgagaacatccagccgggcgaacaaaagtatgaatataagagcgatcagtggaagccactgaacctggaagagaaaaagagatacgatcgggaatttctgcttgggtttcaattcatatttgcatctatgcaaaagccagaggggctcccccacatcagtgatgtggtgctggataaggccaacaagaccccgttgcgaccactggacccaacccgactgcaggggattaactgcggccccgactttacaccctcatttgctaacctgggtcggacaacactgtctacccggggcccgcctcgaggtggccctgggggagaacttcctagggggccagccggcctaggaccaagacgctcacaacagggacctcgaaaggagccgcgaaagattattgcgaccgttttgatgactgaggatattaagcttaataaggccgaaaaggcgtggaagccaagcagcaaaagaaccgcggccgacaaagataggggagaagaagatgccgacggcagcaagacacaggacctctttaggcgagtgcgttctattctgaataaactcactccccagatgtttcagcagctcatgaaacaggtgactcagttggcaattgacaccgaagaacggctaaaaggggtgattgatctcatttttgagaaggctattagtgagccaaacttcagtgtagcctacgctaatatgtgcagatgcctgatggctttgaaggttcctaccacagaaaaaccaaccgtcactgtgaatttccggaagctgcttctgaatagatgtcagaaagagttcgagaaggacaaggacgacgatgaggtgtttgagaagaagcagaaagaaatggacgaagcagccactgctgaggagagagggcgactaaaggaagagctagaggaggcccgggatatagcccgccgcagatcgctgggcaatatcaaattcatcggagagctttttaaactgaagatgctcactgaggctattatgcatgactgcgtggtgaaactcctcaaaaatcatgacgaagaatctctagagtgcctttgtcggctcctcaccaccatcggcaaggatcttgatttcgagaaagccaaacctagaatggatcagtacttcaaccagatggaaaagatcatcaaggaaaaaaaaacttcaagccggatccggtttatgttacaggacgttctagacctgagaggctcaaactgggtgccccgtcggggtgatcaggggcccaaaactatcgaccaaatccacaaggaagcagagatggaagagcaccgggagcacatcaaggttcagcagttaatggcgaaaggctccgacaagcgacggggcggacctccagggcccccgatctcccgaggtctcccgcttgttgacgacggaggttggaacactgtcccaatcagtaagggaagcagaccgatcgacacctctcgcttgaccaagattaccaagccaggctccattgacagcaacaaccagctctttgccccaggtggcaggctgtcctgggggaagggatcatctggcggctcgggtgcgaaaccatcggacgcagcttcagaggctgcgcggcccgctacgagtactctgaatcgattcagcgcactgcagcaggccgtgcctaccgagagcactgacaatcgaagggttgtgcagaggtcttctctgtccagagagcggggcgagaaagccggcgaccggggtgatagactggagcggtccgagagggggggagacagaggcgaccgtctggatcgcgctcgcacccctgccacaaaaagaagtttcagcaaagaggtcgaggaaagatcccgggaacggccctcacaaccagagggcctccgtaaagctgcctctctgacagaggatcgtgataggggcagagatgccgtcaagagggaagccgctctgccccccgtctccccattgaaagcagctctgtccgaggaggagcttgaaaaaaagtccaaggcgatcatcgaagaatacttgcacttgaatgacatgaaagaggcggtgcaatgtgtccaagagctggcctccccatcactcctttttatctttgtccgacacggggtggaatctaccttagaaagaagcgccatagcccgagaacatatgggtcaactactgcaccagctgctgtgtgcgggccacctgtccaccgctcaatactatcagggcctctatgaaattttagaactagccgaggacatggagattgatatcccccacgtctggctgtacctcgccgaactggtaactccaatcctgcaagagggcggagtaccaatgggcgagttgtttcgggagataactaaacccttacgccctctgggcaaagccgcctctttactcctggagatccttggactcctgtgcaaatcgatgggcccgaagaaggtgggcacactgtggagagaagcagggctgtcctggaaagagtttctgccagagggacaggatatcggagccttcgtggcagagcagaaggtcgaatacactctgggagaagaaagcgaagcacccggccagcgcgcgctacccagcgaagaactgaacagacagctggaaaaactgttgaaggaaggatcctctaatcaacgcgtctttgattggattgaggcgaatttgtcagagcagcaaatcgtctctaatactctggtgcgggcgttaatgacagctgtgtgctactctgccatcatcttcgaaactccgttgcgggtcgatgtggcagtgctgaaagcaagagctaaactcctacagaagtatctgtgtgatgaacaaaaggagctgcaggctctgtatgcactgcaagcattggtcgtaactctggaacagcctccaaatctcctgcgaatgttctttgacgctttgtacgacgaagatgtagtcaaagaggatgctttttattcatgggagagcagcaaggaccccgcggagcagcaaggcaagggtgtggccttgaagtcagtcactgcgttttttaaatggctcagggaagcggaggaagaatccgaccataactag

SEQ ID NO: 15070 - DNA, 4821 bp, synthetic construct
  misc_feature 1..4821: note = Description of Artificial Sequence: Synthetic coding sequence
  source 1..4821: mol_type = other DNA
atgaacaaagcgccacaaagtacaggacccccacccgctccgtcccctggtctacctcagccagccttcccacccggacaaacggctccggttgtgttctctacaccacaagcaacgcagatgaacacgccctcgcagcctcgccaaggcgggttcaggagtctgcagcacttttacccttcccgcgctcagccgccttcctctgctgcttcaagggtgcaatccgctgctcccgccaggcccggtcccgctgcccacgtctacccagccgggtcacaggttatgatgattccatcccagatctcttaccccgcctcccagggcgcatattatatcccaggccaggggcgttccacatacgtggtccctacccagcagtatcctgtccagcctggcgcccccggtttctaccccggggccagccctactgagtttggaacgtatgctggtgcctattatccagcccagggggtgcagcagttccccactggggtggcccctacgccagtgctcatgaaccagccacctcagatcgcccctaaaagagaacggaagaccataagaattagggaccccaaccagggtggcaaagacattaccgaggaaatcatgtcgggcgcacgcaccgccagcacgccaacgccacctcagacaggagggggacttgaaccccaagccaatggggagacaccccaggtagcggtcatcgtgcgcccggacgaccgctcacagggagctattatcgctgaccgcccaggacttccaggccctgagcacagcccatctgagtcccagccttcttcaccctcgcctacacccagcccctcaccagtccttgaacccggatctgagccgaatctggcggtgttgagcatacctggggacactatgacaaccatacagatgtccgtggaggaatctacgcccatctctagggagaccggcgagccatatagattgagccccgaaccaaccccactggctgagcccattttagaggtcgaagtgactttatccaaaccagtccccgagtccgaatttagcagctccccgctgcaggctcccaccccactcgcatctcacaccgttgaaatccacgaaccgaatggcatggtgccaagcgaggatcttgagcctgaggtcgagagcagccccgaattggcccctccgccggcgtgccctagtgaaagccccgttccaatcgcaccgacggcccagccagaagagctgctgaacggcgcacccagcccaccggccgtggatttaagccctgtgtctgagccagaggaacaagcaaaggaggtgaccgcctcaatggccccaccgactattccgtcggctactcctgcaaccgcaccctcagcgaccagcccagctcaagaggaggaaatggaagaagaggaggaagaggaggagggcgaagccggcgaggccggtgaggctgagtcagagaaaggaggggaggaactgctgcccccagagtctacaccgatccccgccaacttgtcacagaacttagaggccgccgctgcaactcaggtggctgtatctgtccctaaacgcaggagaaagatcaaggagctcaataaaaaggaagccgttggcgatctcctggacgcctttaaggaggccaatcctgctgtcccggaagtcgagaaccagcctccagccgggagcaatcctggacctgagtctgaggggtctggggtaccaccacgccccgaagaggctgatgaaacatgggactctaaggaagacaagattcataatgcggaaaacatccagccgggcgagcagaagtatgagtacaagagcgatcagtggaaaccacttaatttggaggagaaaaaacgatacgatagagagtttcttttaggattccagttcatatttgcatccatgcagaaacccgaaggtctgccacacatttccgacgtcgtattggataaggcgaataaaacaccattgcggcctctggaccccacgaggctccagggtataaattgtggacccgacttcactccctcattcgcaaacctggggcgcaccacactctccactcgcggtcctcctagaggggggcctggaggggaattgcccaggggtcccgccggcctgggtcctcgccgcagtcagcagggaccgaggaaagagccacggaagattatcgccacagtgttaatgacagaggacatcaaactcaacaaagcagagaaggcctggaaacccagctcaaaacgaacggcggcagacaaagatcgtggtgaagaagatgctgacgggagcaagactcaagatctgtttaggcgggtccgcagtatcctgaacaaattgactcctcaaatgttccagcagctaatgaaacaggtgacacagctggcaattgacaccgaagagaggctgaagggggtgatagacttgatatttgaaaaggctatatccgagccgaatttctctgttgcctacgcaaatatgtgccgctgccttatggccctgaaggtgccaactacagaaaagcccacggtgaccgttaactttcgcaaactgctgttaaatcgctgtcagaaagagttcgagaaggataaagatgatgatgaagtgtttgaaaaaaagcaaaaagagatggatgaggccgcgaccgcagaagagaggggtagactgaaagaagagcttgaagaggctcgcgacatcgcccgtcgacgatctctggggaatatcaagttcattggcgagttgtttaaactgaaaatgcttacagaggctatcatgcacgactgcgtggtgaagttgctaaagaatcacgatgaagagtctcttgaatgcctgtgcagacttctgaccacaatcgggaaggacctcgattttgagaaagctaaacctcgaatggaccagtacttcaaccagatggagaagataattaaagagaaaaagacttcaagcaggattagattcatgttacaggacgtcctagatctccgagggagtaattgggtgccacgaagaggggatcagggtccaaaaactattgatcagatacacaaggaagccgaaatggaggaacatagggagcacatcaaagtgcagcagttgatggccaaaggctcggataaacgtcggggcggccccccagggcccccaattagccgcggtctgcctctggtggacgatggggggtggaataccgtccctatcagcaagggctctcgcccaatcgatacctcccgcttaaccaagattacaaaacctgggtctatagacagtaataatcagttgttcgcacccggtgggcgacttagctggggtaaaggatccagcgggggtagtggcgccaaaccaagcgacgctgcctcagaagctgcccgacctgccacttcaactttaaatcgcttcagtgctcttcaacaggcggtgccaacagagtcaacagataatcgcagagttgtccaaaggtctagtctgagtagagaaagaggcgaaaaagcaggagaccggggggatcggttggaacggtctgagagagggggcgatcggggagaccggcttgaccgggcacgcacccctgccaccaagcgaagttttagcaaagaggtcgaggagagaagtcgcgaacggccctcccagcctgaaggtctgaggaaggcagcctctctgaccgaagatcgagatcgcggtcgcgacgcagtcaagagggaggctgctctaccgccagtcagccctctgaaagccgccctgagcgaggaggaactggaaaagaaatccaaggccattattgaagagtatctgcaccttaacgacatgaaggaggcggtgcagtgcgttcaagagctagcatcaccgagtctgcttttcatctttgtgcgtcatggcgtggaaagtacactggagaggagcgccatcgcgcgcgagcacatggggcaactactgcaccagctgctgtgcgccggccatctaagtactgcccagtactatcaaggtttatatgagatactggagttggcggaggatatggagatagacatacctcatgtgtggttatacttggccgagttggtgacacctattctgcaagaagggggggtgcccatgggggaattgtttagggagataacaaagccactcaggcccttgggcaaggccgctagtctgctgctcgagatcttaggcctgctttgtaaatctatgggcccgaaaaaggtggggacgttgtggcgagaagcagggctgtcatggaaagagttcctgccagaaggtcaggacattggggcgttcgtggccgaacaaaaggtggaatatacgctaggagaggaatccgaggcacctggccagcgggccctgcccagcgaggagctgaatcgtcagctggagaagctgttaaaggaaggatcctctaatcaacgagtatttgattggattgaagctaacctcagcgagcagcagattgtgtcgaataccttagtgcgagcactgatgacagctgtgtgctattccgccattatctttgagaccccactgagagtcgacgtcgcagtcctcaaagccagggccaaacttctccagaagtacttgtgcgacgagcagaaggaattacaagccttatacgctcttcaagccctggtggtgaccctggagcaaccccccaatctgcttcgtatgttcttcgatgccctgtacgatgaggatgttgtgaaagaggacgcattttactcctgggagtccagtaaggatccagccgaacagcaaggtaagggggttgccctgaagtccgttactgcttttttcaagtggttgcgggaagctgaagaggagagtgatcacaattag

SEQ ID NO: 15071 - DNA, 4821 bp, synthetic construct
  misc_feature 1..4821: note = Description of Artificial Sequence: Synthetic coding sequence
  source 1..4821: mol_type = other DNA
atgaataaagcccctcagtccaccgggcctccccccgcgccctcacctgggctcccacagccggcctttcccccaggccagactgcgccggtcgtgtttagcacaccgcaggctacccagatgaatacgccatctcagcccaggcagggtggctttcggtccttgcaacacttctatccttctcgcgcccagcccccaagctccgccgcttcacgggtccagtcggccgctccagcacgacccggcccggcagcacacgtgtaccctgctggctcccaggttatgatgattccctcgcagatcagttatcctgccagccagggcgcatattacatccccgggcagggacgaagcacctacgtggtgcccacccagcaataccctgtgcagccaggagcaccgggcttctaccctggggcgtcccccactgaatttggcacatatgccggagcttattatcctgcccagggggtccagcagtttccaaccggcgtggcgcccacccctgttctgatgaatcagccacctcaaatcgcacccaagagggaacgcaagacgatccggattagggatcctaaccagggcggaaaagatatcaccgaggagatcatgtctggagccaggaccgcatctactcccactccccctcaaactggtggaggcctggaaccccaggccaatggagagactcctcaggtagcggtcatagtgagaccggacgaccggagtcaaggtgctatcatagcagatcggccaggcctccccggacctgagcactccccaagcgaatcacagccttcgagtccgtctcctacaccttctccctcacctgtcctagagccggggagcgagcccaatcttgccgtgctgagcatcccaggagacaccatgacaactattcaaatgtcagtggaggagagtacacctatctctagagaaactggtgaaccctaccgactttccccagaacctacacccctcgcagagcccattctggaggtggaggtaactctttccaagcccgtgcctgagtccgagttctcaagtagtcctctacaggccccgacacctctagcatcacacaccgttgagatacacgagcccaatggcatggttccatcagaggatctcgaaccagaggtcgagtcatcacctgaactggcaccacctcctgcatgtccttcggagagccctgtcccaatcgcccccacagcccagccagaagagctccttaacggcgccccgtcaccgcccgcagtggacctgtctcccgtatctgagccagaagagcaggcaaaagaggtgaccgcgagcatggccccacccaccattcccagtgccacacctgctacagccccatctgctactagtcctgctcaggaggaagagatggaggaagaggaagaggaagaggagggggaggccggcgaggccggtgaagccgagtctgaaaaaggcggggaagagctccttccacccgagtctacccctatccctgcaaacctctcccaaaatttggaagcggccgccgcgacccaggtcgccgtgtccgtacctaagcgaaggcgaaaaatcaaagagttaaataaaaaagaagccgtgggtgacctgctggacgcattcaaggaggcgaaccccgccgtgcccgaggtggagaaccagcccccggctggcagtaatcctggaccggaaagcgaagggtctggggtgccaccacggcctgaggaagccgatgagacctgggattctaaggaagacaagatccataatgcggagaatatccaacctggggaacaaaaatacgagtacaagtccgatcaatggaagccccttaacttggaagaaaaaaagcgatatgatcgcgaattcttgctcggttttcaatttatcttcgccagtatgcagaagcccgaaggtctgccgcacatcagtgacgtggtgctggacaaagccaataagacccccctgaggcccctggaccctactcggttgcagggaattaattgtggcccggacttcacaccttccttcgccaacctgggcagaacgaccttgagtacacgaggccctcctcgtggagggccaggtggagagctccctcgcgggcccgccggcctcggacctaggcgcagccagcaggggccccgaaaagaaccacgcaagataatcgcaaccgtcctcatgacagaagatattaaactgaataaggctgaaaaggcctggaaaccttcctccaagcgaacggccgctgataaggaccgcggcgaggaggacgctgacgggagtaagacgcaggatctgttcaggcgggtgcggagtatcctcaataagctgacaccgcagatgttccagcaactaatgaagcaggtgactcagttggcaatagatacagaggagaggctgaagggagtcatcgacctaattttcgagaaagccatctcagaacccaatttctccgtggcctacgccaatatgtgcaggtgtctcatggcgcttaaggtgcctactacagaaaagcccacagtcaccgtcaactttagaaagctgctgctgaaccgatgccaaaaagagttcgagaaagacaaagacgatgacgaagttttcgagaagaaacagaaagaaatggacgaagcagctactgccgaagagcgcggtcgtctcaaggaggagctcgaggaggctcgagacattgcgcggcgaagatccttaggcaatatcaaattcatcggggagctctttaagcttaaaatgttaaccgaggccattatgcatgattgcgtggtaaaactgctcaagaatcatgatgaagagtccctcgagtgtctctgcaggctccttactaccatagggaaggatcttgacttcgagaaggccaagccccgcatggatcaatattttaatcagatggagaaaattattaaggaaaaaaagacctcaagcaggatcagatttatgctacaagacgttctcgatctacggggatctaattgggttccaaggaggggggatcaggggcccaaaaccatagaccagatccacaaggaagccgaaatggaagaacatagggagcacataaaagttcagcagcttatggccaaaggatctgacaaacgaagggggggccctcccggacccccaatttcccggggcctaccactagttgatgacggcggctggaatacagttccaatctccaaagggagtcggccaatcgacacaagcaggctgaccaaaatcacaaagccagggtcaatagactcgaataatcagttatttgcccctggcggcaggcttagctggggaaaggggtcttcaggaggatccggcgccaaacccagcgacgcggcctctgaagccgcacgacccgcgacaagcacactcaatagattttctgcactgcaacaagctgtgcccactgagagcaccgataacagaagagttgttcaaaggtctagccttagccgggagcgcggcgagaaggcaggcgatcgcggcgatcgattggagaggtcagagcgcgggggcgaccgtggtgacaggctggatcgggctcggaccccggcaacaaagaggtctttcagcaaagaagttgaagaaaggtctcgggagcgaccttcccagcccgaaggactgaggaaggccgcttctctgacggaggaccgggacagagggagagacgccgtgaagcgagaagccgcactgccccctgtgtctcccctgaaggccgctctgtctgaagaagaacttgagaagaaaagcaaggctattatagaggagtacctccacctgaatgatatgaaggaagctgtgcaatgcgttcaggaactcgcgtctccctccctgctgttcatcttcgtacgccatggagttgagtccactctggagagaagtgctatcgccagagagcacatgggtcaactgttgcaccagttgctttgtgccgggcacctgagcacggctcaatattaccagggcttgtatgaaatcctggaactggctgaggatatggaaatcgacatccctcacgtgtggttgtatcttgctgagctggtgactccaatactccaggaaggaggtgtgcccatgggggagctatttcgggagattaccaagccgcttcgacctcttggaaaggccgcttctttgctccttgagatcctggggctgctgtgtaaaagcatgggtcctaaaaaagtgggtaccctttggagagaagcagggctttcgtggaaggagtttctgccggagggtcaggacatcggagcttttgtcgctgaacaaaaagtcgaatacactctgggcgaggaatctgaagctccggggcagagggctttacccagtgaggagttaaaccggcagctggagaagctcttgaaagaaggaagtagcaatcaaagggttttcgattggatagaggccaaccttagtgagcaacagattgtgagcaatactctcgtccgtgcacttatgaccgctgtttgctatagtgctatcatctttgagactcccttaagagtggacgtagcagtgttaaaggcccgggctaaactcttacagaagtatctttgtgatgagcagaaggaactgcaggctctgtatgccttgcaggcgcttgttgtcaccctggagcaaccccccaacctgctgcgaatgttctttgacgccctctacgacgaggatgtggtgaaggaggacgctttttactcatgggagagtagcaaggacccagctgaacaacaaggcaaaggtgtcgctctgaaatctgttactgctttcttcaaatggctcagagaagccgaagaagagtccgatcacaattag

SEQ ID NO: 15072 - DNA, 4539 bp, synthetic construct
  misc_feature 1..4539: note = Description of Artificial Sequence: Synthetic coding sequence
  source 1..4539: mol_type = other DNA
atgatgatcccctctcaaatctcgtatccagcctctcagggagcttactacatcccgggacagggaaggtctacctacgtggtgcctacccagcagtacccagtccaaccaggcgcccctggcttctaccctggcgccagccctactgagttcggcacctatgctggtgcgtactatccagcacagggcgtgcagcagtttccaactggagtagcccctacacctgtgttgatgaaccagccgccacagatcgcacctaagcgcgagaggaaaactattaggatcagagatccaaaccaggggggaaaagacattacggaggagattatgtccggagcgcgaacagcctctaccccaactccaccccagacaggaggcggactggagccacaggctaatggggaaaccccacaggtggcagtgattgtcagaccagacgacaggtcacagggggcgatcatagctgatcgaccaggcctaccaggacctgagcacagtccctcagagagccagcccagctcaccttctccaacaccatccccgtctcctgtcttagaaccaggatccgagcctaatctggcagttctcagtattccaggggatacgatgaccacaatacagatgtctgtcgaggaatcaaccccaataagcagagaaactggcgaaccgtatcgcctctcccccgagccgactcccctggctgaacctatccttgaggtcgaagtgactctcagcaaaccggtgcccgaaagcgaattctccagcagccccctgcaggcccccacccctttggctagccacaccgtcgagattcacgaacctaacgggatggtgccatctgaggatctggaacctgaagtagagtcatcccctgagctggccccgccaccggcatgtccctccgagtcccccgttcccattgctcctactgctcagcccgaggaactactcaacggcgcgccatccccacccgccgtggacctatctcctgtaagcgagcccgaagaacaggctaaagaggtgacagccagcatggcacctccaacgattcctagcgccactcctgcaactgcaccgagcgcaacaagccctgctcaggaagaggagatggaagaagaagaggaggaagaagagggggaagccggtgaagccggagaggccgaaagcgagaaagggggtgaagagctgttgccccccgagtctactccaatccctgctaacctaagtcaaaaccttgaagccgcggcggcgacacaggtcgccgtgtccgtccctaagcgtagaaggaaaattaaagaattaaataaaaaggaggcagtgggagaccttttggatgcatttaaggaggctaaccccgctgtcccagaagtggaaaatcagcccccagctggctccaaccccggtccagaatctgagggttctggcgtgccgccccgccccgaagaggccgatgaaacctgggattctaaagaggataagatccacaacgccgagaatattcagcctggtgagcaaaaatatgaatataagtcagaccagtggaagcccttgaatctggaagaaaaaaaacggtatgaccgtgaatttctgctcgggttccagtttatcttcgcctcaatgcagaagccagaaggcctgccacacatctccgacgttgtgctcgataaagcaaataagacccctctcagaccactagacccaacgcgcctgcaggggataaactgcggaccagacttcacccccagttttgctaacctgggaagaaccaccttgtcaacccgtgggccacctagaggcgggccgggcggggagctgcccagggggccagctggacttggtcccagaaggtctcagcagggccctagaaaggagccaaggaagatcatcgccactgtgctgatgactgaagacatcaagctaaataaagctgagaaagcatggaagcctagctcaaaaaggacggccgctgacaaggatagaggggaagaagacgccgatggatcgaagacccaggacctgttcaggcgggttcggtctatcctgaacaagctcaccccccaaatgttccagcaactgatgaagcaggtaactcaattagcaattgacactgaagaacgcctgaaaggcgtgatcgatttaatcttcgagaaagccatttctgagcctaatttctctgttgcttatgccaacatgtgtcgctgtctcatggcgttgaaagtgcctaccaccgagaagcctactgtcactgtcaactttcgtaaattactactcaacaggtgccaaaaggagttcgaaaaggacaaggacgatgacgaagtgttcgagaagaagcaaaaagagatggacgaggccgccacagctgaggagaggggtcgtctaaaagaagaactggaagaagctcgagatattgcgcgcaggcggtccttggggaatatcaagtttattggagagttattcaaacttaaaatgctgaccgaagccatcatgcacgactgcgtagtgaagctcctgaagaatcacgacgaagagtccctggaatgcctttgtcggcttctgaccaccattgggaaagatttggacttcgaaaaggcaaagccaagaatggatcagtactttaatcagatggaaaaaattattaaggagaagaagacctccagccggattcgtttcatgctacaggatgttcttgatctacgaggctcgaactgggtgccgaggaggggtgatcaaggaccaaagaccattgatcagatacacaaggaagccgagatggaggagcatcgagagcatattaaagtccagcagcttatggcaaagggatcggacaagcggaggggaggtccacccgggcccccaataagtcgcggcttacctctcgtagacgacggaggctggaatacggtgccaatatcaaagggctccagacctatcgacacttctaggctgactaaaataactaaacccggcagcattgattcgaataaccagttgtttgcgccgggcggcagactgtcctgggggaaaggtagtagtgggggctccggagccaaaccgagcgacgctgcttccgaggctgctagaccagcaacctccactttgaataggttcagcgccctgcagcaggcggttcctaccgaaagcacagataaccgcagggttgttcagaggtccagtcttagtcgcgaacgtggggagaaggctggagacagaggcgataggctggagaggtctgagagaggcggggatcgcggagatcgtctggacagggcaagaacgcctgccacaaagaggtcattcagcaaggaggtggaggaaaggagccgcgagaggcctagtcagccagagggactgcgcaaggcagcaagtctgacagaagatagggacaggggcagggatgccgtcaagagagaggctgccctcccccccgtgagccccctgaaagctgcccttagcgaggaggaactcgaaaaaaaaagcaaagcaatcatcgaggaatatcttcaccttaacgatatgaaggaggccgtgcagtgcgttcaggagctggctagccctagcttgttgttcatattcgtccggcacggggtcgagagcacccttgaacggagtgcaatagcccgagaacacatgggtcaattgctccaccagctgctttgtgctgggcacctatctaccgcccagtactaccaaggactctatgaaatcttggagctagccgaggatatggagatcgatatccctcatgtctggctttacctggcggagcttgtgactcccatattgcaggagggcggagtgcccatgggagagctcttcagggagattacaaagccactgaggcccctgggcaaggctgcttctctgttgctggagatactgggcctcctgtgcaagtccatgggtcccaagaaggttggcaccctctggcgcgaggcaggcttgagctggaaggaattcttgcccgaaggtcaggacatcggtgcattcgtggcagaacaaaaggtggagtataccctaggggaagagagcgaagcgcctggccagcgcgctctgccctctgaggaactcaatagacagctcgagaagctgctgaaggagggctcctctaatcaaagggtattcgactggatcgaagcgaacctctccgaacagcagattgtatccaatactcttgtgcgggctctgatgacggctgtctgctacagcgccattattttcgagacaccactcagggtggatgtagctgttttgaaagcgagggctaaactcctacaaaagtatctctgtgacgaacagaaagagctgcaggccttatatgccttacaggccctggttgtgaccctggaacaacctcccaacctgctgaggatgttctttgatgccctttacgacgaggatgtagttaaagaggatgccttttattcttgggagtcaagtaaggaccccgcagaacagcaggggaagggcgtcgctctgaaatctgtgaccgctttcttcaagtggcttagagaggccgaagaggagtcggaccacaattag

SEQ ID NO: 15073 - DNA, 4539 bp, synthetic construct
  misc_feature 1..4539: note = Description of Artificial Sequence: Synthetic coding sequence
  source 1..4539: mol_type = other DNA
atgatgatcccttctcaaataagttacccagcgtctcagggtgcttactatattccaggccaggggagaagtacctacgtggtgccgacacagcagtatccagtccagcccggcgcacctggattttatcctggagcgtcacccactgagtttggaacctatgcaggcgcttattatccagcgcaaggcgttcagcagttccctacaggtgtggcacctacacccgttctgatgaaccagcctccacagatcgccccaaaacgggaaagaaaaaccattagaattcgtgatccaaatcaagggggaaaggatattacagaggagatcatgagcggtgcccgaaccgcctcgacccccactccccctcaaaccgggggaggactggagccacaagcaaacggcgagactcctcaagtggccgtgattgtaaggccagatgaccgtagccagggcgcgattatagccgaccgcccaggattgccgggcccagaacactcaccctcagaaagccagccatcatcgccctctccaacacccagcccgagtccggtcctcgagcctggttccgaacctaacctggccgtactcagtattcccggagacacaatgactaccatccaaatgtctgtagaagaatccactcccatcagcagagaaacgggggagccttatagactgagcccagaaccaaccccgctcgcagaacccatcctggaggtggaagtgacacttagcaagcctgtccccgagagcgagttctcttcatcgcctttgcaggccccaacgcccctcgcgtctcataccgtagaaatccacgaacctaatgggatggtccctagcgaagacctggagcccgaggtggagtcttctcctgaactagcacctcccccagcttgcccctcagaaagccctgtacctattgcccctacggcccagccagaggaactgctgaatggcgcacccagcccccccgctgtggatctgagtccagtgtctgaaccagaggagcaggccaaagaggtcaccgctagcatggcaccacctactatcccctccgccacccctgccacggctccttccgccacgtcacccgcacaggaggaggagatggaggaggaggaggaagaggaagagggagaggcgggcgaggctggagaagccgaaagcgaaaagggaggtgaggagctactaccccctgagtccacacctatccctgccaatctgtcccagaacttggaagctgccgctgccactcaggtggccgttagcgttccgaaacgtcgtcgaaaaataaaggaactgaacaaaaaggaggcggtgggtgacttattggatgcgttcaaagaagcgaaccctgccgtgccagaagtggagaaccagccccccgcagggtcgaaccctgggcctgaatccgaaggcagcggcgtgccccctcgccctgaggaagcggacgagacttgggacagcaaagaggacaaaatccataacgccgaaaatatccagcccggcgagcagaagtacgaatacaaaagcgatcagtggaaacctctgaacttggaggaaaagaagcgttacgaccgcgaatttctgttaggcttccaattcatttttgctagtatgcagaagccagaaggactaccccatatctctgacgtggtgctggacaaggcgaacaagacaccgctgcggcccctggacccaacaagactgcaggggatcaactgcggaccagattttactccaagcttcgcgaaccttggccggaccacattaagcacacggggccccccccgcggtggaccaggaggggagctgcctcgcgggcccgcagggctcggcccgcgacgatcccagcagggccctaggaaggagccaagaaagatcatagccactgtgctgatgacagaagatatcaaactgaacaaagccgagaaagcttggaagccatcctctaagcggacagccgcagacaaagatcgcggtgaggaggacgcggacggctcgaaaactcaggatctgttcagacgcgtgcgctctatcctgaacaagttgacaccccaaatgttccagcagcttatgaagcaagtaacccagctggctatagataccgaagagcgccttaagggagttattgacctcatctttgaaaaggcaattagtgagcccaacttttcagtggcttatgccaatatgtgccgatgtctgatggccctgaaggtgcctacaacagaaaaacctactgtcacagtgaacttccgcaagctcctgcttaacagatgccagaaggagtttgagaaggacaaggacgatgatgaagtctttgaaaagaagcagaaggaaatggatgaggctgcaactgccgaagagcgcggtaggctgaaggaagagcttgaggaagcccgcgacatcgcccgccgtcggagtctgggaaacataaaatttattggcgagctgttcaagcttaagatgctgaccgaagccattatgcacgactgtgtggtgaaactgctgaagaaccatgacgaagagagcctggagtgcctttgtaggctcctgaccactatagggaaggacctggactttgagaaagcaaagccacgcatggaccagtactttaaccaaatggaaaagatcataaaagagaagaagacttctagtcggattagatttatgcttcaggacgtcttggatttgcgcggaagtaactgggtaccacgccggggcgatcagggccccaagaccattgaccagatccacaaggaagctgagatggaggagcacagagaacatattaaggtgcagcagttgatggccaaaggaagtgacaaacgtcggggtggacctcctgggccacccatttcacgggggttgcccctcgtggatgacggagggtggaacaccgtgcctatttctaaaggcagcaggccgatagacacgtcacgacttaccaaaattaccaagccaggctccatagacagcaacaaccaactattcgccccagggggccgactgagctgggggaaagggagtagcggaggcagtggagccaagccgtctgatgccgcatctgaagcagcaagaccagctacaagcacactcaataggtttagcgccctgcagcaggctgttcccaccgaatctaccgataaccggagagtcgtgcagagatcaagcctgtccagagagaggggggagaaagccggagatcggggcgaccggcttgagcgcagcgagcgcgggggggaccggggggatcgtttagacagggcacgaacacccgcaacaaagcgctcgttctccaaggaggtggaggagagaagtagggagcgacctagccagcctgagggactgcgcaaggctgcctccctcaccgaggatagggatcgaggcagagatgctgtgaagcgggaagccgctcttccacctgtgagtcccctcaaggccgccctcagcgaggaggagctcgagaagaagtctaaggcaatcatcgaagagtatctgcatctgaatgacatgaaggaggctgtgcagtgtgtccaggagctggcctctcccagcctgctcttcatatttgtcagacatggagtggagtccacccttgagaggtcagcaatcgcccgtgagcacatgggccagctgctgcatcagctactgtgcgcaggacacctgagcacagcacagtactatcaaggcctgtacgagatactggagctggctgaggatatggaaatagatatcccccatgtgtggctgtacctcgcagagttagttactcccattcttcaggagggtggggtacccatgggggagcttttccgggagattactaaacccttacgtccgctgggcaaagccgcttccctcctccttgagatcctcggcctgctctgcaaaagcatgggccccaagaaggtgggcacgctatggcgcgaggccggacttagctggaaggagttcttaccagaagggcaggacatcggcgcttttgttgcagaacagaaggtggagtacactctgggagaggaatccgaggcccccggccagagggcactgcccagcgaggaactcaatcgccagttggaaaaacttctcaaggaggggagcagcaatcagcgagtcttcgactggatcgaggctaatttgagcgagcagcagattgtttcaaacacccttgtaagggcacttatgactgcagtgtgctactctgccattatcttcgagacccctctgagggttgacgtggccgttctgaaagcaagagcaaagctgctgcaaaaatatctttgtgacgagcaaaaggagctgcaggccctgtacgctttacaggccctcgtcgtaactctcgagcagccgcctaatttactccggatgttcttcgatgcactgtacgatgaggacgtggtaaaagaggacgccttctattcatgggaatcgtcaaaagaccccgctgagcaacagggcaagggtgtcgctctgaaatccgtcaccgcattcttcaaatggttaagggaagccgaagaagagtcagatcataactag

SEQ ID NO: 15074 - DNA, 4683 bp, synthetic construct
  misc_feature 1..4683: note = Description of Artificial Sequence: Synthetic coding sequence
  source 1..4683: mol_type = other DNA
atgaacacaccatctcagcctaggcaacacttttatccttccagagcccagcccccttcctcagctgcttccagggtccagagcgcggctccggccagacccgggccagcagcccacgtgtaccccgcagggagccaggttatgatgatcccgtcccagatctcatatcccgcctcacagggggcatattatattccaggccaagggaggtctacgtacgtagtcccaactcaacaatacccagtacagcccggggcaccaggcttctatcccggggcaagccctacagagttcgggacgtatgcaggggcatactatcccgcccagggtgtccagcaatttcctaccggggtggcgccgacacccgtcctgatgaaccagcctcctcagatagcaccaaaacgcgagcgaaagaccatccgcattagggacccaaatcagggtgggaaggatatcaccgaagaaatcatgtcaggggccaggactgcctccacacctacccccccacaaacgggcggtggtctcgagccacaggccaatggtgagacaccacaggtggcagtcatcgtgcggccagacgacaggtcccagggggcaataatagcagatagacccggtttgccagggcctgaacattcaccctccgagtctcagccgtcaagcccctcaccgactccatccccatcccccgtcctcgagcccgggtctgaaccaaatctagcggttctctcaatacctggcgatacaatgacaacgattcagatgagtgttgaagagtcaacacctatctcaagagaaactggagaaccctatcgcctatcccctgagccaacccccctcgccgaacctatcctggaggtcgaagtgactttaagcaagcccgtgccagaatccgagttttccagcagcccactacaggccccgaccccactcgcatcacacaccgtggagattcacgagcctaacgggatggtgcctagtgaggacctggagccagaagttgaaagttctccagaattggctccaccacccgcctgtccatcagagtctcccgtgcccattgcgccaacagcccagcccgaggagctgctgaacggagctccctctcccccagccgtggacttgagccctgtgtccgagccggaggagcaggccaaagaggtgaccgcaagtatggcacctcctaccatcccatccgccactcctgccacggcaccctctgctacttcaccagcgcaggaggaagagatggaagaagaagaggaggaggaagaaggggaggctggcgaggctggcgaggctgagtccgaaaaagggggggaggaattactcccccctgagtctacaccaatccccgcaaatctctcacagaacctggaagccgccgcagctacccaggtggcagtgtccgtgccgaaaagaaggcgcaagatcaaagaactgaataaaaaagaggctgttggagacctgctggatgcgtttaaagaggcaaaccctgccgtaccggaggtagagaatcaacctcctgcggggagcaaccccggtcccgagtctgaaggctccggtgtaccaccgagaccagaggaagcagatgaaacttgggactcaaaggaggataaaatccacaatgcagaaaatatacagcctggggagcagaaatacgagtacaaaagtgaccagtggaagcctctgaacctcgaggagaagaaacggtatgaccgggagttcctgcttgggttccaattcatctttgcttctatgcaaaagccagagggcctccctcacattagtgacgtggtcttggacaaggccaacaaaacacctcttaggcccctcgatccaacccgacttcagggaataaactgtggcccagatttcacccccagcttcgctaaccttgggaggactacccttagcactcgcggacctcccagaggtggcccaggcggcgaacttcctcggggaccccaagcaggactaggcccgaggcgcagccagcagggccctaggaaagagcccagaaagatcatcgcaactgtgctgatgactgaggacatcaagctgaataaggccgagaaagcctggaagccctccagtaagaggaccgccgctgacaaggaccgtggggaggaggacgccgatggaagcaagacacaggacttatttcgccgcgtccggagtatcttgaacaagctaacaccccaaatgttccagcagcttatgaaacaggtgacccagctggccatcgatacagaggagcgtctcaaaggggtgattgatctgatctttgaaaaagctatctctgagccaaacttttctgtcgcctatgctaacatgtgcaggtgtcttatggctctgaaagtcccaactactgagaagcctaccgttactgtcaacttccggaaactactactcaaccgatgtcagaaagagtttgaaaaggataaggacgacgacgaggtgttcgaaaaaaaacagaaggaaatggatgaggccgccaccgccgaagagagaggacggttaaaggaggagcttgaggaagctcgtgatattgcgcggcggagaagcctcggtaacatcaaatttataggcgagctgtttaagctcaaaatgctgaccgaggcaatcatgcacgattgtgttgtgaaactgctgaaaaatcatgatgaggagtctctagagtgcctgtgcaggttgctcacaaccatcggcaaagatctcgatttcgagaaggccaagccgagaatggatcagtacttcaaccagatggagaaaatcatcaaagaaaagaaaactagtagccggatacgattcatgctccaggacgtgctcgacctgaggggaagcaactgggttcccaggagaggagaccagggtccaaagaccatcgaccagatccataaagaggcagagatggaggagcatagagagcacatcaaggtgcagcaactgatggctaagggctccgataagagacgcggcgggccacccggcccgcccatctcaaggggccttccgctcgtggacgatggtgggtggaacaccgtcccaatatcgaagggctcccgtcccatcgacacaagtcgactgacgaaaatcacaaaacctggaagcattgacagtaacaatcaattatttgccccagggggccgcttatcgtggggcaaaggctccagtggcggctccggtgcgaagccatccgacgctgcctcagaagctgccaggcctgcaacttctacgctgaaccgcttctctgctctccaacaggctgtaccaacagaaagcaccgacaacagaagggtggtgcaacgcagttcgctctcccgggaacgcggggagaaagctggcgaccgcggagataggttagaaagatctgagagggggggcgaccgcggagaccgcttggaccgcgctaggactcccgctaccaagcggagctttagcaaggaagtcgaggagcgtagccgcgaacgtccctcgcaaccagaggggctccggaaggccgcctcactcacagaggacagggatcgagggagagatgctgtaaaacgcgaagcagccctgcccccagtgtcccctctcaaggccgctctgagtgaagaagagctcgaaaagaaatcgaaggcgatcatcgaggaatacttgcacctgaatgatatgaaagaagctgtgcagtgcgtccaggagctcgccagccccagcttgctgttcatctttgtgcgacatggagtggaatccaccttagaacgctcagcaattgctagggagcatatgggccagctgcttcatcagctgctgtgtgccgggcatctgtctactgcacagtattaccaggggttatatgaaattctcgagctggcagaggatatggagattgatattccacatgtttggttgtacctggcagaactggtgactcccatcctccaagaagggggggtgcccatgggggagcttttcagggaaattactaaacccctcaggccgttggggaaggccgcaagcttgttactcgaaatcctggggctgttatgcaagtccatgggccctaaaaaagtgggcactctgtggcgcgaggccggactgtcttggaaggaatttctgcctgagggacaggatattggcgccttcgtcgccgagcagaaagtggagtatacgctgggcgaggagtctgaggcccccgggcagagggccctgcccagtgaggagctgaaccgtcagcttgagaagctgctcaaggagggcagctcaaatcagagagtattcgattggatcgaggcaaatcttagcgagcagcagatcgtatctaatacactggtccgcgcgctgatgaccgccgtgtgctattcggctattatattcgagacacccctaagggtggatgtggccgttctcaaggccagggctaagcttcttcagaagtacttgtgcgacgaacagaaagaactccaggctctctatgcgctgcaagctcttgtggtgaccctggaacagccacctaacttactgcgcatgttcttcgatgccctctatgacgaggatgtagtgaaagaggacgccttctattcatgggagtcatctaaagatcccgctgaacagcaagggaaaggtgttgccttgaagtcggtaacagccttctttaaatggctgcgggaggcagaagaggagtctgatcataactag

SEQ ID NO: 15075 - DNA, 4680 bp, synthetic construct
  misc_feature 1..4680: note = Description of Artificial Sequence: Synthetic coding sequence
  source 1..4680: mol_type = other DNA
atgaatactccttcccagccacgacagcacttttacccatcgagggctcagcctccttcttcggccgccagccgtgttcagtctgccgctcccgcacgccccggacccgctgcacacgtctatccagctgggtcacaagtgatgatgattccatcacagatcagttacccagctagccagggagcatactacatccctgggcaggggcgatccacttacgtcgtgcccacacaacagtatcccgttcagcccggcgcgccaggtttttatccaggcgcctctcccacggagtttgggacttacgccggggcctattaccctgctcagggagtgcaacagtttccaaccggagtggcccccacacctgtgttgatgaatcagcctccacagatcgctccgaaaagggaaagaaagactattcgcatcagagatcccaatcagggagggaaggatatcactgaggaaattatgagcggggccagaacagcgagcacaccaacacctccacaaacaggcggcggcctcgagccccaggccaacggtgaaacgccccaggtagccgtgatcgtgcggcctgacgacagaagccagggcgctatcattgcagatcggccgggtcttccaggccccgaacatagcccaagcgagtcccagccaagttcgccatctcccacaccatctccctcgcccgtcctggaacctggtagcgaaccaaacctggctgttctctcaattccaggcgatactatgacaactatccaaatgtcggtcgaagaaagtactccaatctcaagggagacaggggaaccctaccggctcagccctgaacccactccactggccgaaccaattctcgaggtggaagtgacattaagcaagccagtgcctgaatccgaattctcctcctcccccctccaggcccctactccactggccagccatacggtagagatccacgagcctaacggtatggtgcctagcgaggaccttgaacctgaagtcgagtcctcacccgagctggctccaccaccagcctgtccctccgagagccctgtccctatcgccccaaccgctcagccggaggagctcctgaacggtgcgcctagtcctccagcggtagacctatctccagtgagtgaacctgaggagcaggctaaggaagtgactgcttctatggctcccccaaccattccttctgctacgcctgcaactgctccctccgctacttcaccagcacaggaggaggagatggaagaggaagaagaggaggaggagggggaggccggcgaagccggggaggctgagtccgaaaaaggaggggaagaactgctcccccccgaaagcacaccaattccagccaatctctctcagaacctggaagctgcggctgctacgcaagtagccgtctcggtccctaagcgcagaaggaaaatcaaggagttgaacaaaaaagaggctgtaggcgacctgctcgacgctttcaaagaggcgaaccccgccgtgcccgaggttgaaaaccagccaccagctggctccaaccctggtccggagtctgaaggctcaggcgtgcctccccggccagaggaggcagacgagacgtgggatagcaaagaggacaagatccacaacgctgagaacatccagcccggtgagcaaaagtatgagtacaaatccgatcagtggaagccgctgaatctggaggaaaagaaaaggtatgacagagagttcctcctcggttttcagtttatctttgcgtcaatgcagaaaccagagggactgccacacatctcagatgttgtgctagacaaggccaataaaacccctctgcggcccctggatcccacgcgccttcaagggattaattgcggaccggacttcaccccaagcttcgcaaatctgggaagaacaactctgagtacccgtgggcccccaaggggcgggcctggcggtgagctgccacggggccccgccggcttagggccgagaagatcccagcagggccctagaaaggaacccaggaagatcatagcgacagtgctcatgaccgaagatatcaagctaaataaggccgagaaggcatggaagccatctagcaagcgcacagctgctgataaggaccggggcgaagaggacgccgatggctcaaagacacaagatctattccgacgcgtccgatccatcctaaacaaactaacaccacagatgtttcagcagctgatgaagcaggtaacccagctggctattgacaccgaggaaagattgaagggagtcatcgaccttattttcgagaaggcaataagtgagcccaatttctctgtggcttatgccaatatgtgcaggtgtttgatggctctcaaagtacccaccaccgaaaagcccactgtgacagtgaacttcagaaaactcttactcaatcgctgtcagaaagaattcgagaaagataaggacgatgatgaagtctttgagaagaaacagaaggaaatggatgaggcagccaccgccgaggagcgtggaaggcttaaagaggaactcgaggaggctagagacatagcccgccgtagaagcttagggaacatcaaatttattggggagctgtttaaactgaaaatgttgacagaagcaatcatgcatgactgcgtggtgaaactattaaaaaaccacgatgaggagtctctcgagtgcttgtgccgacttctaaccacaatcggaaaagacctggactttgagaaggcaaagccacggatggatcagtactttaatcagatggaaaaaataattaaagagaagaagacttcttcacggattaggttcatgttgcaggatgtgctggatctcaggggctccaactgggttccccggaggggcgatcaggggccaaaaactatcgaccagattcacaaagaggccgaaatggaggagcatcgggaacatatcaaggtgcagcagttaatggccaagggttcagacaaacgccggggaggtcctccagggccaccaatctcacgaggactacccctcgtggacgacggtggttggaacacagtccccatctccaaaggcagccggcctattgacacctctcgtctcacgaagattacaaagcctgggagcatagactcaaacaatcagctgttcgcaccaggcggccggctgtcttggggaaaggggtcttctggggggtccggagctaagcctagtgatgccgcaagtgaagcagctagacctgctacgagcaccctcaatcggtttagcgcattgcagcaggctgtcccaacagagtctacagataataggagagtggttcaacggtctagcttgagccgagaaagaggcgagaaagcgggagaccgtggagacaggctggagcgctccgagagagggggcgataggggggacagattggatcgcgccagaacgcctgccacaaagcgaagcttttccaaggaagttgaagagcgttcaagagagagaccctcgcagcctgagggacttcggaaagcggcctctctgaccgaggacagggacaggggccgtgatgccgtgaagagggaggctgccctcccacctgtcagccctcttaaagctgctctcagtgaggaggaactcgaaaaaaagtcgaaggcaatcattgaggaatatctccatctaaacgacatgaaggaagcagtgcagtgcgtgcaggagctggcatcaccttcccttttgtttatcttcgtgcggcacggagtggaatcaacccttgaaaggagcgccatcgctagggagcacatggggcaattgttacaccagcttttgtgtgcagggcacctgagtactgcgcagtattaccaggggctctatgaaatactggagctggctgaagacatggagatagacattccacatgtatggttatacctcgccgaactggtgacgcctatcctccaggagggaggcgtccctatgggcgagctcttcagggagataacgaaacctcttcgacccctcggaaaagccgcgagccttctgctggagattctcggcttgctctgcaaatccatgggccctaaaaaggtgggaaccctgtggagagaggcaggtttgtcctggaaggaatttctgcctgagggtcaggacatcggggcatttgtagctgagcagaaggtcgagtacaccctgggagaggagtctgaggcacccgggcagagagctttgccaagcgaggagctgaatcgccagctagagaaacttttaaaggagggatcatccaaccaacgcgtgtttgactggattgaagccaacctctcagaacagcaaatagtttcaaacaccttagtcagggccttgatgacggctgtgtgctatagcgccattatttttgagacccccctgcgggtcgatgtggctgtcttgaaagcccgggccaagcttttacagaagtatctgtgtgatgaacagaaagagcttcaggctctttatgccttgcaggcgctggttgtgaccttggagcagcctcctaatcttttacgcatgttttttgatgcactgtatgacgaggatgtggttaaggaagatgccttctatagctgggagagtagtaaagaccctgccgagcaacagggaaagggtgtcgccttgaaaagcgtgacagcattctttaaatggttgcgggaagccgaggaggagtctgatcacaattag

SEQ ID NO: 15076 - DNA, 4821 bp, synthetic construct
  misc_feature 1..4821: note = Description of Artificial Sequence: Synthetic coding sequence
  source 1..4821: mol_type = other DNA
atgaacaaggccccccagagtaccggcccccctcccgcgccatcacccggcctcccccagcccgcttttcctcccggccagacagctccagtggtgttctccactccccaggccacacagatgaataccccctctcaacccaggcagggcggattccgatccctacagcacttttaccccagccgagcacagccaccaagttctgcagcttctcgggtccaaagcgcagcacctgcgaggcccggtcctgccgcccatgtataccctgccgggtcacaggtgatgatgatcccttcgcagatatcctaccccgccagccagggagcatactacattccggggcaaggaagatccacctacgttgtgcctactcagcaataccccgtgcaacccggggcaccgggattctacccgggtgcgtcccctacagagtttggaacgtacgccggggcttactacccagctcagggcgtgcagcagtttccgacgggagtggcgcccactcctgtgctcatgaatcagccaccgcagattgctcctaaacgcgagagaaagactatccgcatccgcgacccaaaccaaggcggcaaagacatcacagaggagattatgagcggtgcgaggactgcgagcaccccgacgccaccccagactggcggcggactggaaccacaggctaacggcgaaacaccccaggtggccgttatcgtacggcctgatgacagatcccagggagctatcatcgcagaccgcccaggactcccggggccagagcattctccctccgagtcccagccctccagcccctcccctaccccgtctccgtcgcctgtcctcgaaccgggatccgagcccaacctggccgtcttgagtattcccggcgatacaatgacaactatccagatgtctgtggaggagtctacacccatatctagggagactggcgaaccttatcggctctcgccagagcctactcccctcgccgagcccatccttgaagtcgaggtcacgctttccaaaccagtacccgagtccgagttcagctcttctccactgcaagcccccacacccctcgcaagtcacaccgtggaaatacacgagccaaatgggatggttccgtccgaagacctcgagcctgaggtggagtcgtcaccagaactggcaccaccccctgcatgtccttcagaatctccagttccaatcgcacctaccgctcaaccagaagaactactaaatggtgccccttctccccctgccgtcgatctgagcccagtttctgaacccgaagagcaggcgaaagaggtcactgcctccatggccccgcccactattcctagcgcgacgccggcgaccgctccctctgccacttcacccgcgcaggaggaagaaatggaagaggaggaagaagaggaggagggtgaggcgggagaagctggcgaggccgagtcagaaaaaggcggggaagaactgctgccgcccgaatctactcccattccagccaacctcagtcaaaacctcgaagccgccgcagctactcaagttgccgtttccgttcctaagagacgtcggaagatcaaagaactaaataaaaaggaagcagtcggagaccttttagacgctttcaaggaggctaatcccgcagtccccgaagtcgaaaatcagccacctgccggttcaaaccccggacccgaatcagagggcagtggggttcctccacgacccgaagaggcggacgaaacatgggactcgaaggaggataaaattcacaatgctgagaacatccagcctggggagcagaagtacgagtataagtcagaccagtggaagcccctgaatttagaagagaagaaacgctacgaccgcgagtttctgttgggattccagtttatcttcgccagcatgcagaagcccgaaggtttgccgcatatttcggacgtcgtgctcgacaaagccaacaaaacccctttgcggccactggatccaacccgtcttcagggaataaattgtgggccagattttaccccctcttttgccaaccttggaagaactaccttgtcaactcgaggaccaccccggggaggaccaggaggggagctgccaagagggcccgcgggcctcggcccacgccgaagccagcagggacctcggaaagaaccaagaaaaattatcgccactgtgctgatgactgaggacatcaaactgaataaggcagagaaagcctggaagccatcctccaaacgcaccgccgctgataaggaccggggggaagaagacgccgatggaagtaagacccaggaccttttccggcgtgtgaggtcaattctgaataagctgacgccacagatgtttcagcaactcatgaagcaagtgacacaactggccatcgataccgaagaacggcttaagggggttatcgacctcatcttcgaaaaggctattagtgagccaaatttcagcgtggcgtatgcaaatatgtgcaggtgcctgatggcactaaaggtacccaccactgagaagcccacagtgactgttaatttccgcaagctgctgctgaaccgatgtcagaaagagtttgagaaggacaaagacgacgacgaggtgttcgaaaagaagcagaaagagatggatgaagcggctacagcagaagagcgtggtcgcctcaaggaggagctcgaggaagctcgggatatagctcgcagacggtctctcggaaatatcaagtttatcggagaattgttcaagctgaagatgttgaccgaagccattatgcacgactgcgtagttaagcttctgaaaaaccacgacgaagagagtctggagtgtctctgccggctactgactactattggtaaagacctggattttgagaaggcgaagccacgaatggatcagtacttcaatcagatggaaaagattatcaaggagaagaaaacctccagccgaattcgtttcatgctccaagacgtgcttgacttacgcggctccaactgggtccccagaaggggagaccaggggccaaaaacaatcgatcaaatccacaaggaagcagagatggaggagcatagagagcatatcaaagtccagcagctcatggctaagggcagtgacaaacgcagggggggtccaccgggaccgcctatatctagaggactacccctcgtggatgatggaggctggaataccgttcctatcagtaaaggctcaaggccgatcgatacttccaggctcactaagatcaccaagcctgggagcattgactcaaataaccagcttttcgcgcctggcgggaggctatcttggggcaaagggtctagcggaggatctggggctaaaccctccgatgcggcatccgaggccgcacgacctgccacctccactctgaacaggttcagcgcgctccagcaggccgtgcctactgaatcgaccgacaatcggagggtggtccagcgatcttctctttccagggagcgaggggagaaagccggggaccggggggaccggctggagagatccgagcgggggggcgaccggggagatagactggatagagctagaacgcccgctacaaaacgcagtttttccaaggaagtcgaggagagaagtagggaaaggccctcacagccggaggggcttaggaaagctgcaagtttgacagaagaccgggaccgcggtagagacgctgtaaaacgagaagctgctctgcccccagtgagccccttgaaggccgctctatctgaggaggaactggagaagaaatcgaaggccattattgaggagtatctgcacttgaacgacatgaaagaagccgtccagtgcgtccaagaattggcatccccatccttactgttcatcttcgtgcgacacggagtggagagcacactggaacggtcagcaatcgcaagggagcatatgggccagttacttcaccaactcctctgcgctggacacctgtcaacagctcaatactaccaaggactttacgagatactggagctcgcagaggatatggagattgatataccgcacgtttggctctaccttgccgaactggtaaccccgattttacaagaaggcggagtgccgatgggcgaactatttcgggagatcaccaagcctctccgacccctggggaaagctgctagcttgttgttagagatcctgggcctgctttgtaaaagtatgggacctaaaaaggtggggacattgtggcgggaggctggcttgagttggaaggaatttttgcctgaagggcaggacatcggagcgtttgtcgcagagcagaaagtggaatacacactaggggaggaatcagaggctcctggccagagagccttaccctctgaagaactaaaccgccagctggaaaaacttctgaaagaagggtcatctaatcagagagtcttcgattggatcgaagccaacctctccgagcagcagattgtatcaaacacgcttgttagagcacttatgacagccgtatgctacagcgccatcatctttgagacccctctgagagtggacgtggccgtcctcaaggcgcgcgccaagctcctgcaaaagtacctatgtgacgaacagaaggagcttcaggctctgtatgccctgcaggccctcgtcgtgacgcttgaacagcctccaaatctcctgagaatgttcttcgacgcgctgtacgatgaggacgtagtgaaggaggacgccttttacagctgggagagcagcaaggatccagcggaacaacagggtaagggggtggccctaaaatccgtgaccgctttttttaaatggctccgggaggcagaggaagagtccgatcacaactag

SEQ ID NO: 15077 - DNA, 492 bp, synthetic construct
  misc_feature 1..492: note = Description of Artificial Sequence: Synthetic coding sequence
  source 1..492: mol_type = other DNA
atgtccggagcaaggactgcatccacacccacgccaccccagacaggcggaggccttgaaccacaggctaacggcgagaccccgcaggtggcggtcattgtccgcccagatgaccgcagccagggtgcgattatcgctgaccgacctggactgcctggccccgagcactccccatcagagtcacagccttccagtccatcaccgacgcctagtccgagtcccgtgctggaaccaggcagtgagccgaacctcgcagttcttagtattcctggtgacacaatgaccacaattcaaatgtcagtcgaagaaagtacccccatctcccgtgaaacaggggaaccttatcgcttgagcccagagccaaccccactcgctgaaccaatactcgaagtggaggtgactctcagtaagccagtgccagagtccgaattttcctcttcacctttacaagccccaactcccctcgccagtcacaccgttgagatccactag

SEQ ID NO: 15078 - DNA, 4542 bp, synthetic construct
  misc_feature 1..4542: note = Description of Artificial Sequence: Synthetic coding sequence
  source 1..4542: mol_type = other DNA
atgatgataccctcccagatttcatacccggcgagtcagggtgcctactacatccctggtcaggggagaagtacttacgtggtaccaactcagcagtatcctgtccagcctggcgcccccggcttttatccgggcgccagtccaaccgagttcggcacctatgccggcgcctattatcccgcacagggcgtgcagcagttccccacgggcgtggcccctacccctgttctcatgaaccagcccccccagattgcccctaaacgcgagaggaagactattcggataagggatcccaatcagggtgggaaggatatcactgaagagattatgtccggagcacgcaccgcttcaactccaactccaccacagacgggaggtggactagaacctcaggctaacggcgagacaccgcaagtcgctgtgatcgtaaggcctgacgaccgatcccaaggtgcaataatcgctgaccgaccaggcttaccgggccctgagcattctccatccgaatcccagccgagcagcccaagtcctactccaagtcccagtccagtcctggagcccggttccgaacccaatttagccgtgttatctatccccggtgatactatgaccacaattcagatgagcgtcgaagagagtactccaatttcccgggaaacaggagagccgtaccggctttcccccgaaccaacaccgctcgccgagccaatacttgaggtcgaagtgacattgagtaagccagtccctgagagtgagtttagcagcagtcccctacaggccccgacccctcttgctagtcacactgtcgaaattcacgagccaaatgggatggtgccctcagaggaccttgagcctgaagtggagagttcccccgaactggcacccccgcccgcttgcccaagcgagagtcccgtgccaatagccccgaccgcccagccggaggagctgttgaatggggctccttctccacccgctgtggacctctctccagtctcagaacctgaggagcaggccaaggaagtgaccgcctcaatggcccctccgacgatcccctccgcgactcccgccactgcccccagcgcaacgagccctgcccaagaggaagaaatggaagaggaagaagaagaggaagagggcgaggcaggagaggctggagaagccgagagcgagaaaggcggagaagaacttctaccccctgagtcaacgcccatcccggcaaacttgagtcaaaacctggaagccgccgctgcaacacaggtggctgtaagcgtgccaaaacgcagacgaaagataaaggagctgaataaaaaggaagcggtgggtgatttactggatgccttcaaagaggctaaccccgccgtgcctgaagtggaaaatcagccacccgcagggtcgaacccaggacccgaatctgagggaagtggcgtgcccccccggccagaggaggcggatgaaacctgggactcaaaggaagacaagatccacaatgccgagaatattcagccaggagagcagaagtacgagtataagtccgaccagtggaagcccctgaatctggaggagaaaaagaggtacgaccgtgagttcctcctgggctttcagttcatctttgcttccatgcagaagcctgagggcctgccccatatctcagacgtcgtcctcgacaaggcaaataaaaccccactgaggccgctcgatcccacccgtttgcagggcatcaactgtggacccgatttcacaccctcattcgcaaatctgggtagaaccaccctgtctacacgtgggccaccccgcggtgggcccggcggggagttaccacgcggcccgcaggctggtctgggtcccagacgatctcaacaagggcccaggaaggagcctcggaaaattatcgcaactgtcctcatgactgaagacattaagctgaacaaggccgaaaaggcttggaagccttcaagtaaaaggaccgctgccgacaaagataggggggaggaagacgccgatggaagtaaaacccaggaccttttcaggagagtacggtcaattcttaacaagctgacccctcagatgttccagcaattgatgaagcaggtcacccagctcgccattgacaccgaagagagactaaaaggtgtgatagacctcatttttgaaaaagccatatctgaaccaaatttttccgtagcatacgccaatatgtgcagatgtctgatggcattgaaagtacccaccactgaaaagccaacagtaacagtcaatttccgcaagcttctgctgaaccgatgccaaaaagagtttgagaaagataaggatgatgatgaggtctttgagaagaagcagaaagaaatggacgaagctgccacagcggaggaacgtggtagactgaaggaagaactagaagaggctcgcgatatcgcacgtcggagaagtctgggcaacataaaattcataggcgaactgttcaagttaaagatgttaaccgaggccattatgcatgattgcgttgttaagctgcttaagaaccatgacgaggaaagtctggaatgcctttgcagattactgacaaccataggaaaggacctcgacttcgaaaaggccaagccccggatggatcagtactttaaccagatggagaagatcattaaggaaaaaaagacaagcagtaggatcagatttatgctccaggacgttttggacctcaggggaagcaactgggtgccacgcaggggggaccagggccccaagacaatcgatcaaatccataaagaggctgagatggaagagcaccgcgagcacatcaaagtccagcagctgatggctaaggggtcagataagcgtcgggggggcccaccagggcccccaatctccagaggacttcccctggtggacgacgggggctggaatactgtacctatctcaaagggtagcaggcccattgacacttcgcggttgaccaagatcaccaaacccgggtcgattgattctaataaccagctgtttgcgcctggaggaagactctcttggggaaagggctcgagcggcggcagcggcgccaagcccagcgacgccgcctccgaggctgcgagaccagctaccagcacactgaatcgcttcagcgcgttgcaacaagctgtcccgaccgagtccacggataatcggcgcgttgtccaaaggagcagtttaagccgcgagaggggcgagaaggcaggggaccggggcgataggctcgagcgaagcgaacggggcggagatcggggcgaccggctagatagagcgcgaactcccgccacaaaaagaagtttttccaaagaggtcgaagagcggagtagagagagaccttcccagcccgagggcctccgcaaggctgcatctctaactgaggaccgcgatcgggggagggatgccgtgaaaagggaggcagctctgccgcctgttagtccgcttaaggccgccctgagcgaggaggagctggagaagaagtccaaagctatcatagaggaatacctgcacctcaatgatatgaaagaggcagtacagtgtgttcaggaattggcttcaccgtcactccttttcattttcgtgcgccatggagtggaatcaacgttagaacggagcgcaatcgcaagggagcacatgggacagctcctgcaccagctgctgtgtgcaggtcacctgtcaacagctcagtactatcaaggattgtacgagatcctggagctcgctgaggatatggagatcgacatcccacacgtgtggttatacctcgccgagctggtcactccaatactccaagagggtggggttccaatgggcgagctgtttagagaaataacaaaacccctgagaccgcttgggaaagcagcctccctgctgctagagattctgggcctactctgtaagtccatggggccaaaaaaggtggggacactatggagggaggcgggcttaagctggaaagagtttcttcctgaaggccaggacatcggtgccttcgtcgccgagcagaaagtcgaatacactctgggggaagagtccgaagcacccggccagcgcgctctcccgagtgaggagcttaaccgccaactggaaaagttactgaaagagggctcctctaatcagagggttttcgattggatcgaggctaacttgtctgagcaacagattgtgtctaatacactggtcagggccctcatgacggcagtttgttattctgccatcatcttcgaaacccctctgcgagtggatgtggcagtcctgaaagcaagagccaagctgttacagaagtacctctgtgacgaacagaaggaactgcaagccctatacgctttgcaggctctggtcgtgacactcgagcagccccccaacctgctcaggatgttcttcgacgccctgtacgatgaggatgtcgttaaggaagacgccttttacagctgggaatctagtaaagatcccgccgaacagcagggcaagggagtcgcattgaagagcgtcacggcatttttcaaatggcttcgcgaggcagaagaagagtccgaccacaattag

SEQ ID NO: 15079 - DNA, 432 bp, synthetic construct
  misc_feature 1..432: note = Description of Artificial Sequence: Synthetic coding sequence
  source 1..432: mol_type = other DNA
atgtccggtgcaaggaccgcttcgactcctacacccccacagacaggcggggggctggaacctcaggccaacggggagaccccccaggttgccgttatcgtgcgccctgacgatagaagtcagggcgcaatcatcgctgatcggcctgggcttcccggaccagaacattctccctctgagagtcagccgagctccccttcccccacaccatctccctcgccggtgctagagcctggttctgaacctaacctcgccgtcttgagcatccctggggataccatgaccacaatacagatgtccgtcgaagagtctacacccataagtcgagaaacaggagagccatatcgcttgtcccctgaacccactcccctggctgagcctatcctagaagtggaagttactctgtctaagccagtacctgagagcgagtag

SEQ ID NO: 15080 - DNA, 4215 bp, synthetic construct
  misc_feature 1..4215: note = Description of Artificial Sequence: Synthetic coding sequence
  source 1..4215: mol_type = other DNA
atgtcgggtgccagaaccgcttctactcccactcctcctcagaccggtggagggctggagccccaggcaaacggggagacaccccaggttgctgtaatcgtgcgaccggatgaccgttctcagggcgctatcattgccgacaggcctggactccccggacctgagcactcgccctccgaatcacagccctcctccccgagcccaacaccatcacccagccccgtgctggagccgggatccgaaccgaacctagcagtgctgtccatccctggcgacaccatgactaccatccagatgtctgtagaggagtccacccctatctctagagagacaggcgagccgtacaggctgtcgcccgagccaacacctttggcggaaccaattctggaagtagaagtcacactcagcaaacctgtgcccgagagcgagttctcatcatcccctcttcaggcccccacccccttagcatctcatacagtggagatacacgagccaaatgggatggtgccctcagaggatctcgaaccggaagtcgaatccagccctgagctcgccccaccccctgcctgcccttcagaatcccccgtgcctattgcccctacggcccagcctgaggagctcctgaatggcgcgccctctccaccagctgttgacctgagccccgtcagcgagcccgaagagcaggccaaagaagttaccgccagtatggcccctcccactataccctcagccaccccagcaactgcaccctctgcaactagtccagctcaagaggaagaaatggaggaagaggaggaagaggaagaaggtgaggctggagaagcaggcgaggctgagagcgagaagggaggcgaagagttgctgccaccagagtccacacccattccggctaacctgtcacagaacctagaagcagcagcggccacacaggttgcagtttccgtgccaaagcgtagacgcaaaatcaaggagctcaacaagaaggaggctgtcggcgaccttttagatgcttttaaagaggcgaatcccgctgtgccagaggtcgagaatcaacccccagcgggatctaaccctgggcccgaatccgagggatcaggagtccccccccggcctgaggaggccgatgagacctgggactcaaaagaagacaagatccacaatgccgagaacatccaacctggggagcaaaagtacgaatataaatccgatcagtggaagcctctcaacctcgaagagaagaagcggtacgaccgtgaattcctcctcggtttccaatttatttttgccagtatgcagaagcccgagggcctgcctcatatttcggatgtagtgctggataaggccaacaaaacgccactgcgaccactggatccaactaggctgcaggggataaactgtgggccggattttacacctagcttcgctaacctgggcaggacaactctgtccaccaggggccccccgaggggcggtcctggtggagaattgccaagagggccacaggcaggcttgggaccccggcgcagtcagcagggcccacgtaaggaacccagaaagataattgccacggtgttgatgactgaagacatcaagctgaacaaggccgaaaaagcttggaagccgagctcgaaacgcactgctgccgacaaggatagaggtgaggaggacgcggacggcagcaaaacgcaggacctttttcggcgcgtccgaagcattttgaataaattgacaccccaaatgttccagcagttgatgaagcaggtcacacagctggcaattgacactgaggaacggcttaaaggagttattgacttgatctttgaaaaagccataagcgaacccaatttttctgttgcatacgccaatatgtgtcgatgcctcatggcattaaaagtacccacaaccgagaaacccacagtaaccgtcaatttcagaaaacttctactgaacagatgccagaaggagttcgaaaaagataaggatgatgacgaagtatttgaaaaaaagcagaaggagatggacgaggcggctaccgccgaagagaggggtagactcaaggaggagctggaggaggcgcgggacatcgctaggcggagaagcctcggtaatataaaatttattggtgaactgttcaagttgaagatgcttacggaggcaattatgcatgattgcgttgtcaaattgctgaagaaccacgacgaggaatcactcgagtgcctctgtcgcctcctgaccaccattggaaaggacctggatttcgaaaaggcaaagccacgcatggaccagtattttaaccagatggaaaagataattaaagaaaaaaaaacctcctccaggataagatttatgctgcaggatgtcttggacctgcgaggatcgaattgggtccccaggcggggagatcaagggccaaaaaccattgaccagatccacaaggaagctgagatggaggaacaccgggaacatattaaagtgcagcaacttatggccaaggggtccgacaaacgccgtggggggcccccgggccccccaatctccagagggctgccactcgtggatgacggcgggtggaacaccgtgccaatctcaaaaggcagccgccctatagacacctcccgcctcaccaaaattaccaaacccggcagcattgattctaataatcagctctttgcccccggcggacgattgagttggggtaaaggctcatcggggggctcaggcgcgaaaccgtctgacgccgcatcagaagctgctcgacccgctacttccaccttgaaccgattttcagccctgcagcaggccgtgccaactgaaagtactgataacagaagagtggtgcagcgatcttccctgtcccgggaacgcggcgaaaaggcaggcgaccgaggagatcgtcttgaaagatctgagagaggaggagataggggtgatcgccttgacagggctaggacaccagccaccaagaggagtttcagcaaggaggttgaggagcgctctcgcgaaaggcccagccaacctgaagggctcagaaaagccgcaagtctcaccgaggacagggataggggcagagatgctgtcaaacgtgaggccgcactgcctccagtaagtcccttgaaggcagctctttctgaggaagaacttgaaaagaagagtaaagctattattgaagagtatttgcacctgaatgatatgaaggaagccgtgcaatgcgtccaggagcttgcatcaccttctctcctattcatctttgtgcggcatggagtcgaatctacgcttgaacggagcgccatcgccagggaacacatggggcagctgctacaccagctgctttgtgccgggcacctcagcacagcccaatattatcagggactttacgaaattctcgaactggcagaagacatggagattgacattccccatgtttggctctatctggccgagctcgtgaccccaatcctgcaagagggcggcgtccctatgggcgaactttttcgggaaattaccaaacccctccgccctcttggcaaggccgccagcctgttgctggagatcttggggcttctatgtaagtccatgggaccaaagaaggtgggtacattgtggcgcgaagcaggtctctcttggaaggaattcttacccgaaggccaggatataggggccttcgtggccgagcagaaagtcgagtacacattaggtgaggagtcggaagccccaggacaaagggcactgccatccgaggagctcaataggcagttagaaaagttattaaaggagggatcctctaatcagagagtgttcgactggatagaggctaatctgtccgaacaacaaatcgtctcgaacaccctggtacgggctctgatgactgctgtgtgctattccgctatcatcttcgaaacacctcttcgagtcgacgtggccgtcctcaaggcccgtgccaagctccttcagaagtacctgtgtgacgagcaaaaagaattgcaggccctatacgctttgcaggccctggtcgtgactctggaacagccacctaacttgttgaggatgttttttgatgcactgtatgatgaggacgttgtaaaagaggacgcattttactcatgggaatcgtcaaaggaccctgccgaacagcagggaaagggcgttgcactgaagagcgtgacagcattctttaagtggcttcgtgaagctgaggaagagtcagaccataattag

SEQ ID NO: 15081 - DNA, 4212 bp, synthetic construct
  misc_feature 1..4212: note = Description of Artificial Sequence: Synthetic coding sequence
  source 1..4212: mol_type = other DNA
atgtctggagctagaacagcctctacgccgacccccccccagacgggcgggggactcgagccccaggccaacggcgagaccccccaggtggcagttattgttagacctgatgaccgcagtcagggtgctattatcgctgatagacctggcctgcccggtcctgaacacagcccctcagaatcccagccgtcgtcaccttcccctactccgtcccctagtcccgtcttggagccgggttctgaacccaatcttgctgtcctctccatcccaggggacacaatgaccacaatacagatgtccgtggaagagtctacccctatcagtagggaaactggggagccttatagactgagccccgagcccacaccgctggccgagcctatcctggaggtggaggttacactgagcaagccagtgcccgaaagtgagttttcatccagccccctgcaggccccaacccccttggcatcacatactgtagagattcacgagccaaacggcatggtaccatccgaggatctggagcccgaagtcgaaagttctcccgaactcgcacctcctccagcctgcccgagcgagtctcccgtgccgatcgccccaaccgcccaacctgaagagctgctgaatggcgctccatctccacctgccgtcgatctttcccccgtgtccgaaccagaggagcaagcaaaggaggtgacagcttctatggctcctcccaccatccctagtgcaacccctgccactgcgcccagcgcaaccagccccgcacaggaggaggagatggaagaggaagaggaggaggaggagggggaggccggggaggctggggaggccgaatcagaaaaggggggggaagagctgctccctccagagagcaccccaatcccagctaacctatcccagaacctggaggccgcggccgcaacccaggtggcagtatctgtcccgaagcggaggaggaagatcaaggaattgaataagaaggaggcagtcggggacctgctcgacgctttcaaggaggcaaaccccgctgtgcccgaagtggagaaccagccacccgctgggtccaatcctggacctgagtccgaaggttcaggagtgccacccagaccagaggaggcggatgaaacctgggattccaaagaggacaaaattcataacgcagagaatatccagccaggggagcagaagtacgagtataagtcagaccagtggaagccattgaacttagaggagaaaaaacgttatgaccgcgagtttttgcttggattccagttcatctttgcctcaatgcagaagcccgaaggactgccacatatctctgatgtggttctagacaaagccaacaagactcccctccgcccactggatccgactcggctgcaagggatcaattgcggaccggacttcacccctagctttgccaatttggggcgaactaccctgagcacccggggcccccccagaggggggccaggcggagagctgcctagaggcccagcaggtttaggcccgcgaagatcacaacaggggccaagaaaagaaccacggaagatcatcgcaaccgttctgatgactgaggatataaaactgaataaagctgaaaaggcctggaagcctagctccaaaaggacagctgcagataaggatcggggcgaagaagatgcagacggctcaaagacccaggacctgttcaggcgcgtacgcagcatcttaaacaagctcactccccagatgtttcaacagttgatgaaacaggtgactcagttggccatcgacactgaagagcggctgaagggggttattgatctcatatttgagaaggcaatctcggaacccaacttcagcgtcgcatacgccaacatgtgtcgctgcctgatggcattaaaggtcccaaccacagagaaaccgaccgtgaccgtgaattttcggaagctcctcttaaacaggtgccagaaggaattcgagaaggacaaggatgacgacgaagtgttcgaaaagaagcagaaggagatggatgaggcagccaccgctgaagagaggggcagactcaaagaagagttggaagaggcccgcgatattgcacgaagaaggtccctagggaatattaaatttataggagagctatttaagcttaagatgctgaccgaggccattatgcacgattgcgtggtgaagctgctgaagaatcacgatgaggagtcattagagtgtctgtgccggctgctcacgaccatcggtaaggatctggactttgagaaagctaagcctcgcatggaccagtatttcaaccagatggagaagataattaaggagaagaaaacaagcagcaggataagattcatgctccaggacgttctcgatcttcggggttctaattgggttcctagacggggagatcaaggccctaagacaatcgatcagatacacaaggaggctgagatggaggaacatagagaacacatcaaggtgcaacaactaatggctaagggatctgataaacgcaggggagggcctcctggacccccaattagccgcggactacctctggtagacgacggtggatggaacacagtacccatcagtaagggatctaggccaatcgacacgtctcggctgacaaagataacaaagccagggtccatcgacagcaataatcagcttttcgcacctggtggcaggctgagctgggggaaaggcagtagcggcgggagtggtgcaaagccgagcgacgcggcctctgaggctgcccgcccagccacatcaaccctgaatcggttttccgcactacagcaggctgtcccaactgagagcactgataacagaagggtggtgcagaggtctagcctaagccgagagagaggagaaaaggctggagaccgcggagatagactggagcgcagtgaaagaggcggagacaggggggatcggctggaccgagctcgaactccagcaaccaaaagatccttttccaaggaggtggaggagcgctcccgggaaagacccagccagccggagggcctgcgaaaagccgcatctctgacggaagatagggaccggggcagggacgccgttaaaagagaggccgcccttccccccgtcagcccactaaaggccgcgctgagtgaggaggaactcgagaaaaagtcaaaagctattattgaagaatatctgcacctgaacgacatgaaggaagcagtacaatgcgtacaggagctagccagtccaagcttgctgttcatctttgtcagacacggcgttgagagcaccttggagcgctccgccatcgcaagagagcatatgggccagctattacaccagctgctgtgcgcaggacacctctctactgcacaatactaccagggtctttatgagatcttggagctggccgaagacatggagattgatattccccacgtctggctatacctggccgaattggtcacgcccatactgcaggagggaggcgtccccatgggcgagttgtttcgggagataactaaaccactgaggcccctcggcaaagctgcaagtttgttactggagattttgggactgctatgcaagtcgatggggccgaaaaaggtgggcacattatggagagaggcgggcttgtcttggaaagaattcctgcctgaagggcaggacataggcgctttcgtggccgaacagaaggtggagtacacacttggcgaggagagcgaggctcccgggcagcgggcactaccgtccgaagaactcaatcggcaactggagaaacttcttaaggaaggatcttctaatcaacgcgtctttgactggattgaagcaaacctttctgagcagcagatcgtgtctaataccctggtccgagccctcatgacggctgtatgttattccgctatcattttcgagactcccctacgggtggacgtcgccgtgctaaaggcacgcgctaagttactgcagaagtacctctgtgacgagcagaaggagttgcaggccctttatgccctgcaggctctggtggtcacattagagcaacccccaaatctgcttagaatgtttttcgacgccctgtacgatgaggatgttgtgaaggaggacgctttttactcttgggagagttccaaggatccggccgagcagcagggcaagggcgttgccctgaagtctgtgactgcgttctttaaatggctccgtgaagctgaagaggaatccgatcataattag

SEQ ID NO: 15082 - DNA, 4311 bp, synthetic construct
  misc_feature 1..4311: note = Description of Artificial Sequence: Synthetic coding sequence
  source 1..4311: mol_type = other DNA
atgaaccagcctcctcagatagctcccaaaagagagcgcaaaaccatcaggattcgagacccaaatcagggcggtaaggatatcacagaggaaatcatgtcaggagcacgcacagcctctacacctactccccctcaaacaggaggaggtttggagccccaggctaatggagaaactccacaagttgcagttatcgtcaggccagacgaccgttcacagggcgccattattgctgaccgtcctggacttccgggtccagaacattcccccagcgagagccagccctcctccccatcaccgacgccttccccctcccccgtactggaacctggaagcgagcccaacctcgcggtgttatccataccaggcgataccatgacaaccatccagatgagcgtcgaagagagcacacctatcagtagagaaacaggtgaaccataccgcctaagcccagagccgactcccttagctgagccgattctggaagtggaggtgaccctctccaagcccgtgcctgaatcagagttttccagctcgccacttcaggctccgacaccgctcgcctctcatactgttgagattcacgagcccaacgggatggtgccctcagaggatcttgagccagaagtagagagctctccagagcttgccccgccacccgcatgtccgagtgagtcccccgtccccattgcacccactgcacaacctgaggaattacttaacggggccccaagccccccagctgtggacttatctcctgtctccgaacccgaggagcaggcaaaagaggtcacggcttctatggcaccaccgacaattccatccgcaacacctgcaactgctccatcagccacctcacccgcacaggaggaggaaatggaagaggaagaggaggaagaggaaggcgaagctggcgaagccggtgaagcggaatctgaaaagggaggagaagaattacttcctccagaatctactcccatcccagcaaatctgagccagaacctggaagcggcagccgcgacacaagtggctgtgagtgtccctaaaagaaggaggaaaatcaaagaacttaacaaaaaggaggctgtgggcgacctgctggacgcattcaaagaggcaaaccctgccgtgcccgaagtggagaaccaacccccagccggatcaaatccggggcccgagagtgaagggagcggggtgccccctaggcccgaagaagcagacgagacttgggactccaaggaggacaagattcacaacgctgagaatatccaacccggtgagcagaaatacgagtataagagcgatcagtggaaaccccttaacctggaggaaaagaagagatacgaccgggaatttttgctcggatttcagttcatattcgcgtccatgcagaaacccgagggcctcccccacatctctgacgtggtgctcgataaggccaacaagactcccctaaggcctttagatccgacacgcctgcagggaatcaactgtgggccagactttactccgtcatttgccaacttggggagaacaactttgtcaacccgagggccaccacgaggtggtccaggcggcgagttgccgagaggaccacaggccggcctcggcccccggcggagtcaacagggtcctcgcaaggaacccaggaagatcattgcaactgtgttgatgacggaggacattaaacttaacaaggcggagaaggcgtggaagccaagctccaagcgcacggctgccgataaggacagaggggaagaagacgcagatggcagcaagactcaagacctcttccggcgagtcagaagcatccttaacaagctgacacctcagatgttccaacagttgatgaagcaggtgacgcaacttgccatagatactgaggaaagactgaagggggtgattgatctgatatttgaaaaggcaatatctgagcctaacttcagcgttgcgtacgctaacatgtgccgatgcttaatggctctcaaggtgcctactacagaaaagcccactgtgaccgtgaatttcagaaagctgctactgaaccggtgccaaaaggaattcgagaaggataaggacgatgatgaagtctttgaaaaaaagcaaaaggaaatggatgaggcagctacagcagaggaaagaggacggctcaaggaagaattggaggaggcaagagacatcgccagacgaagaagcctcggcaacattaagttcataggggagttgtttaaactaaagatgttgacggaggccattatgcatgactgcgtggttaaactcctcaagaaccacgatgaagaaagtctcgagtgcctgtgtaggttgcttaccactattggcaaagatctggacttcgagaaggccaagcccaggatggatcagtatttcaaccagatggagaaaattatcaaggagaaaaaaacatcttctcgaatcaggttcatgctgcaggacgtcctggatttacgtgggtccaattgggtgcctcgtcgcggggatcagggaccaaagaccatcgaccagatccacaaggaagctgagatggaggagcaccgagagcatattaaagtccagcagctgatggccaaaggaagcgataaacgtagaggtggcccaccaggtccccccattagtaggggcctgcccttggtagacgatggcgggtggaatacagtgcccatttccaagggttctagaccaattgacacaagccgtttaacgaaaattacgaaaccgggatccatcgactccaataaccagttgttcgctcccggaggcagactgtcttggggtaagggaagttccggcgggtcaggtgcaaagccatcggacgccgcctctgaggccgcccgccccgccacttccacactgaataggtttagcgctttacagcaggccgtgccgaccgagtcgaccgacaataggagagtggttcagaggtctagcctcagtcgcgaacggggcgagaaagccggagatagaggtgacaggctcgaaaggtccgaacgtggaggggacaggggtgataggcttgaccgtgccaggacgcctgccacaaaacgctctttcagcaaggaagttgaagagcgctctcgagagcgcccctcccaaccggagggcctgaggaaagccgcttcactgacagaggatcgtgaccggggcagggacgctgtgaaacgtgaggccgccctgcctccagtgagtcctctgaaggccgccctgtccgaggaagagctcgaaaaaaaatctaaggcaatcatcgaggaatatttgcatttgaacgatatgaaggaggcagtgcaatgtgttcaggagctggcatcaccctctttgctcttcatcttcgtccgccacggggtggaatcaacattagagcgaagcgcaattgccagagaacacatgggccagttactccatcagcttctgtgtgcaggacatctctcgacagcacagtactaccaaggtctgtatgagattctcgagctcgcggaggacatggagatagatattccgcacgtgtggttgtacctcgcagagctcgtcactcctattctgcaggaaggaggcgtgcccatgggtgagttgttccgggagatcaccaaacccctgaggcctttaggaaaggcagcttctttacttttggagattctgggactgctgtgcaagagtatgggacctaaaaaggtgggcaccttgtggcgggaggccggactgagctggaaggaattcttgcctgagggacaagatatcggagctttcgtcgcagagcagaaggtggagtacacccttggtgaggagagtgaagctccggggcagcgggcattgccgtcagaagagctgaacagacaactcgagaaactgctgaaagaaggctcgtccaatcaaagggtatttgattggattgaggctaatctctctgaacagcaaattgtttcaaacacattggtccgggctttaatgaccgcagtttgttacagcgccatcatatttgagactccattacgcgtggacgtggctgtgctcaaagccagggccaagttgctccaaaagtacctctgcgatgagcaaaaggaactgcaggccttgtatgctctgcaggctctagttgttaccctcgagcaaccgcccaaccttcttcgcatgttttttgatgctctctatgacgaggacgtagtgaaggaagacgctttttattcttgggaaagttctaaggatcccgcagaacaacagggaaagggagtcgcacttaagtcagtcacagcgttctttaaatggctgagagaagcagaggaagagtccgatcataactag

SEQ ID NO: 15083 - DNA, 384 bp, synthetic construct
  misc_feature 1..384: note = Description of Artificial Sequence: Synthetic coding sequence
  source 1..384: mol_type = other DNA
atgtcaggagccagaacggcttcaaccccaaccccaccccagaccggcggaggtttggaaccccaggccaatggagagacaccacaggtagcagtaatcgtgcggccagatgacaggagtcagggagccataattgccgatcggcctggactgcctggacccgaacattcgccgagcgagagccagccatccagtccctcccccaccccatccccatccccagtgctggaaccaggaagtgaacccaacttggccgtgttgagcatccctggcgatacaatgacaacaatacaaatgagcgtggaggagtcaacaccgatttccagggagaccggggaaccgtatcgcctgagtcctgaaccgacccctcttgccgagccttag

SEQ ID NO: 15084 - DNA, 264 bp, synthetic construct
  misc_feature 1..264: note = Description of Artificial Sequence: Synthetic coding sequence
  source 1..264: mol_type = other DNA
atgaacacaccaagccagcctcgacagcacttctacccttctagagcccagcccccaagttctgctgcctcacgggtacagagtgctgccccagcacgccccggacctgcggcccacgtgtaccctgccggctcgcaggtgatgatgattccctcccaaattagttatccagcctcccagggagcctactacattccaggacagggtaggagcacttacgttgtgccgactcaacagtatcccgtgcagccgggggctccctag

SEQ ID NO: 15085 - DNA, 858 bp, synthetic construct
  misc_feature 1..858: note = Description of Artificial Sequence: Synthetic coding sequence
  source 1..858: mol_type = other DNA
atgagcggggctagaactgccagcacacccaccccaccccagaccgggggaggtctagagccccaggccaatggtgaaactccgcaagttgctgtgattgtgcggccagacgaccgatctcagggggcgatcatagcggatcggcccggactcccaggcccagaacacagccccagtgaaagtcaaccatccagcccctcgcccactccgtctcctagcccagtccttgaacctggctccgaaccgaatctggcagttctctcaattcccggcgatactatgacaacaatacaaatgtcggtggaagagtccactcctatttctcgagagactggtgaaccttaccgactgtcccccgagccaactccattggcggaaccaatccttgaagtagaagtcactctatccaagcctgtgccagagtctgagtttagtagctctcctcttcaagctcccacgccgttggcctcacacactgtggagatccatgaacccaacgggatggtcccctccgaagatctcgagccggaggtcgagagctcacccgaattagctccccctcctgcatgtcctagtgagagccctgttccaatcgcacccactgcacagcctgaggagttgctgaatggcgctccatccccccctgcagttgatctgtcccccgtctcggaacccgaggaacaggctaaagaggtcaccgctagcatggcgccacccactattccctccgccaccccagccaccgcaccctctgccacttcaccagcacaggaggaagagatggaggaggaagaagaagaagaggaaggagaggccggagaggctggagaggccgagtctgagaagggtggcgagtag

SEQ ID NO: 15086 - DNA, 1836 bp, synthetic construct
  misc_feature 1..1836: note = Description of Artificial Sequence: Synthetic coding sequence
  source 1..1836: mol_type = other DNA
atggccgcctctgccaagaagaaaaataagaaagggaagacaattagtctgaccgatttccttgctgaggatggcggcacagggggaggctccacctatgtatccaagcccgtgagctgggctgacgagacagacgacctcgagggagacgtgtccactacttggcattccaacgacgacgacgtataccgagcaccccctatcgacagatccatcctgcccactgcgccaagagctgccagagaaccaaacattgacaggtccagacttccaaagagccccccctacacagcattccttggcaatcttccctacgatgtgacagaggagagtattaaggaattcttcaggggactgaatattagcgccgtccggctgcctagggagccctctaaccccgagcgactgaagggatttggatacgcagagtttgaagacctggattcactgttgagcgccttatcattgaatgaggagagccttgggaaccgacgtatacgggtggatgttgcggatcaggcccaagacaaagatagagacgataggtcctttgggcgcgacagaaatagggatagcgacaagaccgacactgattggcgcgctcgaccagctacagatagttttgatgattaccctccccgtaggggcgatgactcatttggagacaaatacagagaccggtacgattcagacaggtacagagatgggtaccgagacggttatcgtgatggacccagaagagatatggaccgatatggcgggcgtgatcggtatgacgataggggttccagggactatgatagagggtatgactccagaatcggttctgggcgccgggccttcggaagcgggtaccggagggacgacgattacagaggcggaggcgaccgatatgaggacagatatgacaggagggatgatcgctcgtggagtagcagggatgactattccagggacgattaccggcgagatgatcggggcccaccccaaagacctaaactgaacttgaagccccgctctacccccaaagaggacgactccagcgcaagtacctctcagtccacacgagccgcttctatttttggtggtgccaaaccggtagataccgcggcacgagaaagagaagtggaagaaaggctccagaaggaacaggagaagctgcagagacaacttgatgaacctaaattggagaggcgtcctagagaacgtcacccatcctggaggtctgaagagacccaggagcgcgaaaggtccagaaccggcagtgagagtagccagaccggaactagtacaacatcttccagaaatgcccggagacgggaatctgaaaaatccctcgaaaacgaaacgctgaataaggaggaggattgtcactctcctacaagcaagccaccaaaacccgatcaacccttaaaagtcatgcccgcaccgccaccgaaagagaacgcttgggtcaagcggtcgtccaaccctcctgcgcgttcccagagctctgacactgaacaacagtcgcccacctctggcggcgggaaggttgcgcctgcacagccgtcagaggagggtcctggacgcaaagacgaaaacaaagttgacggtatgaacgcgccaaaagggcagactggcaactcatctcgcggtccaggcgatggaggaaatcgggatcactggaaggaatccgataggaaagacgggaagaaagatcaggatagtcgttcagcacctgagcctaagaagccggaggagaacccagcaagcaaatttagcagtgccagcaaatatgcagcactgtctgtggatggagaagatgagaacgagggggaggattatgccgagtag

SEQ ID NO: 15087 - DNA, 1764 bp, synthetic construct
  misc_feature 1..1764: note = Description of Artificial Sequence: Synthetic coding sequence
  source 1..1764: mol_type = other DNA
atggcagcctctgctaaaaaaaagaacaagaagggcaagacaatctcactgacagatttcctggccgaggatgggggaaccgggggcgggagtacttacgtgagcaaaccggtgtcgtgggctgatgaaacagacgacctcgagggggacgtctctacgacttggcactctaatgacgacgatgtgtaccgagcacctcccattgatcgcagtatcctgccgactgctcccagagctgcaagagagccgaacattgaccgctcccgtctgcctaaatctccaccatatacagcatttcttgggaacttaccttatgacgtgacagaggagagcattaaggaattctttcggggactgaacatcagtgcagttcggctcccgcgcgaaccatcgaacccagagcgcctcaagggctttggatatgccgaatttgaggatcttgacagtctcctctcagcactgtcacttaacgaagagtctctcggcaatagaaggatccgggtggatgtcgccgaccaggcccaggataaggatcgggatgacaggtcattcggcagagacagaaatagagatagcgataagacggatacagattggcgcgcccgtccagccacagactcttttgacgactacccccctcgcaggggggatgattcattcggggataagtatcgggatcgatacggtggacgggaccgctatgatgatcgcgggagtcgagactacgaccgcgggtacgacagcagaatcggctcaggccgacgtgctttcggctccggctatcgaagagatgacgactataggggaggcggcgatcgttatgaggacaggtatgacagaagagatgatcgaagctggtcgtcacgtgacgactacagcagggatgattatcggcgcgacgacagagggcctccccagagaccgaaacttaatctcaagccgaggagcacccccaaagaggatgattcttctgcgagcacgtcgcaatccacacgcgcagcatctattttcggaggcgccaaacccgtggatactgctgcaagagagagggaggtggaagaacgcctgcagaaagagcaggagaagttgcagcggcagctggatgaacctaagttagaacggcgtcccagagagaggcatccaagttggaggagcgaggagacccaggagagggagcgatcaagaaccggatccgaaagcagccaaacaggtacatctactacttcgtcgcgaaacgctcgaagaagggagagcgaaaagtcattggagaatgagacactcaataaggaggaggactgccacagcccaacctccaaaccccccaaacctgaccagcctctgaaagtgatgcccgccccaccccccaaagagaatgcctgggtcaagcgaagttcgaacccccctgcaagatctcagtcgtccgacaccgaacagcaatctccaacctctggcggggggaaggtggcacctgcccaaccgagtgaggaggggcccggacgcaaggacgaaaacaaggttgatgggatgaatgctcccaaaggacagactggaaatagttctcgtgggccaggagacggcggaaaccgcgatcactggaaggagagtgacagaaaggacggtaaaaaggatcaggatagtaggtctgcacccgaacccaaaaaacccgaagaaaatccggcttctaagtttagtagcgcatctaaatacgccgccctcagtgtggacggagaggatgagaatgaaggggaggactatgccgaatag

SEQ ID NO: 15088 - DNA, 714 bp, synthetic construct
  misc_feature 1..714: note = Description of Artificial Sequence: Synthetic coding sequence
  source 1..714: mol_type = other DNA
atgctagacctgacatcccgtggacaagttggtactagtcggcggatggccgaggcagcctgcagcgcacatttcttagagaccacgcccacgcctaaccctcccaccacggaggaagagaagactgaatctaatcaagaggtggccaatccagagcactacatcaagcaccctctgcaaaacaggtgggctttgtggtttttcaagaacgataaatctaagacctggcaggcgaatctacgcctgatatccaagttcgatacggtagaagacttctgggccttgtacaatcacattcaactcagcagcaatctaatgccaggctgtgattattccctcttcaaggatggcattgagcccatgtgggaggacgagaaaaataagcgtggcggaaggtggctcattacattgaacaaacagcagaggaggagcgacctggatcggttctggctggagacactgctgtgtttaatcggggagtcattcgacgactattccgacgacgtatgcggagcagtagtgaatgttcgtgccaagggtgataaaattgccatctggacgactgagtgtgagaaccgggaagccgtgacccatatcgggcgtgtttacaaggaaagactgggtcttcccccgaagatcgtgataggttatcagagtcacgccgacacagccaccaagtcaggtagcacaacgaagaaccggtttgtggtgtag

SEQ ID NO: 15089 - DNA, 654 bp, synthetic construct
  misc_feature 1..654: note = Description of Artificial Sequence: Synthetic coding sequence
  source 1..654: mol_type = other DNA
atggccacagttgaacctgaaaccacacctacccccaacccccccactactgaggaggagaagacagagagcaaccaggaggtcgctaatcccgaacactatataaaacatccgttgcagaaccggtgggctctctggttctttaaaaatgataagtcaaaaacttggcaagcaaacctccgcctcatctcaaagtttgacacagtggaagacttttgggctctgtacaaccatattcagctgtcttcaaacctgatgcctggctgcgattacagcttgttcaaagacgggattgaaccaatgtgggaagatgagaaaaacaagagagggggaagatggctgatcacattgaataagcagcagaggaggtccgacctggatcgcttctggctcgaaacactgctgtgtctgataggtgagtcttttgatgattattctgatgacgtctgcggtgcagtggtgaatgtgcgggccaaaggcgacaaaatcgctatctggaccacagagtgtgaaaatcgggaagcagtcactcacattggtagggtttacaaagagcgcctaggactgcctccgaaaatcgtgattgggtatcaatcgcacgctgatacggccaccaaatccgggagtacgactaaaaataggtttgtcgtgtag

SEQ ID NO: 15090 - DNA, 747 bp, synthetic construct
  misc_feature 1..747: note = Description of Artificial Sequence: Synthetic coding sequence
  source 1..747: mol_type = other DNA
atggcgactgtagaaccagaaactacgccaacacccaaccctcccaccaccgaggaagaaaagacggagtcaaatcaagaagtcgcaaatccagaacactacatcaaacaccccctccaaaaccggtgggccctgtggttttttaaaaacgacaagtccaaaacatggcaggctaatttgcgtctgatatccaagttcgacacagtggaagacttctgggctctctacaaccatatacagctgtcctccaaccttatgccgggctgtgattattccctttttaaggacggaatcgagcctatgtgggaggatgagaaaaacaaaagaggcggacggtggctcattacactcaataagcaacaaaggaggtctgatcttgacaggttttggttagaaacccggtgggatctggcaatgcttcctcgcctggtgagcaacttttggccacaggtcatactccccttacagccacccaaagttctcgagctccagctgctctgtctgataggcgaatccttcgatgactatagcgacgacgtgtgcggcgctgtcgtgaacgtgagggcaaaaggggataagatcgccatttggacaaccgagtgcgagaatcgcgaggccgtaacccatataggaagagtatacaaggaaagactcgggctgccaccaaaaatcgtgatcggataccagtcacacgcagacacagcgaccaagtcaggctccaccacaaagaataggtttgttgtgtag

SEQ ID NO: 15091 - DNA, 357 bp, synthetic construct
  misc_feature 1..357: note = Description of Artificial Sequence: Synthetic coding sequence
  source 1..357: mol_type = other DNA
atgagtggaggcagttcttgctctcaaacaccatctagggcgattcccgctactcgtagggtggtccttggcgatggcgtccagttgccaccgggggactattctaccactcctggtggtacgttatttagcacaacccctggaggcaccagaatcatatatgatcgcaagtttttaatggaatgtagaaactctcccgttacaaaaacccctccccgcgatctgccaactatcccgggcgtaacttctccaagcagcgatgagcctcctatggaggcgagccagagccatctgaggaacagcccggaggataagcgcgccggcggcgaagagtcccagtttgaaatggacatatag

SEQ ID NO: 15092 - DNA, 1857 bp, synthetic construct
  misc_feature 1..1857: note = Description of Artificial Sequence: Synthetic coding sequence
  source 1..1857: mol_type = other DNA
atggcttctaccgattactccacctatagtcaggccgctgcgcagcagggttactctgcttacactgcgcagccaacacagggctatgcccagaccacccaggcctacgggcagcaatcatacggtacctatggacagccgactgatgtatcttacactcaggcccaaactactgccacatatgggcagaccgcttatgccaccagctacggtcagccaccaacgggctacacaacaccaacagcaccccaagcctattcccaacccgtccagggctacggaactggtgcttatgataccaccaccgccaccgttaccaccacacaagcaagttacgcagctcaaagtgcctacggtactcagcccgcatatccagcatacgggcagcaaccggctgccactgcaccaacgagaccacaggatggtaacaagcctactgaaacgtcacagcctcaatcgagcaccggagggtataaccagcctagccttggatacggtcagagtaactactcatacccccaggtccctggttcatatcccatgcagccagtgaccgccccgccttcatacccccccactagctattcttcaactcagcctacttcctacgatcaatcctcttactcacagcagaacacatacgggcagccaagttcttatggtcagcagtccagttatggccagcagagctcctatggccagcagccgcctaccagctatccaccccagaccggttcttactcccaggctcctagccagtattcccagcaaagctctagctacggacagcagtcctcattccggcaggaccatccgtcttctatgggcgtctacggacaggagtctggaggattcagcggtcccggcgaaaatcgctctatgtcagggccagacaacagggggcggggccgcggcggcttcgacaggggcgggatgagccgggaccccgacgaggattccgacaattctgccatttacgtgcagggacttaatgacagcgtgactttagacgacttagcggatttcttcaagcagtgtggtgtagtgaaaatgaataagcggactggacaacctatgatccacatctatctggacaaagagactggcaagccgaagggcgatgctacagtgtcttacgaggatccccctactgctaaggccgctgttgagtggttcgacgggaaggatttccaaggcagtaaattaaaagtgtctctggcgcgtaagaagcctcccatgaactcgatgcgtggggggctgcctccaagggaaggaagaggtatgccgcctcccctccggggcgggccgggtggccctggtgggcctggcggtcctatgggaagaatgggtggtagaggaggcgacaggggtggcttcccacccagaggccctcggggcagtagggggaaccctagcggtggcggtaatgtacagcacagggccggcgattggcagtgcccaaatcccgggtgtggcaaccaaaactttgcatggcgaaccgagtgcaatcagtgtaaagccccaaagcctgaggggttcctgcctcccccctttcccccaccagggggcgatcgcggccgtggcggtcctggaggcatgcggggagggagaggtgggctgatggatcgcggagggcccggcgggatgttccggggcggccgtggaggggatcgtggtggatttaggggcggccggggaatggaccgcggagggtttggtggtggcaggagaggaggccccggtggcccccctggtccactcatggagcagatgggaggaaggagaggcgggaggggcggcccgggaaaaatggacaaaggagaacataggcaggagcggcgcgaccgcccctactag

SEQ ID NO: 15093 - DNA, 1803 bp, synthetic construct
  misc_feature 1..1803: note = Description of Artificial Sequence: Synthetic coding sequence
  source 1..1803: mol_type = other DNA
atggccagcaccgattattcaacctattcccaggccgcagcgcagcagggttactctgcttataccgctcaacccacccagggatatgcccaaacaactcaggcttacggccagcagagttatggtacctatggccaacctacggatgtatcatacactcaggctcagactaccgcaacctatggacagacagcctatgccacctcgtacgggcagcccccaactggatatacaaccccaaccgctcctcaggcttactctcagcctgttcaagggtatggcacaggggcttacgacaccacaacagcgactgtgaccaccacccaagcttcgtatgctgctcagagcgcctatggcacccaacctgcctaccctgcatacgggcagcagcccgcagcgacagcccccacttcttacagtagcacccagcccacgagctatgatcagtcaagctactctcagcagaacacgtacggtcagcccagcagctatggccagcagtccagctacggccaacagtcttcctatggccagcagcctccaactagttaccctcctcagacagggagctacagtcaggcaccctcacaatatagtcaacaatcaagtagctacggccaacagtctagctttaggcaagatcatccctctagcatgggggtatacggacaagagtcgggtggattctccggccccggagaaaatagaagtatgagtggaccagacaaccgcggccggggaagaggaggatttgatcggggggggatgtctagagggggaaggggtgggggccggggcggcatggggagcgccggtgagcggggcgggtttaacaaaccaggtggccccatggacgagggaccagatctagaccttggccccccggttgacccagatgaggactctgacaacagcgccatctacgtccaagggctcaacgattcagtcacgcttgacgatctcgccgacttcttcaaacagtgtggcgtagtaaaaatgaacaaacgaacaggccagccgatgatccatatttatctcgacaaggaaacagggaaacctaagggggacgctaccgtgagttacgaagatccgccaacggctaaagccgctgtagagtggtttgacgggaaagatttccagggatccaaactcaaggtgtcactagcgagaaagaaaccacccatgaattcaatgagaggcggccttcccccacgggagggccggggaatgccacctccgctgcgcggcgggccaggtggccccgggggacccggaggtccaatgggccggatggggggcagaggaggcgatcgcggaggttttcccccccgtggtcctcggggaagccgtggcaacccctcagggggcgggaacgtgcagcacagagcaggcgactggcagtgccctaaccctggttgtggtaaccaaaatttcgcctggaggaccgagtgcaaccagtgtaaagcccctaagcccgaagggtttttgccccctccatttccccccccaggaggcgaccgggggcgtgggggtccaggcggcatgcgcggcggccggggcggtctgatggaccgcggggggcctggtgggatgttcaggggggggcgaggaggtgaccggggtggcttccgagggggaaggggcatggaccgtggaggattcggcggtggccgtcggggaggaccggggggacccccaggacctctcatggaacagatgggcggccggaggggtggcagaggcggcccaggcaagatggataagggcgaacataggcaagaacgacgggacagaccgtactag

SEQ ID NO: 15094 - DNA, 1752 bp, synthetic construct
  misc_feature 1..1752: note = Description of Artificial Sequence: Synthetic coding sequence
  source 1..1752: mol_type = other DNA
atggctagcactgactattctacctattcgcaggctgctgcccaacaggggtactccgcctacaccgcccagcctacccaggggtacgctcagactactcaagcctacggtcagcagagctacggaacatacggccaacccacagatgttagctacactcaggcccaaactaccgcaacatacggccagaccgcttacgccacaagctatggacagccccctaccggctatacaactcccaccgccccccaggcctacagtcagcccgtgcaggggtatggtactggtgcttacgacactaccaccgcgaccgttacaaccacacaagcttcttatgcagctcagagcgcttatggaacccagcccgcttatcccgcttacgggcagcaacccgctgcaacagcaccaaccagacctcaggatggcaacaaacctaccgaaacctctcagccccagtcctcaaccggcgggtacaaccagccgagtctggggtatggtcaaagtaattattcttacccccaggtgccagggtcttatcctatgcagcctgtgacggcccctccttcatacccccctacgtcatactctagcactcagcccaccagttatgaccagtcgtcttacagccagcagaacacctatggacagccatcttcctatggtcagcaaagtagttatgggcagcagagtagttatggccaacagccacctaccagctacccccctcaaaccgggtcttacagccaggccccatctcagtatagccagcagagctcctcctatggccagcagagaccaatggacgagggacctgacctggatctcggaccacctgtcgatcccgatgaggactctgacaactctgcgatatatgtgcaaggcctgaacgacagcgtcaccctggatgatctagccgatttcttcaaacagtgcggagtcgtgaaaatgaacaagcgcactgggcaacccatgattcatatctatctcgataaggagactggtaagccaaagggtgacgcaactgtgtcttacgaagatcccccgaccgccaaagcagcggtggaatggtttgatggcaaggacttccagggttcaaagctgaaggtaagtttagcgcggaagaagccccccatgaactctatgcggggaggacttcctccgcgggagggaaggggtatgcctccacccctgagagggggtccggggggacccggagggccaggcggcccaatgggacgaatgggaggtaggggcggggatcgagggggcttccctccccgcggaccaagggggtcacgaggtaatccgagcggggggggcaatgtccaacatcgggccggcgattggcagtgcccaaatcccggatgcggtaaccaaaatttcgcttggagaacggaatgcaatcagtgcaaggccccaaaacctgaaggcttcttaccgcctcctttccctcctccaggaggagaccgcgggaggggtggcccggggggtatgcgggggggtagaggtggactcatggatcggggcggcccgggcggcatgtttcgcggaggccgtggtggggacagaggaggctttaggggcgggcgggggatggaccggggtggatttgggggtgggaggcgaggtggcccaggggggcctcccggaccacttatggagcagatgggcgggaggagaggtggccggggtggcccaggaaagatggataaaggcgaacatcgacaggaacgccgtgacagaccatactag

SEQ ID NO: 15095 - DNA, 1971 bp, synthetic construct
  misc_feature 1..1971: note = Description of Artificial Sequence: Synthetic coding sequence
  source 1..1971: mol_type = other DNA
atggcatcaacagattacagcacctactctcaggccgctgcccagcaggggtatagcgcctacactgcccagccaacccaagggtacgcgcagacgacacaagcttacggccagcaaagctatggaacgtatggtcaaccaaccgatgtgtcctatacacaagcacagactaccgctacttacggccaaactgcatacgcaacatcatacgggcagcctccaacaggttatacgaccccaactgcgcctcaggcgtactctcagcctgttcaggggtacggaaccggggcttatgacacaacgaccgcaaccgtcaccacaactcaggcctcctatgccgcacaaagtgcatatggtacccaacccgcataccccgcttacggccagcagcctgctgccacagcgccaactcgtccccaagacggcaataagcccacagagacctcgcagcctcagtccagtaccgggggatacaaccagcccagcctgggatacggtcagtcaaattacagctatcctcaagttccgggtagctaccctatgcaaccagttaccgcaccgccttcttacccccccaccagctatagcagcacacagcctacgagttacgatcagtcttcttacagccagcaaaatacatatggccagcccagcagctacgggcagcagtccagctacgggcagcaatcttcctacggacagcagcccccaacctcctacccccctcaaaccggctcctattcgcaggctccctcccagtattcccaacagagttcgtcctatggacagcagagcagtttcagacaagatcacccctcaagcatgggcgtctacgggcaggagagtggcggtttctccggccccggggaaaaccggagtatgagtggacctgacaataggggtagggggcggggaggattcgatcgcggcggaatgagccgcggaggcagaggcggtggtagggggggcatgggttcagccggagagaggggtggctttaacaaaccaggaggacccatggatgagggccctgacctggacttggggcctcccgtggacccggatgaggacagcgacaactctgccatctacgtccagggacttaacgacagcgtgactcttgatgacctggccgacttcttcaagcagtgcggcgtcgttaagatgaacaagcgcacaggccagcctatgatccacatatacctggacaaggagacaggtaagcctaagggagacgccaccgtgagctatgaggaccccccgacagccaaggcggccgtcgaatggttcgacggaaaggacttccagggctccaagctcaaagtttcgctcgcccggaagaaacctccaatgaacagtatgaggggaggccttccccctagagagggccgcgggatgcctcctccactccgcggtggccctggtggccccggaggaccaggaggccctatgggacgaatgggtggacggggcggcgatagaggcgggttcccaccccggggtccacggggcagtagaggtaatccctctggtggaggcaacgtccagcaccgcgctggggattggcagtgtccaaatccggggtgcggcaatcagaactttgcatggcgaacagaatgcaaccagtgtaaggctcccaagcccgagggattcctcccgcctccgtttcctccccccgggggagacagggggcggggcggcccaggtggcatgcgcggggggcgcggcggcctcatggacaggggggggcctggaggcatgtttagaggggggagggggggggaccgcggcggatttagaggcggccgcgggatggatcggggcggatttggaggaggtaggcgaggagggcccgggggccctcctggccccttaatggagcagatgggtggcaggcgcggtggccggggcggtcccgggaaaatggacaagggcgagcacagacaggagaggcgcgacaggccctattag

SEQ ID NO: 15096 - DNA, 1968 bp, synthetic construct
  misc_feature 1..1968: note = Description of Artificial Sequence: Synthetic coding sequence
  source 1..1968: mol_type = other DNA
atggcatcaacagattatagcacctactcacaggccgctgctcaacaggggtactccgcctacaccgcccagcccactcagggatacgcgcagacaacacaagcctacgggcagcagtcatacggtacttacgggcagcccacagatgtgagttacactcaggcccaaacaactgcaacttatgggcagacagcttacgccacatcctatggacagcctcctaccgggtatactacacctactgcaccacaggcatactcccagcctgtgcaaggctatggcacaggtgcttatgacaccactacagccaccgttactacgacccaggcttcctacgctgctcagtccgcctacggcacccagcccgcctatccggcgtatgggcagcagcccgctgcgactgctcccacacgccctcaggatggcaacaagcccaccgaaacatctcagccgcagtcatctacgggaggatacaatcaacccagcttggggtatggacagtctaactatagctatcctcaagtgccaggaagttatcccatgcagccagtgaccgcccctccttcctatccaccgacctcctattcaagcacccaaccaacctcatatgatcagagctcttactcacaacaaaatacctacggtcagccttctagttacgggcagcagagctcgtacgggcagcagtcttcttacggccaacagccacccaccagctacccccctcaaaccggctcatacagtcaagccccctcccagtactctcagcaatcttcctcatacggccaacagtcttccttccggcaagaccaccctagcagtatgggggtttacggccaagagagtggagggttttccggtccgggggagaataggtccatgtctgggcccgacaatcgcgggaggggtcgtggaggtttcgaccggggcgggatgagcaggggtgggagaggaggtgggcgaggtggaatgggcgccggagaaagaggtggatttaataagccaggagggcctatggacgaggggccagatctcgacctcggaccacctgttgaccccgacgaggactccgacaacagtgcaatatatgttcagggattgaacgattccgtgactctggacgacctcgccgacttctttaaacagtgcggtgtagtaaagatgaacaaaaggacggggcagcctatgatccacatttacctggacaaggaaaccggcaaacccaaaggggatgcaactgtgtcttatgaggatccacctacggctaaagccgccgtcgagtggttcgacggaaaggatttccaaggcagtaagctcaaagtgtccttagccagaaaaaaacctccaatgaatagcatgagaggtgggctgccccccagggagggccgcggcatgccaccacctctaagggggggaccgggggggcccggtggcccgggcggcccgatgggtcggatggggggaaggggaggcgatcgaggaggctttccaccacgtggaccaagggggagccggggtaacccaagtggtggcggtaatgttcagcacagggcaggtgactggcagtgcccgaatccaggatgcggcaaccagaattttgcctggagaactgagtgtaaccagtgtaaagctccaaagcctgagggctttctccccccgcctttcccgccacctggcggcgatagaggacgggggggcccaggagggatgaggggtggaagagggggtctcatggaccggggcggtccagggggaatgttccggggcggacgtggcggagaccgaggcggtttcagagggggaaggggaatggaccgtggagggtttggcggtggacgtcggggcggtccaggggggccaccaggtcctctcatggaacagatgggaggccgccgtggggggcgcggcggcccagggaagatggacaagggtgaacatcggcaggagcggagggacaggccatattag

SEQ ID NO: 15097 - DNA, 1986 bp, synthetic construct
  misc_feature 1..1986: note = Description of Artificial Sequence: Synthetic coding sequence
  source 1..1986: mol_type = other DNA
atggcaagcaccgactattcaacctacagtcaggctgcagcacaacaaggttactcagcgtacacagcacaacctactcagggatatgctcaaacaacacaggcttatggccagcagtcgtacggcacctatggacagcctaccgacgtctcctatactcaggcccagactactgccacctacgggcagacggcgtacgctacttcctacggccaacctccgacagtcgagggtactagcaccggatatacaacaccaactgctccccaggcttacagccaacctgtgcagggatatggcacaggagcgtatgatacgaccacggccactgtgactaccacacaggcttcgtatgccgctcaatccgcctacggaactcagccagcctacccggcatatggacagcagccggccgcaactgctccaaccaggccacaagatggtaacaaaccaacggagacgtcgcagcctcagagttctacgggcgggtacaaccaaccttcgttgggctacggccagagcaactattcttaccctcaggtgcctgggtcttatccaatgcagcccgttacagctcccccttcgtaccctcccacctcctactccagcacccaacccaccagctacgaccagtcaagctattcacagcagaatacatacgggcagccgtctagctacgggcagcagagctcttatggtcagcaaagttcatatggacagcagccccccacttcgtatccgcctcagactggcagctactcccaagccccctcacaatatagccagcagtcctctagctatggtcagcagagttcttttcggcaagaccatccaagctccatgggtgtgtacggtcaggaaagtggaggattttctgggcccggtgagaacagatcaatgagcggcccagataaccgggggcgaggaaggggtgggttcgaccggggcggcatgtcccgagggggcagggggggaggccggggcggcatgggggcaggagagagaggaggctttaacaaaccaggcgggcctatggacgaggggcccgacctggacttgggtcctcctgtggacccggatgaggactccgataactcagccatctatgtccagggcttgaacgacagcgtaacccttgatgacctggccgatttctttaagcaatgtggagtagtgaaaatgaataaacgaactggccagccaatgatccacatttacctggataaagaaacaggcaaaccaaagggagacgccacagtttcgtacgaggacccccctactgccaaggctgctgtagagtggttcgatggtaaagatttccagggcagtaagttgaaggtttctttagcaagaaaaaaacctcctatgaactcaatgcgaggcgggctcccacctagagagggcagaggaatgccccctccgctgagaggagggccagggggacccggcgggccaggaggtccaatgggccgtatgggtggacgcggtggcgaccgtggaggcttccctcctcgcggaccaagaggatcccgggggaatccctccggaggcggaaatgttcaacaccgggccggagactggcagtgtccgaaccctggatgtgggaaccagaatttcgcttggcgcactgagtgtaaccagtgcaaggccccaaagccggagggattcctccctcccccattcccccccccagggggcgacaggggacgcgggggaccgggtgggatgaggggaggccgtgggggactgatggacagggggggccctgggggtatgtttaggggtgggaggggaggcgaccgcggcggctttaggggcggcagagggatggatcgcggaggcttcgggggaggacgcagagggggccccggggggcctccaggacccctgatggagcaaatgggaggaaggagaggtggccgcggggggccaggcaaaatggacaagggcgagcatagacaggaacggcgggaccggccatattag

SEQ ID NO: 15098 - DNA, 543 bp, synthetic construct
  misc_feature 1..543: note = Description of Artificial Sequence: Synthetic coding sequence
  source 1..543: mol_type = other DNA
atggcaagcacagattattctacctactcacaagccgccgcccagcagggctactcagcatacaccgcccaacccacccagggttatgcgcagacaactcaagctagttatgctgctcaaagcgcctatgggacccagcctgcctaccccgcatacggccaacagcccgcagcaaccgcaccaacgagaccccaggacggaaataaaccaaccgaaacgtctcagccccagagctcaaccggaggctataatcaacccagcctgggatacggccagtctaactattcttaccctcaggtgcccgggtcttatcccatgcagcccgtgaccgccccaccaagctaccccccgacatcgtacagcagtacccagcccacttcatatgatcaatcttcgtactcgcaacagaacacatacggtcagccctcctcctatggacagcagtcttcttatggccagcagtcctcgtacgggcagcagccccccaccagctacccaccacagactgggtcatatagccaagctccgagccagtacagctag

SEQ ID NO: 15099 - DNA, 1065 bp, synthetic construct
  misc_feature 1..1065: note = Description of Artificial Sequence: Synthetic coding sequence
  source 1..1065: mol_type = other DNA
atggcctcgacagactactctacgtacagtcaagctgctgcccagcagggctacagcgcctacactgcccagccgactcagggctacgcgcagactactcaagcttatggccaacaaagttatggaacatacggacagccaaccgacgtctcctacacccaagcacagactacagccacatacggacagacagcctacgcaacatcttatggacagccaccaacggggtatacgacccccacagccccccaagcatacagccagccagtacagggctacggcacgggggcttatgatacgacgacggccaccgtcaccaccacccaagcgtcttatgcagcccagagcgcttatggcactcagccggcttaccccgcttacgggcagcaacccgcggctaccgctcccacacgtcctcaggacggaaataagccaacggagacatcccagccgcagagctctaccggagggtacaaccaaccatccctgggctatggccagtcaaattactcatacccacaggttcccggctcgtacccaatgcaacctgtcactgccccaccctcttatccacctacaagctactccagtactcagcctaccagctatgatcagtcctcatactcccaacaaaatacgtacggccaaccatcctcatacggacagcagtccagttacggacagcaatccagctatggacagcaacccccaacaagctatcctccacagacaggttcatatagtcaggccccctcgcagtacagccaacagtcatcctcttacgggcagcagtcttccttcaggcaagatcatcccagttctatgggggtgtacggacaggagtctggcggtttcagcgggccgggtgagaaccggtcaatgagcgggcccgacaaccgcgggcggggacggggcggattcgaccgggggggtatgagcagaggcggacgtggcggagggcgcggcggcatgggcctgcagtccgaatccctcgtgtacacatcaatcctgaaaaaatacccctacagcgtgctttcccgccaacataatgagaaatgggattag

SEQ ID NO: 15100 - DNA, 972 bp, synthetic construct
  misc_feature 1..972: note = Description of Artificial Sequence: Synthetic coding sequence
  source 1..972: mol_type = other DNA
atggaccccggaaaggataaggaaggcgtgccacagccatctggacctcccgctcggaaaaaatttgtcattccactcgacgaggatgaggtgcctcctggtgtggcaaaaccgctgttcaggtccactcaatccctgccgactgtggatacgtctgcccaagccgcaccacagacctacgctgagtacgctatctcacagcccctggagggcgccggggccacatgtccgaccggatctgagcccctggccggggaaacaccgaatcaggcgctgaaacctggcgctaagtctaactcaatcatagtaagcccacggcaacgagggaatcccgtcctgaaattcgtgaggaacgtcccttgggaatttggcgatgtcattcccgactatgtactcgggcagtccacctgcgccttgttcttatcactgcgctaccacaatttacaccctgactacatccacggcagactgcaatctctggggaagaattttgccctacgagtactgctcgtgcaagtggatgtgaaggaccctcagcaggctttgaaagagctcgccaaaatgtgcattcttgcagactgtactctcattctcgcatggtctccagaagaagccggtagatatcttgagacttacaaagcctatgagcagaagccggcagatcttctcatggagaagcttgaacaggatttcgtgtcccgggtgaccgagtgtctcaccactgtgaagagcgtaaataaaacagattcccagacactgcttacgacgttcggtagcctcgagcagctcatcgccgcgtctcgcgaggacttagccctctgccctggactgggacctcaaaaggtgcgggctctgggcaaaaatcctcggtcttggggcaaggagagggccccgaacaaacataacctgaggccgcagagctttaaggtaaaaaaggagcctaagactaggcactccgggttccgactgtag

SEQ ID NO: 15101 - DNA, 894 bp, synthetic construct
  misc_feature 1..894: note = Description of Artificial Sequence: Synthetic coding sequence
  source 1..894: mol_type = other DNA
atggaccccggaaaggacaaggaaggggttccccagcccagtggaccgcccgctcggaagaagtttgtgataccactggatgaagatgaagtcccccctggagtggccaagcccctgtttagatctacccagtctctgcctacagttgacacaagcgctcaagctgcacctcaaacctatgcagaatacgccattagtcaacccctggagggcgccggtgccacatgcccgaccggtagcgagcctctggctggcgagacccccaaccaagcactcaaacctggtgccaagagcaatagcatcatcgtcagtcctcggcagcgtggcaacccggtgttgaaattcgtaagaaatgtgccctgggagtttggcgatgtgatccccgattatgtgttgggacagtcaacttgtgccctatttctgagcctccgctatcacaatctacaccctgactacatccatggcaggctacagtctttgggcaagaatttcgccttaagggtgttactcgtccaggttgatgtaaaagatcctcaacaagcgctgaaagaattggccaaaatgtgcatactggccgattgcacattgattctggcgtggtctccagaagaggccggtagatatcttgaaacatacaaagcctatgagcaaaaacctgctgacctgctgatggaaaagctggagcaagactttgtcagcagagtgacggagtgccttacaacagttaaatctgtgaataaaactgatagtcagaccctactcaccaccttcggcagtttggaacagcttatcgccgcctcaagagaggacctggcactgtgtcccgggctgggcccccaaaaagctaggcgtttatttgacgtgttacatgagccattcctgaaagttccatag

SEQ ID NO: 15102 - DNA, 822 bp, synthetic construct
  misc_feature 1..822: note = Description of Artificial Sequence: Synthetic coding sequence
  source 1..822: mol_type = other DNA
atggacccaggcaaggacaaagaaggagtcccacagcccagcggaccaccagcgaggaagaagtttgtgataccactggatgaagacgaggtcccccctggggttgccaaacccctttttaggagtactcagagtctgccgacggtggatacttccgcccaagcggcccctcagacttatgctgagtatgcaatcagccagcctctggagggcgccggggccacgtgtccgacaggatctgagccattggccggggaaacaccaaaccaagccttgaagccgggcgctaagagcaactcaattatcgtgtcgccaagacagcgaggcaatcctgtcttaaaattcgtgaggaacgtcccctgggagtttggagatgtgatccctgattacgtgcttgggcagagtacttgcgccctatttttgagtcttcgttatcacaacctacaccccgactatatccatggccggctgcagtctctcgggaagaactttgcactgagagtgctgttagtccaggtggacgtgaaggatccacagcaggcattgaaggagctcgccaagatgtgcattctggccgactgtacactgattctggcctggtcccctgaagaggcaggacggtacctcgagacctataaggcgtacgaacaaaagcccgctgacttactaatggaaaagttggagcaggacttcgtttcacgctcactggaacagctgattgcagcttcacgtgaggacctagcgctgtgccccggcttagggccacagaaagctagacgcctgtttgatgttttacatgaacccttcctgaaggtcccgtag

SEQ ID NO: 15103 - DNA, 678 bp, synthetic construct
  misc_feature 1..678: note = Description of Artificial Sequence: Synthetic coding sequence
  source 1..678: mol_type = other DNA
atggatcccggtaaagataaagaaggtgtcccccagccaagtgggcctcccgccagaaaaaagttcgtgatccctttagacgaagacgaagtcccaccgggagtgcgcggaaacccagtgctgaaattcgtgcggaatgtgccgtgggaatttggagatgtaatccctgattatgtattgggacagtcaacatgcgccttgttcttatccctcaggtaccacaacctgcatcccgactacatacacggcaggttgcagagtttaggcaaaaactttgccctcagggtgctattggttcaggtagacgtgaaggatccgcagcaggcgctgaaggaattagcaaaaatgtgtatcctggcggactgcaccctgattcttgcttggagccccgaagaggccggcaggtaccttgagacttacaaggcttacgagcagaagccggcagatttactcatggaaaagctggagcaagattttgtgagcagagtgaccgagtgtctgacgacagtaaagtccgtgaacaaaaccgactctcaaaccttgctgacgactttcggaagcctggaacagctgatcgccgcgtcgcgggaagacttggccctatgcccaggtctgggcccccagaaggcaaggcggctgttcgacgtattacacgagcctttcctcaaagtgccatag

SEQ ID NO: 15104 - DNA, 120 bp, synthetic construct
  misc_feature 1..120: note = Description of Artificial Sequence: Synthetic coding sequence
  source 1..120: mol_type = other DNA
atggatccagggaaggacaaggaaggtgtcccacagccttccggaccgcccgctaggaagaagttcgttattcccctggatgaagacgaagttcctcctggtgtctccaaacccttgtag

SEQ ID NO: 15105 - DNA, 726 bp, synthetic construct
  misc_feature 1..726: note = Description of Artificial Sequence: Synthetic coding sequence
  source 1..726: mol_type = other DNA
atggctagcctaagcggactcgcctcagccctcgagtcttataggggccgggaccggctgatccgagtactaggctattgttgccagctggtcggaggggtgctcgtcgaacagtgccctgctcggagcgaagtgggtacacgccttttggtagtgagcacccagctctctcattgtcggaccattctgagactgtttgatgaccttgccatgtttgtttataccaaacagtacggtcttggcgcccaggaggaggacgctttcgtgaggtgtgtaagtgtgttgggaaacctggccgatcaattgtattacccttgcgagcacgtggcctgggccgccgatgcacgtgttctgcacgtagattcatcccgctggtggactctctctactactttatgggccctatctctgttactcggggtggctaggtctctttggatgctgctgaaacttaggcagcggttaagatctcctactgcccccttcacatcacccctgccacggggcaagcgcagggcgatggaagcccagatgcagagcgaagcactctctctcctttcaaatcttgcggacttggctaatgccgttcactggttgccaaggggagtactgtgggctgggcgattcccgccttggctcgtggggttgatgggcacaataagtagcattcttagcatgtatcaggccgcaagggctggaggccaggcagaagctactacaccttag

SEQ ID NO: 15106 - DNA, 1218 bp, synthetic construct
  misc_feature 1..1218: note = Description of Artificial Sequence: Synthetic coding sequence
  source 1..1218: mol_type = other DNA
atgcgcgaactgaagcggaccctggacgccaaaggacacggggtactcgagatgccttctgggacggggaagacagtcagcctgctcgcgctgatcatggcctaccagagggcttacccacttgaggtgacaaagctgatctactgcagtcgcacagttcccgagatcgaaaaggtgatcgaggaattaaggaaactgctgaatttctacgagaagcaggagggggagaagctccctttcctcggtcttgccctcagttctcggaagaatctgtgcattcaccccgaagtcactcctctgagatttggcaaagatgtggacggaaaatgccacagcctgaccgcctcctatgtccgagcgcaatatcagcacgacacaagcctgccccattgcagattttatgaagagtttgatgcacacggccgagaggtccctctccccgccggcatctacaatctcgacgacttgaaagctttggggagacgccaggggtggtgcccttatttcctcgcccgttacagcattttacacgcgaatgtagtggtctacagctaccattacctgctggatcccaaaatcgctgatctggtttcaaaagagctggctcgaaaagccgtggtggtgttcgatgaggcgcataatatcgataacgtttgtatcgattccatgtccgtcaacctgacacgaagaacactcgaccgctgtcagggcaatctcgagactctgcagaagacagtgctcagaatcaaagaaacggacgaacagcgactgcgggatgaataccgccgactagtcgaaggcctgagagaggcttccgcggcccgcgaaactgatgctcatttggctaatcccgtgctgccggatgaggtgttacaggaggccgtccctggctcaatacgaaccgcagagcatttcctcggattcctccgccgtctgctggagtatgtcaagtggcgcttacgagtccaacacgtcgttcaagagagccccccagccttcctgagcggcctcgcccagagggtgtgcattcagcggaagccgctgcgattttgtgccgagaggctgcggagtttactccacaccctggaaataacagacctggcggacttttcgcctcttaccctgttggctaatttcgccactctggtatctacctacgctaagggtcaggcgcagcactgtggtagttccagaaatcagaaacgatcgcatccatag

SEQ ID NO: 15107 - DNA, 2133 bp, synthetic construct
  misc_feature 1..2133: note = Description of Artificial Sequence: Synthetic coding sequence
  source 1..2133: mol_type = other DNA
atgagggagttgaagcggacgttagatgccaaagcataccccctcgaggtcacgaaacttatctattgttcaaggacagtaccggagatcgagaaagtcatagaggaactgagaaagctcctgaatttctatgaaaaacaagagggagaaaagctgccctttctaggacttgcattgtcaagcaggaagaatctgtgtatacatcccgaggtgacccccctccgatttggcaaagatgtagacgggaagtgtcattctctgaccgcctcttatgtcagagcacagtaccagcatgatacaagcctcccacactgtcgcttctacgaagagttcgacgcccacggccgagaggtgccattacccgcagggatttataacctagacgatctgaaagctctcggaaggcggcagggctggtgcccatattttttggccaggtactcaatcctgcacgctaacgtcgtcgtgtattcgtatcactacctgctagatcctaaaatcgcggatttagtctctaaagaactggcccgaaaggctgtcgtcgtgtttgatgaggcgcacaacatcgacaatgtgtgtattgattccatgtccgtcaatttgactcgccgaacgttagatcggtgtcagggaaatttagagactcttcagaaaacagtcctccggattaaagaaactgatgaacagcgccttcgtgacgagtaccggcgcttggtagagggcctgagggaagcctctgctgcacgtgaaactgacgcacatttagccaacccagtgttgccggatgaggtgcttcaagaggcagtcccaggttcaattcggaccgcagagcattttcttgggtttctccggcggcttctcgagtacgtgaaatggagattaagggtccagcatgttgtgcaggagtcacctcccgctttcctgagtggcctggcccagagggtttgcattcagcggaagcctctacggttctgcgccgaaaggctgcgatcactgctgcatacactggagattaccgatctcgcagatttctcccccttgactttactggctaacttcgcaactctcgtgtcaacctacgctaagggctttacaatcatcattgagcccttcgatgataggactcccaccatagccaaccccatactccacttcagctgcatggacgctagtctggcaattaagcccgtcttcgagcgatttcaatctgttataatcacgagcgggaccctctcacccctggacatctaccctaagattctcgacttccaccctgtgacgatggccactttcacaatgacgctggcccgggtttgcctgtgtccgatgataatcgggagaggtaacgaccaagttgccatcagttctaagttcgaaactcgcgaggacattgccgtcatccgtaattatggcaacctcctcctggaaatgagcgcagtcgtaccagatggaattgtcgcattcttcacttcttaccagtatatggagtcgactgtagcgagctggtacgagcagggaatcttagagaacatccagcggaacaagcttctgtttatcgagacccaggatggcgcggagacatccgtcgctttggagaagtatcaggaagcctgcgagaatggccgtggggcgattttactctctgtggctcgcgggaaagtctcggaggggattgacttcgtccatcattacggcagggccgtgattatgtttggcgtgccttacgtctacacacagtcaaggatcctgaaggctagactggaatacctccgtgaccagttccagattcgggaaaatgactttttgacctttgacgcaatgcgacatgccgcccaatgtgtcggcagggcaatccggggtaaaactgattacggactgatggtcttcgctgataaacgctttgctaggggcgataagagaggtaaactgcctcgctggatccaagaacatctcacagacgcaaacctgaatttgactgtagatgaaggggtgcaagtggccaaatacttcctgcgtcagatggcccagccctttcaccgagaggaccagctcggactgtccctgctgtccttggaacaactggaaagcgaagagacgctgaagagaattgagcagatcgcgcagcaactgtag

SEQ ID NO: 15108 - DNA, 2211 bp, synthetic construct
  misc_feature 1..2211: note = Description of Artificial Sequence: Synthetic coding sequence
  source 1..2211: mol_type = other DNA
atgcgagagctgaagagaaccttggacgctaagggccacggcgtgctagagatgccttccggcacaggaaaaacagtgtccctgctggcgctgattatggcctatcagagggcatatccgctggaagtgactaagctgatctattgctcacggacagtgcctgagatcgagaaggttatcgaagagctccgcaaactactgaatttttacgagaagcaggagggggagaaactaccattcctcggcttggcactgagtagccgcaagaatctctgcattcacccggaagtgactccactacgctttgggaaggacgtggatgggaaatgccacagcctcactgcctcgtatgtcagagcacagtaccagcacgacacatctctgccccactgccgcttttatgaagaattcgacgcgcacggtagagaagtcccccttccagctggaatctataacttagacgacctcaaggccctggggcgccggcagggatggtgcccatacttcctggctcggtacagtattctgcacgccaatgtggtggtctactcataccactacttgctggatccaaagatcgccgatctggtgagcaaagagctcgcccgcaaggctgtagtggtttttgacgaggcgcataatattgacaatgtgtgtatagattccatgagtgtgaatctcactcgcaggacccttgaccgatgtcagggtaatctggaaactctacagaagaccgtcttgcgaataaaggagaccgacgagcagcgcctcagagatgagtataggagattggttgagggcctccgggaggcatctgccgctcgcgagaccgacgcccatttggcaaatcccgtgctgccagatgaggtgctccaggaagctgtccccggatccatacgcacagccgaacattttctggggttcttgagaaggctactggagtacgtgaaatggaggctccgcgtgcagcatgttgtgcaggagtcgcctcctgctttcttgtccggactggcccagcgggtctgtatccaacggaaacctcttaggttctgtgccgagagactgcggtctctccttcataccttggaaatcactgacctggccgatttctcgccactgactctgctagcaaacttcgccacacttgtgagtacctacgcaaaagggttcactatcatcatagagccatttgacgatcggacgcctacaatagccaatcccatcctccatttctcctgtatggacgcctcacttgcgatcaagccagtgtttgagcgatttcagagcgtaatcatcacatctggaacactgtcacccctggatatctatcctaaaatccttgactttcatccagtcaccatggctacatttacaatgaccttagctcgggtctgcctatgccctatgattatcgggaggggaaatgaccaggtggccatctcaagtaagttcgagacccgggaggacatcgcagttattcggaactacggaaaccttctactcgagatgtctgcagtcgtacctgatgggattgtggcctttttcacatcataccagtatatggagtcaactgtggcttcatggtacgagcaaggcattctggagaacatacagcgcaataaacttctcttcattgaaacacaggacggcgccgaaacttcagtggccctggaaaaataccaggaagcgtgtgaaaacggacggggtgcaattttactcagcgttgcccggggtaaagttagtgagggaattgatttcgtccaccattacggacgagcagtgatcatgtttggggtgccatacgtttacacacaaagtaggattctcaaggcaaggcttgagtacctcagagatcagtttcagatacgggagaacgactttctcacatttgatgctatgagacacgctgcacagtgtgtcggaagggcgatcagaggaaagaccgactacggattaatggtttttgctgacaaacggttcgccaggggggacaaaagagggaagctgccccggtggatccaggagcatcttactgacgccaacctcaatttgaccgtggacgaaggagtgcaagtcgccaaatactttcttcgacagatggctcagccttttcatcgagaggatcagcttggactttctctgctttccctcgagcagctcgaatccgaagaaaccttgaaaaggatcgaacagatcgcccagcagctatag

SEQ ID NO: 15109 - DNA, 2049 bp, synthetic construct
  misc_feature 1..2049: note = Description of Artificial Sequence: Synthetic coding sequence
  source 1..2049: mol_type = other DNA
atgaaactgaatgttgatggactgctggtatacttcccatatgactacatttaccctgagcaattctcttacatgcgggagctgaagcgcaccctcgacgccaagggccacggtgtgctggagatgcccagtgggactggaaaaacagtatccttgcttgcgcttattatggcttaccagcgagcctatcctcttgaggtgaccaaactcatttactgtagtagaacagtgcccgaaattgaaaaagttattgaagagctgcgcaaactgctaaatttctatgagaaacaggagggtgaaaagctcccattcctcgggctagccctgagttctcggaagaatctgtgtatccaccctgaaattctccatgccaacgtggtcgtgtactcctaccactaccttttagaccccaaaatcgccgacctggtgtctaaggagctcgcgaggaaagctgttgtggtcttcgacgaagcccacaacattgataatgtatgtatcgactctatgtctgttaacctcacacggcgcaccttggaccgatgccagggcaatctcgagaccctgcaaaaaaccgttctccgaattaaagagacagacgaacaacgcctgagggacgagtatcgaagacttgtggaggggctgagagaagcctctgcggccagggagactgatgcacacctggctaatcctgttttgcccgatgaggttcttcaggaagcagtgcctggctccattcgcacagccgaacatttccttggttttctgaggagactgctggaatatgttaaatggcgcctccgcgtccagcacgtggtccaggaatctccgccggcctttctgtctgggttggcacagcgggtgtgtatccagcgcaagcccttgcgcttctgcgccgaaagactgcgctcactcttgcacactttggaaatcaccgatctcgccgatttttcacctctaaccctgcttgccaatttcgccaccctggtgtctacttatgcaaagggatttacgatcataatagagcccttcgacgacaggactcccacgatcgccaatcctatcctgcatttctcttgcatggacgcttcacttgccatcaagcctgtcttcgaaagattccagtcggtgatcattacatcgggcactctgtctcctttggatatctatcccaagatcctagactttcacccagtcacaatggcgacatttactatgactctggccagagtatgtttgtgtcccatgatcatcgggcggggaaatgaccaggtggcgatttcctctaagttcgaaacacgcgaggatatcgctgtaatcagaaactacggtaacttgctccttgaaatgagtgctgtcgtccccgatgggatcgtggctttctttacaagttaccagtacatggaatctaccgtcgcttcttggtatgagcagggaattctcgaaaacatccagcgtaataaactgctgttcattgaaacccaagacggtgctgaaaccagcgtcgcactcgagaaataccaggaagcatgcgagaacggcagaggcgctatcctcttatccgtcgctaggggcaaggtgtcagaaggcatagactttgtgcatcactatggacgagccgtcatcatgttcggcgtgccatacgtttatacccagtcccgcatcctgaaggccagactcgagtacctgagggaccagtttcagataagagaaaacgactttctcaccttcgacgcaatgcggcacgccgcacaatgtgttgggcgcgccatcaggggcaagactgattatggtcttatggtctttgccgataagaggttcgcccgcggagataagcgcggaaagttacccaggtggattcaggagcaccttaccgatgccaacctgaatttgactgttgatgagggtgtgcaggttgcaaaatatttcctgcgccagatggcacaaccttttcacagagaagaccagttgggactgagcctactctccctcgaacagttggaatcagaagaaacactgaagcgtattgaacagatcgcccagcagctttag

SEQ ID NO: 15110 - DNA, 2283 bp, synthetic construct
  misc_feature 1..2283: note = Description of Artificial Sequence: Synthetic coding sequence
  source 1..2283: mol_type = other DNA
atgaaactgaacgtcgacggattgctcgtgtattttccatatgactatatctaccccgaacagttctcatacatgcgagagcttaagcgcacactggatgccaaaggacatggggttctggaaatgcccagtggcacgggcaaaacagtctccctcctggcactcatcatggcctatcaaagggcctatcccctggaggttacgaaactaatttactgctctagaaccgtcccagaaattgagaaggtgatcgaagagctccgcaagctgctaaacttctatgaaaagcaggagggcgagaagctgccttttcttggactggcactttcaagccgaaagaatctgtgcatccacccagaagtgactccattacgatttggcaaggatgtggacggcaaatgtcacagtttgacagcttcgtacgtgcgtgctcagtaccagcatgatacttccctgccgcactgcaggttctatgaagaatttgatgcacacgggcgggaagtgcctctgccggccgggatttataatctggacgacttgaaagcccttgggcggcgccagggatggtgtccttacttcctggcaagatactccatccttcatgcaaacgtagtcgtctacagctatcactatctcctcgatcctaagatcgctgaccttgtctctaaagagttagcacggaaagccgtggtcgtcttcgacgaggcccacaatatcgacaatgtgtgcattgactctatgtccgtgaatctgacccgcaggaccctggacaggtgccagggcaatttggaaactctgcagaaaactgtactcagaatcaaggaaacagatgagcagcgcctgagagatgagtatcgtcgcttggtggagggtctacgtgaggccagcgccgctagggagactgatgcccatttagctaatcccgtcctgcccgacgaagtactgcaagaagccgttccgggatctatcagaaccgctgaacattttttaggtttcctaagacggttactagaatatgtgaagtggagattaagggtgcagcatgtcgtgcaagaatctcctcccgcattcctcagtggcctggcccaaagagtatgcatccagcggaagcctcttcgcttctgcgccgaaaggctaaggagcctgttacacacccttgaaatcactgacctggcagattttagccctctgacactcctggccaactttgccactctggtgagtacctacgctaaagggttcactataatcattgagcctttcgatgacagaacccctacaatcgctaatcctatcctgcactttagctgcatggacgcctcgctagcaatcaaacctgtgtttgagcgatttcaatctgttatcatcacaagtggaacactgtcccctctggacatatatccaaagatcctcgacttccatcctgtcacaatggccactttcacaatgactctcgcacgagtgtgtctgtgccccatgatcataggcagaggtaacgaccaagttgccatatcctcaaaattcgagacacgtgaagacatcgctgtaatccggaattatgggaatctcctccttgaaatgagcgctgtggtgccagacggaattgtggcatttttcacaagctatcagtatatggagagcacagtggcttcatggtacgaacaggggatacttgagaacattcagagaaacaaactcctgttcatagagacccaggacggcgcagagacatctgttgccttagagaagtaccaagaggcctgtgaaaatggcagaggggccattctgttgtcagtggcaagagggaaggtctctgagggcatagacttcgtgcatcattatggaagggctgtcatcatgttcggagtcccatacgtgtatacccagtcgaggatcctcaaggctcggctggagtaccttagagatcaattccagattagagaaaatgacttcctgactttcgacgctatgaggcatgctgcccaatgcgttggtcgcgccattcgaggtaagactgactatggcctgatggtgttcgctgacaaaaggtttgcaaggggcgacaaacgtgggaaactccctcggtggattcaggagcatctgaccgacgccaatcttaacctgactgtcgacgagggagtacaggttgccaaatattttttgaggcagatggcccagcccttccaccgggaggatcagctcggcctgagcctcttatccttggaacagctggagagcgaggaaaccctgaagaggatcgaacaaattgctcaacagctttag

SEQ ID NO: 15111 - DNA, 2751 bp, synthetic construct
  misc_feature 1..2751: note = Description of Artificial Sequence: Synthetic coding sequence
  source 1..2751: mol_type = other DNA
atggagtccggacagccggcacgtagaatagctatggctcccctcctggaatacgagcgccagcttgtgctcgagttattagataccgatggtctcgtcgtctgcgccagaggcttgggcgctgaccgcctcttatatcactttttgcagttacattgtcaccccgcttgtctcgtgttagtcctgaacactcagccagcagaggaagagtacttcattaatcagctgaaaatcgaaggagtggagcatctccctaggcgcgtaactaatgaaattactagcaacagccgttacgaggtatatacccagggcggcgtgatttttgctacttcacgaattctggtggtcgatttccttactgatcgcattccctcggatttgatcaccggcatactggtatatcgagcccaccgtattatcgagtcttgccaagaagcctttattttaaggctgtttcggcagaaaaataagcgaggtttcatcaaagccttcacagacaacgctgttgcctttgacacaggattctgccatgtggaaagagtgatgagaaacctcttcgtgcggaagctgtatctctggccgagatttcacgtggctgtgaattcctttctagagcaacacaaaccagaagttgtagaaatccacgtgagtatgaccccaacgatgctggcaatccagactgcaatactggatattctaaacgcttgtcttaaggagcttaaatgccacaatccaagtctggaagtggaggatctaagtctagagaatgctattggcaagccatttgataagaccatccgacactacctagatcctctttggcaccagctaggcgcaaagaccaaatctctggttcaggacctgaaaatcctccgaaccctgttacagtatttgtctcaatacgactgcgttacgttcttgaacctcctggaatcgcttcgggcaaccgagaaagccttcgggcagaattccggctggttgtttctggactcatctaccagcatgtttattaatgctcgagcaagggtataccacttacccgatgctaaaatgagcaagaaagagaaaatctcagaaaagatggaaattaaggagggagaagaaaccaaaaaggagttagtgttagagagtaatcccaaatgggaggctttaactgaggtgctgaaggagatcgaagctgagaataaagagagcgaggcgttagggggccctggccaggtattgatctgtgcttctgacgaccggacatgttcacagctgcgagattatattacgcttggtgccgaggcattcctcctccgactgtaccgcaaaactttcgagaaggatagcaaggcagaggaggtctggatgaaattccggaaggaagactcgtctaagagaatacgcaaatcacataagagacctaaggacccgcagaacaaagagcgcgcctccacgaaggaaaggactttgaagaagaagaaaaggaaactcacattgactcagatggtgggaaagcctgaggagctcgaagaggaaggcgatgtagaagaagggtaccgccgggaaatctcgtcgtcccccgaaagctgtcccgaagagatcaagcacgaggagttcgacgtgaacctttcaagtgacgcagcctttggcatcctcaaagagcctttaacgatcatacaccccctgcttggttgttctgacccctatgctctcacaagagtgctgcatgaggtcgagcctcgctacgttgtgttgtacgacgctgagctgacattcgtaaggcagcttgaaatctaccgagcctcccgcccaggaaaacctctgagagtctactttctgatctacggtgggtcaactgaagagcaaaggtacctgaccgcgctgaggaaagaaaaggaggcctttgaaaaactgatacgtgaaaaagccagtatggttgttcccgaggaacgagaaggcagggacgaaactaacctggacttggtgagaggtactgctagtgcagatgtgagcacagacacccgtaaagcagggggccaggagcagaatggaactcaacagagcattgttgtggatatgagagagttccggtctgagctgccaagccttatccaccgccgcggaatcgatattgagccggtgacattagaagttggagactatattctcacccctgagatgtgcgtcgaaaggaaaagcatcagcgacctgataggatccctcaacaacggccgcctgtattctcagtgtatttctatgtctcgttactataaacgtcctgtcctgctgatcgaatttgacccaagcaagccatttagcctcaccagccgcggagccctatttcaggagatttcatccaatgacatttctagtaaacttacactcctcacactgcactttcctagactgcgtatcttgtggtgcccgtctcctcacgcgaccgccgaattgtttgaggaactgaaacagtcaaagcctcagcctgacgctgccaccgccttagccattaccgccgacagcgagactctgccagaaagtgaaaagtacaaccctggcccgcaggacttcttgctcaagatgcctggcgtgaacgccaagaactgtaggagcttgatgcaccacgtaaagaacatcgcagaactggcagccctctctcaggatgagctcaccagcattctggggaacgcagccaatgctaaacagctttacgactttatacatacttcttttgccgaggtggtatccaaaggcaagggtaagaaatag

SEQ ID NO: 15112 - DNA, 2715 bp, synthetic construct
  misc_feature 1..2715: note = Description of Artificial Sequence: Synthetic coding sequence
  source 1..2715: mol_type = other DNA
atggctcctctgctcgagtacgagcgtcagctggtactagaactgctggatactgatggactggtcgtgtgtgcaaggggattgggcgcagaccgactactctaccatttcctccagcttcactgtcacccagcttgtctcgtgttggtgcttaacactcagccggccgaagaagagtacttcatcaatcagctgaagatcgagggagttgaacacctacccaggcgggttaccaacgaaatcaccagcaacagcagatacgaggtttacacccaggggggcgttattttcgcaacaagccggatacttgttgtggacttcctgaccgatcgcatcccatccgatctcattactgggattctggtctaccgcgcacaccgtattattgagtcatgccaggaggcattcattttgcgactctttcggcaaaagaataaacgggggtttatcaaggcattcacggataatgcagtggccttcgacactggtttttgccatgtggagagagtgatgcgaaatctgtttgtgagaaaactgtatctttggccccgattccacgtcgcagtgaacagctttctagagcaacacaaacccgaagtggtggagatccacgtgtcaatgacacctaccatgctggccatacagaccgctatcctcgacatcctcaacgcttgcttgaaggagctcaagtgccacaaccccagcctcgaggtcgaggatttgtctctggagaatgcaatcggaaagcccttcgacaaaacgataaggcactacctggacccactgtggcaccagctgggcgccaagacaaagtctctagttcaggatcttaaaattctgcgtaccctcctccagtatctgagccagtacgattgtgtaactttcttgaacctgctcgagtcattacgcgcgactgagaaggcctttggacagaattccggctggctgttcctggattcctctacgagcatgttcatcaacgcacgggcccgggtgtaccatttaccagacgctaagatgagtaaaaaagagaaaatttcagagaaaatggaaataaaagagggggaggagacaaagaaggagctcgtgctcgagtcaaaccctaaatgggaagccctcaccgaagtgctgaaagagatcgaggcagagaacaaagagtcagaggcgcttggaggaccaggccaggtgctgatctgtgcgtctgatgacagaacctgctcccagctcagagactacatcactctcggtgccgaggcctttctgctgagactgtacaggaaaacgtttgaaaaggactcaaaggcagaggaagtctggatgaagttccggaaagaagacagcagcaaaaggatacggaagtcccataaacgtcctaaagacccacagaacaaggagcgggcttctaccaaagaaaggactctcaaaaaaaagaaaaggaagctcacattgacccagatggtcggcaagcctgaagagctcgaggaggaaggagatgtcgaggaaggttaccgccgcgaaataagttcttcacccgagtcatgtccagaagaaatcaagcacgaggagttcgacgtcaacctttctagcgacgccgcgtttgggattttaaaagaaccactgacaatcatccatcccctcctcggatgttcggatccatacgcgctcacccgggttcttcatgaagtggagccccgctacgtggtcctgtatgatgcggagctgacattcgttcgccaactggaaatttatagggcaagtcgacctggaaagcccttgcgatattttctgatttacggaggatctaccgaagagcagagatacctgacggcacttaggaaggaaaaagaggccttcgaaaagcttattagggaaaaggcctccatggtcgtgcctgaggagagggaaggacgagatgaaacaaatttggatctggttaggggaactgcatcagccgacgtctctactgatacaaggaaggctggaggccaggaacagaacggcacccagcagagcatcgtcgtggacatgcgggagttcaggagcgaactgccctccctcatccacaggagaggaattgacattgagccagttacactggaggtgggagactacatactcacccccgagatgtgcgttgagagaaagagtatctctgaccttataggatccttaaataatggccgattgtattcacagtgcatctcaatgtcccggtactataagcgccctgtgctgctgattgaattcgatccctctaaaccattcagcctgacaagtagaggggccctgttccaagaaataagctctaacgatataagctctaagctcacccttttgaccctccacttcccccgactccggatcctgtggtgcccgagtccacacgctaccgccgaactattcgaagaacttaagcagtctaagccacagcctgacgcggctacagctcttgctattaccgcggatagcgaaactctacctgaatctgagaaatataacccaggacctcaggattttctcctcaagatgccaggcgtgaatgcaaagaactgcaggagcctcatgcatcacgtcaaaaatattgccgagctcgccgcactgtcacaggacgagttgacttccatcctgggtaacgctgccaatgccaaacaactgtatgactttatacacaccagcttcgccgaagtggtgagtaaaggaaaaggtaaaaaatag

SEQ ID NO: 15113 - DNA, 1071 bp, synthetic construct
  misc_feature 1..1071: note = Description of Artificial Sequence: Synthetic coding sequence
  source 1..1071: mol_type = other DNA
atggctcccctcctagagtacgaacggcagctggtgctggaactgcttgacacggatgggttggtggtgtgtgcccgtggcctaggagcggatcggctgctatatcactttctgcaactgcattgccatcctgcgtgtctagttctggtcctcaacactcagccagccgaagaggaatactttattaaccagctcaagatcgaaggagtggagcacttaccgagaagggtcacaaacgagatcacgtcgaattcacggtatgaagtatacacacagggaggtgttatatttgccacttctcggattttagtggtggacttcttgactgaccgtatcccatctgaccttataaccgggattctagtgtaccgcgcccatcggattattgaatcctgccaggaggcatttatcctgcgcctgttccgtcagaagaacaaaagaggatttataaaagctttcacagataacgccgtcgctttcgataccggcttttgtcacgtggagcgtgtaatgcgtaatctgttcgtccgtaaactgtatctctggccccggttccatgtggcagtgaatagtttcctggagcagcacaagcccgaagtcgttgagatccacgtttcgatgacacccaccatgcttgctatccagactgcaatactggatatcctcaatgcctgtctgaaggaactgaaatgccacaatccgtccctcgaagtggaagatctgtccctagaaaacgcaatcggcaagccctttgacaagacaatccgccactatcttgacccattgtggcaccagttgggggccaaaacaaaaagcctcgtgcaagacttgaagatccttcggaccctactgcaatacctgagccagtatgattgcgtgactttcttaaatctcctggagagcttgcgggcgacggagaaggcgttcggccagaattccgggtggttatttttggatagtagcacaagtatgtttattaatgcaagagccagggtatatcacctgccagacgcgaagatgtccaaaaaagagaagatcagtgaaaaaatcaagaaaaaaaaaaaaaagtag

SEQ ID NO: 15114 - DNA, 3561 bp, synthetic construct
  misc_feature 1..3561: note = Description of Artificial Sequence: Synthetic coding sequence
  source 1..3561: mol_type = other DNA
atgggggtgcaaggactctggaagctgctggaatgctccgggcgacaggtatcacctgaggccttggaggggaaaattttggcggtggatatctccatttggctaaatcaagctctgaaaggcgttcgagacaggcacgggaattccatcgagaaccctcacctcctgactctgttccaccgactctgtaagctgctcttcttcagaatccgcccaatctttgtgttcgacggagacgcccctctacttaagaagcaaacactcgtgaagcgtaggcaacgaaaggatttggcatccagtgattctagaaagacaacagagaaattgctcaaaacattccttaaaagacaggcaatcaaaacagcatttcggagtaaaagagatgaggcactcccctccctcactcaggtacggcgggagaacgatttatatgtcttacctcccttacaggaagaagaaaagcattcatcagaagaagaggacgagaaagagtggcaggagcggatgaaccaaaaacaggcacttcaggaggagttcttccacaatccacaggccatcgacatagagtctgaagacttctcaagcctgccccccgaggtgaaacacgaaatcctgactgacatgaaagaatttactaagcggagacgcacactcttcgaggcgatgcctgaagagtccgacgacttctcgcaataccagctcaaaggacttttgaagaaaaactatttaaatcagcacattgaacatgtgcaaaaggagatgaatcagcagcactcagggcacatccgccggcaatatgaggacgagggaggattccttaaggaagttgagagtaggagagtcgtctctgaggataccagccactacatcctcatcaaaggtattcaggccaaaactgtcgccgaagtggactccgagtcattgcccagtagttccaaaatgcacggcatgagcttcgatgtgaagtctagcccttgcgaaaaacttaagaccgaaaaggaacccgacgctacacctccatcgcccagaacgctgctcgccatgcaagccgcactattgggctcctcttctgaggaagaactcgaaagtgagaatcggaggcaggccagagggagaaacgccccggccgcggtggacgagggctctatctcgccaagaacactttccgcaattaaaagggctctcgatgacgacgaagacgtgaaggtatgcgcaggtgatgacgtccaaactgggggacccggcgctgaagaaatgaggattaatagcagcacagaaaattccgacgaaggtcttaaggtcagagacgggaagggcataccgtttaccgctacgctagctagttcttcggtaaattcagccgaggagcacgtcgctagcacaaatgaggggcgagaacctactgacagtgtcccaaaggagcagatgtccctcgtgcatgtgggaacagaggcatttcctatctcagatgaatccatgatcaaggaccgaaaggatagattacccttggaaagcgccgtggtgagacactctgacgctcctggcctcccaaatggacgagaactgacccctgcaagtcctacatgcaccaactctgtttcaaaaaacgagactcacgctgaggtcttagaacagcaaaacgagctgtgtccttacgaaagcaaattcgattcatctctgttgagcagtgacgacgagacaaagtgtaaaccaaattcggcaagtgaggttatcggcccggtgtccttgcaggaaacttcctctatcgttagtgtgcccagcgaagctgtggacaatgtggaaaacgtggtttcattcaatgcaaaggagcatgagaactttctcgagactattcaagaacagcagacaactgagagtgctggacaggatttgatttccatccccaaagcggttgagcccatggaaatagactccgaagaaagcgagtctgacggttcctttatagaagtgcagtccgtcatctccgatgaagagctgcaggccgagttccccgagacatctaagccaccttcggagcagggggaagaagaactggtaggtacgagggaaggcgaggctccagctgaatcagaatcgcttctgcgtgacaactcagagagggacgacgtagatggagagccacaggaggcagagaaagacgctgaggatagtctacacgagtggcaggacatcaatctggaggaactcgagacattggagtccaaccttctggcccagcagaacagtctgaaggcacagaaacagcagcaggagcggatcgcggccaccgtgaccggtcagatgttcctcgagtcacaggagctgctgcgactctttggcattccgtacatccaggccccaatggaggctgaggcgcaatgtgctatacttgaccttaccgatcagacgtctggcaccatcacggatgattctgacatctggctgttcggcgccaggcacgtctatcgcaactttttcaacaagaacaaattcgttgaatactaccagtacgtcgacttccacaatcaattaggcttagatagaaataagctaatcaacctcgcctacctactgggcagcgactataccgaaggcatccctaccgtcggatgtgtgaccgcaatggagattctcaatgaatttcccggccacgggctagagccgctgttaaaattttctgaatggtggcacgaggcacagaaaaaccctaaaatccgcccgaatccccatgacacaaaagtgaaaaaaaagctcagaaccctgcagcttacccctgggttccccaaccccgctgtcgcagaagcatacttaaagcctgtggtggatgattccaaaggttctttcctgtggggcaagcctgatctcgataaaatcagagagttttgtcagcgctattttgggtggaaccgcaccaagaccgacgagtcgctctttccagtcctgaagcagctagacgctcagcaaacgcagctcaggattgactctttctttcggcttgctcagcaggagaaagaagacgccaagcgcatcaagagccaaaggcttaacagggccgtgacctgcatgctgaggaaggaaaaggaggcagccgcctccgagatcgaagctgtgtcggttgccatggagaaagaatttgaacttttggacaaagcgaaggggaaaacccaaaagcgaggcattaccaacaccttggaggaatctagcagcctgaagcgcaaaaggctgtctgactctaaaggcaaaaacacttgtggaggtttcttgggagagacatgcctatctgagagttccgatggcagctcttctgaagacgccgaatccagctccctcatgaacgtgcagcggcggacagctgccaaagaacccaagacatcagcctcagacagccagaattccgtgaaggaagcccctgttaagaatggcggggctaccacttcttcatcaagcgacagcgacgacgatggtggaaaggagaaaatggttctggttaccgctagatctgtgtttggcaagaaaaggagaaagctgcgcagagccagagggcgcaaacgtaagacctag

SEQ ID NO: 15115 - DNA, 1260 bp, synthetic construct
  misc_feature 1..1260: note = Description of Artificial Sequence: Synthetic coding sequence
  source 1..1260: mol_type = other DNA
atgttcctcgagtctcaggaactgctgcgtctatttggcatcccatatattcaggcacctatggaagctgaagcccagtgcgccatcctggatttaacagaccagactagcggtactatcaccgatgactccgacatttggctgtttggcgcgcgacacgtctatcggaatttcttcaacaagaataaattcgttgagtattaccaatatgtagattttcataatcagctgggcctcgaccgcaacaagcttattaacctggcatatctgcttggatccgattataccgagggaatccccacagtgggctgtgttacagccatggagatcctgaatgagttcccagggcacggacttgagcccttactgaaattttctgagtggtggcatgaggcccaaaagaaccccaagattcgtcctaatccacacgatacaaaagtgaagaaaaagctgcgcactctgcagctgacgccgggctttccaaatcctgcagtggccgaggcatacctcaaaccagttgtagatgactcaaagggatcttttctgtggggcaaaccagatcttgataagatcagagaattctgccaacgctatttcgggtggaaccggacaaagactgacgagtcactgtttcccgtcttgaagcagctggacgcccagcagactcagctgcgcatcgatagcttcttccgacttgcccagcaggaaaaggaggatgcgaagcggattaaaagtcagagactgaacagggccgtgacctgcatgcttagaaaagaaaaggaggctgccgcctccgaaatagaagcagtcagcgtagccatggaaaaagaatttgagctgctagacaaggctaaaggcaagactcaaaagagaggaattacaaatactcttgaggagtcatcgtccctgaagaggaaacgactgtccgactccaagggtaagaatacctgtggagggttcttgggggaaacttgtctgagcgaaagttccgacgggtcttcaagcgaagatgctgagagcagtagccttatgaatgttcagaggaggaccgctgctaaggagccaaaaacctcagcatccgattcacagaactccgtcaaggaggcccctgtgaaaaacggaggcgctaccacatcttccagttccgatagtgacgatgacggcgggaaggaaaagatggtactggtgaccgcccggtcggtcttcggaaagaagcgtaggaagcttagacgagcacgtggcaggaaaagaaagacatag

SEQ ID NO: 15116 - DNA, 3057 bp, synthetic construct
  misc_feature 1..3057: note = Description of Artificial Sequence: Synthetic coding sequence
  source 1..3057: mol_type = other DNA
atgaaccaaaagcaagcccttcaggaggagttttttcataatccacaggccatcgatatcgaatcagaggacttcagtagtctgccccctgaagtgaaacatgagatcctgaccgacatgaaggagtttacaaaaagaagaagaacactattcgaagctatgcctgaagagtccgatgatttcagccagtaccagctgaaaggtttgttgaagaagaattatctaaatcagcatattgaacacgtccaaaaggaaatgaatcagcagcatagcgggcatataaggcgacagtacgaggatgagggcggctttctgaaggaagttgagagcagacgcgttgtctctgaagacacatcccactacatcctcattaaaggcatccaggctaagaccgtggccgaggtggattctgagtccttgccatctagcagcaaaatgcacggcatgtccttcgacgtgaagagctccccctgcgaaaaattgaagactgagaaggagcctgacgcaacacctccctcccctaggacactgctagccatgcaagccgccctgctgggcagctcctcagaagaagaactggagtctgagaatcggagacaggcacgaggccggaacgcaccggctgcagtcgatgaagggtccatcagccctagaactctgagcgccatcaagcgcgccttagatgatgacgaggatgtaaaggtctgcgccggagatgatgttcagaccggaggccccggcgcagaagagatgcggattaattcgagtacagaaaactccgatgagggcctgaaagtaagagatgggaaagggattccattcacagcgacactcgcttcttcttcagtgaatagcgccgaagagcacgtggcctccaccaacgaaggccgcgagcctacagattccgtgcctaaagagcagatgtctctcgtgcatgttggcactgaagcattccctatatctgacgaatccatgattaaagataggaaggaccggctgcctctggagtcagcagtggttcgccactcagatgcccctggcctgcccaatgggcgggagctgacccccgcttccccaacgtgcactaattcagtctctaagaacgagacacacgccgaagtgctcgagcagcaaaatgagttgtgtccctacgagtccaagttcgactctagcctgctcagcagcgatgatgagactaaatgtaagccaaactctgccagcgaggttattggtccagtgtcgctccaggagacatcctccattgtgtcagtgccttccgaggctgtcgacaacgtagaaaatgtggtctcctttaatgctaaggaacacgaaaatttcctggaaaccatacaggagcagcagacaactgagagcgccggacaagacctgattagcatccccaaggccgtcgagccaatggaaatcgatagtgaggagtctgagtcagacggctcttttatcgaggtgcaaagtgtgattagtgatgaggaactgcaggcggaattccctgagacctcgaagccgccctctgagcaaggcgaggaggagctcgtcgggacaagagagggggaagcacccgcagaatcagaatcactgctgagggacaattccgagcgagacgacgtggacggcgagccacaggaggctgaaaaggacgccgaggatagcttgcatgagtggcaggatattaatttagaggagcttgagactctggagagtaacctgctggcccaacaaaactcgttgaaagcacaaaaacagcagcaggagaggatcgctgctacggtgaccggacagatgttcttggaaagtcaggaacttctgaggctgttcggaatcccatatatacaagcccccatggaggcagaggcccagtgcgccatactggatcttacggaccaaactagtggtaccattacagacgactctgacatttggctctttggggcaaggcatgtctatcgaaacttcttcaacaagaacaaatttgtggagtactatcagtatgtggacttccacaatcagctgggactcgaccggaacaaactcataaatctggcctatctgctgggatcagattatactgaagggatacccaccgtgggttgtgtaacagccatggagatcttgaacgaatttccgggacatggcctggagcctctcctcaagttttccgaatggtggcatgaggcccagaagaaccctaaaatcaggccaaaccctcacgataccaaggtgaagaaaaaactgaggacccttcagctgacacccggatttcctaacccagcggtggctgaggcttacttgaagcctgtggtggacgattcgaaaggcagcttcctctggggaaaaccggatttagataagatccgcgagttctgtcagcgatatttcgggtggaaccgtacgaagaccgacgaatccctgttccccgttttgaagcagctcgacgcccagcagacccagctgcggattgatagcttctttagacttgcccagcaagaaaaggaggatgccaagcgcataaaaagccagcggctgaatcgcgcagtgacctgtatgctaagaaaggagaaggaagccgctgcaagtgaaatcgaggcagtctccgtggcaatggagaaggaatttgagttgctagacaaagctaagggtaaaacccagaaaaggggcattactaacacactagaggaatccagttcactcaagaggaaaaggctcagtgacagtaagggcaaaaacacctgcggcgggtttctgggcgaaacatgccttagcgagtcctcagacggctcatctagtgaggacgcagagagctcttctctaatgaatgttcagaggagaaccgctgctaaggagccaaaaacgtcggcttcggacagtcagaatagcgttaaggaagcaccagtgaaaaacggcggcgccacgacaagctcctcatccgacagcgacgacgacggcggcaaggaaaagatggtgcttgtaactgccagatctgtctttggtaaaaagagacgaaaactgagacgtgcccgggggagaaagagaaagacctag

SEQ ID NO: 15117 - DNA, 4836 bp, synthetic construct
  misc_feature 1..4836: note = Description of Artificial Sequence: Synthetic coding sequence
  source 1..4836: mol_type = other DNA
cagggtgctgtgaagtctttctgcacttccgccagcggcgcaccgctggggcccaagggggatggccattacccctggtcatgtcctgtcacacacacccgggaaaagatatatgctatctgcagcgattacgcttttctgaaccaggccacatctatttacaagactccaaatccaagccgcagcccttgcttgcctgactcaactagtctgtcagccgggaataactcttccaggtacattggcattcctacctcaacctccgaaattatctacaacgaagaaaacagcttggagaatctgagcaattcccttggcaagctcccactggcttgggaaatcgacaagtcagagttcgacggtgtcaccacaaactctaaacataagagcggcaatgcaaagaagcaggtgtctaagcgtaagaccagcgacaaaaaaggcaggtatcaaaaggaatgtccgcagcattcaccccttgaagacattaaacagcggaaagttttagatcttagaaggtggtattgcattagtaggccacagtataaaactagctgtggtatctctagcctgatctcttgttggaacttcctgtattctaccatgggggccggtaatctgccccccatcacccaagaagaggcactgcacattctggggttccaacctcctttcgaagatattcgcttcggaccctttactggaaacacaaccttgatgaggtggttccgacagatcaatgatcactttcacgtaaagggctgttcgtatgtcctgtataaaccgcacgggaagaacaaaacggctggagaaactgcctccggcgcgctttccaaactcacacgcggacttaaggacgagagtctagcttatatctaccactgccagaatcactatttctgcccgatcggcttcgaagccacccccgttaaggcgaacaaggcattctctcgaggcccactgagcccccaggaagtagagtactggattctcattggagaatccagccgtaagcaccccgcaatccactgcaagaagtgggccgacattgtgaccgacttaaatactcagaaccccgaatacttggatataagacatctcgagaggggtttgcaatatagaaaaaccaagaaggttggtggtaaccttcactgcattattgcattccagaggttaaattggcagcggttcgggctctggaactttccgtttggtacgattcgtcaggaaagtcagcctccaacccacgctcagggcatcgcaaaatctgagtcggaggataatatctccaagaagcagcacggaagactgggccgctcattttctgcctcctttcaccaggactcagcttggaagaagatgtcaaacatttcaatctggctgaaccaggccctgaagggcgtccgcgaccggcacgggaattccatcgagaatccccacctcctaacactgttccataggctctgtaagctgctgttcttccggattaggcctatctttgtgttcgatggggatgctccattgctaaaaaagcagactctcgtgaaacgaaggcagcgaaaagacctcgcaagtagcgattcaagaaaaaccaccgagaagctgctgaaaactttcttaaagagacaagctatcaaaactgccttcaggtcgaagagggatgaagcactgccttcactgacacaggttcgccgggaaaatgacctttatgtcctgccccctttacaggaagaggaaaaacattcatcggaggaagaagacgaaaaagagtggcaggaacgtatgaaccagaaacaggcactgcaggaagagtttttccacaacccacaagcaattgacatcgaatctgaagatttctcgagcctgccccctgaagtgaaacacgaaatcctcaccgatatgaaagagttcactaagaggcggcggaccttattcgaggcgatgccagaggagtccgatgacttctctcaatatcaacttaaaggtctgctaaagaaaaactacctgaaccagcatatagaacatgtacagaaagagatgaatcagcaacattcgggccacatcaggagacaatatgaggatgagggcgggtttctaaaggaagtggaatcccgtagggtggtaagtgaggacacttcccattacattcttatcaaaggcatacaggcaaagaccgtcgccgaagtggattcagaatctctgcccagcagcagcaaaatgcacgggatgtctttcgatgtcaagagtagcccttgcgagaaattaaagaccgagaaggaaccagatgccacacccccttcacctcggactttactggctatgcaggcagctctgctcggcagctcatccgaagaggaattagagtcagagaatcggcgacaggccaggggacggaacgcccccgccgctgtggacgaaggatccataagcccgagaaccctctcagcgataaagagagcactggacgacgatgaagatgtgaaggtttgcgccggagacgacgtccagactggaggccccggagccgaggagatgaggatcaattcaagtaccgaaaactcagacgaaggactcaaggtgcgggatggcaaaggaatccccttcaccgcgacactagcatcctcgagcgttaactcagccgaagagcatgtagcttccaccaacgaaggtcgcgaacccacagattccgttcccaaagagcaaatgtcattggtacatgtggggacggaagcatttccaattagcgatgaaagcatgatcaaggatagaaaagatcggttgcccctggagagtgctgtggtgcggcacagtgatgccccgggtctgccgaacggccgtgaactcacacctgcctcccctacatgtactaacagcgttagcaaaaatgaaacccatgctgaagtcctggagcaacagaacgaactctgcccttacgagagcaagtttgattcttccctcctgtcttcagacgacgaaacaaaatgtaagccgaattcggcttcagaagtgattggtcccgtttcacttcaagaaacctcttctattgtgtccgtgcctagcgaggcagtggacaatgtggaaaatgtggtcagctttaacgctaaagaacacgagaatttcttggagacaatccaggagcagcaaactaccgagtccgcaggtcaggacttgatcagtattccaaaggcggtggagccaatggagatagacagtgaggaatcggagagcgacggcagtttcatcgaggttcagtcagtcatatccgacgaagagctgcaggcagaattccctgagacctctaagccgccgtcagaacagggggaagaggagttagtgggaacccgggaaggagaagctccagccgagagcgaaagccttttgcgagataattcggagagggatgacgtcgatggggagcctcaggaggctgagaaagatgctgaagatagcctgcacgagtggcaggatatcaatctcgaagagttggaaacccttgagtcgaacctcctcgcacaacagaacagtctaaaagcccagaagcaacaacaggaacgaatagctgccacagtcacaggccagatgttccttgagtcccaggagctgctacgtctctttggaatcccatacattcaggcccccatggaggctgaagcccaatgtgcgatcctcgatctaaccgaccagacctccggcacaatcacagatgacagcgatatctggctgttcggcgcaagacacgtttatcgtaactttttcaacaaaaataagtttgtggagtactaccagtacgtggacttccacaaccagttaggcctggacagaaataaactcataaaccttgcctacctactggggtcagattacactgaagggattccgacagtgggctgtgttactgccatggagattctaaatgagtttccgggacacggccttgagcccctccttaaattctcagaatggtggcatgaagctcaaaaaaaccccaagatcagacctaatccacacgacacgaaggtcaaaaaaaaactgcggaccctgcagttgacacctggattccctaaccctgctgtagcggaagcatacctgaaaccagttgtggatgacagtaagggatcattcctgtggggaaagcctgatttagataaaattcgagaattttgccagcggtactttggatggaacagaacaaagactgacgagagcctgttcccagtgcttaagcaactcgatgcacagcagacacagctcagaatagactcatttttccggttagcccagcaggagaaggaggatgctaaacggattaaaagtcaacgcctaaacagggcagtgacttgtatgctccggaaagaaaaagaagctgctgcttcagagatagaggctgtctccgtggccatggagaaagaatttgaactgctagacaaagctaaagggaaaacacagaagagagggatcactaatactcttgaagagtccagcagcctcaaacgcaaacggctgagcgattctaagggaaagaatacttgcggcggcttcctcggcgaaacatgcttatccgagagctcagatggaagctctagcgaggacgctgagagcagctctcttatgaacgtgcaacggaggaccgccgcgaaggaacccaaaactagcgcgagcgactcccagaacagcgtgaaggaagcacctgtgaaaaacggaggcgcaactacatcaagtagctcagacagtgacgacgacggcggcaaagagaagatggttttggtgaccgcacgctcggttttcggcaagaaacggagaaagttgagacgagcccgtggacgtaaaagaaagacttag

SEQ ID NO: 15118 - DNA, 699 bp, synthetic construct
  misc_feature 1..699: note = Description of Artificial Sequence: Synthetic coding sequence
  source 1..699: mol_type = other DNA
atgggagtgcagggtctctggaaactcctcgaatgtagtggaaggcaggtgagccccgaggcactcgagggaaaaatcctcgccgtcgacatcagtatctggttaaatcaagcactcaaaggagtgagagatcgccacggtaatagcatcgaaaatccccatcttctcacattgttccaccggctttgtaagctgctgttctttaggatccggccaatcttcgtgttcgacggcgatgctcctctcctcaagaagcagacattggtgaaacgcagacagcgaaaggacctcgcgtcatcagactctaggaagacaactgagaagttgttgaaaacctttctcaaaaggcaagcaatcaagactgcttttcggagtaaaagggatgaggctctgccttccctcacccaggtccggcgtgaaaatgatctgtacgttctcccgcctctgcaggaagaggagaagcatagttctgaggaggaggacgaaaaagaatggcaagaacgaatgaaccagaagcaagctcttcaggaagaattcttccacaatccacaagcgattgacattgagtcagaagattttagctctctgcctcccgaggtcaagcatgaaatactaacagacatgaaggagttcacaaagaggcggcgaacgctattcgaagctatgccagaggtgtatttacccttgctacaaccctag

SEQ ID NO: 15119 - DNA, 4482 bp, synthetic construct
  misc_feature 1..4482: note = Description of Artificial Sequence: Synthetic coding sequence
  source 1..4482: mol_type = other DNA
atgccaaatgagggcattccccattcttcacagacccaggagcaggactgtctgcagagccaacctgtcagtaacaacgaagagatggccataaagcaggagagcggcggcgatggcgaggtggaggagtacttgagtttccgcagtgtgggcgatggtctgtctacctcagccgtcggctgcgccagcgcagcccccagaagggggcccgcgttgcttcatattgatcggcaccagattcaggctgtagaaccatctgctcaagccctggagcttcagggattgggagtcgacgtatatgaccaggacgtgctggaacaaggtgtcttacagcaggtggataacgctattcacgaggccagcagagcctctcagctggtggacgtggagaaggaatatcgttctgtcttggacgacctcactagttgcactaccagtctgcggcaaatcaataaaattatagaacagctttctccccaggcagccacttctcgcgacattaatcgcaagctggattctgtgaaacggcaaaagtacaataaagagcagcagctgaaaaaaattacagcgaagcaaaaacacttgcaagccattctcggaggggccgaggtcaagatcgaactggaccacgcctccctagaggaagacgctgagccaggtccttccagtctcgggagtatgcttatgccagtccaggaaacagcctgggaggagctgatccgtactgggcagatgaccccattcggcacacaaataccccaaaagcaggagaaaaaaccccgcaagatcatgctgaacgaagcctctggctttgaaaaatacctggccgaccaagctaaactcagttttgagagaaagaaacaggggtgtaacaagagggctgctaggaaggctccggcccctgtaacgccccctgcacccgtccagaacaagaataaacctaataagaaagccagggttctgtctaagaaggaggagagactgaaaaagcacataaagaagctccaaaagcgagctttgcagtttcagggcaaagttggcttgcccaaggctagacgaccttgggagagcgacatgaggccggaagccgaaggggactccgagggagaggagtctgagtacttcccgaccgaggaagaggaggaggaagaggacgatgaagtggaaggggccgaagctgacctgagcggcgacgggaccgattacgagctgaagcccctcccaaagggcggcaagcgacagaaaaaggttccagtgcaggagatcgacgatgactttttcccctccagtggagaagaggccgaagcggctagtgtgggggagggcggcggcggcggccggaaagtgggcaggtaccgtgacgacggagatgaggactattataagcaaaggttaaggaggtggaacaagctgagattgcaggataaggaaaagaggctgaagctggaggacgactccgaagaaagcgatgccgaatttgatgagggtttcaaggtacccggctttctttttaaaaaactattcaaatatcagcagaccggcgtgaggtggctgtgggaactgcactgtcagcaagcaggaggcatacttggcgacgagatgggtcttgggaagaccatccagatcatagccttccttgccggactgtcttattccaaaatacgcactaggggctccaattaccggtttgagggcctggggcccacagtgatcgtttgtccaaccactgtgatgcaccaatgggtgaaggagtttcatacgtggtggccaccttttagagtcgcgattctccacgagaccggctcatatacacataaaaaagagaaactcatcagggatgtagcccattgccacgggattttaatcacgtcctatagttatatcagactgatgcaggacgatatcagccgctacgactggcactatgtgatcctggacgaggggcacaaaattcgcaatccaaacgccgctgtcaccctggcatgcaagcagttcaggacacctcatagaatcatcctgtccggtagtcccatgcagaacaacctccgcgaactctggtcactctttgattttatctttcctggtaaactgggcaccctgcctgttttcatggagcagttctcagtgcccatcaccatgggcggctatagcaacgcctcaccagtccaggtcaaaactgcttacaaatgtgcctgcgtgctccgtgacaccataaatccttaccttctgagaaggatgaaaagcgacgtgaaaatgtccctcagtcttcctgacaagaacgaacaggtgctattctgtcggctcaccgatgagcagcacaaggtttaccaaaacttcgtcgactctaaagaagtttatcgaatcctgaacggagaaatgcagatctttagcggtttgattgcgctccgtaagatctgtaatcaccccgatttgttcagtggcggccctaaaaacctaaaaggattgcccgatgacgagctggaagaggaccagttcggatattggaaacggagcggcaaaatgatcgtggtggagagcctgctaaagatctggcataaacaggggcaacgtgttctccttttcagtcaaagccgccagatgctggacattttggaagtattcctgcgggcacagaagtacacctatctgaagatggacggaaccaccaccatcgcctcaaggcagccattaatcacacgttacaatgaagatacctcaatctttgtgtttctgctcaccactcgggtcggaggccttggcgtcaatctgactggcgcgaacagagtggtcatctatgaccccgattggaatcccagcaccgacacacaggctagggaacgcgcttggcggattgggcagaagaaacaagtgaccgtgtaccgcttgctgactgctggcaccattgaagagaaaatttaccatagacagatcttcaaacaatttctgaccaatcgtgtccttaaagaccctaaacagagaagattttttaagtctaacgacctttacgaactgttcaccctgaccagccctgacgcatcccagtccaccgagacaagtgctatttttgctgggactggttccgacgtgcaaacacccaagtgccatcttaaaaggcgcattcaaccggctttcggggccgatcatgatgttccaaaacgaaaaaaattccccgcctccaacataagtgtcaacgacgcaacatcatctgaggaaaagagcgaagccaagggcgctgaggtgaatgccgtaaccagcaacagatctgatccccttaaagatgatcctcacatgagctccaatgtgacttccaatgatcgcttgggagaggaaaccaatgctgtgagtggtcccgaggaactgtcagtcatttctgggaatggagagtgcagcaacagctctggcaccgggaagaccagtatgccaagtggggacgagagcatcgacgaaaagctaggcctgtcctataaaagggaacggcctagtcaagcgcaaaccgaagccttctgggaaaacaagcagatggagaacaacttttacaagcacaaatccaagactaagcatcatagcgtcgcagaggaagagacgctggagaaacatctgagacctaagcagaaacctaagaatagtaaacattgtagggatgcaaagttcgaaggaactcgtatacctcacttagtgaagaagagacgttaccagaaacaggattcggaaaataaaagcgaagcgaaggaacaatcgaatgatgactacgtgttagagaagctcttcaagaagtccgtcggggttcatagcgtcatgaagcatgatgctattatggatggcgcctcacccgactatgtgcttgttgaggcagaagcaaacagagttgcccaggacgcgctgaaggctctcagactgtccagacaaaggtgcctgggggctgtgtctggagtgcctacatggaccggccacaggggcatctccggagcacctgcgggcaaaaagtcaagattcggtaaaaagcggaacagcaacttcagcgtgcagcaccctagttccacatctccaaccgaaaagtgccaggatggcatcatgaaaaaggagggcaaggataatgttcccgagcactttagtgggcgagccgaggacgctgatagttcatcaggccctctggcgtcatctagcctactggccaagatgagggctaggaaccacctcatcctgccagagagacttgaatcggagagcggccacttgcaggaggcatctgcgttgttgccgactacagagcatgacgacctgctggtagagatgcggaactttatcgcctttcaagcacatacagacggtcaggccagcaccagggaaattctccaggaattcgaatctaagttgtccgcgtctcagagctgtgtgtttcgagagctgcttcgcaatttgtgcactttccaccgcactagtggaggtgagggtatctggaagctcaaacccgaatactgttag

SEQ ID NO: 15120 - DNA, 2613 bp, synthetic construct
  misc_feature 1..2613: note = Description of Artificial Sequence: Synthetic coding sequence
  source 1..2613: mol_type = other DNA
cagcagccattccataggcatttgctgatgacgactgccttacattcggagaaactgatccgcgacgtggctcactgccacggaattctgatcacgagttactcatatatccgcctcatgcaggatgatatttccaggtacgactggcactacgtgatcctggacgagggccataagattcgaaatccgaatgccgcggtcaccttagcctgcaagcagttcagaacccctcaccgcatcatactgtctggatcccctatgcagaacaatctgagagaactgtggtctctttttgatttcatttttcccggcaaattgggtacgttaccggtctttatggaacagttctccgtgccaattaccatggggggctattccaatgcaagccccgttcaggttaaaaccgcttataaatgtgcctgtgtactgagagacaccattaatccatacctgttacgccgtatgaagtccgatgtgaagatgagtctctctctcccagacaaaaatgaacagatcttctcaggactgattgccctgaggaaaatttgcaaccatcctgatctgttctctgggggcccaaaaaatctcaaagggctacctgatgatgagttggaggaagaccagttcggctactggaaaagatctggtaaaatgatcgtggttgaaagcctgctgaagatctggcataagcaggggcagagagttctcctatttagtcagagccgccagatgctggatattttggaggtctttttgagagctcagaagtatacctacctaaagatggacggaaccactacgattgcctcacggcagcccctgattacacggtacaacgaagacacaagtatttttgtgttcttactgacaacacgggtgggcggattgggcgtaaatctgaccggcgccaaccgcgtagttatatacgatcccgattggaacccttctacagatacccaagcgcgagaaagagcctggaggattggacaaaagaaacaagtgacagtgtatcgcttgctgactgccggcactattgaggaaaagatttaccatcgtcagattttcaagcagttcctcaccaaccgcgttctcaaagacccaaaacaacgacggttctttaagtctaacgacctgtacgagctgttcactctgacctcccccgatgcctcgcagtccacagagacgagcgctatctttgccggtaccgggagtgacgttcagacccctaaatgtcatctgaagagaaggattcagcctgcttttggtgccgatcatgatgtccccaagaggaagaaatttccggcgtccaacataagcgttaacgacgctacatcatcagaagagaagtcggaagcaaagggcgcagaagttaacgccgtgacgtccaatcgcagcgatcccctgaaggacgacccacatatgagttccaatgtcacttccaacgatagactgggcgaggaaaccaacgctgtgtcagggcctgaggagctgagcgtgatctccgggaacggtgagtgtagtaattcgtccggcaccggcaagacatccatgccctcaggcgacgagagcattgatgaaaaactgggactttcctataaaagagaacgtcccagccaggcccagacggaggccttctgggaaaataagcagatggagaacaatttttacaagcacaaaagcaagaccaagcaccactctgttgcagaggaggaaaccctcgaaaaacaccttcggcccaagcagaagcccaagaacagcaaacactgccgagacgcgaaatttgagggaactagaattcctcacctggttaaaaagaggcgataccagaaacaagactcagagaacaagtcagaggcaaaagagcaaagtaatgacgactatgttcttgagaaactttttaagaaaagtgtcggagtccactccgtaatgaagcacgacgcaattatggatggagccagccctgactacgtcctcgtggaggccgaggccaacagagtggcccaggatgccctgaaagctttgagactgtctcgtcagagatgtctgggcgcagtcagcggtgtccccacttggactggccaccgcgggatcagcggggctccagctggtaaaaagtcaaggttcggcaaaaagcgcaattccaacttttctgtgcagcacccttcttcaacaagccctactgaaaagtgtcaggacggtataatgaagaaggagggcaaggataatgttcctgaacatttctctggccgagcagaagacgctgactcctcatccgggcccctagcatctagctctctgcttgcaaaaatgagagcaagaaatcatttaatcctacctgagcgcttggagtcagaatccggccacctgcaggaagcctctgccttactgcccactaccgaacacgacgacctgcttgtagagatgcgaaattttatagcctttcaggctcataccgatggacaggcatccacaagggaaatcctgcaggaattcgagtccaagctttccgcgtcccagtcttgtgtttttcgggagcttctgcgcaacctctgtaccttccaccgaacgagcgggggagagggtatctggaaactcaaacccgagtactgctag

SEQ ID NO: 15121 - DNA, 540 bp, synthetic construct
  misc_feature 1..540: note = Description of Artificial Sequence: Synthetic coding sequence
  source 1..540: mol_type = other DNA
atgcccaatgaaggcatccctcacagtagccagacccaggaacaggactgtcttcagtctcagcccgtgagcaataatgaagagatggcaatcaagcaggagtcaggaggtgacggggaagtggaagaatacctcagtttcagatccgttggagacggactctccaccagcgccgtgggatgcgccagtgccgcccccagaagagggccagctttgctgcatattgaccgacaccagatccaggccgtcgagccttctgcccaggctttagaactgcaggggctgggcgtggatgtctatgaccaggacgtgcttgagcagggggtgctgcagcaagtggataatgctattcacgaagcttctcgcgcaagccagctagtggatgtcgagaaggagtatcggagcgtcctcgatgacctgacctcttgtacaacctccttgcggcagattaacaaaataatagagcagttgtcgccacaggctgccacctcccgtgatatcaatcgaaaactagacagtgtgaagagacaaaaatattag

SEQ ID NO: 15122 - DNA, 318 bp, synthetic construct
  misc_feature 1..318: note = Description of Artificial Sequence: Synthetic coding sequence
  source 1..318: mol_type = other DNA
atgtcgctgagtttgcccgataaaaacgagcaagtgctgttctgccgcctgacggacgaacagcacaaagtctatcagaactttgtggacagtaaggaagtatacagaatactcaacggagaaatgcaagaggttctccagtcctttacatccattcatctgcacgaaagcccactgaacttctttaggtcgttccaagttcgcgggagccgatcccactaccccggtaaaggcatgcagacaaccctcggcattgtgaacttcttggttgtaactctcaaaagaaagaagcgcaatcggttcagtccagacctgtag

SEQ ID NO: 15123 - DNA, 2592 bp, synthetic construct
  misc_feature 1..2592: note = Description of Artificial Sequence: Synthetic coding sequence
  source 1..2592: mol_type = other DNA
atgcaggacgatatctccagatatgactggcattacgtaatactggacgaggggcacaaaatcaggaatccgaacgccgcagtgacattggcgtgcaagcaatttcgcacgcctcaccgcattattctctcgggatcacccatgcagaataatctacgcgaactatggtctctgtttgacttcatttttccaggtaagctgggaaccctaccagtgttcatggagcagttcagtgtgccaatcaccatgggggggtactctaacgctagccccgtccaggtgaagacagcttacaagtgcgcatgcgtccttcgagacactataaatccttatttgcttcgtagaatgaagtcagacgtgaaaatgtcactgtcactgcctgacaaaaacgagcaagtactcttttgcagactgaccgacgaacaacacaaagtctatcagaattttgtggactccaaggaagtgtacaggattttaaatggagaaatgcagatctttagcgggctcatcgcgctgcggaagatttgtaatcacccagacttattttcaggagggcctaagaacctcaaaggcttacctgacgatgaactggaagaagaccagttcgggtactggaagagaagcggcaagatgatagtggtcgagtctctgttaaagatttggcataaacagggccagcgcgtactgctgttcagtcagtcgaggcaaatgctggacattctggaggtatttttgagagcacaaaaatacacttatttgaagatggacgggacaactacaatagcatcccggcagcccctcatcacacggtataatgaagacaccagtatctttgtgtttttgctgacaacacgagtcggcggtctgggcgtaaacctaactggagccaatagggtggtgatttacgacccagattggaatccgtctaccgacacacaagcaagggagcgcgcctggcggataggtcagaaaaagcaagtgaccgtctatagacttctgacggcggggaccattgaagagaagatctatcatagacagatcttcaaacagttcctgacaaaccgggtcttaaaggacccaaaacaacgtagattcttcaagagtaacgacctttatgagttgttcactttgacgagtcccgatgcttcccaaagtaccgagacaagcgccatatttgctggtaccggcagtgatgtgcagactccaaagtgtcacctgaaaaggagaattcagcccgccttcggagctgatcatgacgtccccaaaaggaagaagttccctgcttctaatatttccgttaatgacgctaccagttccgaggagaaatcagaggccaaaggagctgaggtcaacgctgtgactagcaatagatccgacccactgaaggacgaccctcacatgagcagtaacgtgacttcgaacgataggctgggcgaggagaccaacgccgtgtccggcccagaagagttgtctgtgatttccgggaacggtgagtgcagcaatagtagtggtaccggaaaaaccagcatgccctcaggtgacgaaagcatcgatgagaaactcggcctcagttacaaacgcgaacggccatcccaggcccagacagaagcattttgggagaataaacagatggaaaataatttctacaagcataaatctaagaccaaacaccattctgttgcagaagaggagactttggagaaacacctgcgacctaaacagaaacccaagaactcaaagcattgccgtgatgcaaagtttgaggggaccaggattccccatttggttaagaaacggagataccagaaacaggatagtgaaaacaagagcgaggccaaagaacagtctaatgatgactacgtccttgaaaagttattcaaaaaaagcgtcggtgtgcatagcgtgatgaagcacgacgcgattatggacggcgccagtcccgactacgtactggtagaggctgaggccaaccgggtggcacaagacgcccttaaggcccttcgcctctccaggcagcgttgcttgggcgccgtttctggagtgccaacctggaccggccaccgcgggatttcaggggctcccgccgggaagaaaagtaggtttggaaaaaagcgtaattcaaattttagtgtgcagcacccttcatctaccagccccactgagaagtgccaggatggcatcatgaagaaagagggaaaagacaacgtccctgaacacttctcagggcgagccgaagacgccgactcctcaagtggaccattagcctcgagtagcttactcgctaaaatgagggcacggaaccatctgatccttccggaacgacttgagtccgagtcaggtcacttgcaagaagcctccgctctcctgcctaccacggagcatgacgatctcctggtggaaatgcggaattttattgccttccaggcccacactgacggtcaggcttctacccgcgagatcctgcaggagttcgagagtaagctgagcgcaagccagtcttgcgtattccgcgagcttcttcgcaacctgtgcacttttcaccggacatctggcggcgagggaatttggaagctcaaacctgagtactgttag

SEQ ID NO: 15124 - DNA, 1191 bp, synthetic construct
  misc_feature 1..1191: note = Description of Artificial Sequence: Synthetic coding sequence
  source 1..1191: mol_type = other DNA
atgctgggcttccttagcgcccgtcaaacaggtctggaagaccccttgaggttgcggagggctgagtccacacggagggtgctgggactggagttaaataaagaccgggacgtggagagaattcatggaggcgggatcaacacactcgacatcgaaccagtggaaggtcgttatatgcttagtggagggtcggatggagttattgtgctttatgatctggagaattcctctaggcagtcttactatacttgtaaggccgtgtgcagtatagggcgtgaccacccagacgtccaccggtactctgtggaaaccgttcagtggtaccctcacgacaccggcatgttcacatcctcatccttcgataagaccctcaaggtgtgggacaccaacactctacagacagctgatgtcttcaacttcgaggaaacggtgtacagtcatcatatgagccccgtctctaccaagcattgtctcgtcgcggttggcactcgtgggcctaaagttcaactgtgcgatcttaagtctgggtcctgtagccatattctacaaggacaccggcaggagatcttggccgtgtcctggagtcctcggtatgactatatattagccaccgcttctgccgactctagggtaaagctctgggatgtgaggagagccagtgggtgcttaattactctggatcagcacaacggcaagaaaagccaagcagtggagagcgccaacactgcccacaatggcaaagttaacggcctgtgtttcacctcagatggtctgcatctgctcaccgtgggcaccgacaaccggatgcgcctgtggaattccagcaacggtgaaaatactctcgtgaactacggcaaagtatgtaataactctaagaaagggcttaagtttactgtgtcctgcgggtgctctagcgaatttgtatttgtgccctacggctctacaattgctgtctacactgtttattccggggagcaaataacaatgttgaagggccactataaaaccgtggactgttgtgttttccaaagtaactttcaggaactgtactcgggctcacgcgattgtaacattttggcatgggtgccatctctctatgagcccgtgccggacgatgacgaaacaactaccaagtcccagctgaacccagctttcgaagacgcatggtcttcatccgatgaggaggggtag

SEQ ID NO: 15125 - DNA, 1017 bp, synthetic construct
  misc_feature 1..1017: note = Description of Artificial Sequence: Synthetic coding sequence
  source 1..1017: mol_type = other DNA
atgctgtctggggggtcagatggcgtgattgtactgtacgatctggagaattcaagtcgccaaagctattacacgtgtaaggccgtgtgttccatcggtagagatcaccctgacgtgcatcgctacagcgttgagactgtccagtggtacccccacgacacagggatgttcaccagttccagtttcgacaagacacttaaggtctgggatactaatactctgcagacagcggacgtgttcaattttgaagagactgtctactcacatcacatgagcccagttagcactaaacactgcttggtggcagtaggaacccgtggccctaaggtgcagctgtgtgatctcaagagcggttcctgtagccacattttgcagggccacaggcaggaaatactagccgtgtcttggagccctcgatatgactatatcctagctacagcttctgccgatagccgggtgaagctctgggatgtgagaagagcaagcggctgcttgatcaccttggatcagcataacgggaagaagagccaggccgtggaaagcgctaacacagcacacaacgggaaggtgaacggtctgtgttttacgtccgacggcttgcaccttctgaccgtcggaactgacaatagaatgcgactgtggaactcttctaatggagaaaacactctggtgaattatggaaaagtgtgcaataattccaagaaaggtctcaagtttacagtttcctgcggctgcagcagcgaattcgtgtttgtgccctatggatccaccatagcagtctatacagtttacagtggggaacagatcacaatgctgaaaggtcattataaaaccgtggattgttgcgtttttcagtccaatttccaggaattgtacagtggcagcagggattgcaatatcctagcctgggtgccatcactttacgaacctgttcccgacgatgacgagaccacaactaaaagtcagctgaacccggccttcgaagacgcctggtctagcagtgacgaggaaggctag

SEQ ID NO: 15126 - DNA, 1188 bp, synthetic construct
  misc_feature 1..1188: note = Description of Artificial Sequence: Synthetic coding sequence
  source 1..1188: mol_type = other DNA
atggccacgtcgtctgcgcccgctggagtaagaaccaggtatgctggggtctttgtgcggacaccaaatgggtttggaggcccttcttctcccagtgaatctcgcgtgaataccgaatcctttgggacaggcatcaatacattagacatcgagccagtggaaggacggtacatgctcagtggaggctctgacggcgtgatagtgttatatgatttagagaacagttcaagacaaagctactatacgtgtaaggccgtatgcagcatcggaagggatcaccccgacgtccatcgctattcagtggagaccgtacagtggtatcctcacgataccgggatgtttacttccagctcctttgacaagacgctgaaggtgtgggacactaacacactgcagactgccgatgtcttcaactttgaagaaacagtgtatagccatcacatgtctccagtctctacaaaacattgccttgtcgccgtcggaacccgcggccccaaagtgcagttgtgcgatctgaaatctggttcttgctcccacatcctgcagggccatcggcaagaaatcctggcagttagctggtccccacggtatgactacattcttgctaccgcgtccgccgacagcagagtgaagttatgggacgtccgtagagcctctgggtgtttgattaccctggatcagcacaatggcaagaaatcccaggccgtggaatcagccaacacagcccacaacggaaaagtcaacggactgtgcttcacaagcgacggactacacctgctcacagttggcaccgacaacagaatgcgcctatggaacagttccaatggagagaatacactagtaaactatgggaaggtgtgcaacaattccaagaaaggcctgaaatttaccgtttcctgcggctgttcttcagagtttgtgtttgtaccttacggatccaccatagctgtgtacactgtctattcgggcgagcagatcacaatgctcaagggccattataaaacagtcgactgctgtgtgttccagtccaatttccaggagctgtatagtggatcccgagattgcaacatcctggcctgggtgccatcgctttacgagcctgtacctgacgatgacgagacaactacaaagtctcagttgaaccctgctttcgaggatgcttggtcctccagcgatgaggaaggatag

SEQ ID NO: 15127 - DNA, 732 bp, synthetic construct
  misc_feature 1..732: note = Description of Artificial Sequence: Synthetic coding sequence
  source 1..732: mol_type = other DNA
atgggctataagtatatcactattggcacacgtggtcctaaagtgcagctttgcgaccttaaatccggctcctgttcacatattctgcaggggcacagacaggagatccttgcagtgagttggtctccgcggtatgactacatcctagccactgccagcgcagacagccgcgtgaaactctgggacgtccgccgggccagtggctgtctcatcacgctagaccaacacaacggtaagaagtcacaggccgttgagagtgccaacaccgctcacaatgggaaagttaacggcttatgctttacgagcgatgggttgcacctgctgaccgtcggcacagacaatcgcatgaggctctggaactcaagtaacggtgagaacactttagtgaattacggtaaggtctgtaataactccaaaaagggcctgaagttcactgtctcttgtgggtgttccagtgagtttgtgttcgtcccatacggctccacaatcgcggtgtacactgtgtattcgggggagcagatcacaatgctgaagggacactacaaaacagtcgactgctgtgtgtttcagtcaaacttccaggagctctacagtgggagccgagattgcaatattctggcctgggtgccttctctttacgagcctgtccccgacgacgatgaaacaacgacaaaatcccagctgaatccagcatttgaagacgcctggagctccagtgacgaagaggggtag

SEQ ID NO: 15128 - DNA, 2541 bp, synthetic construct
  misc_feature 1..2541: note = Description of Artificial Sequence: Synthetic coding sequence
  source 1..2541: mol_type = other DNA
atgggcatacaggggttgctgcagtttatcaaggaagcctcagaaccaatacacgtgcgaaagtacaaaggacaggtggtagctgtcgacacctattgttggcttcacaaaggcgccatcgcttgtgcggagaagctggctaagggcgaaccgacggacagatacgtcggcttctgtatgaagtttgtgaatatgttgctttcccacggcatcaaacccatcctagtatttgatgggtgtactctgcccagcaagaaagaggtcgagagaagcagaagggagcgacgccaggccaatctgctgaagggcaagcaactgttgagagagggaaaagtgtcagaggcccgcgagtgtttcactaggagtattaacattacccatgcgatggcacataaagtgataaaggccgcccgatcccagggggtggactgccttgtcgcaccctatgaagccgacgcgcagctcgcgtatctaaacaaagctggtattgtccaggcgatcattacagaagattctgacttgctggcctttgggtgtaaaaaagtcatactgaagatggaccaattcggtaacggactggagattgaccaagcccggctgggaatgtgccgacagttgggcgacgtatttacagaggaaaagtttcgatatatgtgcatccttagtggctgcgactatttgtcgtccttgaggggcattggcctggcaaaggcttgtaaggttctgcggcttgcgaacaaccccgacatcgtgaaggtcattaagaaaatcggtcattatctcaagatgaacattacggtgcctgaggattacataaatggctttatccgggctaacaatacatttctgtatcagcttgtgttcgatcctattaagagaaagctgatccctctgaatgcctacgaagacgatgtagaccccgagaccctatcctacgcaggtcagtatgtcgatgacagcatcgctcttcagatcgccctggggaacaaggatataaacacatttgagcaaatcgacgactataaccccgacaccgctatgccagcacattcgcggtctcactcatgggacgacaagacatgtcagaagtccgcaaacgtaagttccatttggcatcgtaattacagtccgagacccgagagtggtaccgtgtctgacgcccctcagcttaaagagaatccaagcaccgtcggagtagagagggtaatctcaacaaaaggcctcaatcttccacgtaagtcaagcatcgtgaaaaggcccagaagcgccgaactgagcgaagacgatctacttagtcagtattccttgtcgtttacaaagaagactaagaagaactcctccgaagggaacaagtccctgagcttctccgaggtgttcgttccagatctggtaaacggtccgactaacaagaaatcagtgtccacgccgccacgtacacggaataagttcgctactttcttgcagcgcaagaatgaagagtctggtgccgtcgtcgttccagggacaaggtcaagattcttctgctccagcgatagcacagattgcgtgagtaataaagtgtctatacagcctctagacgagaccgcagtcactgacaaggaaaacaacctgcacgagtctgaatatggcgaccaggaaggaaagagacttgtggataccgatgttgccaggaattcctccgatgacatccctaacaaccatatccctggagaccacattcctgacaaagccactgtatttacggacgaggaatcatattcctttgaatcttcaaaatttacccgcaccatctcacctccgacgttgggaacactgagatcttgtttctcctggtcaggagggctgggcgatttctccaggactccaagccctagccccagtaccgcgctgcagcagtttcgtcgcaagagcgatagtccgacatcgctccccgaaaacaatatgtccgatgtctcacaactaaaatccgaggagtccagtgacgatgagtctcaccccctcagagaggaggcctgttccagccaaagccaagagtctggcgagttttccctgcagtctagcaatgcatcaaagctgtcccagtgctcgtccaaagactccgacagcgaagaaagcgactgcaatattaagctgctggactcacaatcagaccaaacctctaagcttaggctgtcgcatttctcaaagaaggataccccactcagaaataaagtgccagggctgtacaaatcctcttccgccgatagtctgagtaccaccaaaatcaagcctctgggtcccgctagagcttccggactgagtaaaaagccagcatctatccagaagcggaagcatcataatgctgagaataagcccggccttcagatcaaactgaatgagttgtggaaaaattttggctttaaaaaggacagcgagaaactcccaccctgcaagaagcccctgtcacccgtccgagataacatccagcttaccccagaggcagaggaggacattttcaacaagcctgagtgcggcagagtgcagcgcgcaatcttccagtag

SEQ ID NO: 15129 - DNA, 510 bp, synthetic construct
  misc_feature 1..510: note = Description of Artificial Sequence: Synthetic coding sequence
  source 1..510: mol_type = other DNA
atgggaatacagggactgttgcaattcataaaggaagctagcgagcccattcatgttcgaaagtacaaggggcaggtggtggcagtcgacacctattgttggctgcataaaggggcaatagcttgcgccgagaaactagccaaaggggagcccaccgatcgaaggagacaagctaacctacttaagggcaagcagctactgcgggagggaaaagtgagcgaagccagggaatgtttcactcggagtatcaatatcactcatgccatggcacacaaagttattaaggccgcgagaagccagggcgttgactgtctggtggcgccctacgaggccgacgcacaactggcctatttgaacaaggcagggattgtgcaggctatcataaccgaagatagtgacctgctggcatttggatgcaagaaggtgatccttaaaatggaccagttcggtaacggcctagagatcgaccaggctcgactcggaatgtgtcgtcaactgggggatgtgtag

SEQ ID NO: 15130 - DNA, 2541 bp, synthetic construct
  misc_feature 1..2541: note = Description of Artificial Sequence: Synthetic coding sequence
  source 1..2541: mol_type = other DNA
atgggtattcaggggctcctgcagttcataaaagaagcgtcagaacctatccatgtgcggaaatataaaggccaggtggtggcggtcgacacctattgttggctccacaagggcgcaatcgcttgtgccgagaagctggctaaaggggaaccgaccgatcggtacgtcggtttttgcatgaagtttgtgaacatgcttctgagtcacggtatcaagcccattttagtcttcgatggttgtactttgcctagtaagaaggaggttgagcggagtaggagagagcgccggcaagccaacttgctcaagggaaagcagctccttagggagggaaaggtgagcgaagccagggagtgctttacacgatctattaacatcactcacgctatggcccacaaagtaattaaagcggcgcggagtcaaggtgttgactgcctggtggcaccctatgaggccgatgcacagctggcatacctaaacaaggcggggatcgtgcaagcgattattactgaggactcagacctgttggcttttggctgtaaaaaagtcattctgaagatggaccaattcgggaacggactggagatcgatcaggcacgtttgggtatgtgtagacagctgggggacgtgtttacggaggaaaagtttagatacatgtgcatcttgtccggctgcgactacctctcctccttgcggggcattggactggctaaagcatgtaaggtcctgaggttggccaacaaccctgatatagtgaaggttatcaagaaaatcggccactacctcaaaatgaatatcaccgtgcctgaggactatattaacggtttcattagggccaataatacttttctgtatcaactcgtgttcgaccccataaagcgcaaactgatccccctcaacgcatacgaagacgatgttgaccctgagactctctcctatgccggccaatatgttgacgactcgattgccctgcagatagctctggggaacaaggacattaacacctttgaacagatcgatgactacaatccagacacggctatgcctgcccattccaggtcacatagctgggatgataagacttgccagaaatctgcgaatgtgagctcaatctggcaccggaactattctccacgaccagagagcggaaccgtgagcgatgctcctcaacttaaggaaaacccatctaccgtgggagtcgagcgcgtgatcagcacgaagggcctcaacctgcctcgcaaatcctctattgtgaagcgcccaagatcagcagagttgagcgaggacgaccttctttcgcagtatagcctttcttttactaagaagacaaaaaaaaacagcagcgagggaaataaatcactttcattcagcgaggtgtttgttcccgatcttgttaacggcccgacaaacaagaagagtgtatccacaccacccaggacgcggaacaagtttgctacttttttgcagcgcaagaacgaagaaagtggcgcagtagtcgttccaggaactcgaagccgctttttttgctcctcagactctaccgactgtgtcagtaataaggtgtcaatacaacctctggacgagaccgctgtgacagataaagagaacaatttacatgaatccgagtacggcgatcaggagggcaaacggttagtcgatactgacgtcgcgaggaactcctcagatgacataccgaataatcatattccaggggaccacattcccgataaggctactgtgtttacagacgaagagtcttatagtttcgaatcgagcaaatttacccggaccatctcacccccaacactggggaccttgaggagctgtttctcgtggtctgggggactgggagatttttcccgtacccccagtccatccccatccactgccttgcagcaattcaggcgcaagtcggatagcccaaccagtctgcccgagaataacatgagcgatgtctcacagctgaagtcggaagaatcttctgatgacgaaagccatcccctgcgtgaggaagcttgctccagccagtcacaggagtcaggagaattttctctgcagtcttctaacgcgtcaaagttgtcgcagtgctctagtaaggacagtgattccgaagaatcagattgtaacatcaaattactggattctcagagtgatcagacgagtaaactgagattgtcgcatttcagcaagaaggatacacccctgcgaaataaggtcccgggcctgtataagtcctccagtgctgattccttgagcaccactaagattaaaccattaggaccggcccgggcctcgggcctttccaagaaacctgcctcgatccagaagagaaagcatcataacgctgagaacaaacccggtctgcagatcaagttgaatgagctgtggaagaattttgggtttaagaaagacagcgagaaactgcccccttgtaaaaaacctctgtcccccgtccgggacaatatacaactcaccccagaagccgaagaggacattttcaacaagccagaatgcggtcgggtccagcgcgcaatattccaatag

SEQ ID NO: 15131 - DNA, 408 bp, synthetic construct
  misc_feature 1..408: note = Description of Artificial Sequence: Synthetic coding sequence
  source 1..408: mol_type = other DNA
atggggatccagggcctgttgcagttcatcaaggaagcttccgaacctatccatgtccggaaatataaggggcaggttgttgctgtggatacctactgttggttgcataagggtgctatcgcatgcgcagaaaagctggcgaaaggcgaacccacagacagatacgtcggcttttgtatgaaattcgttaacatgttactgtctcacggcatcaaaccgatcctcgtgtttgacggatgcaccctaccgtctaaaaaggaggtggagagaagccggagggaacgaaggcaggccaaccttttaaagggaaagcaactcctgagggagggcaaggtcagcgaggccagggagtgctttacacgctctattaacattactcatgccatggctcacaaagtgattaagtag

SEQ ID NO: 15132 - DNA, 2412 bp, synthetic construct
  misc_feature 1..2412: note = Description of Artificial Sequence: Synthetic coding sequence
  source 1..2412: mol_type = other DNA
atggggatccagggtttgctgcaattcattaaagaggcatcggaacccatccacgtgcgaaaatacaaaggtcaggttgtggcagtagacacatactgttggctccacaagggcgccattgcctgcgccgagaaactcgcgaagggagaaccaaccgaccgatatgtgggcttttgcatgaagttcgtgaacatgctgctttctcatggtattaagcccatcctagtatttgatgggtgcacactcccctccaaaaaggaggttgagcgatccagaagggagcgcaggcaggcgaacttgctgaagggcaagcaactgctgcgcgaggggaaggtgagtgaggcgagggagtgcttcactaggagtataaatatcactcatgccatggcccataaggtgattaaagcagcccgcagtcaaggagtggactgcctggtggcaccttatgaggctgatgcacaattggcctatcttaataaggcaggtatagtgcaagcgattatcactgaggactcagatcttttggccttcggatgcaagaaggtgatactcaagatggaccagtttgggaatgggttggaaatcgaccaggctcgattgggcatgtgcaggcagctgggggatgtgttcaccgaggagaaatttcgttatatgtgcatcctcagtggctgtgactacctttcaagtttacgggggatcggtctcgcaaaggcatgtaaagtgctcaggttggccaataaccctgacattgttaaggttattaagaaaatcggacattacctcaagatgaacattaccgtgcccgaggattatattaacggattcattcgcgcgaataatacctttctataccaactggtattcgaccccatcaagcggaaactcatcccgttgaatgcctacgaggacgacgtggaccccgagacactatcctacgcgggccagtatgtggatgattccattgctctgcagatcgcacttggcaataaggatataaacacgttcgaacaaatcgacgattataatcctgacacagcaatgcccgcacattctaggtcccatagctgggatgataaaacctgccaaaagagcgctaatgtgagttctatatggcaccgtaactacagccctagaccagaatctggtactgtgagtgatgccccgcagctgaaggagaatcctagcacagtgggggtcgaacgggtgatctcaaccaagggcctgaatctgccgcggaagagttcaattgtgaagcgtcccagaagtgcggagctcagtgaagatgatctcctatcacaatatagtctatctttcaccaagaaaaccaagaagaactcttctgaaggaaacaaatcgttaagcttctctgaggtcttcgtacccgacctcgtaaatggtccaactaacaagaagtcagtatcaactccacctcgcacaaggaataagtttgccacttttctgcagcgtaaaaatgaggaatctggagccgtcgtagtgccgggcactcgtagtagattcttctgctcaagcgactccactgactgcgtgtccaacaaggtgagtatccagcctttggacgagaccgccgtaacagacaaagaaaacaaccttcacgagagtgaatatggcgaccaggagggaaagagactagttgatacagatgtcgctagaaacagctctgacgacataccgaacaaccatattcctggagatcacatccctgacaaagcaacagtttttaccgatgaagaatcctactcatttgagagcagtaaatttacccggactatttcaccaccgacactgggtacgctgcgaagctgtttctcctggagcggagggctcggcgatttcagtagaaccccctctccatcaccttccactgcgttgcagcagtttcgtcgcaaaagcgattcacctaccagcctgcccgaaaataatatgagcgatgtctctcaactcaagtcagaggagtcaagcgacgatgaatcccaccccttgcgcgaggaagcttgctcttctcagtcacaggaatctggggagtttagtctccagagttcaaacgcatctaaactctcacaatgctctagcaaagatagcgatagcgaggaaagcgattgtaatataaagttactggactcccagagcgaccagacttccaaactgcggctgagccacttttctaaaaaagacaccccgctgcgtaacaaggtaccaggcctctataagagtagctctgctgattcactgtctaccaccaaaatcaagcccctcggacccgctcgggcatccgggctaagcaagaaacccgcttccatacagaagcggaaacaccataatgctgaaaacaaaccgggcctgcaaattaaactgaatgaactatggaagaatttcggatttaagaaattctag

SEQ ID NO: 15133 - DNA, 36 bp, synthetic construct
  misc_feature 1..36: note = Description of Artificial Sequence: Synthetic coding sequence
  source 1..36: mol_type = other DNA
atgggcattcaaggccttctacaatttatcaagtag

SEQ ID NO: 15134 - DNA, 2241 bp, synthetic construct
  misc_feature 1..2241: note = Description of Artificial Sequence: Synthetic coding sequence
  source 1..2241: mol_type = other DNA
atgcaggccaagaagcgctactttatactcctctctgccgggagctgtctggctctgttgttttatttcggtggattacagttcagggcttccagatcccattcccgtcgggaagagcatagtggacggaacgggctgcatcacccatctccagaccacttctggccccgttttcccgacgcgctacgcccatttgtgccttgggaccagctagaaaatgaggattcttctgtacacattagcccacgccagaaaagagacgccaatagctctatttataaagggaagaagtgccggatggaatcttgttttgacttcaccctatgtaagaagaatggattcaaggtctatgtgtaccctcagcagaaaggagaaaaaattgcagagagttatcagaatattctcgcagctattgaaggcagccggttctacacctctgacccaagccaggcttgcctattcgtgttgagcttggatacactcgaccgggaccagctttctccccaatatgtgcataacttaagatccaaggtgcagtccctccatctctggaataacggacggaatcatctaatttttaatctgtactcaggcacctggccagactataccgaagacgtggggtttgacattggccaggcaatgctggcaaaggcctctattagtacagaaaactttaggccaaatttcgatgtgagtattccactcttctctaaagaccacccacgaacggggggtgaacgcggcttcctcaagttcaacaccatccccccactacgtaaatacatgcttgtatttaagggtaagcgatacttgacaggaataggtagcgacacccgaaatgcattgtaccacgtacacaacggagaagacgtggtgcttttaacaacctgcaagcacggaaaggactggcagaaacacaaagacagcaggtgtgacagggacaataccgagtacgaaaaatatgattatagagagatgcttcacaatgccacgttctgtctggtgccgcgcgggcgccggctaggctcgttcagattcttagaggccctgcaagcagcttgcgtccccgtgatgctgagcaatgggtgggagttaccttttagcgaagtaatcaactggaatcaggctgctgtcataggcgatgaacggttgttgcttcagattccctccactattcgcagtatccatcaggacaaaatcttggccttaaggcaacagactcagtttctttgggaagcctacttttcttccgtcgagaagatcgtgttgaccactctagaaatcatccaggatcgtatattcaaacacattagtagaaatagtctgatttggaacaagcatcctggggggctgtttgttttaccacagtattcttcctacttaggggatttcccatactattatgccaaccttggattaaagccaccttcaaagttcaccgccgtcatacacgcagtgacccctctggtgtcccagtctcagcccgtcttgaaactgctcgtggctgctgcaaagagccagtattgcgcccagatcattgtcttatggaactgcgacaagccattacctgccaagcacaggtggcccgctaccgctgtcccggttgtcgtgatcgagggcgagtctaaagtaatgagctccaggtttctcccatacgataatattatcactgatgcggttctgagcctggacgaagataccgttctgagcacgaccgaagtggacttcgctttcaccgtgtggcagtcttttccagaacgcattgtaggatacccagcccgatctcacttttgggataactcaaaggaaagatggggctatacctcaaagtggacaaacgactactctatggtcctcactggcgctgctatctatcacaagtactaccactacctatacagccattacctccccgcaagcctgaagaatatggtggaccagctggctaactgtgaagatatcctaatgaacttcctggtgagcgccgtgaccaaactcccacctatcaaggtaactcaaaagaaacaatataaagaaactatgatggggcagaccagtagagcatcacgctgggcagaccctgaccacttcgcgcagcggcagagctgtatgaacacttttgcctcctggtttggttacatgccgttgatccattctcagatgagactggatccagttttatttaaggatcaggttagcatcctgcggaaaaagtaccgcgatatcgaaagactgtag

SEQ ID NO: 15135 - DNA, 2157 bp, synthetic construct
  misc_feature 1..2157: note = Description of Artificial Sequence: Synthetic coding sequence
  source 1..2157: mol_type = other DNA
atgtgcgcgtctgtcaaatataatattagaggccctgcgctaattccgcgcatgaaaaccaaacatagaatctactacattaccctcttttccatcgtgctcttgggcctcattgctacgggtatgttccagttctggccacactccatcgaatcttctaacgactggaacgtggaaaagagaagcatcagggacgttcctgtagtcagactgccggccgatagcccaattcccgagagaggcgatctgtcttgcagaatgcatacttgctttgacgtgtacaggtgcggatttaaccccaagaataagataaaggtttatatttacgctctcaaaaaatacgtggatgatttcggggtgtccgtgtcaaataccatctccagagaatataacgaacttctgatggccatctctgactctgattattacacagacgatatcaaccgagcctgcctttttgtcccatcaattgacgtattgaatcaaaacactcttaggatcaaagaaaccgcccaggcaatggcccagctgagcagatgggataggggaacgaaccacctcctgtttaatatgctgccggggggaccccccgattataatactgctttagacgtgccaagggatcgagccttattggctggcggaggattttcaacgtggacttacaggcaagggtacgacgtatctatcccagtgtacagtccattgtccgcagaggtggatcttccagaaaaaggccctggaccccggcagtatttcctgctgtcctctcaggtggggctgcatcccgagtatcgtgaggacttggaggccctacaagtgaagcacggcgagtccgtgctggtgctcgacaaatgcactaatttatccgagggggtgctgtctgtgagaaagagatgccacaagcatcaggttttcgattaccctcaagtgctgcaggaggccacattttgtgtggtgcttagaggggctcgtttaggacaagccgtattgtccgacgtcttacaggcaggttgcgttccagtggtcatcgcagactcatatatcctccccttctctgaggtcctcgactggaagcgtgcctctgtcgtggttcccgaggagaagatgagtgatgtgtacagcatcctccagtcaattccgcagagacagattgaggagatgcagagacaggctaggtggttttgggaagcttatttccaatctatcaaggccatagcacttgcgacccttcagatcataaacgacaggatctacccctacgcagccatttcttacgaagaatggaatgatccccctgcagtgaagtgggggtcggtctctaatcccttgttcctgcccttgattcccccccagtcgcagggcttcaccgccatagtgcttacatacgaccgagtcgagtccctgttccgagtaatcaccgaggttagtaaggtgccatccctttctaaactcctcgtcgtgtggaataaccagaataaaaatccacccgaggactctctctggcccaagatcagggttcccctgaaagtggtgcgcacggcagagaataaactgtctaacaggttttttccgtatgacgaaatcgaaaccgaggcagttctcgccattgacgacgacataataatgctgacatctgatgagcttcagtttgggtatgaggtatggagagagttccctgaccgcttggtcgggtacccaggtcgccttcacctttgggaccatgaaatgaataagtggaagtatgagtccgaatggactaatgaggtatcaatggtgctgaccggtgctgccttttatcataaatacttcaactatttgtatacctacaagatgcctggcgatatcaaaaactgggtcgatgctcacatgaactgtgaagatatagctatgaatttcctggtggccaacgtgacaggcaaggctgtgatcaaagtcactcctcgaaagaagtttaagtgtcctgaatgtaccgcaatcgatgggctctctcttgaccaaactcatatggttgaacggtctgagtgcattaataaatttgcttcggttttcgggacgatgcccctgaaggtggttgagcaccgggccgacccagttctttataaagacgacttcccagagaagttaaagtctttcccaaacatcggaagtctgtag

SEQ ID NO: 15136 - DNA, 2187 bp, synthetic construct
  misc_feature 1..2187: note = Description of Artificial Sequence: Synthetic coding sequence
  source 1..2187: mol_type = other DNA
atgtgcgcctctgtgaaatataacatcagaggccctgctctcattccccggatgaaaaccaagcataggatttattacatcactcttttctctatcgtactcctgggtctcatcgctacaggcatgtttcagttttggcctcatagtatcgagagctctaacgactggaatgtggagaaaaggtcgatccgcgatgtgccggtggtgagattgcctgctgattccccaatccccgagcggggcgacttgagttgtaggatgcacacctgcttcgatgtctacagatgtggcttcaatcccaagaacaaaattaaagtgtacatatatgcgctcaagaagtatgttgatgactttggcgtgagcgtctctaatacaattagcagagaatataacgagcttctgatggcgatctccgactctgactactacacagacgacatcaatagggcttgcttgtttgtgccaagcattgatgtcctgaaccagaatactctgcggatcaaggaaacggcccaggcaatggcccagttatcacgatgggaccgcggcactaaccaccttctctttaacatgttgcctggtggcccacctgattacaacacagcgctagatgtgccacgggatcgggccctgttggcgggcggcgggttctctacgtggacttataggcagggatacgacgtttctatcccggtgtattccccattgtctgcagaggtggatctgccagagaagggtccaggacccaggcagtatttccttctatcgagccaggtgggcctccaccccgagtacagggaggacctggaggcactgcaggtaaaacacggcgaatcagtcctggtactggataagtgcaccaatctgagtgaaggagtgctgagtgtgcggaagcgatgtcataaacatcaggttttcgattaccctcaggtcttacaggaggccaccttctgcgtggtgctgcgtggcgccagactgggtcaggcagtgctgtccgatgttctgcaggcagggtgcgttcccgtcgttatcgcagatagctatatcctgcccttttctgaggtgctcgactggaaacgcgctagcgtggttgtgcccgaagagaaaatgtccgatgtgtactcaattctgcagtccattcctcagagacagattgaagagatgcagcgtcagttatttatggagcccgccagaagggagaactggagtgcggctaaccaccagatgaactcccttatttggcctagagagcagtgggatagccagattattaacgaccggatttacccctatgcagctatctcatatgaggagtggaatgatcctcctgcagtcaagtggggttcagtatccaacccacttttcctgccactcatccccccccagagccagggtttcacagccattgttctgacctacgatagagtggagtcacttttcagagttatcacggaggtgagcaaggtgccaagtttgagtaagctgctggtggtgtggaacaatcagaacaaaaacccaccagaagactccttgtggcccaagatccgtgtgcccctgaaggtcgttcgtactgcggagaacaagctgagcaacagatttttcccttacgatgaaatagagaccgaagccgttttggcaattgatgatgacattataatgctgacatccgacgagttgcagttcggctatgaggtctggagggaattcccagaccgcctggtaggataccctggcaggctgcacctctgggatcatgagatgaacaagtggaagtacgagtcagagtggaccaacgaggtctctatggtcttgactggagctgccttttaccataaatactttaactatctgtatacctacaagatgccaggcgatatcaagaactgggtcgacgctcatatgaattgtgaagacatcgcaatgaacttcctggtggcaaacgtgaccggaaaagcagtgattaaagtcaccccgagaaaaaagttcaagtgcccagagtgcactgcgatcgacggactgtctctggatcagactcatatggtcgagcgcagcgagtgtatcaacaaattcgcatctgtgtttggcacgatgcctttgaaggttgttgaacatagagctgaccccgttttatataaagacgacttccccgaaaagctgaaatcctttcccaacatcggcagtctgtag

SEQ ID NO: 15137 - DNA, 2256 bp, synthetic construct
  misc_feature 1..2256: note = Description of Artificial Sequence: Synthetic coding sequence
  source 1..2256: mol_type = other DNA
atgtcctgtgcaagtggcagcggaggaggactccggcacccactccggtgccagaagccatgggatgaagaatgcgaagaggaagccgtgtgcgtgataatgtgcgcatccgtgaaatacaatattagaggcccagctttgatccccagaatgaaaaccaaacatagaatctactacattacgctattcagcattgtgcttctcgggttaattgcaacagggatgttccaattctggcctcacagcatcgaatcctccaacgactggaacgttgaaaagaggtcgattagggatgtgccggtggttcggctcccagccgacagccccattcctgagcggggagatctgagctgccggatgcacacctgttttgacgtgtatcgctgtggttttaacccaaagaataaaatcaaggtatacatctatgccttgaagaagtatgtggacgatttcggtgtctctgtgagcaataccatctcgagagaatacaatgaactcctgatggccatttcagacagcgactactacacagatgatataaaccgcgcatgcttgttcgtaccttctattgacgtgctcaaccaaaacaccttaaggataaaagagacggcacaagccatggctcagctaagccgttgggatcgcggcaccaaccatttgctctttaacatgctccccggcggaccaccggattacaataccgccttggatgtccctcgcgaccgggccctccttgctggggggggcttttctacatggacttataggcaggggtacgatgtttccatacccgtctattcacctctctctgccgaggtagacctgccagagaagggaccaggaccgcgtcagtatttcctgctgtccagtcaggttggtttgcacccagagtatcgcgaagatttggaagcactgcaagtaaaacacggcgagtccgttctcgtactggacaaatgcacaaatctcagcgaaggcgtgctgtcggtgaggaagcggtgtcataagcatcaggttttcgattatccccaggtactgcaggaggccaccttctgtgttgtgcttaggggggctagactaggccaggccgtacttagcgatgtgttgcaggccggatgcgtgcctgtggttattgctgactcctacatcctgccattttcggaagtgctggactggaaacgagcttccgtggtggtcccagaagaaaagatgtccgatgtttacagtattctccagtcgatcccccagcgtcagattgaggagatgcagagacaggcccgttggttctgggaggcttacttccaaagcataaaagcaatcgctctcgccaccctgcagataattaatgatcgcatctacccctacgctgctataagctacgaagagtggaacgacccccctgcggttaagtggggatcggtgtctaatccgttgttcctccctcttatccccccccagtcgcagggattcacggctattgttctcacgtatgatagagtggagagtctatttcgggtcatcacggaggtgtccaaagtcccgagtctgagcaaactgctcgtagtctggaacaaccagaacaaaaacccacccgaggacagcctctggccaaaaatcagagtacccttgaaggttgtgaggacagccgaaaacaagctcagtaaccgatttttcccgtatgacgagatcgagacagaagctgttcttgctattgacgacgacattattatgctgacctcagatgagctgcaatttggttatgaagtatggcgggagttccccgatcgccttgttgggtaccccggccgcctgcacctttgggatcacgaaatgaacaagtggaagtacgagtcagaatggacaaacgaagtgagcatggtgctgaccggagcagctttttatcacaaatacttcaattacctgtatacctataagatgccaggcgacatcaagaactgggtcgacgctcatatgaattgtgaggacattgccatgaacttcttggtggcgaacgtaaccggaaaggcagtgatcaaggtgactcctaggaaaaagtttaaatgccctgagtgcacagctattgatggactgtcactggaccagactcacatggtggagcgctcagagtgcattaacaagtttgcctcggttttcggcactatgcccctcaaggtagtggaacaccgggcagatccggtgctgtacaaggatgacttccccgagaaactcaagagttttccgaatatcgggtccctgtag

SEQ ID NO: 15138 - DNA, 339 bp, synthetic construct
  misc_feature 1..339: note = Description of Artificial Sequence: Synthetic coding sequence
  source 1..339: mol_type = other DNA
atgtgtgcttcagttaaatataatatccgaggaccggccttgatccctcggatgaaaaccaaacaccggatctactacataaccctcttctctattgtactccttggcctcatcgcaaccggcatgtttcagttctggccgcactctatcgaaagcagtaacgattggaatgtggaaaaaagaagcattagggacgtgcctgtcgtccggctgcctgccgactcccctatccccgagcggggagaccttagttgtcgtatgcacacttgtttcgacgtctatcgttgcgggtttaaccccaagaacaagatcaaggtctatatctacgccctgaaatag

SEQ ID NO: 15139 - DNA, 150 bp, synthetic construct
  misc_feature 1..150: note = Description of Artificial Sequence: Synthetic coding sequence
  source 1..150: mol_type = other DNA
atgtgtgccagcgtgaagtacaatatccgcggccctgcattgattccccgtatgaaaactaagcataggatctactacattacgctgtttagcatagttctcctgggcttgatagcaacagggatgtttcagttttggccccactcttag

SEQ ID NO: 15140 - DNA, 2157 bp, synthetic construct
  misc_feature 1..2157: note = Description of Artificial Sequence: Synthetic coding sequence
  source 1..2157: mol_type = other DNA
atgtgtgccagcgtcaaatacaacatccgagggccagcactcatccctcgtatgaagaccaagcataggatttactatatcacactcttctcaattgtgctgctgggtctgattgctacggggatgttccaattctggccccactctatcgagtcttctaacgattggaacgtcgagaaaagatccatcagggacgtgcccgtggtgcgcttgcccgcagatagccctatacccgagcggggtgatctgtcctgccggatgcacacatgcttcgacgtatatcggtgtgggtttaatccaaaaaacaagattaaggtgtacatctatgcacttaagaagtacgtcgacgattttggcgtgtctgtgagcaatacaatcagtcgagaatacaacgagctattgatggcaatttctgattcggactactatacagacgacatcaaccgggcttgcctgttcgtgccgagcatcgacgtgcttaaccaaaatacgctccgcatcaaagaaacggcacaggccatggctcagctgtcgcggtgggaccgcggaacaaatcatctgcttttcaatatgttacccgggggtccccccgattataacaccgccctcgacgtcccacgtgaccgagccctgctggcggggggcggcttctcaacctggacctaccgccagggctacgacgtgtctatccctgtgtattcaccactgagcgccgaggtggacctgcctgaaaaaggtccagggccacggcaatatttcttgctttcaagccaggtcggactgcatccggagtatcgcgaagatctcgaggccttacaagtgaaacatggagagagcgtgcttgtgctggacaagtgcaccaatctctctgagggggtgttaagtgtccgcaagagatgccacaagcatcaggtatttgactacccgcaggtactgcaggaggctacattttgtgtagtgctccgaggcgcccggttaggccaggccgtcctgagcgacgttcttcaggctggctgtgtgcctgtggtcattgctgattcttatatattgccattttccgaggtgctggattggaagcgcgcgtccgttgtcgtgccggaggaaaagatgtccgacgtgtacagcatacttcagtcaatcccccagcgccagatcgaagagatgcaacggcaggcacgctggttttgggaagcatacttccagtctatcaaagccattgctctggcgactttacagattataaatgatcggatctacccatacgccgcaattagttatgaagagtggaacgatccccctgcagtcaagtgggggagcgtgagtaacccgttgtttttacccttgatcccgcctcaaagtcagggatttactgcaatagttctgacatacgatagggtggaaagccttttccgggtgatcactgaggtctccaaagtgccctccctgtccaagctccttgtcgtttggaacaatcaaaacaagaatccccccgaagactctctgtggcccaagattagggtgcccctgaaagttgttcgaacagcggaaaataaactgagcaaccgattcttcccctacgatgaaatcgaaaccgaagcagttctggctatagatgatgatatcataatgctgacctctgatgagttacagtttggctatgaagtctggcgcgaatttcctgaccggttggtgggttatccgggccgcctgcacttgtgggaccatgagatgaacaaatggaaatacgagtcagagtggaccaacgaggttagtatggtcctgaccggggccgcattttaccataagtactttaactacctatacacctataaaatgcctggcgatataaaaaactgggtggatgcacacatgaactgcgaagacattgcaatgaacttcctcgtggcgaacgtaacaggaaaagccgtgatcaaggtgactccaagaaagaagttcaagtgccctgaatgtaccgcaatagatggcttgtccttggatcagacgcacatggtagagcggtctgagtgcataaataagttcgcatctgtgttcgggaccatgccactaaaggtggtagaacatcgagccgatccggttctgtacaaggatgatttcccagagaaactgaagagcttcccaaacattggctcactttag

SEQ ID NO: 15141 - DNA, 1761 bp, synthetic construct
  misc_feature 1..1761: note = Description of Artificial Sequence: Synthetic coding sequence
  source 1..1761: mol_type = other DNA
atgccgaaaccaattaacgtgagggtcactacaatggatgcagagctcgaatttgcgatccagcccaataccaccggaaagcagttgttcgatcaggtggtgaaaaccattggcttgcgggaggtttggtacttcggcctacactatgttgacaacaaaggctttccaacctggctcaagctcgacaagaaggtgagtgcccaagaagtacggaaagagaacccactccaatttaagtttcgagcaaaattttacccagaagatgtggcagaagagttgatccaagacatcacccagaagttattttttttgcaggtcaaagagggcatcctctccgacgagatctattgtccccctgagacggctgtgttgctggggagttatgccgtgcaggctaaatttggtgactataataaggaggtccacaagagcggctacttgagctccgagcggcttattccccagagagtgatggaccagcataagctgactagggaccagtgggaggacaggattcaggtgtggcatgccgaacatcgggggatgctgaaggacaacgctatgcttgagtaccttaagatcgctcaggacctagaaatgtatggcataaattacttcgagataaaaaacaaaaagggcacagacttgtggctgggtgtagatgccctggggctaaacatctacgaaaaggacgataagctgacccctaaaatcggattcccctggtcagaaatccggaatatttccttcaatgacaaaaagttcgtgattaaacccatcgataagaaggctcccgatttcgtgttttacgccccacgactgagaattaacaaacgtattttacagttatgtatggggaaccacgagctctacatgcgcaggcgcaaacccgataccatcgaggtccagcaaatgaaagcgcaagcacgggaagagaagcatcaaaaacagctggagagacagcagttagaaacagagaagaaaaggcgtgagactgtagagagagagaaagagcaaatgatgagggaaaaggaagagctgatgctgcgcctgcaagactacgaagagaagacaaagaaagcagagagggaattgtccgagcagatccaaagagctctgcagctggaagaggaaaggaagcgggctcaagaagaggccgaaagacttgaagccgatagaatggccgccctacgagccaaagaggaacttgagagacaggccgtcgaccagatcaagtcacaggaacagctggctgccgagctcgccgagtataccgctaaaatagccttactggaggaggctcggaggaggaaggaggatgaggttgaggagtggcagcatcgcgccaaggaagcccaagatgacttagttaagacaaaagaggagctccatcttgtgatgaccgcaccaccaccccccccacccccagtgtacgaaccagtcagttatcatgtccaggaatctctgcaggacgagggcgctgagcccactgggtacagcgcagaactatcaagtgagggtatccgtgacgatagaaatgaggagaagagaattacagaggccgaaaagaatgagcgcgttcagagacagctcctcactctgtcctccgaattgtctcaggcccgggatgagaacaagagaactcataatgatataatccacaatgagaacatgaggcaaggtagagataagtataagacccttagacagatccgacagggcaatacaaaacaacgcattgacgaatttgaggccttatag

SEQ ID NO: 15142 - DNA, 1761 bp, synthetic construct
  misc_feature 1..1761: note = Description of Artificial Sequence: Synthetic coding sequence
  source 1..1761: mol_type = other DNA
atgcccaaaccgatcaatgttcgagtgaccaccatggatgccgagctcgagtttgccatccagcctaataccacagggaagcagctcttcgaccaggttgttaagaccattggcctccgtgaggtgtggtacttcgggttgcattacgtggacaataaaggctttccaacttggttgaaactcgataagaaagtgtcggctcaggaggtacgaaaagaaaatcccctccaattcaaattccgggccaaattctatcccgaagacgttgctgaagagctcattcaggacataactcagaaattgttctttctgcaggtgaaagagggaatcctgtctgacgaaatatactgtccacctgaaacggctgtactgcttggatcatacgctgtacaggcaaagttcggagattacaacaaagaggttcacaaaagtgggtatctttcctcagaaaggctgatccctcagagggtcatggaccagcacaaactcacgagagatcagtgggaggatcgaattcaggtgtggcatgccgagcaccgcggaatgcttaaagacaacgcgatgctggaataccttaaaatcgcccaagatcttgaaatgtatggaattaattactttgagattaagaataaaaagggtacagacctctggctgggcgtggacgcgctgggtttaaacatctatgaaaaagatgacaaactcaccccgaagatcggttttccttggtccgagatccggaacatctccttcaacgacaagaagttcgttataaagcctattgacaagaaggccccagatttcgtgttctacgcaccgcgcttacgtattaataagaggatcctgcaactgtgcatgggcaaccacgaactgtacatgagaagacgaaaaccggacaccattgaagttcagcagatgaaagcacaggcccgggaggagaagcatcagaagcagctggaacgtcagcagcttgaaaccgaaaaaaagcgtcgggagacggtggaacgagagaaagaacagatgatgcgggagaaggaggaactgatgcttcggttacaggattatgaggaaaagacgaaaaaggcagaaagagagctgtccgagcagatccagcgggcattgcagctggaggaagaaaggaagagggctcaggaagaagcagagcgactggaagcagacagaatggcagcccttcgcgccaaagaggagctggagagacaggcagtggaccagataaaaagccaggagcagctggccgcggaacttgcagaatataccgccaagatcgctctgctggaggaggcacgcagaaggaaggaggatgaggtggaggagtggcagcaccgtgctaaagaagcacaagatgatttagtcaaaactaaagaagaattgcatctggtaatgacagcccctcccccgcctccaccccctgtgtacgagccagtcagctatcacgtccaagaatccctgcaagatgagggagctgaaccaactggttactccgcagaattatcatcggagggaatcagagatgacagaaacgaggagaaaagaattaccgaagccgaaaaaaacgagagagtccagcggcagcttctcaccctgagctctgagcttagtcaggctagagacgagaacaaaaggacccacaatgatatcatccataatgagaacatgcgccaaggccgcgataagtacaaaactttacgccagattcgacaggggaacacaaaacaaagaatcgacgaattcgaagcactgtag

SEQ ID NO: 15143 - DNA, 1665 bp, synthetic construct
  misc_feature 1..1665: note = Description of Artificial Sequence: Synthetic coding sequence
  source 1..1665: mol_type = other DNA
atgcccaagcctatcaatgtccgggtcacaaccatggatgccgaactggagttcgcaattcaacccaataccaccggaaaacagctctttgaccaggtcagtgctcaggaggtgagaaaagagaacccactccaattcaagttcagggccaaattctaccctgaggacgtcgccgaagagctcatccaggatatcacacagaaactcttttttttacaagtaaaggagggcatattatcagacgagatctattgccctcccgaaaccgctgtactgctcgggagttacgcggtgcaggccaaatttggagattacaacaaggaggtccacaaatcaggttacctatctagcgaacgcctgatcccgcagagagtgatggatcaacacaaactgacccgagaccagtgggaggatcgcatacaagtttggcacgcggagcacaggggaatgctgaaagataatgctatgctggagtatcttaagatcgcccaggatcttgagatgtatggcatcaattactttgagattaagaataaaaagggcactgatctgtggctcggcgtggacgctcttggccttaacatctacgaaaaagatgacaagctaacaccaaaaatcggatttccctggagcgagatccggaacatctcctttaacgacaaaaagttcgttattaagccaatcgacaagaaagctcctgacttcgtgttctatgcccctaggctgagaatcaacaagcgtatcttgcagttgtgcatgggaaatcatgagctttatatgaggcggaggaagcctgatacgatcgaagtccagcagatgaaggctcaagcccgggaggaaaagcaccagaaacagctcgagcgccagcagctggagacggagaaaaagagacgggagaccgtggaaagagaaaaagagcagatgatgcgggagaaagaggagctgatgctgaggcttcaggactatgaggaaaaaactaaaaaggcagaacgagagctgtccgagcagatccaaagagcccttcagctggaggaggaacgcaaacgggcgcaggaggaggctgaacgcttggaagccgataggatggccgctctgcgcgccaaagaggagctagaaaggcaggctgtggaccaaataaaaagtcaggaacagttggcggccgagctggccgaatatactgccaagattgcacttttggaggaggcaaggaggcgtaaagaagacgaggtggaggaatggcaacatcgcgccaaggaggcccaagacgacctcgttaagaccaaggaagagctgcacctcgtcatgacagccccccctccacctcctccccccgtttatgagccagtcagttaccatgttcaagaatcgctgcaagacgaaggagccgagcccactggatattcggccgaattgtcctctgaggggattcgggatgaccgcaacgaggagaagaggatcaccgaggctgagaaaaatgaacgcgtccagcgacaactactgacgctgtcctctgaattatcacaggctcgggatgaaaataagcggactcataacgatatcatacataacgagaacatgaggcaaggacgtgacaaatataagacactgcggcagatccgccaaggcaatacaaagcaaaggatcgacgagttcgaggccctgtag

SEQ ID NO: 15144 - DNA, 900 bp, synthetic construct
  misc_feature 1..900: note = Description of Artificial Sequence: Synthetic coding sequence
  source 1..900: mol_type = other DNA
atgggtacgaaagctcaggtggaacggaaactcctttgcctgtttatcctcgcgatcctgttgtgcagcctggcgctggggtctgttaccgtgcactcctccgagcccgaggtccgaattcccgaaaacaaccccgtgaaattgtcctgcgcttacagcggctttagctctcctagggtggaatggaagtttgaccagggggacactaccagactggtctgctacaataacaaaattaccgcttcctatgaggatcgggtgactttccttcctacagggattacattcaagtcggtgacacgggaagataccggcacttacacctgcatggtgagcgaagagggcggtaattcctatggcgaggtaaaggtgaaactgatcgttctggttcccccatccaagcccacagttaatattccttcatccgcaaccattggcaaccgtgctgtgttgacctgcagcgaacaggacggtagccctccgtccgaatatacctggtttaaagatggaattgtgatgcccaccaatcctaaatctacacgtgctttctccaatagcagctacgtgctgaacccaactaccggggagctggtattcgaccctttgagcgcttccgatacaggcgaatacagttgcgaggccaggaatggctacggtacacctatgacttccaacgctgtgagaatggaagccgtcgagaggaatgtaggcgtgatcgtcgcggctgtgctggtgactctcatactgcttggaattctggtcttcggcatctggttcgcctattctagaggccatttcgatcgcaccaaaaaaggcacgtccagcaagaaagtgatttactcacagccgtctgctagaagtgaaggagagtttaagcagactagctccttcctggtctag

SEQ ID NO: 15145 - DNA, 900 bp, synthetic construct
  misc_feature 1..900: note = Description of Artificial Sequence: Synthetic coding sequence
  source 1..900: mol_type = other DNA
atgggcaccaaagcacaggtggaaagaaaactactatgcctgtttatactggccatcctattgtgttctctggcattaggctcagtaacagttcacagcagcgaaccagaagtccggatccccgagaataatccggtgaaactgagttgcgcttacagtggcttttcgagcccacgagtggagtggaagtttgaccagggtgacactacaagactcgtgtgttataacaacaaaatcaccgcaagctacgaggacagagtgacattccttcccaccgggattacattcaagagtgtgacgagggaggacaccgggacttacacgtgcatggtgagtgaggaaggaggaaacagctacggggaggtgaaggtaaagttaattgtccttgttcctccttccaaacctacagtcaatattccgagctccgctacaattggaaatcgcgccgttcttacgtgttcagaacaggacggcagtccaccgagcgaatatacctggtttaaagacggcatcgtaatgccaactaatcccaagtcaactagggctttctccaattcttcttatgttctgaatcccacaaccggagagctggtgttcgaccctttgtctgcaagtgatacgggtgaatactcctgtgaagctcgcaatggctacgggacccccatgaccagcaatgccgttcggatggaggccgtggaaagaaatgtgggagtgatcgtggcggcagtactggtaactttgattttgctgggtatcctcgtgttcggaatctggttcgcttactcccggggtcattttgaccgcactaaaaaaggtacttcatccaagaaggtgatttactcccagccttcagcccgctctgagggggaattcaaacagacttctagtttcctggtgtag

SEQ ID NO: 15146 - DNA, 900 bp, synthetic construct
  misc_feature 1..900: note = Description of Artificial Sequence: Synthetic coding sequence
  source 1..900: mol_type = other DNA
atgggaaccaaggcccaagtagaacgaaaactcctgtgtctgttcatactggcaatcttactctgttctcttgctctgggatccgttactgttcatagttcggaacctgaagtccgcattcctgagaacaatcccgtgaaactgtcatgcgcttactccggattctcctctccgcgagtggaatggaagtttgatcagggcgacaccacccggctcgtgtgttataataataaaatcacagcctcttacgaggaccgagtgaccttcctgccgaccggcattaccttcaagagcgttactcgagaagatactgggacctacacgtgtatggtgagtgaggaaggcggcaattcgtacggtgaggtgaaagtgaagcttatagtgttagtaccaccaagcaaacctacagtcaatattcccagctctgccacaattggaaatagagccgtgcttacatgctcggagcaagacggatcacctccctctgaatacacctggtttaaagatggcatcgttatgcccacaaaccccaaatccacacgggctttttctaactccagctacgtgctgaaccccacaactggggagttggttttcgatcccttgtctgcctccgacacaggcgaatattcttgcgaggcacggaatggctacggcaccccaatgacctccaacgcggtgcggatggaggccgtcgaacgtaacgtgggggtcattgtggccgctgtcctagtgactctcatcctactcgggatcctggttttcggaatttggtttgcctactccaggggtcatttcgacaggaccaagaagggtacttcctctaaaaaggtcatttacagccaacctagtgctagatccgagggggaattcaagcagacatcgtcttttctcgtctag

SEQ ID NO: 15147 - DNA, 912 bp, synthetic construct
  misc_feature 1..912: note = Description of Artificial Sequence: Synthetic coding sequence
  source 1..912: mol_type = other DNA
atgctgcaagcacctagagggagagctagagccgcgcttaggagactggctgtcgctactcggaccatggctggaggctcactcgcactcggaagcgtgaccgtccattcctcagaaccagaagtcaggattccagagaataatccagtgaaactgtcttgcgcgtactccgggttctcctctccacgcgttgaatggaagttcgatcagggcgatacaactagattggtttgctacaacaacaagataacagccagctacgaggaccgggtaaccttcctgcctacaggaatcaccttcaagtccgtgactagggaagatacgggaacctacacctgcatggtctccgaagaggggggtaacagttacggcgaggtgaaggtgaaattaattgtccttgtgccgccctcgaaaccaacagtaaacattccctcatccgccactattggtaaccgcgcggtcctgacctgcagcgagcaggatggctccccaccaagtgagtacacatggtttaaggacggcatcgttatgccaacaaatccaaagtcaacgcgtgcctttagcaacagctcttacgtcctgaaccccactacgggcgagctggtgttcgacccactgagtgcctccgacactggggaatattcttgtgaagctcgaaacggatatggtacaccgatgacatctaatgcggtgcgcatggaagccgtggaacggaatgtgggagtcatcgtggctgctgtactcgtgacattaatcctcctgggcattcttgtttttggcatctggtttgcatacagcagagggcactttgatcggaccaagaaaggaacatcaagcaagaaggtgatttacagtcaaccctccgcgagaagcgaaggcgagttcaagcaaacctcctcattcctggtgtag

SEQ ID NO: 15148 - DNA, 753 bp, synthetic construct
  misc_feature 1..753: note = Description of Artificial Sequence: Synthetic coding sequence
  source 1..753: mol_type = other DNA
atgggaacgaaagctcaggttgaacgaaagctgctctgtttgttcattctcgcaattctgctttgttctcttgctctggggtccgtgactgtacattccagtgaacctgaagtgagaatccccgaaaataatcccgtcaaactaagctgcgcctattctggattctcctcgcctagggttgagtggaaatttgatcagggtgataccacacgcctggtttgttataataacaagataaccgtccctccaagtaaaccaacagtgaacattcctagtagcgctacaatcggaaacagagccgtcttgacatgtagcgagcaagacggaagcccccctagcgaatacacctggtttaaggacggaatagtcatgcccacaaaccccaagagcacaagggcattctctaatagtagttacgttctgaacccgacaaccggcgagcttgtgttcgatcccctatccgcctctgataccggtgaatattcttgtgaagcacgcaacggatacggtacgcctatgacttccaacgctgtcagaatggaagcagtggagcggaacgtcggagtgatagtcgccgccgtcctcgtaaccctgatcctgctcggcatcctggtctttggcatatggtttgcttatagcagagggcacttcgacagaacaaaaaaaggcacctcctccaaaaaggtcatctacagtcagcctagtgctaggtctgaaggcgagtttaagcagacttcttcatttctggtctag

SEQ ID NO: 15149 - DNA, 3357 bp, synthetic construct
  misc_feature 1..3357: note = Description of Artificial Sequence: Synthetic coding sequence
  source 1..3357: mol_type = other DNA
atgggagttcaaggatttcaagattatattgagaaacactgcccatcggccgtagtgcccgttgagttacagaagctggcccgcggctccctcgtcggcggcgggcgccagcgtcctccccaaacgccactgcgacttttagtcgatgctgacaactgccttcatcgcctctatgggggtttctacacagactgggtctctggaggtcagtggaatcatatgctggggtatcttgcggctctagccaaggcatgcttcgggggcaatatcgaactgttcgttttttttaatggagccctcgaaaaggcacggctgcacgagtgggtgaaaagacagggcaacgagaggcagaccgcccagcagatcgtatcccacgttcagaataagggaacaccacctcctaaggtgtggtttttgcccccggtgtgcatggctcactgcatacgcctggcattaatacgctttcacgttaaagttgctcagtctatagaggatcaccaccaggaggtgataggcttttgtcgcgagaatgggttccatggtctcgttgcctacgattccgactatgccctctgcaatattccatactacttctccgcccacgctctgaagttgtcccggaacggcaagagtcttacaaccagccaatatctcatgcatgaggtggctaagcagctggacctgaatcctaacaggttcccaatctttgctgcgctgctgggcaatcacattctgcccgatgaagatctcgcctctttccattggagtctgcttggaccggaacatcctttggccagcctcaaagtccgtgcacatcagctcgttttacctccctgtgatgtggtgattaaggccgtagctgattatgttcgaaacattcaggatactagcgacctcgacgcgatcgccaaagacgtttttcaacatagtcagtcgagaaccgacgacaaagtaatccgctttaagagggcgattggctactattcagccacctccaagcctatgtcatttcaccccccgcactaccttgctgctaggcccggccccttcggcatgcccgggatggtccctccgcacgtgccccctcagatgctcaacatcccacagacaagcctacaagcaaaaccagtggccccacaagtcccatcccctgggggagcccctgggcagggaccctacccctattctctgagcgagcccgcccccctcactctcgatacctccggcaagaacctgactgaacagaattcttatagtaacatcccccacgagggaaaacatacgccgttatacgaaaggtcaagccctatcaacccagcccagtccggtagcccaaaccatgtcgattccgcgtactttccgggcagttctacgagttcctctagcgataatgacgagggatccgggggggccaccaaccatattagcgggaacaagattgggtgggaaaagactggatctcattctgagcctcaggctaggggcgacccaggcgaccagaccaaagcggagggatctagcaccgcctcctccgggagccaacttgcagagggaaaaggaagccagatgggaacagtgcaacctatcccttgtctccttagtatgccaactcgtaatcatatggacatcaccacccccccccttccacctgtcgcccctgaggtcctgcgagtggctgagcaccgtcataaaaaggggcttatgtacccatacattttccacgtcctcaccaaaggggaaattaagatagccgtatcgatagaggatgaagcaaataaggacctccctccggccgccttgttgtaccgaccagttcgccagtacgtgtacggagtgttgttctccctagcagagagtaggaagaaaacagagaggctagcgttccgtaagaacagactgccccctgaattttcccccgtaatcatcaaggagtgggcagcttataaaggaaagtctcctcaaacaccagaactggtggaagccctggcattcagagaatggacttgtccaaacctgaagcgattatggctgggcaaggcagtcgaggacaagaataggaggatgagagcatttttggcatgtatgcgctcagacacccccgccatgctgaaccccgcaaacgttccgacacacctgatggtgctctgttgcgtgctgcgctacatggttcagtggcccggagcccggatcctgcggcggcaagagctggacgccttcttggctcaagcgctcagtcccaaactgtacgaacccgatcagctgcaggaactgaagatcgagaatctggacccacgtggcattcagctcagcgcactttttatgtccggcgttgatatggccctgttcgcgaatgacgcttgcggtcaaccgattccttgggagcactgctgtccctggatgtacttcgatgggaaactgttccagtccaaattgctcaaggccagtagggagaagactcccctcattgacctttgcgacggtcaggctgatcaggccgccaaggttgaaaagatgcgacaatccgtactggaaggcttatccttttcgcggcaaagtcacactctgcctttccccccacccccagcgttacctttttacccagcttctgcttacccacgccattttggacctgtgccgcccagtcagggacgtggtaggggctttgccggggtgtgtgggtttggcggaccatatggtgaaacggtggccactgggccttatcgggcttttcgtgtcgctgctgcttccggacactgcggagctttcagtgggagcgattcttcaagaaccagtaaatcccaggggggcgtgcagccgatcccctcacagggtggtaaactagaaatcgctggcaccgtagtgggccattgggcggggtctcggcgagggcggggaggacgtggcccgttccccttacaggtagtgagcgtgggagggcctgctcgcggtcgtccaagaggggtgatcagtactccagtgatcaggaccttcggcaggggcggcagatactacggccgcggatataaaaaccaggctgctatacaggggcgcccaccttacgcagcaagtgcggaagaagtggcgaaggaactgaaatccaagtcgggagagagcaagagctctgctatgtccagcgacggatccctcgctgaaaacggggtgatggctgaggaaaagcccgccccacagatgaacggcagcaccggggacgctagggccccctctcacagcgaaagtgcactgaataatgactcgaagacctgcaacacgaatccccatctgaacgccctgagcactgactctgcctgtagaagggaggccgccctggaggctgccgtgttaaataaggaagaatag

SEQ ID NO: 15150 - DNA, 3441 bp, synthetic construct
  misc_feature 1..3441: note = Description of Artificial Sequence: Synthetic coding sequence
  source 1..3441: mol_type = other DNA
atgggcgtgcaaggattccaggattatatagagaagcattgtccctcagccgtcgtgccagtggagctccaaaagctggcccgtgggagcctggtgggtgggggccgacagcgtcccccccagacccctctccgcctgctcgtggatgccgataactgtctgcacagactctacgggggcttctacacagactgggtgagtggcggacagtggaatcacatgcttggatacctagctgctctggcaaaggcttgctttggggggaacatcgagctttttgtatttttcaacggagccctcgagaaagctcgtctgcacgagtgggtgaagcgccaggggaacgagcggcagaccgcacagcagatagtctcgcatgttcaaaacaagggcactccgccacctaaggtctggttcctgccacctgtctgcatggcacactgtattaggcttgcgctgattcgcttccatgtcaaggtcgcccagtcaattgaggaccaccaccaggaggtcataggcttctgcagagaaaatggattccatgggctggtcgcttacgacagcgactatgccctgtgcaatattccctactacttctccgcgcatgcactgaagcttagcagaaacgggaagtctctcacaacttcccagtatcttatgcacgaagtggcaaaacagttggatctgaacccaaatcgttttcccatcttcgccgctctgttgggcaaccacatattgcctgacgaggatctagcttctttccattggtccttgctggggccagagcacccactggccagcctgaaggttagggcacaccagcttgtcctgcccccctgcgacgtggtgattaaagcagtagccgattatgtgaggaacatccaggacacttcagatttggatgccatagctaaagatgtgttccagcatagccagtccagaacagacgataaggtcattagattcaagcgagccatcggctactactcagcgacttcaaagcctatgagctttcatcctcctcactaccttgctgccagaccaggcccttttgggatgcctggcatggtccctccccatgtcccaccccagatgctcaatatcccacagacgagtctgcaggccaagccggtggcaccccaggtgccttcacctgggggcgctccaggtcagggtccctacccatacagcttgagtgaaccagccccccttaccctggacacgtcaggtaaaaatctaacggagcaaaactcctactccaatatccctcacgagggaaagcatacacccctctatgaacgctcctcgcctattaaccctgctcagtcgggctcccccaatcacgtggacagtgcatatttccccggtagtagtactagctcttcctcagacaatgatgagggcagtggcggggccactaaacctttccagctgtatttgcagaagaacttcgtgttccataaagaaaatagtatcgtgctgtgcagcaggatcctcaggcacggacacatatcaggaaacaagatcgggtgggaaaagacaggctctcatagtgagccgcaggcccgaggagatcctggggaccaaactaaagctgagggttcctctaccgcctcctctggaagtcagctggcggaaggcaagggttctcagatggggactgtccagcccatcccatgcctgttgtctatgccaactcgtaaccatatggacattactaccccaccactaccgcctgttgcaccggaagtcttgagagttgctgagcaccggcacaagaaagggctgatgtatccctatatctttcatgtccttaccaagggggagattaagatcgcagtctcaatcgaggacgaggccaacaaggacctgcccccagccgcactcctgtacagacccgttcgacagtatgtgtatggtgtgttgttcagccttgctgagtctagaaagaaaacagagcggctggccttcaggaagaaccgtctccctcccgaattctctcctgtgatcattaaagaatgggccgcatacaaaggaaagtcaccgcagacacccgagctcgtggaggccctggcatttagggagtggacttgtccaaatttgaaacggttatggctgggcaaggcagttgaagacaaaaataggaggatgagggcctttctggcttgtatgcggtccgatacccccgccatgctcaacccggctaacgtccctacacatctcatggtcctctgctgtgttctgaggtatatggtacagtggcctggggcccggatcctccgcaggcaagagcttgacgcatttctcgcccaggcgttatctcccaagctgtatgaacccgaccagctacaggagttaaaaatagaaaatcttgatccacgagggatacaactgtctgccttgtttatgagtggggtggacatggcgctgttcgctaatgatgcatgtggccaaccaatcccttgggagcattgctgtccttggatgtacttcgacggcaaactattccagagcaaacttctgaaagcaagtagggaaaagacaccgcttatcgacctgtgcgatggtcaggcagatcaggcagcaaaggttgagaaaatgcggcagagcgtgctggaaggactgagtttttcgaggcagtctcacacactgccctttcctcctcctccagccctgccgttctatccggcaagcgcctacccaagacactttggtcctgttccaccgtcccaggggcgcggcagaggctttgccggggtctgtgggtttgggggcccgtacggcgagaccgtcgctaccggtccatatcgcgcattcagggtggccgcggcttcaggccactgcggggcgttcagcggtagcgactcatcgcggacttctaagagtcaagggggcgtacagccgatacccagccagggcggtaaacttgaaattgccggcactgttgtagggcattgggcagggtcacgacgaggcagaggcggaagaggaccttttcccctgcaggtcgtgtcagtcggtggcccggctcgcgggcggccgagaggggtgatcagtacccccgtgattaggacgttcggtagaggcgggaggtattatggacggggatacaagaaccaggccgctatccaaggcaggcctccctatgcggcctccgcggaagaagtagccaaggagctgaaaagtaagagcggcgagagcaaatcgagcgctatgagttctgatgggtcactggccgagaacggagtcatggcggaagaaaagcccgccccccagatgaatggaagcacgggggacgcacgtgcaccaagtcacagtgagtccgccctgaacaacgattcaaagacttgcaacaccaaccctcacctcaatgcccttagtacagattctgcatgcaggcgagaagctgcactggaggctgccgtgctgaacaaagaagaatag

SEQ ID NO: 15151 - DNA, 3219 bp, synthetic construct
  misc_feature 1..3219: note = Description of Artificial Sequence: Synthetic coding sequence
  source 1..3219: mol_type = other DNA
atgggtgtgcaggggttccaagattatatcgagaaacactgcccctctgccgtggtgcctgtcgagttgcagaaactggcaagaggaagcctggtaggaggaggcagacagaggccccctcagacacccctgcgcctgctcgtcgacgcggataattgcctgcaccgattgtacggaggtttttacacagattgggtaagcggaggacagtggaatcatatgttgggctacctcgccgccctcgccaaggcttgctttggggggaatatcgaactgttcgtgtttttcaacggagctctggagaaagcccgcctccatgagtgggtgaagcgccagggaaatgagaggcaaaccgcacagcagatcgtcagccatgtccagaataaaggcacacctcccccaaaagtgtggttcctgccccccgtgtgcatggcccactgtatacggctagcactgatacgctttcacgttaaagtggcccagagcattgaggaccatcatcaggaagttattggcttctgccgggagaatggcttccacggcttggtggcttacgattctgactatgcactctgtaatattccttattacttcagtgcccacgctttgaagttgtctaggaacggcaagagcctgaccacgagccagtacctgatgcacgaggtggctaagcagttagaccttaatcccaataggtttcctatttttgccgcacttctagggaatcatatcctgccagatgaagatttggctagtttccattggagtctgctcgggcctgaacacccacttgcatcccttaaggtgagggcacaccagttagtcttgcctccatgcgatgtcgtaatcaaagcagttgcggattatgtgcggaatattcaggacacttctgacctagacgctatagcgaaggacgtctttcagcatagccagagccgaaccgatgataaagttatccgatttaagcgggctatcgggtattacagcgcaacctccaaacccatgtcattccaccctccgcattatctcgccgctagaccaggtccctttggaatgcccggtatggtgccacctcatgtgcctcctcaaatgctcaacataccacagaccagcctgcaggcgaaaccagttgccccccaggttccgagtcctggaggagccccgggccagggtccgtacccgtacagcctgagcgagcctgctcctttgaccctggacacatccggaaaaaacctaaccgagcagaattcctactccaacattccccacgaaggtaagcacactcccctctatgaaagatcaagtccaatcaacccagcacagtctggctcaccgaatcatgtggactccgcatacttccccggatccagcacatcgagtagttcagataacgatgaaggatcagggggagccactaaccacatctccggtaacaagatcggctgggagaagaccggatcacactctgagccacaggcgcgcggcgaccctggcgaccagaccaaggcggagggaagcagcacggcgagctccggctcacagctcgcagagggtaagggttcccagatgggcactgtccagcccattccatgtctgctgagcatgccgactagaaatcacatggatataacaacgccacctcttccaccagtggccccggaggtgctgcgggtcgccgagcataggcataagaagggcctgatgtacccctatatcttccacgttctgaccaagggggagattaagattgccgtctccatagaagatgaggcgaataaggacttgccacctgccgccctgctctataggccggtcagacagtacgtgtatggagtgttgttttctctcgccgaatcccggaagaaaacagaacgcctggcatttaggaaaaaccggttaccaccagaattttcacctgtaattattaaggagtgggccgcgtacaaggggaaatcccctcagacacctgagttagtagaggccttagctttccgagaatggacttgtccaaatcttaaacgcctgtggctcgggaaggctgtcgaggacaagaataggcgtatgcgggcttttctggcgtgtatgagatctgatacccccgcaatgcttaaccctgctaacgtgcctacccacctaatggtgttatgctgtgtgctcagatacatggtccagtggcccggtgctaggatacttcgacgacaggagctggatgcctttttagctcaggcactctcacccaaactgtacgagccagatcagctacaggaacttaaaatcgagaacctcgatcctcggggaattcagctctccgcattgttcatgagtggcgtcgacatggcactgtttgcaaacgatgcatgtggacagcctatcccatgggaacattgttgcccctggatgtacttcgacggcaaactcttccaatccaagctactgaaagcatcaagagaaaagactcctcttatcgacctttgcgacgggcaagccgaccaggccgccaaggtagaaaagatgcgccagagtgtcctggaggggctgtcctttagcagacagagccacacactcccattccctcccccacccgcgctacccttttatccagcttcagcgtatccccgccattttggacctgtcccacctagccagggccggggaaggggcttcgcgggcgtacagcctattccctcgcaaggcggcaagctcgaaattgccggcactgtggtgggccattgggctggatcccggagggggagaggcggacgcggccccttccctctgcaagtggtgtcagttgggggcccagcacggggacggccacgaggagtgatctcaacccccgtgatccggacattcggaagaggcggccgctactacggaagaggctacaagaatcaagccgccattcagggacggccaccctacgccgcatccgccgaggaagtggccaaggagttgaaatctaaaagcggggagtcaaagagctccgccatgtctagcgatggtagtcttgctgagaacggagtgatggccgaggagaaacccgcaccccaaatgaatggttccactggggacgccagggcacctagccatagcgagagcgctcttaacaacgacagtaagacttgcaatactaaccctcacttgaatgccctgtccacagactctgcatgtcggagagaggccgctctagaggccgcggtgcttaacaaggaggagtag

SEQ ID NO: 15152 - DNA, 1887 bp, synthetic construct
  misc_feature 1..1887: note = Description of Artificial Sequence: Synthetic coding sequence
  source 1..1887: mol_type = other DNA
atgggtgtgcagggattccaggattacattgagaagcactgcccatctgcagtggtgccagtcgaacttcagaaattggcaaggggatcactggttggagggggccgtcagagacccccgcagacaccactgcgccttttggtagatgcagacaactgccttcaccgcttatatgggggattttacaccgattgggtctccggcgggcagtggaaccacatgctggggtaccttgccgctctggcgaaggcctgctttgggggtaacatcgagctgtttgtgttctttaacggagctctcgagaaagccaggcttcacgaatgggtgaagcgccagggcaacgagcggcagactgctcaacagattgtttcccatgtacaaaacaagggtactccaccccccaaggtctggttcctgcccccagtctgtatggcccattgtatccggctcgccttgatccgctttcacgtgaaagtggcacagtccatcgaggaccaccaccaggaagtcatcggattttgtcgggagaatggattccacggtctggtggcgtatgactctgactatgcgctttgtaatattccatactacttctccgcccacgccctgaagctgtctcgtaacggaaaatctctaaccacttctcaatacctgatgcacgaggtggctaaacaactggatctgaaccccaaccggttccccatatttgcagcactgctggggaatcacattctgcctgacgaagatttagcttcctttcattggtcactgttgggtcctgagcatcccctcgcctcactgaaagtgcgagctcatcagctggtcctgcccccctgtgacgtggttattaaggccgtggctgactacgtgcggaatatccaagataccagcgatctggacgctattgccaaggatgtttttcagcactcccagtctcgaacggacgataaggtaatccggttcaaacgggctatcggctattatagtgccaccagtaaacccatgagtttccacccacctcattatctggccgcgagacccggaccttttggaatgcctggaatggtgcccccccatgttccccctcaaatgctcaacatccctcaaacgtctctccaggcaaagcctgtggccccacaggtgccatccccaggaggcgctccgggccagggaccatacccctatagcctctccgaaccagctcctcttaccctagacacctcgggcaagaaccttaccgagcagaactcctattccaatatcccccacgaggggaagcatacaccactttacgaacgctctagtccaatcaaccctgctcagtcaggatcaccaaatcacgtcgactctgcatacttccctggctcatccacctcctcatcttccgataatgacgagggatccggtggagccacgaaccatatcagcggcaacaagataggatgggagaagacgggatcccatagcgaaccccaggcccgcggcgaccctggtgaccaaacaaaggcggaggggagctcaactgccagctccggaagccagctggccgaagggaaggggagtcagatggggacagtgcaaccaatcccctgcctgctttctatgcctacacggaaccacatggatatcacaaccccgcccttgcctccagtggcccccgaggtgctacgcgtggctgagcaccggcataagaaggggcttatgtatccctacattttccatgtgttgaccaaggtgttatcgaagggcccatggagcggtttctgttacctgatgtccggccattcctacggctgctttgtacttctcagctttttcgagcccttcttctgtctcactaacctgcttgaaactaagtttacattcccattcctcaatattgaatag

SEQ ID NO: 15153 - DNA, 1485 bp, synthetic construct
  misc_feature 1..1485: note = Description of Artificial Sequence: Synthetic coding sequence
  source 1..1485: mol_type = other DNA
ggggagataaaaattgctgtgagcattgaagatgaggcaaacaaggatctgcccccagccgcactactgtacagacctgttcgccagtacgtctacggggtgctgtttagcctggccgaaagccggaaaaagacggagcgcctggcatttcgcaagaaccgtttacctcccgagttctcgccggtcataattaaggaatgggctgcctacaaagggaagagtccgcagactcctgaattagtcgaggcccttgctttcagggagtggacctgcccaaatctcaaaaggctctggctcggaaaggccgtcgaagataaaaacagacggatgcgagccttcctggcttgtatgagaagcgatactcccgccatgcttaaccccgcaaatgtgcctacacatctgatggtcctttgttgtgtgctgagatacatggtccagtggcctggagcccgaatcctccggaggcaggagcttgacgcttttctggcccaggctttaagtccgaagctgtacgaaccggaccaattacaagaacttaaaattgaaaacctggatccacgcggcatacaactcagcgccctgttcatgagcggggtggacatggcactctttgccaatgacgcatgtggacagcccatcccttgggagcattgctgtccgtggatgtactttgacggtaaattgttccagtccaaactcctcaaggcttcacgagaaaagacaccgctgatagatctttgcgatgggcaagccgatcaggccgctaaagtcgagaagatgcgacagtccgtgctcgagggactgtcattctcacggcagtcgcatactctgccctttccacccccgcctgcactcccattttatccagctagcgcttacccccgccacttcgggccagtgccaccctcccaggggcggggcagaggcttcgctggcgtccaaccaatcccctctcaaggtgggaaactggagatcgccgggactgtggtcggacactgggcaggatcccgacgaggccgaggtggcaggggacccttccccctccaggttgtgtccgtgggaggtcctgcccggggtagacctcggggggttatcagtaccccggttattagaacgttcggacgagggggcaggtactacggacggggctacaaaaaccaggctgctatccagggccgacctccctatgcagcctctgccgaggaggtagctaaggaactgaaaagcaagagcggggagtctaaatcaagcgcaatgtcatcagatggcagtttagcagagaacggcgtgatggctgaggagaaacccgccccccaaatgaacggctccacgggtgacgcacgcgcaccatctcatagcgagtccgcccttaataacgattctaaaacttgcaacactaatccgcatctcaatgctctcagcaccgacagcgcgtgccgcagggaagctgcactcgaggccgctgtactgaacaaggaggagtag

SEQ ID NO: 15154 - DNA, 1485 bp, synthetic construct
  misc_feature 1..1485: note = Description of Artificial Sequence: Synthetic coding sequence
  source 1..1485: mol_type = other DNA
tgagtcgcccagtctatagaggaccaccatcaagaggttataggattttgcagggaaaatggtttccatggcctcgtggcctacgattctgactacgcattgtgcaacattccctattatttcagtgcccatgccctaaagctatcaagaaatggcaagtcattgaccacctcccagtacctcatgcacgaagtagcaaaacagctcgatctcaacccaaaccggttccctatctttgccgctctactgggaaaccatatcttgcccgatgaagacctggctagtttccattggtcacttcttggtccggagcacccactcgcttcactgaaggtccgcgcccaccagctagtgctgccaccctgcgatgtagtgatcaaagcggtggctgattacgtaaggaacatacaggatacttccgatttggatgctattgccaaggatgtgttccagcacagccagtcacgcacggacgataaagtgatccgctttaaaagggccatcggctactattccgccacatcaaagccaatgtcttttcatcccccccattacctcgcggctcgcccgggtccttttggcatgcccgggatggtgccgccccacgtccccccacagatgttaaatattcctcagaccagtctgcaggcaaagcctgtggccccccaagtgccatctcccggcggggctcctggccagggcccatatccgtatagtctgtctgagcctgcccccttgaccctggacacttccgggaagaacctcaccgaacagaactcatattcgaatattccacatgaaggaaagcatacccctttgtacgaacggtccagccctattaaccctgcgcaatcgggttctccaaatcatgtggactcagcttatttcccagggagcagcacctcgtctagtagtgacaacgacgaaggtagtggcggagccacaaatcacattagtggtaataaaatcggctgggagaagaccgggtcacatagcgagcctcaggcccggggcgaccctggcgatcagacaaaggccgaaggctcgagtaccgcttcttccggctcgcagctggcagaagggaagggatcacaaatgggaactgtccagccaatcccttgcctgctgagcatgcccactaggaatcatatggacatcacaacaccacctctgccccccgtggccccagaggttctgcgcgttgcggagcacaggcataagaaaggactgatgtatccttacattttccacgtccttaccaaaggcgagatcaagattgcagtgtcgatagaagatgaagccaataaggatttacctcctgccgccctcctgtatcggcccgtccgtcagtacgtgtacggagtactttttagcttggctgaatctagaaagaagacggagcggctcgcattcaggaagaaccgtctcccacctgaatgcatgtactgtaacaacccattatttgtttttctgggcacgtcctag

SEQ ID NO: 15155 - DNA, 969 bp, synthetic construct
  misc_feature 1..969: note = Description of Artificial Sequence: Synthetic coding sequence
  source 1..969: mol_type = other DNA
atggtagcagatctcgaactgcaacaggatctcatagtgcctttggggcatactcccagccaggagcactttctgttcgagattttcagaaggagactgcaggcgctgacgtccggctggtctgtggctgcaagtttgcagagacaaagggagttactgatgtataaacgaatccttctcagactgccctccagcgttctctgcggcagttcttttcaggctgaacagcccatcacggcacgctgtgaacagtttttccaccttgtgaattctgagatgcggaatttttgtagccacggaggcgctctgacgcaggatattaccgcgcacttctttcgtggtctcctgaacgcgtgcctgcggtcacgagatccttctctgatggtggacttcatacttgcgaagtgtcagaccaaatgtcctttaatcctcacttcggcacttgtttggtggccatctttggagccagtgctcttatgccgctggaggcgccactgccagagcccactgccacgggaattacaaaagctgcaggaaggaagacagtttgcatccgacttcctcagtcctgaagccgccagtcctgcccccaaccctgactggctctccgctgctgctctgcattttgccattcagcaagttagagaagagaacattaggaaacagctgaaaaagttagactgcgagagagaggaactccttgtgtttctgtttttctttagcctcatgggactcttatcctcccacttgacctccaactccaccaccgacctgcctaaagccttccacgtgtgcgccgcaatactggaatgtctggagaaaaggaagataagttggctcgccctcttccagctcacagagtccggaaagaaacacgcagccgaagcacagatgagacgggccgcattgtttaggggcattctgcagatggtcaagaacgaaccttcccttcgcttcctcgcaaaatag

SEQ ID NO: 15156 - DNA, 4368 bp, synthetic construct
  misc_feature 1..4368: note = Description of Artificial Sequence: Synthetic coding sequence
  source 1..4368: mol_type = other DNA
atgtccgactcctgggtgccaaacagcgcaagcggtcaggatcccggtggtcgccggcgtgcctgggccgaactgttggctgggagggttaaaagggaaaagtacaacccagagagagcccagaagctgaaagagtccgccgtgagactgctacgtagtcatcaggatttaaacgccttgcttctcgaagtcgaaggaccactctgtaaaaagcttagcctgtctaaggtgatcgactgtgacagctctgaggcttacgctaatcacagctccagtttcatcggaagcgcgctgcaggaccaggcttccaggttgggcgtacccgtgggcatcctgagtgccgggatggtggcctcctccgtggggcagatttgcacggctcccgccgaaacaagccatcctgtactgctgacagtggaacagcggaaaaaactctcctccctgctggaattcgcacaatatttgctcgcccattccatgttcagtcgcctcagtttttgtcaggagctgtggaagatccagagctctctcctgctggaggctgtgtggcacctgcatgtgcaagggattgtcagcctccaggaattactcgagtcacaccctgacatgcatgcagtcggctcttggcttttccgtaacctctgctgtctgtgcgagcagatggaagcctcctgtcaacatgcagatgttgccagagcaatgctcagtgatttcgtccaaatgtttgttctgcgaggttttcagaagaatagcgacctcagaaggaccgtggaaccggaaaagatgcctcaggtaacagttgacgttttacaaagaatgttgatatttgccctcgatgcactcgccgccggagtgcaagaggaatcctccacccataaaatagtgcgatgttggttcggcgtcttttccggtcacactctcggctcggtaatttccacagaccccctgaagcgattcttttctcacacactgacccagatccttacccactcccccgtgctgaaagcctcggacgctgtccagatgcagagggaatggtctttcgcaaggacgcatcctttacttacaagtttgtacagacgcttatttgtgatgctcagtgcggaagagctggtcggacatctgcaagaagtcctcgagacgcaagaagtgcactggcagcgggtgctaagtttcgtgagtgctctagtggtgtgcttccctgaggcccaacaactgctggaggactgggttgctcgcctgatggcgcaagccttcgaatcctgccagctcgactccatggttacggccttcttagtggtgaggcaagccgcgctcgagggcccttccgccttcctgtcgtatgccgattggttcaaggccagttttggatcaaccaggggctatcacggttgttccaaaaaagccctggtttttctgttcacctttctgtcagaactcgtgccattcgaatctccaaggtacctgcaagtgcacatcctgcatcccccacttgtgccaggaaaataccggagccttttaaccgactacatatctctagcgaagacgcgtctggccgatctgaaggtttccattgaaaacatgggcctgtacgaggatttgtcctctgctggagacatcaccgaaccccacagtcaggccctccaagatgtcgaaaaagcgatcatggtgttcgagcataccggaaacattcccgtgacagtcatggaggcgtctatctttaggcgcccttactacgtgagccacttcctgccagccctcctgacgccccgagtgctgcccaaagtgcccgactcccgcgtcgccttcatcgagagcctgaagcgcgccgataaaattcccccttctttgtattctacatactgtcaggcttgtagcgctgctgaggagaagcctgaagacgccgcactgggggttagagctgagcctaactccgcagaggagcctttgggccagctgacggctgctttaggggagctaagggcaagcatgactgacccatcccagcgggacgtcatttcggcacaggtggcagtgatttcagagaggctcagagccgtcctgggccataatgaggacgactctagcgtggagatctcaaaaatacagctctctatcaatacgcctaggcttgagccacgagagcatatggcagtagatctactgttaacatctttttgccaaaatttgatggcagcctcgtcagttgcgccgcccgagagacagggtccatgggccgcactgtttgtccggaccatgtgcggccgcgtgcttcccgcagtacttacacgcctgtgtcagcttttacgccaccagggccctagtctgtccgctccccacgtcctggggctcgcggctctggccgttcacctaggtgaaagccggtccgctctccccgaagttgatgttgggccacccgcccctggcgccggactgccagtccccgcactcttcgacagtcttctgacctgtagaaccagggattctcttttcttttgccttaagttttgtactgccgccatctcatacagcttgtgcaaattctcgagtcaaagtcgcgatactttgtgttcttgcctttcaccaggcttaataaagaaattccagttcctaatgttccggctcttttcggaagcccgccaaccgctgagcgaagaagacgtggccagcctttcttggaggccactgcatctgccctctgctgattggcaacgggctgcattgtctctgtggacacaccgaaccttcagggaggttctgaaggaagaggatgtgcaccttacttatcaggattggctccatctggaattggagattcagccagaagcagatgctctcagcgatacggagcggcaggacttccatcagtgggctattcatgaacacttcctgccagagtcctccgccagtggaggatgtgatggagatctccaggctgcttgcaccatactagtcaatgcgttgatggatttccatcagagcagccgaagttacgatcattcagagaactcagacctggtttttggtggaaggacaggaaatgaggatattatatctagactccaggagatggtggcggaccttgagctgcagcaagatcttatcgtgcccctgggccacacacctagtcaggagcacttcttgttcgagatttttagacggagactccaggctctgacctcaggctggagcgtcgcagctagtttgcagcgacaacgcgaactactgatgtacaaacggatattgctgcgcctgcctagcagtgttctctgcggctccagcttccaggctgagcaacccatcactgcacgctgtgagcaattctttcatctggtgaactctgaaatgagaaacttctgctcccatggcggggctctgacccaagacatcactgctcacttcttcaggggccttctaaatgcatgcctcaggagtagggacccatccctgatggtcgactttatcctggccaaatgccagactaagtgccctctgattctgacaagtgccctcgtgtggtggccttccctcgaacctgtgctgctgtgtcgctggagacgccattgccagagccccctgcctagggagctccagaaactacaagaagggcggcagttcgcttcagatttcttatcacctgaggccgcttcaccagcacctaatcccgactggttaagcgccgcggccctgcacttcgcaatccaacaggtgcgcgaagagaacataagaaaacagttgaaaaagctggattgtgaacgggaggaattgctcgtctttctcttcttttttagtttgatgggcctcttatcaagccatcttacaagcaattctacgacagacctgcccaaggccttccatgtctgcgccgccatcctggaatgccttgaaaagaggaagatcagttggctggcattgtttcagttgactgagtctgatttaagactgggccgactgctgctgagggtcgcacccgaccagcacacaagactgctccccttcgctttctacagcctattgtcatactttcacgaggacgcagccattcgcgaggaagcctttctgcatgttgccgtggacatgtaccttaagctggtgcaactcttcgtggccggcgacacctccacagttagcccacccgctggaagatcactggagctgaaggggcaaggcaatcctgtagagctgatcacaaaggcccggctgtttttactccagctaatacccagatgccccaagaagtctttttcccacgtggcagagttactggcagatagaggcgactgcgaccctgaagtttccgctgcactgcaatcccgccagcaggctgccccagatgccgatctaagccaagaacctcacttgttctag

SEQ ID NO: 15157 - DNA, 894 bp, synthetic construct
  misc_feature 1..894: note = Description of Artificial Sequence: Synthetic coding sequence
  source 1..894: mol_type = other DNA
atgagcgactcctgggtgcccaatagcgctagtgggcaggacccaggaggaagacgacgcgcctgggccgagctactcgccggtcgtgtgaaaagggaaaaatacaatccagagcgcgcacagaaacttaaggagagtgctgtccgactgctgcgcagccatcaggatcttaacgccttgttgttggaagtggaggggcctctgtgcaaaaagcttagcttatctaaggtaatcgattgcgacagcagcgaggcatatgcaaaccattcctcatcgttcattggtagcgccttgcaggaccaggccagcaggctcggtgttcctgttgggatcctgagcgccgggatggtggcaagcagtgtgggccagatttgtactgcgccggccgagacctcacatccggtgctgctgacagtggagcagagaaaaaagctgtcctctctgctcgagttcgcacagtacttattggcccacagtatgttcagtagactttccttttgccaggagctttggaagatccagtcaagtctcctgctggaggccgtatggcatctgcatgtgcaagggattgtttccctgcaggagctcctcgagtcacatccagacatgcatgctgtaggatcctggctgtttaggaatctgtgctgcctatgtgaacagatggaggctagctgccagcatgcagatgtcgcgcgtgccatgctcagtgactttgtgcagatgtttgtgctgcgcggattccagaaaaacagcgatttaagacgaacagttgaaccagagaaaatgccacaggttactgttgatgtacttcaacgcatgctgatctttgctctggatgcgcttgccgccggtgttcaagaagaatcctctacccacaagatcgtcaggtgctag

SEQ ID NO: 15158 - DNA, 909 bp, synthetic construct
  misc_feature 1..909: note = Description of Artificial Sequence: Synthetic coding sequence
  source 1..909: mol_type = other DNA
atgagtgatagttgggtgccaaactcggcatctgggcaggatccaggcggacgacgccgtgcttgggccgaattgctggcaggcagggtcaagagagaaaaatacaaccccgagcgcgctcaaaaactgaaagaatccgcggtgagactactgcggagccaccaggacttaaacgctctgcttctggaggtggagggccctttatgtaaaaaactgtctctgtcaaaggtcatcgattgcgactcaagcgaggcatacgctaaccacagctccagcttcatcggctctgccctgcaggaccaggcatcccggctgggcgtacccgtcggaatccttagcgccggaatggttgccagttctgtgggccagatctgcacggctccagcagagaccagccatcctgttctgttgactgtggagcagcggaaaaaactgagtagccttttggagttcgcccagtatctgctggctcattcgatgttcagcaggctgtccttctgtcaggaattgtggaagatccaatcatctttgttgctggaggctgtctggcacctccacgtacagggcatcgtgtcgcttcaagagctgcttgaatcgcaccccgatatgcatgccgtcggatcatggctgtttagaaacttgtgttgtctgtgcgaacagatggaggcctcttgccagcacgctgacgtggcacgggccatgctaagcgacttcgtacagatgttcgtcctaaggggctttcaaaagaattcagatctacggcggacagtggagcctgagaaaatgccacaggtcaccgtcgatgtactccagcgcatgctaatcttcgcactggatgctcttgctgctggcgtccaggaagagtcatcgacacataagatcgtccgagcctcagctgcgcgttcatag

SEQ ID NO: 15159 - DNA, 798 bp, synthetic construct
  misc_feature 1..798: note = Description of Artificial Sequence: Synthetic coding sequence
  source 1..798: mol_type = other DNA
atgtctgattcctgggtgcctaacagcgcgtccggtcaggaccccggtgggcggcgacgtgcctgggccgaactgctggccggcagggtgaagcgggagaagtataacccagagagggcccagaagttgaaagagtctgcagtccgactgctcagaagccatcaggacctgaacgccttgctgttagaagttgagggccccctgtgcaaaaagttatcgctgtctaaagtgatcgactgcgactccagcgaggcatacgccaatcacagttcttctttcataggatcagcactccaggaccaggcgtcccggcttggagtgcccgtcggcattctctcagctggaatggtggcctctagcgtcggacagatctgtactgcccccgcagaaacaagtcacccagtgctgctcactgtcgaacagcgcagttcgttgctccttgaagcagtatggcacctgcacgtgcagggaattgtgtcactgcaagaactcctcgagtcacacccagatatgcatgccgtgggatcttggttgtttcgcaacctctgctgcttgtgcgagcaaatggaggccagctgccagcatgcagacgtggctagagctatgctgtccgactttgtccagatgttcgtcttacgtggattccagaaaaatagtgacctccggaggacggtcgagccagagaaaatgcctcaagtcacggtggatgtgttgcagcgcatgctgatattcgccctagatgcgttggctgctggagtgcaagaagagagcagcacccacaaaatcgtccgctgctag

SEQ ID NO: 15160 - DNA, 1869 bp, synthetic construct
  misc_feature 1..1869: note = Description of Artificial Sequence: Synthetic coding sequence
  source 1..1869: mol_type = other DNA
atgtccaggcagactacatccgtgggaagtagttgcctcgatctatggagggagaaaaacgacagactggtgcgccaggctaaggtcgctcagaactctggtcttactttacgtcgccagcagctggctcaggacgccctcgagggtcttcgcggcctgctgcatagcctgcagggcctgcccgccgcagtccccgttcttccactagagctaacagtgacctgtaatttcatcatcctacgcgcaagcctggctcaggggttcacagaagaccaggcccaagatattcagcgatcccttgaaagagtcctggaaacccaagaacagcaagggccacgactggagcaggggcttagagaactgtgggattccgtactgcgagcgtcctgtctgctaccagaattgttaagtgctctgcataggctggtcggcttgcaggccgccctctggctttccgccgataggctgggcgacctggccctactgcttgagaccttaaacggaagtcagtctggggcaagtaaagacctacttttgctgctaaagacttggtcccctccagcggaggagctggacgcacccctcaccctgcaagacgcccagggactcaaggacgtcctacttactgcgttcgcatacaggcaaggactgcaggagctgattactggaaatccagacaaggcacttagctcccttcacgaagccgccagtggtttgtgtcctagaccagtcctggtgcaggtgtacaccgctttgggtagctgtcacaggaagatgggaaacccacaacgcgctctgctttacctggtagctgctctcaaagaagggagtgcttgggggccgcctctgttggaggctagcaggctgtatcagcagttaggcgacaccaccgccgagctggagagtctggagctgctggtggaggccctgaatgttccttgttcctccaaagccccccagttcctcattgaggttgaacttttactgccgccccccgacttagcaagccccctccattgcggcacacagtcacagaccaagcatatcctagcttctcggtgcctgcagaccggcagagctggtgatgctgctgagcactacctcgacttactggcactcctgttagactcatccgagccaagattctcgccacctcccagtccgcccgggccctgtatgcctgaggtttttttggaggcggccgttgcgctaatccaggcgggccgcgcccaggacgcccttacactgtgcgaagaactactgagtcggacctcctctctacttccaaaaatgtcccggctgtgggaagacgcccgaaaaggaacaaaggaacttccttattgccctttgtgggtctcagctacacatctcctccagggccaggcttgggttcagctcggcgcccagaaggtagcaatttctgaattttcacggtgcctggagctgttattcagggcaacccccgaggaaaaggagcagggggccgcattcaactgtgagcagggctgcaagagcgacgccgcactgcagcagctccgcgccgctgccctaatctctcgagggctcgagtgggttgcttcagggcaggacaccaaggcactgcaggattttctgctgtctgtgcagatgtgcccgggtaacagagacacttacttccatctgctacaaacactcaagcggttggaccggagagacgaagctacagccctttggtggcggctggaagcgcaaaccaaaggcagccacgaggacgctctgtggagtcttcccctatatctggaatcttatttaagctggattcgcccctctgaccgggacgcttttttggaggaatttaggacgtcccttcccaagagctgtgacctgtag

SEQ ID NO: 15161 - DNA, 648 bp, synthetic construct
  misc_feature 1..648: note = Description of Artificial Sequence: Synthetic coding sequence
  source 1..648: mol_type = other DNA
atgtctcgccagacgacatctgtaggctcctcctgtcttgacctgtggcgcgagaaaaacgatcggcttgtgcgccaggccaaagtggcacagaatagtgggttgaccctgagaaggcagcagttagctcaagacgctcttgaaggtctgagggggctgcttcattcgctgcagggcctcccagcagctgttcctgtactgccactggagctcaccgttacttgtaacttcatcatcctcagggccagcctggcgcaaggctttactgaagatcaagcccaggacattcagcggtcactagagcgtgtgctggagactcaagaacaacagggccccaggctggaacagggtttgagggagctctgggacagcgttctgcgagccagttgcctattaccagagctactgtccgctctgcaccgattggtgggtctccaagctgctctatggctttcagctgataggctgggcgatcttgccttgttgctggagacactcaatggaagtcaaagcggagcctcaaaagacctcctgctgcttctgaagacctggtcaccaccggctgaggagctcgacgcacccttgactctgcaggatgcccaggggctgaaggatgtcctcttgacagcctttgcatacaggcagtag

SEQ ID NO: 15162 - DNA, 1347 bp, synthetic construct
  misc_feature 1..1347: note = Description of Artificial Sequence: Synthetic coding sequence
  source 1..1347: mol_type = other DNA
atgagccgccagacaacctctgtgggctcttcttgcctggatttgtggcgagagaagaatgatcgactagtgcgacaggcgaaggtggctcagaatagcggcctgaccctcagaaggcaacaactggctcaggatgccctggagggactgagagggctcctccactctctgcagggtctgccagcagctgtgcccgtgctcccactagagctgactgtgacctgtaatttcattatcctccgcgccagtctggctcagggattcactgaagaccaagcacaggatatccagcgaagccttgaacgggtcttggagactcaggagcagcagggccccagactcgaacagggactaagagagctgtgggatagcgtattgagggcctcttgcctgcttccagagctgctgagtgcattgcacaggttagtcggactgcaggctgctctgtggctgagcgccgacaggctgggtgacctggctttgctcttggaaacactcaatggaagccagtcgggagccagcaaggatttgctactactcctcaagacttggtccccccctgcagaggagctggacgcccctctcaccctgcaggacgcccaaggtctgaaagacgtattgcttaccgcctttgcgtaccgacaaggtctgcaggagctaataaccggtaatcctgataaggccctgtcttcattgcatgaagcagcctctgggctgtgtccccgccctgtactagtgcaggtttacaccgccttgggaagctgccaccggaagatgggcaatccccagcgcgctctgctttacctggttgcagctctgaaggaggggtctgcatgggggccaccattactcgaggcatcccgtctataccagcagctgggggatactactgcggagctggagtccctggagctcctggtggaggctttaaatgttccttgcagctcaaaagccccacagttcctgatcgaggtcgaattgctcctcccacccccggacctcgcatcaccactgcattgcggaactcagtcacagaccaagcacatacttgcctctcgctgcctgcagacaggcagagccggcgacgcggctgaacactacttggatctcctcgcactgctgctcgactcaagcgagccgcgctttagccctccacctagccctccaggaccatgtatgcccgaggttttccttgaagccgccgtggctttgatccaggcaggtcgtgctcaagatgcgctcacattatgtgaggaactgctgtccaggacatcgtcgctactgccaaagatgtcaagactgtgggaggacgcaaggaagagaacacgcgggagcttccagctctag

SEQ ID NO: 15163 - DNA, 663 bp, synthetic construct
  misc_feature 1..663: note = Description of Artificial Sequence: Synthetic coding sequence
  source 1..663: mol_type = other DNA
atgctgggcatatggacattgttacctctcgtgctcacttccgttgcacgtctgtcctctaagagcgtgaatgcccaagtaacagatattaacagcaaagggcttgagctcaggaaaaccgtcactactgtggagactcaaaacttggagggacttcatcacgacggacaattctgccacaagccatgccccccaggcgagcgaaaggctcgggattgcacagtgaacggagacgagcctgattgcgtgccctgccaggagggcaaggagtacacagataaagctcatttctccagtaaatgtcggaggtgtagactttgtgacgaaggacacggcctcgaggtcgaaatcaactgtactcgcacgcaaaacaccaaatgcaggtgtaaacccaattttttctgtaactctacagtgtgcgaacactgtgacccctgcactaagtgtgagcatgggataatcaaagaatgcacactcacaagcaacaccaagtgcaaggaggagggcagccgctccaatctcggctggctgtgcctgttgctgctgcctatccccctgatcgtgtgggttaaacgcaaggaagtgcagaagacctgcagaaagcaccgaaaagagaatcagggctcccacgagagcccaacgttaaacccaatgcttacctag

SEQ ID NO: 15164 - DNA, 1008 bp, synthetic construct
  misc_feature 1..1008: note = Description of Artificial Sequence: Synthetic coding sequence
  source 1..1008: mol_type = other DNA
atgctcggaatatggaccctcttacccctcgtgctaacaagtgtggcccgcctgtcaagcaaatcagtcaacgctcaggtcacggatatcaacagcaagggactcgaactgaggaagaccgtcaccacagtcgaaacccagaacttagagggcctccatcacgacggtcaattttgtcacaaaccatgtccccctggggagagaaaggctagggactgcacggtgaacggcgatgaacctgactgtgtgccctgccaagagggtaaagagtatactgataaagcacatttctccagtaaatgccgtcgctgtcggctgtgcgacgagggacacgggctggaggtggagatcaactgcacaaggacccagaacacaaaatgcaggtgcaaaccaaattttttttgcaacagtaccgtttgcgaacattgcgacccctgcacgaagtgcgagcacggtataattaaagagtgcactcttacgagcaacacaaagtgcaaggaggagggatcccggtcaaacctggggtggctttgcctcctcctgctccccatccccctgatcgtttgggttaaaagaaaggaggtgcagaaaacctgcaggaaacataggaaggagaaccaggggagtcacgaaagcccaacactgaaccccgagaccgtggccatcaatctcagcgatgtggacttgtccaagtacatcacaacaatagctggtgtgatgactctgagccaggtaaaaggatttgtaaggaagaacggcgtgaacgaggctaagatcgatgagataaaaaatgataacgtgcaggatacagcagagcagaaagttcaactgttgagaaactggcaccagttgcatggcaaaaaggaagcctacgatactctgattaaagatcttaaaaaggccaacctgtgtactttagcagagaaaattcagacgattattttaaaggacatcacgtcagattctgaaaatagcaattttagaaacgagattcaatcactggtctag

SEQ ID NO: 15165 - DNA, 945 bp, synthetic construct
  misc_feature 1..945: note = Description of Artificial Sequence: Synthetic coding sequence
  source 1..945: mol_type = other DNA
atgctggggatttggactcttctgccgcttgtactgacatcggtggcccgactctcttctaagtcagtaaatgcccaagtcaccgacattaatagtaaaggactggagttacgaaagactgtcacaacagtggagacccagaatttagagggtctgcatcacgacggccagttttgtcataagccctgcccccccggcgagcggaaggccagagattgcaccgtaaacggcgacgaaccggactgtgtcccttgccaggaagggaaggaatataccgataaggcccacttttcttcaaagtgcagacgctgtcgtctgtgtgatgaagggcacgggcttgaagtggagatcaactgcacccggactcagaataccaagtgccggtgtaaaccaaatttcttctgtaactcaaccgtgtgcgaacattgcgatccctgcacaaagtgtgaacacggcattatcaaagagtgcacactgaccagcaacacaaagtgtaaagaagaagttaagagaaaggaagtgcaaaaaacatgccggaagcataggaaggagaaccaagggagccatgagagcccaacactgaaccccgaaactgtggccatcaatctgagcgatgtggatctgtcgaagtatattactacgattgcaggcgtgatgacactctcccaggtaaaagggtttgtgagaaaaaatggggttaacgaggccaaaatagatgagattaaaaatgacaacgttcaggacactgctgagcaaaaagtccagctgctgcggaactggcatcagttacacggcaaaaaggaagcgtatgacaccctgatcaaggatttgaagaaggcgaacctgtgtactttagccgagaaaatccaaacaattatactgaaggatattacttcagatagcgaaaatagtaactttcggaatgaaatccagtccctcgtatag

SEQ ID NO: 15166 - DNA, 735 bp, synthetic construct
  misc_feature 1..735: note = Description of Artificial Sequence: Synthetic coding sequence
  source 1..735: mol_type = other DNA
atgctcggtatttggacactgctaccgttggtgctaactagcgttgctcggctcagcagcaaaagcgtgaatgctcaggtcaccgacatcaatagtaagggccttgagctgcggaaaaccgtgactaccgtggaaacacaaaacttagaaggacttcatcatgacgggcagttctgccacaaaccttgtcctccaggggagcggaaagcgagggattgcacagtgaacggcgatgaacccgactgcgttccttgccaagagggtaaagaatacacagataaggctcacttttcgtccaaatgccggagatgtaggctgtgtgacgaaggacacggattggaggtggagattaattgtacccgcactcagaatactaaatgcaggtgtaagcctaacttcttttgcaacagtactgtctgtgagcattgtgacccatgtactaaatgtgagcatggtatcataaaggagtgcacactaaccagcaacactaaatgcaaagaggaggggtccagatccaacctgggatggctgtgcctgctgctgctgcccattcccttgatcgtgtgggttaagaggaaagaagtgcaaaaaacctgtagaaaacaccgcaaggagaatcaaggctctcatgaaagccctactctcaatccagagacagttgcgatcaacttgtcagatgtagacctttccaagtatcatcattactgctggtcacatgacaccaaaagctcttag

SEQ ID NO: 15167 - DNA, 1089 bp, synthetic construct
  misc_feature 1..1089: note = Description of Artificial Sequence: Synthetic coding sequence
  source 1..1089: mol_type = other DNA
atgctgagggtgtgcgcccaggggtggcacgcccaggggctgccacatggcactaacagtttactgaaaggcggcactgaaacctctctgtccacccctacacggctggtggttctgacgtcagtggctcggctaagctctaagagtgtaaacgcccaggttacagacatcaatagcaaaggactcgaactcagaaaaacggtgacaaccgtggagacacagaatttggagggcctccatcacgacggacagttctgccataaaccatgtccaccaggcgagaggaaggccagggactgcaccgtgaatggagacgagccagattgcgtcccctgccaagagggcaaggagtacactgacaaggcacacttctcttccaagtgtcggaggtgccgcttatgcgatgaagggcatggtctggaggttgaaatcaactgcacaagaactcagaacacaaaatgtcgatgtaagcccaattttttctgcaactcaaccgtctgtgaacactgtgacccatgcactaaatgtgagcatggcatcatcaaagagtgcacattaacctccaacacaaaatgcaaagaagagggctcaagatccaaccttgggtggctgtgcctgctgctgctgcctatacctctcatcgtgtgggtgaagcgaaaagaagtgcaaaagacctgcaggaagcatagaaaggaaaaccagggatcccacgaatcgccaactctcaatcccgtgggtatcgagatcgattttagtgacgtggatctcagtaaatacatcacaactatcgccggtgttatgacactttcccaagtgaaagggttcgtgaggaagaatggggtgaacgaggctaaaatcgacgagattaagaatgacaatgtccaggatacagcggagcagaaggttcagcttttgaggaattggcaccagcttcacgggaagaaagaggcctatgacaccctcatcaaggacttgaagaaggctaatttgtgcactctggcagagaagatccagaccattatattgaaggatataacttccgactcggagaatagcaattttcgcaacgaaatacagtctctcgtgtag

SEQ ID NO: 15168 - DNA, 627 bp, synthetic construct
  misc_feature 1..627: note = Description of Artificial Sequence: Synthetic coding sequence
  source 1..627: mol_type = other DNA
atggatccgtttctcgtgctgctgcactcagtatccagcagtttaagttcttccgaactgactgagctgaagttcctttgcctgggaagagtggggaagaggaagcttgagcgcgtgcagtccggtttggaccttttcagcatgctcttggagcagaacgacctggaacctggtcacacagaactgctgcgcgaactacttgcgagcctgagacgtcacgatctgctcagaagagtcgacgactttgaggcgggtgccgccgctggagccgctccaggagaagaggacctgtgcgccgctttcaacgtgatctgtgacaacgttgggaaggattggcgaagattagcgcggcagctgaaagtgagcgacacaaagattgactctatcgaagatcgctatcctcggaacctgacagaacgagtgagagagtccttgaggatctggaagaacacggaaaaggaaaatgctacggtagcccacctggtcggtgccctaaggagttgccagatgaatctggttgctgatctggtgcaggaggtgcagcaggctagagacctccagaaccggtctggcgccatgagtcccatgtcctggaactcggacgcgtccacctctgaggcttcttag

SEQ ID NO: 15169 - DNA, 384 bp, synthetic construct
  misc_feature 1..384: note = Description of Artificial Sequence: Synthetic coding sequence
  source 1..384: mol_type = other DNA
atgcaacagccctttaactacccctacccacagatttactgggtcgacagttcagccagcagtccttgggcgccgcctggcacagtcctcccttgcccaacttcagttcccagacggccaggccagcgacgcccacctcctcctcctcctcctccaccattgcccccccctccacctccaccacctctgccacctcttcccctcccacccctgaaaaaacgcggaaatcacagcacaggcctgtgcttgttggtcatgttctttatggtactggtggccctggtgggtttggggttgggtatgtttcagctgtttcacctgcaaaaagaactggcggagctgagagaagccaccccagtgcatcctctcaagaaacgaagctag

SEQ ID NO: 15170 - DNA, 846 bp, synthetic construct
  misc_feature 1..846: note = Description of Artificial Sequence: Synthetic coding sequence
  source 1..846: mol_type = other DNA
atgcagcagccatttaactatccttatccccaaatttactgggtcgattcttcagcatcttctccatgggcacctccaggcaccgtcctcccctgtccaacttcggttccgcgcaggccaggccagcgaaggcccccgccacctccacctccccccccactaccacctcctccgccaccacctccacttccacccctccctctccctcctctaaagaagagggggaaccacagcaccggtctatgtttgctggtgatgttcttcatggtcctggtggcgctcgtgggcttaggacttggcatgtttcagcttttccacctccagaaagagctggctgaattaagagagtcgacatctcagatgcacacagcctcctcgctggaaaagcaaatcggccacccatctccacctccagaaaagaaggagctacggaaagtggcacatctgaccggtaaaagcaatagtagatcgatgcctctggagtgggaggatacttacggaattgtgctgctgtcgggcgtcaagtacaaaaagggcggactcgtcatcaacgagacaggtctgtactttgtttactctaaggtgtacttccgcggtcagtcttgcaataatctgcccctttcacataaagtgtacatgaggaatagcaaatatccccaagacctggtgatgatggaaggaaagatgatgtcatactgcactactggccagatgtgggcacggtcctcttacttgggagccgtgttcaacctcaccagcgcggaccacctctacgtgaatgtaagcgagctgagcctggtgaatttcgaggagagccagaccttcttcggcctgtacaagctctag

SEQ ID NO: 15171 - DNA, 13773 bp, synthetic construct
  misc_feature 1..13773: note = Description of Artificial Sequence: Synthetic coding sequence
  source 1..13773: mol_type = other DNA
atgggcaggcacctcgctctgttacttctgctgctgttactttttcagcacttcggagactcagacggctctcaacggctagaacagacccctcttcagttcacacatctggagtataacgtcaccgtgcaggaaaacagtgccgccaaaacctacgtgggccacccagtcaagatgggagtttacattactcatccagcttgggaagtgcgatataagatcgtgtccggggactccgagaacctcttcaaggctgaggagtacattctgggcgacttttgcttcctcaggatcaggactaaagggggcaacacagcaatcctgaacagggaggtgaaggaccactataccttgattgtgaaggctttagaaaagaacacaaacgtggaagcccgaactaaggtccgagttcaggtgctcgataccaatgatttacggccactgttcagcccgacaagctattctgtgagtctcccagaaaacaccgccataaggacctccatcgcacgagtgtccgctacggatgccgacattggcacaaatggcgagttctattactcgtttaaagaccgcactgacatgttcgcaatccacccaacaagcggcgtgattgttctgaccgggaggctcgactacctcgagaccaaactttacgaaatggaaatccttgctgcagatcgcggtatgaagctctacgggagctctgggatttctagcatggctaaactgaccgtgcatatagagcaagcaaacgagtgcgctcctgtgatcacagctgtcactctgtcaccatcagaactggatcgcgacccagcgtacgccattgtgacagtcgacgattgcgaccaaggtgccaatggagatatagcatccttatcgatcgtggccggcgacctgctgcagcagttccgaacagtgagatcatttcccggttcaaaggaatacaaagtgaaagccataggcggcatcgactgggactcgcacccctttgggtacaacttgacacttcaagctaaggacaagggaactccgcctcagttctcctccgtaaaagtcatccacgtgacatccccccaattcaaagctggaccagtaaaattcgagaaggacgtttatcgcgccgagattagcgagtttgctcctccaaatactcccgtcgtgatggttaaggccatcccagcctattcccatctacggtacgtgtttaagtcgacccccggtaaggcaaagttctctctgaactacaataccggattaatctctatacttgagccagtgaagagacagcaggcagctcactttgagcttgaggtgaccaccagcgaccgaaaggcaagcaccaaagtgctggtgaaagtccttggcgccaatagcaacccccccgagtttacacagacagcatataaagccgcgttcgacgagaatgtgcccatcggtaccaccgtgatgtcactgtctgcggtggaccctgatgaaggtgagaacgggtacgtgacctacagcatcgccaatctgaaccatgttccatttgccattgatcattttacaggcgcagtttctacaagcgaaaacctcgattatgagttgatgcccagagtctataccctgcgtatccgtgcttctgattggggcctgccctatcggcgagaggttgaagtgctagcaaccataacattgaacaatctcaacgataatacaccactcttcgaaaaaattaactgcgaaggcacaatacctcgcgacctgggagttggcgaacaaatcaccacagtgagcgcaattgacgcagatgaactgcagctggtgcaataccagattgaagccgggaacgaacttgatttctttagtcttaatcctaatagtggcgtcttgtccttgaagaggtccctgatggatggcctcggagccaaagtgtcctttcatagtctcaggatcactgctaccgatggcgagaatttcgctacaccgctatatattaacatcaccgttgccgcttcccacaagctggtgaatcttcagtgcgaagaaaccggggtggccaagatgttagcggaaaaactactgcaagctaataaactccataaccagggcgaagtggaagatatctttttcgatagccactccgtgaatgcacacattccacagtttaggagtaccctgcccactggaatccaagtcaaggagaatcagcccgtgggttccagtgtgattttcatgaattcgaccgacttggacacagggttcaacggaaaactcgtgtatgccgtttccgggggcaacgaagacagttgctttatgattgacatggagactggcatgcttaagatcctgagtcctcttgacagggagactactgacaagtacactctaaatatcacagtgtatgacctgggcattccacagaaggccgcctggcgccttctacacgtggtagtggttgatgctaacgacaatcctcccgaatttctgcaagagtcttactttgtcgaagtgtccgaagacaaggaggtgcattccgagattatccaggttgaagctacagacaaagatctgggccccaatggtcatgtcacatattcgatcgtcactgacacagatacattcagcatcgattccgtgaccggcgtagtgaatattgccaggcccttggacagagaacttcaacacgagcatagtctgaagatcgaggcccgcgatcaggcgcgagaggaacctcagttgttttcaactgtggtggttaaagtatcccttgaggacgtgaatgataatcctcctacctttatccctcccaactatagagtaaaggttagagaagaccttcctgagggcacagtaattatgtggttagaggcccacgatcctgacctgggccagagcgggcaggttaggtactctctgctcgatcatggggaggggaattttgatgttgacaagctcagtggcgccgtccgcatcgtccagcaactcgacttcgaaaaaaaacaggtatataatctcactgtcagagccaaagataaaggcaagcccgtctccctgtccagcacatgttatgtggaagtggaggtagtagatgtcaacgagaacttacacccccccgtgttctcgtcctttgtcgagaaaggtactgtcaaagaggatgccccagtggggtccctggtgatgactgtctctgcccacgatgaggatgcgagacgcgatggggaaatccggtattctatccgggatggctccggggttggcgtctttaagattggggaagagaccggagtcatcgaaacatcagatcgccttgaccgagagagtacctctcactattggttgaccgtgttcgcaacggaccagggggtggtgcccctgtcaagtttcattgaaatttatatagaggtcgaagatgttaacgacaatgcaccccagaccagtgaaccggtgtactatcctgagattatggagaactcacctaaagatgtcagcgttgtgcaaatcgaggccttcgaccccgactcatcgagcaacgacaaactgatgtataagatcacttccggtaaccctcaggggttcttttccatccatcccaagacgggcctgatcactacaacctccagaaagcttgacagagaacaacaggatgagcacatcctcgaggtaactgtgacagataacggatcacctcccaaaagtaccatcgcccgcgtgatcgtgaagattcttgatgagaacgacaacaaaccacaattccttcagaagttttacaagatccgtctgcctgaaagggaaaagcccgatcgggaaagaaatgcccggcgcgagccactttaccacgttattgcaacagataaggacgaggggcctaatgcagagatcagctatagcatagaggacggaaatgaacatgggaagtttttcattgaaccaaaaactggtgtcgtgagcagcaaaaggttcagcgctgccggggaatatgatatcctcagtattaaggccgttgataacgggaggccgcaaaagtcttcaaccacaaggctgcatatagagtggatttccaaacccaaaccatctcttgagcctatctcttttgaagagtcatttttcacatttacggttatggagagtgaccctgtggcccacatgatcggcgtgatctccgtagagcccccgggcattcctttatggttcgatatcaccggaggaaactatgactcgcacttcgacgtagacaaaggaaccggtaccataatcgttgccaaaccactggatgcagagcagaagagcaattacaaccttacggtagaggctactgacggaaccaccacgattttgacccaagtttttatcaaagtgatcgatacgaacgaccataggccccagtttagtacctccaagtacgaagtggtgattcctgaggacacagcccccgagacggaaattttacaaatttccgcggtcgatcaagacgagaagaacaaactcatatacacactgcaatcctctagagatcccctgagtctgaagaagttccggctggacccagcaacaggatccttatatacctccgagaagcttgaccacgaggcagtcccagcccatctcacagtgatggtgagagatcaggacgtccctgtcaagaggaactttgctagaattgtagtgaacgtgagcgacacaaatgaccacgcaccctggttcactgcaagttcctacaagggcagggtttacgagtccgccgccgtaggatctgtggttctgcaggttacagcactggacaaggacaaggggaaaaatgccgaggtgttgtattccattgaaagtggaaccttcgggaacatcggcaacagctttatgattgatccggtactcgggtcgatcaaaactgccaaggagttagatagatctaatcaggccgaatacgacctcatggtaaaagccaccgataagggcagcccacccatgagtgaaattacgagcgtaaggatctttgttaccatagcagataacgcatcacccaagttcacctccaaagagtactcggttgagctgtctgagactgtgtccattgggtcctttgtgggcatggtcacagcccactctcagtctagcgtcgtctatgaaattaaggacggaaacacgggtgatgctttcgatatcaatccacatagcggaactatcatcacacagaaggctctggacttcgagacgctgccaatctacactcttatcatacagggcaccaacatggccggtctttctaccaacactaccgtgctcgtacatctgcaagatgaaaatgataacgcccccgtattcatgcaggctgaatatacgggactgatcagcgagagtgccagcattaattcagtggttttgactgatagaaacgtaccacttgtaataagggccgctgacgccgataaggattccaacgccttgctggtctatcacattgttgagccttccgtgcacacttactttgctatcgactctagtactggggccatccacaccgtgctgtcgttggactatgaagagactagcatcttccattttacagttcaggtacatgatatgggtacccccaggctgttcgcggaatatgccgcgaacgtcacagtacacgtaatcgatatcaacgactgtccaccagtgttcgctaaaccactgtatgaagcgagtcttttgctgcctacttacaagggcgtaaaagtcataaccgtgaacgccaccgacgccgatagtagcgcattttctcagctgatctattctattactgaggggaacattggtgaaaaattcagtatggactacaagacaggggctctcactgttcagaacaccacacagttgaggtcccggtacgagctgacagtccgcgctagcgatgggcgcttcgctggcctcacttcggttaagattaatgttaaggagtctaaggagagccacttgaagttcacccaggacgtgtattcagccgtcgtaaaggaaaattctaccgaggcagaaactttggccgtaattacggctattggcaaccccatcaatgaaccactcttctatcacatcttgaacccagaccgaagatttaagatctcaaggaccagcggagttctttctaccactggaacacctttcgatcgcgaacagcaggaggccttcgacgttgtggtggaggtgacggaggagcacaagccttcagctgtagctcacgtggtggtgaaggtaattgtagaggatcaaaacgacaatgctcctgtgtttgtcaatctgccgtactatgctgtggtgaaggtggacacggaggtcggacatgtgatccgatacgtaactgccgtggatagggatagcggcaggaatggagaggtgcattattacttaaaggagcaccatgagcatttccaaatcggtcctctcggcgagatttctctgaagaagcagttcgagctggacacactcaacaaggagtatttggtgactgtggtggcaaaggacggcggcaacccagctttttcagctgaggtaattgtgccgatcacagtcatgaataaagcaatgcccgttttcgagaagcccttctacagtgccgaaatcgcagaaagcatccaggttcacagtccagtggtgcatgtccaggcaaactccccagaagggctgaaagtcttctatagtatcaccgacggggaccccttttctcagtttacgatcaacttcaataccggagttatcaatgtcattgctccgctggatttcgaggcccatcctgcttataagctgagtatcagggcaaccgattcacttactggcgcccatgccgaagtcttcgtagatattattgtggacgacataaatgataaccccccggtttttgcacaacagtcatatgccgtcaccttgagcgaagcatccgtgattggcaccagcgtcgttcaggtgcgcgcaacagactctgatagtgagccaaatagagggatcagctaccagatgttcgggaatcattccaagtcccacgaccattttcatgtggactcaagtacaggtttaatctcccttctgcgcacactagactacgagcagtcccggcagcatacaatcttcgttagggccgtagacggcgggatgccaactttaagttctgatgtcattgtgaccgttgatgtgactgatttgaatgataacccccctctcttcgaacaacaaatctatgaggcaagaatctcagaacatgctcctcacgggcatttcgtgacatgcgttaaggcctacgatgctgattcttccgacatcgataaactgcagtattctatcctgtcgggaaacgaccacaagcactttgtcatcgatagtgccaccggtattatcactttgtctaatttgcatagacatgctctgaagcccttttactccctcaacctgtccgtgagcgatggggtttttagaagtagcacacaggtccacgttactgtcatcggtggtaatctgcacagccccgcctttctgcaaaacgaatacgaagtagaattggccgagaatgcaccactgcacacgttggtgatggaagtgaagacaacagatggagacagcggcatttatggtcatgtgacctatcacatcgtaaatgatttcgcgaaagatagattttacatcaatgaacgcggtcaaatcttcaccctcgagaaattggatagggagactccagcagagaaggtgatctccgtgagactgatggcaaaggacgccggcggaaaggtagctttttgtactgtgaatgtgatcctaaccgatgataacgacaacgccccccagttccgtgctaccaagtacgaagtcaacattggctcttccgctgctaaaggcaccagtgtcgtgaaggtgctggcctccgacgccgacgagggtagtaacgctgatataacatatgcaatcgaagcagactcagagagcgtcaaagaaaacctcgagattaacaagctgtccggggtgatcactactaaagagagcttgattggcctggaaaatgagttttttacattttttgttcgagccgttgacaacggctcaccgagcaaggaaagcgtcgtacttgtatatgtgaagatcttgcctcccgaaatgcagctacctaagttctcagagcccttctacacttttacggtgagtgaggacgtgccgattggcaccgaaattgatctcattagagcagaacacagtggcaccgtcctgtattcccttgttaagggaaatacacccgagtccaaccgagacgaaagttttgttatagaccgtcagtccggacgacttaagctggagaagtcactggatcacgaaaccacaaagtggtaccagttctccattctggctcggtgtacccaggatgatcacgagatggtagcctctgtagacgtgagcattcaggtgaaagatgccaacgataactcacccgtcttcgagagctctccctacgaagcttttatcgtcgagaaccttccgggcggttctcgcgtaattcagatccgcgcctcggatgccgactcaggaactaacggccaggttatgtactctctggaccaaagtcagtccgttgaagtgatcgagtcttttgccatcaatatggagacggggtggatcacgaccctcaaagaacttgatcatgaaaaacgagacaattatcagatcaaagtagtggcatccgaccacggcgagaagatccagctatccagcacagccatcgtggacgtcaccgtcaccgacgtgaacgacagcccaccacgctttaccgcagagatctacaaaggcaccgtatcagaggacgatccccagggcggcgtgattgctatcctctctaccacagacgctgatagcgaagagattaatcgccaggtaacttatttcatcacagggggcgatcctttgggccaattcgctgttgagaccatccagaatgagtggaaggtttacgtgaaaaaaccactggaccgagaaaaacgggacaactatctccttactataacggccacagacggtacattctccagtaaagccatcgtagaggttaaagtgctggatgctaacgacaactctccagtctgcgagaagacgctttactccgatacgatcccagaagacgtgctgcctggcaagctgattatgcaaattagtgccactgatgctgacattaggagcaatgcggagatcacctacaccctgctcgggagtggggctgaaaaatttaaactgaatcctgacactggggaattaaagacttccacccccttggaccgagaagaacaggctgtgtaccacttgcttgtgcgtgccacggatggcggtggtagattttgccaggctagcattgtgttgactctggaggacgtcaatgataatgcaccagaattctcagccgacccgtacgccatcactgtatttgaaaacaccgagccgggaacacttctgactagggtgcaagccaccgatgcagatgccggcttgaacagaaaaatcctctattcactgatcgactcagctgatggtcagttctctatcaatgagttaagcggcatcatccagttggagaagccactggacagagagttacaagccgtgtatactttaagcctgaaggctgttgaccagggattgcctcgtaggctaactgccaccggcactgtcatcgtcagtgtgctagacataaacgacaatccccctgtttttgagtacagagagtatggcgccaccgtgtcagaggatatcctcgtgggcacagaggtccttcaggtctatgccgcttctagggacattgaggcaaacgccgagatcacatactctatcattagtggaaatgagcacggaaaattcagcattgacagtaagaccggggccgtgttcattatagagaatttagactacgaatcttcgcacgagtactatctgacggtggaggcgacagacggaggcactcccagtctctctgatgtcgcaacggttaacgtcaacgtaacagacattaatgacaacacccccgtgttcagtcaggatacgtataccactgtgatcagcgaggatgccgtactggaacagagcgtgattactgtgatggcagacgacgccgatggcccttcgaattcacatatccactactccatcatagacggaaaccaggggtcgtccttcaccatcgacccggtccgcggcgaagtgaaggtgacaaaacttctggatcgcgagaccatatccggctatacgttgaccgtgcaggcatctgataatgggtcacctcctagggtgaacactacgactgtgaacattgatgtaagtgatgtgaatgataacgcacctgtttttagccgcggcaattatagcgttatcatacaggagaataagcctgtgggattcagcgtgctccagcttgtcgtgacggatgaagattccagtcacaatggacccccattcttttttacaattgtcactggtaatgacgaaaaagcctttgaggtgaacccccagggggtcctgctgacgtcttccgctatcaagcgaaaggaaaaggatcactacctgttacaggtgaaggtggcagacaatggaaaaccacagctgtcatccctgacctatatcgacatcagggtgattgaggaatctatctacccacccgccattctaccgctcgaaatcttcatcacgtcttcaggggaggaatactctgggggagtgatcgggaaaatccacgcaacagatcaagatgtctatgacaccctgacatactccctggatccacagatggataacctcttttcggtttcctccactggcgggaaactgatcgcccataagaagttggacatcggccagtacttattgaatgtcagcgtgacagacgggaagttcacaacagtggccgacattaccgttcatatcaggcaggtgacacaggagatgctgaatcacacgatcgccattagattcgccaacttgacaccagaggaattcgtcggcgactattggcgcaacttccagcgggcgctgagaaacatcctgggcgttcgaagaaacgacatccaaattgtgagtctccaatctagcgaaccgcatccccacctcgatgtcctcttattcgtagagaagccgggatcagcgcagattagcactaagcaactactccacaaaatcaacagcagtgtcactgacatcgaagaaatcatcggggttcggattctgaatgtcttccaaaagctctgtgccggcctcgactgtccctggaagttctgtgatgaaaaggtgagcgtagacgaatcagttatgtctactcattccacagccagactcagctttgtgactccacgtcatcaccgggcagcagtgtgcctctgcaaagagggcaggtgtccccccgttcaccacgggtgtgaggatgacccttgccccgagggtagtgagtgtgtgtccgacccttgggaagaaaaacacacatgcgtctgccccagcgggaggtttggccaatgccccggatcttcttccatgacactgactgggaactcgtacgtgaaatataggctgacagagaatgagaacaaacttgagatgaaattgacaatgagactgcggacgtactcgacacacgcagtggtcatgtacgcacgcgggacagattattctatcctggagatccaccacggcaggctgcagtacaagttcgattgtggctctggtccggggatcgtgagcgtgcagagtatacaagttaacgacggacagtggcacgcagtggcactggaagtaaacggtaactatgctcggctggtgctcgaccaggtccacacagcttcagggactgctccaggaactcttaagaccctaaacctggataattatgtttttttcgggggccacatcagacagcagggcacaaggcacggaagatccccccaggttggcaatggcttcagaggctgtatggatagcatctacctgaacggacaggaattgccccttaattccaaacctcgaagctatgcccatattgaggaatctgtggatgtttctccgggatgttttctcacagccacggaggattgtgccagcaacccatgtcaaaatgggggtgtctgcaacccttctcctgcaggcggttattattgcaaatgttccgcactgtatattggaactcattgcgagatcagcgtgaacccctgctccagtaagccatgcctgtatggcggaacttgtgtggtggacaacggcggtttcgtttgtcagtgtcgcggtctgtatactggccagcggtgccagctctctccttactgtaaggacgagccatgcaaaaacggcggtacttgctttgactcactggatggggctgtatgccaatgcgattctggcttccggggcgaaaggtgtcaatcagatatcgacgagtgttctgggaatccttgtctgcacggggccctttgtgagaatacacatgggtcctaccattgcaattgttcccatgagtatagagggcggcattgcgaagacgccgcgcctaaccaatacgtaagcactccttggaatattggcctggcagaggggattggcatcgtggtgttcgtcgctggcatttttcttttggtcgtcgtgttcgtactgtgccgcaaaatgatcagtcgcaaaaaaaagcaccaggccgaacccaaggacaagcatctcggtcccgccaccgccttcctgcaaaggccatacttcgacagcaaattaaataagaacatctacagcgacatcccaccacaggtccctgtgcggcccatctcttacacacctagcataccaagtgattcccggaataacctcgacaggaacagcttcgaagggagcgctattccagaacaccccgagtttagcacatttaacccagagtctgtgcatgggcatcggaaagcggttgccgtgtgctcagtcgcccccaatctacctccgcccccgccaagcaactcgccctctgattctgactccatccagaaaccatcttgggacttcgactatgataccaaggtggttgacctggatccttgtctgtccaaaaaaccactggaagagaagccatcgcagccatattccgcacgggagtccctctctgaggttcaatctcttagttcattccagagcgagagctgtgacgacaatggataccactgggacacatcagactggatgccttccgtccccctgccagacattcaggaattcccgaactatgaggtgatagacgaacagactccactctattccgctgatccaaacgccattgatacagattattatccaggtggctacgatattgagtctgacttcccccccccccccgaagacttccctgcggccgacgagttacctccgctacccccagagttctcaaatcagttcgagtcgattcatccgcctagggacatgccagctgcgggttcactgggaagtagcagccgaaatagacagcgcttcaaccttaatcaatacctcccgaacttctaccccctggacatgagcgaaccgcagacaaagggcaccggagagaattctacttgccgggaaccccatgcaccctatccgcccgggtatcagcgccattttgaggctcctgcagtggaaagtatgcccatgtctgtctacgcttctacggcgagctgctccgatgtatctgcttgctgcgaggtggagtcggaggttatgatgtccgattacgagagtggcgacgacggccacttcgaagaagtgacaataccacctttagacagtcagcagcacacagaggtgtag

SEQ ID NO: 15172 - DNA, 13767 bp, synthetic construct
  misc_feature 1..13767: note = Description of Artificial Sequence: Synthetic coding sequence
  source 1..13767: mol_type = other DNA
atgggtcggcacttagcactcctgctcctcctgttactcctctttcagcatttcggcgacagcgacggttcccagagactggagcagacccccttacaattcacacacttagaatacaatgtaacagtgcaagaaaattccgctgctaagacttacgtcggccaccccgtcaaaatgggcgtgtacattacccacccggcatgggaggtcaggtacaagattgtgagcggtgattcagagaatttgtttaaggccgaggagtacatcttaggtgacttttgctttctccgaatccggactaaaggcgggaatacggcaattctcaacagagaggtgaaggaccactacacattaattgtgaaggctctggaaaagaatacgaacgttgaggccaggaccaaggtcagagtgcaggtgcttgatacaaacgacttaagacccctgttcagcccaacatcctattctgtaagccttcccgaaaacaccgcaatcaggaccagtattgcaagggtgtcagccacagatgccgatattggtacaaacggtgagttctactactctttcaaagaccgaacggatatgttcgctattcaccctacttccggggtgatcgtcctgactggaagactggactatctggaaaccaaattatacgagatggaaatccttgccgctgataggggaatgaaactgtacggcagcagtggcatatcgtcaatggctaaactgacagtgcatattgagcaggccaacgagtgtgcccccgtgatcaccgccgtgactctgagtccaagcgagctggaccgggatccggcatacgccatcgttactgtggatgattgcgatcagggcgcgaacggagacattgcgagccttagcatagtcgctggggacctgttgcagcagttcagaaccgtgcgaagctttccaggctccaaggagtacaaggtgaaggcgatcggaggcatcgactgggatagtcacccctttggctataacctcactctgcaggctaaagacaagggtacccctccccagttttcaagcgtgaaggttatacatgtgacttctccgcaattcaaagcaggtccagtgaagtttgaaaaagatgtctacagagccgaaatcagcgaatttgccccaccaaatactccagtggtgatggtcaaggccatacctgcttatagccatctccggtacgtgtttaaatctactcctggaaaggccaaattctctctgaactataacaccggcttgatctcaattctggagcccgtaaagaggcagcaggcagcacacttcgagctcgaagtcacaacatctgatcgcaaagccagcactaaggtgttggtgaaggtgctgggggccaattctaacccccccgagttcacacagaccgcttacaaggctgcattcgacgagaacgttcctattgggacaacggttatgtccctgagcgcggtggatccggacgagggcgaaaacggatatgttacctattcaattgccaacttaaaccatgtcccttttgccattgaccactttacaggggctgtttccacctctgaaaacttagactacgagctgatgccccgggtttatacactcagaattagagcctcagattggggcctgccttaccggagggaagtggaggtgctggcgaccataacactgaataatcttaatgataataccccgctattcgaaaagattaactgtgagggaacaatcccccgtgacctgggcgtcggagagcaaattactacagtgtctgcaattgacgccgacgagctgcaactggtgcagtaccagatcgaggccgggaacgagctcgacttttttagtctgaatccaaacagcggcgtactgtctcttaagcgatccctcatggatgggttaggggcgaaggtgagctttcattccttacgcataacagcgaccgatggtgaaaattttgccacaccactttatattaacattacagtggccgcctcacataagttggtcaacctgcaatgcgaggagaccggtgtggcaaagatgttggcagagaagctactgcaggccaacaaactccataaccagggcgaagtggaagatatcttctttgacagtcacagtgtgaatgctcatattcctcagttccgatccacactgcccaccggcatacaggtaaaagagaatcagccggtggggagcagcgtaattttcatgaattccaccgatctcgatacaggcttcaatggaaaactggtgtatgcggtaagcggcggaaacgaagatagctgctttatgatcgacatggaaaccggcatgctaaagattctgtccccattggatagggaaaccactgacaagtatacactgaatattaccgtgtatgatttgggtataccacagaaagcagcctggcggttgctccacgtggtcgtcgtggacgccaacgacaatccccccgagtttctgcaggaatcctacttcgtggaagtcagtgaggacaaagaggtgcacagcgagattattcaggttgaggccacagacaaggatctcggcccaaatgggcatgttacctacagtatcgttaccgacaccgatacctttagcatcgacagcgtgactggtgttgtgaacattgcgagaccactcgatcgggaattacagcacgagcactccttaaaaatcgaagctagagatcaggcaagggaggaaccccaactgttctctacagtcgttgttaaagtgtccctcgaggatgtcaacgacaacccaccaaccttcataccccccaactatcgcgtgaaggtgcgcgaggacctgcctgagggcaccgtcatcatgtggcttgaggcccacgatcccgatttgggacagtccgggcaggtgcgctactccctattggaccacggcgagggaaacttcgacgttgacaagctttctggagcagtgaggatagtgcagcaacttgatttcgagaagaaacaggtttacaacctcactgtgcgcgccaaagacaaggggaagcccgttagcctctcatccacatgctacgtcgaagttgaggtggtggatgtgaacgaaaatctgcatccgccagttttttctagctttgtggaaaaaggaacagttaaagaagacgctccagtgggtagtctggtgatgaccgtcagtgcgcacgatgaagatgcacgtcgagacggggagattcggtatagcatcagagatggttccggagtaggcgtctttaagattggcgaggagactggcgtgatagaaacttcggatcgcctggaccgggaatccacctcccactactggctcacagtgttcgcgacagaccaaggggtggtgcctctctcatcctttattgagatttacattgaagtcgaggatgtaaacgataacgccccccagacttctgaacctgtgtattatcctgaaattatggagaatagcccaaaagatgtgagcgtggtacagattgaggcctttgatcctgactcctcatccaacgataaactgatgtacaaaataacatccgggaatcctcaaggctttttctcaattcaccccaaaaccggacttataacaaccacaagcagaaagttggatagggagcagcaggacgagcatattttggaggtcaccgtgacagacaatggttctccccccaagagcactatagccagggtgatcgtaaaaatcttggatgagaacgacaataagcctcagttcttgcagaaattttacaagatcagactgcctgagcgggagaagcccgatcgtgagcggaatgctagacgggagcctctgtatcacgtgatcgccacagataaagatgagggaccaaacgccgaaatctcctactcaatcgaggatgggaatgaacatgggaagtttttcatagagcctaaaacgggcgtggtttcttccaagagattttctgcagctggtgagtatgacattctcagcatcaaggccgtcgacaatggacgcccacagaaatcctcaacaacccgtctgcacatcgagtggataagtaaacccaagccatctcttgagccaatctcgttcgaggaaagcttttttacatttactgtcatggaatccgatcccgtcgcccatatgattggcgtcatctctgtggagcctccagggatcccactctggttcgatattaccggtggtaattacgactcccatttcgatgtggacaaaggcactgggaccatcatagtggccaaacctcttgacgccgagcagaagtccaactataacctgaccgtcgaggctacggatggaaccacaacgatcttgacacaggtgtttatcaaagtgattgacaccaacgaccaccgaccccagtttagcacgtcaaaatatgaggtcgttatccccgaggacacagcccccgaaacagagattctgcagatatctgccgtggaccaggatgaaaagaataagcttatctacacacttcagtcttctcgcgaccccctgtctctgaagaaatttcggttggatcctgcgaccggatccctatatacctcagaaaagctagatcacgaagccgtacatcagcacacactgacagttatggtcagagaccaggacgtgcccgttaagcgtaacttcgctcgcattgtcgtgaacgtctcggacacaaatgaccacgccccttggtttactgcatcttcctacaagggaagggtttacgagtccgctgccgttggatcagtggtgctgcaggttactgccttagacaaggacaaaggaaagaacgctgaggttctgtacagtatcgagtctggtaatattggaaatagctttatgattgaccccgtgctcgggtcaatcaagaccgctaaggaactggaccggtctaaccaggccgagtacgatttaatggttaaagctaccgacaaagggagtccacctatgtcagagatcactagcgtccgtatctttgtcactattgctgataacgcgtctcctaaatttacttccaaagagtattccgttgaactcagcgaaaccgtgagtattggatcttttgtgggaatggtgacagctcactcgcagagctctgtggtgtatgaaatcaaggacggaaatacaggcgacgcgtttgacattaatccgcactcaggaaccattataacacagaaagccctcgactttgaaaccctgccaatctataccctgattatacagggaaccaacatggccggcctttccacgaacaccaccgtgctggtccatctgcaggatgagaatgacaatgccccagtcttcatgcaagctgagtacaccgggctaattagcgaatcagcttcaatcaattcagtggtgctgacagatcggaatgttcctttggtgataagggccgctgatgctgataaagacagcaatgccctcttagtttaccatatcgtcgaaccttccgtgcatacatatttcgcaattgactcaagtaccggcgcaatccatactgtgctgtccttagactatgaggagacttccatcttccacttcacggtgcaggtccacgatatggggacaccgagactgttcgctgaatacgcggccaatgttaccgtacacgtaatcgatatcaacgactgtcctcccgtgtttgctaagcctctgtacgaagcaagccttctcctgccgacatacaagggtgtaaaggttattactgttaacgcaactgacgccgactcttcagccttctcgcagttaatctactccattactgagggtaatatcggcgaaaagttttcaatggattacaaaacaggcgctttaactgttcaaaatacaactcaactccggtcccgctacgaactgaccgtccgcgcatcagatggtcgcttcgcagggctcaccagtgtgaagataaacgtcaaagaaagcaaggaatctcaccttaagttcacccaggacgtttactccgcagtagtcaaagaaaactctaccgaggccgaaaccctggcagtgattaccgccataggcaacccaatcaatgaaccactgttctaccatattttgaatccggaccgtcgattcaaaatttcaaggacttcaggcgttcttagtactacagggaccccatttgacagggagcagcaagaggcgtttgacgtcgtagttgaagtcaccgaagaacacaagccttcggcagtggcccacgtggtagtgaaagtcatcgtggaagatcagaacgacaacgctccagttttcgtgaatctgccttattacgccgtggtcaaagtcgacactgaggttggccacgtgattaggtatgtgactgccgtggatcgcgactccggcaggaacggagaggttcattactatcttaaagagcaccatgaacattttcagattggaccactcggtgaaatctcacttaagaaacagttcgagttggacacactaaataaggagtacctcgtaaccgtagtcgctaaggacggtggaaatcccgcattctcagcagaggtaatcgttcccataactgtgatgaacaaggctatgccagttttcgagaagcctttctacagcgccgaaattgccgagagtatccaggtgcactctccggtggttcacgtacaggcgaacagtcctgaggggctgaaagtattctattctatcacagatggggacccgttctcacaattcactatcaatttcaatacaggagtgatcaacgtgatagctcccctggacttcgaggctcacccagcttataaactttccatccgggccacagatagtctgaccggggcccacgccgaggtgttcgtggatattatcgtggatgatattaatgataacccaccagtttttgcacagcagtcctacgctgtcactctgtcagaggcgagcgtgattgggactagcgttgtacaggttcgggccactgattctgacagcgaacctaacaggggtatctcctatcaaatgttcggcaatcatagcaagtcgcatgaccacttccatgtggattcatctactggcttgatctccctgctgaggaccttagactacgagcagtccaggcagcatactatttttgtccgggcggtggacggggggatgcccactctgagcagtgacgttattgttacagtggacgtgaccgatctaaacgataacccgccactcttcgaacagcagatctatgaggcccgtataagtgaacatgccccccacgggcattttgtcacttgtgtgaaagcctacgacgcggactcaagcgatatcgacaagttgcagtactcaattctgtccggcaacgaccataaacattttgtgattgactcggccacgggtattataactctgtccaatcttcacagacatgcgttgaaacctttttactcactaaacttgtccgtgtcagacggcgtttttaggagttctacccaggtgcacgtgacagtgatcggggggaatctgcactcccccgccttccttcagaatgagtatgaagtggaactggcggagaacgctccactgcacactctggtgatggaagtaaaaactactgacggtgactccggtatttatggtcatgttacctaccacatcgtcaatgattttgctaaagataggttctatattaacgaacgaggtcaaatcttcacactggagaaactggatagagaaacaccagccgaaaaggtgatctcggtgcgcctgatggcaaaggatgccggtgggaaggtcgccttctgtaccgtgaacgtgattttgacggatgacaacgacaatgcgccccagttcagggccacaaaatacgaagtgaatataggctcctcagccgcaaaggggacttcagtggtgaaggtcctggcatccgacgcagatgaggggagcaacgccgacatcacctatgcaattgaagctgattcagagtcggtgaaggagaacctggagataaacaaattgagcggagtcattactaccaaagaatccctaatcggtctagagaatgagttcttcactttcttcgtcagggcagtagacaacggatcaccttctaaggaatctgtggtcctcgtttacgtgaaaatactcccccctgaaatgcagctccccaagttctcagagccattttacacattcacagtgagcgaggacgtgccgatcggaaccgaaattgatctcatccgcgcagaacattctggtacagttttatacagcctggtgaagggcaacactccagaaagtaatcgcgacgagagctttgtaatagacagacaaagtgggaggctgaagttggaaaaaagcttagatcatgaaactacaaagtggtatcaattttcaatcctcgctcgttgtactcaggatgatcatgaaatggtggcctctgtcgacgtgtcaatccaggtgaaggacgccaatgacaattctccggtattcgaaagcagcccctacgaggccttcatcgtggagaatctgcccggtgggtctcgagtgattcaaatcagagccagcgatgcagatagtggaacaaatggccaagttatgtattctcttgaccagagccagagtgtggaagtgatcgagagtttcgcaattaatatggagaccgggtggatcacaacactgaaggaactggaccatgagaagagagataattaccaaattaaagtggtcgccagcgatcatggtgagaaaatccagctgagcagcactgccatcgtcgacgtaactgttactgacgtaaacgatagcccacctcgctttaccgccgagatctacaagggtaccgtttccgaggacgatccacaaggcggagtgatagcaatcctgagtacaaccgatgccgattctgaggagatcaatagacaggtgacctattttattacaggaggggacccactgggtcagttcgctgtggagacgattcagaacgaatggaaagtgtacgtcaagaaaccccttgacagagagaaacgtgacaattatttgttaaccatcaccgccaccgacggcactttttccagtaaagccatcgttgaggtgaaggtccttgatgccaacgataactcacccgtgtgtgagaagactctgtactctgacactatccccgaagacgttctacctggaaagctgatcatgcaaatttcagctacagatgctgatattaggtccaatgccgaaatcacatatacgttgctgggtagtggcgctgagaaattcaagctaaaccctgatactggggagctcaagacatccacacccctggatcgggaagaacaggcagtataccacttgctcgtccgagctaccgacggcgggggaagattctgccaggctagcatcgtattgaccctggaggacgtgaacgacaacgcaccagaattcagcgcggatccatacgctattacagtcttcgaaaatactgagcccggcaccctgctgacgcgggtgcaggctaccgacgcagatgcaggccttaatagaaaaatcctatacagcctcattgacagtgccgatggccagttctcaatcaatgaactgtctggcataattcagctggagaagccccttgaccgggagttgcaagccgtgtacaccctcagtctcaaagccgttgaccagggactcccgcggcgcttgaccgccactggtacggtgatcgtcagtgtcctggatatcaatgacaaccctcctgtgtttgagtaccgagaatacggcgccacggtttctgaggacatcctcgtgggaaccgaggtactccaggtgtatgcagctagtagagatattgaggccaacgccgaaatcacttacagtatcatatccggcaacgagcacggcaagttctccatcgactcgaagacaggagccgtgttcatcatcgaaaacttggattatgaaagcagccacgagtactacctgaccgtagaggccacagatggtgggaccccaagtctgtctgacgtggctaccgtgaacgttaacgtgaccgatattaacgacaatacgcccgtattttcacaggacacatataccacagtaatttcggaggacgctgttctggaacagtcagtcatcaccgttatggccgacgacgcggacggaccctctaatagccacattcattatagtataatagacggtaatcaaggaagctcatttacaatcgaccccgtcaggggtgaagtgaaggtgacgaagctgttagacagagaaacaatcagcggatatacccttacagtgcaagccagcgataatggatctccaccgagagtgaatactactacagttaacatagatgtctccgacgtgaacgataacgctccagtgttttctagagggaactactcagtcataatccaagaaaataagcctgttgggttttctgtactgcagttggtggtgacagatgaagacagctcacacaatggtccccccttcttcttcaccattgtgacggggaacgatgaaaaagctttcgaagtgaacccccaaggtgtcctactcaccagttcggcaatcaaaagaaaggagaaagatcactaccttcttcaggtgaaagtcgcagacaatgggaagccccagttgtcctctctcacatatattgacataagggtgatagaggagagcatctacccaccagccattttgccgcttgagattttcatcacatcaagcggggaagaatattcaggaggagttattggtaagatccatgccaccgaccaagacgtgtacgatacccttacgtattctctggacccacagatggataatctgttcagtgtgagctccaccggaggaaagcttatagcacataagaaactggacattgggcagtatctcctcaacgtgagcgtgacagatgggaaatttactactgtcgccgatattacagtacatatcaggcaagtcacccaggaaatgcttaaccatactatcgctataaggttcgccaacctgacaccggaagaattcgtcggggattactggaggaactttcaaagggcactgcgaaatattctcggagtccgccggaatgacatacaaatcgttagcctacagtcatcagaacctcacccgcatcttgacgtcctgctgttcgtcgagaagccagggagtgcacagatttccactaaacagctgctgcataagatcaattcttcagttaccgacattgaagaaatcattggcgtgcgcatactcaatgtcttccagaaactttgtgcaggcctggactgtccttggaaattctgcgacgagaaagtttctgttgatgagtcagtgatgtcaacccattcgactgccagattgagtttcgtcacccctagacaccaccgtgcagcagtttgcctttgcaaagaaggacgatgcccaccggttcatcacggatgcgaagatgatccttgccccgagggctcggaatgcgtaagcgacccatgggaggaaaagcatacatgtgtgtgccccagtggccggttcggacagtgtcccggctccagctccatgaccctcacgggaaacagctatgtcaaatacagattgactgagaatgagaacaagcttgaaatgaaactcactatgagactcagaacctacagcacacacgcagtggtcatgtacgccagaggaaccgactatagtattctggagatacaccacggtcgcctgcaatataagtttgactgcggtagtggccccgggatcgtcagtgtgcagtctatccaggtgaatgatggccagtggcacgccgtggccctggaagtgaacggcaattatgctagactggttctcgaccaggttcacactgcctccggcacggctcccgggaccctcaaaactttaaatctggacaactatgtgttttttggcggacatatacgtcagcagggtacaagacacggtcgctctccacaagtaggtaatggtttcaggggatgtatggacagtatctatctcaacggacaggagcttcctctgaactctaagccgagatcatatgcccacatagaggaatcagtggatgtgtctcctgggtgttttttgaccgcaacagaggattgtgcgtccaacccatgtcagaacggcggcgtgtgtaacccaagccccgcaggcggctactactgcaaatgtagcgcactgtacattggcacccattgtgaaatttccgttaatccctgttcctcaaagccttgtctgtacgggggtacttgtgtggttgacaacgggggattcgtttgccagtgcaggggattatacacagggcaacggtgccagctttcaccttactgcaaagacgaaccctgcaagaacggaggtacgtgtttcgactccctagacggggctgtgtgccagtgtgattccggttttcgaggcgagcgctgtcagtctgatatcgatgaatgttcagggaacccttgcttgcacggcgccctctgtgagaatacacatggcagttaccactgcaattgctcccacgagtatcgaggcagacattgtgaagacgccgctccaaatcagtatgtttctactccatggaacataggtcttgcagagggcattggaattgtcgtgttcgtggcgggcattttccttctagtggttgtctttgtgctctgtagaaaaatgattagtcggaagaaaaagcaccaggcagaacccaaggacaaacatctgggacctgctacagcctttcttcagcggccatacttcgacagtaagttgaacaaaaacatatatagcgatatccctccccaagtgcctgtgagaccgatctcatataccccatccataccgtccgactctcggaacaatttggatcggaatagttttgaggggagtgctattcctgagcatcctgagttcagcaccttcaacccggagagtgtgcacggtcacaggaaggcggtggccgtgtgctcggtggccccaaacctaccccccccgccccctagtaacagcccctcggactcggattccatccagaagccttcctgggattttgattatgacaccaaggtggtggatctggacccctgtctctcaaaaaagcctttggaggaaaaaccgagccaaccctacagtgctagagagtctctgtccgaggtgcagagtctcagctcgtttcaatcagaaagttgtgacgacaatggttaccactgggacactagtgactggatgccttctgttcccctcccggatattcaagaattcccaaactacgaagtgatcgatgagcagacgcccctgtattcggccgaccccaatgcaattgatactgactactatccagggggctatgacatagaaagtgacttcccaccacctcctgaggacttcccagccgcagacgagctgccgcctctccctcccgaatttagcaaccaattcgagtctatccatcctccacgggatatgcccgcagccggcagtctgggatcttcctctcgcaacaggcagcggttcaacttaaatcagtatctgcccaatttctatcctttggatatgtctgaaccgcagacaaagggcactggggagaactctacttgcagagaaccccacgctccataccccccggggtaccagaggcactttgaggcacctgccgttgagagtatgccaatgtccgtttatgccagcaccgcgagttgtagcgatgtctccgcgtgctgtgaggtcgagagcgaggttatgatgtctgactatgagagcggcgacgacggccactttgaggaagtgaccattccccccctggattctcaacagcatacagaggtgtag

SEQ ID NO: 15173 - DNA, 1467 bp, synthetic construct
  misc_feature 1..1467: note = Description of Artificial Sequence: Synthetic coding sequence
  source 1..1467: mol_type = other DNA
atgggccgccaccttgcactgctgttactgctcctgcttctgttccagcactttggggattcagatggttcccagagactggagcagaccccacttcagttcacccacttggaatataacgtcactgttcaggagaattccgctgcgaagacctacgtaggtcacccagttaagatgggggtgtacatcacccatccggcctgggaggtccgctacaagattgtgagcggtgacagcgaaaacctcttcaaagctgaagaatacattttgggagacttttgttttctgcgtattagaaccaagggcggcaatacggctatccttaaccgtgaagtaaaggaccactatactctcatcgtaaaggcactcgagaagaataccaatgtggaggcaaggactaaagtgcgggtgcaagtcttggataccaatgacctgcgtcctcttttcagccctacgtcctacagcgtgtccctgcctgaaaacacagccatacgtacaagtatcgctagagtaagtgccacagacgccgacattggcaccaacggtgaattttactacagttttaaagacagaacggatatgttcgccatacaccccacatcgggcgtgattgtccttactggtagattagattacctggaaaccaaactctacgaaatggagatcctcgccgccgaccgtggaatgaagctctatgggagctccggaatttcttccatggcaaaactcaccgtacatatcgagcaggctaacgaatgcgccccagtcattaccgctgtcacactcagtccatccgagctagatcgtgacccagcctacgccatagttaccgtggacgattgtgaccaaggtgctaatggcgatatagcttcactatcaatcgtggcaggtgacctcctgcaacagtttaggaccgtgcgatctttccctggttccaaggagtacaaggttaaagcaattggaggaatcgactgggacagccatccattcggctacaacttgacattgcaggcgaaggacaaagggacacccccccaattcagctcagttaaggtaattcatgtgacctcccctcagtttaaggcaggccccgtcaagtttgagaaggacgtatacagagctgagatcagcgagtttgcaccaccgaatacgccagtcgtgatggtaaaagccattcctgcgtatagccatctgcggtacgtgttcaaatcaacccccgggaaggctaagttctcattgaactataacacgggcctgatatcaattctggaacccgttaaacgacaacaggccgcccactttgagctggaagtcaccacatcagacaggaaagcatcaactaaggtactcgtgaaggtattgggggcaaatagcaacccccccgagtttacacagacagcatataaagctgcattcgacgaaaacgtgcctatcgggaccacagtgatgtccttatccgctgtctag

SEQ ID NO: 15174 - DNA, 399 bp, synthetic construct
  misc_feature 1..399: note = Description of Artificial Sequence: Synthetic coding sequence
  source 1..399: mol_type = other DNA
atgtgtgatgcattcgtgggcacctggaagctagtcagtagcgaaaactttgacgattacatgaaggaggtgggcgtggggtttgcaacacgcaaggttgctggaatggcaaaacctaatatgattattagcgttaatggagatgtcataactatcaagagtgaaagcacattcaagaacaccgagattagcttcatcctcggacaggaattcgacgaagtcaccgccgacgaccgtaaagtgaagtccactattacactggacggtggcgtgctggtacacgtgcagaaatgggacggcaaatccactacgatcaagaggaaacgcgaagacgacaagctggtggtggagtgcgttatgaaaggcgttacctctacccgcgtgtatgagagggcctag

SEQ ID NO: 15175 - DNA, 7536 bp, synthetic construct
  misc_feature 1..7536: note = Description of Artificial Sequence: Synthetic coding sequence
  source 1..7536: mol_type = other DNA
atggaagaggtggtgatagctggtatgagtggtaaattaccagagtcggaaaatctgcaggagttttgggataatctgattgggggcgtggatatggtgacagacgacgaccgcagatggaaagctggcttgtatggcctgcctcgccgttcagggaagctgaaggacttgagccggtttgatgcttccttctttggggtccacccaaaacaggctcatacaatggatcctcagctcaggctgctgctggaggtgacctacgaggccatcgtagacggaggcatcaaccccgactcactgcgggggacacacactggcgtctgggtgggcgttagcggctccgagaccagcgaagcactttcccgcgatcctgagacactcgtgggatacagcatggtggggtgccagcgagccatgatggctaaccggctctcgtttttcttcgatttcagagggccaagcattgccctcgacacggcatgctcttccagcctgatggccctacagaacgcgtaccaagctattcactcaggccagtgtcctgcggcgattgtgggaggtataaatgtactactgaaacccaatacctctgtgcagtttctgcgcctaggtatgttgtctcctgaagggacatgcaaagccttcgacaccgcaggcaacggctactgccgcagcgagggggtggtagctgttcttctgactaaaaagtcactagcccgcagagtctacgctaccatcttaaatgcgggaactaacacagacggctttaaggagcagggggtgacttttccttccggtgatattcaggaacagctgataaggtctttgtatcaaagtgctggcgtggcccctgaatcctttgaatacatagaagcgcatggcacaggaacgaaagttggcgaccctcaagagctgaacggcatcactcgggctctttgtgccacacgccaggaacctctgctaattgggtccactaaatccaacatgggacaccccgagccagccagcggcctagcagcgttggctaaagtgctcctgtctctggaacacggattatgggcaccaaacctgcactttcactctcccaaccccgagataccagctctgctcgatggtaggcttcaggtagtagatcaacccctcccggtgcgaggtggtaacgtgggcatcaattcctttggcttcggaggttcgaatgtgcatatcatcctgcggccgaatacacagccccccccagcccccgccccccatgccaccctgccaagactgttgcgcgcctcaggacgcacaccagaagctgtgcagaaactgctggagcagggtctgcggcattcacaggacctcgccttccttagtatgctgaatgatatcgctgccgtgcccgccactgcgatgccctttagaggttacgcggtactgggaggcgaacggggtggacccgaagttcagcaagtgcctgcaggagaacgcccgttgtggtttatttgctccgggatgggaacacagtggcgtggcatgggcctaagccttatgcgactcgaccggttcagggactccatcctgcggtccgacgaggctgtgaagccgtttgggttgaaagtgtcacagctgctgttatccacggacgagtctacatttgatgatattgttcacagttttgtgagtttaacagcaattcagataggactcattgatttgttgagctgtatgggactgcgccctgacgggatcgttgggcattctctgggcgaagttgcatgtgggtacgctgacggatgtctctctcaggaggaggccgtgcttgcagcctactggaggggccagtgtattaaagaagcgcaccttccccctggagccatggcagcagtcggcctgagctgggaagagtgcaagcagaggtgtccacctggtgtcgtgccggcatgccacaactccaaggacactgtgaccatctcggggccgcaggcccccgtcttcgaatttgtggagcagctcaggaaggagggcgtcttcgccaaagaagttaggaccggaggcatggcttttcactcgtacttcatggaggcaattgctcctccccttctccaggaattgaagaaggtcatccgcgagccgaagccaagaagcgcaagatggctctccacttctattcccgaagcccagtggcattcctccctggccaggacctccagtgcggagtataatgttaacaacctggtatccccggttctcttccaggaggctctgtggcatgtccccgaacatgctgtcgttttggaaatagctccccacgctttgctgcaggcagtactcaaaagagggctcaagccaagttgtaccatcatcccccttatgaaaaaagatcatcgcgacaatctcgaatttttcctggccgggatcggaagacttcacctgtccgggattgacgcgaatccaaatgcactgtttcctcccgtggagttccctgctccacgcgggactcccttaatctcccccttaatcaaatgggatcactccctcgcctgggatgtgcccgccgcagaggacttccctaacgggtccggcagtcctagtgccgcaatatacaatatcgatacatcatctgagtcacctgaccactatcttgtggaccacaccttagacggtcgggtgctgttcccagcgacagggtatttgtccatagtgtggaagactttagctcgggcccttggcctgggagtggagcagttgccggttgtttttgaggatgtggtgctccatcaggctactatcctaccgaaaacggggacggtgagcctggaagtccgcctgcttgaggcaagcagggcttttgaggtttcagagaatgggaaccttgtagttagcggcaaggtgtaccagtgggacgatcccgacccgagactgttcgaccatcccgagtccccaacacctaatcctaccgaacctctatttctggctcaggctgaagtgtataaggaacttagactccgcggctacgactacggtcctcactttcagggcatacttgaggcaagcctggaaggggactctgggcggttactatggaaggataattgggtgagtttcatggataccatgctccaaatgtcgatcctggggagtgcaaaacacggactttaccttccaactcgggttacggcaatccacattgatccggctacacatcgccagaaactctatactttgcaagacaaggcccaagtagcggatgtggttgtaagcagatggctgagggtcaccgtggctggcggtgtacacattagcggtctgcacacagagagtgcgccgcggcgacaacaagaacagcaggtccctatccttgagaagttttgcttcacccctcatacagaggaagggtgtctgtctgagagagcggcgctgcaagaagaacttcagctctgcaagggtctcgtacaggcgctgcagaccaaagtcacccagcaagggctgaaaatggtggttcccggactggacggcgcgcagattccacgagacccatcccaacaggaactacctcgtctgctgtcagctgcctgccgcctgcagttgaacgggaacctccaacttgaactcgcacaggttctggcccaggaacgcccaaagcttcccgaggacccactgctaagcggcctgctggacagccccgccctcaaagcctgtctggacactgccgtagaaaatatgccaagcctcaaaatgaaggtggtggaggtcctggccggacacggacatctgtactcaagaataccagggctgctgtctccacaccccctgttacagctttcatatactgccacggatagacacccgcaggctctcgaggctgcccaggctgagttgcagcaacatgatgtggctcaggggcaatgggaccccgctgatcccgcacccagcgccttgggaagtgcggaccttctggtgtgcaactgcgcagtggctgctctgggggatccagcgagcgctctttctaacatggtggctgcattacgggaggggggattcctactgctgcatacccttctgcgcggtcatcccttaggggacattgtggcctttctcacctctacagagccccagtacggacaaggaattctcagtcaggatgcatgggagagtcttttttcgcgggtctcgttgagactggttggactgaaaaagtccttttacggcagtaccctctttctatgccgcagaccaactccccaggatagtccaatcttccttcctgtggacgacacatcattccgttgggttgaaagcctgaagggcatcctggcagacgaagatagcagccgcccagtttggctgaaagctatcaattgcgcaacatccggggtggtggggcttgttaactgtttgagacgggagcccggaggaaaccgacttcgttgcgtgctactgagcaacctgtcatccacgtcccacgtcccagaggttgacccgggctcagccgagctgcaaaaggtattacagggcgatttggttatgaacgtgtacagggacggtgcgtggggggcttttcgacatttcctgctggaagaagataagccagaagagcccacggcccacgccttcgtctcaacccttacgaggggggacttgtcctctatcagatgggtctgtagctcacttagacacgctcagccaacatgtccaggcgctcagttgtgtacagtgtactacgcctctcttaatttccgtgatatcatgctggccacaggcaagctctctcctgacgcgatcccgggaaagtggacaagccaggactcgctcttgggcatggagttttccggccgagacgccagtggtaaacgcgtaatggggttggttcccgccaagggactggcgactagtgtcctcctgtcacctgactttctgtgggacgtgccgtccaattggacactggaagaggcagcttccgtgcctgtcgtgtacagtacggcctactacgctctggtggtgcgtggaagggtcaggcccggagaaactctgttgatccactcgggcagcggcggcgtgggacaggctgccatcgcgattgcactatccctggggtgccgtgtgttcactacagtcggcagcgctgaaaaaagggcttacctccaggccagattcccccagttagactctacatccttcgcaaattccagagatacgtcttttgagcagcatgtgctttggcacacaggcggaaaaggagtcgatctagtgctcaattcactagccgaagaaaagttgcaggcctcggtgcggtgcctcgccactcacggtcgctttctggagatcggaaaatttgacctgtcgcagaaccaccccctggggatggcgatattcctgaagaacgtaacgtttcatggggtgttgcttgatgcattcttcaatgagtcctcagcggattggagagaagtgtgggctcttgtgcaagcaggcataagggacggcgtggtgcggccgttaaaatgtacagttttccacggtgcacaagtggaggacgcatttagatacatggctcagggtaaacacataggcaaggtagtggtgcaagtgttagctgaggagcccgaggctgtcctgaaaggtgccaagcctaagcttatgtctgctatcagtaagactttctgtcccgctcataagagctacatcatcgccggcggcctcgggggcttcggcttagagcttgcccagtggctgattcagagaggtgtacagaagctagtgttaacctcccgctcaggaatccgtactggttaccaggcgaaacaagtacgccgctggcgtagacaaggcgttcaagtgcaggtaagcactagcaacatatcttctttggaaggcgcacggggacttatcgccgaagcagcacagctagggccggtaggaggcgtgttcaacttggctgtcgtgcttagggacggccttctcgaaaaccagactccggagttttttcaggacgtttgcaagccaaaatactctgggaccttaaatttagaccgtgtgactcgggaagcatgtccagagctggattactttgtggtgttcagctccgtgtcctgcggccggggaaacgccggccaaagtaactacggattcgccaactctgctatggagagaatctgcgaaaagaggagacatgaaggactgcccgggttggccgttcagtggggtgcaatcggcgatgtgggtatcctcgttgagacgatgtccaccaacgacacaattgtatccggcacgctgcctcaacgcatggccagttgcctagaggtcctggatcttttccttaaccagccccatatggttttgtcgtcattcgtgcttgccgaaaaggcggccgcgtaccgagatcgggatagtcagagagacctggttgaggctgtggcccatatcctcggtatcagggatctggcagcagttaatttagatagttctctggccgatttgggtcttgatagcctgatgagtgttgaagtgagacagacactggaacgcgaactgaacctggtgctgtccgtgagggaggtgcgccagctcaccctgcgcaaactccaggaactatccagcaaggctgacgaggcgagtgaactagcgtgtcccacgcctaaagaggatgggctagcccagcagcagacacagcttaaccttagatccctactggtgaacccggagggcccgaccctgatgcgtctcaacagtgtccagagtagcgaacggcccctgttccttgtgcatccaatagaggggtcaactactgtttttcactccctggccagcaggctcagtataccaacttatgggctgcaatgcaccagggccgcaccactggacagtattcattcacttgccgcctattatattgactgtatccgtcaggtccagccagagggtccctaccgagttgctgggtatagctatggtgcctgcgttgcattcgaaatgtgctctcagctacaagcccaacagtctccagctcctacccacaacagtctgttcctctttgatggaagtcctacatacgtgctggcctacacccagtcctaccgggcaaagctgacgcccggctgcgaagcagaagcggaaactgaagcgatatgcttttttgttcagcaatttacggatatggagcacaatagggttctcgaggcactgctgccgttgaagggactagaagagcgggtggcggctgctgtggacctcataatcaaaagccaccaggggttagaccgccaggagctgtcatttgcggcaaggagcttctattacaaattgcgagccgctgagcaatatactcccaaggcaaaatatcacggtaatgtgatgctcctccgcgcaaaaacaggtggcgcgtatggcgaagatctcggtgcagactataacttgtcccaagtctgtgacgggaaagtttcagttcatgtaatagagggtgatcaccggacccttcttgaaggctccggtctagaatccataatcagcataatacacagctctttagcagaacctcgcgtatcagtgagagagggctag

SEQ ID NO: 15176 - DNA, 2502 bp, synthetic construct
  misc_feature 1..2502: note = Description of Artificial Sequence: Synthetic coding sequence
  source 1..2502: mol_type = other DNA
atgtccatcctaggatccgctaagcacggcctgtatttgcctacccgggttactgccatacacatcgatcccgcgacccatagacagaaactctacacactccaggataaagcgcaggtggccgacgtcgtcgtctcccgctggttgcgtgtcacagttgcaggtggagtgcacatttcaggtcttcacacagagtctgccccaaggagacagcaggagcagcaggtcccaattcttgagaagttctgcttcacaccacatacggaagagggatgcctctcagaacgtgccgccctgcaggaagaactgcagctgtgcaagggcctggtgcaggcactgcaaactaaggtgactcagcaagggcttaaaatggttgtgccaggcctcgacggcgctcagatccctagagacccctctcagcaggaactccccaggctgttgtcggcggcctgccggctgcagctgaatggaaatctacaactcgagctggcacaggtgctcgctcaggaacgccctaaactgcctgaagatcctcttttgtccggtttactggactcccctgctcttaaggcgtgcttagataccgctgttgagaacatgccaagtctcaaaatgaaggttgttgaggtgctggcaggccacgggcatctgtatagccggatccctgggctcctgtctccccatcctctgttgcagctctcatatactgcgaccgacaggcacccccaggccctggaagccgctcaggctgagctccagcaacatgacgtggcacagggccagtgggaccccgcggaccccgccccttctgctctcgggtctgcagacctcctcgtgtgcaattgtgctgtggccgccctgggagatccagcgtctgcactgtcaaatatggtcgcggccctgagggagggcgggtttttgctcctccatacattgctgcgaggccatcctttaggagatatcgtggcctttctgacatctaccgaacctcaatacggccaggggatcctgagccaggacgcatgggaatcccttttcagccgcgtgagcctcaggcttgtggggctcaaaaagtctttctatgggagcaccctctttctgtgccgaaggcctaccccccaggatagtccaattttcttaccggttgacgacacttcatttagatgggtggagtccttgaaaggcattttagcggacgaggacagttcacggccagtgtggctgaaggcgatcaactgcgccaccagcggagtcgtgggcctcgtaaactgtctcaggagagaacctgggggtaataggttgcggtgtgtcttgttatctaacttgtcctctacaagccacgtacctgaggtagatcctggatctgcggagctgcagaaagtcctacagggcgaccttgttatgaacgtgtatcgtgacggcgcttggggcgcttttcgccactttctgttggaggaggataaaccagaggagcctactgcacacgcttttgtaagcaccttaacacggggagacctgagctctatcaggtgggtctgcagtagtcttagacacgcccaacccacatgtcccggggcacagctgtgtactgtgtattacgccagcttaaacttccgtgacatcatgcttgctaccggcaagttgtcgcctgacgccatcccaggcaagtggaccagccaggattctctgctgggtatggagtttagcggacgagacgcttctggcaagcgcgtcatgggtttggtgcctgccaaaggcctggctacttccgtgcttttgtcacctgatttcttatgggatgtgccatcaaattggactcttgaagaagcagctagcgtgcccgttgtctactcaacggcctattacgctctagtcgtccgaggtagagtgagacctggggagacgctcctgatacactccggctcgggcggagtgggacaggccgcaatagccatcgcactgtcgctcggttgccgggtttttaccaccgtgggcagtgccgaaaaacgggcctatctccaggctcgtttcccacaattggactctacttcttttgcaaactctagagatacctccttcgagcagcacgtgctttggcacaccgggggcaagggggtcgatctggtcctaaacagtcttgccgaggaaaaattgcaagcttcagtcagatgcttggccactcacggtcggttcctcgaaataggaaaattcgatctatcgcagaatcaccctctgggtatggctatcttcctgaagaacgtaacttttcacggagtgctactggatgccttctttaacgaatcttccgctgattggcgggaggtctgggccctggtacaggccggtatcagggacggtgtggtacgcccgttaaaatgcacagtattccacggcgcccaagtcgaggacgcctttcgctacatggcccaggctaaagcttcacaagcctggccttgcagcggcgcccccagcgccacctgggctttttggtggagacgctag

SEQ ID NO: 15177 - DNA, 1143 bp, synthetic construct
  misc_feature 1..1143: note = Description of Artificial Sequence: Synthetic coding sequence
  source 1..1143: mol_type = other DNA
atgatgttctccggattcaacgcagattatgaagcttccagttcaagatgttccagcgcctcccctgccggcgatagtcttagctactatcacagtcccgcagattctttttcatcaatggggtcaccggtgaatgcccaggatttttgtacagacctggcagtttcatctgctaattttatccccaccgtgacggccattagcacctcacctgacctacagtggttggtgcaacccgccttggtcagcagcgtcgccccctcccaaactagggccccccacccttttggcgtcccagccccttctgcaggggcctactcaagagcgggagtcgtgaaaacaatgaccgggggtagggcccaatctatcgggagacgggggaaggtggagcagctcagccccgaagaggaggaaaagcgccgcatccgtagggagaggaacaagatggccgctgcgaagtgcagaaacaggcgtcgcgaactgacagataccctgcaggctgaaactgatcagctggaggacgaaaagtctgctctgcaaactgaaattgccaacttactaaaggagaaggagaaactcgaatttattctcgccgcccatagacctgcatgcaagatccccgatgatctaggctttccagaggaaatgtctgttgcctccctggacctcacaggaggcctgcctgaggtagcgacccctgaaagcgaagaagcgtttacattgcctctccttaatgatccagagccaaaaccttcagtcgagccagtcaaatccatatcctctatggagctcaagacagagccttttgatgattttctatttcctgcatccagtcggccttctggctccgagaccgcccgctccgtgcccgatatggacttgagcggcagtttctacgcggcagactgggagcctcttcattctggtagcctggggatgggtcctatggctaccgaattggagcccctgtgtactccagtggttacttgtacaccaagctgtaccgcctacacgagcagctttgtgttcacatatccagaggctgattccttcccatcctgtgctgccgcgcatagaaaagggtcctctagcaacgagccctcttccgactccctgagtagccccactttgcttgctttatag

SEQ ID NO: 15178 - DNA, 966 bp, synthetic construct
  misc_feature 1..966: note = Description of Artificial Sequence: Synthetic coding sequence
  source 1..966: mol_type = other DNA
atggaggaaggacagtatagcgaaatcgaggagcttccaaggaggagatgttgccggagaggtactcagattgttctgctcgggctcgtaactgctgccttatgggcggggctcctgactctcctgttgctgtggcactgggacactacgcagagtctcaaacagctggaggagcgggcagcccgcaacgtatcccaggtaagcaagaacctcgaatctcaccacggagatcaaatggcgcagaagtcacagagcacgcagatatcgcaggagttggaggagctgagagctgaacagcaaagactcaagtcccaggatctagaactgtcctggaacttaaacggcctgcaggcagatctctcctcatttaaaagtcaggaactcaatgagcgcaatgaggccagcgatcttctggaacgactccgtgaggaggtcaccaaattgaggatggagctgcaggtgagcagcggattcgtgtgcaacacatgtcccgagaagtggatcaactttcagcgaaagtgctattactttggcaagggcacaaaacagtgggtgcatgcccggtacgcctgcgatgacatggagggccagttagtctctattcacagcccagaggaacaagatttcctcacgaagcatgcctctcataccggctcttggatcgggctgcgcaacctggatctgaagggcgaattcatttgggtggatgggagtcacgtggactactcaaattgggccccaggggagcccacgagccgctctcagggagaggactgcgttatgatgaggggctcaggccggtggaacgatgctttctgtgacagaaagttgggcgcctgggtgtgcgacagattagcaacatgcacgccaccggcttctgaaggatcagccgagtcgatgggccctgacagtcggcccgatccagacggaaggttgccaactccctccgcgcccctccatagctag

SEQ ID NO: 15179 - DNA, 963 bp, synthetic construct
  misc_feature 1..963: note = Description of Artificial Sequence: Synthetic coding sequence
  source 1..963: mol_type = other DNA
atgaatccaccaagtcaggagattgaagaattgcctaggaggagatgctgcagaaggggcacccagattgttcttttaggcctagtcaccgcagccctgtgggctgggttgttaaccctcctgctactttggcactgggacactacccagtcactgaaacagctggaagagcgcgcggcacgtaatgtttcacaggtgagcaagaacctggaaagtcatcatggggatcagatggcacagaagtcacagtccacccagatttcacaagagctcgaggagttacgtgcagagcagcaacgattaaagagccaggatttagagttaagctggaatctaaacggactacaggctgacctgagttcttttaaatcacaagaactgaatgaaagaaatgaggcatccgatctccttgagcgattgcgcgaagaggtcaccaaactgaggatggagctgcaagtgtcaagtgggttcgtgtgtaacacatgtcccgagaagtggattaattttcagcgcaagtgctactacttcggcaaaggtaccaagcagtgggtgcacgctcggtacgcttgcgacgacatggaagggcagctggtgtcaatccacagtcctgaggagcaggatttccttactaaacatgcgtctcacacaggtagttggattggcctccgcaacctggatctgaagggagaatttatctgggtagacgggagccatgtcgattattcaaactgggcacccggagagccaacctcccgctctcagggtgaggattgtgtcatgatgcgaggaagcggacggtggaatgacgctttttgcgaccgcaagttgggcgcctgggtgtgcgataggctggctacatgtacaccacctgcatcagaagggagtgccgaatccatgggccccgactccagacccgaccctgatgggaggctcccaactccctctgcccctctgcattcctag

SEQ ID NO: 15180 - DNA, 1125 bp, synthetic construct
  misc_feature 1..1125: note = Description of Artificial Sequence: Synthetic coding sequence
  source 1..1125: mol_type = other DNA
atgtggtttcttacgaccctcctgctgtgggtaccagttgatgggcaagtcgatactactaaagccgtgattaccctccagcccccgtgggtgagcgtcttccaggaagagacagtgacactgcactgtgaggttctgcatcttcccgggtcctccagcacccagtggttcctgaatggaactgcaacacagacctccacaccgagctaccgaatcacgtccgcctctgtcaacgactcaggtgagtaccgctgccaacgtggattgtcaggccggagtgatcctatacagctagaaatccaccgggggtggctcctgctgcaagtttctagccgggtgttcacggaaggagagccacttgcccttaggtgccacgcgtggaaagataaactagtgtacaatgtgctctactaccgtaatggtaaggccttcaaattcttccactggaacagcaatcttaccattttgaagacaaatatctcacacaatggaacttatcactgttctgggatgggcaagcaccgttacacctcagccggaatcagcgttaccgtgaaggagctcttccccgcaccggtgttgaatgcctccgtgacatccccactgttagaggggaatctcgtcacccttagctgtgagacaaagctgctcctgcagagacccggtcttcagttgtatttctctttctatatgggtagcaaaacgctgagaggtagaaatacctcatcagaataccagatcctcacagcgcggcgggaagattcaggactgtactggtgtgaagcagccaccgaggatggcaacgtgttgaaaaggagtcctgaactagagctccaggtccttggacttcagctgccgacgccggtgtggtttcacgtgctcttctacctggctgtcggcatcatgttcctcgttaatactgtcctgtgggtgacaatccggaaggaactcaagcggaaaaagaagtgggatcttgaaatctcattggatagcgggcatgagaagaaggtcatctcatctttacaggaggaccggcacttagaggaagagcttaagtgtcaagaacagaaagaggagcagctgcaagaaggggtccatcggaaggagccccagggagcaacatag

SEQ ID NO: 15181 - DNA, 723 bp, synthetic construct
  misc_feature 1..723: note = Description of Artificial Sequence: Synthetic coding sequence
  source 1..723: mol_type = other DNA
atgtggtttctgacgacgctgctgctgtggggatggctcctgctgcaggtgtcttctagagtgtttaccgaaggggaacccttggccctgagatgtcacgcttggaaggataagctcgtttataacgttttgtactatcgcaacggtaaggcattcaaattctttcattggaacagcaatctgactatcctgaagaccaatatatcacacaacggaacctaccactgcagcggcatgggaaaacacaggtacacaagcgctgggataagcgtcaccgtgaaggagcttttccctgccccagtcctgaacgcgtccgttacgagcccgcttctcgagggcaatctggtgactctttcctgcgagactaagctccttcttcagcggcccggacttcagctctatttttccttctacatgggatccaagactctccgtggaaggaacacctcttctgagtatcaaattctgactgcccggagggaagactcaggtctctactggtgcgaggcagccacggaagacggcaatgttctgaagagatcacccgaactcgaactacaagtgctgggcctgcagctgccgacacctgtctggttccatgtcctgttctaccttgctgtggggatcatgttcctcgtgaacactgtgctgtgggtcactatacgtaaggagctcaaacggaagaagaaatgggatctggaaatttccctcgatagtgggtag

SEQ ID NO: 15182 - DNA, 2469 bp, synthetic construct
  misc_feature 1..2469: note = Description of Artificial Sequence: Synthetic coding sequence
  source 1..2469: mol_type = other DNA
atgggcttctctagtgagctttgctcccctcagggccatggcgttctgcagcagatgcaagaggcggaactgaggttgctagagggcatgcgaaagtggatggcccagagggtgaaatctgaccgggagtatgccggattgctgcatcacatgagtctgcaggatagcggcgggcaaagcagagcaatctctccggatagcccaattagtcaatcctgggcggaaatcacgtcccagaccgagggactgtcacggctactgcggcagcatgctgaagatctgaacagcggcccactctccaagctttcattactcattcgggaaagacagcaactgcgcaaaacatacagcgaacaatggcaacagcttcagcaggaacttacaaaaacacattcacaagatatcgaaaagctaaaatcccagtaccgcgcactcgccagagatagtgcccaggcaaaacgcaaatatcaagaggcctctaaggataaggacagggacaaagccaaggacaagtatgtgcgaagcctgtggaaattgtttgcccaccacaatagatatgtcttgggcgttagggctgctcagttacaccatcagcatcaccaccagttgctgctcccaggcctccttagaagcttgcaggacttgcacgaggagatggcttgtattcttaaagaaatcttgcaggagtatctggagatttcttctctcgtccaggacgaggtcgtggcaatccatcgggagatggcagccgcagcggctagaatccaacctgaggccgagtaccagggattccttcggcaatatggaagtgcacccgacgtaccaccttgcgttactttcgacgagtcccttctcgaagagggggagcctctagagcccggcgagctacagcttaacgagcttaccgtcgaatctgtccaacacacgctgacaagtgtgaccgatgagttggcggtggctacagagatggtcttcaggcggcaggagatggtgactcagttgcagcaggagcttaggaatgaagaggagaacacacacccacgggaacgggttcagctcctgggaaagcggcaggtgcttcaggaggccctacaggggctgcaggtggcgctctgcagccaggcaaaactgcaggcccagcaggaactgttgcaaaccaagctcgagcatctcggtccaggagaacctccccccgtcctacttctgcaggacgatcgacactccacctcttcttctgaacaggagcgtgaagggggaagaacgcccacattggaaattctgaaatcccatatctctgggatttttcgaccgaaattctcactgccaccccccctacagctcattccagaggttcaaaaacctctccatgaacagttgtggtaccacggcgcaatacctagagccgaagtagcggaactgctggtccacagtggcgacttcttggtccgggaaagtcagggcaaacaagaatacgtgctcagcgtcttgtgggacggactcccgaggcattttatcatacagagcctggataacctgtacaggctagagggcgaaggatttccctctatcccactgttgatcgaccatctgctgtccactcagcaaccgctgaccaagaagtcaggcgttgttcttcacagagcggtgcctaaggataagtgggtcctgaatcacgaggacctggtgttgggggagcagataggccgcggtaactttggtgaggtattcagcggacgtctgcgcgccgacaacacgctggtagctgtgaaatcttgcagagagaccctgccaccagatctgaaagctaagttcctgcaagaggcacgcatccttaaacaatactcacatccgaatatcgttaggctcattggggtctgtactcaaaagcagcccatatatatagtcatggagttggtgcagggaggtgatttccttacatttctccgaacagaaggagctcggctccgagtcaagacgttgctccaaatggtaggcgatgcagcagctgggatggagtatctggagagtaaatgctgtatccatcgcgacctagccgcccgaaattgcttggtgacagagaaaaatgtgttgaaaatctctgactttgggatgtctcgcgaggaggcagacggagtctatgccgcaagcggcggactgcggcaggtgccagtgaaatggacagccccagaagctcttaattatggccggtactctagcgagtccgacgtttggagctttgggattttgctatgggaaacctttagtcttggggcctctccttaccccaatctatctaatcagcagactcgggaatttgtggagaaaggaggcaggctaccctgcccagaattatgtccagatgcagtgtttcgactcatggagcagtgctgggcttatgagcctggccagcggccctccttctctacgatctatcaagaactgcaatccataagaaagagacacaggtag

SEQ ID NO: 15183 - DNA, 2295 bp, synthetic construct
  misc_feature 1..2295: note = Description of Artificial Sequence: Synthetic coding sequence
  source 1..2295: mol_type = other DNA
atgggttttagttcagagctgtgctccccgcaaggacatggcgtactgcagcagatgcaggaagcagaattgcgcctcttggagggaatgagaaagtggatggctcaaagagtgaagtcagatagagaatacgccgggctcctgcatcacatgtctctgcaggactcaggaggtcaatcccgggcaattagccccgacagccctatttctcagacacattcgcaggatattgaaaagctcaaatcgcagtatcgcgcgcttgcccgagattctgcccaggcaaagcggaagtaccaggaggccagcaaagacaaggatcgggacaaggcgaaggataaatacgttcggtcgctgtggaagttgttcgcacatcataaccgttacgttctgggcgttcgggccgcccagctacatcaccaacaccaccaccagttgttgctgccgggcctcctccgaagtctgcaggacttacacgaagagatggcttgtattcttaaggagatccttcaggaatatttggaaatcagttccctggtccaggatgaggttgtcgccatacaccgtgagatggccgccgccgctgcccgtatccaaccggaggcagaataccaagggttcctgagacaatatgggtccgcacccgacgttcccccctgtgtgactttcgacgagtcactgctggaagagggcgagccgctggagccaggtgaattgcagctgaacgaactcactgtcgaaagcgtacagcatacacttacttcagtgactgatgagctagccgtagccaccgaaatggtctttcggagacaggaaatggttacacaactgcagcaggaactcaggaacgaggaggagaacactcatcctcgggaacgggtgcagctcctaggcaagagacaagtgctgcaggaagccctgcagggtctgcaggtagccctgtgctcccaagctaagcttcaagcccagcaggaactgctacagacaaaattggagcatcttgggccaggggaacccccaccagtgctgctgcttcaagacgacaggcacagtactagcagcagcgagcaggaaagagagggcggcagaacacctactctcgagatcctcaagtcacacatatctgggatcttccgaccaaagttcagcttgcccccccctctgcagctcatccccgaggttcagaaacctctgcatgaacagctttggtatcacggcgcaatccctagagccgaggtagctgagctcctagtgcactctggagactttttggtccgcgagtcacagggcaagcaggagtatgtgctatccgtcctgtgggatggtcttccacggcattttatcatacagtccttagacaatctgtatcgactagagggggagggcttcccatcaattccactgttgattgaccatctgctcagcacccagcaacctctcacaaagaagagcggcgtggtgttacacagggcagtgcctaaagataaatgggtgctgaaccatgaggatttagtgttgggggagcaaattgggaggggcaactttggggaggtcttctctggcagactcagagcggacaacacactcgtggctgtcaaatcctgcagagagacgctgcccccggacctgaaggcaaagtttctgcaggaagcccgcatactgaagcagtactcccaccctaatattgtacggctgattggagtctgtacgcagaagcagcccatctatatcgtgatggagctggtacagggcggagactttctcacgtttctccgaacagaaggtgcccggctgcgcgtgaaaactctcctgcagatggtgggtgatgccgccgccggaatggagtaccttgagagtaagtgctgcatccacagggatttggcagcgaggaactgcctcgtcaccgagaagaacgtgctgaaaataagtgatttcgggatgtctagagaggaagcggatggggtgtatgcggcatccggcggcctgaggcaggttccggtcaagtggaccgcacccgaagctttgaattatggccgatattcgagtgaaagtgatgtgtggtcttttggtatactgttatgggaaacattcagcctgggtgcctccccctatcccaacctcagcaaccagcagactcgggagttcgttgagaaggggggacgtttgccctgtccggaactgtgccccgacgcagtttttcggctcatggagcagtgctgggcatatgaaccgggacagcggccctccttcagcaccatctatcaggaactccagtcgatccgaaaacgccatcgctag

SEQ ID NO: 15184 - DNA, 2046 bp, synthetic construct
  misc_feature 1..2046: note = Description of Artificial Sequence: Synthetic coding sequence
  source 1..2046: mol_type = other DNA
atgggatttagcagcgagttatgctcacctcaaggtcacggtgtcttgcagcagatgcaggaagctgagctccggctactcgaaggaatgcgaaaatggatggctcagagggtcaaaagcgatagggaatatgccgggctgctgcatcacatgagccttcaagacagcggcgggcagtcccgagcaatatcacccgactcacccatctcccagacccacagtcaggacatcgagaaactcaagagccagtaccgggccttagcacgggattcagcacaggctaaaagaaagtaccaggaggcctccaaggacaaagatcgggacaaagccaaagacaagtatgtgcgcagtctgtggaagctcttcgcccaccataatcgctacgttttaggggtcagagccgctcaactccatcaccagcatcatcatcagctcctcttgcctggcctgttgcgtagccttcaggatctgcatgaagagatggcctgtattctgaaagaaattctccaggagtatctcgaaattagttccctcgttcaagatgaggtggtggccatacatagagagatggccgccgccgccgcccgaatccagcccgaggctgaatatcagggctttctgcgacagtacggctccgcacctgatgtgcctccgtgcgtcaccttcgatgagtcacttctagaggaaggggaacccttagagcctggagagctgcaactcaatgaacttactgtcgagagcgtgcaacacactctcacatctgtcactgatgaactggctgtggcaaccgagatggtatttaggaggcaggagatggtaacccagctgcaacaagaactgagaaacgaggaggaaaatacgcaccccagagagagagtccagctgctcgggaaaaggcaggtgttacaggaagctctgcagggtctccaagtcgcgctctgctcacaggccaaattgcaggcacagcaggagttactacagaccaaactagaacatctgggacctggtgagcctcctccagtcttattgctccaagacgatcgtcactctacctccagcagtgagcaggaaagagaaggcggacgcacccccacactcgaaatactcaagagtcatatctccggaatttttcgacccaagttttcaaacctctatagactcgaaggcgagggttttccatctatcccgctgctgattgaccacttgctgtccacacagcagcctctcactaagaagtctggcgtcgtgttgcaccgcgctgtgccgaaagacaagtgggtgttaaaccacgaagaccttgtcctgggggaacaaatcggccgtggaaattttggcgaggtattctcagggcggctgagagcagacaacacactggtcgccgtgaaatcttgcagggagaccttgccccctgaccttaaagccaagtttcttcaagaagccagatcttccccatctacatccagctggtccctctgtcgcgggtcttctcctcccgctggcggcgatttcctcacatttctgcgcaccgagggagcaagactccgagtgaagaccctgctgcaaatggtcggggacgccgcagctggaatggagtacctcgaatccaaatgttgcattcatagggacctggctgccagaaactgcctggtcacagagaaaaatgtcttgaagattagcgattttgggatgtcaagagaggaagccgacggagtctacgctgcctcaggagggctgcggcaggttccagtcaaatggacggcaccagaggccctgaactacggacgatatagctcggagagtgatgtgtggtcattcggcattctactgtgggaaacattctctcttggggccagtccataccctaatctgtccaatcagcaaacccgcgagttcgttgagaagggcggaaggctgccctgccctgaactctgccccgatgccgtattcaggttgatggaacagtgctgggcctacgaaccgggccagagaccctccttttcaactatctaccaggaacttcagagcatccggaagcgtcatagatag

SEQ ID NO: 15185 - DNA, 2085 bp, synthetic construct
  misc_feature 1..2085: note = Description of Artificial Sequence: Synthetic coding sequence
  source 1..2085: mol_type = other DNA
atggggttttccagcgaattgtgtagtcctcagggtcacggggtacttcagcaaatgcaggaagcggaactgaggctactcgaagggatgagaaagtggatggctcaacgcgtgaaaagcgatagggaatatgctggactgctccatcatatgagtctgcaggattctggggggcagtctcgggcaatctctccagattcaccgatcagccagacgcatagccaggacatagagaagctcaagtcccagtaccgtgctctggcccgcgatagtgctcaggccaaaagaaagtaccaggaagcaagtaaggacaaggaccgcgataaagccaaagataaatatgtaagaagcctttggaagctcttcgcacatcataatcgctacgtgctcggagttcgcgccgcccagctgcatcatcagcatcatcatcagttgttgctgccggggctcctgaggtctcttcaggatctacatgaggagatggcatgtatcctaaaagaaatactacaggaataccttgaaatcagcagtctggtccaggacgaggtcgtcgcaatccacagggagatggctgctgctgccgctaggatccaacctgaagcagaatatcaggggtttctgaggcagtacgggtccgctccagatgtgcctccctgtgttacattcgatgaatccttgctggaggagggggaacccctcgagccaggtgagctccagttaaacgagctgaccgtagaatctgttcaacataccctcacctcggtgacagatgagctggcagttgccaccgagatggtctttaggagacaggagatggtgactcagctgcagcaggaattgcggaatgaggaggagaacactcacccacgggaacgtgttcaactcttgggcaaaagacaggtgttacaggaggctttacaggggttgcaggtggcgctttgttcacaggctaaacttcaggctcagcaggagctgctacagacaaagctggagcacctgggacctggggaaccgccacctgttctcctgctgcaggacgatcgccactccacatcgagctcagagcaggagcgcgagggaggcagaactccgacccttgagatcctcaagtctcacatttccggcatatttaggcccaagttcagcaacctgtatcgcctggagggagaaggattcccatccatcccattgttaatagaccatctgctgtccacccaacagccacttaccaagaaatcaggcgtggtgctccatagggctgtcccaaaggacaaatgggtattaaaccacgaggatttagttctcggagaacagattggtagaggcaattttggtgaggtattcagcgggcggctgagagctgacaataccttggtcgcggtgaagtcgtgcagagaaactcttccaccagacctgaaagcaaaatttttacaagaggcgagaattctgaaacagtatagccatccaaatatcgtccggttaattggcgtatgcacccaaaagcagccgatatatattgtaatggaattggtgcagggaggagacttcctcacattcctccgaactgaaggcgccagactcagagtcaagacactgctacagatggttggggatgctgctgccggtatggaatacctggagtcgaagtgctgtatccatcgagaccttgcggctagaaattgtctcgttactgagaaaaatgtgttgaagattagcgacttcggcatgtctcgggaagaggccgacggtgtgtatgcagccagtgggggactgcggcaagtgccagtgaagtggacagctcccgaagcgctgaattatggtagatattcaagcgagtcagacgtgtggagttttggaatcctcctttgggagactttttccctcggcgccagcccttaccccaacctgagtaaccagcaaaccagagaattcgtggagaagggtgggcggctgccatgcccggaactttgtccggacgcggtattccgtctgatggagcagtgttgggcctacgagcccgggcaacgaccttctttctctaccatttaccaggaactgcagagtattagaaagcggcatcgttag

SEQ ID NO: 15186 - DNA, 129 bp, synthetic construct
  misc_feature 1..129: note = Description of Artificial Sequence: Synthetic coding sequence
  source 1..129: mol_type = other DNA
atgggcttctcttccgagctgtgtagtccccaggggcacggcgtgctgcagcagatgcaggaagccgaattgcgactcctcgagggaatgcggaagtggatggcacagagagtcaaaagtgaccgctag

SEQ ID NO: 15187 - DNA, 348 bp, synthetic construct
  misc_feature 1..348: note = Description of Artificial Sequence: Synthetic coding sequence
  source 1..348: mol_type = other DNA
atggggttcagcagtgagctgtgctctccacaaggccacggcgtcctccagcagatgcaagaagccgaacttcgcctgctggaaggcatgcgaaaatggatggctcagagggtgaagagtgatagggagtacgccggcctcttacaccatatgtcattgcaggattcaggaggtcagtcccgtgctatctcgccagatagtcccattagtcagagttgggcagaaatcactagccagactgaaggattaagtcgtcttctcaggcagcacgcggaggatctgaattctggcccgttgagtaaactctcacttttgattagagagcggcagcagttgcgtaagacctag

SEQ ID NO: 15188 - DNA, 2259 bp, synthetic construct
  misc_feature 1..2259: note = Description of Artificial Sequence: Synthetic coding sequence
  source 1..2259: mol_type = other DNA
atgggattttcgtctgagctatgctcccctcaaggacacggcgtgttgcagcagatgcaggaagccgagctacgcctgctggagggaatgcggaaatggatggcgcagagggtgaaatccgaccgagaatatgccggactcctgcatcatatgtctctgcaagattctggcggccagtctcgggccatctcaccagattccccgatctcccagtcgtgggccgaaattacttcccaaacggaaggcctctctcggcttcttagacaacacgcagaggaccttaattcaggcccacttagcaaacttagcctgctgatccgggagaggcagcagctcagaaagacctattcagaacagtggcagcagctgcagcaggagctgactaagacacacagtcaggacatcgagaagttgaagtctcaataccgggccttggctagagacagtgcccaggctaaaagaaagtaccaggaggcttccaaagataaggacagagacaaggctaaagacaagtatgttaggtccctgtggaagctcttcgctcaccacaacagatacgtgctgggtgttcgcgccgcccagctccatcaccagcaccaccaccagctcttacttcctggccttctccgcagcctgcaggacctgcatgaagaaatggcgtgcattttgaaagagatcctgcaggaatacctggaaattagctctctggtgcaggacgaggtagtggcaattcaccgtgagatggcagctgccgccgcaagaattcagccagaggcagagtaccaggggttcttgcgacagtacggctccgcccctgacgtcccaccttgcgtgacattcgacgagtctctgttggaagaaggcgaaccattagagcctggggagctgcagctaaatgagctgacagtggagtccgtacaacacacactgacttctgtgacggatgaactggctgtcgctacggagatggtttttaggaggcaggagatggtgactcagctgcaacaggaactgagaaatgaagaagagaatacccaccctcgagaaagagtccagctgttgggcaagcgacaagtcctgcaagaagccctgcagggcctgcaagtggccctgtgttcccaggctaagctccaggcgcagcaggaactcctgcaaacaaaactagaacatctcggcccaggtgagccaccaccagtactgctgctacaggatgatcgccatagcacaagctctagtgaacaggagagagagggcggacgtactcccaccttggagatcctgaaatcccatatctctggtatattcaggcccaagttctctaatctttacaggctagagggcgagggcttccctagcatacccctgctcatcgatcaccttctttctactcagcagcccctgaccaaaaaatcaggcgtggtgttgcatagggcagtcccaaaggataagtgggtgctgaaccatgaggacttagtcctgggcgaacaaatcgggcggggaaatttcggagaggtgtttagcggcaggttacgcgccgacaacactttggtggcggttaagagctgtagggagacgctccctcctgacttaaaggctaagtttcttcaggaggcccggatattaaaacagtactcacatccaaacatcgtcaggctcattggtgtttgtacacagaagcagcctatttatatagtcatggaattagtgcaaggtggcgacttcctcacgtttctgcggacagaaggggcacggctgagggttaagacacttctccagatggtcggcgatgccgccgcgggtatggagtacttggagtcaaaatgctgcatacatagggacctggctgctagaaactgcctcgttaccgaaaagaacgtccttaaaatttccgactttggtatgagtagggaggaggccgatggtgtatacgctgcatcgggcggactgaggcaagttccagtcaagtggaccgctcctgaagccctcaattacggaagatattcatccgagtctgatgtgtggtcctttggcatccttttgtgggaaactttttccctcggtgcctcaccataccccaacttgagcaaccagcagacaagggagtttgtggagaagggtggtcggctcccgtgcccagagctctgtcctgacgctgtcttcaggcttatggagcagtgctgggcttacgaaccaggtcagcgaccatcgttcagcaccatctaccaagagcttcagagcatcaggaagcgccacaggtag

SEQ ID NO: 15189 - DNA, 2085 bp, synthetic construct
  misc_feature 1..2085: note = Description of Artificial Sequence: Synthetic coding sequence
  source 1..2085: mol_type = other DNA
atggggtttagctcagagctctgcagtcctcaggggcacggtgtgctgcagcagatgcaggaggcagagctgaggctcctcgagggcatgagaaagtggatggctcagagagttaagtccgaccgggagtacgctggactactgcatcacatgagcttgcaggatagcggcggtcagtcaagagccatctcccccgatagcccaatttcgcagacacacagccaggacattgaaaaactgaagtcccagtaccgggcgttggccagagacagtgcacaggcaaaaaggaagtatcaggaggcatcaaaggacaaagacagagacaaggccaaagacaagtacgtaagaagtctttggaagctattcgcacaccacaatcgttatgtactgggggttagagctgcccaactgcaccatcagcaccatcaccagctgcttttaccaggcctgttacggtcactccaggatctgcatgaagagatggcctgtatactgaaggagattctccaggagtatctcgaaatctcctccctagttcaggacgaggtggtcgccatacacagagagatggccgctgcggccgccagaatccagccagaagcagaatatcaggggtttctgaggcagtatggctctgctccagatgtgcctccctgcgtgactttcgacgagagcctgctggaagagggagagccattagaaccaggcgagcttcaacttaacgaactaacagtcgagagtgtgcaacacactctgacatccgtgaccgacgaactagccgtggcaacagagatggtgtttaggcggcaggagatggtgacccagctccagcaagagctgagaaatgaagaggaaaatacgcaccctcgtgagagagtgcaactactgggcaaacgccaagttcttcaggaagctctccaagggttgcaggtcgcgttgtgctctcaggcgaagcttcaggctcagcaggagttactccaaactaagctggaacacctgggtcctggcgaacctccacccgtactgttactccaggacgatcgtcactctaccagttccagtgaacaggaacgcgaggggggccgtacgcctaccctggagattctcaaatcccacatcagtgggatctttaggcccaagttcagcaatctgtataggttggaaggggagggttttccaagcattcccctgctgattgatcacctgctcagcacgcagcagcccttgaccaaaaagtctggtgtggtccttcacagagccgtgccgaaggataagtgggtgctaaatcatgaagacctcgttctgggagaacaaattgggaggggcaatttcggtgaagtattttctggacggctgagagcagacaataccttggtggccgtcaagtcctgccgggaaacactgcccccggatctgaaggcaaaatttcttcaggaggctagaatcctcaaacagtatagccaccctaatattgtcagacttatcggcgtctgcacacagaaacagccaatctacattgtcatggagctggtacaaggtggcgactttctcaccttccttcgaacagagggggcccgcctcagagttaaaacactcctccagatggttggtgatgctgcagctggtatggagtacctggagtctaagtgttgtattcatagggatctggctgctcggaactgccttgtaactgagaagaacgtcctgaagatttccgattttggcatgtccagagaggaagctgatggtgtctatgcagcctctggcggattgcgacaagtgcccgtcaaatggaccgctccagaggccctaaactatggcagatactcctctgaaagcgatgtgtggtcattcgggatcctgttgtgggaaacattctcgctcggcgcttctccgtacccaaatctttcaaaccaacagactagggagttcgtcgaaaaaggcgggcgactgccatgtcctgagctttgcccagacgctgtcttccgcctgatggaacagtgttgggcctatgaaccaggccagaggccttcatttagcacaatctatcaggagttacagagcataagaaagaggcaccgatag

SEQ ID NO: 15190 - DNA, 444 bp, synthetic construct
  misc_feature 1..444: note = Description of Artificial Sequence: Synthetic coding sequence
  source 1..444: mol_type = other DNA
atgggctttagcagcgaactgtgcagtcctcagggccatggggttcttcagcagatgcaagaagcagagctgaggctcctggagggcatgaggaagtggatggctcagagagtgaaaagcgaccgtgagtacgcagggttgctgcatcacatgtctctgcaggattccggaggacagtctagggccatatcaccagacagtcctatttcgcaaagctgggccgagatcacatcacagacagagggcttgtcaaggctgctccggcagcacgctgaggacctcaacagcggacccctgtctaaactctcgctcctgatcagggaacggcaacagctgcgcaaaacttacagtgaacaatggcagcaattacaacaggaactaaccaagacccattcccaagatatcgaaaaacttaaatcccaatacagagccttggctcggtag

SEQ ID NO: 15191 - DNA, 1638 bp, synthetic construct
  misc_feature 1..1638: note = Description of Artificial Sequence: Synthetic coding sequence
  source 1..1638: mol_type = other DNA
atgggtttttcttcagaactctgttcgccacaggggcatggcgttcttcaacagatgcaagaggccgaactaagactcctggagggaatgcgaaagtggatggcccagcgggtgaaatctgaccgggaatatgccggattactgcatcatatgagtctgcaggatagcgggggccagtctagagcaatttccccagattcaccaatcagccagagctgggctgaaatcacgagccaaaccgagggactttcacgactactcaggcagcacgccgaagacctcaactctggacctctgtctaagctaagtcttctcatccgggaaagacagcagctgcgcaagacttattccgagcagtggcagcagctgcagcaggagctcaccaaaacccattctcaggacatagaaaagttgaaatcccagtatcgggctctggcgcgggattccgcccaggccaaacgaaagtatcaagaagcatcgaaggataaagatcgggataaagccaaagacaaatatgtgagatcgctgtggaagctgtttgctcaccacaaccgatatgtgctgggcgttcgggctgcacagctgcatcaccagcatcatcaccaactcctcctgcctgggctactacggtcactgcaggacctccacgaggagatggcatgtatcctcaaagagatcttacaggagtatctggaaataagttcactggtgcaggacgaagtcgtggccatacatcgagagatggccgcagccgccgctaggattcagccggaggcagagtaccagggcttcttgcggcagtatgggtccgctccagacgtgccaccgtgcgtgaccttcgatgagtccctcttggaggagggtgagcctctggagcccggcgagctgcagttgaacgagctgaccgtggaaagtgtgcagcacacattaacaagcgtgaccgacgagctggctgtggccacagagatggtgtttcgacgccaggagatggtaacacagctgcagcaggaattaaggaacgaggaggagaacacacaccctagggagagggtacagctattgggtaaacgtcaggtgttgcaggaagccctgcagggcctccaggtcgccctttgttcccaggccaaattgcaagcccaacaggaattgttgcagaccaaactcgaacacctaggaccaggcgagccacctcccgtacttctgctccaggacgaccgacattctacctcctcctcggaacaagagcgtgagggtgggcgcaccccaactttagagattctgaaatctcacatttccgggatcttccgcccaaagttctcccttcccccacctctgcagctgattcccgaggttcagaagcctctgcatgagcagctgtggtaccacggagcaattccaagggccgaagtagccgaactgctggtgcatagcggcgacttcctggtccgggaaagtcaaggcaaacaggagtacgtgctgtcagtgctctgggatgggctgccgagacacttcatcatccaggctcacgcaccttcagaatggaggctgctgacccccggacccctgccctgcaggacctgtaccgactggaagggcaaagcattcttagccttcctctgctcatctaccacctactag

SEQ ID NO: 15192 - DNA, 366 bp, synthetic construct
  misc_feature 1..366: note = Description of Artificial Sequence: Synthetic coding sequence
  source 1..366: mol_type = other DNA
atgggattttcatccgagctgtgctcaccccaggggcacggagtactccagcagatgcaagaggcggaactccgactgttagaaggtatgagaaagtggatggcccagagagtgaagtcagacagggagtatgctggcctcttacaccacatgagccttcaagactctggggggcagagcagagctatctcgcctgattccccaataagtcaggtgggcctgtatgggactttagtgggggctggatgtatttgcttgctacttcccctgctgggagccttatgggggtcgggatggaggagcggaaggcctatgttgggtagccactgcgcaccactccctgcttcacctatctgtgcagtttag

SEQ ID NO: 15193 - DNA, 510 bp, synthetic construct
  misc_feature 1..510: note = Description of Artificial Sequence: Synthetic coding sequence
  source 1..510: mol_type = other DNA
atgggtttctcttccgagctgtgctcaccccagggccacggtgtactacaacagatgcaagaggccgagctacggctcctggaaggaatgcggaagtggatggcccagcgggtcaaatcagatagggaatatgccgggctcttgcatcatatgagtctgcaggattctggcgggcagagtcgggcaatctcccccgattccccgatctcacagtcatgggctgagataacctctcagacggaggggttgtcacggcttctgaggcagcatgctgaggatctcaattcaggcccgctgagcaagctgtctctgctaattagggagcgacagcagctgagaaagacctacagtgagcaatggcagcaattgcaacaggagctgactaaaacacactcacaggacatcgagaagctgaagagccaatatagagctttggccagagatagtgcacaggccaagcgaaagtatcaggaagccagcaaggacaaagaccgagacaaagcaaaatag

SEQ ID NO: 15194 - DNA, 2283 bp, synthetic construct
  misc_feature 1..2283: note = Description of Artificial Sequence: Synthetic coding sequence
  source 1..2283: mol_type = other DNA
atgaagacatgggtcaagatcgtgtttggcgtggcaacaagcgcggttctggcgcttctcgtgatgtgcatcgtgctgcgtccctcccgggtgcacaattcagaagaaaacaccatgcgtgctttgacattaaaggatattctgaatgggactttcagctacaaaaccttttttcctaactggatctccggacaggaatatctacaccagtctgctgacaataatatcgttctgtataatatagagactggtcagagctacactatactctcaaacaggacaatgaagtctgttaatgcctctaattacgggctcagtccagatagacaattcgtgtacttagaatccgactacagtaaattgtggagatatagctatacggccacttattacatctatgatctgagtaacggcgaatttgttcgcgggaatgagttgccgcgtccaatacagtatctgtgttggtctcctgttggttcaaaactcgcctacgtataccagaacaacatctatctcaaacagcgcccaggcgacccccccttccagattaccttcaatggacgcgagaataaaatttttaacgggattcctgactgggtgtacgaggaagaaatgctcgctactaagtatgcgctgtggtggagccccaacgggaagtttctcgcatacgctgagttcaatgacacagacatcccagtgattgcatactcctattacggcgacgaacagtaccctcggaccattaacataccctatccgaaggctggggcgaagaaccccgtggtgcggatctttatcattgataccacctaccccgcctacgtgggtcctcaggaagtgccggtgccagcgatgatcgcatcgtctgattattacttcagctggttgacatgggtcacggacgaaagagtgtgcttacagtggttgaagagagttcagaatgtatccgtgctttccatctgcgacttcagggaagactggcagacatgggattgcccaaaaacccaggagcacattgaagagtcgaggacaggctgggcaggcggattctttgtttccacgcccgtgttttcgtacgacgccatcagctactataagatattcagcgacaaagatgggtacaagcacattcattacattaaagacacagtggagaatgcaattcagattacgtctgggaagtgggaggctattaacatcttcagggtcactcaagattcactcttctatagttccaatgagttcgaggagtatcccggtcgccgcaacatttataggatctcaataggaagttatcccccgagcaagaagtgtgtcacatgtcacctaaggaaggaacggtgtcagtattacacagcttcgttctcagactacgccaagtattacgccctggtgtgttacggccccggaattcccatatcgactctgcatgacgggaggaccgaccaggagatcaaaattttggaagagaacaaggagctcgaaaacgcactgaagaatattcagctgcccaaggaagagatcaaaaagcttgaagttgacgaaatcacactttggtacaagatgatcttacctccccagttcgaccggagcaaaaagtatccacttctgatccaagtgtatgggggcccatgttctcagagtgtgcgatcagtgttcgccgtgaattggatcagttacttggcgtctaaggaaggaatggtcattgctcttgtcgatggccgtggaacagcatttcagggcgataagctcctttatgcagtttacaggaaattaggggtttacgaagttgaggaccagattacggcagtgagaaaatttatcgagatgggtttcatcgatgagaagagaatagccatatggggatggtcttacggtgggtacgttagttctctcgcccttgcgtctggcactggactgttcaagtgtggcattgccgtggcccccgtcagctcctgggaatactatgccagtgtgtatacagaacgcttcatgggcctgcccaccaaggacgacaatctggaacattataaaaattcgaccgtaatggcacgcgccgaatatttcagaaacgtagactacctacttatccacggcaccgctgacgacaatgtacactttcagaactccgctcaaatcgccaaggccctggtcaacgcacaggttgactttcaagcgatgtggtacagtgatcaaaaccacggactgagcggcctcagtactaatcacctttacacgcacatgacgcactttttgaaacagtgttttagcctaagcgattag

SEQ ID NO: 15195 - DNA, 2208 bp, synthetic construct
  misc_feature 1..2208: note = Description of Artificial Sequence: Synthetic coding sequence
  source 1..2208: mol_type = other DNA
atgaagacttgggtaaagattgtttttggcgtggcaacatccgcagtcctggcgttactggtgatgtgtatcgtactgcggcccagtcgggttcataattctgaagaaaatactatgcgcgctttgacgctgaaagatatcctcaatggcacctttagctacaaaacattttttcctaactggatcagtggccaggaatatctgcaccaatctgcagataacaatatcgtcctctataatatcgagactggtcagagctacacgattttgtctaacaggaccatgctttggcgatattcatacactgcaacatactacatctacgatcttagtaacggagagttcgtgaggggaaacgaactaccccggccaattcagtacttgtgctggagccctgttggaagtaagctcgcctatgtgtaccagaacaacatctatctcaagcagagaccgggcgacccaccattccagattaccttcaacggtcgtgagaataaaatatttaatggcattccggactgggtctatgaggaggagatgctggccacaaaatacgccttgtggtggtcaccaaacggaaaatttctggcatatgcagagtttaatgacaccgacatccctgtgatcgcctattcatattatggagacgaacaatatcctcgcaccatcaatattccctatcccaaggctggggcaaaaaaccccgtagttcgtattttcattattgacaccacttaccctgcgtacgtggggccacaagaggtgccagtaccggccatgatagcttccagtgactactacttttcttggttgacctgggtaaccgatgaaagagtgtgcctgcagtggctcaagcgagtccagaatgtgagcgtactctctatctgtgatttccgcgaagactggcaaacatgggactgtccgaagacacaggagcatatagaggaatcaaggactgggtgggccggcggattcttcgttagcaccccagtgttctcgtatgacgccatcagttattataaaatttttagcgataaagatgggtataagcatatccattacataaaagacaccgtcgagaatgcgatacaaatcacctccggaaagtgggaggcgatcaatatattcagagtgactcaggattcactgttttatagctccaacgagttcgaggaataccctggccggaggaacatttatagaatctctattgggtcgtaccccccctcgaagaagtgcgtaacttgccacctccgtaaagagcggtgtcagtattacaccgcatcgtttagcgactatgccaagtattacgccctggtatgttacggacctggcattcctatttctaccctccacgacggcagaaccgatcaagaaattaagatactagaggagaacaaagagctcgagaatgcacttaaaaacattcaactgccgaaggaagaaattaagaagttagaagttgacgagatcaccctctggtataagatgatcttgccccctcagtttgaccgcagcaagaagtaccccctactgattcaagtgtatggcggaccctgctctcagtcagtccgtagtgtctttgccgtgaattggattagctatcttgcgtccaaggagggcatggtgatcgcgctcgtagatggccggggaaccgcattccagggcgataagttactctatgctgtttataggaagctgggcgtgtatgaagtggaagaccagataactgccgtgcgcaagtttattgaaatgggctttatcgacgagaagaggatcgccatatggggttggtcatacggaggatatgtgagctcactcgctctcgcctcagggacagggctgttcaaatgcgggattgcagtcgctccggtatcctcctgggagtattatgcctccgtgtacaccgaaagattcatggggctgcccaccaaggatgacaacctggaacattacaaaaacagcaccgtaatggcccgtgcagagtatttccgaaatgtggattatctcttgattcatggaacagccgacgacaacgttcatttccagaattctgcccaaattgcaaaagcccttgtcaacgcccaggtagactttcaggccatgtggtacagcgatcagaaccatggtttaagcggactctctactaaccacctctacactcacatgacgcattttctgaaacaatgcttctcactgagcgattag

SEQ ID NO: 15196 - DNA, 468 bp, synthetic construct
  misc_feature 1..468: note = Description of Artificial Sequence: Synthetic coding sequence
  source 1..468: mol_type = other DNA
atggccgagggcgaaatcaccaccttcacagcgttgacagaaaagttcaatctgccccctgggaattacaaaaagcctaagctcctgtattgctccaacggaggacacttcttgcgcattctaccagacgggaccgttgatggaacgcgcgacagaagtgaccagcatatccagcttcagctatccgctgagagcgtgggcgaagtgtatatcaagtccactgaaactgggcagtacttagccatggacactgacggcttgttgtacggaagccagactcccaatgaggagtgtttgttcctagagcgcctggaggagaaccactataatacgtacataagcaagaagcatgcagaaaaaaattggttcgtcggtcttaagaagaatgggtcttgcaagaggggcccgcggacacactatggacagaaagcaatcctgttcctccccctccctgtctcctcggactag

SEQ ID NO: 15197 - DNA, 468 bp, synthetic construct
  misc_feature 1..468: note = Description of Artificial Sequence: Synthetic coding sequence
  source 1..468: mol_type = other DNA
atggcggagggcgagataactacattcacagcactgacagaaaaattcaatctgcctccaggcaactacaaaaaaccaaaactgctttactgctctaatggtggccacttcctacgtatcctgcccgacggcacagttgatgggacccgcgatcgctccgatcaacatattcaactgcagctgagtgccgaatcagtgggtgaggtctatattaaaagtacggaaacgggccagtatctggccatggacaccgatggcttgctttatggcagtcagactcccaatgaagaatgcttattccttgagaggctcgaggaaaaccattataatacctacatttcaaagaaacatgcggaaaaaaattggttcgttgggctcaagaaaaacggctcatgcaagcgcggtcctcgcacacattacggacaaaaagcgattctctttctacctttgccggtgtcatccgactag

SEQ ID NO: 15198 - DNA, 468 bp, synthetic construct
  misc_feature 1..468: note = Description of Artificial Sequence: Synthetic coding sequence
  source 1..468: mol_type = other DNA
atggccgaaggggaaattactacatttaccgcactgaccgagaagttcaatttgccccccgggaattataaaaagccaaaactgttatattgttccaacggtggccattttttgagaattttgcccgatgggacagtcgatgggactagggaccgatccgatcagcacatccagctgcaattaagcgccgagagcgtcggtgaggtatatatcaagtcaaccgagacaggtcagtacctcgcaatggacacagacggactactgtacggaagtcagacccccaatgaagagtgtcttttcctcgaacggctcgaagaaaaccattataatacctatataagcaagaagcacgctgagaagaactggtttgtcggcctgaagaagaatggttcatgtaaacgagggccgagaactcactatggacaaaaggccattctgtttttgccacttcccgtatcgtcagattag

SEQ ID NO: 15199 - DNA, 177 bp, synthetic construct
  misc_feature 1..177: note = Description of Artificial Sequence: Synthetic coding sequence
  source 1..177: mol_type = other DNA
atggctgagggagagattactactttcactgcactcactgagaaattcaacctacctcccggaaactataagaaaccaaaactgttgtattgttcgaatggaggacattttttgcggatactacccgacgggacggttgacggcactagggacagatctgaccaacatattcaatag

SEQ ID NO: 15200 - DNA, 126 bp, synthetic construct
  misc_feature 1..126: note = Description of Artificial Sequence: Synthetic coding sequence
  source 1..126: mol_type = other DNA
atggccgagggagagatcacaacattcaccgctctgactgagaaattcaacttaccccccggaaactacaagaaacctaagctgctgtattgttcaaatggcggccactttctgcgaattctgtag

SEQ ID NO: 15201 - DNA, 468 bp, synthetic construct
  misc_feature 1..468: note = Description of Artificial Sequence: Synthetic coding sequence
  source 1..468: mol_type = other DNA
atggctgagggggagatcacaacctttacggccctcacagaaaaatttaacctccctccagggaactacaaaaaacctaagctgctgtattgtagcaatggcggccactttctgcggatcctgcctgacgggacagtcgacggcacgagagataggtcagaccaacacattcagctgcagctttccgcagagtctgtgggcgaagtgtacattaaaagcacggagaccggacagtacctggcaatggacacagacggattgctgtacggatctcagactcccaatgaagaatgcctttttttggaacgtctcgaagagaatcattataatacatacatctccaaaaagcacgccgaaaaaaattggttcgtcggactgaagaaaaatggatcttgcaaaaggggaccacgtacgcactatggccagaaggccatcctgttccttcccctgcccgtttcaagcgattag

SEQ ID NO: 15202 - DNA, 468 bp, synthetic construct
  misc_feature 1..468: note = Description of Artificial Sequence: Synthetic coding sequence
  source 1..468: mol_type = other DNA
atggccgagggcgagatcaccacctttaccgctcttaccgagaagtttaacctgcctccaggaaattacaagaaaccgaagctactttactgtagtaatggaggccacttcctgaggatactcccggacggtaccgtcgacggcacccgcgaccgttctgaccagcacattcagcttcagttgagcgctgagagtgtgggagaagtgtacatcaaatctaccgagacgggtcagtacctcgcgatggatacagacggactgctgtacggcagccagacacccaatgaggagtgcttgtttttggaaagactcgaggaaaaccactataacacttacatctctaagaaacatgccgaaaaaaactggtttgtcggtctcaaaaagaatgggagctgcaagcgaggccccaggactcattacgggcagaaagctattttatttctgcccctgccggtgtcaagcgattag

SEQ ID NO: 15203 - DNA, 183 bp, synthetic construct
  misc_feature 1..183: note = Description of Artificial Sequence: Synthetic coding sequence
  source 1..183: mol_type = other DNA
atggccgaaggagagatcaccacgttcacagcattaacagaaaagttcaatctccccccaggtaattataagaagcctaaactgctgtattgctccaatggcggccacttcctgcggatcctgcccgacggcactgtggatgggacgcgggaccgttccgatcaacataccgacacaaaatag

SEQ ID NO: 15204 - DNA, 627 bp, synthetic construct
  misc_feature 1..627: note = Description of Artificial Sequence: Synthetic coding sequence
  source 1..627: mol_type = other DNA
atgtggaaatggatattgacccactgcgcctcagcgtttcctcaccttccaggctgctgttgctgctgctttttgctgctgtttttggtgtccagtgtgccagttacttgccaggcccttggtcaggacatggtctcccccgaggccacgaattcaagctccagttccttttcctcacccagttccgctggcaggcatgtcaggtcatacaatcatctgcagggcgacgtccgttggagaaagctcttctcattcacaaagtattttctgaaaatcgagaaaaatggaaaagtctccggcaccaaaaaagagaattgtccttatagtattctggagattacttctgtcgaaatcggtgttgtcgccgtgaaagccatcaactccaactactatctagctatgaacaagaaggggaaactctatggctctaaagagttcaacaatgactgcaagttaaaagaacgcatagaagagaatggttacaatacctacgcttccttcaattggcagcataatggtagacagatgtacgtggcccttaacggcaagggcgcgccacgaaggggccaaaaaacacggcgtaaaaacacttctgcacacttcctccccatggtggtgcactcttag

SEQ ID NO: 15205 - DNA, 201 bp, synthetic construct
  misc_feature 1..201: note = Description of Artificial Sequence: Synthetic coding sequence
  source 1..201: mol_type = other DNA
atgtggaagtggattctcacacactgcgcctcagcctttcctcacttgcctgggtgctgttgttgctgcttcctgttgctgtttctagtctcaagcgtaccagtgacgtgtcaggctctgggtcaggatatggtctcccccgaagccacgaacagttcctctagcagtttcagcagtccatcatcagcaggccgccactag

SEQ ID NO: 15206 - DNA, 867 bp, synthetic construct
  misc_feature 1..867: note = Description of Artificial Sequence: Synthetic coding sequence
  source 1..867: mol_type = other DNA
ctggttggtgttgggggcggtgacgttgaggatgttaccccccggcctggtgggtgtcaaatctcaggccggggcgcacgagggtgcaacggcattcctggagccgctgcttgggaggccgcattgccgaggaggcgaccaagaagacacccaagtgttaaccccagaagccgggccgctggaagtcctcgcaccaggggaagacgcacggaagagagaccatccggctcccggctgggggatcggggccgcggcagggcactgccgggcggccgcctgggaggccggggcagaggacgcgcccccgagcgagtcggcgggcgcggccgcggccggggcactgctgccccaagggcggcgccagctgcaagaggatcacgccccggacccgctggaacaatggccgcgggaagcatcaccaccttgcctgcattgcctgaagacggcgggtcaggtgcatttccccccggccacttcaaggatccgaagagattatactgcaaaaacggcggattctttctgaggatccaccctgatggtagagtggatggagtgagggagaaaagcgatcctcatatcaagctgcagttgcaggctgaagaaagaggtgttgtgtccattaaaggtgtatgtgcaaatcgctacctcgccatgaaagaggacgggcgcctactggctagcaaatgtgtgacagacgaatgtttcttcttcgaaagattggagtccaacaactacaacacataccggagccgaaaatatacctcttggtacgtggcactaaaacggacgggacagtataaattgggatcaaaaaccgggcctggccagaaggccatccttttcctgccaatgagtgccaaatcctag

SEQ ID NO: 15207 - DNA, 585 bp, synthetic construct
  misc_feature 1..585: note = Description of Artificial Sequence: Synthetic coding sequence
  source 1..585: mol_type = other DNA
atgcacaaatggattcttacttggatactgcctaccttgctgtacagatcatgtttccatatcatatgtctcgtaggaaccattagcctggcatgtaatgatatgactcctgagcagatggcaactaacgtgaactgttcatcacctgagcggcatacacgcagctacgattatatggaaggcggcgacatccgggtccgccgcctgttttgtcgtactcagtggtacctccgcatagacaagcgaggtaaggtcaagggcacccaggagatgaaaaacaattacaacattatggagataaggactgttgcagtgggcatcgttgcaatcaaaggagtggagagcgagttttatcttgctatgaacaaggaaggcaagctttatgcaaaaaaagaatgcaacgaggactgtaattttaaggagttgatcctggaaaatcactataacacctacgcgagtgcaaaatggacacataacggcggagaaatgttcgtggccctgaatcagaagggcatccccgtccgcggcaaaaaaactaaaaaagaacagaaaaccgcccactttctgcccatggcaattacatag

SEQ ID NO: 15208 - DNA, 585 bp, synthetic construct
  misc_feature 1..585: note = Description of Artificial Sequence: Synthetic coding sequence
  source 1..585: mol_type = other DNA
atgcacaagtggatattgacctggatccttcccacccttctttatcggtcatgttttcatattatttgcttagtgggcacgattagtctcgcttgtaacgacatgacccccgagcaaatggctaccaacgttaactgctcatccccagagcgccatactagatcctacgactatatggagggtggggacattagagtgagacggcttttttgccggacccagtggtatttaaggattgacaagcgaggcaaagtgaaaggcacacaagagatgaagaacaactataatattatggagatccgaactgtcgccgtcggcatcgtggccataaaaggggtggagagcgagttttacctggctatgaataaagaagggaagctgtatgcgaagaaggaatgtaacgaggattgcaacttcaaagagttaatattggagaatcattataacacttatgccagtgccaaatggactcataacgggggagagatgttcgtcgctctgaaccaaaaggggatccccgtccggggtaaaaagacaaaaaaggagcagaaaacagcccatttcttacccatggccattacctag

SEQ ID NO: 15209 - DNA, 705 bp, synthetic construct
  misc_feature 1..705: note = Description of Artificial Sequence: Synthetic coding sequence
  source 1..705: mol_type = other DNA
atgaaaatctgctcactcaccttgctgagcttcttgctgctggctgcccaggtgctcctggtcgaaggaaagaagaaggttaagaacggcttacatagtaaggtggtttcagaacagaaggataccttgggcaacacccagatcaagcagaaatctcggcccgggaataagggaaagttcgtcacaaaggatcaggccaattgtcgctgggctgcaacagagcaagaggagggcatctctctaaaggtagaatgtactcaactggatcacgagttctcatgcgtctttgccggtaaccccacctcctgcctaaaactgaaggatgagcgggtctactggaaacaggtggcacggaacctgcggagccaaaaggacatatgccggtatagcaaaacggctgtcaagacacgtgtttgccgcaaggatttcccagaatcatccctgaaactcgtctcctcaactctttttgggaacaccaaaccaaggaaagagaaaaccgaaatgtcacctagggaacacatcaaaggcaaggagaccactccgagtagcctggcggtcacacagactatggccactaaggctcccgaatgtgtggaagacccggatatggcaaatcagagaaaaacagctctggaattttgcggcgagacctggtcgtccctgtgtacattcttcctgtcgattgtacaagacacatcttgctag

SEQ ID NO: 15210 - DNA, 705 bp, synthetic construct
  misc_feature 1..705: note = Description of Artificial Sequence: Synthetic coding sequence
  source 1..705: mol_type = other DNA
atgaaaatctgctccctcacccttctctcattccttctgctcgccgctcaggtgctattggtggaaggaaaaaagaaggtgaagaatgggttgcactcaaaagtagtgtcagagcaaaaagacacgctgggaaacacacagattaagcagaagtcgagacctggtaataagggcaaattcgttactaaggatcaagccaactgtcggtgggctgcaacggaacaggaagagggaatcagcttaaaagtggaatgcacgcagttggatcacgagttcagttgtgtcttcgccggaaatcccacttcatgcctgaaactgaaagacgagagagtgtactggaaacaggtcgccaggaatctgcggtctcagaaggatatatgtagatatagtaagacagcagtgaaaactagagtctgcagaaaagatttccctgagtcgtccctgaaacttgtgagcagtacgcttttcggtaacactaagcccagaaaagagaagaccgaaatgtccccacgggaacacattaagggcaaggagactaccccaagttctttggcggtgacacaaaccatggcaacgaaagcccccgagtgcgtagaggatcctgacatggcaaaccagcgtaagacagcactggaattctgcggagaaacctggagtagcttatgtactttctttctgtccatcgtacaagatactagctgctag

SEQ ID NO: 15211 - DNA, 2421 bp, synthetic construct
  misc_feature 1..2421: note = Description of Artificial Sequence: Synthetic coding sequence
  source 1..2421: mol_type = other DNA
atgggcgcacctgcctgtgccctggcactgtgtgtggcagtggctatcgtggcaggcgcgtcttctgagtcactgggcaccgaacaacgggtcgttggtagggccgcggaggtcccaggccccgagccaggacagcaggagcagttggtttttggttcaggcgatgcggtggaactgagctgtccaccacctggaggtggccctatgggtccaaccgtatgggtcaaggatggcacgggcctggtgcccagcgaaagggtcctggtaggaccacagcgtctgcaggtacttaatgcttctcacgaagacagtggggcttactcttgccgccaacggctgactcagcgtgttctgtgccacttttccgtccgagtaactgacgctcctagctcaggagatgatgaggacggcgaggacgaagctgaagacactggcgtcgataccggcgccccttattggacacggcctgaacgcatggataagaaattactggcggtgcctgccgcaaataccgtcagattcagatgtccagccgccggtaaccctactcccagcatttcctggctcaagaacgggcgagaatttcggggcgaacacaggattggtggcataaaactccgccaccagcaatggtcattggtgatggagtctgttgtgccctcagaccggggcaactacacctgcgtggtcgagaacaaattcggatccattcgccagacatacacgctagacgtcctggaaagatcccctcacaggccaatcctgcaggcaggactgcccgccaaccaaacagcagtgcttggatccgatgtcgaatttcattgtaaggtgtacagcgacgcacagccacacatacagtggctgaagcacgtcgaggtgaacgggagtaaggtcggccccgatggtactccgtacgtcaccgtgcttaagacagccggcgcaaataccacagataaagaactggaagtgttgtccctgcataacgtgacttttgaggacgcaggagagtacacttgcctggctggcaacagcataggcttcagtcatcattcagcttggttagtagtgttgccagctgaggaggaactggtagaagctgatgaagcggggtccgtttacgcagggatcttaagttacggcgtggggttcttcctgtttattttggtggttgctgctgtgaccctgtgtagattacggtcacccccaaaaaaagggctggggagtcccactgtgcacaagatctcccgcttcccacttaagaggcaagtgtccctcgaaagcaatgcttcgatgtcttctaacacccccttggttaggatcgctcgtctaagcagtggcgagggtccaacactcgcgaacgtgtcagagttggaactgccggcggaccctaaatgggaactgtctagagcccggctgacgcttggaaagcccttaggcgagggatgcttcggccaggttgtaatggctgaagctatcggtattgataaggacagggccgcaaagccagtgaccgtcgctgttaagatgctgaaagatgacgcaacagataaggatctgtccgacctggtttcagagatggagatgatgaaaatgattggcaagcacaaaaatattatcaatttgctgggcgcatgtacccaagggggccccctatacgtgcttgtggaatacgcagcaaaaggaaaccttcgcgagttcctgagagcacgacgaccaccagggctcgattacagcttcgacacttgcaaacctccggaggaacaactgacatttaaagatctggtcagctgtgcgtaccaggtggcccgtggtatggagtatctggcttcacagaaatgcattcatagggatctagccgcccgcaatgtgctggtgaccgaggacaacgtcatgaagatcgctgacttcggcctggcgagggatgttcataatctggactactataagaagaccacaaatggacggctaccagtgaagtggatggcgcccgaggccctgttcgatcgagtttacacacaccagtcggacgtctggtccttcggggtcctcctctgggagatctttacactgggcgggtctccttacccaggaattcccgttgaagagttatttaagctcctgaaggagggccaccgcatggataaacctgcgaattgcactcatgacctgtacatgatcatgcgcgaatgttggcacgccgccccctcccagagacctacgtttaaacaactcgtcgaagatctagaccgcgtcctcacagtcacttctactgacgagtaccttgatctcagcgcccccttcgagcaatactcacctggcggccaggacacgcctagctccagttcaagcggcgacgattccgtgttcgcccatgatctactgcccccagctccccctagcagcggcggttctaggacatag

SEQ ID NO: 15212 - DNA, 513 bp, synthetic construct
  misc_feature 1..513: note = Description of Artificial Sequence: Synthetic coding sequence
  source 1..513: mol_type = other DNA
gaataccttgatctgagtgccccgttcgagcagtattccccaggtggccaggacaccccaagctcttcatcctccggcgacgattccgtattcgcccacgatttactcgccacaggcccacagcagtgcgagggcagcctggctgcccaccccgctgctggtgcccagcccctgcccgggatgaggctgtccgccgacggtgagaccgccacccagtcattcgggctatgtgtctgcgtctgtgtctgtgtctgctgcacaagtgcctgcgcatgcgtgcgggctcatcttgcaagcaggtgtcgagggaccctcggagtgcctgcagcggtacagaggagccccgactggtgttgctctactgaggggccgctcttttggggagaccctgttcagaatgtctcaggtccaactcgatgggatcctgggcagggcgcaggaccggacatgagaccactgccactgcatcacggcacctcccagggccttggaccatctcatacccagtcctag

SEQ ID NO: 15213 - DNA, 2427 bp, synthetic construct
  misc_feature 1..2427: note = Description of Artificial Sequence: Synthetic coding sequence
  source 1..2427: mol_type = other DNA
atgggagcccccgcgtgcgcactcgcactgtgcgtcgcggtggcgattgtcgccggagcatcctcagaatccctggggactgagcaaagggtcgtcggccgagctgccgaggtgcctgggccagagcccgggcagcaagagcagctggtcttcggtagtggcgacgctgtggagctgagctgtcctcctcctggagggggccccatgggacccactgtctgggtcaaggacggtactgggctggtcccaagtgagagagtgctggtgggccctcagaggctgcaggttctcaacgcatctcacgaagactctggagcatattcatgccgacaaagattaactcagcgtgttttatgtcacttctcagtccgcgtgacagatgctcctagctcgggagacgacgaagatggagaggatgaggccgaagatacaggcgtcgacacaggcgcaccttactggaccagacctgagcggatggacaagaagctgctggccgtccccgctgctaatacagttaggtttcggtgccccgccgctggaaaccccacaccatcaatctcttggctcaagaatggtcgcgaatttcgaggtgagcacaggataggcggcataaagttgcgccaccagcaatggtccctagtcatggaaagcgtggtacctagcgataggggtaattacacatgtgtcgttgaaaataaattcggcagcatccgccaaacatatacccttgatgttttagaacgatccccacatcgtcccattttacaagccggcttgccagctaatcaaactgccgtccttggaagcgatgtggaatttcattgcaaggtgtactctgatgcacagcctcacattcagtggttgaaacacgtcgaggtgaatggatctaaagtgggacccgatggaactccttatgtgaccgtgctgaagagctggatctctgaatctgttgaagcagacgtgcggctgagactggcaaacgtgtctgaaagggatggcggggaatacctgtgccgagctaccaattttatcggagttgctgaaaaggccttttggttgagcgtgcacggtccccgagccgcagaggaggaactggttgaagcagacgaagccgggtccgtgtacgctggaatcctctcctatggcgtgggattcttcctgttcatactcgtggttgccgccgtgacattatgtcgcctcagatccccaccgaaaaaaggacttggaagcccgacagttcacaagatcagtagatttcccttgaaaagacaggtttctttggaatccaacgcatcaatgagctccaataccccattggtgcggatcgctcggctgtcttcaggggaaggccctactcttgctaatgtgagcgaacttgaactcccagccgaccctaagtgggaattgtctcgggcacggctgaccctcggaaaaccactcggagaaggatgctttggccaggttgtgatggcagaggctattgggattgacaaggaccgcgccgcaaagccggtaactgttgccgtgaagatgctcaaagacgacgccacagacaaagatctgagtgacctggtgtccgagatggagatgatgaaaatgatcgggaagcacaaaaatatcataaatctgttgggagcctgcacccaaggcggaccactatacgtactagtggagtatgctgctaaaggcaatctgcgtgagttcctcagggcgcggcggcctcctggcctagactactcctttgacacatgtaaacccccggaagagcagttgactttcaaagatcttgtcagttgcgcttaccaggtcgcccgaggcatggagtacctggctagccagaagtgcatccacagagatttggctgcccgaaatgtgctagtgacggaggacaacgtgatgaaaattgccgactttgggttggctcgcgatgtgcacaacctggattactataagaaaaccaccaacggtcgcctaccggtgaagtggatggcgcctgaagcgctgttcgaccgcgtttacacacatcagagcgacgtgtggtccttcggggtgcttctctgggaaatcttcaccttgggcgggagtccttatccaggcatccctgtcgaggaacttttcaaactgcttaaggaggggcacaggatggacaagcctgcgaattgcacgcacgatctttatatgattatgcgggaatgttggcatgcggccccttcacagcggccaactttcaaacagttagtggaggatctagaccgggtgctcaccgtgaccagtactgacgagtacctggatctgagtgcccctttcgagcagtatagtcctggggggcaagacactccgagttcttcttcatctggcgacgattccgtgttcgctcatgaccttttaccacctgcccctccttcaagcggaggctcccgaacgtag

SEQ ID NO: 15214 - DNA, 2085 bp, synthetic construct
  misc_feature 1..2085: note = Description of Artificial Sequence: Synthetic coding sequence
  source 1..2085: mol_type = other DNA
atgggcgctcccgcatgcgcactggctctgtgcgtggctgtcgccatcgtggctggggcctcctccgagagtctcgggaccgagcagcgggtggtaggccgtgcagccgaagtgcccggcccagagcccgggcagcaggagcagctggtgttcgggtctggggatgcagtggagctttcctgtcctcccccaggcggcggacctatgggccctacagtgtgggtcaaagacgggaccggactcgttccttccgagcgggtgctggtcgggccccaaagactgcaggtgttaaatgcaagccacgaagattctggggcctactcctgtagacagcgccttactcagcgggtgctgtgtcatttctctgtgcgggtgaccgatgcaccttcctcaggggacgatgaggatggggaggatgaggctgaggacactggggtggacactggcgccccctactggacaagacctgaaaggatggacaagaaattactcgccgtgccagcagccaacactgtgagattccgctgtccggctgctggaaacccaactccaagtatctcctggctaaagaatgggcgagagtttcgcggggagcaccgtattgggggaattaaattgcggcaccaacagtggagcctggtgatggagagcgtcgtgccctctgacaggggtaactacacctgcgtggtcgagaataagtttggatctatacgccagacgtatacactcgatgtactagagcgatcccctcatcggccaatcctgcaggctggcctgcccgctaatcagacggctgtgctgggcagtgatgtggaattccactgcaaggtgtattccgatgcccagccccacattcagtggctgaaacatgtcgaggttaacggttctaaggtggggcctgacgggacaccgtatgtcacagtgctcaaggtgagcctcgaatctaatgcttcgatgtcgagtaacacccccctcgtaaggatagcccgactcagcagcggagaagggcctaccttggctaacgtaagcgaactggaactacccgccgaccctaagtgggagctctcacgcgctcgactcacattgggtaagcctctgggcgagggctgttttggacaggttgtgatggcggaagctatcgggattgacaaagacagggcagccaaaccagtgactgtggcagttaaaatgctgaaagacgacgcaaccgataaggacctgtccgacttggtctctgaaatggagatgatgaagatgattggaaagcataaaaacattattaacctacttggcgcttgtacccagggcgggcctctgtacgtgcttgttgagtacgctgctaagggcaaccttcgcgaatttcttagggccaggcggccccctggcctggactattcatttgacacgtgtaagccacctgaagagcagcttacgttcaaagatctggtgagctgtgcctaccaggttgctcgtggcatggaatacttggcgtctcaaaaatgcatccaccgcgacctagccgcccgtaacgtgttggtcacggaggacaacgtgatgaagatagccgattttggactggcacgcgatgttcataacttggattattataagaagaccaccaatgggcgcctgcccgtgaagtggatggcgcccgaggcactttttgatcgcgtgtacactcatcagagcgacgtgtggtcctttggagtcctgctgtgggagatttttacactcgggggaagtccgtatcccggaattccagtagaggaactttttaagctcttgaaagagggacacagaatggataagcctgcaaattgtactcatgatttgtatatgataatgcgggaatgctggcacgccgccccctcacagaggccaaccttcaagcaactcgtagaagacctggaccgcgtgctcacagttacctcaacggacgaatacctggatttatccgccccctttgaacagtattctcccggcggccaggacactccctcttcaagttcatctggcgatgactccgtcttcgcccacgatctgctcccccccgcccctccctcgagcgggggatcgaggacgtag

SEQ ID NO: 15215 - DNA, 2421 bp, synthetic construct
  misc_feature 1..2421: note = Description of Artificial Sequence: Synthetic coding sequence
  source 1..2421: mol_type = other DNA
atgggggcccccgcctgtgctctggctttgtgcgtcgctgtggctattgtcgctggcgcttcttctgaatccctgggcactgaacagcgggttgtcggacgggccgccgaggtacccgggcccgagcccggacagcaggagcagctggtgtttggatctggggacgcggtggaactaagctgcccaccccccgggggcggaccaatgggaccaactgtgtgggtgaaggatggtacaggcctggttccaagtgaaagagtgctggtgggcccacagagactgcaagttcttaacgcttcgcacgaggacagtggggcctacagctgcagacaacgactcacccagagggtgctctgccatttcagcgtgcgagtgacagatgctccgtcaagcggcgacgatgaagacggtgaagacgaggctgaagataccggtgtggacactggggcaccttactggaccaggcccgaacgaatggacaagaagcttcttgctgtacccgcagccaacacagtccggtttaggtgccctgcggcggggaaccccacgcctagcatatcatggctgaagaacgggagagaattcaggggcgagcatcgaattggtggaattaagctgcgtcaccagcagtggtctcttgtaatggaatcagtggttccgtcagatcgagggaattatacctgcgtcgtcgaaaacaaattcggatccattcggcagacttatactctggacgtgctggagcgcagcccgcatagacccattttgcaggctggcttacccgcgaaccagacggctgtccttgggtcagatgtggagtttcattgcaaggtgtactcagacgcccagccacatatccagtggctcaagcacgttgaggtgaacggtagcaaagtaggccccgatggaaccccttatgtgactgtcctgaagactgcaggagcaaataccaccgataaggaattggaagtactgtcccttcacaacgtaacctttgaggatgcgggtgaatatacttgcctcgcagggaacagtataggcttcagtcaccactctgcttggctggtggtgttgcccgccgaagaggaactggtggaagctgacgaggctggcagtgtctacgctgggatcctctcttacggcgtcggcttcttcctgttcatcttagtcgtcgcagccgttactctgtgcagactaaggagcccgcccaagaagggactgggctcccccactgttcacaaaatatccagatttccactgaagcgacaggtttcattggagagtaatgcaagcatgtcatccaacaccccactggtgagaatcgcccggctatcatcaggagagggtccaaccttggcaaatgtgagtgaactagaactacctgccgaccctaagtgggagctctcccgcgcgagactgaccctgggtaaacctcttggcgaagggtgcttcggccaggtggtgatggccgaagctattggaattgataaagatagggcagccaaaccagtaaccgttgccgtaaaaatgttgaaggacgacgcaaccgataaggatctcagtgacctggtctccgaaatggagatgatgaagatgattggcaaacataagaacatcatcaacttgttgggggcatgcacccaggggggccccctgtatgttttagtggagtacgcggctaaagggaatttgagggagttcctccgtgcccgtagaccacccggactggattactccttcgacacatgtaaacccccagaagagcagcttacttttaaagatctggtgtcatgcgcctatcaggttgccagaggaatggagtatctggcctcacagaagtgcattcatagggacttggctgcccgcaatgtcctggtaacagaagacaatgtcatgaagatagctgatttcgggctggcccgagatgtgcacaatctggattattacaagaaaacaactaatgggcggcttccagtgaagtggatggcgccagaggccctgttcgacagagtctacacgcatcaatctgatgtctggtccttcggcgtcctgctgtgggagatcttcaccctgggggggtctccgtatccggggattccggtggaggagctattcaaacttttaaaggagggacaccggatggataaaccagccaattgtacccacgatctctatatgatcatgcgcgagtgttggcatgcagcccccagtcagcgacccacgtttaagcagctggtggaagacttagatagggtgctgaccgttacctcaactgatgaatacttagacctgagtgcaccatttgaacaatactcaccaggtggtcaggataccccaagttcttcttcaagcggagatgatagcgtcttcgcccacgacctgctgccaccggctccaccttcgagtggaggctctcgtacttag

SEQ ID NO: 15216 - DNA, 2379 bp, synthetic construct
  misc_feature 1..2379: note = Description of Artificial Sequence: Synthetic coding sequence
  source 1..2379: mol_type = other DNA
atgggagctcctgcctgcgctctggccctgtgcgtggcggttgctatcgtagcgggcgcgagtagtgaaagcctggggaccgaacaaagagttgtgggacgcgccgcggaggttccaggccccgagccaggacagcaagagcagttggttttcggttccggcgatgcagttgaactgagctgtccacctcccggaggcggtcctatgggccccaccgtgtgggtgaaggatggcacaggactcgtgccttccgaacgggtgcttgtcgggcctcaacggctgcaggtgctgaacgcctcccacgaagactctggggcctatagttgtcggcaaagacttacgcagagagtgctttgccacttcagcgttcgggtcacagacgccccatcaagtggagacgacgaagatggagaggacgaggccgaggacactggggtggacacaggcgcgccatactggacaagacctgaacgcatggataaaaaattgctggccgtgccagctgctaatactgtccgcttccgctgccctgccgcaggcaacccaacccctagcatttcttggctgaagaacggccgagaatttaggggtgagcataggattggaggtattaaactgcgccatcagcagtggtcattggtgatggaatccgtggttcccagtgaccgggggaattacacctgcgtcgttgaaaacaagttcggctccatcaggcagacctataccctggatgtgttagagcggagcccgcaccgaccaatacttcaggctgggcttcccgcaaatcagaccgcagttctcggcagtgacgtggaattccattgcaaagtctacagcgatgcacaaccacacatccagtggctcaaacacgtcgaggtgaacggcagtaaagtgggaccagacgggaccccatacgtcaccgtcctcaagaccgccggggcgaacactaccgataaggagctggaggtgctatcactgcataacgttactttcgaggatgcgggagagtacacatgtctggctggtaatagtatcggatttagccatcatagcgcctggctcgttgtgctgccggcagaggaggaactcgttgaagccgacgaggctgggtcggtctatgcaggcattcttagctatggcgtgggcttcttcctttttattctagttgtagcagcggtgaccctgtgcagacttaggagcccccctaaaaaagggctcggaagcccaaccgtccacaagattagccgattccctctgaaaagacagcaggtgagcttggaaagtaatgcgtctatgagctccaatactcccttggtgcggatcgcacgcttgagttccggcgagggacccaccttggcaaacgtttctgaattggaactcccagcggacccaaaatgggagctgtctagggcgcgcctaaccctgggaaagccactcggcgaaggctgctttggacaggtcgtgatggccgaagctattggaatagacaaggatagagcggctaaaccagtgacagtggcagtaaagatgctcaaggatgacgcaaccgataaggatctctctgaccttgtgtcagagatggaaatgatgaagatgattggcaagcacaagaacattatcaacttactgggcgcctgtacgcaaggaggacctctctatgttctcgtagagtatgctgcaaagggcaaccttagggaatttcttcgtgccaggcggcctccaggcttggattactcattcgatacttgcaaaccgccggaagaacaactcacctttaaagatctcgtgagctgcgcttatcaagtggcgcgtggaatggaatatctcgctagccaaaaatgcatacacagagacctggccgcaaggaacgtgctggtgacagaggacaacgttatgaaaatcgctgactttggactggctagggatgtccataacctggattactataagaaaactacaaatctggtgctgtgggggccagccttaggagacctgcacgctggcggcctgccggtccctaggcacccatgtggtggagcactgcaggctgccgaaggtggacctccccacggacaagcacgtcaactacacacacgtccagttcacgatcatgccggggtgttggcctgccgcgctctccctgaggcccacctgcaagccgcagggggcggccctggcccttgtccatatcgagatgtccaccgccgggtacctggacccgtgggagcctttagagccgtactgccgggctggccaggtcatcctcaactccagctgctccggggcagactgagagtgtgccccagaccagctgctccgggcccgacccagcagtgggggctggccgacgtgaaaggacactggtctccaactatgtag

SEQ ID NO: 15217 - DNA, 2409 bp, synthetic construct
  misc_feature 1..2409: note = Description of Artificial Sequence: Synthetic coding sequence
  source 1..2409: mol_type = other DNA
atgcgccttttactggccctgcttggagtgttgctctccgtccctggcccccccgtcctgagcctggaggcaagtgaagaggtcgaactcgagccttgtctggccccatctctggagcaacaggagcaggagctgaccgttgcacttggtcagcctgtgcggctgtgctgtggcagggccgaaagaggcgggcattggtataaggaaggatcccggttggcaccagcaggtcgcgttcgtggctggcgtggccggttggagatcgcttcattcttgcctgaggatgcgggccggtacctgtgtctcgcccggggatcgatgatcgtcttgcagaatctcacactgattactggcgacagccttaccagttcaaatgacgatgaagatccgaagagccatagggatccatccaatcgacactcctacccccagcaggcaccatactggactcatccacagcgtatggagaaaaaactgcacgcagtacctgctggcaacaccgtgaaattccggtgccctgcagctgggaacccgaccccgaccatcagatggctgaaagacggacaggcctttcatggcgaaaaccgaattggtggtattaggctaagacaccagcattggtccctggtgatggaatctgtggtgccttcagatcgtgggacatacacttgtctggttgagaatgctgtgggatctattcggtataattacctgttagacgtactggagcggtctcctcatagacccatattacaagctggactgcccgccaacacaactgcggtagttggttctgatgtggaactgttgtgtaaggtgtacagtgacgctcagcctcatattcagtggctaaaacacatcgtcatcaacggtagttccttcggggccgatggcttcccctatgtgcaggtcttaaaaaccgcagatattaactcttctgaggtcgaggtgttatatctgcggaacgtgagcgcggaagatgccggggagtacacatgtttggccggcaattcaattggactcagttaccagagcgcttggctcacggtgttgccggaagaggatcccacttggactgccgcggcccctgaagcccggtatacagacattatcttgtacgcctcggggagcctggcccttgccgtacttcttctcctcgccgggctgtatcgcggccaggcattacacggccgacatccacgaccgccagcaaccgtgcagaaactgagccgctttccattggcacgtcagttcagtctggagtcaggaagcagtgggaaaagctcgtccagtctggttcgtggagtgcgtctctcctcctctggccccgcgttactagccgggctggtcagtctggacctgcccttagaccccctttgggagttcccacgggaccgcctcgtactgggaaagcctctgggagaagggtgttttgggcaggtcgtgagggcagaagcctttggcatggacccagcccgacctgatcaggcatctacagtagcagttaagatgttgaaagacaatgcctccgataaagatctagccgatctggtgagcgagatggaggttatgaagctcattggcaggcataaaaatatcataaacctgctaggcgtgtgcacccaggaagggcctctgtacgtcattgttgagtgtgcagcaaaaggcaaccttcgggaatttctgagggcacggcgtcccccaggccccgacctgtcgcctgacggccccagatcgtccgagggaccgctgtcttttcctgtactagtatcatgtgcctatcaagtagcgaggggtatgcagtaccttgaatccaggaaatgtatacatcgagatctcgctgcccgtaatgtgctcgttaccgaagataatgttatgaaaatcgccgattttggattggcgcggggcgtgcaccacatcgactattataagaagacaagtaatggacggcttcctgttaagtggatggcacctgaggctttattcgacagggtttacacccaccagagtgacgtgtggtcgtttggcattctcctttgggagatcttcactctgggtggctccccatacccagggattcccgtggaggagctgtttagcttgctccgggagggccaccggatggatcgccctccacattgtccccctgaactctacggactgatgcgcgagtgttggcacgccgctccaagccagcgccccacctttaagcagctggtggaggcattggacaaggtgttgctcgctgtgtctgaagaatacctagatctgcgtctgaccttcggcccctatagccccagcgggggggacgcttcttccacatgctctagctccgacagcgttttttcgcatgatccattgcctttggggagctcctctttcccgttcggctccggagtccagacgtag

SEQ ID NO: 15218 - DNA, 2289 bp, synthetic construct
  misc_feature 1..2289: note = Description of Artificial Sequence: Synthetic coding sequence
  source 1..2289: mol_type = other DNA
atgcgactcctcttagcgcttctcggtgtcctcttgagtgtccccggcccccctgtcctgtccctcgaagcatccgaagaagttgaactggagccatgtcttgctccctctctcgagcagcaggagcaggaactgacggtagcgttgggccaaccagttcggctctgttgcggtagggcagagcgcggcggccactggtataaggagggctcacggctcgccccagctggccgtgtgagaggttggagaggaaggttggaaatagcgtccttcctccctgaggacgctgggagatacctgtgtctggccagaggcagtatgattgtgcttcagaacctgaccttaatcactggcgactctcttaccagctcaaacgatgacgaagaccctaagagtcacagagacccctccaatcggcactcttatccacagcaggccccttactggactcatccccagaggatggagaagaagctgcacgccgttcctgctggcaacaccgtcaagttccggtgccccgcggccggcaatcccacccccaccattcgttggctaaaagatggccaagcgttccacggcgagaatcgaattggagggattagactccgccaccaacactggtccctggtcatggaatcagtggtcccctcggacaggggcacctacacttgtctggtggaaaatgccgtcggctcaatccggtacaactacttgctggacgtgttagaacgatcccctcacagacccatcctccaggcaggcctcccagccaataccaccgcagtcgtggggtctgacgtcgaactgctgtgtaaggtttactctgacgcccaaccccacatacaatggctgaagcatatcgtgatcaatggttcttcatttggggccgacggctttccttatgtgcaggtgcttaagacggcagacatcaacagtagcgaggtagaggtactctacctacgtaatgtgagcgcggaagacgccggcgagtacacatgcttagctggcaattctatcggcctgtcctatcagtcagcttggttaacggttttgcctggaactggacgcataccacatttaacctgtgacagcctcacccccgccgggcgcacaaaaagtccgaccctgcaatttagcctggaaagcggtagctctggtaagagtagttctagcctcgttcgtggcgtgagactaagctcctctgggccagccctcctggctggccttgtaagtcttgatcttccactggacccactctgggagtttcctcgcgatcgtttagtgctgggaaaacctctgggagagggctgctttggccaagtagtgagagcggaggctttcggcatggatcctgccagaccggaccaggcttccaccgtggcagtcaagatgctgaaagataatgcatctgataaggacttggctgacctggttagcgagatggaggtgatgaaacttattggtcggcacaagaatattatcaatttactcggtgtgtgtacccaggagggcccattatatgtgattgtggaatgcgctgccaagggtaatcttagagagttcttgcgcgcccgaagaccccctgggccggacctgagtcccgatgggccacgcagtagcgagggacccttaagtttccccgtgctggtcagctgtgcgtaccaggttgccagagggatgcagtacctggaatctcggaaatgtatccatcgagatctcgctgcccgaaatgtgctcgtaactgaggataacgtgatgaagatcgcagactttggactggccaggggggtccatcacattgactattacaaaaaaaccagtaacggccgcctgccagtgaaatggatggctccagaggcattgttcgatagagtgtatacccaccagagcgacgtgtggagttttggcatcctgctctgggaaatcttcacgctgggaggtagtccctatcctgggatcccagtagaagagctattctctctgctccgtgagggccacaggatggaccgaccacctcactgccctccagagctctacggactaatgcgcgagtgttggcacgccgcgccaagccagcgccccaccttcaaacagctagtggaggccctggacaaagtgctactggcagtgtctgaggagtacctagatttgcgcctgaccttcggcccctatagcccttccggcggcgacgccagcagcacttgttcgtcctctgactcagtctttagtcacgacccccttcctctgggatccagttcttttcctttcggaagtggcgttcagacctag

SEQ ID NO: 15219 - DNA, 3093 bp, synthetic construct
  misc_feature 1..3093: note = Description of Artificial Sequence: Synthetic coding sequence
  source 1..3093: mol_type = other DNA
ccatgcatgtggcaccagcagcacgtgccctgcgtctgcgtttgtccatatgtgtgtgtctgtatgagggtatgtgtttgcgtatgctggcctctcagttgcgccctaaacgcggtatgcgtgacgtgtcctaagtccgtggcctttgcacttggtgtcgccagcgcagcctgcggctgtgtcggtgtcaaagaatggtggctcctgcagcacgccttgcaatctgcctgcgcattgcacgtccgctgcgtgctgtgtacacaagaagccgcaagcgacggcgctgccgggtcggccgacctgtgccctctacccacggaaccgtgtcttgctcctagtttggagcaacaggaacaggagttgactgtggcattgggccagcctgtacgtctatgctgtggccgtgcagagcgtggcggccattggtataaagaaggtagccgtctagctcccgctggtagagttcgagggtggagaggacggctagagattgcaagctttttacctgaggacgcggggaggtatctgtgccttgcccgcggttccatgatcgtactccagaatctgactcttatcacaggggacagtcctcctgcgaccatgatgaggaccccttcccctataggaacaccccgaatcggcactgtaacgccgagcaaagtgtcacgttctcccaggacctgcgttcctgctgctgcccacctcatcactgagaagagaagaccagtctgggagcatacagttatactcggtgccttcccttgcccacctgcgccatactggacccatcctcaaagaatggagaaaaaactacatgcagttcctgcagggaacactgtgaagttcagatgtcccgctgctggaaatccgactcctactataagatggctcaaagatggtcaggcgttccacggggaaaaccggatcggagggatccggttacgtcatcagcattggtcgctcgtgatggagtccgtggtcccttccgaccgcgggacgtatacgtgcctggtggagaacgccgtgggttctatcaggtacaactatctccttgacgtgttggaaaggtcacctcaccgtcccatactccaggctggcctacctgctaacacaaccgccgttgtcgggtccgatgtggaactcctttgtaaagtctactctgatgctcaaccccacattcagtggttaaagcacattgtgattaatggatcttcctttggagccgatgggttcccctacgtgcaagtgctgaagacagccgacattaactcttccgaggtggaagtgttgtatttaagaaatgtgtctgctgaggatgcaggggaatacacatgtctggcaggcaacagcattggcctgtcttaccagagcgcatggttgaccgtactaccaggcgaacatctgaagggacaggagatgctacgggacgcaccacttgggcagcagtgggggctgtggcccgtgggatggtcagtttccgtcggcctgtggggtctcgcctggggggcagtgtgcggtttcgtaggactgagctgtatgacagcccccctctgcctcagtactcgagggcggccctgcgacagacttctgcggtgtgggtgccttggcttggggatcaccaccgcctcttcagtgtgtgtgccgacttacgtgggctcttgggaaggcctggggtgcaccggccgccccgtcagccccttaacttcactgagtgtgtgtgtgtgcccatgcgctcgggccgaggaagatccaacatggaccgccgccgccccggaagcacgttatacagatataattctatacgcttccggttccctggcccttgccgtactgcttctactcgctggtctataccggggtcaggctctccatggaagacacccaagacctccagccactgtgcagaagctcagtaggttcccacttgcgcgtcagttctctcttgagtcgggatcatccggcaagagttcctcctccctggttcggggagtgcggttgagctcatctggaccagcactgctggctggtctcgtgtccctggatctgcccctcgaccctttgtgggaattccctagggaccgattggtgctgggcaagcccctaggcgagggctgcttcgggcaggtggtgcgagcagaagctttcggtatggatccagctcgtcctgatcaggcctccaccgtcgctgtgaagatgctgaaggacaacgcatctgataaagaccttgctgatctcgtttccgagatggaggtgatgaagctgattggcaggcacaaaaatattataaacctgctgggcgtgtgcactcaggaagggcccctctatgtgatcgtagaatgcgcggcgaaaggaaacctccgcgagttccttagggcccggcggccaccaggaccggatctcagccccgatggcccccgaagttccgaaggaccgctgagcttccctgtgctggtaagctgtgcttatcaggtcgccagaggcatgcagtatctagagagcaggaagtgcatccaccgcgatctggcagctagaaatgtgctggtgactgaagataatgtcatgaagattgccgacttcgggctggcaagaggcgtccatcatattgactactacaagaagaccagcaatggacggcttcctgttaaatggatggctcctgaggctctgttcgatcgagtctatacccatcaaagtgacgtgtggagcttcggcatcctgctctgggagatctttacactgggaggcagcccttacccgggcattcctgtcgaggaacttttttcgctgttgagagaaggacacagaatggacaggccaccgcattgtccacccgagctctacggacttatgcgtgagtgctggcacgcagcgccctcacagcgccctacattcaagcagcttgtggaggccctggacaaagttctgctggctgtgtcagaggagtatctcgacctgcggctgacttttggcccttattccccatctgggggcgacgcaagctccacttgcagtagttcagatagcgtgttctcccatgaccctctcccattaggaagctcatctttcccattcggctctggagtccagacatag

SEQ ID NO: 15220 - DNA, 2289 bp, synthetic construct
  misc_feature 1..2289: note = Description of Artificial Sequence: Synthetic coding sequence
  source 1..2289: mol_type = other DNA
atgagacttttattggctttattgggtgtgctgctctccgttcccggcccgcctgttctgagtctggaagcctccgaggaagtcgagctcgaaccctgtctggccccctcccttgaacagcaggagcaagagctcacagtcgcactaggacagcccgttcgactgtgctgtggccgtgctgagagaggtggtcattggtacaaagaaggatcacgccttgcccctgccggccgggtgcggggctggcgcggcaggcttgagattgcctccttcctccctgaggatgcaggcaggtatctgtgcctcgcccgggggagcatgatagtactgcagaatttaacgctgattacgggcgactctctcacctctagcaacgatgacgaggacccgaagtctcatagggatcccagcaatcgacattcctacccccagcaagctccctattggacacacccacagcgaatggagaagaagctccacgcggtccctgctggcaacacggtgaaattccgctgtcctgcagctggcaatccgactccaacaattcgctggcttaaggacggccaagctttccatggcgaaaacaggattggggggatccggctgaggcaccagcactggtcactcgtcatggagagtgtcgtgccgagtgacagggggacatacacttgtctcgtagaaaacgccgttggatctataaggtataattacctgctggatgtgctggagcgctctcctcatcggcctatccttcaagcaggtttacccgcaaacactacagctgtagtaggctctgacgttgagctgctctgtaaagtgtactccgatgctcagccccacattcaatggctaaaacatatcgtgattaacggttcaagctttggagccgatggatttccttacgtgcaggtgctgaaaaccgccgatatcaactcaagtgaggttgaagtcctctacctgcgaaatgtaagtgccgaagacgccggcgagtacacctgcttagctggaaacagtatcgggttaagctatcagtccgcgtggctcaccgtcttgcccggaacaggaagaataccacatcttacttgtgattctctgacacccgctggaaggacaaaatcccccaccttgcaatttagtctcgagtcgggaagctcaggaaagtcttctagctcattagtgcggggcgtgcgcctgagctccagtggacctgctctgcttgccggcttggtgtcactcgatctgcccctcgatcctctgtgggagtttcctcgcgacaggctggtgctaggcaaaccccttggagagggatgctttggccaagtggtcagggctgaagcatttggcatggatccagccaggccagaccaggcttctactgtggccgtgaaaatgctgaaggacaacgccagtgacaaagaccttgctgacctcgtaagcgagatggaagtcatgaaattgataggtcgccataaaaatattatcaacctcctgggtgtgtgcacacaggaagggccactgtatgttattgttgaatgcgcggcgaaaggcaaccttcgagagtttctgcgggctagaagaccccctgggccagacctgagtcccgacggacccaggtcatctgaaggccccctgagctttcccgtgctcgtgagctgcgcttatcaggtcgcacgtggcatgcagtatctggagtcacggaagtgtatacaccgagacctagccgcccgcaatgttctggtcactgaagacaatgtaatgaagattgccgactttggattggcacgtggcgtgcaccatattgactattacaagaaaacctctaacgggaggcttccggtgaaatggatggcaccagaagctctattcgacagggtgtacactcaccagtctgatgtgtggtctttcggcatcctgctgtgggagatattcacacttggcggatcaccttacccagggatccccgtcgaggagctttttagtctgctccgtgaggggcaccgcatggacaggccacctcattgtcctcccgaactgtacggcctgatgagggagtgttggcacgctgcaccctctcagaggccaacattcaaacagctcgtcgaagctctggataaagtcctgttggctgtatccgaagagtatctcgatctgcggctcacgtttggcccctacagtccctcaggaggcgatgcctcttcaacctgcagcagctctgactcagtgtttagccacgaccctttaccgctggggtctagcagctttccatttggtagcggcgtgcaaacctag

SEQ ID NO: 15221 - DNA, 2409 bp, synthetic construct
  misc_feature 1..2409: note = Description of Artificial Sequence: Synthetic coding sequence
  source 1..2409: mol_type = other DNA
atgaggttattgctcgcactgctgggcgtactgctttcagtccctggccctccggttctctccctggaggccagcgaggaagtggagttagagccttgcctcgcacccagtctggaacaacaggagcaggaacttaccgttgcgttgggacaacctgtccggctgtgttgtggcagggccgagagggggggccattggtacaaggaaggctctagactggctccggcagggcgtgtgagaggttggaggggaagactcgaaatagcgtcatttttgcctgaggacgccggtcggtacctatgtctggcccgtgggagcatgatagtcctacaaaacctcaccttaataaccggtgactcactgaccagctccaacgacgacgaagatcccaaatctcatcgagaccccagcaatcgtcacagctaccctcagcaggctccttactggacacacccacagcgaatggaaaaaaagctgcacgcggtaccagcaggcaatactgttaagttccgctgtccagcagcaggaaatccaacccctaccatcaggtggctgaaggatggccaagcattccacggagaaaaccgcatcgggggtataagattaagacaccaacactggtccctggtcatggagagtgtcgtgccgtccgacaggggaacctacacttgcctcgtcgagaatgccgtgggcagcatccggtacaattatctgttggacgtactggagcgttctcctcaccgccctatcctgcaggccgggctcccagccaatacaaccgctgtggtcgggtccgatgtggagctgttgtgcaaagtatacagcgacgcccaacctcatattcaatggttgaaacatatcgttatcaatggttcatcctttggcgctgatggcttcccctacgtgcaggttctaaaaacagccgacatcaactctagtgaagtggaagtgctttaccttagaaatgtgtctgctgaggatgccggcgaatatacatgcctggcaggcaatagcatcgggctaagctatcaatccgcttggttgacagttttacccgaagaagaccctacatggaccgcagcagcccctgaagcacgatatacggacatcattctgtacgcctctggctctcttgccctggccgtccttctgctcttggccggcctgtaccgcggacaggccctgcacggccgacacccacgaccccccgcaacagtccagaagttgagcaggtttcccttagctcgccagttcagcctggaatccggatcatccggcaagtcatctagctcattagttcggggagttaggctgagcagctctggccccgcccttttagccggtctggtgtccctcgacttaccccttgatcctctttgggagtttccccgggatagactcgtgctcgggaagccactgggagaggggtgttttggccaggtcgtccgggccgaggcctttggcatggatcctgcccggcctgatcaggcctccactgtggccgtaaagatgctgaaggataatgcctcagacaaagatcttgcagacctggtgtctgaaatggaagtgatgaagcttattggacgtcacaagaacatcattaacttattgggtgtctgtacacaagagggacctctgtacgttattgtggagtgtgcggcaaagggcaatctgcgcgagtttctacgcgcccggagaccccccggacccgacctgagcccagatggaccacgcagcagtgaggggcccttgtcttttcccgttctggtaagttgtgcatatcaagtggcaaggggaatgcagtacctcgagtctaggaaatgcatccatcgggatctggccgctcgcaacgtactggtgacagaggataacgttatgaaaattgcagacttcggcctggcacgtggcgtgcaccacatcgactattataagaaaacttctaacgggagactgcccgtaaaatggatggcaccagaagccctgttcgatagagtgtacacccatcagtccgacgtatggagctttggaatcttgctgtgggaaatattcactctgggcggcagcccctatcccggcataccggtggaggagcttttctcactgctgagggaggggcacagaatggataggcctccacattgccccccagagctttacggtttgatgcgcgaatgttggcatgccgccccctcacagaggcctaccttcaaacagctggtggaagccctggataaagttctgcttgcagtcagtgaagagtacttggacctccgtctgacatttgggccttactcgccctccggcggtgatgcaagttcaacctgcagctcaagcgattcagtgttttcacatgatcccttgccactgggcagctcttccttcccatttggctcaggagtgcagacttag

SEQ ID NO: 15222 - DNA, 606 bp, synthetic construct
  misc_feature 1..606: note = Description of Artificial Sequence: Synthetic coding sequence
  source 1..606: mol_type = other DNA
atgaggttgcttctcgcactcctcggggtcctcctgtcagtaccgggccccccagtgctctctttggaagccagcgaggaggtcgaactagaaccttgcttggctccttctctggagcaacaggaacaggagctgaccgtggccctagggcagcctgtgcggctgtgctgcggtagggcggagaggggcggccattggtacaaagaagggtccagactcgccccagccgggagggtgcggggatggcggggacgcctggagattgccagcttcctgcctgaagatgcaggccgctatctgtgtctcgcccgggggtctatgatcgtgcttcaaaatcttactctcatcactggggactccttgacaagctctaacgacgacgaggatcccaagtcacaccgcgatccctccaacaggcactcttatccgcaacaagcaccttattggactcacccacagagaatggaaaaaaagctccacgctgttcctgccgggaacacagttaaatttcgctgtcccgctgctgggaatccgaccccaacaattagatggctcaaagacgggcaggctttccacggggaaaatagaattggcggtatcaggtag

SEQ ID NO: 15223 - DNA, 264 bp, synthetic construct
  misc_feature 1..264: note = Description of Artificial Sequence: Synthetic coding sequence
  source 1..264: mol_type = other DNA
atgcgactgctgctggccctgctaggggtccttctcagcgttccagggccccccgtgctgtcactagaagcttcagaggaggtggagttagaaccgtgcttggccccatcactggagcagcaggagcaggagctgaccgtcgcactgggtcaacctgtgaggctgtgctgcgggagagccgagaggggggggcactggtataaggagggttcccgtctggccccagccggccgcgtgcgaggctggcggggacgtctcgaatag

SEQ ID NO: 15224 - DNA, 327 bp, synthetic construct
  misc_feature 1..327: note = Description of Artificial Sequence: Synthetic coding sequence
  source 1..327: mol_type = other DNA
atgaggctattattggcgcttttgggggttttgctgagcgtccccggaccacccgtgctgtctctcgaagccagcgaggaggtggagttagagccttgtctcgccccctccctggagcagcaagagcaagagctgacggtcgccttgggccagcccgtaagactctgctgcggtagggctgaacggggcggacattggtataaggaaggatcaaggctcgcccctgcaggccgggtccgcggttggagaggacgattagagatcgcctcattcctcccagaagacgccggaagatacctgtgtttggcaagaggtagtatgatttag

SEQ ID NO: 15225 - DNA, 345 bp, synthetic construct
  misc_feature 1..345: note = Description of Artificial Sequence: Synthetic coding sequence
  source 1..345: mol_type = other DNA
atgcgcctgctgttagcattactgggcgtccttttgagcgtgcccggaccccccgtcctttctctcgaggcctccgaggaagtggagttggagccatgcttagcaccatctctcgaacagcaggaacaggaactaacagtggcccttggccaaccagtgagactctgttgcggtagggctgagcgcgggggtcactggtataaggaaggtagcagattggcccctgccggcagggtgagaggttggcgcggacgattggaaattgccagttttctgccagaggacgcagggcggtacctctgcttggcccggggttcgatgattgttcttcaaaatttaacatag

SEQ ID NO: 15226 - DNA, 7164 bp, synthetic construct
  misc_feature 1..7164: note = Description of Artificial Sequence: Synthetic coding sequence
  source 1..7164: mol_type = other DNA
atgctgagaggtccaggacctggcttacttctcctggccgtgcaatgtctgggcacggccgtcccgagcactggtgcgagcaagagtaagcgacaagcgcaacagatggtgcagcctcaaagtccagtggccgtcagccagtctaagcccgggtgttatgataacgggaaacattaccaaataaaccagcagtgggagcggacttatcttgggaacgcactggtgtgcacttgctatggcggaagccggggttttaattgcgaatccaaacccgaggccgaggagacatgctttgataagtataccggcaacacataccgggtgggcgatacttacgaacgtccaaaggatagtatgatttgggattgtacatgcatcggggccggtcggggacggatctcatgtacaattgccaatcgttgccacgaagggggacagtcttataagattggcgacacctggagacgcccacacgaaacaggcggctacatgctcgaatgcgtgtgcttaggtaacggcaagggggagtggacgtgcaagcctatcgccgaaaagtgctttgatcatgcggcgggcactagctacgtggtgggcgagacatgggaaaaaccttaccaggggtggatgatggtggactgcacatgtcttggcgaaggatcaggccgcattacctgcacttcaagaaatcgctgcaatgatcaagatactcgaacgtcctatcggattggcgacacatggtccaaaaaagataacaggggcaatctgctgcagtgcatatgtacaggaaatggccgaggtgagtggaaatgtgagaggcatacctccgtgcaaacgaccagtagtggtagcggacccttcaccgacgtcagagcggctgtctatcagcctcagcctcatccccagccccctccgtatggccactgcgtgaccgactctggagtcgtctatagtgtgggcatgcaatggctgaaaacccagggcaacaagcagatgttgtgcacatgcctcggcaacggcgtatcatgtcaagagactgctgtaactcagacctacggcggaaacagcaatggcgagccttgcgttctgccatttacctacaatggccgtacattttacagctgtacgaccgaaggccgccaggacggtcatctgtggtgcagcaccacttccaactatgagcaggatcagaagtactctttctgcacagaccataccgttctcgtgcagacccggggtggcaactctaatggcgccctgtgtcacttcccatttctctacaacaaccataactacacagattgcacatcagaaggcagaagggacaatatgaaatggtgcggaacaacacagaactacgatgcagaccagaaattcggattttgtccgatggccgctcatgaggagatttgtaccaccaacgaaggggtgatgtatcgtatcggtgaccagtgggataagcaacacgacatgggccacatgatgcgatgtacttgcgtcggcaatggaagaggcgagtggacctgcattgcttacagccaactgagagatcagtgtatcgtagacgatatcacctacaacgtgaacgacaccttccacaagaggcatgaggaggggcatatgttaaactgcacctgcttcggccaggggcgcggacgctggaagtgtgatcccgtcgaccagtgccaagatagtgaaaccggtacattttaccagattggcgattcctgggagaagtatgtacatggagtccggtatcaatgttattgttacgggagaggaatcggagaatggcattgtcagcccctgcaaacatacccatcctcttccggtcccgtcgaggtctttatcacagagacacccagtcaaccaaacagccacccaatccagtggaacgctccacaacccagccatatctcaaaatatatcctgcgatggcgacctaagaattccgttgggcgctggaaagaagccacaattcccggccatcttaactcctacacgattaagggtcttaaaccaggcgtcgtgtacgagggtcaactgatatctattcagcagtatgggcaccaggaggtcaccagattcgattttactaccaccagcacgtccacaccagtgacatccaacacagttacgggcgaaaccactccctttagccccctggtggcaacatctgagagcgttacagagattactgcctcatcctttgtcgtgagctgggtgtccgccagcgataccgtatccggatttcgggtggagtacgaattgagtgaagaaggggacgaaccacagtacctggacctgccttcaacagcaacttccgtgaacatcccagatttgctaccaggcagaaagtatatcgtgaacgtgtaccaaatctccgaggatggcgagcagtccttgattctttccacgagtcaaacgaccgcacccgatgcaccacccgatacaacagtcgatcaggtggacgatacctcaattgtggtccgttggagccggccacaggcaccaatcaccgggtacagaatcgtgtacagcccctctgtagaaggatcaagcacagagcttaatttgccagagacggctaactcagtgaccctgtccgatctccagcctggcgtacagtataacatcaccatttacgctgtggaggaaaaccaagagagcactcccgtagtcattcaacaggagacaactggcacgccgcgctccgacaccgtccccagccctcgcgaccttcagtttgtagaggtgacagacgtcaaagttaccataatgtggaccccccccgagagcgccgtgaccgggtacagggtggatgttatccctgtgaacctccctggagaacacgggcagaggctcccaatatcgcggaatacgttcgctgaggtcaccgggttaagccctggggttacatactattttaaggtgttcgctgtttctcatggtcgtgagagcaagccgctaacagcacagcagaccaccaagctggatgctccgaccaatttgcagttcgtgaacgaaaccgactcgacggtgctcgttcggtggacccctcccagggcccaaataactgggtatcggctcacggttgggctcacccgccgcggtcagccccgccagtacaatgtcggtcctagcgtgtccaagtatcccctgcgaaatctgcagccagcttccgaatacacagtgagcctcgttgcaattaagggtaaccaggagagcccgaaagccaccggagtgttcacaaccttacagccaggcagcagtatccctccatacaataccgaagtgaccgagactacaatagtgattacatggacgccggcaccccggataggattcaagttgggagttcggcccagccaagggggggaagccccaagagaggtgactagtgacagcggatctattgtggtatccgggttgacccccggggtggagtatgtgtatacaattcaggtcctccgggacgggcaggaacgggacgcccctatcgtgaacaaagtggtcactcccctgtcgcctccaaccaaccttcacttagaggcaaacccggatacaggtgtgctgactgtttcatgggaacgtagcacaaccccggatatcacaggatacagaattaccactacgccgactaatggccagcagggaaattcattggaggaagtcgtccacgcagaccagtcttcctgcacctttgacaatctgtctccaggattagaatataatgtgtccgtgtacaccgttaaggacgataaagaaagtgtgcccatatccgacacaattattcccgaggtcccacagctcactgacctgagttttgtggacattacagattctagtataggcctgcggtggacacccctcaactcctcaacaatcatcggataccgcattacagtagtcgccgcgggtgagggcatccccattttcgaagactttgtcgactccagtgtgggatattacaccgtcaccggactggagccgggtattgactacgatataagcgttattacgttgataaacggtggtgagtcagcccctactacactcacccaacagaccgccgtccctcctccgactgatcttcggttcttttctgatatcactgccaatagctttacagtgcattggatcgcacccagagctacgattacagggtaccgcattcgccatcaccctgaacattttagcggacgcccaagagaggatcgggtaccgcattccagaaactcgataacattgaccaatttgactccagggacagaatacgtggtaagcattgttgcgctaaatggacgcgaggaatctccactgttgatcgggcagcagagcactgttagcgacgtgccaagggatttagaggtcgtcgccgccaccccgactagcttgctcattagttgggacgcgccagcagtcacagttaggtattacagaattacctacggcgaaaccgggggaaacagcccagtccaagagttcacagtccccggcagcaaatctactgccacaatttcaggcctgaagcctggagtggattatacaattacagtgtatgctgtgactggcaggggcgacagccctgcgtcaagtaagccaatctcgattaattaccggactgagatcgataagcctagtcagatgcaggttactgacgttcaggataacagtatcagcgtcaagtggctccctagtagctctccagttaccggataccgcgtgacaactactcccaaaaacggtcccggcccgactaaaacaaaaacggcaggaccggaccaaaccgagatgactattgaggggcttcaacccactgtcgaatatgtagtctctgtgtacgcgcagaaccccagcggggagagtcagccgctggtccaaacggccgtcacgaacatagacaggcccaagggactggcctttacagacgtggatgtggacagcatcaagatcgcctgggagagtccacagggacaggtcagccgctatcgcgtgacctacagctctccggaagatgggatccacgagttgttccccgcacctgacggagaggaggacacagcagaattacaaggcttacggcccgggagcgagtacactgtgagtgtcgtcgcactgcacgacgatatggagtcgcaaccactgatcggaacccagtctaccgcaatccctgcgcccactgaccttaaatttactcaagtgacccccacttccctctctgcgcagtggacgccccccaatgtacagttgaccggatatagagtgcgggtgacgcctaaagagaagaccggtccgatgaaggagattaacttagcacccgacagtagctctgtggttgtgtctggactgatggtcgctactaagtatgaagtgagtgtgtatgcgctgaaagacacactgaccagcaggcctgcccagggcgtcgtcactacactcgagaatgtcagcccacctagacgagcgagagtcactgacgccactgagacaacgatcacaattagttggaggactaaaacagagacaatcaccgggttccaggtagatgccgtgccggctaacggacaaactccaatccagaggaccatcaaacccgatgtgagatcctacacaatcaccggcctgcaacctggcacggactataagatttatctttatactctcaacgataacgctcgcagcagtccagttgttatcgatgcatctactgcaattgacgccccatccaacttacggttcttggccacaacccccaactccctccttgtgagctggcaacctccccgcgccagaatcactggctacattatcaagtatgaaaaacccggcagtccccctagggaggtggtgccacggccgcgacccggagtaactgaggctacaatcacgggtctggagcctggcacagagtacaccatctatgtcatcgctctgaaaaataatcagaagagtgaacccttaattggtaggaagaaaactgacgaactgccacagctggtgaccctcccacacccaaacctgcacggtcccgagatactcgacgtaccatcaacggtgcaaaaaaccccttttgtcacacacccagggtatgacaccgggaatggcatccagctgcctggcacttcaggccagcagcctagcgtcggtcaacagatgatatttgaggagcacggattccggaggacaactcccccgaccacagccacacccataagacacagaccacgaccttatccacctaacgtgggtgaggagatacaaattggacacatcccaagagaggatgtcgattatcacttgtatccacacggcccgggccttaaccccaatgcttcaaccggccaggaggctctttcccaaactactatcagttgggcccccttccaggataccagcgaatatattatttcctgccatcctgtgggaacggatgaggagccactgcagtttcgagtgccaggaaccagtacatctgcaacactgactggtctaactagaggtgcaacatacaacgtcatcgtggaggctctgaaggaccagcagagacataaggtgagggaagaggtggtcacggtcggaaattccgttaacgagggcctgaaccagcctacggatgattcttgcttcgacccatacacagtaagtcattacgcagtgggggacgaatgggagagaatgtccgagagcgggtttaaactgctctgccaatgcctggggtttggatctgggcatttcagatgcgactcctcacggtggtgccacgacaacggtgtaaactacaagataggtgaaaagtgggatagacagggtgagaatggacagatgatgtcgtgtacgtgcttgggcaatggcaaaggtgaatttaagtgcgacccccatgaggctacctgctacgacgatggcaaaacataccacgtcggggagcagtggcagaaagagtacctgggtgctatttgtagctgtacatgttttggagggcagagggggtggcggtgtgacaactgcagacgaccgggcggcgagccctccccggaggggacaaccgggcaatcttacaaccaatactcacaaagataccaccagcgaactaatactaacgtcaattgtcctattgagtgttttatgccgctggatgttcaagccgatagagaagatagtcgcgagtag

SEQ ID NO: 15227 - DNA, 7341 bp, synthetic construct
  misc_feature 1..7341: note = Description of Artificial Sequence: Synthetic coding sequence
  source 1..7341: mol_type = other DNA
atgctccgcgggccaggcccaggcctgctgctgctcgcagtgcagtgcttgggtactgctgtcccgagcactggagccagcaaaagcaagagacaggcgcagcagatggtacagcctcagagcccagtggccgtttcgcaatctaagcctggatgctacgacaacgggaaacactaccagatcaatcagcagtgggagcgtacttacttaggcaacgcactggtgtgtacgtgttacggcggtagccggggctttaattgcgagtctaagcctgaagcagaggaaacatgctttgacaagtacactgggaacacatatcgggtcggcgacacgtatgagcgacccaaagattctatgatttgggattgcacgtgtattggggcagggcggggtcgaattagctgcacaattgccaatcgttgtcacgaaggagggcaaagctataagattggggacacctggcgccgcccccatgagaccggcgggtacatgttagaatgtgtgtgcctgggcaatggcaagggcgaatggacctgcaaaccaatcgccgagaaatgttttgatcatgcagccggtaccagttacgttgtgggtgagacatgggagaaaccctaccagggttggatgatggtagattgtacctgcctcggtgaagggtcaggtagaatcacatgtacctctagaaaccgatgtaatgaccaggatactcgcacttcctatcgcatcggcgacacctggtcaaagaaagacaacagaggtaacctgttgcagtgtatctgtacaggaaacggacgcggcgagtggaaatgtgagagacatacatctgtccaaaccacctcctcagggagcggcccattcaccgacgtgcgagcggctgtgtatcagccccaaccccacccacagccccccccctacgggcactgcgtcacagactccggagtggtttacagcgtgggcatgcagtggttaaaaacacaaggcaacaagcaaatgctttgcacttgtctgggtaatggtgtctcctgccaagagacagccgtgactcagacttacggcggaaacagtaacggagaaccttgtgtcttaccttttacctataacggtcggacgttctatagttgcaccacggaaggccgtcaagatggacacttgtggtgctcgactacctccaattatgagcaggaccagaagtatagcttctgtactgaccacaccgtattggtgcaaaccaggggcgggaactctaacggggctctctgccacttcccattcttatacaataatcacaactacactgactgtacatcagaggggcggcgagacaacatgaaatggtgcgggactacccagaactatgacgcagatcagaagtttggtttctgcccaatggccgcccatgaggaaatttgcaccactaatgagggcgtcatgtacagaattggggaccaatgggataagcagcacgacatggggcacatgatgcgctgcacttgcgtgggcaacggccgcggtgaatggacttgtattgcatatagtcagcttcgggatcagtgcatagtggacgatattacatataacgtcaatgataccttccataaacgtcatgaagagggtcatatgctcaactgtacctgttttggccaggggagaggtcgatggaaatgcgatcctgtggaccagtgccaggactctgagacaggcacattttaccagattggtgactcttgggagaaatatgtccatggcgttcgctaccagtgttactgttatggaaggggcatcggcgaatggcactgccagcccctccaaacataccctagttcctccggaccagtcgaagtgttcatcaccgagacgccgtcacagcccaacagtcaccctattcagtggaacgcgccccaaccaagccatatttctaaatatatcctgcgatggagacccaaaaacagcgtgggcaggtggaaagaagcgactatccctggccacttgaattcatacacgataaagggattgaaacctggtgtggtgtacgagggccagttgatctccattcagcaatatgggcatcaagaagtgactagattcgactttacgacaacctctactagcaccccggttacttcaaacacagtaactggtgagaccacacctttctctccccttgtggccacttcggagtcggtcacagagatcaccgcctcctccttcgttgtcagctgggtcagtgcgtcggacactgtcagcgggtttcgggtggaatacgaactgagcgaagagggagacgaaccgcagtatctggatctgccttcgactgcaacctcagttaatataccagatcttcttcctggacggaaatatatcgtgaacgtgtaccaaatttcagaagacggcgagcagagcctcatcctctcaaccagccagactactgccccggacgccccacccgatactacggtggatcaagtcgacgacacttccatcgttgtcaggtggtcaagaccacaggctccaatcaccggctatcgcatcgtgtactcacctagtgtggaaggctcctccacagagctgaacttgcccgaaactgcaaactcagtaacactttcggatctacaacccggtgtgcagtataatatcactatatacgcagtggaggaaaaccaagaatccaccccagtggtaatccaacaggaaacaaccggaaccccgagatctgacaccgtcccgagccctcgcgacctccagtttgtcgaggttacagatgtgaaagtgacgataatgtggacacctcccgagtcagcagtaaccggttatcgggtggacgttattcccgtcaatctgcccggggagcatgggcaacggcttcccatctctcgtaatacatttgcagaggttaccggactgagccctggtgtgacctactatttcaaagtctttgccgtctcacacggaagggagtccaaaccactgacggcacaacagaccacaaaattggatgccccaaccaatctgcagttcgtgaatgagaccgactctacagtgcttgttaggtggactccacctcgtgctcaaatcaccggttatcggctgaccgttggcctgactagacgcggacagccacggcagtataacgtggggccaagcgtttctaaataccctctgcggaacctccagccggcttctgagtacacagtcagtttggtggccattaagggtaatcaagaaagccccaaggcaacaggtgtgttcacaaccctccagccaggatcctcaattcctccatacaatacagaggttaccgaaaccacgatagtcattacttggacgcccgccccgagaattggattcaagctaggagtgagaccaagccaggggggcgaagctcctcgggaagtaacgagtgactcaggctctattgtggtttcgggtttaaccccgggtgttgagtacgtgtacacgattcaagtgctgcgtgatggacaggaacgggacgctcctatcgttaataaggtcgtcactccgctatctccccccacaaatttacaccttgaggctaatcccgacacaggcgttctgaccgtcagttgggaaagatccaccacacccgacattaccggctatcgcataacaactacacctacgaatggacagcagggaaacagcctggaggaggtcgttcacgccgatcaatcctcctgcaccttcgacaacctgagccccggtctcgagtacaacgtctctgtatatactgtgaaggatgacaaagagtcggttcctattagcgatacaattattccagaagtccctcaactcacagatctttctttcgtcgatatcacagattcatcgattggtctcagatggactcctctcaacagctccacaattattgggtataggatcacagtggtagccgccggcgaaggaatccccatattcgaggacttcgtcgactctagcgtgggttattacaccgtgaccgggcttgagcctgggatcgactacgacatcagcgtgatcacactgatcaatgggggagagtccgctcctacaaccttaactcagcagaccgcggtgcctccccccacagacctccgcttcacaaacatcgggcccgataccatgagggtgacctgggccccgcctccgtccatagacctgacgaattttctggttcggtattcacctgtgaaaaatgaggaggatgtggctgagctctctatcagcccatccgacaatgcagtggtgctcaccaacctgctgccaggcaccgaatacgtcgttagtgtctcctccgtgtacgagcaacacgaatcaacccccctgcggggccgacagaagactggcctggattcacccactggaatagacttcagtgacatcactgcgaattcgtttaccgtccactggatcgccccaagggctacaataactggctaccgcatacgccaccacccagagcatttttctggacggccccgggaggacagggtgcctcacagcaggaacagtataactctaacgaatctgacaccaggaaccgaatacgtcgtaagtatcgtcgccctaaatggcagggaagaatcacctctgcttataggccagcaatcgacggtgagcgacgtccccagagacttggaagtcgtagctgccactcccacatccctgttgatttcttgggatgctcctgcagtcacggtgaggtattacaggattacatacggcgaaacaggtggcaactcccctgtacaggagttcactgtgccaggtagtaaaagcacagctaccatctccgggcttaaaccgggcgttgactacactattaccgtgtatgctgtcacgggccgcggtgacagtcccgcgtcttccaagcctattagcatcaattatcgcaccgagatcgataagccctcccagatgcaagtgaccgacgtccaagacaattccattagtgtgaaatggttaccaagctcttccccggtaaccggttatagggtgacaacaacaccaaaaaacggtccaggacctaccaaaacgaagaccgccgggcccgatcagacagaaatgaccatagaaggtttacagcccaccgttgagtacgtggtgtcagtgtacgcccagaaccctagcggtgagtcacagcctctcgttcagaccgcagtcaccaatattgatcgcccaaagggcctcgcttttactgacgttgatgttgactcaattaaaatcgcctgggagtccccccagggccaggtttcgcgatatcgcgtgacatattctagccccgaggatggaattcatgagctgttccccgcaccagatggggaagaggatactgcggagcttcagggcctgcggcctggaagcgaatacaccgtgagcgtagtagctctccacgacgacatggaaagccaacccctgattgggacccagtcaacggccatccctgccccaacggacctcaagttcacgcaggtcacacctacatccctttctgcccagtggacaccacccaacgttcagctcactgggtatcgcgtgagggtcactcccaaggagaagacgggccccatgaaagagatcaatctggctccggacagctccagcgtggtagtgagtggcttaatggtggccacgaagtacgaagtatcagtgtatgcactaaaggacactttgacatccaggccggcccagggcgtggtgacaactttagaaaacgtgtccccacctaggcgagcccgggttaccgacgctactgagaccacaatcactatcagctggcggacgaagacggagaccattacagggttccaggtggacgcagtgccagctaacggtcaaacacccatccagaggacaattaagccagatgtgcgatcttatacaattactggcttgcagcccggcacggattataagatctacctctacaccctgaatgataacgctagatcttctccagtggtcattgacgcttctacggcaatcgatgctccttcaaatctgcgattcctggcaactaccccgaacagcctgctggtttcctggcagccgcccagggcccgcataactggctatatcatcaagtatgaaaaacctgggtcaccaccaagagaagttgttcccaggcctagaccgggagttaccgaagccacaattaccggcttagaacctgggactgaatacactatttatgttatcgccctcaaaaacaatcaaaaatctgaacctctgatcggccgtaaaaagaccgacgaactacctcagctggtcacgctgccacacccaaacctgcacgggcccgagattttggatgttccttcaacagtccagaaaactccctttgtgacccaccccgggtacgataccgggaatggcatccaactgccaggaacatctgggcagcagccatcagtgggccaacagatgatttttgaggagcatggatttcgccgaaccacccctccgaccacagctacacccatcaggcatcggcccaggccctatcccccaaacgtggggcaagaggcactttctcagacgaccatcagctgggcccctttccaagacacatctgagtacataattagctgccatccagtgggaacagacgaggagccactgcagtttagggtgcctggtaccagtacctcagctaccctcaccgggcttacacgcggagccacctacaacgtgatcgttgaagcccttaaagaccagcagagacataaagtcagagaagaagtggttacggtgggtaattctgtgaatgagggactgaaccagcctactgatgatagctgtttcgatccttatactgtgagccactatgccgtgggcgatgaatgggagagaatgtctgagagcggatttaagctgctgtgccagtgcttaggattcgggagcggtcattttagatgcgactcctcccgttggtgtcatgacaatggggtgaattataaaatcggagagaagtgggaccgccagggtgaaaatgggcagatgatgagttgcacctgcttaggcaacgggaagggggaattcaagtgcgatccacacgaagccacgtgttatgatgatggaaagacctaccacgtcggcgagcaatggcagaaagaatacctgggcgctatctgctcatgcacctgtttcgggggccagcgaggatggaggtgtgataactgccgtaggcccgggggggaaccttcccccgaggggaccaccggccagtcttacaatcagtactctcagcgttaccatcagagaacaaatacaaacgtcaactgtccaattgagtgttttatgcccctagacgtacaggcagatcgcgaggatagtcgggaatag

SEQ ID NO: 15228 - DNA, 7068 bp, synthetic construct
  misc_feature 1..7068: note = Description of Artificial Sequence: Synthetic coding sequence
  source 1..7068: mol_type = other DNA
atgctgcgcggccccggacctgggctactcctgctcgccgtccagtgtctcgggactgctgtgccctcaacaggagcctctaagtccaaaaggcaggcccaacagatggtgcagccacagagccctgtcgctgtgtcccaatctaagcctggctgctacgacaacggtaagcattatcaaataaatcagcagtgggagcgtacatatctcggaaatgccctagtctgcacctgctacggggggtcaaggggatttaactgcgagagtaagccagaagctgaggagacctgctttgacaagtataccggtaacacatatcgtgttggtgatacgtatgagaggcctaaggattcaatgatttgggattgcacgtgtataggtgccggccgaggcagaatcagctgcacaatcgcaaaccgctgtcacgagggaggccagagttacaagataggggacacttggaggagaccacatgaaactggcggctatatgctggagtgcgtgtgtctcgggaatggcaaaggcgaatggacctgtaagcccatagctgagaagtgcttcgaccacgctgcaggcactagttacgttgtaggagagacctgggagaagccataccagggctggatgatggtggattgcacctgtctgggggaggggagcggcagaataacttgtacatcacgtaaccgctgcaacgatcaggacacacgcacctcctacaggatcggggatacatggtctaaaaaagataatagaggcaatttattgcaatgcatctgtacgggaaacggtcgtggcgagtggaagtgcgagaggcataccagcgtgcagactactagtagtgggtctgggccgttcacagacgttagggccgcagtgtaccagccacaaccacacccccagcctccgccttacgggcattgtgttacagactcaggagttgtatacagtgtcgggatgcagtggcttaagacccagggaaacaaacagatgctctgtacttgccttggcaacggggtctcctgccaggaaacagctgtcacgcagacatacggaggtaacagtaatggagagccctgcgtactcccttttacatataatgggaggactttctacagctgtactacagagggccggcaggacgggcacttatggtgttctacaaccagcaactacgaacaggaccaaaaatacagcttttgtacggaccacaccgtcctggtgcagactcgaggagggaactccaacggggcactctgtcatttcccattcttatacaataaccacaattatactgactgtacatctgaaggaaggcgtgacaacatgaagtggtgcgggacgacgcagaattatgacgctgatcagaagtttggcttttgccccatggccgcccatgaggaaatttgcacaaccaacgagggagttatgtaccggattggcgatcaatgggacaagcaacatgacatgggccatatgatgagatgcacttgtgtgggaaacgggcggggtgaatggacctgcattgcctatagtcagcttcgggatcagtgcatcgtggacgacatcacctacaacgtcaatgacacctttcataagcggcacgaagaggggcatatgctgaactgcacatgttttgggcaaggcaggggacgttggaagtgcgaccccgttgaccaatgccaggatagcgaaacaggcacattttatcaaatcggagactcctgggagaaatatgtgcacggcgtgcggtaccaatgttattgctatgggagagggatcggcgaatggcactgtcagccattgcaaacctatccctctagtagcggccctgttgaagtcttcatcaccgagacccctagtcagcctaattcgcacccaatccagtggaacgcccctcagccttcccatatttcgaaatacattctgcgatggcggcctaaaaatagcgtcgggcggtggaaggaagccacaattcccggccatttgaattcctacacaattaaaggactaaagcccggggttgtgtatgaagggcagctgatttccatccagcagtacggacatcaagaagtgactaggtttgacttcaccacaacctcaacctctacacccgtgacgagtaatacagtgactggcgagacgactcccttttcccccctggtggcaacaagtgagagcgtgacagaaattaccgcttcctcatttgtggtttcttgggtctcagcttcagacaccgttagtggcttccgcgtcgaatatgaattgtctgaggaaggggacgagccccagtacctggatctgcctagcaccgctacctctgttaacattccagacctgcttccaggacggaagtatattgtgaacgtctatcagatctctgaagacggcgagcagagtttgatccttagcacaagccagacaactgcccccgacgcgccccctgacactacagtggaccaggtggacgataccagcatagtggtgcggtggtccagacctcaagcccccatcaccggatatcgtatagtctattctccatctgtagagggatcttctactgagcttaatcttcctgaaacggcgaactccgtgaccttaagcgatctacaacccggcgtacaatataatattacaatatacgcagtggaggagaatcaggaatccactccagtagttattcagcaagagactaccggcacccctcggagtgatactgtaccgagtcctagagacctccagtttgtcgaagtgaccgacgtgaaggtgaccattatgtggacacctccagagtccgcagtgaccggctatagagtagacgtgattccggtcaacctgcctggtgagcacggccagcgtcttcccatctcccgtaataccttcgccgaagtcaccggacttagccctggtgtcacatactactttaaggtctttgctgtgagccacggacgagagtctaaaccactgaccgcccaacagaccacgaagcttgacgcccctacaaacctgcagttcgtaaacgagaccgattcaacagtgctcgtgagatggaccccccctagggcccagataacagggtacagattgacagtcggtttgacgcggcgcgggcagcctcggcaatataacgttggccctagcgtgtcaaaatatccactgcggaacctgcagcctgcatccgaatacaccgtgagcttggttgctatcaaagggaaccaggagtctcccaaggcaaccggggtgttcacaacactccagcccggatcttctatccctccctataacactgaggtgaccgaaacaaccatagtgatcacatggacaccagcgccacgtattggatttaagctgggggtgcggcccagccaaggcggtgaggcacctcgcgaggttacttccgattccggtagcattgtcgtcagcggactcacccccggcgtggagtacgtgtacacaatccaggtgctgcgggatggccaggaacgggatgcaccgattgtgaacaaggtggtcacaccactgtcccctccaaccaacctgcatcttgaggcaaatcccgataccggggtgcttacagtgtcatgggagcggtccacgacacccgacattaccggctacagaatcaccacaactccaaccaatggacaacagggaaattccctcgaggaggtggtgcacgccgaccagtcatcatgtacttttgacaacctgtctcccggccttgaatataacgtgagtgtgtacacggtgaaggatgataaggagtctgttcccatttccgacacaattattcccgccgtgcccccgcctacagacttgcgattcaccaacattggccctgataccatgcgagtgacatgggcgccgcctccctcgatcgatttaactaacttcctcgtccgctacagtcccgttaaaaatgaagaagatgtggcagagctgtcgatttcaccatccgacaacgctgtggtgctgacaaatctgttgcctgggacagagtatgtcgtgtcggtgtcgtcggtctacgaacagcacgagagtactcctctgcgaggaaggcagaaaaccggcctggatagccccaccggtatcgatttttccgatatcactgccaattcatttactgttcattggatcgcgccaagagcaactatcactggttatcggattcgccatcatccggagcacttttcgggaaggccgagagaggatcgagtgcctcacagccgaaatagtattacactgactaacctcacaccaggcacagaatacgttgtcagtatcgtggctctcaatgggcgtgaagagtccccactgttgatcgggcagcagagtaccgtcagtgatgtgcctagagacttggaagtcgtggccgctactccgacctccctcctcatttcctgggacgcgcccgcggtgacagtgagatactacagaatcacatatggagaaaccggtggaaacagtcccgtgcaggaatttaccgtgcccggttccaagagtaccgcaacgatatctgggctgaagccaggagtggactatactatcactgtatacgccgtgacaggacgtggcgattcccccgcttccagtaaaccgatctccatcaattatcgcactgagattgacaaaccgtcccagatgcaggtgaccgacgtgcaggacaattccattagtgtaaagtggctgcctagctcatcccccgtgaccgggtacagagtaaccacgactccaaagaacgggccaggaccaacgaagacaaagaccgctggcccagatcagactgagatgaccatagagggcctgcagcccacagtggaatatgttgtctcagtgtatgctcagaaccctagcggtgaaagccagcccctcgtccagactgcggtgacaaacattgatcggcccaaaggactggcattcaccgatgttgacgtggactctattaagatcgcctgggagtccccacaggggcaagtaagccgttaccgggtcacgtattcgtctcctgaggatgggattcatgaactgtttcctgcccccgacggggaagaagacacagctgagcttcagggtctcagacctgggtcagaatacaccgtaagtgtggtggctctgcacgacgatatggagtctcagcctctgatcgggactcagtcaactgccatccccgcacctactgacctgaagtttactcaggtgaccccgacgtctttgtccgcacagtggactccccccaacgtgcagctaacggggtaccgcgtccgtgtgacacctaaggaaaaaacaggacctatgaaagagataaacctcgcccctgacagctcctctgtcgttgtctccggtcttatggttgcgacgaagtacgaagtgtcagtatatgctctcaaagacaccctgacttccaggccagctcaaggggtggtgaccactctcgaaaatgtgagcccaccgagaagggcaagggtgacagatgccactgagactacaatcactatctcctggcggaccaagactgaaactattacggggttccaggtggacgcagtcccagccaatgggcagactccaatacaacgaaccattaagccagacgttagaagttatacaatcaccggcttgcagcctgggactgactacaaaatttacctgtataccttgaatgacaatgccaggtctagccctgtcgtgattgacgctagcaccgcgattgacgccccctccaacctgcgctttctggcgaccacccccaattcgctgcttgtgtcttggcaaccccctcgggcccggatcaccggatatataatcaaatacgaaaagcccggctccccaccccgagaggtggtgccccgccccaggccgggcgtgactgaagcaaccattacaggtcttgaaccaggaacagaatacacaatctatgtgatcgccttaaagaacaaccaaaaatcggagccgctgatcggccggaaaaagacagatgaactccctcagctcgtcacgcttccacacccgaatctgcacgggcccgaaatcctggacgtgccttccactgttcagaaaactccctttgtgacccacccggggtacgatactggaaacggcatccagctgccagggacctctggccagcagcctagcgtgggacagcagatgatcttcgaggaacatggcttccggcggaccacgcctcctaccacagccacccctatccggcatcggccacgcccgtatccgccaaacgtgggacaggaggcgcttagccagactaccatctcctgggctccgttccaagatacaagcgaatatataatctcttgtcaccccgttgggacagacgaggaacctctccagttccgagtgcctggtacaagtacaagcgccacactgacgggactcacacggggtgctacatacaacgtcattgtcgaggcactgaaggatcaacagaggcacaaagtccgggaggaggtggtcaccgtggggaattctgtcaacgaagggctgaaccagcctacagacgactcctgctttgacccatataccgtaagccattatgccgttggcgacgagtgggagaggatgagcgagagtggctttaagttgttatgccaatgcttagggttcggctcagggcacttccgatgtgattcctcacggtggtgccacgacaatggcgtcaactacaagattggggaaaagtgggaccgccagggagagaatgggcagatgatgtcctgtacttgcctgggtaacggcaagggggagttcaaatgtgatccacacgaggctacatgctatgacgacgggaagacataccacgtgggagagcagtggcagaaggagtatttgggggccatatgctcttgcacttgctttgggggccagagaggttggagatgcgataactgtaggcgacctgggggagaaccttcacccgagggtactaccgggcagtcttacaaccagtactcacagcgctaccatcagcgaacaaacaccaatgttaattgcccaattgaatgcttcatgcccctggacgtccaggccgatcgcgaggactctcgggaatag

SEQ ID NO: 15229 - DNA, 6555 bp, synthetic construct
  misc_feature 1..6555: note = Description of Artificial Sequence: Synthetic coding sequence
  source 1..6555: mol_type = other DNA
atgcttcgtggaccaggccccggcttactcctgctggctgtgcagtgccttggtacggcagtgccatccactggcgctagcaaatcaaaacgtcaagcccaacaaatggtccaaccgcaatcccctgtcgccgtgagtcagtcaaaaccaggctgttatgataacggtaagcattatcaaatcaaccagcagtgggagcggacgtaccttgggaacgctctcgtctgtacttgttacggagggtcgcgcggctttaactgtgagtctaaaccagaggccgaagagacttgtttcgacaaatacacaggaaacacctatcgtgtgggcgacacgtacgaacgacccaaagattctatgatttgggattgtacatgcattggggcgggaaggggtcgcatttcatgcacgatagctaaccgatgccacgagggagggcagtcatacaagatcggagacacttggcgacgccctcacgaaacaggcggctacatgcttgagtgcgtgtgccttggcaacggcaaaggagagtggacctgcaaaccaatcgctgagaaatgtttcgatcatgccgcgggcacatcgtacgtggtgggagaaacttgggaaaaaccataccaggggtggatgatggtcgattgtacctgcctgggggaaggcagcgggagaatcacctgtactagcagaaaccggtgcaatgaccaagacaccaggacctcctatagaatcggagatacatggtccaagaaagacaaccgggggaatctcctacagtgcatttgtactggtaacgggcgaggggaatggaagtgcgagaggcatacgtctgtccagaccacaagcagcgggtccggacccttcaccgacgtccgcgccgccgtttatcaaccgcagccccatcctcagccacctccatatggtcactgtgttaccgactctggcgtggtgtacagtgttggtatgcagtggctcaagacccagggaaataaacagatgctatgcacgtgcctgggcaacggggtctcctgtcaggagactgcggtgacacagacctacggtggaaattcgaatggggagccctgcgttctgccctttacttataacggaaggaccttttactcttgtacaaccgaaggccgccaggacggacacctttggtgttcgacaacttcaaactacgaacaggatcagaaatacagtttctgcacagaccatacagttcttgtgcagaccagaggcgggaacagcaacggtgccctctgtcactttccttttctttataacaaccacaattatactgactgtacatcagaggggaggcgggataatatgaaatggtgtggcacaacccagaactatgatgctgaccagaagtttggtttctgtccaatggcagctcacgaggagatttgcacaactaatgaaggggtgatgtatcggattggggatcagtgggataagcaacacgatatgggacatatgatgcgatgcacatgcgttgggaatgggcgaggcgagtggacttgtattgcctatagtcagctgagagatcagtgcattgtggatgacatcacgtataacgtcaatgacacattccataaaaggcacgaggaaggccacatgctcaattgtacatgcttcgggcagggccgtggaaggtggaagtgcgatccagtcgaccaatgtcaagattctgagacaggcacattctatcagataggagactcttgggaaaagtacgtccacggcgtcaggtatcagtgttactgttatgggagggggattggggaatggcactgtcagcctcttcagacctacccgtccagttcgggtccagtggaagtattcattaccgagacgccaagccagccaaactcccatccaattcagtggaatgcaccacaacctagccacataagcaagtacatcctcagatggcgaccgaagaacagcgtagggcgttggaaggaagctacaatcccaggtcacctgaactcatatactatcaagggtctgaagcccggagttgtttatgaagggcagttaatttccatccagcagtacggacaccaagaggtgaccagattcgattttaccaccacatcaacttccaccccagttacgagtaacactgtaactggcgagactaccccatttagtccactcgtagctacctcagaatctgtgaccgagatcaccgcaagctctttcgtggtcagctgggtcagcgccagcgatactgtgtctggctttcgggttgagtatgagttgtccgaggaaggcgacgaaccccagtacctcgacctcccttctacggcgacaagcgtaaacattcctgaccttttgcctggcaggaagtacatcgtgaacgtgtaccagattagcgaggacggcgagcagagcctgatcctgagcacttcgcagaccaccgcccctgatgcgcctccagatacaacagtggaccaggttgacgacacctccattgtggtgaggtggagccggccacaggcccctattaccggctataggatcgtgtattctccatctgtggaagggtcaagtaccgagttaaatctcccggagacagccaacagcgtgaccttgagcgacctgcagcctggagtgcagtacaatatcactatttatgccgttgaagaaaaccaggaatctactcctgtcgtgatacagcaggagactaccggtacaccccgcagtgatacagtgccgagcccgcgagatctgcaattcgttgaggtaacagacgtgaaagtgacaattatgtggactccaccagagagcgctgtcactggttatcgtgtcgacgttattcctgtaaatcttcccggcgagcatgggcaacgcctgcccatctccagaaacactttcgccgaggtgaccggtctcagccctggcgtgacctactatttcaaggtattcgcagttagccatgggcgcgaatccaagcctcttactgctcagcagactaccaagcttgatgccccaaccaacctccagtttgtgaacgagaccgactcgacagtcctagtaaggtggaccccgcctcgtgcccagatcacgggttacagacttacggtggggctgacacggcgcggtcagcctcggcaatacaacgtgggtccttcagttagcaagtatcccctgcggaacttgcagccagcctctgaatataccgtgtcgctggtggccataaaggggaaccaagagtccccgaaagcaactggagtgttcacaactctccaacccggctccagcattccaccatacaacacagaagtgaccgagacgaccatcgtaatcacatggactccagctcctcggatcggcttcaagctgggagtgcgtccctctcagggcggggaagccccccgcgaggtcacgagtgactccggcagcattgttgtttcgggcctaacacctggcgttgagtatgtttataccatccaggtgctgagggacggccaggaaagagacgcccccatcgtgaataaggtcgtcacgccgttgagtccaccgaccaacctccacctcgaggctaatccagatacaggggttcttactgtcagctgggagcgatcaacaaccccagacatcacgggttaccgtatcaccacgactcctacaaatggccagcagggaaactccctggaggaggttgtgcacgccgaccagtctagttgcacctttgataacttgagtcctggtttagagtataatgtatccgtgtatacagtgaaagacgacaaggagtcggtgcctataagtgatactatcatacccgcggtgccacctccaactgacctgcggttcactaatattggacctgataccatgagagtcacatgggcaccgcccccctccatagacctcactaactttttggtccgctattctccagtcaaaaacgaggaggacgtcgcggaactgagcatatcaccttcagacaacgccgtggtcctcactaatctactgccaggaacggagtacgtcgtgagcgtgagtagcgtgtatgagcagcatgagagcactccattgcggggcaggcaaaaaacaggcctggactcccccacaggcatcgacttctcggacattaccgcaaattcctttacggtgcactggatcgctccaagagctactatcacgggataccgcatacgccatcatcctgagcacttctcaggaaggcccagggaggaccgcgtgccacatagcagaaactccataactctgacaaatctgactcctggaacggagtacgtggtctcaatagttgccctgaatggcagagaggagtctcctctgctgatcggacaacaaagtaccgtctcagatgtgcccagggacctagaagtggtagcggcaacacccacaagcctgttaatatcctgggacgcacccgccgtcactgtgagatattaccgtataacatatggcgaaactggcggaaatagccccgtgcaggaatttacagtgcccggcagtaaaagtactgcgaccatctctggactcaaacccggcgtcgattacaccatcactgtgtatgcagttaccggccggggcgattcacctgctagttctaaaccaatctcaatcaattaccgaacggaaattgacaaaccttctcagatgcaggtcacagatgtgcaggacaacagcatatccgtgaagtggctgccttcatcaagcccagtcacagggtacagggtaaccaccacaccgaagaatggtcccgggcctacaaaaacaaaaacggccggcccggaccagaccgaaatgaccattgaaggacttcaacctactgtagagtatgtagtgtctgtttacgcacagaatccaagcggtgaatctcagccccttgtgcagaccgccgtgaccaacattgaccgacccaagggactggcctttactgacgtcgatgtagatagtatcaagatcgcctgggagtctcctcaagggcaggtatcccgatatcgagtgacctactcctctccagaggacggtatccatgagctcttccccgccccagacggcgaagaggataccgctgaattacaggggctccgtcctgggagcgagtacaccgttagtgtagtcgctctgcacgacgatatggaaagccagcctctgattggaacgcaaagcacagccatacccgctccaacagacttgaagttcacccaggtgactcccacttccctgtcagctcagtggaccccaccaaatgtgcagctgacagggtatagggttcgcgtgacccccaaagaaaaaaccggtccaatgaaagaaatcaaccttgcgcccgactccagctccgtcgtcgtgagtgggctgatggtggcaaccaagtacgaggtgtcagtgtatgccttgaaggacaccctgactagtcgccctgctcagggagtggttaccactctggagaatgtcagcccgccaagaagagcgcgggtcaccgacgcgacagaaacaacaattaccatctcctggagaacaaagacagagaccataacaggctttcaggtcgacgcagtcccagcgaacggtcagacccccatccagcgcaccataaaacctgacgttcggagttacactataaccggcctacagccagggacagactataaaatctatctctatactctgaacgataatgcgcgctcttcccctgtggtgatagatgcaagcacagcaatcgatgcgcccagtaatctacgcttcctcgccaccaccccgaactcgctactcgtatcctggcaacctcctcgtgcgcgcatcacaggttacataatcaaatacgaaaagcccggttcacctcctagagaggtggtacctcggccccggccaggggttaccgaggccaccattaccggcctggagcctggaacagaatatacaatatacgtgatcgcactgaaaaataatcagaaatcagaaccattaattggcaggaaaaagaccgtgaacgaaggtcttaaccagccaaccgatgacagttgcttcgatccgtacacagtgagccattatgccgtgggagacgagtgggagcgaatgtctgagagtggattcaaactgctgtgtcagtgcctaggcttcggctctggacactttcgctgcgacagctctcgctggtgtcacgacaatggtgtcaactacaaaattggggagaagtgggatcgtcagggtgagaatggtcagatgatgtcctgtacttgcctgggcaacggaaaaggtgagtttaaatgtgacccccacgaggcaacatgctatgatgatggtaagacatatcatgtgggcgagcagtggcagaaagagtatctgggtgctatatgtagttgtacctgcttcggaggacagcgcgggtggcggtgcgataattgtagaaggcctggtggcgaaccatcaccggaagggactactggtcagtcgtataatcagtactcgcaaagatatcaccaacgaacgaatacaaacgtcaattgtccgatcgaatgcttcatgccccttgatgtgcaggccgatagggaggattcacgcgagtag

SEQ ID NO: 15230 - DNA, 6636 bp, synthetic construct
  misc_feature 1..6636: note = Description of Artificial Sequence: Synthetic coding sequence
  source 1..6636: mol_type = other DNA
atgcttcgcggacccggaccaggactgttgctcttggcggtgcagtgcctgggcaccgcggtgccttctacgggcgcaagcaagtccaagcgtcaggctcaacagatggttcaaccacagtcacccgttgccgtaagtcagtcgaagccagggtgttacgacaatggaaaacactatcagataaaccaacagtgggagcgcacttaccttggtaatgccctcgtatgtacctgttatggtggcagcaggggattcaactgtgaatccaagcccgaggccgaggaaacgtgcttcgataagtacaccgggaatacatatagagtgggggacacatatgagcgaccaaaagacagcatgatctgggattgtacctgcataggggccggaagagggaggatcagttgcacaattgccaataggtgccacgaaggaggtcagagctataagattggagatacatggcggcggccccatgaaaccggaggctatatgttggagtgcgtgtgtcttggtaacggcaagggagagtggacttgtaagccgatcgccgaaaagtgtttcgatcatgctgctggcacgagctacgtcgtcggagaaacatgggagaagccctaccaaggatggatgatggttgactgcacgtgcttaggcgaaggaagtgggaggatcacatgtaccagtagaaacaggtgcaatgaccaagatacccgcacctcctaccggattggggatacatggtccaagaaggacaataggggcaatttgttgcagtgtatatgcacggggaacgggaggggcgaatggaaatgcgaaaggcacacgtctgtgcagacgacgagctccggttccggaccgtttaccgatgtgcgtgctgccgtgtatcaaccacagcctcacccgcagccgcccccctatggccactgtgtgaccgatagtggtgtggtgtactcggtaggtatgcagtggttgaagacacagggcaacaaacagatgctctgcacctgtcttgggaacggggtgtcttgccaggagactgccgtcacacagacttacggagggaacagcaacggtgagccatgcgtgctcccatttacttacaacggcaggacattttactcttgtactaccgagggtcggcaggacggccatctctggtgcagcaccacatctaactatgaacaagatcagaagtattccttctgtactgatcatacagtactggtacagaccagaggcggcaatagcaatggcgctctctgccatttccctttcctgtacaacaaccacaattacaccgattgcacatcggaaggacgaagagacaacatgaaatggtgtggcacaacccagaattacgatgcggaccagaaatttggtttttgccccatggccgcccatgaagagatatgcaccacaaacgaaggcgtgatgtaccgcatcggggaccagtgggataaacagcacgacatgggacatatgatgaggtgcacttgcgtgggtaacggacgtggcgagtggacgtgcatcgcatattctcagcttagagaccagtgcatcgtcgatgatattacttacaatgtaaacgatacctttcataaacggcacgaagagggacacatgctaaattgcacttgttttggacagggtcgtggccgatggaagtgtgatcctgtcgaccagtgccaagacagcgaaactgggacgttttatcaaatcggcgattcctgggagaaatacgttcacggggttcgttaccaatgttattgttacggacgaggaataggtgaatggcactgccagcctttacagacgtatcccagctcaagcggcccagtggaggtcttcattaccgagacacctagccagccgaactctcaccctatccaatggaatgcaccacagccatcccacatatcaaagtacatcctgagatggcgaccaaagaactctgtcggacggtggaaagaggccaccatcccagggcatctgaatagctacactatcaaaggccttaaacccggagttgtttacgagggtcaactgattagtattcagcagtacggtcaccaggaggtaaccaggttcgactttaccaccactagcacctctacgccagtgacttcaaacactgtcactggagagaccacaccttttagtcctcttgtcgctacttccgaatccgtaacagagatcacagctagctcgttcgttgtgagctgggtaagcgcatccgacaccgtcagcggctttcgagtggaatacgagctaagtgaagagggggacgagcctcagtacttagacctgccttccactgccacgtccgtgaatattcctgacttgttgcccggtaggaagtacatcgtaaacgtatatcagatttccgaggatggcgaacagtccttaatcctctccactagccagaccaccgcccccgacgcacccccagacacaacagtggaccaggtcgacgatacctcgatcgtggtccggtggtcccggccgcaggcacccatcaccggctatagaattgtttattctcccagcgttgagggctcatcaacggaactgaatctgccagaaaccgccaatagtgtgaccctgtccgatctccagccaggggtgcagtacaacattactatttacgccgttgaagagaaccaggagagcactcccgttgtcatccagcaagagaccacgggaacccctaggagcgacaccgtccccagtccacgggacctgcagttcgtcgaggtcacagacgtcaaggtcaccattatgtggacaccaccagagtcagccgtgactggctaccgagttgacgtcattccagtcaatttgccaggtgagcacggccagcgcctgccaatttccaggaacactttcgccgaagtcactgggctaagcccaggcgttacatattattttaaagtatttgccgtgagtcacgggagagagtccaagcctctgaccgcccaacaaaccactaagctggatgcgcctactaatctgcagttcgtcaatgaaaccgactcgaccgtgctggtgcgatggaccccccccagggcacagatcacggggtacagactgaccgtcgggctcacccgcagaggccagcccaggcaatacaatgtcgggccttccgtgtccaagtaccctttaagaaacttgcagcccgccagcgagtacactgtgtcactggtggccatcaagggcaaccaggaatcaccaaaggcaacgggagtcttcacaaccttgcagccaggttccagcattcccccctataatacggaagtgaccgagaccaccattgtgattacatggacacctgccccacgcatcggtttcaaactcggagtgagaccttcacagggtggggaggcacctagggaggtgacatcagacagtggcagcattgtggtgtccggactgacacccggggtcgaatacgtctacaccatccaggtgctgcgcgatgggcaggagagagatgcacccattgtcaataaggttgtaactccgctgagcccacccaccaacttgcatcttgaagctaatccagacacaggggtgctcacagtgagttgggagagaagtactacacctgacataaccggatatagaattacaaccactccgacaaacggtcaacagggtaatagcctcgaggaggttgtgcacgctgatcagtcaagctgcacgttcgacaacctgagtcccgggctggagtataacgtctccgtgtatacagtcaaggatgataaagagagtgtgcccatatccgataccatcataccagctgtcccaccaccgaccgacttgaggttcactaacatcgggcccgacaccatgagagtgacttgggcgccccctcccagtattgaccttactaattttctagtgcgctactcgcccgtaaagaacgaagaggatgttgctgagctgagcataagtcccagcgacaacgcagttgtcctgacgaatctgctgcccggtaccgagtatgttgtgagtgtgtcatctgtctacgagcaacacgaaagcacacccctcagaggacgccaaaaaacaggcctggatagccctaccggcatcgatttctccgatattaccgctaattcgtttaccgtgcactggattgcaccccgggccaccataacagggtatagaattcgtcatcatccggagcacttttctggacggcctagggaggaccgcgttccccattcccgcaattccataactcttaccaacctgacacccggtactgaatatgttgtctcaattgtggcactcaatggccgagaagaaagtccgttacttatcggccaacagtccacagtctcggacgttcctcgtgacctagaggtggtggccgcaacacccacatctctcctaatttcctgggacgcccccgcagtcaccgtccggtattaccgcatcacctacggggaaaccggtggcaattcacctgtgcaagaatttaccgtacccggaagtaagagcaccgctacaatatccgggctaaaaccaggggtcgactatacaatcaccgtctatgctgtaaccggaagaggtgattccccggcctcctccaagccgatctctatcaattataggactgagattgacaagccttctcagatgcaggtgacagacgtgcaggataatagtatctccgtcaagtggttaccatctagttcaccagttaccggatatcgagtgaccacaactcccaaaaacggtccaggacctacaaaaacaaagacagccggtccggaccagactgaaatgactattgaaggattgcaacctactgtggagtacgtggtgtctgtatacgcccagaacccgtctggagagagccagccgctcgtgcagactgctgttacaaacatcgataggccgaagggtttggcattcaccgacgtcgacgttgacagcatcaaaatagcttgggaatcacctcaaggccaagtttcccgttacagggttacctactcatctccagaggacggaatccacgagctgtttcccgcgcccgacggagaggaagacaccgctgagctgcagggcctccgccccgggtccgaatatacggtgtctgtggtggcactccacgacgatatggaatcacaacctctgatcggcacccagagcaccgccatcccagctcctaccgatctcaaattcactcaggttactccaacttccctttccgcccagtggaccccaccaaatgtccagctcaccggctatagggtgagggtgaccccgaaagagaagacagggccaatgaaggagatcaatctcgctcctgacagttcatccgtggttgtaagcggcttgatggtcgcaactaagtacgaagtttccgtctacgcactgaaagatacattaacatcgcgccctgcccagggagttgtgacaactcttgagaacgtttctccgccgcggagagcaagagtgacagacgctaccgaaactacaatcacgattagctggaggaccaagacagaaacgataacaggattccaggttgacgctgtgcccgcgaacggtcagacccccatccagcgtacaattaaaccggatgtgagatcttacaccatcacaggtttgcagccaggtacggattacaaaatttatctgtacacattgaatgacaatgcccgttctagccctgtggtgattgatgctagcacagccatcgatgcaccttccaatttgcggtttctcgctactaccccaaatagcctgctggtgtcatggcagcccccgagagctcggattacaggatacattattaagtacgaaaagcctggtagcccacccagggaagtggtaccccgcccccgacctggcgtcaccgaggctactattaccgggctggagcctgggacagagtataccatatacgtgatcgctcttaagaacaaccaaaaatcggagccgctcatcggcagaaaaaagaccggccaggaggccctctcacagacaactatctcctgggctcccttccaggacacatcagagtacatcatctcttgccaccccgtcggcacagacgaggagcctctccaatttcgcgttcctggaacttccaccagtgctacactgacaggcctgacacgtggcgcgacctataacgttattgtcgaagccctcaaggaccagcagcgacacaaggtgcgggaggaagttgtgacagtgggtaactcgggatggtgtcacgataacggcgttaactataaaatcggcgaaaaatgggataggcaaggtgaaaatgggcagatgatgagttgcacgtgtctggggaatgggaagggagaattcaaatgcgacccacatgaagcaacatgttacgacgacggcaagacttaccacgtgggtgaacagtggcaaaaggagtacttgggagccatctgcagttgtacttgcttcggtggtcagaggggctggcgctgcgacaattgtaggagaccagggggggaaccctctccagaggggactacaggacagagctataatcagtacagtcagcgctaccatcagcgcaccaacacaaatgtcaactgtcctatagagtgttttatgcccctggacgtgcaggccgatagggaggactcgcgagagtag

SEQ ID NO: 15231 - DNA, 7434 bp, synthetic construct
  misc_feature 1..7434: note = Description of Artificial Sequence: Synthetic coding sequence
  source 1..7434: mol_type = other DNA
atgttgcggggcccaggaccaggtcttcttcttctggccgtgcagtgtcttggcactgcagtgccttcgacgggtgccagtaagtccaagaggcaggcccagcagatggttcaacctcaaagccccgtggcagtgagccaaagtaaacctggctgctatgataacgggaagcactatcaaatcaaccaacagtgggagcgcacatatctgggtaacgccctggtgtgtacctgctacggcggttctcggggatttaactgtgaatctaaacctgaggctgaggagacatgcttcgataaatacactggcaacacgtacagagtgggcgacacatatgagcgccctaaggacagcatgatctgggattgtacatgcattggagctggcagaggcaggatttcttgtacaattgctaatcggtgccatgagggcggccagtcctataaaattggcgacacgtggcgtcgcccccacgagacaggaggctacatgctcgaatgtgtgtgcttgggcaatgggaaaggcgagtggacatgcaaaccaatcgcggagaagtgctttgatcacgctgctggcacgtcctacgttgtcggggagacatgggaaaaaccttatcaaggctggatgatggtggactgtacttgcctcggtgaaggaagcggcaggattacgtgtacgagccggaacaggtgcaacgatcaggatacgagaacatcatatcgaattggggatacatggagcaaaaaagataatagggggaacttactgcagtgcatatgtactggcaatggccggggggaatggaagtgcgagagacataccagtgtccagactacctcttcggggagcggtcctttcaccgatgtgagagcagccgtctatcagccccagcctcacccccagccacccccatacggccattgcgtgactgacagtggagtcgtgtacagtgtgggaatgcaatggctgaagacgcaaggcaacaaacagatgttgtgcacatgcctggggaatggtgtgtcctgtcaggagaccgccgtcactcagacatacgggggcaattcaaacggcgaaccatgcgtgctgccatttacatataacggacgaacgttttactcctgcactactgagggtcgtcaggatggccacctgtggtgttccactactagcaactacgagcaggaccagaagtacagcttctgcactgatcacacagtgttagtgcaaacacgcggcggtaatagcaacggggccttgtgccatttcccatttctgtataacaaccataattacacagactgtacctcagagggacgtcgcgataacatgaaatggtgtggaacgacacagaactatgatgccgatcagaaattcggcttctgtccaatggcagctcatgaggagatctgcactactaacgagggagtcatgtatagaattggagatcagtgggacaaacagcacgatatggggcacatgatgaggtgcacttgcgtcggaaacggccggggcgaatggacttgcatagcttacagccagctcagggatcagtgcatagtggatgacatcacatacaacgtaaatgacacatttcacaaacgccacgaagaaggccacatgctgaactgcacctgtttcggccagggccgggggaggtggaaatgcgatccagtggatcaatgccaggactccgagaccggcacattttatcagatcggcgatagctgggagaaatacgtccacggggttcgatatcagtgttactgttatggcaggggaataggtgagtggcattgtcaacccctgcagacctaccctagcagctcaggacctgtcgaggtctttattaccgaaacaccttcccaaccaaatagtcacccgatacagtggaatgccccacagcccagccacatctccaaatatatcctcaggtggaggccgaaaaatagtgtgggcaggtggaaggaggctactataccaggacacctcaacagctatactatcaaagggctgaaacctggtgtggtatatgagggacagttaatcagcatacaacaatatggacatcaggaagtgactcgcttcgatttcacaacgacgtcaacttccacccctgttacgtccaacacggtaacgggcgaaaccacgccgttctctccattggtggctaccagcgagtcagtaaccgaaatcaccgcctcatctttcgtggtgtcatgggttagtgcatcagataccgtaagcggctttagagtagaatatgagctctcagaagagggtgacgaaccgcagtacttagacctcccatccacagccaccagtgtgaatattccagatctgctgcctggtaggaagtacatcgtgaatgtctaccagattagtgaggatggtgaacagtctctgattcttagcacgagccaaacaaccgctcccgatgctccacccgatactaccgtggatcaggtggacgatacatcaatagtcgtaagatggtcacggccccaagctccaatcaccggatatcggattgtttatagtccatcagtggagggatcatctactgagctgaacctccctgaaactgctaacagcgtgactctctcagacctacagccgggcgtgcagtacaatatcactatttatgccgtagaagaaaatcaggaatccacccctgttgttattcaacaggagaccaccggcacccctagatctgatacggtccccagcccccgcgacctgcagttcgtggaagtaactgacgtcaaggtaaccattatgtggaccccccctgagtccgccgttaccggataccgggtagatgttatcccagtcaatctgcctggtgagcacggccagcgcttaccaatctcccgcaatacgtttgccgaggttacaggattgagcccaggggtgacctattattttaaagtttttgccgtgagccacggacgcgaatctaaaccgttaactgctcagcaaactaccaagctggatgctcccacgaacttacaatttgtgaacgagactgacagcacagtgctggtgcgatggacccctccacgagcacagatcaccggttacagattgacagtaggtctgacgcggagggggcagcctagacagtacaacgtgggacctagcgttagtaaatatccactgcgcaatctgcagcctgcttcggagtataccgtttctcttgtggctattaagggtaatcaggagagccctaaggccaccggcgtctttaccacattacagccaggaagctcaatccccccttacaatacagaagtgaccgagactacgatcgtaatcacatggacgccggcgccaagaatcggctttaaactgggtgttcgtccatcacaggggggggaggcaccgcgagaggtgactagcgattcggggagtatcgtggtctcagggctgacaccaggagtcgaatatgtttacacaattcaggtgctgagagacggacaggagcgagacgctcccatcgttaacaaggtggtgactcctttatctccaccaactaatctgcacctggaagcaaaccccgacaccggagtgctaactgtgagttgggaacgcagtactacgcccgacataactggctatcgtatcacaacaacccccacaaacggacagcaggggaacagtctcgaggaagtagtgcacgctgatcaaagctcatgcacgttcgataatctgagtcccgggctggaatataacgtctccgtctacactgtgaaggatgataaagaatctgtaccaatctctgatacaattatcccagaagtgccacagctgaccgatctctcctttgtggatattactgactcaagtattggcctccgttggaccccgttaaactcatcaaccattattggatatcggattaccgtagtcgccgctggtgaagggattcctatcttcgaagactttgtggactcctccgtcggctactatactgtgaccggcctggagcccggcatagactatgacatttcggttattactctcatcaacggcggagaatctgccccaacaaccctgacgcagcagaccgccgtccctcccccaacagatcttcggttcaccaatatcggccctgataccatgcgggtcacttgggccccccctccatcaatcgacctgacaaacttccttgtgaggtactcaccagtcaagaacgaggaagacgtagcggagctgtccatctctccctctgataacgctgttgttctcacaaacttgctgcccgggaccgaatacgtagtttccgttagttctgtctacgaacagcacgaaagtactccacttagagggcgacagaagaccggcttagactcaccaaccggcatagatttcagtgacattaccgctaactcatttacagtccactggatagctccaagggcaaccattacagggtaccgaatacgacatcatcctgaacacttcagtggtaggcctcgagaagatcgcgtgccgcactcccgaaattccatcactctgacaaatctcacccccggaacggagtatgtggtaagcattgtggctctcaatggcagagaggagtcccctctactcatcggtcagcagagcacggtatcggacgtgcctagagatctggaggtggtggccgcaacacccacttcattactcatcagctgggacgccccagcagtcacagtgcggtactatcggattacttacggtgaaacaggtggcaacagcccagttcaagaatttactgtccccggctccaagtctactgccacaatttctggcctgaaacctggcgtggactatacaatcactgtctatgccgtgaccggaaggggggattcaccggcctcatctaagcctatctccataaactatagaactgagatagataagcccagccagatgcaggtcacagatgtgcaggacaatagcatcagtgtgaaatggctcccgtcctctagccccgtgactggctaccgcgtcactacgacccccaaaaacgggcctgggcctacaaaaacaaagacagcggggccagatcagacagaaatgacgattgagggactccaacctaccgtggagtacgtcgtttcggtttatgcacagaatccaagcggggagtctcagcctctggtgcagacggcagtcacgaatatcgacagaccaaaaggactggcatttacagacgtagatgtggactcaatcaagattgcttgggaatctcctcagggccaggtgtcgaggtacagagtgacctacagctccccagaagacggtattcacgaactgtttcccgcgcctgacggtgaagaggacacagccgaactgcagggcctgagacccgggtccgagtacacggtgagtgttgtggctttgcacgatgacatggagtcacagcccctcatcggcacacaaagcacagcgatcccagctcccactgatttgaaatttacacaagtgactcccacatcgttgtctgcccaatggacaccacctaacgtccagttaacaggctaccgtgtgcgggtgaccccaaaggagaagaccgggcctatgaaggaaatcaacctggcacccgacagtagcagcgtcgttgtatccggactgatggtggccactaagtacgaagttagcgtctatgcccttaaagatacactgacttccagaccagcacagggagtggtgacaactttggagaacgttagtccacctaggcgggctcgcgtgactgatgcgacggaaaccacaatcactatctcttggcggacaaaaacagaaactattacagggttccaagtggatgccgtcccagcaaacggtcaaactcctatccagaggaccattaagccagatgttaggtcctataccataaccggtttacaacctggcaccgattacaagatctacttatataccctaaacgataacgcgaggtcaagccctgttgtaatcgatgcttccaccgcaattgacgcccccagcaacctcaggtttctcgccactacccccaacagcctcctcgtctcatggcagcctcctcgcgctagaatcacaggctatattataaagtatgagaaaccaggctctccaccgcgggaagtggtacctagaccacggccaggcgtgactgaagccaccataaccggccttgaacctggaacagaatacaccatctatgtgatagccttaaaaaataaccagaagtcagaaccacttatcggtcgcaaaaagacggatgagctgccacagttggtaactctcccccaccctaacctgcacgggccggaaatcctggatgtcccctcgaccgtacaaaagacacctttcgtcacgcacccaggttatgatactggaaatggaattcagctgcctgggacaagtgggcagcagccgtccgtcggacaacagatgatttttgaggagcacggctttcgtcgtacaaccccgcctacgactgccacgcctataagacaccgcccgagaccatatccccccaatgtgggcgaggagatccaaattggccacatcccacgggaggacgttgattatcacttgtatccgcatggtcccggcctgaatccaaacgctagcaccggacaggaggccctgtcccagacgacaatctcttgggccccgtttcaggacacttccgagtacatcatcagctgtcatccagtcgggactgatgaagaacctcttcagttccgcgtgcccggtacaagcacatccgccacacttacaggactgactcgtggcgctacatataacgtgattgtggaagccttaaaagaccagcagcgccataaggtccgtgaggaggtggttacagtcgggaattccgtcaatgagggccttaaccaacccacggacgactcttgcttcgatccgtatactgtgtcacactatgcggtgggcgatgagtgggagagaatgagtgaaagcggcttcaagcttttatgccagtgcctcgggttcggcagcggacatttccggtgcgacagcagcaggtggtgccatgataacggggtaaattacaaaattggggaaaagtgggatcgtcagggagagaacggccaaatgatgtcctgtacttgtctggggaacggaaaaggcgagtttaagtgtgatcctcatgaagcaacatgctatgacgatggcaaaacttaccatgtgggagaacagtggcaaaaggaatatcttggagccatctgttcatgcacctgctttggcgggcagagagggtggcgatgcgataattgccggagacccgggggcgaacccagcccagagggaactacaggacagtcctataaccagtactcccagagataccaccaaagaacaaatacaaatgtcaattgccccatcgagtgtttcatgcccctagatgttcaagcagatcgggaggattcgagggagtag

SEQ ID NO: 15232 - DNA, 6891 bp, synthetic construct
  misc_feature 1..6891: note = Description of Artificial Sequence: Synthetic coding sequence
  source 1..6891: mol_type = other DNA
atgcttcgagggccgggaccaggcctgcttcttctggccgtgcaatgccttggaactgctgttccgagtacaggtgctagcaaaagtaagcgacaggctcagcagatggtccaaccgcaaagcccagtggccgtgagccagtccaagcctggttgttatgataatgggaaacactatcagattaaccagcagtgggagcgcacatacttaggaaacgcactggtctgtacttgttatggcggctcccgaggcttcaactgtgaatcaaaacccgaggccgaggaaacttgttttgacaagtataccggtaacacctatagggtgggagacacatatgagcgccctaaagatagcatgatttgggactgtacctgcataggtgccggacgagggcgcatctcctgcacaatagcaaatcgttgccacgagggcggccaatcctacaagatcggagacacttggcggcgcccacatgaaactggaggctacatgttggagtgcgtgtgcctgggaaacggcaaaggagagtggacatgcaagcccatcgcagaaaaatgctttgatcatgccgcaggcacttcatatgtcgtgggagaaacttgggagaaaccctatcagggttggatgatggtggactgtacgtgcctgggtgaagggagtgggagaatcacatgtacctcccggaatcggtgtaacgaccaggacactcgcacctcttacaggattggagacacctggtctaaaaaagacaaccgagggaatttgctccaatgtatatgcacaggcaacgggaggggtgagtggaaatgcgagagacacacttccgtccagacaaccagctcagggtctgggccttttacggatgtgagagctgccgtctaccaaccccagcctcacccccagccccccccctatgggcactgcgttaccgatagcggtgtagtttattcagtgggcatgcagtggctgaagactcagggaaataaacagatgctctgtacttgtctgggaaacggggtgtcttgtcaggaaactgcagtcacccaaacctacggagggaatagcaacggcgaaccctgtgtgctgccgttcacttacaatggccggactttttactcatgcaccacggagggccggcaggacgggcacctgtggtgctccacaaccagcaattacgagcaagatcagaagtacagcttctgtactgaccacaccgttctggttcagaccagaggcggtaactccaatggcgctttgtgccactttcctttcctctataacaatcataactacaccgattgtacttccgaaggacggcgcgacaatatgaagtggtgcggcaccacccagaattacgatgctgaccagaagtttggcttttgtcccatggcagctcacgaggagatttgtaccacaaatgagggcgtgatgtatcgcatcggggatcaatgggataagcaacatgacatgggtcacatgatgcgatgcacttgcgtcggcaacgggcgcggagaatggacatgtattgcctactcccagttgcgcgatcagtgtattgtggatgacatcacctacaacgttaacgacacctttcacaagaggcacgaagaaggacacatgctgaattgcacctgctttggccagggacgcggcagatggaaatgtgaccccgtggatcaatgtcaagatagcgagaccggaaccttttaccaaatcggcgacagctgggagaaatacgtgcatggggtgaggtaccaatgctattgttacggccgaggaataggggaatggcactgtcagcccttgcagacatacccctcctcttccggccccgtggaggtgtttattaccgagactcccagccaaccaaatagccacccgatccagtggaacgcccctcagccgtcccatattagtaagtatatactgagatggagacctaaaaatagcgttggccggtggaaggaagctactattcctggacatctgaattcatatactatcaaaggcttaaaaccgggagtcgtatatgaaggacagctgatctcgatacaacagtatggacaccaggaggttactcggttcgactttacaactacatctacttccacccccgtgacatcgaatacagtcactggggaaactacccccttctctcctttggtggcgactagcgagtcagttacagagattacagcctctagcttcgttgtcagttgggtctcggcctcagatacagtatctggatttagagtggaatacgaattgtccgaggagggggatgagcctcaatacttagacctcccatcaacagctacatccgtgaatattccggatctgttgcccggacggaagtacattgtcaatgtgtaccagatctccgaagatggtgagcagtcgctcattttgagcacatcccaaaccacagccccagatgctccaccggatacaacagtggaccaggtggacgatacaagcattgtggtgaggtggagtcgcccgcaagcgcctattacaggttatcgtatcgtgtattcacccagtgtggaaggctccagcaccgaattaaacctgccggagacggcgaactccgttactctctcagatctacagcctggtgtgcaatacaacatcacaatctatgcagttgaggaaaaccaggaatctacccccgtggttatccagcaggagactaccggcacccctcgctctgataccgttccgtcacctagagacctgcagttcgtagaggtgactgatgttaaagtgaccatcatgtggacacccccggaatctgcagttactggctaccgagtagatgtgatacctgtgaacctgccaggcgaacacggacagaggctccctattagtcggaacactttcgccgaggtgaccgggctgtcacccggtgtgacatactactttaaggtgtttgcagtgagccacggtagagaatccaagccactgaccgcgcagcagactaccaaactcgacgcaccaacaaatttgcagttcgtgaatgaaactgatagtaccgttctcgtgcggtggactccaccaagagctcagattactggatatcggctgacagtggggctgacgagacggggccagccgcggcaatacaatgtcggtccatctgtgagtaagtaccctctgagaaacctgcagccagcatcagaatatactgtaagtcttgtcgctatcaagggaaaccaagagtcgccgaaagcaaccggcgtttttaccactctgcagcctggctcttcaattccaccttataacactgaggttaccgagactaccatagtcattacatggaccccagcaccacgaattggttttaagctgggagtccgtcccagtcagggtggcgaggccccacgggaggtgaccagcgatagcggtagtatcgtcgtgtcagggctgaccccgggggtagagtatgtgtacaccatacaggtgctgagggatgggcaagagagagatgccccaatcgtgaataaagtagtgaccccgctcagcccacccaccaatctccatttggaggccaatcctgacacaggagtccttacagtgtcatgggagcggtcaactacgcctgacatcacaggatatagaatcacaactacccctactaacggccagcagggcaattctttagaggaagtggtccacgcagatcagtcctcctgtacattcgataacttgtcccctgggctggagtacaacgtttccgtgtatacggtaaaagatgacaaagaaagcgtgcctatttctgacacaatcatccctgccgtgcccccccctacagatttgagattcactaatattggcccagacaccatgagggttacatgggctccgcctccgagcatcgatcttacaaatttcctcgtgaggtatagtccagtaaagaacgaagaggatgtggctgagctctccatctcaccctctgacaacgcagttgtcttgactaaccttctgcccgggacggaatacgtcgtctccgtgtccagcgtgtacgaacagcacgaaagcactcccctccgaggaaggcagaagacggggctggatagccccaccggcatcgatttctccgacataaccgctaactcctttacagtccattggattgcccccagggctacgatcacaggctaccgaatccgccaccatcctgagcacttctccggacgtccgagagaggatcgcgtgccacattctaggaactccatcactcttacaaatttgactccaggcactgagtacgtggtgagcatagtcgcactgaacggccgggaggaatctcccctgcttattgggcagcagagcaccgtgtcagatgtcccacgcgatctggaagttgttgcagctacacccacatctctactaatctcttgggacgctcccgctgtgacagtcaggtattacagaatcacttacggcgaaaccggagggaattcccccgtgcaagaatttactgtgcccgggtctaaaagcactgctaccatttcgggattgaagcccggggtagattacaccatcactgtttatgctgtcaccggtagaggggatagtcctgcctccagcaaacctattagtattaactataggaccgaaatagacaagcctagtcaaatgcaggtgaccgatgtgcaggataattccatctccgtgaaatggcttcccagcagcagtccggtcaccggctatagggtgacgacaacaccaaagaacgggcccggccccacgaaaactaagacagcaggacccgatcagaccgagatgacaatcgaaggcctccagcctacggtcgagtacgtcgtgagcgtttatgcacagaaccccagcggggagtctcagccactggtccagacagccgtaacaactattccggctcccaccgatctgaaatttacccaagtcacacctacatcccttagcgcccagtggactcctccgaatgtgcagttaactggttatagggtgcgggttactcctaaggagaaaacggggcccatgaaggagatcaacttggcccccgacagtagtagcgttgtggtctctggactgatggtcgccaccaagtatgaggtttcagtgtacgccctcaaagatacattaaccagtcggcccgcccagggggtggtgacgactctagaaaatgtgagtcctccaaggcgagctcgggtgacggacgcaaccgaaaccactataacaatttcatggaggacaaagacagagaccattacaggcttccaggtagacgcagttccagccaacggtcaaacccccatccagcgaaccatcaagccggatgtaagatcttacacgatcaccggactccaaccaggaaccgactacaaaatttacctatatactctcaacgataatgccagatcctcacccgtagtgatagatgccagtaccgctatcgatgcacctagtaacctgagattccttgcaaccactccgaattcgctgctggtgtcctggcagccaccgcgcgcaagaattaccggctacattattaagtacgagaaacctggcagcccccctagggaagtcgtcccgcggcccagacctggtgtgactgaggccacaatcacgggactcgaaccaggaacggaatataccatctatgtgattgcattgaagaacaatcagaagagcgagccccttattggacggaaaaaaaccgatgaactgccccagttggtgaccctgccacaccccaacttacacggacctgagatcctcgacgtgcccagcactgtacagaagacacccttcgtaactcaccccggatatgacaccggcaacggaattcaattgcccggaactagtgggcagcagccttccgtcggtcagcagatgatcttcgaagagcacgggttccgtagaaccacccctcccactaccgcaacgccaatcagacatcgcccacgcccgtacccacctaacgttggggaggagatccagatcggacacatcccgagagaagacgtggactaccacctttaccctcacggtcccggactgaatccaaatgcctctacaggccaggaggctctctctcagaccaccatctcatgggccccgtttcaagacacgagtgagtacattattagctgtcaccctgttggaactgacgaagagccactgcagtttcgagtgcccggtacctctacctccgcaactttgacagggctcactaggggtgccacgtacaacgtgatcgttgaggcactgaaggatcagcagagacacaaggtgcgagaggaagtcgtgacagtgggcaatagcgtgaacgaaggtctcaatcagccaacggacgacagctgcttcgacccatatacggtgtcacactatgctgtcggtgacgagtgggagaggatgagtgagtccggatttaagctcctttgccagtgtttaggtttcggatctgggcattttcggtgcgattctagccgctggtgtcatgataacggcgtcaattacaagatcggagaaaagtgggatagacagggggagaacggacagatgatgtcatgcacttgcctgggtaacgggaagggagagttcaaatgtgatccgcacgaggcaacatgctacgacgacggcaagacttatcacgtgggcgaacagtggcagaaggaatatctgggcgcgatctgttcctgtacctgtttcggcggccagcggggctggaggtgtgacaattgccggaggcctggcggggaaccttccccagaaggtactaccggtcaatcatataatcaatattcacaaaggtaccaccagcgtaccaacacaaatgttaactgtcctatcgagtgctttatgccgctcgacgtccaggccgatcgcgaggattctcgggagtag

SEQ ID NO: 15233 - DNA, 6096 bp, synthetic construct
  misc_feature 1..6096: note = Description of Artificial Sequence: Synthetic coding sequence
  source 1..6096: mol_type = other DNA
atgcttagaggaccgggacccggactactgctgctcgccgtccagtgtctcggaacggccgttccaagtacaggagcctccaagtcaaagcgtcaggctcaacagatggtgcagccccagtcccctgtggccgtgtcacagtccaaaccaggctgctacgataatggcaaacattaccaaattaaccagcagtgggaaaggacctatctggggaacgccctagtgtgcacatgctatggcggcagccgtggattcaactgcgaaagcaagccagaggccgaggagacctgctttgacaagtacacaggaaatacttacagggtcggtgatacctacgagagaccgaaggatagcatgatctgggattgcacttgtattggcgccggcaggggacggatttcttgcaccattgccaacaggtgccacgagggtggccagtcctacaagattggagacacatggcggaggccccatgagacagggggctacatgttagagtgcgtgtgtctgggcaatggaaagggcgaatggacctgtaagccgattgcggagaagtgctttgatcatgccgccggcactagctacgtagttggtgagacctgggagaagccttatcagggctggatgatggttgactgcacctgtctgggggaaggttcaggtagaatcacctgtacttctagaaatagatgcaacgaccaggacacccgaaccagctaccggattggagatacttggtccaaaaaggacaatagaggcaatctcctacagtgtatctgcactgggaatggcaggggcgagtggaagtgcgaacgtcatacatccgtgcagactacgtccagcggcagcggtccattcaccgatgttagggccgcagtctatcagccgcaaccacaccctcaaccaccgccgtatggtcattgtgtgacagactcaggggttgtgtattccgtaggcatgcagtggctaaaaacccaggggaacaaacagatgttgtgcacctgtctgggaaacggggtgtcctgtcaggaaacggccgtgacacagacctacggtggcaactccaacggtgaaccatgtgtccttcctttcacctataacggacggacgttctatagctgcacaactgaagggcgccaggatggccacctttggtgttctaccacatcaaattacgagcaagaccaaaagtatagcttctgcacggaccacactgtgttggtgcaaacacggggcggcaattctaatggggccctctgtcatttccccttcttgtataacaatcataactatacagactgtacatcggaaggtcggagggacaacatgaagtggtgtggcactacacagaattatgatgccgatcagaagttcggcttctgccctatggcagcccatgaggaaatctgcactactaacgagggcgtcatgtatcgtatcggagaccagtgggataagcagcacgatatgggccatatgatgagatgcacctgtgtggggaatggcaggggcgagtggacctgtatcgcctactcacagttgagggaccagtgcattgttgacgatattacatacaatgtcaacgatactttccataagcggcacgaagaagggcacatgttaaactgcacttgtttcggacaaggaaggggcagatggaaatgtgatccagtcgaccagtgccaggatagcgagacagggaccttttatcagataggggattcctgggagaagtatgtgcacggggtgagatatcagtgttattgctatggtcggggcataggtgagtggcactgccagcccctgcaaacctatccctcaagttccggaccagtggaagtattcatcaccgagacaccttcgcaacctaacagtcatccaattcagtggaacgcaccccaaccgagccatatctctaaatatatcctgagatggcgacccaagaattctgtcggtaggtggaaggaagcaactatccctggtcacctcaattcctataccataaaggggcttaagcctggggtggtctatgaagggcaactgatctccattcagcagtacgggcatcaggaggtcacccgattcgactttaccacgacatccacctccacacccgtgacgtcaaacaccgttacaggggaaaccacgccatttagccctttggtggcaacatctgagtccgtcaccgaaatcaccgcgagttcctttgtggtgtcttgggtatcggcctccgacaccgtctctggcttccgagtggaatatgagctgtcagaggagggagatgaaccacagtatctcgatctgccctccacagctacctcagtgaatatcccggatttactgcctggcaggaagtacattgtgaatgtgtaccagatcagcgaggacggtgaacaatcgctgatcctgagtacatcccagaccaccgctccggacgcccctccagatacaacagttgaccaggtagacgataccagcatcgtagttagatggagccggcctcaggctcccatcactgggtacagaattgtctatagcccatcggtcgaaggcagctctactgagctaaacctgcccgaaactgcaaattccgtgaccctgtccgacctgcaaccgggcgtacagtacaacatcactatatatgccgtagaggaaaatcaggaaagtacacccgtcgtgatacagcaagaaacaaccggcactcccagatccgacacagtacctagtccacgtgatttacaattcgtggaggtgacagatgtgaaggtaactataatgtggaccccacccgagtcggccgtgacaggatatcgcgtggacgtaatacccgtgaatctccctggggaacatggacagcgactgcctatctcaaggaacaccttcgcagaagtgacaggtctgtcaccaggggtaacgtattactttaaagtgttcgccgtgagtcacggtcgcgagtcgaagccactgacggcccagcaaaccaccaaactagatgcacccacaaatctgcagtttgtgaacgagaccgacagcaccgtacttgttcggtggactccaccaagggcccagattaccggatatcgactaactgttggtcttacacgccggggacagccacgccagtataacgtgggaccttcagtttccaagtatcctttgcgcaacctgcaacccgctagcgaatatactgtgtccctggtggcgattaagggtaatcaggagagcccgaaggctactggggtgtttaccactctccagccggggtcctccatccccccttacaatactgaggtgactgagacaacaatcgtgatcacctggactcctgccccacgcataggcttcaagcttggagtgagaccatctcagggaggcgaggctcccagggaggttacttctgattcaggaagcatcgtcgttagcggactgacacccggagtggagtacgtgtacacaatccaggttttgagagatggacaggagagagacgctccaattgtgaataaggtggtgactcccctcagcccacccacaaacctacacctggaggccaaccccgacacaggtgtgttgaccgtgagttgggaacgaagcaccacaccagacatcacggggtatagaataacaaccactcctaccaacgggcagcaaggtaacagcttggaggaggtggttcacgctgaccagtcttcatgtacattcgataacctttctcctgggttggagtataatgttagtgtgtacacagtgaaagatgataaagagtccgtaccaatttcggatactattatccctgcagtgcctcctccaaccgacttgcgcttcacaaatatcggcccagacactatgagggttacgtgggctcctcctccttcaatcgatctgaccaattttctggtgaggtactccccagttaagaatgaggaggacgtggcggagctctcgatcagcccctctgacaacgctgtggtgctcactaacctgctgcctggaaccgaatacgtagtgagcgtaagctcagtctatgaacagcatgaatccacgccactgaggggaagacagaaaaccgggttagattcacccactggaatagactttagtgacataaccgcaaactcttttaccgtgcattggatagcgccccgggctaccataactggttatagaataagacaccacccggagcacttctccggtcgtcctcgcgaggatcgagtgccacactccaggaactcaatcacgttgacaaatctgactccaggtaccgaatatgtggtttccatagttgcccttaatgggcgggaagaatcccccctgctgatcggacagcagtcgaccgtgagcgatgtgcctcgggacttggaggtggtggccgctaccccaaccagccttctaatctcgtgggacgcacctgcagtgaccgtgaggtattacagaatcacctacggagaaacaggcgggaacagtccggtacaagaattcaccgtgcccggaagtaaaagtactgcaacaatttcaggattgaagcctggagttgactacaccatcacagtgtatgccgtgacaggccggggagatagcccggccagtagtaagccaattagcataaattataggaccgagatcgataaaccttcccagatgcaagtgacggatgttcaggacaactctataagtgtgaagtggttaccatccagctccccagtgaccggctatagggttaccaccactcctaagaacggtcctgggccaacgaagactaagacagcgggaccagatcaaactgagatgactattgaaggcctacagccgacagtggaatacgtggttagtgtctacgcccaaaacccatccggagagtctcaacctcttgttcagacagcagtgacaaacattgaccgccccaagggtctggccttcaccgacgtggatgtggactccatcaagattgcatgggagtctccgcagggacaagtgtcccgttacagggttacctactcaagcccagaggatgggattcatgagctcttccctgctccagatggcgaagaagacacagcagagctgcaagggttgcggccaggtagtgaatatactgtgagcgtcgtggcactacatgacgatatggagtcacagccactgataggcacccagagcacagccatacctgcaccaaccgatcttaagtttactcaggtaacaccaacgagcctctccgcccagtggacccctcctaatgtacagctaactggatacagagttcgcgtgaccccaaaggaaaagactggtccgatgaaggagatcaacttggcccccgattcgtcatctgtcgttgtgagcgggcttatggtggcaacaaagtacgaggttagtgtctatgcccttaaagacaccctgacatctcgccccgcgcagggcgtggtcactaccctggagaacgtctccccaccgcggcgcgcgagggttaccgatgcaaccgagacaacaattaccataagttggcggacaaagacagaaaccattacagggttccaggtggatgcagtacctgctaatgggcagacccctatccaacggactatcaagccagatgttagatcctatactataactggtcttcagcctggcacagattacaaaatctatctttatacattgaatgataacgctcgctcaagtcccgtcgtcatcgatgcgtctacagctattgacgctcccagcaacctaaggtttctcgccactactccaaactccctcctggtttcctggcagccccctcgcgctaggatcaccggatacataataaaatacgaaaagcccggctcccccccccgggaggtggtgcccaggccaagaccaggtgtaacagaggctacgatcacaggccttgaacctgggactgaatataccatttatgttattgctctgaagaataaccagaagtctgagcctctgattggacggaagaaaactggccaggaggcactgtcacagactacaatctcttgggctcctttccaagatacatccgaatatatcattagttgtcatcccgtgggtacggacgaagagcctctccaatcaactaaggcctag

SEQ ID NO: 15234 - DNA, 6531 bp, synthetic construct
  misc_feature 1..6531: note = Description of Artificial Sequence: Synthetic coding sequence
  source 1..6531: mol_type = other DNA
atgctgcgaggccccgggcctggcctcctgctgcttgccgtgcagtgtctgggcacagcagtgcctagtacaggggcttccaagtccaagcgccaagcgcagcagatggtccagccccagagccctgtcgcagtgtctcaaagcaagcctggttgctacgacaacggtaaacattatcagataaatcaacaatgggagcgcacatatctcggcaacgcactggtgtgtacctgctatggtggctctagggggtttaattgcgagagtaagcctgaggctgaggagacctgctttgacaagtataccgggaacacctatcgtgttggcgacacttatgagcggcctaaggatagtatgatctgggactgcacatgcatcggcgctggaaggggcaggatatcttgcaccatcgccaaccggtgccatgaaggagggcagtcctataagattggggatacctggcgccggccccacgagacaggcggctacatgctcgagtgtgtgtgcctcggcaacggcaaaggtgagtggacctgtaaaccaatagccgaaaaatgcttcgaccacgccgcagggacttcatatgtagtgggcgaaacgtgggagaagccataccaggggtggatgatggtggactgcacttgcctgggcgaagggtcaggacggatcacatgtacgtcacgcaatagatgtaatgaccaggacacccgcacaagctatcgcataggcgacacttggtccaaaaaggacaatcgcggtaaccttctgcagtgcatctgtacagggaacggacgtggcgaatggaagtgtgagaggcatacctccgtgcagactacgagctccggctcagggccgtttactgatgtccgcgcggcagtataccaacctcagccacacccccaaccacccccttatgggcactgcgtgacagatagcggcgttgtctattctgtggggatgcagtggctcaaaacgcagggaaataaacaaatgttgtgcacatgccttggcaatggagtatcctgccaggaaaccgcagtcacacagacttacggcggaaactccaacggcgaaccctgtgtgttgccattcacgtataacggaagaaccttttactcctgtaccactgagggtcgtcaggatggccacctttggtgcagtaccacttcgaactacgagcaggaccagaagtatagtttctgtaccgatcacacggtcctcgtgcaaacgcgcggcggtaactcaaacggggctctctgtcatttcccatttttatacaataaccataactacaccgattgtacatctgaaggtagacgggataacatgaagtggtgtggcacaacccagaattatgacgcagaccagaagtttggcttctgtccgatggcagcacatgaagagatctgcacaaccaacgagggggtgatgtaccgaataggtgatcagtgggataagcagcacgatatgggtcacatgatgaggtgcacctgtgtgggtaatggccgaggagagtggacctgtatagcttactcccagttacgagaccaatgcatagtggacgatataacctacaatgtgaacgacaccttccacaagcgtcatgaagagggccacatgctgaattgtacctgtttcgggcagggtcggggcagatggaagtgcgacccagtcgatcaatgccaggatagtgagactggcactttctaccagataggcgactcttgggagaaatacgtgcacggggttaggtatcaatgctactgctacggaagggggataggagaatggcactgccaaccactgcaaacatacccatcgagtagcggcccagtcgaggtgtttattacagagaccccgtctcagcctaactctcatcccatccagtggaatgctcctcaaccctcacacatctcgaagtatatcctgagatggaggcctaaaaactctgtgggccgatggaaagaggcaactattcctggccatctgaactcgtatactattaagggcctgaagccgggagtcgtgtacgaagggcaactgatttccatccagcaatatgggcaccaggaggtgactaggttcgactttaccactaccagcacatccacaccagtgactagtaacacagtgaccggcgagaccactccattttcacccctcgtggcaacctctgaatctgtgactgagatcaccgctagtagctttgtggtctcctgggtctcagctagtgacaccgtttctggtttccgagtcgaatacgaactgtccgaggagggcgacgaaccacagtacctggatctcccatctaccgcaacttccgttaatatacccgacttgctgcctggtcgtaaatatattgtgaatgtgtatcaaatttcggaagatggcgagcaatccctgatacttagcacatcacagaccacagcacccgatgcccctcctgatacgaccgtggatcaggtcgatgacacaagcattgtggtgagatggtcacgtccgcaggctccaattaccggatatcgtatcgtctattcgccgtcggtggaaggctcatcaacagagctcaacctgcctgagactgcaaactccgtgacactgtctgacctccagccgggtgtacagtacaacatcactatatatgcggtggaggagaatcaggagagtactccagtggtcatacagcaggagacaaccggaacgccgcggagtgatactgtgccaagccctagggatctgcagtttgtggaagtgacagatgtgaaagtcactataatgtggacgccacccgaaagcgctgttactggctaccgagtggatgtaatcccagtgaacctcccaggagagcacggacaaagactgcctatctcacgcaataccttcgccgaggttaccggactctcaccaggtgtgacatactattttaaagtcttcgccgtgtcccatggtcgagaaagtaaacccctgacggctcaacagacaaccaaactagacgctccaacaaaccttcagtttgttaatgagactgactccacggtgttggtccgatggacaccaccgcgcgctcagatcactgggtaccggcttacagttggcttaacaaggagaggacagcccaggcagtataatgttggtccatccgtttctaagtacccacttaggaatctgcagcccgcctccgaatataccgtttccctcgtggctattaagggaaaccaagaatcacctaaagctaccggtgtgttcactaccctgcagccaggcagttcaatcccaccttacaataccgaagttaccgagacaaccatagtcataacatggacaccggccccgcgcatcggcttcaagctgggggttaggccatcacaagggggcgaagctccaagggaggtgacctccgattccggttcaatagtcgtatccggcctaacaccaggagtcgaatacgtgtacacaatacaggtcttgcgagatggacaggaaagagacgcacctattgtgaataaagtggtcactccactgtccccccctaccaatttgcacctagaagccaaccctgataccggtgtacttacggtcagctgggagcggtcaactactccagacataactgggtacaggattacaaccacccccactaatggtcagcaaggcaattctctcgaggaggtggttcatgcagatcagtctagttgtacttttgacaatctaagtcctggccttgagtataacgtttccgtctacactgtcaaagacgataaggagagcgtgcctatcagcgacaccatcatccccgcggtgcctccgcctactgatctcaggtttactaatattggtcctgacactatgcgggtcacttgggcccctccacccagcattgatctgacaaactttctcgtcagatattctccagtcaagaatgaggaagacgtggcagagttgtctatctctccaagcgacaatgcagtggtcctaactaatctgctgccagggactgaatacgtggtttcggtctcctccgtttatgaacagcacgagtccaccccccttaggggacgacagaaaaccggattggatagtcctactgggatagacttttccgacataaccgcaaacagtttcacagttcattggattgccccaagggccactatcacaggctacaggattaggcatcatcctgaacacttctcagggagacctagagaagaccgagtccctcactcccgtaactcgattacactcacaaatctgacccccggtaccgaatacgttgtttctattgtagccctaaacggtcgagaggagtctccccttctaatcggacagcaatccaccgtctcagacgttcccagagatctggaggtcgtcgccgcaacaccgacatctcttttaatatcatgggacgcccctgcggtaaccgtacgctactataggatcacatacggcgagacgggaggtaacagccctgtgcaggagttcacagtccctggctccaagtctaccgctacgatctcgggactcaaacccggagtagactatacaatcaccgtttacgcggtgacagggcgtggagacagcccggccagtagtaaacccatctccatcaactataggaccgagatcgataagccaagccaaatgcaagtgacagatgtgcaagataactccatctcagtgaagtggttaccatcttcaagccccgtgaccggataccgggttaccaccactcctaaaaacggaccgggtcctaccaagactaaaacggcaggcccggatcagactgaaatgaccatcgagggcctccaaccaactgtcgagtacgtcgtttcagtgtatgcgcagaaccccagtggtgaatcgcaacctcttgtgcaaactgcagttacaacgattccagccccaactgacctgaagtttacacaggtgactccaacatcactgtcagcccagtggaccccaccaaacgtgcagctcaccggatatagagtacgggtaacccccaaggaaaaaacaggccccatgaaagagattaacctggcacccgatagctcatctgtggtggtcagcgggctcatggtggccaccaagtacgaagttagtgtgtacgccctcaaagacaccttgacctctcgtccagcccagggggtggttacaactttagagaatgtcagcccacctcgcagggctagagtcacagacgctaccgaaacaactatcactatatcctggcggaccaaaacggagaccatcaccggcttccaagtggacgctgtcccagccaacgggcagactcccatccagagaactatcaaacccgatgtccgatcctataccattaccggcctgcagccgggcacggattataaaatctacttgtatactctgaacgacaacgcccggtcttctcctgtggtcatcgacgcctctactgcaattgacgcaccctccaatctgcgttttctagccacgactccgaacagcctgttggtttcttggcagccacccagagcccgcataaccgggtatatcattaagtacgaaaagccaggttctcctcctcgggaggtggtgccaagacctagacccggtgttacagaggctacaatcacaggcctggagcccggtaccgagtacacaatttatgtgattgccctgaagaataaccagaaatctgaacctctgatcgggaggaagaagactggtcaggaagccttgtcacagacaaccatttcctgggccccctttcaggatacaagcgagtatatcatctcctgtcatcctgtaggaacggacgaggagcccctccagtttagggtgccagggactagtacgagcgccaccctgacgggactaaccaggggcgcaacgtacaacgtgatcgtggaggctttgaaagaccagcagcgccacaaggtgcgggaggaagtggtgaccgtgggaaacagcgtgaatgaaggcctgaatcaacctactgacgactcttgcttcgacccatatacggttagtcattacgccgtgggagacgaatgggagaggatgtccgaatccggatttaagctcctgtgtcaatgcctggggttcggaagcggccatttccggtgcgattcctctagatggtgtcacgataacggggtgaattataaaatcggggagaagtgggatagacagggggagaatggccagatgatgtcctgcacttgcttaggcaacggcaagggcgaatttaaatgcgatccacacgaggcgacatgttacgacgatgggaaaacctaccatgtaggcgagcaatggcagaaggagtacctgggggccatctgctcttgtacctgttttggaggtcaaagaggctggagatgtgataattgtagacgacccggaggtgaaccttcgcccgaaggcaccactggccagagctacaatcagtatagccagaggtaccaccagagaacaaataccaatgtaaactgtccaatcgagtgtttcatgcctctggacgtgcaggccgatagagaggattccagggagtag

SEQ ID NO: 15235 - DNA, 7161 bp, synthetic construct
  misc_feature 1..7161: note = Description of Artificial Sequence: Synthetic coding sequence
  source 1..7161: mol_type = other DNA
atgctgcgcggtcccggccccgggctcttactcttagccgtacagtgcctcgggacagccgtgccctccaccggcgcctctaaatcaaagagacaagctcagcagatggtgcaacctcaatctccagtggccgtgagccagtctaagcccgggtgttatgataacgggaaacattatcagatcaaccaacagtgggagaggacgtatcttggaaacgctctggtatgcacatgctatgggggctcccgtggtttcaattgtgagtcaaaaccagaggccgaagagacctgctttgacaagtacacaggcaacacgtatagggtcggcgatacatatgagaggcccaaagacagtatgatatgggactgtacctgtattggagccggcagaggcagaatctcctgcactatagcaaacagatgtcacgaaggagggcagtcctacaaaatcggcgatacctggcggcgcccccatgaaaccggggggtatatgctggaatgtgtgtgtctcggtaacggcaagggggaatggacctgtaagccgatcgcagaaaaatgcttcgaccatgcagcaggcacgtcatacgtggtcggcgagacatgggaaaaaccatatcagggctggatgatggtggattgtacctgcctgggggaggggagcggccgaattacatgcaccagccgaaatcgatgtaatgaccaggatactcgaaccagttacagaattggcgacacctggagcaagaaagacaacagaggtaatctcttacagtgtatatgcacggggaatggccggggggaatggaaatgcgaaaggcacacctccgttcagacaacctcctctggtagcgggccctttacagatgtccgggctgccgtgtatcagccccagccacatccacagcctcctccctatgggcactgtgtgactgatagcggagtggtatattcagtcggtatgcagtggctgaaaacgcagggcaataaacagatgctatgcacctgcctgggcaacggcgtgagctgccaggagactgctgtgacccaaacatatggcggaaattccaacggggaaccctgtgtgttgcccttcacatacaacggccgaacattctattcatgtaccacagagggtaggcaggatggccacctctggtgcagtaccacatcaaactacgagcaggaccagaagtattctttctgcacagatcacaccgtactggttcagacaagaggtggcaacagcaacggggcattgtgccatttccctttcctgtataataaccataattacaccgactgcacgtcagaaggacgcagggataatatgaagtggtgtggaacaactcagaactacgatgccgaccagaagtttggcttctgccccatggccgcccacgaggaaatttgcaccacgaacgaaggcgtaatgtacaggatcggggaccagtgggataaacagcatgacatgggccacatgatgaggtgcacgtgtgtgggaaacggcagaggagaatggacctgtatagcctattctcagcttcgggaccagtgtattgtcgacgacattacgtacaatgtgaacgatacgttccataaaagacatgaggagggccacatgctgaattgtacctgcttcggccagggtaggggcaggtggaaatgtgatcccgtggatcaatgtcaggattctgagacaggcaccttctaccaaataggggatagctgggagaaatacgtccacggggttaggtatcagtgttactgctacggccggggcattggagagtggcactgccaacccctacagacatatccttcctcctctggccctgtggaagtatttatcacagaaacacccagccaaccaaattcacatccaatacagtggaatgcaccccagcctagtcatatctctaagtatatccttcgatggaggccaaagaatagtgtcggtcgatggaaggaggctacaatcccaggccacttaaactcatataccattaaggggcttaagcccggcgtcgtttacgagggccagttaatctccatccagcagtacgggcaccaggaagtgacccggtttgactttacaactacttctacgagcacgcccgtcacgtccaacacggtaactggagagaccacaccattcagtcccctggtggcaaccagcgaaagcgtgaccgagatcaccgcatcctccttcgtcgtgtcatgggtgagtgccagcgataccgtctctggatttcgcgtggagtatgagttgagtgaagagggggatgagccccagtacttggatctgccctccactgccacgagcgtgaacattccagacctgttgcccgggcgtaagtacattgtaaacgtctaccagatttcagaggatggtgaacagagtctcattcttagcaccagccaaaccactgcgccagacgcaccccctgatacaacagtcgatcaggtcgatgataccagcatcgtagtgcggtggagccggcctcaggcacctattacaggataccggattgtctacagcccatccgtggaggggagttcaaccgaacttaacctgccggagacagcaaattctgtgaccctgtctgacttacagcctggggtgcagtacaacatcacgatctatgctgtggaggagaaccaggaatcaactccagttgtgatacagcaggagacaactggtaccccacggtctgataccgtgcccagcccccgagatctacagttcgtcgaagtcacagacgtcaaagttaccattatgtggacacccccagaatccgccgtcactgggtatagggtggatgtgatacccgttaacctcccaggagagcatgggcagagactgcccatttctaggaacacatttgctgaagtcaccggtctgtctcccggggtcacgtactactttaaagtattcgccgtgtctcacgggagggaaagcaaacctctgaccgcacagcagaccaccaagctcgacgctcctactaatctccaattcgtgaatgagactgactccaccgtgctggtcagatggacgcctcctcgtgcacaaatcacagggtataggcttactgtgggacttacacggagggggcaaccacgccaatacaatgttggaccctcagtttcgaagtatcccctccgcaaccttcaacctgccagtgagtacactgtgagcctggttgccatcaaggggaaccaggaatcccctaaagcaacaggtgtgttcaccactctacagcccggaagctcaatacctccctacaacactgaggttacagagaccaccatcgtgattacctggacgcccgcccccagaatagggtttaagttgggggtcagaccttcacagggcggcgaggcacctcgcgaagtgactagcgatagcggctctattgtggtgtcaggcctcacacctggggttgagtatgtctacaccatacaggtgctgcgagatggccaggaacgggacgcaccaatagtgaataaagttgtgacaccgctgtcgccaccgaccaatctacacctggaggccaatcctgacactggtgtgcttacggtgagttgggagcgctctactaccccggatataacaggctaccggattacaacgactcccaccaatggtcaacaggggaattccctggaggaagtggtccatgcagatcagtcttcatgcacattcgataacctgtctccgggcctggaatacaatgtgtcagtttacacagtcaaggacgataaagagtctgtgccgatctctgacacaatcattcctgccgtgcctcccccaactgacctccgctttacgaacataggcccagacactatgagagtgacctgggctccaccacctagcatcgacctgactaattttcttgttcggtacagcccggttaagaacgaagaggatgtggctgaactctctatttccccatcagataacgcggtggtgctgacgaacctgctccccggcactgaatatgtcgtctctgtgtcgagcgtgtatgagcagcacgaatctacacctctgagaggcagacagaaaactggccttgattctccaacaggaatcgacttcagcgatatcactgctaactctttcacggtccattggatcgcaccacgtgccaccatcactggatacaggatcaggcaccacccagaacactttagtggaagacccagggaagatagagttcctcactcgagaaacagtatcaccttgacaaatctgactcccggtaccgagtatgtggtatcgatcgtcgctctgaacggaagagaggagtctccccttctgattggccagcagtctactgtgtccgatgtaccccgcgatttggaagtcgtggcggccactcctacaagtcttcttattagttgggacgccccagctgtgactgtaagatattacagaattacttatggcgagacagggggtaacagtccggtgcaagaatttactgtcccgggaagtaagtctaccgctacaatatccggactcaagcccggggtggactacaccataaccgtgtacgctgtaaccggtaggggggattctccggcctcctccaaacccatcagcattaactaccggacagagatcgacaagcctagccagatgcaggtgacagatgtgcaggacaacagcatttctgtgaaatggctgccttcctcatccccagtgacagggtaccgggtgaccacaacacccaaaaacggcccgggacctactaagactaaaacggctggtcctgatcaaacagaaatgaccattgaaggtttacagcctaccgtggaatacgtggtgtctgtgtatgcccaaaacccctcgggcgagtcccagccgttagtgcagactgccgttaccaatattgatcgacccaaaggactggcttttactgatgtggacgtggacagtatcaagatcgcctgggaatcaccccagggacaagtttcccgctaccgcgtgacttacagttcaccagaagacgggatacatgaactgtttccagcgccggacggcgaagaagacacggccgagttacagggcctccgaccgggctctgaatacacagtctcggtcgtggcactgcacgacgatatggaatcccaacctctaatcggaactcagtcaactgctatcccagccccgaccgacctaaagtttacccaggtgacaccgacctcactgtcagcacagtggacgccccctaatgtgcagttgaccgggtaccgagtcagagtcaccccaaaggaaaagacaggacctatgaaagagatcaatctggccccggactcttcaagcgtagtggtgtctggtctgatggtggccacgaagtatgaagttagcgtctatgccttgaaagatacactcacctctagaccagctcagggtgtggtgactaccctggagaatgtgagccctcctcggcgcgcccgagttaccgacgctacggaaaccactatcacgatctcttggcgaaccaagacggagaccatcacaggctttcaggtcgatgcagttcccgcaaatggccagactcccattcagcggacaataaaacccgacgtcaggagttacacaattacaggacttcagcctgggaccgactacaagatatatctgtatacactgaacgataatgcccggagtagtcccgtcgtgattgacgcttcaaccgccatcgatgccccgagtaatcttcggtttctggccacaaccccgaactcactgctggtgtcctggcagcccccacgagcccgcatcacaggatacattatcaagtacgaaaagcctgggagcccgccaagggaagtcgttccaaggccccgaccaggagtcaccgaagctaccatcactggtttggagccaggaacggagtacacaatatacgtgatagccctcaagaataaccagaaatccgagcccctgataggcaggaaaaaaaccgacgagctgcctcaactcgtcacgttacctcaccctaacctccacggccccgaaatccttgacgttccatctaccgttcagaagaccccttttgttacccaccccggatatgacacaggaaatggtattcagctcccgggcactagtggccagcagccttctgttggacagcaaatgatctttgaggaacacggcttcagacgtaccacaccccctacaacagctacaccaatccgacaccgcccccgaccatacccccccaacgtgggcgaggagatccagattggccatatcccacgggaagacgttgattatcacctgtatccgcatggtcccggccttaaccctaacgccagtacagggcaggaggccctgagccaaacaacgatctcctgggctccttttcaggacacctctgagtacattattagctgccatcctgttggcaccgatgaggagcctctgcagttccgggttcctggcacttccacgagcgccacattaaccggcctcaccaggggtgccacttataatgtgatcgtcgaagctctcaaggatcaacagcggcacaaagttcgcgaagaggtagtgaccgtcggcaacagcgtgaatgagggcttgaaccagcctaccgatgactcatgcttcgacccttacaccgtgagtcactatgccgtgggggatgaatgggagcggatgagcgagtccggttttaaattgctgtgccagtgcctgggattcggctcgggacatttcagatgcgactcctcaaggtggtgccacgataatggagtgaactataagatcggagaaaagtgggaccgacaaggagagaacggccagatgatgtcttgcacctgcctgggcaacggtaagggagagttcaagtgtgatccgcatgaagccacgtgctatgacgatggaaaaacctaccacgtgggcgagcagtggcagaaagaatatctcggtgccatatgttcttgtacatgtttcggtggccagcgcggatggaggtgcgataactgtcggcgtccaggtggggagcctagccctgaaggaaccaccggccaaagttacaatcagtattcacaaaggtaccatcagcggacaaacacaaacgtcaactgccctatcgaatgttttatgccactcgatgtccaggctgatcgcgaagacagccgagaatag

SEQ ID NO: 15236 - DNA, 6723 bp, synthetic construct
  misc_feature 1..6723: note = Description of Artificial Sequence: Synthetic coding sequence
  source 1..6723: mol_type = other DNA
atgcttagagggcccgggcccgggctcttgctactggcagtccagtgcctgggcactgccgtaccaagcactggagccagtaagtctaaacgccaggcccaacagatggtccagcctcaatccccagtcgccgtttctcagagcaagcctggatgttacgacaatggtaaacattaccagattaaccaacagtgggagaggacatacctgggtaacgccttggtgtgtacatgctacggtggcagcagaggctttaactgcgagagcaaaccggaagccgaggagacttgctttgacaagtataccggaaatacttacagggtcggtgatacctacgagcggccaaaggactctatgatttgggattgcacctgcatcggagccggacgaggacgaattagctgtaccattgctaatcgctgccatgagggcggtcagagttataagattggagacacctggcgccggccacatgaaacaggcggatacatgctggagtgcgtctgtctgggcaacggaaaaggggaatggacttgcaagcctattgcggagaagtgcttcgaccacgccgccggaacatcttacgtggtgggcgagacatgggagaagccctatcaggggtggatgatggtggactgcacatgtctaggggaaggaagtggaaggattacttgcacctcccgtaaccgctgcaacgatcaggacacgaggacgagctaccggattggagacacttggagcaaaaaagataatcgggggaatttgctccagtgtatatgtactggcaatggtaggggcgaatggaaatgcgaacgacacacatccgtgcagaccacctcatcgggaagtgggccctttacagatgtccgtgccgctgtgtatcaaccgcagccacatccgcagccaccgccgtacggccactgtgttactgactccggagttgtgtattctgtgggtatgcagtggcttaaaactcagggaaacaagcagatgctctgcacttgtctgggtaacggcgtctcatgtcaggagaccgccgtcacacagacttatgggggaaacagcaatggcgaaccctgtgtgctccctttcacctacaatggtcgtaccttttactcttgtaccacggaggggaggcaggatggacacctgtggtgcagtacgactagcaattatgagcaagaccagaagtactctttttgcaccgaccacaccgtgttggtgcagacaagggggggcaatagtaacggggccctttgccatttcccgttcctttacaacaaccataattatacggattgtacgtccgagggtcggcgagacaatatgaagtggtgcggtaccacccagaattacgacgcggatcaaaaattcggcttttgtccaatggccgcccatgaggagatttgcacaacaaacgagggtgtgatgtacagaattggagatcagtgggataagcagcacgacatgggccacatgatgaggtgcacgtgtgttgggaacggccgaggagaatggacctgcatcgcttacagtcagttgagggaccagtgcatcgtagacgacatcacatacaatgtcaacgatacgttccataaacgccacgaagaaggacacatgctgaattgcacctgcttcggtcagggaaggggacgatggaagtgtgaccctgtcgatcagtgtcaagactccgagaccgggacgttctaccagataggggacagctgggagaaatacgtccatggtgtgagatatcagtgttattgttatggtagaggaattggtgaatggcactgtcagcccctccagacctacccgagcagttccggcccagttgaagtgttcatcacagaaacaccatctcaaccaaacagccaccccatccagtggaatgccccccagcccagtcacatatctaagtacatactccgctggcgaccaaaaaactcggttgggcgctggaaagaagcaactatccccggccacctgaatagctatacgattaagggcctcaagccaggggtggtgtacgagggccagcttatttcaatccagcaatatggccaccaggaggtgaccaggttcgatttcaccacaacatctacatcgacgccagtaacgtcgaacacagtgaccggagaaaccacccctttcagcccactggtggctacctctgaaagcgtaaccgagatcacagccagctccttcgtggtgtcctgggtcagcgcgtctgacactgtttcaggatttcgcgtggagtacgaactgtccgaggagggagacgaacctcagtatttggatctccccagcaccgcgaccagcgtgaatattcccgacttattaccaggccgaaaatatatcgtgaacgtctatcagatttccgaggacggcgaacagagcctgatcctgagtacttcacagacaacagcccctgacgcgcccccagatacaacagtggaccaggttgatgatacctcaattgtggtgaggtggtctcgcccacaggcaccaattaccggctaccgcattgtgtactcaccgtcagtagaggggagctctactgagctcaatctgcccgagacagccaatagtgttaccctgtccgatctgcagccaggggttcaatacaatatcacaatatatgcggttgaagagaatcaagagtccaccccggtcgtgatccagcaggaaactacaggtacgcctcgcagcgacacagttccttctccacgggatctgcagttcgtggaggtcaccgacgtgaaggtgactatcatgtggacccctcccgagagtgccgttaccgggtatcgcgtcgatgtgatacctgtgaacctccctggcgagcacggccagcgtctgccaatatcgaggaataccttcgccgaggtaactggattaagcccaggagtgacctattacttcaaggtcttcgctgtgtcacatggccgggaatcaaagcccttaaccgcgcagcagaccacaaaactggacgcacctactaatctgcagttcgtgaacgaaaccgactctaccgtgctcgtcaggtggacacctccacgagcacagataacaggctaccggctaacagtcggtctgacacgccgcggtcaaccccggcaatacaacgtcgggccaagtgtgagcaagtacccacttaggaaccttcagcccgctagcgagtacacggtcagcctggttgctatcaaaggaaaccaggagagccctaaagcgaccggagtgtttactacactgcagcctggaagctctatcccaccctataacactgaggtaaccgaaacaaccattgtcatcacttggaccccggcccctcgaatcggctttaagctcggtgtgcgaccgagtcaggggggagaggcgccccgcgaagtgacgtcagacagcggctctattgttgtgtcagggttgacaccgggggtggagtacgtgtataccattcaggtcttaagagacggccaagagcgcgacgccccaatcgtgaacaaggtagtcactcctctgagtccccccaccaacctccacctcgaagcaaaccccgacaccggcgtcctcaccgtctcctgggagcgatcaacaacccctgatataactggatacagaattacaactaccccaacaaacggccagcagggaaacagcctggaagaggtggtacatgctgaccagtccagttgtacatttgataatctttcccctgggttggaatacaacgttagcgtctacaccgtgaaagacgacaaggaatccgtgcctatcagcgacactatcattcccgctgtgcccccccccacagatcttcgattcaccaacattgggcctgataccatgagagtcacttgggccccacccccctcaatcgatctcacaaattttcttgtgcgctactctccagttaaaaacgaagaggatgtggctgagctgtcaatctctccctcggataatgctgtcgtgctcaccaatttgctgcccggcaccgagtacgtagtctcagtaagtagtgtatatgaacagcacgagagtacacccctcagaggtcgacagaagaccggccttgacagtcccaccggaatcgattttagcgacatcactgccaactcatttaccgtgcattggatcgcccccagggctacaattacaggatacagaatcaggcaccaccctgaacattttagcggccgaccccgcgaagatcgtgtcccacattctcgtaacagcatcacactcacaaaccttacaccgggtacagagtatgtcgtctctatcgtggcgctgaacggtagagaggagagtccactcctgattggtcagcagtctaccgtttcagatgtccccagggatctcgaggtcgtagcagcaacaccaacaagcttgctgatctcctgggacgcccccgccgtgaccgtccgttactacaggataacgtacggggagaccggggggaatagccctgttcaggagtttactgttcctggatcaaagagcacagccacaatttctggtctgaaacctggagtggattataccattaccgtgtatgctgtgaccggccgcggcgacagtcctgcttctagcaagccaataagtatcaattatcgaaccgaaatagacaagccgtcccagatgcaggtgacagacgttcaggacaatagcatctccgttaagtggctccctagcagcagccctgtgaccgggtatcgcgtgacgacaaccccaaagaatgggcccggacccacgaagactaaaacggctggccccgaccagaccgagatgaccatagagggcctgcagccaaccgttgagtatgttgtgagcgtttacgcccagaatccctctggagagtctcagcccctagtccagaccgcggtcacaaccattccagctccaaccgacctgaagttcacccaggtgactccaacttccttgtccgctcagtggactccgcctaatgttcagttaacaggatatcgagtacgcgtgactccaaaagaaaaaaccggcccaatgaaggagataaatttagctccagacagttccagcgttgtagtatctggtctaatggttgcaactaaatatgaggtcagcgtatacgccttgaaagatacgctcacatcgagacctgcccagggtgtggtgacaacccttgaaaacgtgtccccccctaggcgagcccgtgtcaccgatgctaccgagacaacaatcactatcagctggcggaccaagacagagacaatcacaggattccaggtggacgcagtgcccgcaaacgggcagactcctatccaaaggactatcaaacccgatgtaagatcatacaccatcacagggctccagcctggcacagattacaaaatttatctatatactcttaacgacaatgccagatcatcgcctgtggtcatcgatgcgtcaaccgccatcgacgccccctccaatcttcgattcttagcgaccacccctaatagcctcctggtctcatggcagcctccacgcgctaggataactggatacatcatcaagtacgagaagcccggctctccaccacgggaagtggtgccacgcccgcgacccggcgttacagaagccacaattactggactagaaccaggcacagagtatactatttatgtaatcgcgctcaaaaacaatcagaagtccgagcctctgatcgggaggaaaaagacagtgcaaaaaacccctttcgtgactcaccccgggtatgacaccggtaacgggattcagctgcctgggacaagcggtcagcagccctctgtgggccagcaaatgatctttgaggaacatgggtttagacggactacacccccaaccaccgctacccccattcgtcacagaccccgtccttatcctcccaacgtagggcaggaagcgctgtcccaaaccacaatcagctgggcgcccttccaagatacatctgagtacataatctcatgccacccagtgggcacagacgaggagcccctgcagttcagagtccccggtacttcaacttctgccacactcactggactcacgaggggggctacgtacaatgtgattgtggaagctttaaaagatcagcagcgacacaaagtgcgagaggaggtggtgactgttgggaacagtgttaacgaaggcctcaaccagcctactgatgactcctgctttgacccctacacagtcagtcattatgccgtgggcgatgagtgggagcggatgtctgaaagcggctttaagttgttgtgccagtgcctcggtttcggttcagggcactttcggtgtgactctagtcgctggtgccacgacaacggcgtgaactacaagattggagagaagtgggatcgccagggggaaaacgggcaaatgatgtcctgtacatgcctcgggaatggaaagggcgaatttaaatgcgacccccatgaagcgacgtgctatgatgatggcaaaacgtatcatgtcggtgagcaatggcaaaaggagtacctgggagcaatctgttcttgcacttgcttcggagggcagcgtggatggagatgcgacaattgcagaagaccaggaggggagccatcccctgaaggcaccaccggacagagctacaaccagtattcgcaaagatatcatcagaggactaacactaacgtgaattgccctatagagtgctttatgcccctggacgtgcaagctgatcgcgaagactcccgggaatag

SEQ ID NO: 15237 - DNA, 1974 bp, synthetic construct
  misc_feature 1..1974: note = Description of Artificial Sequence: Synthetic coding sequence
  source 1..1974: mol_type = other DNA
atgctgcgcggccctggccctgggcttctgctgctggctgtgcagtgtctggggacggccgtaccctcaacaggagcttccaagtcgaaaaggcaggcccagcagatggtgcagccacagtccccggtggctgtgtcccagtcaaagccaggctgttatgacaacggaaaacactatcagattaatcagcagtgggaacgaacttatctgggcaacgcacttgtatgcacctgttacggcgggtcacgcggcttcaactgtgaatcaaaaccggaagccgaagaaacatgcttcgacaagtataccgggaacacctacagggtgggagatacatacgagcgaccgaaggactctatgatctgggattgtacatgcattggggccggccgtgggcggatttcctgcaccatcgcaaaccggtgccatgagggtggtcagtcctataaaatcggggatacatggagacggccacatgagacaggcggctacatgttagagtgtgtgtgcctaggaaatgggaagggagagtggacctgtaagccgatcgctgaaaaatgcttcgaccatgcggccgggacctcatatgtggttggcgagacctgggagaagccttaccagggctggatgatggtcgactgtacatgcttgggcgaggggtcggggagaatcacctgtacaagccgcaaccgctgtaatgaccaggatacccggacatcttatcggattggagatacgtggtccaagaaagacaatagaggtaatctccttcagtgcatctgtacaggcaacgggcggggagagtggaaatgcgaacgtcatacgtcggtgcagactacttcatccggcagtggccccttcactgacgttagagctgccgtttaccagccgcagccgcacccacagcctcctccctatgggcactgcgttacagacagtggcgtagtgtactctgtcggtatgcaatggctgaagactcagggcaacaaacaaatgctgtgtacttgcttgggaaatggagtgagctgccaggagacagctgtcacacaaacgtacgggggcaactcgaatggggaaccttgtgttcttccattcacctacaacgggcgcaccttttacagctgcacaacagaagggcggcaggacggacacttatggtgtagtaccacttctaactacgagcaagaccagaaatactcattttgcacagaccataccgttctggtccagacccggggcggaaattccaatggggcattatgtcattttccattcctctataacaatcataactacaccgattgcacaagtgaggggcgccgcgacaacatgaagtggtgcggcaccacacagaactatgacgctgatcaaaaattcggattctgcccaatggctgctcacgaagagatctgtactaccaacgaaggggtaatgtaccgcataggggatcagtgggacaagcaacatgacatgggtcatatgatgcgctgtacctgtgtaggtaacggaagaggcgagtggacctgcattgcctactctcaactgagggatcagtgtatcgtggacgacatcacctacaacgttaatgatacctttcataagaggcatgaggaaggtcacatgctcaattgcacttgttttggtcaggggcgcgggaggtggaaatgcgacccagtggatcagtgtcaggatagcgagactgggaccttttatcagatcggagactcttgggagaaatatgtacatggagtgcgataccaatgttattgctatggccgcggaatcggtgagtggcactgccagccactgcagacctacccatcaagcagtgggcccgtggaagtgtttattaccgagacccctagtcagccgaatagtcatcccatacaatggaatgccccccagccatcccatatctcaaagtacatactgcggtggcgaccagtctccatcccccccagaaatctgggatattag

SEQ ID NO: 15238 - DNA, 6804 bp, synthetic construct
  misc_feature 1..6804: note = Description of Artificial Sequence: Synthetic coding sequence
  source 1..6804: mol_type = other DNA
atgctgcgaggaccaggacctggccttcttcttcttgctgtacagtgtctgggcaccgctgtgcctagtacaggtgcatcgaaatcaaaacggcaggcccagcaaatggtccaacctcagtctcctgtggctgtcagtcagagtaaacctggatgctatgataatggtaaacactaccaaatcaaccagcagtgggagagaacctatctgggcaacgcgctggtgtgtacctgttacggcgggagtaggggctttaactgcgagtctaagccagaagccgaggagacgtgctttgataagtacactggcaatacctacagggtgggtgatacttacgaacggcccaaagatagtatgatttgggattgcacctgcattggtgctggccggggccggattagttgtactatcgcaaacaggtgccacgaaggtgggcaatcctacaagataggagatacatggcggcgtccccatgaaaccggcgggtatatgctcgagtgcgtctgcctcggaaatggaaagggggagtggacgtgcaagcccatagccgagaaatgctttgaccacgccgctggaaccagctacgtggtgggggaaacatgggaaaagccttatcagggttggatgatggtggattgtacctgtttaggcgagggcagcggaagaatcacatgtacctcgcggaatcgctgtaacgatcaggacaccaggactagttaccggattggagatacttggagtaaaaaagacaaccgcgggaatcttctacagtgtatctgcaccgggaacggtcgcggggagtggaagtgcgagcgtcataccagcgtacagacgacatcttcagggtcagggccattcacagatgtccgcgctgccgtctatcaaccacagccccatccccaacctccgccctatggccattgcgtgacagactccggagtggtctattcagtgggcatgcagtggctgaagactcagggcaacaaacagatgttgtgtacctgcttagggaatggtgtttcctgtcaggagaccgccgtcactcagacatacggtggcaatagcaacggcgagccatgtgtgttaccttttacttataacggccgcaccttctactcatgcactaccgaggggcgtcaggatggtcatctttggtgcagcacgactagtaactatgagcaggaccagaagtattcgttctgcactgaccacacagtgctggtccaaacccgcggcggcaacagcaatggggcactttgtcactttccttttctgtataacaaccacaactacaccgactgcacatcagaaggacgcagggacaacatgaagtggtgtggaactactcagaattacgacgccgatcagaagttcggcttttgtccaatggccgcccatgaggagatctgtaccaccaacgagggggtgatgtacaggatcggcgaccagtgggacaagcagcacgacatgggccatatgatgaggtgtacatgcgtgggaaatggccgcggcgaatggacctgcattgcgtattcccaactgagggatcagtgtatagttgacgacatcacctacaacgtaaacgacactttccacaaacgtcacgaagagggacacatgttaaactgtacgtgtttcggccagggtaggggccgttggaagtgcgaccctgtggaccagtgccaggattctgagactggaacattctaccagattggagacagctgggaaaagtacgtgcacggggtcaggtaccaatgttattgttatggtagaggtataggagaatggcattgccagccactgcagacatatccatccagttctgggcctgtggaagtttttattaccgagactccgagccagcccaattctcaccctatccagtggaatgcaccacagccaagtcatatctccaagtacatcctgcggtggcgtcccaagaattctgtgggccggtggaaggaggccaccattccaggtcacctgaactcttataccataaaaggcctgaaaccaggagtggtctatgagggccagcttataagcatccagcagtatggccatcaggaggtcacacggtttgattttactactacatcaacaagcacaccagtgacgtcaaatactgtcacaggcgagacgacccccttcagcccactagttgccacatctgaaagtgtgacagaaatcactgcgtcctccttcgttgtgagctgggtgtcagctagcgatacggtgtccggatttcgagtcgagtacgaactgtcagaagagggagacgagccgcaatacctggatcttccttccacagctaccagtgtcaacatcccagatttactaccaggaaggaaatatattgtgaacgtgtaccagatctcagaagacggagaacaatccctgattctgagtacctcccaaaccaccgctcctgatgcccctcctgacaccacagtcgatcaggtcgatgacacatcaatcgtcgtgcgctggtccaggccacaggctcctattaccggttaccgcattgtctacagtccaagtgtagaaggtagctccaccgaattaaatctgcctgaaactgcaaactcggtcacactttcagaccttcagccaggagtgcagtataacataactatttatgcggtggaggaaaatcaggaaagcaccccagtggttatccagcaggaaaccactggcacgcctcgctccgacactgtgccatcaccaagagatctgcaatttgtcgaggtaacggacgtcaaggtgaccattatgtggacccctcccgagtctgctgtgacaggatatcgagttgacgtgatacctgttaacctccccggggagcatggccagaggctgcccattagtcgcaatactttcgcggaagtgactggattgtctcccggggtcacctattatttcaaagtgttcgctgtgtctcacgggagagaatccaagcccctcaccgcacaacagaccaccaaattggatgccccaacaaacttacaattcgtaaacgagaccgattctaccgtcctggtgcgctggacgccaccccgggcacagatcactggctacagattgactgttggactgacacgcaggggccagcccaggcagtacaacgtcggtccttcggtgtcaaagtacccgctacggaatcttcagcctgccagcgaatataccgtgagtctggtggctatcaaggggaatcaggagtctccaaaggccactggagtgtttacgacacttcagcctggttcttcaatccctccctacaacactgaagtgacagagacaactatcgtgatcacctggacccccgcccccagaatcggcttcaaactgggtgtcagaccgtcacaggggggagaggctccacgcgaggttaccagcgacagcgggtctatcgttgtgtccgggctcacaccaggtgtggagtatgtgtatactatccaagttctccgggatgggcaagaaagagacgccccaattgtgaacaaggtggtgactcccctgagcccaccgaccaatcttcatttggaagccaaccccgatacaggcgtactcacagtttcttgggagcgatcgaccactcccgacatcacgggttatcggatcaccaccacccctacaaacggccaacagggcaactcactggaggaggtggtccatgccgaccaatctagctgtacctttgacaacctctcacccggactggagtacaatgtgagcgtctacaccgtgaaggatgataaagagtcggtaccaatcagtgataccatcatccctgaggtcccccagctgacagatttaagcttcgtggacataacagattcgtcaatcggtctccggtggacccccctgaactcaagcacgataattggctaccgcatcactgtcgtggcagctggggaagggattcccatttttgaagactttgttgatagtagtgtaggatactatactgtaaccggcctggagccaggaattgactatgatatctcagtgatcacccttatcaacggcggagagtccgctcctacaactttaactcagcaaaccgccgttcctccgccaacagacctgcgattcacaaatatcggaccagacaccatgagggtaacctgggcacctcctcctagcatcgatctgaccaatttcctggttaggtactccccggtgaagaacgaggaagatgtggccgagctctccatctcgcctagcgacaacgctgtcgtcctgactaatctgctaccagggacggagtacgtggtgagcgtgtcctcagtttatgagcagcatgaatcaacccctcttcggggacggcagaagactggccttgacagcccaacaggaatagacttttctgacataacggcgaattccttcacagtgcattggatcgctccacgagccactattacagggtatcgcatcaggcatcatccagagcatttttcgggtcgcccaagagaagatcgggtcccccactcccgaaacagcatcaccctgactaatctcactccagggaccgagtacgtggtgtcaatcgtggcactgaacggccgggaggaaagccccctactcatcgggcagcagtccaccgtttcagatgtgcccagggacctggaggtagtcgctgccaccccaacaagcctactgatcagttgggatgctcccgctgtgactgtgagatactaccgtattacctacggcgagaccggcggaaacagccctgttcaagagtttaccgtgcctggaagcaaatcgacagccacgatatccggactcaaaccaggggtcgattataccatcacagtgtacgcagtgaccggcagaggagactctccagcatcaagtaagcccatatcaattaactatcgtaccgaaatcgataaaccctctcagatgcaggtgaccgatgtgcaggacaattctatttctgtcaagtggctgccgagcagctcacccgtgaccggttatagagtgacaacaacaccaaagaacggcccaggaccgactaagaccaagacagcgggccctgaccaaacggaaatgaccatcgaaggattgcaacctacagtagagtacgttgtttctgtgtatgcccagaacccatcgggggagagtcagccgttggtccaaacagctgttactaccattcccgcaccaacggatctgaagttcactcaagtgactcccacctctttgtccgcccagtggactccccccaatgtgcagctcactggataccgggtaagagttacccccaaggaaaaaacaggcccaatgaaggagatcaacctcgcaccagattctagctccgtcgtggtgtcaggccttatggtggccacgaaatacgaggtaagcgtgtacgctcttaaggacacactcacttcccgtcccgcccaaggggtggtgacaacgctcgaaaacgtgagcccaccgagacgcgctagagtcactgacgcaacggagacaaccatcacaatttcctggagaaccaaaaccgagactatcaccggcttccaggtggatgccgtcccagctaatggtcagacccccattcagcggacaattaagcccgatgttagatcctacaccatcactggacttcagcctggtactgattataaaatctacttgtacacactcaacgataatgcccgttcgagtcccgtggtcattgacgcaagcaccgctattgacgctcctagcaatctccgatttctcgccactaccccaaactcattgctggtcagttggcagcccccacgcgccagaatcacaggttacataattaaatacgaaaaaccaggatcccctcctcgagaggtggttcccaggcctagacctggcgttactgaagcgactatcactggtttagaaccaggaaccgagtataccatctatgtgatcgcactaaaaaataaccagaagtccgaaccacttatcgggcgaaagaagactggtcaggaggcgcttagccagacaacaatctcttgggctcccttccaggacacctcggaatatattatctcctgccaccccgtcggcaccgacgaggaacctctgcagtttcgggtgcccggcaccagtacctcggcgacattaacaggacttacaaggggtgccacatataacgtcatcgtggaggctttgaaggaccagcagcgccataaggttagggaggaagtggtcacggtcggtaattcagttaacgaaggcctcaaccagcctacagatgacagctgtttcgatccttacaccgtatcgcactatgctgtgggtgacgaatgggagcgcatgagcgaatctggttttaagttactgtgccagtgcttgggctttggtagcgggcactttaggtgcgattcatctaggtggtgccacgacaacggtgtgaactataaaatcggagagaagtgggaccgccagggcgaaaacgggcaaatgatgtcttgcacgtgccttggtaacggaaagggagaattcaaatgcgacccccacgaagctacatgctacgatgacgggaaaacttaccacgtcggagagcaatggcagaaggagtaccttggagctatctgcagttgcacatgctttggcgggcagaggggatggcggtgtgacaactgcaggaggccaggtggtgagccgtctccagagggcaccacaggacagtcgtacaaccaatattcgcagcgttatcaccaacggactaacactaatgtcaattgtcccatcgagtgcttcatgccccttgacgtgcaagcggatcgagaagactctagagaatag

SEQ ID NO: 15239 - DNA, 6798 bp, synthetic construct
  misc_feature 1..6798: note = Description of Artificial Sequence: Synthetic coding sequence
  source 1..6798: mol_type = other DNA
atgcttagggggccggggccgggcctgctcctgctcgctgtgcaatgcctgggaacagcggtgccatccaccggagcaagtaagagcaagaggcaagcacagcaaatggtccagccacagtcacctgttgcagtctcccagtccaaacctggttgttacgacaatgggaagcactatcaaatcaatcagcagtgggaacgcacatacctcggaaatgccctggtgtgtacttgctatggcggctcccgcggctttaattgtgagagtaaaccagaggcagaggagacctgctttgacaagtacaccggcaatacctacagggttggggacacatatgagaggccaaaagactcaatgatctgggactgcacctgtatcggcgctggccggggaaggattagctgtactattgccaaccgctgccacgaaggcggccagagctataaaattggggacacctggaggcgtccacacgagaccgggggttatatgctggaatgtgtttgtttgggtaacggaaaaggtgagtggacatgtaagcctatcgccgaaaagtgtttcgatcatgctgccggcaccagttacgtggtcggcgagacttgggaaaagccctatcaggggtggatgatggtggattgtacttgcctcggggaaggatccggtcgtatcacttgtaccagccgaaacaggtgtaatgatcaagatacccgaacatcttatcggatcggagacacatggtctaagaaagataatagagggaacctcctacagtgtatctgtaccggcaacggtagaggggagtggaaatgcgaaaggcatacatctgtgcagacaacctcctcaggttccggacccttcactgacgtgagggccgctgtctaccagccccagcctcacccacagccgccaccctacgggcactgcgtgaccgactctggcgtcgtgtattcagtaggaatgcaatggctgaaaacccaggggaacaagcagatgctctgcacgtgtctgggaaacggcgtcagctgtcaagaaacggcagtgacacagacatatggcggcaattcgaacggggaaccttgcgtcctccccttcacttacaacggtaggacgttctattcatgcaccactgagggccgccaggacggccacttatggtgctctacgaccagtaattatgagcaggatcagaaatatagcttttgtacagatcacactgtgctggtacagacgcggggcggaaactcaaatggcgcactgtgtcacttccccttcctgtataacaatcataattacacagattgtacaagtgaaggtaggcgggataatatgaaatggtgcggaacgacgcagaattatgatgccgaccagaagttcggtttctgccccatggcagcccatgaggagatttgtactaccaatgaaggcgtcatgtacagaataggcgatcagtgggataaacagcatgacatgggtcacatgatgagatgcacgtgcgtgggcaacggccggggggagtggacctgtattgcttatagtcagctgcgggatcagtgtatcgtggacgacatcacatataacgtgaacgatacctttcataagcgccatgaggaagggcacatgctaaattgtacctgtttcggccagggacgcgggcggtggaagtgtgaccccgttgatcagtgccaggacagcgagaccggaacattctaccagatcggcgatagttgggagaagtatgtccacggagtccgataccagtgttactgctatgggcggggaatcggagaatggcactgtcaacccttgcagacttacccatcatcatccggtcccgtggaagtgttcataaccgaaaccccctcacagccaaactctcatcctatccagtggaatgccccccagccgagtcacatttccaagtatatcttgcggtggagaccaaagaacagtgtgggcagatggaaggaagctaccatccccgggcacctgaattcttatactatcaagggcttaaagcccggtgtggtctatgaggggcagttgatatccatccagcagtacggacaccaggaagtcactcggtttgattttaccaccaccagcacaagtaccccagtaacaagtaatactgtgactggcgagaccaccccgttctctcccttagtggcgactagtgagtctgttacagagataacagcctcctcctttgtcgtcagctgggtgtccgcatccgacacggtgagtggattccgcgtggagtacgaactaagcgaagagggagatgaaccacaatacctggacttaccatcaaccgcaacgagcgtcaatatacccgacctgctgccaggccgcaaatacattgtaaacgtttaccagatatctgaggacggagagcagagcctaatattatcgacatcccaaacaaccgcccccgacgctcccccagacacaaccgtggatcaagtcgacgataccagtattgtggtgcgttggtccagaccccaggctcccattaccggttatagaattgtatacagcccgtccgtggaaggctcctctactgaactcaatctacctgaaacagcaaacagtgtgactctgtctgatcttcagcccggcgtccaatataatattaccatttacgccgtcgaagaaaatcaggaatcaacgcccgtggtgatccagcaggagactacaggtaccccacgatcagatacagtcccgagccctagagacctacagttcgtcgaggtaactgacgtgaaagtcaccattatgtggactccacctgaatcagctgttacaggctatagggtggatgttatccctgtcaacttgcctggagaacacgggcaaagactgcccatcagccgcaatacctttgcagaagttaccggactcagccccggggtcacttactactttaaagttttcgccgtaagtcacggacgtgaaagcaaaccgctaacagctcagcaaaccactaagctcgatgcaccaactaatctgcagttcgtcaatgaaaccgactccactgtcctcgtgcgatggacccctccacgggcccagatcaccggctaccgactgacggtcgggctgacgaggcgggggcagccaaggcagtataacgtcggtccatccgtgtctaaatatcccctccggaacttgcagcccgcatctgagtatactgtgagccttgtggctatcaaggggaaccaggaaagccccaaagctaccggggtgtttactaccctgcagcctggctctagcatacctccttacaacaccgaagtgaccgagacaacgattgttatcacatggacgcccgcacctcgaatcggtttcaagctaggagttcggccaagtcaaggaggcgaagctcccagagaggtcacttccgattcggggtcaatcgtggtcagtggactgacccccggggtcgagtacgtctacaccatccaagtactccgggacggacaagaacgcgatgcccccatcgtaaacaaagttgtgacaccattgtccccgccaactaatttacacttggaagccaatcccgacactggggtgctgacagtatcatgggaaaggtccaccacacccgacatcacaggataccggatcacaacaactccaaccaatggccaacagggaaattctctcgaagaagtggtgcatgcagaccaatccagctgcaccttcgacaacttaagccccggccttgaatacaacgtgagcgtgtataccgtcaaagatgacaaggagtcggtgcctataagcgatacaatcatcccagccgtccctcctccaaccgatctgcgtttcactaatatcgggccagacaccatgcgagtcacttgggctccccccccatctattgatctcaccaactttctcgtgagatacagccccgtgaagaacgaggaggatgtggccgagcttagtataagtcccagtgacaacgccgtggtcttaactaacctcctcccgggaactgagtacgtggttagtgtttcgagtgtgtacgaacaacatgagagcacgcccctacgaggccgccaaaaaaccggcctcgactctcccacaggcatagatttcagcgacattacagcaaactcttttacagtgcattggatcgcccctagggccaccatcacgggatataggattcggcaccacccagagcactttagcgggcgaccacgggaggatcgcgtcccacactcccggaacagcattacactgacaaatctgacaccagggacggagtacgtcgtgtcaattgtggccctgaacgggcgcgaggagtcacccctgctcattgggcagcagagcaccgtctcagatgtaccacgcgatctggaggtcgtcgccgctactccaacctcgctgcttatcagctgggatgccccagctgttaccgtccgatactaccgcatcacttatggagagactggtggcaacagtcccgttcaggaatttactgtcccaggctccaagtcaacggccacaatttcgggcctcaagcctggtgtagactacaccatcaccgtgtatgccgtcactggacgcggcgactcccccgcaagctccaaacctattagcattaattatcgaactgaaatagataaaccctcacagatgcaggtgaccgatgtgcaggataactccatcagcgtgaaatggcttcccagctcttctcccgtcacgggctacagggttacaacaacacctaagaacggtcctggacctaccaaaactaagacagccggacccgaccaaactgaaatgactatcgaagggctgcaacctaccgtggagtatgtggtgagtgtgtacgctcagaacccgagtggagaatctcaaccactcgtgcagactgcagtgactacaatcccagcgccaactgacttgaaatttactcaggttacccccacttcgctgtccgctcagtggactccacccaatgtgcagctcacagggtatagagtgagagtcacgcccaaagaaaaaacggggcccatgaaagagatcaatttggctcctgactccagttctgtggttgtatctggattgatggtggctactaaatatgaggtctccgtctacgctctcaaggacacactcacttcaaggcctgcgcagggcgtagtgactaccctagagaacgtgagcccccctcggcgagcccgcgtcactgacgccacagagactacaattacaatttcctggcggacaaagacagagaccatcacagggttccaggtggatgccgttccagccaacggtcagacaccaattcagaggacgattaagccagacgtgcggtcctacacaatcactgggcttcagccagggacagactataaaatctatctgtataccctcaacgataacgctaggtcctcgcccgtcgtcattgacgccagcaccgctattgatgctccaagcaaccttcggtttctggcgacaacacccaactccctcttggtcagctggcagcctcctcgggcgcgaataaccggatatatcattaaatatgagaaacctgggtcacctcctcgggaagtggtgccccggccccgtccgggggtaaccgaagctacaatcaccggcctggaaccagggactgagtatacaatttatgtaattgcgttgaaaaataatcagaaaagtgaaccactgataggtcgcaaaaaaacagacgagctgcctcaactggtgaccttgccacaccccaacctgcacggcccagaaatcctcgacgtgccaagcacggtccagaagacccctttcgttactcaccccggctacgacaccggcaacgggatacagctccccggtacatccggtcagcagccatctgtcggacaacagatgatttttgaagaacacggctttcggcgaacaacaccacccaccactgccacaccaatcagacacagacctcgcccttaccctcctaacgtgggccaggaagcgctgtcgcagaccacaatctcctgggcaccttttcaggatactagcgagtatatcataagttgccaccccgttggcaccgatgaagaacccttgcaatttcgggtgcccggcactagcacgagcgccactctcacgggtttgacgagaggagctacgtataacgtcatagtcgaagctctcaaagaccagcagagacacaaggtgcgagaagaagtagtaacggttggaaattccgtcaatgagggacttaaccagccaactgacgatagctgttttgatccctacacagtctcccactacgccgtgggagatgagtgggagagaatgtcggagagcggattcaagctcctctgccaatgcttgggtttcggctccgggcacttccggtgtgacagctcccgctggtgccatgacaacggtgtgaattataagatcggggagaagtgggatcggcagggagagaacggtcagatgatgtcttgtacatgccttggcaatgggaaaggagagttcaagtgcgatcctcatgaggcaacgtgttacgatgatggcaaaacctaccacgtcggcgagcagtggcagaaagaatacctgggagcaatctgtagttgcacctgctttggcgggcagagagggtggagatgcgacaactgtagacgtcctggaggagagccatctccagaggggactactgggcaaagttacaaccaatactcccagaggtaccatcagcgcaccaacaccaacgtgaattgccccatagagtgctttatgccgcttgacgtccaggcagacagggaggacagtagagaatag

SEQ ID NO: 15240 - DNA, 6993 bp, synthetic construct
  misc_feature 1..6993: note = Description of Artificial Sequence: Synthetic coding sequence
  source 1..6993: mol_type = other DNA
atgctgagaggtcccggtcccggtctgctcctgctggcagtccaatgtcttggtacagcagtgccgagcaccggagccagcaaatccaaacgccaggcccagcagatggtgcagcctcagagtcccgtagccgttagtcagagcaagcccggctgctatgacaacgggaagcactatcagatcaatcaacagtgggaaaggacatacctgggaaacgcgctggtttgtacttgttatggcggctctcgggggttcaattgcgaatcaaaacctgaagccgaagaaacctgcttcgataagtataccggaaatacatatcgtgttggagatacatatgaacgccccaaagattccatgatttgggattgcacctgtatcggcgccggacgcgggcgcattagctgtaccatagcaaataggtgccatgaaggcggccaatcttataaaataggcgacacctggcggaggccccatgaaacgggaggatatatgctcgagtgcgtgtgcctggggaacggcaaaggggaatggacatgtaagccaatcgctgaaaagtgttttgatcatgctgctggaacaagttacgtggtgggagaaacatgggaaaagccataccagggttggatgatggtggactgtacttgtctaggcgaggggtccggaaggattacatgtaccagtagaaaccgatgcaatgaccaggacacccgcacctcataccgaattggtgacacgtggagcaaaaaagataatcgtggtaacctgctacaatgtatatgcaccgggaacggcagaggagagtggaaatgtgagagacacactagtgtacagaccacttcctctggtagcggacctttcactgatgtaagggcggctgtataccagccccagccgcacccccagccccctccatacgggcactgtgttactgactctggtgtggtgtactccgtaggcatgcagtggcttaaaacccagggtaataaacagatgctgtgtacatgcctgggcaatggcgtttcttgccaggagactgctgtcactcagacctacggtggcaactcaaacggagagccttgcgttctcccttttacgtacaacggaagaacattctactcatgcactactgaagggcggcaggatggccacttatggtgtagcactacatccaattatgagcaagaccaaaagtactctttctgcactgaccacacagtcttggtgcagacgagggggggaaattctaatggggcactctgccattttccctttctctacaacaaccataattacaccgactgcacatctgagggccgcagggataacatgaaatggtgtggtacgacccagaattacgatgctgaccagaaatttggcttttgccccatggcggcacacgaggagatctgtaccaccaacgagggcgtcatgtacagaattggggatcagtgggacaagcaacacgacatgggacacatgatgcggtgcacttgcgtgggcaatggtcgcggcgagtggacttgcatcgcatatagtcagctgagagaccaatgcatcgtggacgacatcacatataacgtgaatgatacatttcataaacgacacgaggaaggacacatgctgaattgtacatgcttcggccagggccgcggccggtggaaatgtgaccccgttgatcagtgtcaagactctgagacggggaccttctaccaaatcggcgatagctgggaaaagtatgtccacggcgtaagataccagtgctattgctacgggcggggtatcggtgaatggcactgtcagcccctgcagacttacccgtcgtccagtggtcctgtggaagtgttcattacggaaacgccctctcagccgaacagtcatcccattcagtggaacgcgccccaaccttcacatatctctaaatatatcctgcggtggaggcccaaaaactccgtgggtcgctggaaggaggcgacaattccgggtcacttaaattcttataccattaaaggcctcaagcccggcgttgtgtacgagggccagcttatctctattcagcagtacggccaccaggaagtaaccagatttgatttcaccacaacctccaccagcactcccgtgacgtccaatactgtgaccggtgagactaccccattctctcctcttgtggcaacttccgagtccgttacagaaatcacagcatcctcgtttgtggttagctgggtctccgccagcgatactgtctcaggattccgcgtggaatacgaattgagtgaggaaggtgacgaaccgcagtatttagacctcccctctactgctaccagcgtgaatattccggaccttttgcccggacggaaatacattgttaacgtttaccagatcagtgaggatggggagcagagcctcatcctgagcacaagccaaacaacagcacccgatgcccctcccgacaccaccgtggaccaggtagacgacacatctatcgtggtgaggtggagtcggcctcaggctcctatcaccggataccgaatagtctatagtcctagcgttgaaggctcttccaccgagctgaatctccccgagactgccaattccgttacactgtcagacctgcagcccggcgtacagtataatataactatttatgctgtcgaggagaaccaggaaagcactcctgttgtgattcagcaggagaccactgggacacctcggtcagacaccgtcccttcgcctcgagacctgcagtttgttgaagtcaccgacgttaaagtaaccatcatgtggactccaccagagtcagccgttactggataccgggttgacgtcattccggttaatctgccgggcgagcatggtcagagactgcctatatccagaaatacatttgctgaggtgacaggcctctcccccggcgttacctattacttcaaggttttcgccgtgtcacatggaagagaaagcaaacctctcaccgcacagcagacgacgaaattggacgctcccaccaacctgcagttcgtcaatgaaacagattcaacggtactggttaggtggacgcctccacgggcacagattacaggctaccgtctcacggtcggattaaccagaagaggccagcctagacaatataacgtagggccaagcgtttccaagtatccactgagaaatttgcagcccgcatcagagtacaccgtctctcttgtggccatcaaaggcaaccaggaatctccaaaggcgactggtgtgttcacaactctccaacctggctccagcattccgccatataatactgaagtgaccgagacaacaattgtgatcacctggacacccgcacccaggatcgggttcaaactgggcgtccgccccagtcagggcggagaggctccccgagaggtgactagtgatagtgggagtatcgtggtttctggcctgacacccggcgtggagtacgtgtacacaatccaggtactgagggacggccaggagcgagacgctcccatcgtaaataaggtggtgaccccattgtccccaccaaccaatctgcatctcgaggccaatccagacacaggggttctcacagtgtcctgggagcggtccacaacgccagacatcaccggttaccggattaccactacccccactaacggtcaacagggtaatagtctagaggaggtggtgcacgccgatcagagtagctgtacctttgacaatctgagtccagggttagagtataatgtgtccgtgtatacggtgaaggatgacaaggagagcgtcccaatctccgacaccattataccggcagtgccacccccaactgacttacgattcactaatatcgggccggatacgatgagagtgacctgggctccccctccgagtattgacctcactaactttttggtaagatattctccagtcaaaaatgaggaggatgttgcagagttgtctatttcacctagcgataatgctgtcgtgctgacaaacttactgcccgggacagagtacgtggtgagcgtgtccagcgtatatgaacagcatgaatcaactccactgcggggcagacagaagacagggctggattcccctactggcatagatttttccgatatcactgccaatagcttcaccgttcactggattgccccacgcgcgactattacaggctatcgtataaggcaccatcctgaacacttcagcggaagaccaagagaggatcgggtaccccattcaaggaacagcatcacgcttactaacctcacaccaggaaccgagtacgtcgtcagtatcgtagctttaaatgggcgggaggagtcccccttgctgatcggccagcagtccacagtgtccgatgtaccacgtgatctcgaagtggtggctgcaacacctacgagcttgctgatctcatgggacgctcctgcagtcactgtacgatactaccgaatcacatacggagagacaggtggaaactcacccgttcaggagtttacagtccccggtagtaagtcaaccgctacaatttccggcctgaagccaggggtagactatactattaccgtctatgcagtaaccggcaggggggattccccagctagctcaaagccaatatctatcaactaccgtaccgagatcgacaaacccagccagatgcaggttactgatgtgcaggacaatagcatttctgtgaagtggttgcccagctcttcaccagttacaggttaccgcgtcacaaccaccccgaaaaatggtcccggtcccactaagaccaagactgcaggaccagaccagaccgaaatgactatcgagggtctgcagcccaccgtggaatacgttgttagcgtgtacgcccagaacccctcaggcgaaagtcaacccctggttcagacagctgttacaaatatcgatagacccaaaggtcttgcctttaccgacgtggatgtggactctataaagatcgcctgggagagcccacagggccaggtgagccgctaccgggtcacgtattcatcacctgaggatggcatccacgaactcttccccgccccagatggagaagaggacacggcagaattgcagggcttgagaccgggctccgaatacacggtatccgtcgttgccctgcacgacgacatggaatcacagcccctgatagggactcagagcacagcaatacctgcgcctactgatctgaaattcacccaggtgacccccacttccctgtccgctcagtggacccccccgaatgttcagctcactgggtacagagtgcgggtcactccaaaagagaagacaggccccatgaaggagatcaaccttgcgcctgactcctcatcagtcgtagtctctgggctaatggtggccacgaaatatgaggtcagtgtgtacgcactgaaggacaccctcacatctaggcctgctcagggagtcgtaacaactctggagaacgtttcacctccccggagggcacgggtcaccgacgccaccgagaccaccatcaccattagctggagaactaagacggaaactattacgggtttccaggtggatgcagtgcctgctaatgggcagacgccgatccagaggacaattaaaccagatgtacgatcctacactatcactgggctgcagcctggcaccgattacaagatatacctctacacccttaatgacaacgcccggagttctccagtggtaatcgatgcctctaccgctatagatgctccttctaacctgagattcctcgctactacccccaacagtctcctcgtttcctggcaacccccccgagcccgcattacgggctacattattaaatacgagaaacctggctcaccccccagagaagtggtccctcgtcccaggcctggggtgacggaggctactatcactggactggagcccgggactgagtataccatatatgtgattgcactgaaaaacaaccagaaatccgagccacttatcgggaggaagaagacagtccagaaaacccccttcgtaacccatcccgggtatgacaccgggaacggaatccaactgcccggcacatcagggcagcagccaagtgtcgggcaacagatgatcttcgaggagcatggattccgccggactaccccaccaaccacggccacccccattaggcacagaccccgcccttacccccctaacgtcggtcaggaagctctgtcgcagactactattagctgggccccctttcaggatacatctgaatatattatctcttgccatccggtggggaccgatgaggagccactgcagtttagggtacccgggaccagcacgagcgcaaccttgaccggccttactagaggggctacttacaacgtcattgtggaggcccttaaagaccaacagcgccataaagtccgagaggaagtcgttacagtcggcaactctgtgaatgaaggcctgaaccagcctacagacgacagttgcttcgacccttacaccgtttcacattacgccgtgggcgatgaatgggaaaggatgtcagaatcaggattcaaactgctgtgccagtgtctgggctttgggagcggacacttccgctgcgactcgtcccggtggtgccacgacaacggtgtcaactacaagatcggtgagaagtgggatcgacaaggagagaacggtcaaatgatgagctgcacctgtcttggaaatgggaaaggagaattcaaatgtgacccccatgaagcgacttgttatgatgatggtaagacctaccacgtgggagaacagtggcagaaggaatacctaggagcaatatgcagctgtacctgctttggtggccagagaggctggcggtgcgataactgcagacgcccagggggtgagccttctccagaagggaccacgggacagtcatataaccaatacagccaaagatatcatcagcgcacaaataccaatgtgaattgcccaattgaatgctttatgcccctggatgtacaggccgatagggaggattctagagagtag

SEQ ID NO: 15241 - DNA, 3312 bp, synthetic construct
  misc_feature 1..3312: note = Description of Artificial Sequence: Synthetic coding sequence
  source 1..3312: mol_type = other DNA
cttagatggacacccttgaactccagcacaatcatcggctataggatcactgtcgtcgccgctggagaaggaatcccaatctttgaggactttgtggatagcagcgtggggtactacactgtgacggggctggaaccgggaatcgactatgacattagcgtaataactctgatcaacggaggggagtcggcccctactacactgactcaacaaacggctgtcccgcctcccaccgatctgagattcacaaacatcggccccgacactatgcgagttacgtgggctccgccgccaagcatcgaccttacgaacttcctagtcaggtactcccctgtaaagaacgaggaagacgtggcggagctcagcatctcgccttctgacaacgcagtagttttgactaatctgttgcccggcaccgaatatgtggttagcgtgtctagcgtgtacgaacaacatgagtctacgcctctgcggggacggcagaagaccgggctagactctccgaccggtatagacttctccgatattacagcaaacagcttcacagtacactggatcgcccccagagctacaattaccgggtacagaatccggcatcaccctgagcatttctcagggcgcccaagggaggaccgagtcccccattccagaaattccattactttgacaaacttaactccaggaacagaatatgtcgtgtctatagtcgcactgaatgggagggaggagtccccactgctcatcgggcagcagtcgaccgtcagcgacgtgccaagggatttggaggtggtcgccgcgactcctacgtccctgctgatctcttgggacgcgcccgcagtgacagttaggtactatcggattacctatggcgaaacaggaggcaactccccggtccaggagttcacagtgcccggttccaaatctactgctacaatcagcgggctaaagcccggcgtagattacactatcaccgtatacgccgtgactgggcgcggagattcaccagccagctcaaaacccataagtataaactaccgtactgaaatcgataaaccctctcagatgcaggtgaccgacgttcaggacaacagcattagcgttaaatggctcccatcttccagccccgtcaccgggtaccgagtcaccactacccccaagaacgggcctggcccgactaagacaaagactgctggccctgaccaaactgagatgactattgagggcctacaaccaactgtggaatacgtcgtctccgtgtacgcacagaatccctcaggggaatcccagccgctcgtccagaccgcagtgactaccattccagctcctactgacctgaagttcactcaggtcacacccacatccttatccgcccagtggactcccccgaatgtccagctgaccggataccgggtacgcgtgactcctaaggagaaaacagggccgatgaaggagatcaatttagcacctgactcatcctccgtcgtggtgtctggactgatggtcgcaaccaaatacgaagtgagtgtttatgcacttaaagacacattaaccagtcgccctgctcaaggcgtggtgaccacattagagaatgtgtcacctccccggagagcccgagtgaccgatgccactgaaacaactatcacaatttcatggaggaccaagaccgagacaatcaccggcttccaggtggatgctgtccccgctaacggccagacgcctatccagcgaaccataaaaccggacgtcaggtcctatactattacaggtctacagcctgggactgactacaagatctatctctatacattgaacgataacgctagaagctccccggtggtgatcgacgcctctactgcaattgacgccccaagtaatctcagatttctggccaccacgccaaattcactgctggtgtcttggcagccccctcgggccaggataacgggttatatcataaagtacgaaaagccaggtagcccgcctcgggaggtagtgccccgcccgcggccaggcgttacggaggccaccataactggcctggagccaggcaccgaatatactatatacgtaatagctctgaagaacaatcagaaatctgaacctttaataggtcgaaagaagaccgacgagcttcctcaacttgtgaccctgccgcatcccaaccttcacggtccagaaatactggacgttccctccaccgtccagaagactccgttcgtcacccaccccggatacgacactgggaatggaatccagttgcctgggacgtctgggcagcaaccctctgtaggccagcagatgattttcgaagagcacggttttcgtcggactacaccaccaactacggcgactcctatcagacacaggccgcgcccatatccgcctaacgttggagaagagattcaaatcgggcatatacctcgggaggatgttgactaccatctctatccccacggcccgggactgaatcccaacgcctcaaccggccaagaagctctcagccagaccactatcagttgggcccctttccaagataccagcgagtacatcatatcctgccatccagtgggaacggatgaggaaccactacagtttcgcgtccctggtacctcaactagtgccaccctgacggggttaacaagaggagcaacttataacgtgattgtggaggcccttaaggatcagcagcgtcacaaggtgagagaggaggtggtcacggtcggcaactcggtcaatgagggactaaaccagcccactgatgacagctgcttcgatccctataccgtctcacactacgcagtgggggatgagtgggagagaatgagtgaatctggattcaaacttctttgtcagtgtcttggttttggatcaggccactttagatgtgatagctcccgctggtgccacgataatggagtgaactataaaattggtgagaaatgggataggcaaggcgaaaacggacagatgatgagctgcacctgtctggggaacggaaagggagagttcaaatgtgatccgcacgaggcgacttgctacgacgacggaaagacttatcacgtgggcgaacaatggcaaaaagagtatctaggtgcaatttgctcttgcacatgtttcgggggccagcgcggctggcgttgtgacaattgtagacgacccggcggagagccttctcctgaggggacgaccggccaaagctacaatcagtactcccagagatatcaccagaggacgaatactaatgtgaattgtccgatagaatgcttcatgcccctggatgttcaggctgatagggaagatagtagagaatag

SEQ ID NO: 15242 - DNA, 312 bp, synthetic construct
  misc_feature 1..312: note = Description of Artificial Sequence: Synthetic coding sequence
  source 1..312: mol_type = other DNA
atgcccgtgagcgtttcaagcggccgcacttttcccaagagagggcagacctgcgttgtgcactacaccgggatgctcgaggatggaaagaaatttgactcatcgcgggacagaaacaaacctttcaaattcatgctgggcaagcaggaggtgatacgagggtgggaagagggtgtggctcagatgtccgtgggacagcgcgcaaaattgaccatttctcccgattacgcctacggcgccaccggccatccggggattatccccccacacgccacactcgtgttcgacgtggaattactgaaattggagtag

SEQ ID NO: 15243 - DNA, 327 bp, synthetic construct
  misc_feature 1..327: note = Description of Artificial Sequence: Synthetic coding sequence
  source 1..327: mol_type = other DNA
atgggggtccaggttgaaactatatcgccaggggacggaaggacctttccaaagagaggccagacatgcgtagttcactatactggcatgctcgaggacggcaagaagttcgatagctctagagatagaaacaagccctttaaattcatgctcggcaagcaggaggttatcagaggctgggaggagggtgtggcccagatgtccgtgggacagcgagcgaagctcaccattagccccgactatgcttacggtgccacaggccatcccgggatcatccctccacacgccaccttagtcttcgatgtcgagctgttgaagcttgagtag

SEQ ID NO: 15244 - DNA, 312 bp, synthetic construct
  misc_feature 1..312: note = Description of Artificial Sequence: Synthetic coding sequence
  source 1..312: mol_type = other DNA
atgccagtgtctgtgtcatctggtcgtacttttccgaagcgcggccagacgtgcgtagtccactacacggggatgctcgaggatggtaaaaaatttgactcttctcgggatagaaataaacctttcaagttcatgctcggcaaacaggaggtgatccgggggtgggaagaaggcgtggctcaaatgagcgtcgggcagcgcgccaagctgacaatttctccagattatgcatatggcgctactgggcacccaggaattatccctcctcacgccacactcgtattcgacgttgaactgctgaaactggagtag

SEQ ID NO: 15245 - DNA, 327 bp, synthetic construct
  misc_feature 1..327: note = Description of Artificial Sequence: Synthetic coding sequence
  source 1..327: mol_type = other DNA
atgggggttcaagtggagaccattagcccgggggacgggaggaccttccctaaacgagggcagacgtgtgtggttcattacaccggaatgcttgaggacggaaaaaaatttgactcttcacgtgatcgcaacaagcctttcaagttcatgctgggaaagcaggaggtgatcagaggttgggaagaaggggtggctcagatgtctgttgggcagcgagctaagctgaccatttcacctgactacgcatacggagcgacaggacatcctgggataatcccgccgcatgctacactcgttttcgacgtagagttgctgaagctggaatag

SEQ ID NO: 15246 - DNA, 279 bp, synthetic construct
  misc_feature 1..279: note = Description of Artificial Sequence: Synthetic coding sequence
  source 1..279: mol_type = other DNA
atgggcgttcaggtggaaacaatttctcccggggacggtatgttagaagacggtaagaaattcgactcttcacgcgatcggaataagccattcaagttcatgctcggcaagcaggaagtcattaggggctgggaagaaggggtggcacagatgtccgttggccaacgggctaaactgactataagccccgactacgcttacggcgctactggtcacccaggaattatccccccacacgcaaccctggtcttcgacgttgagctgctgaaactggaatag

SEQ ID NO: 15247 - DNA, 1143 bp, synthetic construct
  misc_feature 1..1143: note = Description of Artificial Sequence: Synthetic coding sequence
  source 1..1143: mol_type = other DNA
atgggtattcagggcttggccaagctgatcgccgacgtcgctccctccgctattagggagaacgatataaagagctacttcggtaggaaggtggccattgatgcaagtatgtccatctatcaatttctgatcgctgttaggcagggtggggatgtcttacagaatgaggagggcgaaaccaccagtcacttgatggggatgttttaccgcaccattcgaatgatggagaacgggatcaagcctgtgtacgtgtttgacggcaaaccgccgcagcttaaatctggcgaacttgctaagcgctcagaacgcagagccgaggctgagaaacagctacaacaggcgcaggccgccggtgcggagcaagaagtggaaaagttcacaaagcgactggtgaaagtgactaagcagcacaacgacgagtgtaagcacctgctttcactcatgggaatcccttaccttgatgctcctagcgaggccgaggcctcgtgtgcagcactcgtgaaagccggcaaagtatacgcggcagctaccgaggacatggattgtcttactttcggatcacccgtgctgatgcgacacctaaccgcatccgaggcaaagaagctcccaatacaggagttccatctgtcacggatcctgcaagagctgggcctgaaccaggaacagttcgtggatctgtgcatcctgctggggagcgattactgcgagtccattcgcgggattggacctaagagggcagtggacctaatacaaaagcataagagtatcgaggagatagtcaggcgcctggacccaaataaatatcctgtgccagagaattggctgcataaagaggcacaccaattatttctcgaaccagaagtcctggatcccgagagtgtagaattgaaatggagtgaaccaaatgaagaagagctgattaaattcatgtgcggggagaaacagttctctgaggagaggataagatctggagtcaaaaggctcagcaaaagccgccagggctccacacaaggacgcctggatgatttctttaaggttacaggctctctctcatctgctaagagaaaggagccggaacctaaggggagtaccaaaaagaaagccaagaccggtgcggcgggcaaattcaaacgcgggaagtag

SEQ ID NO: 15248 - DNA, 498 bp, synthetic construct
  misc_feature 1..498: note = Description of Artificial Sequence: Synthetic coding sequence
  source 1..498: mol_type = other DNA
atggggatccaggggctggccaagctgatcgcggatgtcgccccctctgcgattcgggaaaatgatatcaaaagctactttggacgcaaagttgccatagacgccagcatgtctatatatcaattcctgattgctgtgcgccaaggcggagatgttcttcagaacgaggaaggagagacaacctcacacttgatgggaatgttctatagaactatacgcatgatggagaatggaattaagccggtgtacgtgttcgacggtaaacctccgcaactgaagtccggagaactagcgaagagatcagagcggcgagccgaggctgagaaacagttgcaacaggcacaggctgcaggagccgaacaggaagtggagaaattcacaaagcgactagtaaaagtgaccaagcagcacaacgatgaatgcaaacacctgctgtccctgatgggtataccctacctggacgctccaagcgaagcagaggcttcgtgtgccgcttag

SEQ ID NO: 15249 - DNA, 4017 bp, synthetic construct
  misc_feature 1..4017: note = Description of Artificial Sequence: Synthetic coding sequence
  source 1..4017: mol_type = other DNA
atggtgagctattgggataccggggttctgctttgtgccctactgagctgtctgttgctaactggatcatcaagtggaagcaagctcaaagacccggagttatcacttaaaggcacacagcacattatgcaggctggccagactcttcatcttcagtgccgaggagaggcggcacacaagtggtctctaccagaaatggtttctaaagagagcgagagactctcaatcaccaagtccgcttgcggtcgcaatggaaaacaattctgctcaaccctaaccctcaacacagcgcaagctaatcatacaggcttctattcatgtaagtatctcgccgtgcctactagcaaaaagaaggaaacggagagcgctatttacatctttatctctgacaccggccgcccttttgtggaaatgtactcagaaatccctgagatcattcacatgactgagggtcgcgaacttgtgatcccctgccgcgtaacctccccgaacatcactgtgaccttgaagaagttccctctcgacaccttgattcctgacggcaaacggattatatgggattcccgaaaaggatttattatatctaatgccacatataaggagatagggctcttaacctgcgaggctaccgtcaacggccatctgtataaaacaaattatttgacccatagacaaacgaatacaattattgacgtgcagattagtacccctcgccccgtgaaactgttgcgcggacacactctagttctgaactgtaccgcaactacacctttgaacacccgcgtgcaaatgacttggagttatcctgacgagaaaaataagcgggccagcgtacggcggaggattgaccaatctaacagccatgcaaatattttctacagcgtgctcaccatcgataaaatgcaaaacaaggataagggtctatacacctgtcgggtccgatcagggccatccttcaagagcgttaatactagcgtgcacatatacgacaaggctttcataacagtgaaacaccggaaacagcaggtactggaaaccgtcgctggcaagcgctcatatcggctgtccatgaaggtcaaggccttcccctccccagaggtcgtgtggctaaaggacggtctacctgccacagagaaaagcgcacggtacctgacccgcggatactctttgattattaaggatgtaaccgaagaagatgccggcaattacacgattctcctgtccataaaacagtcgaatgtatttaaaaacctgaccgcaacattgattgtcaacgtgaagccccaaatctacgaaaaggctgtctccagttttcccgaccccgctctgtatcctctcggctcacgccagatcttaacctgtaccgcctatggcattccccaacctaccatcaagtggttttggcatccttgtaaccataatcattccgaagccagatgtgacttttgtagtaataatgaggagagtttcatcctagacgccgattccaatatgggtaatcggatcgaatccatcacgcaacggatggctattatcgagggcaagaataagatggcatctaccttagtagtggcagattctcggatatcagggatatacatttgcattgcatctaataaggtgggcaccgtgggaaggaacatcagtttctatatcacggatgtccccaacggttttcacgtcaacctcgaaaaaatgcctactgagggagaagacctgaaactgagctgcactgttaacaaattcttgtatcgcgatgttacttggattctgctccgcacagtgaacaacaggactatgcattactccatttccaaacagaagatggcaatcaccaaggaacactccataaccttaaacctcacaatcatgaatgtctcgctccaggatagtggtacgtatgcatgtagagctagaaacgtctataccggggaggagatactgcagaaaaaagaaattaccatccgggatcaggaggcaccttatctcctgcggaacctctctgatcatacagtggccattagtagcagcaccacgctggattgtcatgccaatggggtcccagaacctcaaatcacatggttcaagaataaccacaaaattcagcaggagccagggattatactcggtccaggaagctcaacactgttcatcgagcgcgttaccgaggaagatgagggcgtctatcactgcaaggctaccaaccaaaagggctccgtcgagtccagcgcatacctgaccgtgcaaggcacctccgataaaagcaatctggaattaatcactttgacctgtacatgcgtcgccgccactctgttctggctgctgttgacactgtttattcggaagatgaaaaggagtagtagcgagattaagaccgactatctatcgataataatggaccccgatgaggtgcccctcgatgaacagtgtgaaaggctcccatacgacgcatctaagtgggaatttgctagagagcgactgaagctcggaaagagtctcgggaggggggcattcgggaaggttgtacaggcgagtgcttttgggattaagaagagccctacctgcagaaccgttgccgtgaaaatgttgaaagaaggcgccactgcttcggaatataaagcccttatgaccgagctgaagatccttacacatattggccatcatttaaacgtggttaacctactcggcgcttgcactaagcaggggggccctctcatggtcattgtggagtactgtaagtatgggaacctgagcaattatctcaaatcaaagagggacctcttcttcctgaataaagatgcagccttgcatatggagcccaaaaaggaaaagatggagcccgggctggaacaggggaaaaaaccccggcttgattctgttactagtagcgaatcatttgcttctagcgggtttcaggaggataaatcacttagtgacgtcgaggaggaagaagacagcgatggcttttataaggaaccaattacaatggaggaccttatctcctatagctttcaggtcgctcggggcatggaatttctaagcagccgcaaatgtatccaccgtgaccttgccgctcggaacatccttctttcagagaacaatgtggtgaagatctgtgatttcggtctcgctagggatatatacaaaaaccctgactatgtcagaaagggagatacacgcttgccactgaagtggatggctccagagtccatatttgataaaatatacagtaccaaatccgatgtctggtcatatggcgtcctgttatgggagattttctccttgggtggatctccatacccaggagtccaaatggacgaagacttttgctctcggttaagggagggcatgcggatgagagcacccgagtatagcaccccagagatctaccaaattatgctagactgttggcacagggacccgaaggaacgcccaagatttgctgaattggtggagaaactcggagatctactgcaggcaaacgtccagcaagacggcaaggactacattcctataaatgccattctgactggtaactctgggttcacttattctaccccagccttctcagaggactttttcaaagagagtatcagcgcaccgaagttcaacagtggaagtagtgatgatgtgcggtacgtgaacgcgtttaaattcatgtcgctggagcgcataaaaacatttgaagaactgcttcccaacgcgacttctatgttcgatgattatcagggagattcctctacactccttgcctctcccatgctgaaacggtttacttggaccgatagtaagcccaaggcctctctgaagatcgacctgcgcgttacttctaagtctaaggagtcaggcctgagtgacgtctcacggcccagtttctgccactcctcctgcgggcacgtcagcgaggggaaacggcgattcacctacgatcacgccgaactcgaaaggaagatcgcttgctgcagtccgccacccgattacaacagtgtggttctgtacagtactccccctatatag

SEQ ID NO: 15250 - DNA, 531 bp, synthetic construct
  misc_feature 1..531: note = Description of Artificial Sequence: Synthetic coding sequence
  source 1..531: mol_type = other DNA
atggtaagctactgggacacaggagtactcttatgcgctctgctgagctgtctgctgctcacaggctcgagctctggcagtaagctcaaagacccggagctgtctttgaagggcacacaacatatcatgcaggccggccaaacgctacacctgcaatgtcggggcgaggcggcccataaatggagcctgcctgaaatggtgtctaaagaatctgaacggttgagcatcaccaaatccgcctgtggccggaacgggaagcagttctgttctactctgaccttgaatactgcacaggctaatcataccggcttttatagctgtaaatatctggctgtccccacaagtaagaagaaggagactgaatctgccatctatatctttatcagtgacactggcagacctttcgtggaaatgtactcggagattcctgaaatcattcatatgaccgagggaagagaattggtaatcccttgtcgcgtaacctcccctaatatcaccgtgaccttgaagaaaaaaaacaaaagggcttag

SEQ ID NO: 15251 - DNA, 1626 bp, synthetic construct
  misc_feature 1..1626: note = Description of Artificial Sequence: Synthetic coding sequence
  source 1..1626: mol_type = other DNA
atggtaagctactgggacaccggcgtcctgctctgcgcattactcagctgtctgttgttgaccggctcctcgtccggatctaaactgaaggatcctgagttgtcactgaaagggacccagcatattatgcaagctggacagacccttcacctgcagtgccggggcgaggccgctcacaaatggtccctgccggaaatggtgtcaaaagaaagcgagcgactgagtatcacaaagtcagcctgcggccgaaatggcaaacagttttgttctaccctcacattgaacaccgctcaggcaaatcacactggattctactcttgcaaatacctggctgtacctacttccaaaaagaaggaaacagagtctgccatctatatttttatctcagataccggccgccccttcgttgaaatgtacagcgaaattccagagatcattcacatgacagagggcagggagctcgtcataccttgtcgagtgacgtcccctaacatcacagtgacactcaagaaatttccactggacactctcatcccagacgggaagcggattatttgggactctcgtaaaggattcatcataagcaacgcaacctataaggagattgggcttctgacatgcgaagccaccgttaatggtcacctctataagacaaactatttgacccatcgccaaaccaacactattattgacgtgcagatttcgacccctagacccgtgaagctgctgcggggtcacacccttgtgctaaattgcaccgccaccacgccgttgaacacaagagtgcagatgacatggtcatacccagacgaaaagaataagagagcctctgtgcggagacggattgatcagtcgaattcccacgctaatattttttatagcgtgctgaccatagataagatgcagaacaaggacaagggcctatacacgtgccgagtaaggtcaggtccaagctttaaaagcgtcaacacgtccgtgcacatctatgacaaagctttcattacagttaagcaccggaaacaacaggtgctggaaactgtggccggcaaacgcagctacagacttagcatgaaggttaaggccttcccttctcccgaggtggtctggctcaaagacgggctgcccgctaccgaaaaaagtgcaagatacctaacccgcggttactctttgattattaaggacgtgaccgaggaggatgctggaaactacaccattctccttagcattaagcagagtaatgtgtttaagaacctgaccgccacactgatagtgaatgttaaaccgcagatttatgagaaagcggtgagttccttccctgacccggcactctaccccctgggcagtcgccagattttaacttgcaccgcctatggaatcccacagccaaccattaagtggttctggcatccatgtaaccacaaccatagtgaagctcgctgcgatttctgcagtaataatgaagagagttttattttagacgcagattcaaacatgggcaatcgtattgaatcaatcacccagcgcatggccattatagagggcaaaaataagttacctccagctaattcttctttcatgttgccaccgacaagcttctcttcaaactattttcatttcttgccttag

SEQ ID NO: 15252 - DNA, 1671 bp, synthetic construct
  misc_feature 1..1671: note = Description of Artificial Sequence: Synthetic coding sequence
  source 1..1671: mol_type = other DNA
atgaagcgctcatcctctgagataaagaccgattatctctcaattattatggatcccgatgaggtacccctcgacgagcaatgcgagcgcctgccctatgacgccagtaaatgggaatttgcccgtgagagactgaagctcggaaagtcactcggaagaggcgcgtttgggaaggtagtccaggccagcgcctttgggattaagaagtcacctacctgtcggaccgtcgccgtgaaaatgctcaaggagggggccactgcttcagagtacaaggctctgatgaccgagctcaagattctgacgcatataggtcatcatctcaatgttgtgaatctgctgggcgcctgtaccaaacaaggcggccccctgatggtgatcgtggagtattgtaaatatggaaacctgtccaactatctcaaatctaaaagagacttgttcttcctgaacaaggatgccgccctccacatggaacccaaaaaggaaaagatggagccggggctggagcagggcaagaagccccgtctggattccgtcacttcaagtgaatcttttgccagcagcggattccaggaagacaaaagcctgagcgatgtggaagaagaggaagattccgacggcttctataaggagcccatcactatggaagaccttatttcttatagctttcaggtggcaagaggcatggagttcctgagcagcaggaaatgcatccacagagatttagcagcccggaacattcttctgtctgaaaacaacgttgttaagatatgcgacttcggactggcccgggacatctacaaaaaccccgattatgtccggaagggcgacacccggctcccacttaagtggatggcgcccgaatcaatcttcgacaagatttacagcacgaagtccgacgtgtggtcttatggagtccttctatgggagatattttctttaggcgggtctccctatcctggtgtccagatggatgaggatttttgctcccggctcagggagggaatgcgcatgcgtgcgccagagtacagcacccccgagatctatcagataatgttggactgttggcatcgggaccccaaagagagaccacgatttgctgagctagtggaaaagctgggtgacttgctgcaggcaaacgtccagcaagatggcaaagattatatccctattaacgcaatcctcacagggaacagtgggtttacctatagcactcccgcattttctgaagacttctttaaggagagtatctcagcgcctaagttcaacagtggaagctccgatgacgttagatatgtaaacgcattcaaatttatgagtcttgagagaattaagacctttgaggaattgctccccaatgctaccagcatgttcgatgattatcaaggtgacagcagcactttgttagcctcccccatgttgaaacgatttacctggaccgactccaaaccaaaagctagtctgaaaatcgatctccgggttaccagtaaaagcaaggagagcggactgagcgacgtttctagaccctccttttgtcattctagttgcggtcacgtgtccgaggggaagagaagattcacctacgatcacgcggagctagagcgcaagattgcatgctgcagcccaccgcctgattataactccgtggtattgtatagtacaccccctatctag

SEQ ID NO: 15253 - DNA, 45 bp, synthetic construct
  misc_feature 1..45: note = Description of Artificial Sequence: Synthetic coding sequence
  source 1..45: mol_type = other DNA
gagctaagcaactttgagtgcttgcacccctgttctcaggagtag

SEQ ID NO: 15254 - DNA, 2202 bp, synthetic construct
  misc_feature 1..2202: note = Description of Artificial Sequence: Synthetic coding sequence
  source 1..2202: mol_type = other DNA
atggtgtcatactgggacacgggggtactgctttgtgcccttttaagctgcctgttgctcacaggaagcagttcgggctccaagcttaaggacccagaattatctttgaagggaacacagcatattatgcaggcaggacagaccttgcatcttcagtgtagaggcgaggcggcccataagtggtctttgccagagatggtctctaaagaatcagagcgtctgtccattaccaagtctgcttgcggtcggaacgggaaacaattttgctcaaccctgaccttaaacaccgcccaggcaaaccatactgggttttactcatgcaaatacttggctgtccctactagtaaaaaaaaggagactgagagtgccatttacatcttcataagtgacacgggaaggccctttgttgagatgtactctgaaattcccgagatcattcatatgactgaagggcgcgagctggtgataccttgtagagttacaagcccaaatattaccgtcaccctcaagaaattccctctagatacgctgattcctgatgggaaacgcattatttgggatagtaggaagggctttatcatttctaacgccacttacaaggaaatcgggctgctaacttgcgaggccacagtgaacggccatctgtacaagacgaattatcttactcacagacagacaaacactatcattgacgtgcagatcagcaccccacggcctgttaaactgttaaggggacatacactggtgctgaattgcactgctactactccccttaacacacgagtgcagatgacttggagttacccagatgaaaagaacaagagagcctccgtccgtcgcaggatagatcagtcaaatagccacgccaatatcttttactcggtgctgaccattgataagatgcagaacaaagacaagggcctctacacatgccgcgtccgctccggtccgtcctttaagtcagtgaacactagtgtgcacatctacgataaggccttcattacagtaaagcacagaaaacaacaggtgctggagaccgtggctggcaaaagatcttaccggctgtcaatgaaggttaaggctttcccatcccccgaggttgtctggcttaaagacggcctgccagccactgagaaatctgctaggtacctcactcgggggtacagcctcattattaaggatgtgaccgaggaggatgctggtaattatacgattctcctatcgattaagcagtcaaatgtgtttaagaatctgaccgcaaccttaatcgtgaacgtgaagccccaaatttatgaaaaagccgtttcttcttttccagacccagctctctatccgcttggttcgcggcaaatactgacctgcacagcctacggtattccacaaccaaccatcaaatggttctggcatccctgcaaccataaccactctgaggcgcgctgtgatttttgctcaaacaacgaggagagttttattctggacgccgactcaaatatgggcaacaggattgaatcaatcacccagcgcatggctattatcgagggcaagaataagatggcaagtacgttagttgttgccgactctcgcatcagcggtatttatatttgtattgcgagtaacaaagtcgggaccgtcggcagaaatatctccttctatattaccgatgtacccaatgggttccatgtgaacttggagaagatgccaactgaaggggaggacctgaaactcagctgcaccgttaacaagtttttgtacagagacgtgacgtggatacttcttcgcactgtcaataaccgaacaatgcattacagcatttcaaagcagaagatggccataaccaaggaacattccatcaccttaaaccttacaatcatgaacgtatcgttgcaagattcggggacctatgcctgccgcgctagaaacgtgtacactggtgaggagatactgcagaagaaggaaatcaccattagggatcaggaggcgccctacctgctgcgaaacctcagtgaccacaccgtggcaatttctagctccacaactttggactgccatgctaatggcgtccccgagccacagatcacctggttcaaaaataaccataagattcaacaagagcccgaactgtatacaagtacttcaccctcaagcagttctagctcccccctctcctccagcagttcaagcagctcctcctcatcatcttag

SEQ ID NO: 15255 - DNA, 1086 bp, synthetic construct
  misc_feature 1..1086: note = Description of Artificial Sequence: Synthetic coding sequence
  source 1..1086: mol_type = other DNA
atgaactcagacctacttgttgatagcgatggcttctataaagagccaataacaatggaagatctcatatcttattcttttcaggtagcaaggggaatggagttcttgagttctcggaaatgcatccatcgggatttggctgctaggaatatcctgttgtctgaaaacaatgttgtgaagatatgtgacttcgggctggctagggatatctacaagaaccccgactatgtacggaagggggacacaagactccccctgaagtggatggcccccgagagcatctttgacaaaatttatagcacaaagtctgacgtatggagctacggagtgctcctttgggagatcttcagccttggggggagcccgtatcctggcgtgcagatggatgaggacttttgctccagattgagagaaggtatgcgtatgcgggcccccgagtattcgacacctgagatttatcagatcatgctggactgctggcatagggacccaaaggagcggccccgttttgccgagctagtagagaagctcggcgatcttctgcaggcgaatgtgcagcaggacggcaaagattacattcctatcaacgcaatactgaccggcaattccgggtttacgtattccactccagccttctctgaagacttttttaaggagagcataagcgcccccaaattcaattcaggctcaagcgatgatgtccgatacgtgaatgccttcaaattcatgagcttagagcgaatcaagacctttgaagagctactcccaaacgcaaccagcatgtttgacgattatcagggtgactcctccactctgttagcaagtccgatgctgaagcgctttacctggactgacagtaagccaaaagccagtctcaagattgacctccgagtgacttccaaatccaaggagtctggcctttctgatgtcagtcgtcccagcttctgtcatagtagttgcggccacgtctcagagggaaaacgccgcttcacttacgaccacgcggaattagaaaggaaaatcgcttgctgttccccaccacctgattataattccgtggttctctactccacccctccaatttag

SEQ ID NO: 15256 - DNA, 75 bp, synthetic construct
  misc_feature 1..75: note = Description of Artificial Sequence: Synthetic coding sequence
  source 1..75: mol_type = other DNA
ctgccgccagcgaactcttccttcatgctgcccccaacttctttctcgtcgaattatttccatttccttccctag

SEQ ID NO: 15257 - DNA, 1062 bp, synthetic construct
  misc_feature 1..1062: note = Description of Artificial Sequence: Synthetic coding sequence
  source 1..1062: mol_type = other DNA
atggagctgaccgagcttctgctagtggtcatgctgctgttgacagcccgactgacgctgagctctccagctccacctgcctgtgacctccgggtactgtctaagctgctccgagattctcacgttttacactctagactgagccagtgcccagaggtacaccccctacctactcccgtcctcctgccagccgtcgacttcagtctaggcgaatggaagactcagatggaagagacaaaagcacaagatattctgggcgccgtgactttgctgctagagggcgtcatggctgctagaggccagttaggacctacatgcctttcaagcctccttggccagctgtcagggcaggtcagattgctcttgggcgcactgcaatcactactcggaacccagctgccgcctcaggggcggaccaccgcccataaagaccccaacgctatattcttgagcttccaacatctcttgcggggaaaggtcaggtttctgatgttggtaggagggtcaaccctctgtgttagacgggcaccacctaccacggccgtcccctccagaacctccctggtcctgaccctaaatgaactccctaataggactagtggattgctggagaccaatttcacggccagtgcgcggacaacggggagcggactgttgaagtggcaacagggatttcgggctaagattcctggactgctgaaccagacctccaggtccctcgaccaaatacctgggtatctgaatcggattcacgaactcctcaatggaacacgcgggctattccctggaccctctcgacgcacattgggagctcccgacatctcttcaggtacctccgacacagggtccctcccacccaaccttcagcctgggtattcaccctccccgactcaccctcccacagggcagtatacactttttcctttgcctcccaccttgccaacccctgtcgtccagctacaccccctcttgcctgatccatctgcgcccacaccaacacccacatctcccctccttaacactagttacacacattcacaaaatcttagccaagaaggatag

SEQ ID NO: 15258 - DNA, 537 bp, synthetic construct
  misc_feature 1..537: note = Description of Artificial Sequence: Synthetic coding sequence
  source 1..537: mol_type = other DNA
atgacggtgctggcaccagcatggagcccgaccacctatttactcctgttgctcttgttgtctagcggcctctcggggacgcaggactgttccttccagcacagtccaatcagctctgattttgctgtgaaaattcgagaactttcagactatctcctccaagattacccggtaacagtggcttctaacctccaggacgaggaactttgcggcgggctgtggcggctcgttttggcccagcgctggatggagcggctgaagacagttgctggcagcaaaatgcagggacttctggaacgggtcaatacagagattcactttgttacaaaatgcgcatttcagccgccaccctcctgtctgcggttcgtgcagactaacatttcacgtctgctgcaggagacaagcgagcaactggtcgctctaaagccctggattacaagacagaacttttcacgctgtctcgagctgcaatgccaacccgtggagactgtgttccacagggtctcgcaagatggcttagacctgttaacatcatag

SEQ ID NO: 15259 - DNA, 708 bp, synthetic construct
  misc_feature 1..708: note = Description of Artificial Sequence: Synthetic coding sequence
  source 1..708: mol_type = other DNA
atgacagtgctggcccccgcctggagcccgacaacctaccttcttctgcttttgctccttagtagtggactgagtggcacacaggattgctcattccaacacagccccatttcctccgacttcgcagtgaagatccgggagctgagtgactatttactgcaggattatcccgtgacagttgcctccaatcttcaggatgaggagctgtgcggcggattatggagactcgtgctggcacagcgctggatggaacggctaaagactgtggcaggaagcaaaatgcaggggctgctggagcgagtgaacacagagatacactttgtcaccaagtgtgcattccagccccctcccagctgcctccgcttcgtgcagaccaacatctcacggttgctgcaggagaccagtgagcaactggtggcccttaagccgtggatcacacggcagaattttagccggtgtctggagttgcagtgccaacccgacagctctacattaccccctccttggagcccgcgcccccttgaagccacggcacccaccgccccgcagcctccgctgctgctgctactgctgctgccagtgggtcttctactgctggccgctgcatggtgtcttcactggcaaaggacaagacgtcgcactccaagacctggagagcaggtgccgccagtgccatcaccccaggacctgctgctggtagagcattag

SEQ ID NO: 15260 - DNA, 4092 bp, synthetic construct
  misc_feature 1..4092: note = Description of Artificial Sequence: Synthetic coding sequence
  source 1..4092: mol_type = other DNA
atgcaaagaggtgcggccttatgcttaaggctgtggctgtgcttggggctgcttgatggattggtctcaggctactccatgactccgcccaccctgaacataactgaagaatcacatgtcatcgacacaggtgattcccttagcatttcctgtagagggcagcaccctctggaatgggcttggccaggcgctcaggaggcccccgcgacaggcgacaaggatagcgaggatacaggcgtagtgcgcgactgcgaagggacagacgctcgaccgtactgcaaggttctgctgctacacgaggtccatgccaacgatacggggagctacgtgtgttattataagtatattaaagcccggatcgagggcacaacagccgcctctagttatgttttcgtgagggactttgaacagccatttatcaacaagccagacacacttttggttaaccggaaggacgcgatgtgggttccctgcctcgtgagcatacccggcctgaacgtcaccctcaggagccaaagcagtgtgctttggcccgatgggcaagaagttgtgtgggacgaccgtcgagggatgctcgtctctacccccctcctgcacgacgccttgtatctacagtgtgagactacctggggagaccaagacttcctctctaaccctttcctggtgcacattaccggcaacgagctgtatgacattcagctcctgccccggaagagcctggagctccttgtcggagaaaaactggtgttaaattgcacagtgtgggctgagtttaatagcggggtgacatttgactgggattacccaggaaagcaggcagagaggggaaagtgggtgcccgagaggcgttcacagcaaacccatacagagctcagcagcatcctaactattcacaatgttagtcagcacgatttgggaagctatgtctgcaaggcgaataatgggattcagcgatttcgcgagagtaccgaggttatagtgcatgaaaatcctttcatttcagtcgaatggctaaaaggtcccatcctcgaagcgactgccggcgacgagctagttaagctcccagtaaaacttgctgcatatccacctcccgagtttcaatggtacaaagatgggaaggcgctttccgggaggcacagcccccatgccctagtgctgaaagaggtgacggaggcgtctactgggacctacactctggcactatggaattcagctgcagggctcagacgcaatatatcgttggaacttgtagtgaacgtgcctccacagatacatgaaaaagaggcctctagtccaagcatctactctcgccattccagacaggctcttacctgcacggcctacggggtgccactccctctgtccatccagtggcattggcgcccatggactccttgcaaaatgttcgctcaaagatctctgagaaggcgccagcagcaggacctcatgccccagtgtagagattggagggcagtgacgacacaggatgctgtgaacccaattgaatcactggatacatggaccgagtttgtcgagggcaaaaacaaaacagtgagtaagcttgtgattcagaacgccaatgtgtccgccatgtacaagtgcgtggttagtaacaaggtgggacaagacgagcggctgatctatttttatgtgaccactattccggacggtttcaccatagagagtaaaccctccgaagagctgttggagggccaaccagtgttgctaagttgccaggctgacagttacaagtacgagcatctgagatggtaccgcctgaatctgtccaccctccacgacgcccacggtaatccactgctcctggactgtaaaaacgttcaccttttcgctacacccttagccgctagcctcgaggaagtggcccccggcgcccgacacgctaccttgagtctcagcatcccccgtgtggctccagagcacgaggggcattacgtttgcgaggtgcaggatcgccggagccatgataagcattgccacaagaaatatctgagtgtgcaggccctggaggcccccagacttacccagaatctgacggacctgctggtgaacgtgtccgactccctcgagatgcagtgtttggtggccggagcacacgcccccagtatcgtatggtacaaggatgagaggctcctggaagagaagtctggtgttgatttagccgactctaatcagaaactcagcattcaaagagtcagggaggaggacgccggccgctacttgtgttccgtttgtaacgcaaaaggatgtgtgaacagctcagctagtgtggcggtggaaggcagtgaggacaaggggtccatggaaatcgttattctcgtcggcactggggtcatagcggttttcttctgggttctgctcctattaatcttctgcaacatgcggagaccagcccacgccgacattaagactggctatctcagcattatcatggaccctggcgaagtgcccctcgaggaacagtgtgagtatctgtcctacgatgcctcacaatgggagttccctcgagagcgactccatctcggcagagtgctcgggtacggagcctttggtaaggtcgtggaggcatcggccttcggcatccataaaggttcttcatgcgacaccgtcgcagtcaagatgcttaaagagggggccactgcttcagagcatcgggcccttatgtcagagctaaaaattttaatccacattggtaatcacctcaacgtggtaaatttgttgggggcgtgtacaaaaccccagggacctcttatggtaatcgtggagttttgtaagtatggaaatctcagtaattttctgagggcgaaacgggacgcattttctccgtgcgcggagaaatcccctgaacagagaggccggtttagggccatggtggaactcgcccgcctggatagacgtcgccctgggagcagcgaccgcgtgttattcgcccgatttagcaagactgaggggggggcccgacgggcaagcccagaccaggaagccgaagacctatggctgagccccctgacgatggaggacctcgtctgctatagcttccaggtggcccggggaatggaattcctggcctctcggaagtgcattcatagagatctggccgcgcgtaatatactcctgagcgagtcagatgtggtgaagatttgcgactttggattggcacgagacatctataaagatcccgattacgtgcggaaaggtagtgctcgcctgccactgaagtggatggcccccgaaagtatctttgacaaggtgtacaccacccagagtgacgtgtggtcatttggcgtgctgctgtgggagatattcagcttaggagcctcgccatatcctggggttcagattaatgaggaattctgtcagcgtctgcgggacggcacacgaatgagagcccctgagttagccacccctgcaattagacggatcatgctgaattgctggtcaggtgatccgaaggcccggccagccttctcagaactggtggagatccttggagatctcctccagggtagaggcctccaggaagaagaagaggtgtgcatggctccccgctcctctcagtcatcagaggagggatccttttcacaggtcagcacaatggctttgcatatcgcgcaggctgacgcggaagactcacccccatccctccaacggcacagtctagctgcacggtactacaattgggtgtcattcccaggttgccttgctagaggcgccgaaacccgaggttcgagcagaatgaaaactttcgaggaattcccaatgactcccacaacatacaagggtagtgtggacaaccaaacagattccggtatggtactcgcttccgaagagttcgagcagattgaaagccgacatcggcaagagagcggattttcttgtaaagggccaggccagaacgtggccgtgacacgcgcccacccggattcccagggccggaggcgtagaccggaacgcggcgccaggggcggtcaggttttctacaactcggaatacggcgagctcagcgagccgtcagaggaggaccactgttcgccgtctgccagggtgactttttttaccgataattcctattag

SEQ ID NO: 15261 - DNA, 2283 bp, synthetic construct
  misc_feature 1..2283: note = Description of Artificial Sequence: Synthetic coding sequence
  source 1..2283: mol_type = other DNA
atgctggttagcacccccctgctgcatgatgccctgtatctgcagtgcgagacaacttggggtgaccaggatttcctgtccaacccttttctggtgcatataaccggaaatgaactgtacgacattcagctgctgccgagaaagagtctcgagctactagtgggcgaaaagctggttctaaactgtacggtatgggcagagtttaactcgggggtcaccttcgactgggattatcccggcaaacaggctgaaagagggaaatgggttcctgagagacgtagccagcagactcataccgagctgagtagtattctgacaatacataacgtgagccagcatgatctgggttcctacgtctgcaaggccaataacggaattcagagattccgcgagagcacggaggtgattgtgcatgaaaatccttttatctccgtcgagtggcttaaaggacctattctggaagccaccgccggcgacgagcttgtgaaactgcccgtgaaactcgccgcatatcctccacccgagtttcagtggtacaaagatggaaaagccctttcaggtaggcattcaccacacgctctggttctgaaggaagtcacagaagcctcaaccggcacctatacacttgccctgtggaattccgcagccggcctccgccgcaatattagcctcgagctggtggtcaatgttcctccacagatccatgagaaagaggcctcaagcccatctatttactcccgacactcccggcaagctctgacttgcactgcctacggtgttcctttgcctctgagcatacaatggcactggaggccatggaccccctgtaagatgttcgcccaacgatctctgaggcgcagacagcagcaggacctgatgccgcagtgccgcgattggagggctgtcaccacacaggatgccgtcaatcccattgaatctttggacacctggaccgaatttgtggagggaaagaataagaccgttagtaagctagtaatccagaatgcgaacgtttcagcaatgtataagtgcgtggtttcaaataaggtcggccaggatgagaggctgatttacttctacgtcaccacaattcctgatggatttacaatcgagtcaaagccgagcgaggagctactcgagggccaaccagtcttgttgtcctgccaggccgattcttacaagtatgaacacctgcgctggtacagattgaatctgtctaccttgcacgatgctcacggcaacccactcctgctggactgtaagaatgtacacctcttcgctacccccctcgccgccagtctggaggaggttgcgcctggcgcaaggcacgccaccctgtccttaagtattcctcgggtggccccagagcacgaagggcactatgtttgtgaagtgcaggatcgccgtagtcatgataagcattgccataaaaaatacttgtcagttcaagccttggaagcgcctaggttgacccagaacctgacagacctgctcgtcaacgtttccgactctctggagatgcagtgtctggttgccggcgcccacgctccctcaatcgtttggtacaaagacgaacgcctgctggaggagaaatccggggtggacctggcagattcaaaccagaaactgagcattcagcgcgtcagagaagaagacgctggaagatatctctgcagcgtgtgcaacgctaagggttgcgtgaatagtagcgcctcggtggccgtggaaggatccgaggacaagggatcgatggaaattgtcattctggttgggacaggagttatcgccgtttttttctgggttttgctcttgctgatcttctgtaatatgagacggccagcccatgcggatatcaagaccggctacctgagcatcattatggaccctggcgaggtgccattagaggagcaatgtgagtaccttagctacgatgctagtcaatgggaatttcctagagagcgcttgcatcttggtagagtgctaggctacggagccttcggtaaggttgttgaagcgagtgctttcggcatccacaaaggaagctcctgcgacaccgtggccgttaaaatgctcaaaggagtcggctccgcagggggaaggggaagccttgccggcgaggaacaacaactcggggtgggcaggtgggatggcaattcagggcgtgaaacggaagctgggtcacagagtcacccccggttttacagagaggctgctgggtttcgagcagaaggaccacccgagccacctagcgtggggccagctggttgccccggggggccttag

SEQ ID NO: 15262 - DNA, 3897 bp, synthetic construct
  misc_feature 1..3897: note = Description of Artificial Sequence: Synthetic coding sequence
  source 1..3897: mol_type = other DNA
atgcagagaggggccgcactctgcttgaggctgtggctatgcttgggccttctcgatggcctggtcagtggctactctatgaccccacctactctaaacattaccgaggagtcacatgtaatcgacacgggggattcactgagcatctcgtgcagaggacaacatcctctggagtgggcctggcccggagcccaagaagcaccagctaccggggataaagatagtgaggatacaggggtagttagggactgcgaaggcacggatgcacggccctactgtaaagtcctattgcttcatgaggtgcacgcaaacgacactggttcctatgtctgctactataagtacatcaaggccagaattgagggcaccacagccgctagttcttatgtgtttgtgcgcgactttgagcaacccttcatcaataagcccgacactctccttgttaatcgcaaagacgcgatgtgggtgccttgcttggtcagtattcccgggttgaacgtgacgcttagatcacagagctctgttctgtggcctgacgggcaggaagtcgtgtgggacgatagaagaggaatgctcgtttctacacctctgctgcacgacgctctgtacctgcaatgtgaaaccacgtggggtgatcaagacttcttgtcgaacccatttctggtgcacattaccggaaatgagctctacgacattcagctactccctaggaaaagcctggaattgctagtcggagaaaaattggtgttgaactgtaccgtgtgggctgaatttaattctggagtgacatttgattgggattacccagggaagcaggcagaaagaggaaagtgggtgccagagagacgaagtcaacagacacataccgagctctcttccattctaaccattcacaatgttagccagcacgacttgggttcctacgtgtgtaaggcaaataacgggatccagcgctttcgggaaagtaccgaggtcattgttcatgaaaacccattcataagcgtcgaatggttaaagggcccaattctggaggcaaccgctggagacgagctcgtgaaactacctgtcaagttggcggcctatccacctcctgaatttcagtggtacaaagacggcaaggccctgagcggcagacactcaccccacgccctcgtcctcaaggaggtgacagaggccagcacggggacctataccctggccctatggaactccgctgctggcctacgtagaaatatttcgctcgagctcgtcgtcaacgtgcctccacaaatccacgagaaagaagcatcaagcccaagtatctatagcagacattcacgacaggctctcacgtgtacagcctacggggtcccattgcctctgtccatccagtggcactggaggccttggaccccatgcaagatgttcgcacagcggagcctgagacgccggcagcaacaggaccttatgcctcagtgtcgcgactggcgagccgtcactactcaggacgcggttaatccaatcgaaagcctcgacacctggaccgagttcgtggaagggaagaacaaaacagtgagcaagctggtaatccagaacgccaatgtgtcggcaatgtacaaatgtgttgtgtccaataaggtgggacaagatgaaagactgatctacttttacgtgactaccatccctgacggatttaccatcgagtcaaagccaagcgaggagctcctggaaggtcaaccagtgctcctttcctgtcaggctgactcctacaagtatgagcacctcagatggtacaggttaaatctgagcacgttgcatgacgcgcatggcaacccccttcttctggattgcaaaaatgtccatctattcgcaaccccattggccgcttcgctggaggaagtagccccaggcgccagacatgccactctaagcctatccattcccagagttgcccccgaacatgagggtcactatgtgtgcgaggtgcaggatcggcgctcgcacgacaagcattgccacaagaagtatctctccgtacaggcattggaggcaccccggctgacacagaatctgaccgatctcctggtaaacgtatctgacagccttgagatgcagtgtctcgtggcaggggctcacgcgccgtccatcgtatggtacaaagacgaaagattacttgaggagaaaagcggtgtggatctggctgattctaatcagaagctctctatacagcgggttcgggaagaggatgccgggaggtacctctgtagcgtgtgtaacgctaagggttgcgtgaacagtagcgcgtcagtggcagtggagggctcagaggacaagggaagtatggaaatcgttattctggtggggacgggggtgatagcagtttttttttgggtcttgctgctgcttatcttctgcaacatgcgacggccggcccacgcagatataaagacaggctatctgtcaattatcatggatcccggtgaagtgcccctggaggaacagtgtgaatatctgtcctacgatgcttctcagtgggagtttccacgagagcggctgcacttggggcgagttctaggatacggagcgttcggaaaggtggtggaggctagcgcgtttggcatacacaaagggagtagttgcgacaccgtcgccgttaaaatgttgaaggagggagcgactgcttccgagcacagggcgttgatgtcggaattaaagatactgatccatatcggcaatcatctcaatgtcgtgaatctcctgggggcttgtaccaaaccccaaggtcccctgatggttattgttgaattttgtaagtacggcaatctgagcaactttctgagagctaagagggacgctttctcgccttgcgccgagaaatcaccagagcagcgaggccgcttcagagcgatggtggagttagcccggctagatcggcgcaggccaggatcgtctgacagagtgctgttcgcccgtttctcaaagaccgagggcggcgctcggcgagccagtcccgaccaggaagccgaagacttgtggttgtctccccttactatggaggacttggtatgctactcctttcaagtggccaggggaatggagttcttggcatcaaggaagtgcatccatcgtgatttggcagcaagaaatatcctcctgtccgaaagtgacgtcgtgaaaatctgtgacttcggcctggctagagacatatataaggatccagattacgtgcgcaagggcagcgcaaggctacctctgaagtggatggcgcccgagagcatctttgacaaggtctatacaacgcagagcgacgtgtggagcttcggggtcctgttatgggagatattttcccttggtgcttctccatatcctggcgttcagatcaatgaggagttttgtcagcgcttaagagacggtactagaatgagggcacccgaactcgctacccccgccatacgccgtattatgcttaattgttggagcggggacccaaaggcccgacccgctttctccgaactcgtggagatcctcggggatttacttcagggaagaggactgcaggaggaagaagaggtctgcatggcccctaggtcctcccagagctctgaggaaggttccttttctcaggtaagtaccatggcactccatattgcacaggctgacgccgaggactcaccacctagtctgcagaggcacagtttagcggcgaggtattataactgggtctcattccctggctgcctcgctcgcggagccgaaaccaggggttctagcaggatgaagacatttgaggagtttccaatgaccccaacgacatataaaggtagcgtcgataaccagacggacagcggtatggtgctcgcaagcgaggagttcgaacagattgagtctcggcataggcaagaatctggattcaggtag

SEQ ID NO: 15263 - DNA, 3921 bp, synthetic construct
  misc_feature 1..3921: note = Description of Artificial Sequence: Synthetic coding sequence
  source 1..3921: mol_type = other DNA
atgcaaagaggggccgcactgtgtctgcggctctggctgtgtttaggccttctggatggactggtcagtggctattcgatgacgccccctacacttaatattacagaggaatcccatgtgattgacacaggggactcactgtcgattagctgtaggggccaacatcctttggagtgggcttggccaggtgcacaggaagcgccggctacaggcgataaggacagtgaagacacaggggttgtccgggattgtgagggaacagatgcccgtccttactgcaaagtgctgcttttacatgaagtgcatgccaacgatactggctcttacgtttgttactataagtatatcaaagctcgcatcgaggggaccactgcggcttctagctatgtgttcgtgcgagactttgagcagccattcattaataagcctgatacacttttggtgaatcgcaaagatgcaatgtgggtcccctgcttggtttctatacccggactcaacgtgacactccgtagccagtcaagcgtgttgtggcccgatggacaggaggtcgtgtgggatgacagacgaggcatgcttgttagcacccctctgttacatgacgccttgtatcttcagtgcgaaaccacctggggagatcaggattttctctccaatccattccttgtgcacatcaccgggaacgaactctatgacatccaactgcttcctcggaaatctctggaacttctagtgggcgaaaagctagtcctgaactgtaccgtttgggctgaatttaattctggggtgacatttgattgggattatcccggaaaacaggctgagcgtgggaagtgggtgcccgaaagaaggagccaacagacacacacggaactctcttcaattcttaccatccacaatgtgtctcagcacgacttaggctcctacgtatgtaaggccaacaacggaatacagcggttccgggaaagtactgaggtcattgtccacgagaatcctttcatatccgtggaatggctgaaaggacccatcctcgaggccacagcgggagatgaattagttaagctgccagtgaaattggccgcctatcctcctcctgaattccagtggtacaaagacggaaaagccctgtccgggcggcatagcccacacgccttagtcttaaaagaagtgaccgaggcatccacagggacctacactctcgccctgtggaattccgctgcagggcttcggagaaacattagtctggagctcgtggtgaacgtgccgccccagatacatgaaaaggaggcttctagtccctccatatacagccgccattcgcgacaggctttgacatgtaccgcctacggggtccccctgccactgtctatccagtggcactggcgcccgtggacaccctgtaagatgtttgcccaacgtagcctgcggcgacgccaacagcaagatctgatgcctcaatgtcgggattggagggcagtgacaacccaagatgctgtcaatcctattgaatcactcgatacgtggaccgaattcgtggaagggaagaataagactgtctcaaaattggtgatccaaaacgccaatgtgagcgccatgtataagtgtgtcgtctctaacaaggtgggccaggatgagcgcctgatctatttctatgtcaccacaatacccgacggctttaccatcgagtcaaagccgtcagaggaattgttagagggacaacctgtcttattaagttgtcaggctgatagctacaaatacgagcatctgcgatggtaccggttgaatctgtctactcttcatgatgctcatggcaaccctctgttactggactgtaaaaatgtacacttatttgcaacacccttagcagccagccttgaagaagtggcccctggcgcaaggcatgccacgctgagcttatccattcccagggtcgcacccgagcatgagggtcactatgtgtgcgaagtgcaagaccgacgctctcatgataaacactgccataagaagtacctctccgtgcaagctcttgaagcacctaggttgacgcagaacttgactgatctgctcgtgaacgtttcagacagcctagagatgcagtgcctggttgctggggcccacgctccaagcattgtttggtataaagacgaacggttgttagaggaaaaatccggcgtcgatctggctgacagtaaccagaagctgagcattcagcgggttagagaggaagatgccggaaggtatctctgctcggtatgtaatgccaaaggctgcgtaaacagcagtgcctctgtagcggtggaggggagcgaagacaaaggtagcatggaaattgttatccttgtcggtacgggggtgatagcagttttcttctgggttttactactcctcatattttgtaacatgcgcagacctgcccacgccgacattaagacaggatatctctcaatcatcatggaccccggcgaggtacctctcgaagagcagtgtgaatacctctcttacgatgcctcccagtgggagttccctcgggaaagattacacttaggccgggtcctcgggtatggggccttcggcaaagtcgtggaggcctcggccttcgggatccataagggcagcagctgcgacacagtggccgtgaagatgctgaaggagggagccacagcatcagagcatagagcacttatgtctgagttaaagattctcatccatattggaaaccacctcaacgtggtgaatctcctaggggcctgtactaagccccagggcccgcttatggttatcgttgagttttgtaagtacggaaatctttccaatttcttgcgggccaagagagacgcgttttccccctgtgccgagaagagtccagaacaacggggccggtttcgcgcaatggtagagttagctaggctcgatagaaggagacccgggtcaagcgaccgggttctcttcgctcgtttcagtaagactgaaggcggcgcccgacgcgcttctccggatcaagaggctgaagacctatggctgtcccccctcactatggaggacctcgtctgctatagcttccaggtggctagaggaatggaatttcttgcttcacggaagtgtattcatcgcgatctggctgccagaaatattctgctgtctgagtctgacgtcgtgaagatctgcgactttggcttagcccgtgacatctataaggaccctgactacgtacggaaaggcagtgcccgcttgcccctcaaatggatggctccagaatcaatctttgataaggtgtacactacgcaatctgatgtctggagtttcggtgtccttctctgggagattttttccctgggagcctccccttaccccggggtgcagatcaatgaagagttctgccagagacttcgagacgggacaagaatgcgggctccagaactggccacacccgcaattcggcgaattatgttgaactgttggtccggagaccctaaggcgcggccggccttctccgaacttgttgagattctcggggacctgctccagggcaggggtctgcaagaagaggaggaggtttgcatggcacctcgttcttctcagtccagcgaggagggttcattttcacaagttagcactatggcacttcatatcgcacaggccgatgccgaggattctccaccttctctgcagaggcattctttggcggcccgctattataactgggtcagttttccagggtgcctggcaagaggcgcggaaaccaggggtagcagtcgcatgaagacttttgaagaatttcccatgacacctaccacctacaaaggctctgtggataaccagactgacagcgggatggtcttagcctctgaagaattcgaacaaattgagagcagacaccggcaggagtccggcttcagggggacacggcgtaccaggggagcctag

SEQ ID NO: 15264 - DNA, 1740 bp, synthetic construct
  misc_feature 1..1740: note = Description of Artificial Sequence: Synthetic coding sequence
  source 1..1740: mol_type = other DNA
atgaatgccatcgtagccctgtgtcatttctgcgaacttcacggcccccgcacactgttttgcacggaagtgttacacgctcctctccctcagggcgatggtaacgaagacagtcccggccagggagagcaggctgaggaagaggaagggggaatacagatgaattctcgtatgagggcacactctcctgctgagggcgcctccgtggagtcatcttcccccggacccaagaaaagcgacatgtgtgaaggctgccggtccctggctgcggggcaccccggctacatttctcacgataaggagacttctattaagtacgtgtcgcatcagcaccccagccatcctcagttgttctcgattgtcagacaagcatgtgtacgctctctgagttgtgaggtatgccctggtcgcgaaggaccaatattctttggcgatgagcagcatggcttcgtgttctcgcacacttttttcattaaagactcgcttgctaggggctttcagcggtggtattccatcataaccattatgatggaccgcatctatcttattaattcctggccgtttctcctgggcaaagtgaggggaatcatcgacgagctccaagggaaggccctaaaggtgttcgaggccgaacagtttggttgcccacagagagcccagcggatgaacactgcttttactccctttcttcaccagaggaatggaaacgctgcgcggtcactgacctcactcacctctgacgataatctatgggcttgtctacacaccagtttcgcgtggctcttgaaagcctgtgggagccgactgaccgagaagctactcgagggcgcccctacggaggatactctggttcagatggagaaactggccgacctggaagaggagtcagagtcatgggataactctgaggctgaggaggaagagaaagctcctgtcctgcctgagtccaccgagggcagagagctgacccaggggcctgcagaaagttctagtctttccgggtgtggcagctggcagcccagaaaactgcccgtctttaagagtctgcggcatatgaggcaagtgcttggggctccctcattcaggatgttagcctggcacgtgctgatgggaaaccaagtgatttggaaaagtagggatgttgatttggtgcaatctgccttcgaagtgctgaggaccatgctgccagtgggctgtgttaggatcataccatattcctctcagtacgaggaggcatatcgttgcaacttcctgggtttgtcaccacacgtgcagatcccccctcacgtactgagctctgaatttgctgtcatcgtggaagtgcatgctgccgctagatcgaccctgcatccagttggctgcgaagacgatcaaagtttgtctaagtacgaattcgtcgtgacgtcaggctcccccgtggctgctgatagggtgggccctaccattcttaacaagatagaggcagctctgaccaaccagaatttgtccgttgacgttgttgatcagtgtttagtctgcttgaaggaggagtggatgaacaaagtaaaagtgttgttcaagttcacgaaagtggactccaggccaaaagaggatactcagaagttgctctccattttgggcgcttcagaggaggacaacgtgaagctcttgaaattctggatgacaggactctctaaaacatataaaagtcacctgatgagcaccgtcaggtctcccaccgcctcagaatcaagaaactag

SEQ ID NO: 15265 - DNA, 594 bp, synthetic construct
  misc_feature 1..594: note = Description of Artificial Sequence: Synthetic coding sequence
  source 1..594: mol_type = other DNA
atgaacgctattgtagccttatgccatttttgtgaactgcacggccccaggactttattttgcaccgaagtgctccacgctccactgccacagggcgacggcaacgaagatagtcctgggcaaggcgaacaggctgaagaggaagagggagggatccagatgaattccagaatgcgcgcgcactcacctgctgagggcgcaagcgttgagtcgagttctcccggccccaaaaagagtgatatgtgcgagggttgccggtccctggccgctggacaccccgggtacatctctcatgacaaggagacatccataaagtatgtgtctcatcaacatccctcccatccccagttgttctctattgttcgccaggcgtgtgtcagatcgttatcatgcgaagtctccttggtggccacagagcctgtgtcagtgggggctcatatgttgcccggcgcactggggggcctcggagcatcgatcgcgcagggtggacgacattggtccagtttgcgagcggacccccaaatctcaaccgctcagggaacaggccgcctgccatgccccgaactgcgagaagagagttgttggacttgttag

SEQ ID NO: 15266 - DNA, 1029 bp, synthetic construct
  misc_feature 1..1029: note = Description of Artificial Sequence: Synthetic coding sequence
  source 1..1029: mol_type = other DNA
atgaatgccattgtagctctgtgtcacttttgtgaactacacggacccaggacactcttctgcactgaagtattacacgctccactgccccagggcgacggaaatgaggatagccctggtcaaggggagcaggctgaagaagaggagggtggtatccaaatgaattcacgtatgagggcgcactctcctgcagaaggtgcaagcgtagagtcctctagtcccgggccaaaaaagtccgacatgtgcgagggctgccggagtctagccgcaggccatccgggctacatctcccatgataaagaaacatcgatcaaatacgtgtctcaccaacacccttctcacccgcagctattcagtattgtcaggcaggcatgcgttcggtccctgtcatgtgaagtgtgccccggcagagaaggccccatcttctttggggacgaacaacacggcttcgtgttttctcatacctttttcatcaaggattcactggcacgtggtttccagcgctggtacagtatcattaccattatgatggaccggatttacctcataaattcttggcctttcctgctgggcaaagtacgcggcatcattgatgagctgcagggaaaagcgctgaaagtcttcgaagctgagcagttcggatgccctcaacgtgctcagcgaatgaatactgccttcactcccttcctccaccaaagaaatggtaatgccgctcgcagcctcacttctctgacatccgatgacaacctgtgggcatgtctgcacacgtcttttgcctggttgcttaaggcttgcgggagccgcctgacggagaaactgctggagggcgctcctactgaggacacactcgtccagatggagaagctcgctggcgaagccggggttttactgcctggcccctggccgggttggccatggggaggaacctcttgcctcctgtcctggcaggaatctctgagggagggcaatgccgccttaaaccaacccagaacatctctccgcgaggctcatccacccatctcagtatag

SEQ ID NO: 15267 - DNA, 594 bp, synthetic construct
  misc_feature 1..594: note = Description of Artificial Sequence: Synthetic coding sequence
  source 1..594: mol_type = other DNA
atgaatgccattgtagccctgtgccacttttgtgaacttcacggcccacgaaccctgttttgcacagaggtcctgcatgccccccttccccaaggggatggaaatgaggactctcccggccagggggaacaagcagaagaggaggaaggcgggatacagatgaactcacgcatgcgcgctcattctccagcagagggagcatcggtggagagcagctctcctggcccaaaaaagagtgacatgtgcgaaggctgtcgatccttggctgctggccatcccggatacatcagtcacgacaaggagacttctatcaaatacgtgtcacatcaacacccatcccacccccagcttttttctattgtacgccaggcatgtgtgagaagcctctcctgtgaagtctctctcgttgccacagaaccggtgtccgtcggtgcccacatgttacccggagcccttggcggcctgggagccagtatagcccaagggggccggcattggtcaagtctgcgagctgatccccaaatatcaaccgcccaggggacagggcggctgccatgcccggagctacgagaggaaagttgctggacctgctag

SEQ ID NO: 15268 - DNA, 462 bp, synthetic construct
  misc_feature 1..462: note = Description of Artificial Sequence: Synthetic coding sequence
  source 1..462: mol_type = other DNA
atgaattcccgcatgcgtgctcactcccctgccgagggtgcctcggtcgaatcgtcaagtccaggacctaagaagtctgatatgtgtgagggatgtaggtcactggctgctggacatccaggctacatctctcacgacaaagaaaccagtatcaagtacgtgagccaccagcacccctcgcatccccagttattcagcatcgtcagacaggcttgcgtgaggtctctgagctgcgaggtgtgtcctgggcgcgaagggcctattttttttggtgatgagcagcacggatttgtgttttcccacacgttttttataaaggattccctggcgcgcggatttcagaggtggtactccattattacaataatgatggatcgcatctatttaattaactcatggccctttttgctgggaaaggttagaggcatcatcgacgagctccagggtaaagctctaaagtag

SEQ ID NO: 15269 - DNA, 1419 bp, synthetic construct
  misc_feature 1..1419: note = Description of Artificial Sequence: Synthetic coding sequence
  source 1..1419: mol_type = other DNA
atgctcggcacggtgaaaatggagggacacgaaacaagtgactggaatagctattatgccgacactcaagaggcctatagcagtgtgccagtctccaatatgaacagtgggctggggagtatgaactccatgaacacatacatgaccatgaataccatgacgacatcaggcaatatgacccctgcctcatttaacatgagctacgccaatcccggccttggcgccggactctctcctggagctgtagccgggatgcccgggggatctgccggcgcaatgaacagtatgaccgcagctggcgtgaccgccatgggtaccgccctgtcgccttccgggatgggcgcaatgggggcgcagcaggctgcttccatgaatggactgggaccatatgcggctgctatgaacccgtgtatgtctcccatggcttatgcaccatctaacctgggtaggtccagagccggaggaggtggcgatgcgaaaactttcaaaaggtcatacccacatgctaaacccccatatagctatatctcgctgattaccatggccattcaacaagctccctcaaaaatgctcactctgtcagagatctatcagtggatcatggacctgtttccctactaccggcagaaccagcagcggtggcaaaacagtatcagacactctctgagcttcaacgactgtttcgtgaaggttgctagaagccctgacaagcctgggaaggggagctactggactctgcaccccgacagcgggaacatgttcgagaatggatgctatctcagaaggcagaagaggtttaagtgtgaaaaacagccaggtgccggcggcggtggtggctctggcagcgggggttccggtgcaaagggcggacccgagagcaggaaggaccctagcggtgcatctaatccaagcgccgactctcccctgcaccgcggggtgcacgggaagaccggccagcttgagggggccccagcccccgggccagcagcctccccacagacgctcgatcactctggtgcaaccgcgaccggaggggcctccgagctgaagacacccgcttcctcaacggcccctccaatctcctccgggccaggagccctggcctcagtccctgcttcacatccggcccatggccttgcccctcacgagagccaattgcacctgaagggggacccacattactcattcaaccatccattttccatcaataatttgatgtctagcagcgaacagcagcataagctcgatttcaaggcttacgagcaggccctccagtattccccttatgggagcacgttaccagcttctctccccctgggctcagcaagtgtcaccaccaggtccccaatagaacctagcgccttggagccagcctactaccagggcgtgtatagtcggcctgtattaaatacgtcttag

SEQ ID NO: 15270 - DNA, 1320 bp, synthetic construct
  misc_feature 1..1320: note = Description of Artificial Sequence: Synthetic coding sequence
  source 1..1320: mol_type = other DNA
atgaactcaggactgggcagtatgaattccatgaatacttacatgactatgaacacaatgaccacctcagggaatatgacacctgcgtcctttaacatgagttacgccaatcctgggctcggcgccggtctcagtcccggggctgttgctggtatgcctggcggcagtgccggagcaatgaattcgatgactgctgccggtgtgactgccatggggacagcattgtccccgtccggcatgggcgctatgggcgcgcagcaggccgccagcatgaacgggctcgggccctatgcagcagcaatgaatccatgtatgagtccaatggcctacgccccttctaatctgggaagaagccgcgcaggcggcggtggggatgccaaaacttttaagcggagttacccacatgccaaacccccctactcatacatttcccttatcaccatggccatccagcaagccccatcaaaaatgctgaccctgtctgaaatttaccaatggatcatggatcttttcccatattaccgccagaaccaacagaggtggcagaattcaattagacactccctaagctttaacgactgcttcgtgaaagtcgcccggagccccgataaacccggcaaggggtcgtattggactctccacccggatagcggaaatatgtttgaaaacggctgctaccttcgcagacagaagcggttcaagtgcgagaagcaacccggggctggaggcgggggcggcagtggaagcggtggttcgggtgccaaggggggtcccgaatcccggaaggatccctcaggcgcctctaatccgtcggcggactcacctctgcaccgtggggtgcatggaaagaccggccagctggagggcgcaccagcccctggtcctgcggcttccccccaaaccctcgaccatagcggtgccactgcaacaggcggagcgagtgagttaaaaactccagcttcaagcacggcccctcccatctcttcaggacctggcgccctcgcttccgtgcctgcctcccaccccgcccatggcctcgcacctcacgaaagtcagctccatctgaagggcgatccccactactcctttaatcacccgttctcgattaataatctgatgagcagcagtgagcagcagcataagctagactttaaggcttacgagcaagccctgcaatacagtccctatggctccaccctgcccgcatccttaccactggggtccgccagtgtgacaactcgctcacctatcgagccgtccgctctggaacccgcgtattatcagggtgtctacagcagaccagtgctgaatacttcgtag

SEQ ID NO: 15271 - DNA, 1506 bp, synthetic construct
  misc_feature 1..1506: note = Description of Artificial Sequence: Synthetic coding sequence
  source 1..1506: mol_type = other DNA
atgcaggcccgatactctgtgtccgaccctaacgccctgggcgttgtgccttacttgagcgaacagaattactatcgggcggcagggtcttatggtgggatggccagtcctatgggcgtgtactctggccaccctgaacaatattccgctgggatggggcgctcttatgctccatatcatcaccatcagcctgcagccccaaaggatctagtgaagcccccttactcctacatcgccctcataaccatggcaatccagaatgccccggagaagaaaattacactgaacggcatctaccagtttattatggaccgtttcccattttatcgtgaaaacaagcagggctggcagaactccatccggcacaacttgagcctgaatgagtgtttcgtaaaggtgcctagagatgataaaaagccaggtaaaggctcttactggacacttgatccagacagttacaatatgtttgagaacggaagctttttgcggcgaagaagaaggttcaagaagaaagatgtctccaaggagaaagaggagcgcgcgcatttgaaggagccaccccctgccgcatcaaagggcgcacccgccaccccacatttggctgacgctccaaaggaagcggagaagaaagtcgtgatcaaatcagaggctgccagtcccgccctgcctgttatcactaaagtggaaacactctccccagagtcagccctccaagggtcccctaggagcgccgcttccacaccagcgggaagcccagacggctccctgccagagcatcacgctgcagcacctaatggcctgcctgggtttagtgttgaaaacattatgaccctgcggaccagtcctccggggggcgagctaagccctggagccggcagggcgggtctggttgtgcccccgctagcactaccttacgcagcggccccaccagcagcttacggccagccttgcgcccagggcctggaagctggtgccgcaggaggctatcaatgtagcatgagggccatgagtctctacacaggcgcggaaaggcctgctcacatgtgtgtgcctccagcactcgatgaggcgttgtctgaccacccttccgggccaacttccccactcagtgcactcaatcttgccgctggccaggaaggtgctctcgccgccaccggacaccaccatcagcaccacggccaccaccacccccaagctcccccacccccacctgctccacaacctcagcctacaccgcagcccggtgcagccgctgcacaggccgctagttggtatctcaaccactccggggacctgaaccacttgcccggacacacgttcgctgcccaacaacaaacctttcctaatgtgcgcgaaatgtttaattcccacagactaggcatcgagaactctactctcggcgaaagccaggtaagcggtaatgcgagctgccagctcccgtatcgcagtacccctcctttatacagacacgctgcaccatacagttatgactgtaccaagtattag

SEQ ID NO: 15272 - DNA, 1968 bp, synthetic construct
  misc_feature 1..1968: note = Description of Artificial Sequence: Synthetic coding sequence
  source 1..1968: mol_type = other DNA
atggcggaggctcctcaggtggttgaaattgatcctgattttgagccgctcccaaggcctcgatcatgtacttggcccctcccgcgccctgagttctctcaaagcaatagcgcaacatcaagccctgcccccagtggctctgccgctgccaatcctgacgcagctgctggcctccccagcgcctctgccgcggcagtgagcgcagactttatgtcaaacctgagtctactggaagagtcagaggactttccccaggcccccgggtccgtagccgctgccgtcgcagcagcggctgctgccgctgccaccggtggcttgtgcggggatttccagggaccggaagcaggctgtctgcaccccgcccccccccagcccccaccgcccggtcctctgtctcagcatcctccagtgcctcccgccgcagccggacctctggcgggacagcctcgaaaatcctccagttcgcggcgcaacgcatgggggaatctgtcgtacgcagacctgataaccaaggccattgagagtagtgcagagaagcggctgacacttagtcagatctatgaatggatggttaagagtgtgccttatttcaaagacaagggcgactctaactcttcggcagggtggaagaatagcataaggcacaatctctctttacactccaaattcatcagggtgcagaacgagggtacaggcaagagtagctggtggatgcttaatcccgagggcggtaagtccggaaagtccccccgcaggagggccgctagtatggataacaactcgaagtttgcgaaatctcgcagccgtgctgccaaaaagaaagcctctcttcagtctggccaagagggagctggcgacagtccgggttcccagttcagcaagtggccagccagccccggctctcattcgaatgatgatttcgacaactggagcacttttagaccccgcacctcgtccaacgccagcactatctcagggagactgagccctattatgaccgaacaggatgatctgggcgaaggagatgtgcatagcatggtttacccaccctctgctgccaagatggcatctacccttccatctctctcagagatctccaacccggaaaacatggagaacctattggataatttgaacctactgagcagtccgaccagcctcacagtgtcaacccagtcctcccctggcaccatgatgcaacaaaccccttgctactccttcgcaccccctaacacctctcttaacagcccgagccccaattaccaaaagtacacctacggacagagcagcatgtccccattgccacagatgccaattcagactcttcaggacaacaagtcttcgtatggtgggatgagccagtataactgtgctcccggacttctgaaagaactcctgacttctgacagcccaccgcataacgatatcatgacgcccgtagaccctggtgtagcccagcccaacagccgcgtcctgggccaaaatgtcatgatgggtcctaattccgtaatgtctacatatggtagtcaagcatcacataacaagatgatgaaccccagctcacacactcatccgggccacgctcaacagacttctgctgtgaatgggagaccactgccgcacacagtctccaccatgccacacacttccggcatgaatcgactgacacaggtcaagaccccggttcaggtaccactcccacaccctatgcagatgtccgccctgggaggatatagctctgtctcttcctgcaacggctacgggcgcatgggcttactgcaccaggaaaaattgccttcggatctagatggaatgtttatcgagcgcttggattgtgatatggaatcaatcattagaaacgaccttatggacggggatacccttgattttaatttcgacaatgtgctgcccaaccagagcttccctcacagtgtcaaaacaacaacacattcatgggtgtcagggtag

SEQ ID NO: 15273 - DNA, 2022 bp, synthetic construct
  misc_feature 1..2022: note = Description of Artificial Sequence: Synthetic coding sequence
  source 1..2022: mol_type = other DNA
atggcagaggcgccagcatctcccgcccctcttagtcctctggaggtggagctggatcccgagttcgagccccagagccggccccgatcctgtacttggccactccagagaccagagctgcaagccagcccagcgaaaccctccggagaaacggccgctgattcaatgattcccgaagaagaggacgatgaagatgacgaggatggaggaggccgggccggctcagccatggccatcggtggaggcggcgggtccgggaccctggggtccggattactgttggaggatagcgctagagtactggcacccggcggacaagaccccggcagtggcccggcgaccgctgccgggggcctctccgggggcacccaggccctgctacaaccacagcaacccttacctcctccccagccaggagccgcgggggggtctggccagccgaggaagtgcagtagccgaaggaacgcatgggggaatctttcttacgccgaccttatcactagggcaatagagtcaagtcctgacaagcggttaaccctatcccagatatatgagtggatggtccgctgcgtgccttattttaaagataaaggcgattctaattccagcgctggatggaagaacagcatccggcacaatttgtcattacactcccggtttatgcgtgtgcagaacgaagggactggaaagagctcctggtggatcatcaacccggacggtggaaaatctggcaaggccccccgacgccgggccgtttccatggacaacagcaataagtacacaaagtctcgaggcagagccgccaaaaagaaggccgccttgcaaacggctccagaatctgccgatgatagcccctctcaactctccaagtggcccggctctccgacctcccgctcctccgatgagcttgacgcatggacagacttccggtcaaggacaaattccaatgcgtcaaccgtgtccggtcgtctttccccaataatggcgagcacagaactcgacgaggtgcaagacgacgatgcgccattaagccccatgctgtacagttccagcgcaagtttatccccttcagttagtaaaccgtgtacggtggagctgccgcgcttaacggatatggctggcactatgaatctgaatgatggcctcaccgaaaacttaatggatgacctattagacaatatcaccctgcctccgagccaacctagccctactggcgggctcatgcagcggtcaagcagctttccttacactaccaagggttctggtctgggctcacccacttcatccttcaactctaccgtgtttgggcccagcagcctgaacagcttgcgccagagccctatgcaaaccatccaggagaacaaaccagccactttcagttccatgtctcattatggtaatcagacactgcaggatttgctgaccagtgattccctctcacacagcgacgtgatgatgactcagtccgaccctctcatgtcccaggcatctaccgccgtcagcgcccagaattcccgcaggaatgtgatgctgcgcaatgatccgatgatgtccttcgccgcccagccaaaccagggcagcctcgttaaccagaaccttttacaccaccagcaccagacacagggggccttaggaggctctcgagcactcagtaactccgtatccaatatgggactctcagaatcttcgtctctgggctccgcgaagcaccaacagcagagccccgtgtcgcagagtatgcagacacttagcgattccttaagtgggagttcactgtactccacatctgcaaaccttccagtcatgggccatgagaaattcccctcagacctcgacctggatatgttcaacggttctctggaatgtgatatggaatccataataaggagtgaactcatggacgccgacggcttagatttcaattttgacagtctgatctctacacaaaatgtggtggggctcaacgtcggaaacttcactggcgctaaacaggcctcatcacagtcctgggtgccaggctag

SEQ ID NO: 15274 - DNA, 2022 bp, synthetic construct
  misc_feature 1..2022: note = Description of Artificial Sequence: Synthetic coding sequence
  source 1..2022: mol_type = other DNA
atggctgaagcccccgccagtcctgctcccctctctcccctggaggtagaactggaccctgagttcgaacctcagagtagaccacgatcgtgcacctggccactgcaacggccagagctgcaggccagtcctgccaagccatcaggggaaaccgcagcggactctatgatccccgaggaagaagacgatgaagacgacgaggacggcggaggcagggccgggtcagccatggcgattgggggtggaggcggcagtggtactcttggcagcggcctccttttggaggatagtgctagagtgctggccccagggggccaggatcccggatctggacctgctactgctgccggcggcctctcgggtgggacacaggccctgctacagcctcagcagcctctacccccaccgcagccaggtgcagcaggcgggtcgggacagccacgcaaatgctctagcagacggaatgcttggggcaacctgagctacgcggacctcataaccagggccatcgaatcctctcccgataagaggctaacgctgagccaaatttacgagtggatggtgaggtgtgtgccatacttcaaggataagggagacagcaactcttcggctggctggaaaaatagtattcgacacaatctctcactacactcaagattcatgcgcgtgcagaacgaggggacggggaagagctcctggtggatcattaaccccgatggaggaaaaagcgggaaagcccccagacgaagggcagtgagtatggacaatagcaacaagtacacaaagagccgagggagagcagccaagaaaaaggccgctcttcagacagcacccgaatctgctgacgacagtccttcacagttgtccaaatggcccggcagccccacatctcgctccagcgacgaactggacgcttggacagactttcggtcacgtacgaactccaatgcatctacagtaagtggaagactgagcccgatcatggcctcaaccgaattggatgaagtacaagatgatgatgctccccttagtccaatgctgtatagttcatctgcctcactttcaccgagtgtctccaaaccatgcaccgtggaactcccacgcttgactgacatggctggtacgatgaatctgaatgacgggctcaccgaaaatttgatggacgaccttttggacaacatcacgctcccaccttcacaaccatcccctacgggcggacttatgcaaaggtcctcatccttcccctacacaacaaaagggtccggtctcggctcacccacatcttctttcaactccactgtgttcggtccctcttcattgaatagcctgagacagagccctatgcagacaatccaggaaaacaagccagccaccttctcttcgatgagccattatggaaaccaaaccttgcaggatctcttgacctcagatagtttgagtcacagcgatgtcatgatgactcagtcagaccccctgatgtctcaggcttcaacggcagttagtgcccagaacagtcgtaggaacgtcatgctgagaaatgacccaatgatgtcattcgctgctcagcctaaccaggggtcattagtgaaccagaatttactccaccaccaacaccagacacaaggtgccctcggtggaagtcgcgctctttcaaactccgttagcaatatgggactttctgagagcagcagcctcgggtcagctaaacatcagcagcaatctcctgtctcccaatcaatgcagacgttgtctgacagcctatcgggttccagcctgtattctacctccgccaatttgccagtgatgggccatgagaaattcccttctgatctggacttagatatgtttaacggctctctcgaatgcgacatggagtctatcatcaggagcgaacttatggacgcagacgggcttgattttaactttgatagtcttatctctacgcagaatgtcgtagggctgaacgtgggaaatttcaccggcgcgaagcaggctagtagccagtcttgggtgcctggctag

SEQ ID NO: 15275 - DNA, 1302 bp, synthetic construct
  misc_feature 1..1302: note = Description of Artificial Sequence: Synthetic coding sequence
  source 1..1302: mol_type = other DNA
atgcgggtgcagaatgaaggcacgggcaaatccagctggtggatcataaatcctgatggcggaaaaagcgggaaggcccctaggagaagagcagtttcaatggataattcaaataagtatactaagtctagaggcagagccgctaaaaaaaaagccgccctgcagacagctcccgaatcggcagacgacagcccaagccagctatcgaaatggccgggtagcccgacatctcgatcgagtgatgaactggacgcttggaccgacttccgttcaagaaccaactcaaatgcgagcaccgtgagtggacgcctgagtcccatcatggcctcaacggaactcgacgaagtgcaagatgatgatgccccgctgagcccgatgttatactccagtagcgcgtctctttcgccgtccgtcagcaagccctgtactgttgaattacctagattgacagacatggccggaacaatgaatctaaacgatggactgacggaaaatctcatggacgatctcctggacaatatcactctacccccatctcagccttctcctacagggggcctgatgcagagaagctccagttttccctacacaactaaaggttccgggcttggatctcctacgtccagttttaatagcaccgtatttggcccatcctccttgaacagcctgcgccagtctcccatgcagaccatacaagaaaataaacctgccactttttcctctatgagtcattatggcaatcagactctgcaagacctgctgacgagtgactccttatcccattcagacgtcatgatgacacagtcagacccactaatgagccaggcctcaaccgccgtgtccgcacagaactcgcgacggaatgttatgttacggaacgaccccatgatgtccttcgcggcacagcccaatcagggatctctcgtcaatcagaacctcctgcaccatcagcatcagacacagggcgccctgggcggttccagagccctgagtaacagcgtgtctaatatgggcttatcggagtcctcttcactcgggagtgccaaacaccaacagcaatctccggtgagccagtcaatgcagaccctgtccgactccttgagcggctccagcctctacagcaccagcgctaacctacctgtaatggggcacgagaagtttccaagtgacctggatcttgacatgagcatgggcgcatggaatgtcacatggtcaccactctcagtcgtcaatagttggatgcttatgggttggatcttaacactcataccctcctcccctcaccgcatgctcttagtttag

SEQ ID NO: 15276 - DNA, 1362 bp, synthetic construct
  misc_feature 1..1362: note = Description of Artificial Sequence: Synthetic coding sequence
  source 1..1362: mol_type = other DNA
atgagagtgcagaatgaaggcaccgggaagagcagctggtggatcatcaatcctgacgggggaaagagcgggaaggccccccggcgaagggccgtgagcatggataactcgaacaagtacacaaaatcacgcggaagggccgccaagaagaaggccgccttgcagacggccccggagtcagccgatgactctccatcccaacttagtaagtggccaggttctcctacttctagaagctccgacgaactcgatgcttggacagactttcggagccggactaattcgaacgcttcgactgtcagcggccggctgagccctattatggctagtacagagctggacgaagtccaggatgacgacgccccactgagccctatgctctactcatctagcgcttctctgtctccctctgttagtaagccttgtacagtcgaattgccaagactgacggatatggccggcacgatgaaccttaacgacggccttactgaaaatctgatggatgatttgttagacaacattacgttacccccgagtcagccctctcccacgggaggcctgatgcagcgtagttcttcatttccctacacaaccaagggcagtggcctgggaagcccaacatcttcctttaatagcacggtcttcggcccatctagcctgaactccctgaggcagagcccaatgcagacaatccaggaaaacaaacccgccaccttctcttcaatgtcccattacggcaatcagaccctccaggacctgctgacttccgactcgctcagtcatagcgacgtaatgatgacgcagagcgacccgctcatgtctcaagcgtcaactgccgtgtctgctcaaaatagcaggcgcaacgttatgctgcgaaacgatcctatgatgtctttcgcagcgcagcctaatcaaggcagccttgtcaatcagaacctgctccaccaccagcatcagacccaaggagccctgggcgggtctcgcgcactgtctaattccgtgtccaatatgggtctgagcgagagctcctccttgggtagcgccaagcaccaacagcagtcaccggtgtctcagagcatgcaaacattgagcgatagcctctccgggtcctcactttacagcacatcggcgaacttgccagtcatgggacatgagaaatttccctctgatttagacctagacatgtttaacggttctctcgagtgtgacatggagtctataattagatctgagctgatggatgctgatggcttggattttaactttgattccctgatatccacccagaacgtggtaggccttaatgtggggaattttaccggcgccaagcaggcgtccagccagtcctgggttccaggctag

SEQ ID NO: 15277 - DNA, 444 bp, synthetic construct
  misc_feature 1..444: note = Description of Artificial Sequence: Synthetic coding sequence
  source 1..444: mol_type = other DNA
atgtccttccgatttggacaacacctgatcaaaccatcagtggtgtttctgaagaccgagctctcattcgcactggtgaataggaaaccggtggtgcccggacacgtcctagtatgtccactccggcccgtcgagagattccatgatctcaggccagatgaggtcgcggacctctttcagaccacacagagagtcggaacagttgtggagaagcatttccacggcaccagtctgaccttcagcatgcaggatggccctgaggctggtcagacagtgaagcacgtgcatgtccatgtcctgcctcggaaggccggcgattttcataggaacgatagcatttacgaagagttgcaaaaacatgacaaagaagattttcccgccagttggcgctccgaggaggaaatggcagccgaggcggccgcactccgcgtttatttccagtag

SEQ ID NO: 15278 - DNA, 444 bp, synthetic construct
  misc_feature 1..444: note = Description of Artificial Sequence: Synthetic coding sequence
  source 1..444: mol_type = other DNA
atgtcctttcgattcggtcaacatttaatcaagccatcagttgttttcttaaagactgagctgtcatttgctctggtaaacaggaagccagtagtccccggacacgtgctggtgtgtcccctgaggcccgtggagagatttcacgatttacggcctgacgaagtagccgacctgttccaaacaacacagagggttggaacagttgtcgaaaagcactttcatggaaccagtctgacattttcaatgcaggacggacccgaagctggacagacagtcaaacacgtccacgttcatgtgctgccccgtaaggctggggacttccacagaaacgacagtatttatgaagagctgcaaaagcatgataaggaggacttccctgctagttggcgcagcgaagaagaaatggcagcagaagctgctgccctccgggtctactttcaatag

SEQ ID NO: 15279 - DNA, 444 bp, synthetic construct
  misc_feature 1..444: note = Description of Artificial Sequence: Synthetic coding sequence
  source 1..444: mol_type = other DNA
atgagcttccgcttcggtcaacaccttataaagccgagtgtcgtctttctcaagaccgagctgtccttcgcattagtcaaccgaaaacccgtcgtccctggacacgtgttagtgtgcccacttcgcccagtggaacgctttcacgatctgaggcctgacgaagttgcggatctgtttcagaccacgcagcgggtgggcacagtggttgagaaacacttccacggtacttcactgacattttcaatgcaggacggtcctgaggccggacagacggtcaaacatgtgcatgttcacgtgctgccacgcaaggccggtgattttcaccggaatgactcaatatatgaagaactgcagaagcatgacaaagaggatttccccgcttcctggaggagcgaagaggagatggccgccgaggccgccgcgcttagagtatattttcagtag

SEQ ID NO: 15280 - DNA, 240 bp, synthetic construct
  misc_feature 1..240: note = Description of Artificial Sequence: Synthetic coding sequence
  source 1..240: mol_type = other DNA
atgagcttccgcttcggccagcacctgataaaaccatcagtggttttcctgaaaacagagctatctttcgcgctggtgaaccggaaaccagtggtgcccggacatgtgctggtctgtcctctgcgtccggttgagagatttcacgaccttaggcccgacgaggtggcagacttgttccagaccactcagcgagtcggtaccgtggtggagaaacacttccacggcacgtcactcacgtag

SEQ ID NO: 15281 - DNA, 444 bp, synthetic construct
  misc_feature 1..444: note = Description of Artificial Sequence: Synthetic coding sequence
  source 1..444: mol_type = other DNA
atgtcgtttcgctttggccagcatctgattaagccatcagtggtatttctgaagacagaactttcatttgccttggtcaaccgcaaacccgtggtacctggccacgttctggtgtgtccactcagaccagttgagcgattccacgatctgaggcccgacgaggtcgcggatctctttcagaccactcaaagggttgggacagtcgtggagaagcatttccacggcacctccctcactttcagcatgcaggatggacctgaggcaggacagacagtgaagcatgtgcacgtccacgttctaccgaggaaggccggcgattttcatcggaatgacagcatttatgaggaactgcagaagcatgataaggaagacttccctgcgagctggcgcagtgaagaagagatggccgccgaagccgccgccttgcgcgtatattttcagtag

SEQ ID NO: 15282 - DNA, 1725 bp, synthetic construct
  misc_feature 1..1725: note = Description of Artificial Sequence: Synthetic coding sequence
  source 1..1725: mol_type = other DNA
atgcgggacccaggcgccgcagcacccctgagtagcctcggcctgtgcgcacttgtgctggctttattaggcgcccttagcgccggagccggcgcacagccttaccatggggagaaagggatatccgttccagaccatgggttttgtcagcccatcagcatacctctgtgcaccgatatagcatacaatcaaacaatcctgcccaatctgctggggcatacaaaccaggaggacgctggattggaggtccaccagttttacccactggtgaaggttcagtgcagtcctgagctgagatttttcctgtgttctatgtacgccccagtgtgtactgtcttggaccaagctatccctccatgtagatccctgtgtgagcgtgctagacagggctgtgaagcattgatgaacaaatttgggttccagtggccagaacgacttcgctgtgagaattttccagtacacggggccggtgagatttgtgtgggccagaacaccagtgatggctcagggggacccggcggcggccctacagcctatccaacagccccctatctacctgatttaccctttactgctctgcctcctggcgcttccgatggacgtggccgaccagcttttcctttctcctgccctcgccaactgaaagtgcccccttatctgggttaccgttttcttggcgagcgggactgcggagcaccatgcgaacccgggcgtgctaacggactcatgtacttcaaggaagaggaacgtaggttcgcgaggctgtgggtgggtgtatggtctgtactgtgctgcgcctcgaccttgttcaccgttctaacttacctggttgacatgcgaagatttagttaccccgaaaggcctataatattcctctctggatgttattttatggtggcagttgcccatgtggccgggtttttgcttgaggaccgagcggtgtgtgtggagcgttttagcgatgatggatatcgaactgtggcccagggtactaaaaaagagggatgcacaatccttttcatggttctctactttttcgggatggcatcctctatatggtgggtcatcctgtccctcacctggttcctggcagctggtatgaagtgggggcacgaagctattgaggccaattctcagtactttcatttggcagcctgggccgtgcccgctgttaagacaatcacgattctggctatgggacaagtggatggagacctgctctccggcgtctgttatgtgggcttatcctctgtggatgcactacgggggttcgtgctagcaccactgtttgtctaccttttcattggcactagctttttgctagcaggcttcgtgtcactgttccgcattcgaactattatgaagcatgatggcaccaagaccgaaaaactggaaaaactcatggtgaggatcggcgtgttcagcgtactgtacactgtacccgccacaatcgtgttagcctgctacttttacgaacaggcttttagggaacactgggaacggacctggttgctgcagacttgcaaatcatacgcagttccatgcccccccgggcactttccccctatgtccccagatttcaccgtgttcatgattaaatatctcatgactatgatcgtgggcatcaccaccgggttttggatttggtctggtaagaccttgcagagttggaggaggttctatcaccggctgagccacagtagtaagggagaaaccgccgtatag

SEQ ID NO: 15283 - DNA, 654 bp, synthetic construct
  misc_feature 1..654: note = Description of Artificial Sequence: Synthetic coding sequence
  source 1..654: mol_type = other DNA
atgtcttttcgaggcggcggccgaggtggttttaaccgcgggggaggaggcggtgggttcaatcgtggcggttctagtaatcactttcgaggcgggggaggggggggcggggggggaaattttcggggtggggggagagggggcttcggccggggcggcggtagggggggatttaacaagggccaggaccaaggaccccctgaaagggtggtactgctgggcgagttcctgcacccatgtgaagacgatatcgtgtgcaagtgtacaacagatgaaaataaggtgccttattttaatgctccagtgtatctggaaaataaagaacagatcggcaaggtggacgaaattttcggacagctgcgggacttttatttttccgtgaagctgtccgaaaatatgaaggctagtagctttaaaaaattacagaagttttatatcgacccttacaaattgctcccactgcaaagattcctacctcgcccccctggagaaaaggggcccccacgcggcggtggcagaggaggtagagggggcgggagagggggaggaggccggggcggcggacgtggtggaggctttcggggcggtcggggcgggggcggaggaggctttcggggggggcgtgggggtggcttcagggggcgagggcactag

SEQ ID NO: 15284 - DNA, 1533 bp, synthetic construct
  misc_feature 1..1533: note = Description of Artificial Sequence: Synthetic coding sequence
  source 1..1533: mol_type = other DNA
atgtatcgagcacttaggctgctggcccgctctcgccccttggtgcgggcccctgccgcagccctggcatccgctccagggctaggcggcgccgctgtcccaagtttctggccaccaaacgcagctcgaatggccagtcaaaactctttccggatcgagtacgacactttcggagaactgaaagttcctaacgataagtactatggggcccagacagtcaggtctacaatgaattttaaaattgggggtgttaccgagagaatgccgacccccgttattaaggcctttggcatcctcaagagagctgctgccgaggtgaatcaggattacgggctcgatcccaaaattgctaacgcaattatgaaggctgccgatgaagtcgcagaaggcaaacttaatgaccactttcccttggtggtctggcaaacaggctcaggcacacaaactaacatgaacgtgaacgaagtaatcagcaaccgggccatagagatgttaggcggcgaacttgggtcgaagattccagtccaccccaacgaccacgtgaataaatcccagtccagtaacgatacgttccctacagctatgcatatagcggccgcgattgaggtgcatgaggtgttgctccctggcctacaaaaactccacgatgccctggacgctaaaagcaaagagttcgcacagatcattaagatcggcagaacacatacgcaggacgccgtgcctctaacactcgggcaggagttctcgggttacgttcagcaggtgaagtacgccatgacaagaattaaggctgccatgcctaggatttacgaactggccgccggggggacagccgtgggaactggacttaatactagaataggcttcgccgaaaaagttgcagctaaggtggccgcgctgactggcctccccttcgtgacagccccaaataaattcgaagcactggccgcgcacgacgccctcgtcgaactctcaggggccatgaatacgactgcctgctctttgatgaagatcgccaacgacataagattcttggggtccggacctcgttctggcttaggggagctgatcctgccggagaatgaacctggtagctcgataatgccaggaaaggtcaatcctacgcagtgcgaggccatgacaatggttgccgctcaggtgatgggaaaccatgtggccgtcactgtggggggaagcaatggtcattttgagttgaatgtctttaaacctatgatgataaagaacgtgttacattctgcccggcttctgggagacgcatcggtgtcttttaccgaaaattgtgttgtaggcatccaggcaaacaccgaaaggataaacaaactgatgaacgagagcctcatgctggtaaccgcactgaacccccatataggctacgacaaggctgccaaaatcgcaaaaactgctcacaaaaacggaagcacacttaaagaaactgccattgagctcggatatctgacagccgagcagttcgacgagtgggtcaagcctaaggacatgctggggccaaagtag

SEQ ID NO: 15285 - DNA, 537 bp, synthetic construct
  misc_feature 1..537: note = Description of Artificial Sequence: Synthetic coding sequence
  source 1..537: mol_type = other DNA
atgtctccctctggcagattgtgtttactgacgattgttggcttgattttacccacaagggggcaaaccctaaaggataccacaagctcttcttccgcagatagcaccatcatggatattcaggtgcccacccgcgcccccgacgctgtgtacacagagctgcagcccacatctccgacccccacttggcctgcagacgagacaccccagccacagacccagactcagcaactggagggaactgatggccctctggtgaccgaccccgagactcataagtctaccaaggccgcgcatcccaccgatgatactacaaccctatctgaacgccccagcccctctaccgacgtccaaactgatccccaaacactgaaaccctcgggcttccacgaagacgacccatttttctatgacgaacacacattgagaaaacgaggccttttggtggccgccgtgcttttcataaccggaataattatacttacgtcaggcaagtgccgtcaactgagccgcctttgcaggaatagatgtagatag

SEQ ID NO: 15286 - DNA, 324 bp, synthetic construct
  misc_feature 1..324: note = Description of Artificial Sequence: Synthetic coding sequence
  source 1..324: mol_type = other DNA
atgcaaactctctcaaacattccgtgcttttgccttcacgggtctttgctcccatctaccgacctggctactctctcagcgcaccccactgacgacaccacaaccttatctgagcgtccatctcctagtacagacgtccagactgacccacagaccctgaaaccatcgggttttcacgaggatgacccattcttttatgatgaacataccctgcggaagcggggccttcttgtggccgccgtgctattcatcaccggaatcattattcttacttctgggaaatgccgccaactcagtcgcctctgcagaaataggtgccgttag

SEQ ID NO: 15287 - DNA, 291 bp, synthetic construct
  misc_feature 1..291: note = Description of Artificial Sequence: Synthetic coding sequence
  source 1..291: mol_type = other DNA
atgtctcccagtggacggctttgtctactgaccatcgtgggattgattttaccaacaagaggtcaaactctgaaggatacgacatcttcctcatctgctgacagcacgattatggatatccaagtcccaacacgggcgcctgacgccgtgtacacggagctgcaacccacaagccctacacctacttggcccgcagacggcgcttatatcacagcctacggtgtgactcacttcctgatgaatatgctggccgtgagtagctttttttgtttgcatacggcgcctcagtag

SEQ ID NO: 15288 - DNA, 537 bp, synthetic construct
  misc_feature 1..537: note = Description of Artificial Sequence: Synthetic coding sequence
  source 1..537: mol_type = other DNA
atgtccccgagtgggcgtctctgtctgctgaccattgtcggcctaattctccctacaagggggcaaaccctgaaagacacaacctcatcctcctctgcagattccactatcatggacattcaggtgcctacccgagcgcctgatgcggtgtatacggagctgcagcccaccagccccaccccaacatggccagcagacgagacacctcagcctcagacgcagacgcagcagctggagggaaccgatggacctctggtcaccgatcccgagactcataagagcaccaaggcggctcacccaactgacgacaccaccactctctccgagcgtccctcccctagcaccgacgtgcagaccgaccctcagactttaaagccatcgggattccatgaggatgacccatttttctatgacgaacataccctgaggaagagaggccttctggtcgctgccgttctgttcatcactggcataataatccttacgtcagggaagtgcagacagctatcaaggctttgccgcaaccggtgcaggtag

SEQ ID NO: 15289 - DNA, 537 bp, synthetic construct
  misc_feature 1..537: note = Description of Artificial Sequence: Synthetic coding sequence
  source 1..537: mol_type = other DNA
atgagtcctagcgggcgcctctgtctgctaacaattgtcggcctgatcctgccaactcgaggtcagactttaaaagatactacgagcagctcctcggctgactcaaccataatggacattcaggtccctactagagccccagatgcggtgtatacagagctacagccaactagcccaacccctacatggccagccgacgagacacctcagccacaaactcagacacagcaacttgaggggaccgacggcccactggttacggatcccgaaactcacaagagcaccaaagcagcccatcccaccgacgataccaccacgttaagcgagcgcccatcaccctccacggatgtccagaccgacccccagacccttaagccgtccggcttccacgaggacgatccttttttctacgacgaacatacgcttcggaagagaggcctgttggtggccgcagtgctgtttatcacgggcatcataattctgactagtggtaagtgtcggcagctctcccgcctgtgtcgcaatcggtgcaggtag

SEQ ID NO: 15290 - DNA, 537 bp, synthetic construct
  misc_feature 1..537: note = Description of Artificial Sequence: Synthetic coding sequence
  source 1..537: mol_type = other DNA
atgagtccatcgggaaggctgtgcctgttgaccatcgtcggtttgattctgccaacccgcggacagacgctgaaggacactacgtcgtcctcaagtgccgactcaaccattatggacatacaggtgcctacccgagctccggacgcagtgtacaccgagctgcagccaacgtctccgacacccacttggcctgccgacgaaaccccccagccccagacacagacccagcagttggaagggacggacggtccgctcgtaacagaccccgagacccataaatccactaaagcagcccacccaaccgatgatactaccacactgtctgagagaccttctccaagcacagacgttcaaaccgatccccagacgctcaaaccttccggcttccacgaggacgatccttttttttacgatgagcatacactcaggaagcgaggccttttggtggctgctgtgctatttatcactggcatcattatattgactagtggtaagtgtcgtcaactgtcccggctgtgtcgcaatcggtgcaggtag

SEQ ID NO: 15291 - DNA, 585 bp, synthetic construct
  misc_feature 1..585: note = Description of Artificial Sequence: Synthetic coding sequence
  source 1..585: mol_type = other DNA
atgagcccatccggtcggctgtgcctgctaacgattgtgggcttgatactccccactcgcgggcagacgttgaaagacacaactagcagcagctctgctgatagcactataatggacattcaggtacctactcgggctcccgacgcagtgtacaccgaattacagcccacatcccccactcctacatggcctgcagacgagactcctcagcctcagactcagacccagcaattggaaggaacggacgggccattagtgacagacccggaaacacacaagagcaccaaggctgcccacccaacagacgacacaacgacgctgtcggagcgcccctcaccttccaccgatgtgcagaccgatccacagaccctgaaacctagtggctttcacgaggacgaccctttcttttatgacgaacataccctcaggaaaagggggctcctggtagccgcagttctgtttattactgggatcatcattctgacctcagagaattggggctgggtggggaggacacctcgccccgggggtggcctgatgaccgaggggtgggtactaaaaggcccttgggctatattgttttag

SEQ ID NO: 15292 - DNA, 1518 bp, synthetic construct
  misc_feature 1..1518: note = Description of Artificial Sequence: Synthetic coding sequence
  source 1..1518: mol_type = other DNA
atgagtaacatatgccaacgcctctgggagtaccttgaaccctatctaccatgtttgtcgaccgaggccgacaaatccaccgttatcgaaaatcccggtgcgctgtgctcccctcagagccagcggcacggccactactttgttgccttatttgactaccaggcccgtacagccgaggatctcagtttccgagcgggcgataaactgcaggtgctggacacactgcacgaaggctggtggtttgccaggcacctcgaaaaacgccgtgacggctcgtcccagcagctgcaaggatacataccctctaattacgttgccgaggaccgctcccttcaagctgagccttggtttttcggggcaatcgggaggtctgatgccgaaaaacagttgctttactctgaaaacaagaccggcagttttctgatccgggagagcgaatcccagaagggtgaatttagtctgtctgtgttggacggggcagtagtgaagcattatagaataaagcgcctcgatgagggggggttttttctcactcggcgacggatttttagcactctcaacgagttcgtgtcccattacaccaagactagtgatggcctgtgtgtgaagctcggtaaaccatgtctcaagattcaagtaccagctcctttcgacctctcctacaagacagttgatcagtgggagatagatcgtaatagcatccagttgcttaagcgactaggaagtgggcagttcggcgaggtctgggagggcttgtggaacaacactacccctgtcgcagtgaagacactcaaacctggcagcatggaccctaacgattttttgagggaagcacagatcatgaagaatctccgacatcccaaactgattcagctgtatgccgtctgcacgctggaggatccaatctacatcattaccgagctcatgcgccacggttctctgcaggagtatctgcagaatgatacaggaagtaagattcacctcacccagcaggtggacatggccgcccaagttgcaagtgggatggcctaccttgagtccaggaattacattcatagagacctggccgctcgaaatgtgctggtaggcgagcacaatatttataaagtggcagactttggactggctcgggtgttcaaagtagacaacgaggatatctacgaatcccgccacgaaatcaagctacccgtaaagtggacggccccagaagctatcaggagcaacaagttttcaattaaaagcgacgtgtggtcgtttggaatactgctatatgagataattacatacggaaaaatgccctattctggtatgactggggctcaggtcattcaaatgttggcccagaactatcgcctcccccagccctcaaactgtccacagcaattttataacatcatgctggagtgctggaacgccgaacccaaggagaggcccactttcgaaacactgcgatggaagctggaggattacttcgagactgatagcagttatagcgatgcgaacaatttcatccgctag

SEQ ID NO: 15293 - DNA, 1092 bp, synthetic construct
  misc_feature 1..1092: note = Description of Artificial Sequence: Synthetic coding sequence
  source 1..1092: mol_type = other DNA
atggattccactagcctgctgccaaacccatggattcgggtccttgatggagcagtggtgaagcactataggatcaagcgtctggatgaaggcggattcttcctgacaagacggaggatattcagcacactgaatgagttcgtgagccattatactaagacatctgacggcctgtgcgtgaaactgggaaagccttgtctgaagatccaggtgccagcccctttcgatctgagctataaaaccgtcgatcagtgggagatcgatcggaactctatccagctgttaaagcgattggggtcaggacaattcggtgaggtatgggagggactgtggaataataccactccggtggctgtgaagacactgaagcctggcagtatggatccaaacgactttctgcgtgaggctcagatcatgaagaacctgaggcacccgaaactgatccagctgtatgccgtgtgcaccctggaggaccccatatatataatcactgaattaatgcgccatggctccctgcaagaatatctgcagaatgacactggctccaaaatacacctgacacagcaggtggatatggccgctcaagttgcatctggaatggcttatcttgagagtaggaactacatccatagggacctagctgcccggaacgtattggtgggcgaacataatatttacaaggtcgccgactttgggcttgcacgagtcttcaaagtcgataatgaagacatctacgaatctaggcacgagataaaactgccagtgaagtggactgcaccggaagccattagatcaaacaagttctccatcaagagcgacgtgtggagcttcggaatcctgctgtacgaaattattacctatggaaagatgccttattccggtatgaccggcgcccaggttatccaaatgttagcacagaattaccgcctgccacaaccatccaattgtcctcaacagttctataacatcatgcttgagtgttggaatgccgaaccgaaggagaggccgacttttgaaacgctgagatggaagctggaggactatttcgaaacagactctagttactctgatgctaataatttcattcggtag

SEQ ID NO: 15294 - DNA, 1128 bp, synthetic construct
  misc_feature 1..1128: note = Description of Artificial Sequence: Synthetic coding sequence
  source 1..1128: mol_type = other DNA
atgaggtctgtcgcccctagtggccccaaaatggggaatatcacagctgacaactcctccatgtcctgcactatcgatcacacaatacatcaaacattggccccagtggtttatgtgactgtgctggttgttggcttccccgcaaattgcctgagcctctactttggctacctgcaaatcaaggccagaaatgaacttggggtatatttgtgtaatttgactgtggccgaccttttctacatctgctcattacccttctggctgcaatatgtgctgcagcacgacaactggtctcatggtgacctttcgtgccaggtgtgcggcatccttctgtatgaaaatatctatatcagcgtggggtttttgtgctgtatctcggtggacagatacttagcagtggcccacccatttcgctttcaccagtttcgcacactgaaagccgctgttggagtaagcgtagtgatttgggcaaaagagctgctgacgtccatttatttcctgatgcatgaagaagtgattgaagatgagaaccagcacagggtctgctttgaacactaccctatccaggcctggcagcgggccatcaactattatcggttcctcgttggatttctgttccccatttgtctgctgttggcctcttatcaaggaattcttagagccgtgcgccgaagtcatggaacccaaaagagtaggaaagaccaaatccagagactggttctcagcaccgtagtcatcttccttgcctgcttcctaccataccatgtgctgctgctggtacggagcgtgtgggaggcaagttgcgacttcgccaagggcgttttcaatgcctaccatttcagcctccttctcactagctttaattgtgttgcagacccagtgctgtactgttttgtgagtgaaacaacccaccgggacctggctaggctgaggggggcctgtttagcctttctcacttgttcacggacaggccgggcccgggaggcctacccactgggtgcgccagaggcctccggaaagtctggagcccagggcgaggaacccgaactcttaacaaaactccaccccgcgttccagacgccaaacagccccggcagtggtggatttcccaccggccgcctcgcctag

SEQ ID NO: 15295 - DNA, 1017 bp, synthetic construct
  misc_feature 1..1017: note = Description of Artificial Sequence: Synthetic coding sequence
  source 1..1017: mol_type = other DNA
atgggcaacatcacggcggacaattcctctatgtcctgcactattgaccataccatccatcagacactggcgcctgtcgtttatgttactgttcttgtcgtggggtttcccgccaattgcctgtccctgtactttggatatcttcaaatcaaggcgcgtaatgagctcggcgtgtacctctgtaatttgaccgtcgcggatctcttttacatttgtagcctgccattctggctccagtatgtgctgcagcacgataattggtcccacggcgatttatcctgccaggtatgcggaatcctattatacgaaaacatatacatttctgtaggctttctgtgctgcatttccgtagacaggtatctggcagtggcccatccctttcgcttccaccagtttcgcacgttgaaggccgccgtcggcgtgtcagtcgtcatctgggccaaggagctactcacctcaatctactttctcatgcatgaggaggtgattgaggacgaaaatcagcaccgcgtttgttttgagcactacccaatccaggcgtggcagcgcgccatcaactactaccgcttcctggtgggcttcttattccctatctgcctattactggccagctatcagggtatacttcgcgctgtgcggcggagccacggcacacagaaatctagaaaggaccagatccagaggctggttctatcaaccgttgtcatattcttggcttgcttcctgccatatcatgtgctcctgttggtgaggagcgtgtgggaagctagttgcgactttgcaaagggggtgttcaacgcctatcatttttccttgctcctcaccagcttcaattgtgtggccgatccagtcctgtactgcttcgtctctgagactacacatcgggatctggctaggctgcgaggcgcgtgcctagccttcctgacttgttcacgaaccggccgggccagagaagcttacccactcggtgctcctgaggcctccggcaaaagtggggctcagggagaagagccatag

SEQ ID NO: 15296 - DNA, 1098 bp, synthetic construct
  misc_feature 1..1098: note = Description of Artificial Sequence: Synthetic coding sequence
  source 1..1098: mol_type = other DNA
atgggaaatatcacagctgacaactcatctatgagttgcaccatcgaccataccattcatcagacacttgcccctgtagtgtacgtgacagtattggttgtcggctttccagccaattgcttgtctctctacttcggctacctgcagattaaggcacgcaatgagcttggagtatacctgtgcaacctcaccgtcgctgacctattttatatatgctctttgcccttttggttgcagtatgttctgcagcacgacaattggagccacggtgatctgagttgccaagtgtgcggaatactgctgtatgagaatatatacatctcggttggatttctctgctgcatctcagtcgacagatatctcgcagtggcccatccctttcggttccaccagtttagaaccctgaaagctgcagttggagtctctgtggttatctgggccaaggaactactgacgtccatttactttctgatgcacgaggaagtgatagaggacgaaaatcaacatagagtctgtttcgaacactacccaatacaagcttggcagcgagccatcaactactaccggttcctggtgggatttttgttccctatctgtttgctcctcgcctcataccagggcatcctgagagctgtgcggaggagtcacgggacccaaaaaagtagaaaagatcagattcaacgcctggttttgtccacagtggtgatttttctcgcttgcttcttgccttaccacgtgctcttgctggtccgctctgtgtgggaggctagctgtgattttgctaaaggggtcttcaacgcttatcacttctcactccttcttacatcatttaattgcgtcgcagatcccgtgctatactgttttgtgtccgagaccactcacagagatctggcgagactgcggggagcatgcttagcgttcttaacttgtagcaggaccggcagagccagggaggcctacccacttggagctccagaggcctctgggaaatctggcgcccagggcgaagagccagaacttttgaccaagctgcatccagcctttcagacaccgaacagtccagggtccgggggatttcctacaggtcggttggcgtag

SEQ ID NO: 15297 - DNA, 1098 bp, synthetic construct
  misc_feature 1..1098: note = Description of Artificial Sequence: Synthetic coding sequence
  source 1..1098: mol_type = other DNA
atggggaacataactgccgataactcgagtatgtcatgtaccatcgatcataccatacatcagacactcgctcctgtagtctacgtaactgttttggtagtcggcttccccgccaactgtctgagcctgtattttggttacctgcagataaaagctaggaatgagctgggggtgtacctctgtaatctcacggtggcagaccttttctacatttgtagcctgccattctggctccagtatgtattacagcatgataattggagccacggcgatctgtcgtgccaagtttgcggaatccttctctacgagaatatctatatctcggtgggattcctgtgctgcatatcagtggaccgatatttggccgttgcacaccctttccgatttcatcaatttagaaccctgaaagccgctgtcggagtgtctgtcgtcatctgggccaaggaactcctcactagtatctacttcctcatgcacgaggaagtgatcgaggacgaaaatcagcaccgggtgtgcttcgaacattatcccatccaggcctggcagagggcaattaactactataggttccttgtcggatttctcttccccatctgcctgttattagcttcgtaccagggcatactgagggccgtgaggaggtcccacggcacacagaagtcccgcaaagaccaaatccagcgcctggtgcttagtacagtcgtgatctttctggcttgcttcctgccttaccacgtactgctcctcgttcggtcagtgtgggaggctagctgcgacttcgccaagggagtgtttaacgcatatcatttttctctgttgttgacaagctttaattgcgtcgcagatcccgttttgtattgttttgtctccgagacaacgcacagagacctggctcgcctcaggggagcttgtctggcttttctcacctgttctcggaccggcagggccagggaggcttacccactcggggctccagaggctagtgggaagtctggggcacaaggcgaggaaccagagctgctaacaaagctccaccctgcatttcagacaccaaactctcccggatccggcggattcccgaccggcagactggcttag

SEQ ID NO: 15298 - DNA, 2100 bp, synthetic construct
  misc_feature 1..2100: note = Description of Artificial Sequence: Synthetic coding sequence
  source 1..2100: mol_type = other DNA
atgactttgaggcggaagtgcaatgaggacgatgaggttttttttggcccattcggacataaggagcgctgcattgcagccagcttggaactcaacaatccggtaccagagcaaccacccctgccgactagcgaatcaccttttgcctggtctcccttagcaggagaaaagtttgtggaagtgtacaaggaggcccatctgctggctctgcatatagaatcatccagcagaaatcaggccgcgcaggctgctaagcccgaggatcccagaagtcagggcgtggaacgtttcattcaggaaagtaagctgaagatcaatctttttgagaaagaaaaagaaatgaaaaaatcccccacctccttgaaacgcgagacctattatctgtctgacagcccgctcctgggccccccagtgggggagcctagactgctggcatcttcgccagccctgccatcaagcggtgcccaggcccgcctcacacgggcacctggacctcctcactcagcccatgcactcccaagggaatcttgcactgcccatgccgcatcacaggcagcgactcaacgtaaacccgggaccaagctgctcctccctcgcgcggcttctgtgcgcggccggtcaattccgggtgctgcggaaaaacccaaaaaagagatcccagcctctccatccaggactaaaattcccgctgaaaaggaatcccatcgggatgttctgcccgacaaaccggcccccggggctgtgaacgtccccgcggctggctcacatctgggacaaggcaaaagagctattcccgtgcctaacaagctgggcctcaaaaagacactgctcaaagcccccggatccacatccaacctcgctagaaaaagctctagcggccccgtatggtctggagccagctccgcttgtacttctcctgccgtcggtaaggctaagagcagcgagttcgcctccatcccggccaattcctcccgtcccttaagtaatatatccaagtccggccgcatgggtcccgctatgctccgccctgctcttcccgccggtcctgtgggagcctcgtcatggcaagctaagcgggtagacgtgagtgagctggccgcagagcagctcaccgcgccaccaagcgcgtcccccacacaacctcagacacctgagggcgggggccaatggcttaattccagctgcgcctggtcagagtcctcgcagctcaacaagacaagatcaatccggcgccgtgattcatgtctaaactctaagaccaaagttatgccgacaccaactaatcagttcaagataccaaagttttcaatcggagactcccccgactcttccactcctaaactgtcaagagcccagcggccacaaagctgcaccagcgtagggagagtcaccgtacactctaccccagtgcgccgatccagcggaccggcgcctcaaagcctactttctgcttggcgggtgtctgctctgccaacgcctgcgagcaggcgttgctcgggtctgccacccatgactcctaaaacaatgccccgggctgtgggctctcctctgtgcgtgccagcgaggcgccgctcctcggaaccacgaaaaaattcagccatgagaactgagccaacccgggagagtaaccgcaagaccgatagccgcctcgtagacgtgagtcccgaccgcgggagccctccatctagggttccacaggcactgaacttctctccagaagagagcgattccacattcagcaagagtaccgctactgaggtggcgagggaagaagctaaaccaggaggcgatgccgccccgtcggaagctctcctagtggacattaagctggagccattagcagtgacacccgatgcagctagtcagccactgattgacttgccattaattgatttttgtgatacccctgaagcgcatgttgccgtggggtccgagtcacgacccctcatcgacctcatgacaaatactcccgatatgaacaaaaatgttgccaagcccagcccagtcgtgggccagttgattgacctcagctctcctcttatccagttatcacctgaggccgacaaagagaacgtggactcgcctctgctgaagttctag

SEQ ID NO: 15299 - DNA, 2220 bp, synthetic construct
  misc_feature 1..2220: note = Description of Artificial Sequence: Synthetic coding sequence
  source 1..2220: mol_type = other DNA
atggaagggggtgggggcagagacgagccctcggcttgtcgcgcaggagatgttaatatggatgatccaaagaaggaggacatactcctactggccgatgaaaaattcgacttcgatctatctctctctagtagtagcgcaaacgaggatgacgaagttttcttcggcccattcggacataaggaacgttgtatcgctgccagcctggagctgaacaatcctgtacccgagcagcccccgcttccaactagcgaatcccctttcgcctggtcacctctggcaggggagaaattcgtggaagtctacaaagaagcacacctgttggcgctgcacattgagtcatcaagtagaaatcaggcagcccaggcagctaagccggaagacccacggtcccagggcgtggagcggttcatacaagaatccaaactgaaaattaacctgttcgagaaggaaaaggagatgaagaagtctcccacatcattaaaacgggagacttattacctctccgactcaccgttgctgggaccacccgtaggggagccccgactgcttgcctcatcgcccgctctccctagctctggcgctcaggccaggctgacacgggcgcctggacccccgcactctgctcacgctttgccacgagagagttgtacagcccacgccgctagccaggcagcaacgcagcgcaaaccaggcacgaaattgctgctgccgagagcagcctcagtccggggccgctccattccgggcgccgccgaaaaaccaaagaaagagatacctgcttcccccagtcggacaaaaatccctgccgaaaaagaatcacacagagacgtcctcccggacaaacccgctccaggtgccgtgaatgttcctgcagctggctcgcacctgggacaggggaagcgggccattcccgttcccaataagttgggccttaaaaagacgttgctgaaggctcccggctcaacctcgaacctggcaagaaaaagcagttcgggtccagtctggtccggcgcttctagtgcctgcacaagcccagccgtaggaaaggcaaagagctccgaattcgcctcaattccagctaactcttctcgcccactttctaacatcagcaagagtggacgaatggggccagccatgttgaggccagccctgcctgcaggtcccgtgggcgcaagtagctggcaggcgaaacgcgtcgacgtgtctgaactggccgcagaacagttgactgcacctccttctgcctcccctactcagccacagacgcctgaaggaggcggacaatggttgaacagtagctgtgcttggagtgaaagctcgcagctcaataagaccaggagtattagaaggagagactcttgccttaatagcaaaactaaggtgatgcctacaccaactaatcaatttaagattcccaaattcagcatcggagactcgcctgattcatcgaccccgaagctctcacgcgcccagcggcctcagagttgcacgtctgtcggccgcgtgacggtccactccacgcctgtccgccgcagttctggacctgcgcctcaatccttgctatccgcatggcgagtgagcgcactacctacaccagcaagtcgacgctgtagtggcctccccccgatgactcccaaaacaatgccacgggccgtcggaagccctctctgtgtgcctgcccgccgtcgctcttcagagcccagaaaaaatagtgccatgaggactgagccgacccgggaaagcaatcgtaagactgacagcaggcttgtggacgttagccccgaccgtgggtcgcctcccagccgcgtgcctcaagctctgaatttctcccccgaagaatctgactcaaccttcagtaaatctacagccactgaggtcgcccgagaggaggccaaaccagggggagacgctgccccatccgaagcgctccttgtcgacataaaactggaacccctggctgtgacccccgatgcagccagtcagcccttaattgatctgcccctcattgatttctgtgacactccggaagcacacgttgctgtgggttccgagtctaggcccctcatcgatctgatgacgaataccccggatatgaacaaaaacgtcgccaagccatcacctgtggtggggcagcttattgatttgtcttcccctctgatccagctttctccagaggctgataaggaaaatgtggacagtcccctcctcaagttttag

SEQ ID NO: 15300 - DNA, 1149 bp, synthetic construct
  misc_feature 1..1149: note = Description of Artificial Sequence: Synthetic coding sequence
  source 1..1149: mol_type = other DNA
atgggggattggtctgccttaggtaaacttcttgataaagtccaggcatatagtactgccggtggtaaagtatggttgtcagtgcttttcatctttaggattcttctcctgggtacagctgtggagagcgcctggggcgacgagcagtctgcctttagatgtaatacccaacagcctgggtgcgaaaatgtgtgttacgataaaagttttccgataagccacgtgcgattttgggtccttcaaatcatattcgtttccgtgcccactctcttgtacttggcccatgtcttctatgtcatgagaaaggaagagaaacttaacaaaaaagaggaggaactcaaggtcgctcagaccgacggcgtaaatgtcgacatgcatctgaagcagatcgaaatcaaaaagtttaaatatggcatcgaagagcatgggaaagtgaagatgagaggcgggttattgcgaacgtacatcattagcatcctgtttaaatccatttttgaagtcgctttcctcctgatacagtggtacatctacggcttcagcctgtctgcggtttatacatgcaaaagggatccttgtccacatcaggtcgattgctttctgtctcgccccaccgaaaaaacgatctttattatttttatgttggtggtcagcctcgtctcactagcactcaacatcattgagttgttctatgtgttttttaaaggagtcaaggatagggtgaaaggaaagagcgatccctatcatgcgacgagtggagctctgtctcccgccaaggattgtgggagccagaagtatgcttatttcaacgggtgttcaagcccaacagcgcccttgtctcccatgagcccgccgggttataagctggtgaccggggataggaacaactcaagctgtcgcaactacaataagcaggcgagtgaacagaactgggccaactattcagccgaacaaaatcgcatgggacaggctggatccaccatatccaattcacacgcacagccattcgactttccagatgacaatcagaatagtaaaaaactcgccgccggtcacgaactgcagccgcttgcgattgtggatcagcgaccctcctcccgcgctagctcaagagctagtagccggccgcgcccagacgacctggagatttag

SEQ ID NO: 15301 - DNA, 1101 bp, synthetic construct
  misc_feature 1..1101: note = Description of Artificial Sequence: Synthetic coding sequence
  source 1..1101: mol_type = other DNA
atgggtgattggagtgctttggggaagttgctggataaggtgcaggcttactcaacagcaggaggaaaggtttggctttctgcttggggggacgaacagtcagccttcaggtgtaacacacagcagccgggatgtgagaacgtgtgttacgataagtcctttccgatctcccatgtgaggttctgggttctccagataatttttgtgagcgtcccaacattgctgtacctcgcccacgtgttctacgttatgcggaaggaggaaaaactaaacaagaaagaggaagagctcaaagtcgctcagacagatggcgtgaatgttgatatgcacctgaagcagatagaaataaaaaagtttaagtacggcatcgaggagcacggcaaggtgaagatgcggggtggcctcttgcggacatacatcatatccatactgttcaaatcaatttttgaagtcgccttcctgctgattcagtggtatatttatggattttccttaagcgccgtgtacacatgtaaacgggatccctgcccccatcaggtggactgcttcttatctcgcccgacagaaaagaccatttttatcatcttcatgctcgtggtgagccttgtcagtcttgccttaaatatcattgagcttttttacgtgttctttaaaggcgtgaaggacagggtgaaggggaagtccgatccataccacgctacaagcggggcattgtcaccagcaaaagattgtggttctcagaagtacgcttatttcaacggctgctccagtcctacggcaccgcttagtcctatgtcacccccgggctacaagctggtgaccggggacaggaataattcctcatgcaggaattacaacaagcaggcgtccgagcagaattgggccaactactccgctgagcagaacagaatgggacaggccgggtccaccattagcaactctcatgcccagccatttgacttccccgatgataaccagaacagcaagaaattagccgcaggccacgaattgcaacccctcgcaatcgtggaccaaagacctagcagcagagccagttctcgtgcttcgtcgaggccacggcctgacgacctggaaatctag

SEQ ID NO: 15302 - DNA, 2673 bp, synthetic construct
  misc_feature 1..2673: note = Description of Artificial Sequence: Synthetic coding sequence
  source 1..2673: mol_type = other DNA
atggactccaacacagcgccgctgggcccttcctgcccgcagccacctcccgcgcctcagccccaagcccggtctagacttaacgctacagcgagcctggaacaggaacgtagtgagaggcccagggcaccagggccccaggctggacctggtcccggggtacgagatgccgcggcacctgctgagccgcaggcccaacacacgaggtctcgggagagagctgatggaacggggccgacaaagggcgatatggagattccctttgaagaggtgctggagagggctaaagctggggacccgaaagctcagaccgaggtgggaaaacattaccttcaactggccggtgataccgatgaggagctgaacagctgcacggcggtcgattggctggtgctggccgccaaacagggaagacgggaagccgtgaagctcctcagacgctgcttggccgatcggagaggaataacctccgaaaatgagcgggaggtgcgtcagctatccagcgagactgacctggagagggcggttagaaaggccgcccttgtgatgtactggaagttaaacccaaagaaaaagaagcaggtggcagttgccgaactgctagaaaacgttggccaggtcaacgagcacgacggaggcgcacagcctggacctgtgccaaaaagcctccagaagcaaaggcgcatgctcgaacgattggtgtcatccgagtcaaagaactatatcgccctggatgattttgtggagatcactaagaagtatgcaaaaggcgtaatccccagctctctgttcttacaggacgacgaagacgacgacgaactcgccgggaaatcacctgaagacttgccactccggctcaaggttgtgaagtaccctcttcatgccatcatggagattaaagaatacctgatagatatggccagcagggccggtatgcactggctgtctacaatcatacctacacaccacattaacgccttaatctttttttttatcgtttctaacttgacaatagactttttcgctttctttattcccctggtcattttttatctgtcttttatctccatggtgatctgcaccctgaaggtatttcaggattctaaagcttgggaaaattttcgcaccctgaccgacctcctgcttcgattcgaaccaaacctggacgtcgagcaggcagaggttaattttggatggaatcacctcgagccctacgcccacttcctgttaagcgtgttcttcgttatcttctcttttcccatcgcttctaaagactgtataccatgctcagaactagccgtgatcaccggattctttaccgtaaccagctacctttccctgtcaacccatgccgaaccatataccagaagagcacttgccactgaggtgactgccggccttctgtccctgctgccgtccatgcccctcaattggccctacctcaaggttttgggccagactttcatcacagtgccagtgggacacctggtagtgcttaacgtgagtgtcccctgtttgctatatgtctacttattgtatttgttcttccggatggcacagttgagaaactttaaggggacttattgctatctggtgccttatctggtatgctttatgtggtgcgagctaagcgtggtgatcctactggagtctaccggtctgggccttctacgagctagtattgggtatttcctgtttctttttgccctcccaatactggttgctggcctcgctctggtgggcgtgctccagttcgcccgatggtttacctctttggagcttactaagatcgctgtgacagtggccgtgtgcagcgtccctcttctgctgcgctggtggacaaaagcctctttcagtgtggttggtatggtcaagagtctgactcggtctagcatggtcaaactgatcttagtgtggttgaccgcaatagtacttttttgctggttttatgtgtatcgcagtgagggaatgaaagtgtataactccaccctaacatggcaacagtacggagcactatgcggccccagagcctggaaagagacgaatatggccagaactcagatcctatgctcacatctggaaggtcatagggttacgtggacagggcgttttaagtatgtcagggtgaccgatatcgacaatagcgctgagtccgccatcaacatgttgccattttttattggagactggatgcggtgtttgtacggggaagcttaccccgcctgctctcccgggaacaccagtaccgctgaagaagagctgtgccggctgaagttactcgccaagcacccgtgccatataaagaaatttgatcggtacaagtttgagatcacagtcggcatgccgttctccagtggagctgatggatctaggagccgcgaagaggacgacgttacaaaggacattgtgctgagagctagtagcgagttcaagtccgtattactgagcctgcggcagggcagtctgatcgaattctcaacaatcttagaggggcgactgggatcaaagtggcctgtcttcgaactgaaagctatttcctgcctgaactgcatggcccagctctctcccacacgcagacacgtgaaaatcgagcacgattggcgatctacggtgcatggcgcagtgaaatttgcttttgactttttcttctttccattcctgtctgcagcttag

SEQ ID NO: 15303 - DNA, 654 bp, synthetic construct
  misc_feature 1..654: note = Description of Artificial Sequence: Synthetic coding sequence
  source 1..654: mol_type = other DNA
atgagcttcagaggtggtggaaggggcggctttaatcgcggcgggggtggcggaggctttaatcggggcggctccagcaaccacttccgcggcggagggggtggtgggggcggcggcaattttaggggaggcgggaggggtggattcgggcggggcggcggccgcggaggatttaacaagggccaggatcagggccccccagagagggtcgtcttactgggagagttcctccatccctgtgaagatgatattgtgtgtaaatgcactactgatgagaacaaagtcccctactttaatgcccctgtgtatctggagaataaggagcaaattgggaaggtagatgaaatcttcggtcagttgcgggatttttacttctccgtcaagctgagtgagaatatgaaagccagttccttcaaaaagctgcagaaattttatattgacccttataagctcctgcccctgcaaaggttcttgccgcgcccccctggggagaagggccctcccaggggaggcggtagaggagggaggggaggaggaagggggggcggaggaagaggaggaggccggggcggcggattccggggggggagggggggaggtggaggggggttccggggggggcgtggcggtggatttaggggccggggacattag

SEQ ID NO: 15304 - DNA, 1590 bp, synthetic construct
  misc_feature 1..1590: note = Description of Artificial Sequence: Synthetic coding sequence
  source 1..1590: mol_type = other DNA
atgggatgcgttttctgcaaaaagcttgagccggtggccaccgcaaaagaggatgccggtttggaaggcgactttcggagctacggggccgccgatcattacggccccgaccccactaaggcccgtccagcctcgagctttgctcatattcctaattacagtaacttcagttcccaggcaataaacccagggtttctagactccggaactatcagaggcgtctcaggaattggggtaacactatttatcgccctgtatgattacgaagccaggaccgaggacgatctgacttttactaaaggtgagaaattccatattttgaacaatacagaaggagattggtgggaggccagaagcctcagttctggcaagacagggtgcattccctctaattacgtggcacccgtcgattctattcaggctgaagagtggtactttggcaaaattgggagaaaagatgcagaacgccagctgttgagtccgggcaatcctcagggcgccttcttgatcagggaatctgagacgactaaaggtgcgtattcgctgtccatccgagactgggaccagaccaggggagatcacgtcaaacattataagattcgtaagctggacatggggggttactacattaccacccgcgtccaattcaatagcgtccaggaactagtccagcattatatggaggtcaatgacggtctgtgtaatctgttaatcgctccttgcacaatcatgaagccccagacacttgggctggccaaggacgcttgggaaattagccgcagctccataacccttgaacggcgcctcggcacaggctgctttggggacgtatggctggggacctggaacggaagcacaaaggtggcggtgaagacactcaaaccaggaaccatgtccccaaaagctttcttagaggaagctcaggtcatgaagcttctgagacacgataaattagtgcagctgtatgccgtggtgtcggaggagcccatttacattgtgaccgaattcatgtgtcatggcagcctgctagatttcctcaaaaaccctgagggacaagatctccgcctgccacagcttgtggacatggcggcccaggtggccgagggcatggcttacatggagcggatgaattacattcaccgggatctgcgcgcagccaacattttggtgggagaacgcctcgcttgcaagattgccgatttcggattggccaggttgattaaggacgatgagtacaatccctgccagggttccaagttccctatcaaatggaccgcacctgaggcggcgcttttcggacgcttcaccatcaagagcgatgtttggtcctttggtatattgttaaccgagttgatcaccaagggaagaataccttaccccgggatgaataaacgggaagtgttagagcaggtcgagcaggggtaccacatgccttgcccccctggatgccctgcctcgctgtatgaggcgatggaacaaacttggagactcgatccagaagagcggcctaccttcgaatatctgcagtcgttcctcgaggattacttcacttcagcagagccccagtatcagccaggcgaccagacctag

SEQ ID NO: 15305 - DNA, 1590 bp, synthetic construct
  misc_feature 1..1590: note = Description of Artificial Sequence: Synthetic coding sequence
  source 1..1590: mol_type = other DNA
atgggctgtgttttctgcaaaaaactggagcccgtggccactgctaaggaggacgccggtctggaaggtgacttcaggtcctacggggccgcggaccactacggtcccgacccaaccaaggccagaccagcgtcttccttcgcccacattcccaattactcaaacttcagttcacaggccatcaaccccggctttcttgacagcggcaccataaggggggtgagtggcatcggtgtgaccctgttcatagccttgtatgactacgaggctaggaccgaggacgatttgaccttcaccaaaggtgaaaagttccatatcttgaacaacacagagggcgattggtgggaagccaggtctctgagtagcggaaagacgggctgcattcccagcaactacgtggcgcccgtggactccattcaagccgaggaatggtactttggaaaaattggccgaaaagacgcggagcgacagttactgagtccggggaacccgcagggtgcctttctgattcgcgaaagcgaaacaacgaaaggagcctactcactgtcaattagagattgggatcaaacgcgcggcgatcatgtcaaacattacaagatcaggaaattggacatgggcggctattatattacaactcgggtgcaattcaacagcgtgcaggagctcgtgcagcactacatggaggtgaacgacggactgtgtaacctgctgatcgcaccatgcacaattatgaagccacagacactgggcctggccaaggacgcctgggagattagtagatcaagcatcacgctcgaacgtaggttggggacagggtgctttggagacgtctggctgggcacatggaacggatcaacaaaggttgctgtgaagaccctgaaaccgggaacgatgagccccaaagccttcttggaggaggcccaagttatgaagcttctccgtcacgacaaacttgtgcagttgtatgctgtggtgagtgaagagcccatctatattgtgaccgaatttatgtgccacgggtccttgttggacttcctaaagaaccctgaaggacaagatctgagactgccacagctcgtggacatggccgctcaggtcgcagagggtatggcctacatggaacggatgaattacatccacagggacctgagggccgccaacatcttagtgggcgaaagactggcctgtaagatcgctgatttcggtctggcaagactgatcaaggatgatgagtataacccatgccagggatcaaaattcccaattaaatggactgcacccgaggctgcactttttgggcggtttacaataaaatccgatgtctggagtttcggtatcctgctgaccgagctcattacaaaagggcgcattccctaccccggtatgaacaagcgtgaggttctggaacaggtggagcagggataccatatgccctgccctcctggttgtccagcctcactgtacgaggccatggaacagacatggcgcctggatcctgaggagcgccctacgttcgagtatctacagagtttccttgaagactacttcacctcagccgagcctcagtatcagccgggagatcagacctag

SEQ ID NO: 15306 - DNA, 1590 bp, synthetic construct
  misc_feature 1..1590: note = Description of Artificial Sequence: Synthetic coding sequence
  source 1..1590: mol_type = other DNA
atgggatgcgtgttttgtaaaaagctagagccagtagctacggccaaagaagacgcaggattggaaggagattttaggagctatggtgctgccgatcattacgggccagaccctactaaggccaggcctgcaagctcattcgcacatataccaaattattcaaacttctccagtcaggctatcaatcctgggttcctggatagcggcactataagaggagtgtctggaatcggcgtcacactgttcatcgctttgtatgattacgaggccagaaccgaggatgatctgacattcacaaagggagagaagttccacattctgaataataccgaaggtgattggtgggaggcgcgctctttgtccagtgggaagactgggtgcatccccagtaattatgtcgcacccgtggattctatacaggccgaggagtggtattttggcaagatcggaagaaaggacgccgaacggcagttgctgtccccgggtaatccacagggtgccttcctgatacgggagagcgaaactacgaaaggagcgtacagtctatcaatccgcgattgggatcagacacgcggcgaccatgtcaaacattacaagatcagaaagctggatatgggcggttactacattaccaccagggtacaattcaactctgtgcaggaattggtgcagcactacatggaagtcaatgatggcctgtgcaatctgctcatcgctccatgtacgataatgaaacctcagacattggggctggccaaggacgcttgggagatctctcgctcatctataaccctggaaaggaggcttgggacagggtgctttggagacgtttggctcggcacatggaacggcagcacaaaagttgctgtgaagactttgaaaccaggaacgatgagtccaaaagccttcctcgaggaggctcaggtgatgaaacttctacgacacgataaacttgttcaattgtacgccgtcgtgagcgaggagcccatctatattgttactgaatttatgtgtcatggcagcctcctagattttctaaaaaaccctgaggggcaggacttgaggcttccacagctggtggatatggcagctcaagtggccgaagggatggcatatatggaacgaatgaattacatacatcgcgatctgagagcagctaacatacttgttggcgaaaggctggcttgtaaaattgccgatttcggcctggcacgactaatcaaggatgatgagtacaatccttgtcaaggaagtaaattccccataaagtggaccgcccctgaagccgcgctgttcgggcgattcaccatcaaaagtgacgtgtggtctttcggtattttgctgactgagctgattacaaagggtcggattccttatccaggaatgaacaaacgggaagtcctggaacaggtagaacagggctaccacatgccctgtcctcctgggtgccctgcctccttgtacgaggctatggaacagacttggcggttagatccggaagaaagacctaccttcgaataccttcagagctttctggaggattactttacgtcggccgagccccagtatcagcccggcgatcagacttag

SEQ ID NO: 15307 - DNA, 1590 bp, synthetic construct
  misc_feature 1..1590: note = Description of Artificial Sequence: Synthetic coding sequence
  source 1..1590: mol_type = other DNA
atggggtgtgtgttctgcaagaagctggaacccgtagccactgcgaaagaggatgccgggctggagggagatttccgcagttacggggccgctgatcactatggccccgaccccacaaaagcgcgcccggcatcctctttcgcccacattcccaactacagtaattttagctcccaagctatcaacccagggttcttagattcaggaaccatcagaggagtcagtggaatcggagtaactttgttcattgccctgtacgattacgaagcaagaaccgaggatgaccttactttcaccaagggggagaagtttcatatcctcaacaacactgagggcgattggtgggaagccaggagtctgagctctggaaagacaggctgtatcccctctaattacgtggccccagtcgattcaatccaagccgaggaatggtacttcggtaaaatagggagaaaggacgctgaaaggcagttactgtcccctgggaatccacagggtgcctttctgatacgcgaatcagagacaacaaagggagcttattcccttagcatccgggactgggatcagactagaggtgaccatgtcaaacactataaaattcggaagctggatatggggggatactatattacgactcgcgttcagtttaactcagtgcaggaattagttcagcactatatggaagtcaatgatggactgtgtaacctcctgatcgccccatgtacaataatgaaacctcagacgctcggattggccaaggatgcttgggagatcagcaggtcaagcatcacattagagcgcaggctcgggacaggttgtttcggggacgtgtggctcgggacttggaatggaagcaccaaggtggccgttaagactctcaaaccagggaccatgtcacctaaagccttcttagaggaggcccaagtgatgaagctgctgcgccacgataaactggtgcagctctacgccgtagtgtccgaagagccaatctacatcgtcactgagttcatgtgccacggcagccttctcgattttctgaagaatcccgaagggcaggatctgcgactgccccagttggtggatatggccgcgcaggttgccgagggcatggcatatatggagcggatgaactatatccaccgcgaccttcgggcagcaaatatcttggtaggggaacggctggcctgtaaaattgctgacttcggtttggcccgtctcatcaaggatgatgagtataatccatgccagggctcaaagtttcccatcaagtggacggcccccgaagccgccctgtttgggcgctttactattaagagcgacgtgtggtcctttgggattctcctcaccgaactcatcacaaagggtaggattccatatccaggcatgaacaagcgcgaagtgctggagcaagtggagcagggctatcacatgccctgtcccccaggctgtccggccagtctgtatgaggcaatggaacagacctggcgacttgacccagaggaaaggcctacattcgaatatttacagagttttctggaggattactttacctcagccgaacctcagtatcagccgggtgatcaaacctag

SEQ ID NO: 15308 - DNA, 942 bp, synthetic construct
  misc_feature 1..942: note = Description of Artificial Sequence: Synthetic coding sequence
  source 1..942: mol_type = other DNA
atgggctgtgtgttctgcaaaaagctagagcctgtggccaccgctaaggaagatgcaggtctcgagggcgattttcgtagttacggcgccgccgatcattacgggcccgaccctaccaaagctcggcctgcgagttcttttgcgcacatccctaactacagtaatttctcatctcaagcgatcaaccctgggtttctcgactcaggcaccataaggggagtgtcaggcatcggggtgactctgttcatcgccctgtatgattatgaagccagaaccgaggacgacctgacatttactaaaggagagaaattccacattctgaataatacagaaggggactggtgggaagctcggtccctctcctctggtaagacggggtgtattccaagtaactacgtggcacctgtggactcaatccaggccgaggaatggtattttggcaagataggccggaaggacgcggagcgccagctcctcagccctggcaatcctcagggggcatttctgatccgagaatcagagaccaccaagggcgcatactcgctgtcaatccgggattgggaccagacaagaggcgatcacgtgaaacactacaagattcggaaattggacatgggtggatattatattacgaccagggtgcagttcaacagcgttcaggaacttgtccagcactacatggaggtgaacgatgggctgtgcaacctcctaatagctccctgcacgatcatgaaaccgcaaacgctgggattggcaaaagatgcctgggaaatttcacgctcatccatcaccttggagcgcaggcttggcacaggttgctttggcgatgtgtggctgggaacgtggaatggctcaacaaaggtggcagtcaaaaccctgaaacccggtactatgagccctaaagcctttttggaagaagcccaagtgatgaagctgttatag

SEQ ID NO: 15309 - DNA, 1392 bp, synthetic construct
  misc_feature 1..1392: note = Description of Artificial Sequence: Synthetic coding sequence
  source 1..1392: mol_type = other DNA
atgggctgtgtgttctgtaagaagctagagcctgtggctacggctaaagaagatgcaggcctggagggcgatttcaggagttatggggctgccgaccattacggacccgacccaacgaaagctcgacccgcctcctcctttgcccatattcctaactactctaatttctcttctcaagccattaatccaggcttcttggacagtggaacaattcgcggtgttagcggaattggtgttaccctctttatagccctttacgactatgaagccagaacagaagatgacctcacattcacaaagggcgagaaattccacatcttgaacaataccgaaggcgcctacagcctgtccatccgtgattgggaccagacaaggggcgaccacgtaaaacactataagatccggaaactggatatgggcggttactatataacaaccagggtgcagttcaattcagtgcaagaactggttcagcactacatggaagtgaacgatggcctgtgcaacctactgatcgccccttgcaccattatgaagccccagacacttggactggctaaggacgcctgggaaatctcacggagctctatcactctggagagaagattggggacaggctgctttggcgacgtgtggttaggcacgtggaatggttctacaaaagtggccgtcaaaaccctgaagcccgggaccatgtcaccgaaggcttttctcgaggaagctcaggtcatgaagttactgagacacgacaagctggtgcaattgtacgccgtggtgtcagaagaaccaatttatatcgtgacagagtttatgtgccatggttcactgctagatttcttaaaaaacccagaggggcaggatcttcggctcccccagctggtcgatatggccgcccaagtagcggaaggcatggcttatatggaacggatgaactacatccacagagatcttagggctgcgaatatactggtgggagaacgtctcgcatgtaaaatcgctgatttcgggctcgcccgattaataaaggatgacgaatataatccttgccaaggctcaaagttccccatcaagtggacggcgcccgaggcagccttgttcggcagattcaccattaagtcagatgtgtggtcgtttgggattttgctgaccgagcttattactaaaggccggatcccgtaccccggaatgaacaagcgcgaagtgttggaacaagtggagcagggttaccacatgccctgtcctcccgggtgcccagcaagtctgtacgaagctatggaacaaacatggcggcttgaccctgaagaacggcctacatttgagtacttgcaaagctttcttgaggactatttcacctctgcagagccccaataccaaccaggggaccagacatag

SEQ ID NO: 15310 - DNA, 1005 bp, synthetic construct
  misc_feature 1..1005: note = Description of Artificial Sequence: Synthetic coding sequence
  source 1..1005: mol_type = other DNA
atggagtttcccggactgggaagcttaggcacttccgaacctctgccccaatttgtggacccagcactggtgagctctacgccagaaagcggggtttttttcccctctgggcccgaggggttggacgctgctgccagctcgactgctccttcaacagcaaccgccgccgccgcagccctggcttattaccgcgatgccgaggcctaccgacactcacccgtttttcaggtgtacccacttttaaactgcatggagggtatccctgggggctccccttatgccggttgggcctacggtaaaactggcctctatcccgcctccacagtctgtcctacacgtgaggactcacccccgcaagccgtagaagacctggatggcaagggcagtacctcctttctggaaacgctcaagaccgaacgtctaagtccagatttgttgactctgggccctgcccttccaagtagcctccctgtaccaaattccgcctatggcgggcccgacttctcatcgacctttttcagcccaaccgggagccccctcaacagcgccgcctacagctccccgaagctgagggggacactgcccttgcctccatgtgaggcccgcgagtgcgtgaactgcggcgccacagccacccccctttggaggcgtgatcgaaccggacactatctgtgtaatgcttgtggcctgtatcacaaaatgaatgggcaaaacagacctcttatccgtcctaagaaacgcctcatagtgtcaaagcgcgctggaactcagtgtacaaactgtcagactacaacaactaccctgtggcggagaaatgcctctggtgaccctgtatgcaatgcatgcggactctactacaaattgcatcaacattactgtggggggagtgcccagctgatgcgcgcacagtccatggcatctagggggggggtcgtgtccttttccagttgctcccagaactcaggacagcccaaaagccttggaccccgacacccactggcctag

SEQ ID NO: 15311 - DNA, 1242 bp, synthetic construct
  misc_feature 1..1242: note = Description of Artificial Sequence: Synthetic coding sequence
  source 1..1242: mol_type = other DNA
atggagtttccgggcctgggttcactgggcacaagcgaaccacttcctcagttcgtggaccctgccctggtgtcatcaacgcctgaaagtggagtcttcttcccctccgggcccgaaggtctcgatgccgccgcaagtagcactgcacctagcactgccacagctgctgctgccgctctggcttactaccgcgatgccgaagcttacaggcatagccctgtcttccaggtctaccccctcttaaattgcatggaggggatacctggaggaagtccatacgcaggatgggcctatggtaaaacaggcctctacccagcaagcacggtgtgcccaacccgcgaggatagtccaccccaagctgtcgaggatcttgacggtaaggggtcaacatcattcctggagactctgaaaacggagagactctcacctgacctactgacactggggcccgccctgccaagcagtcttcctgtgccgaattccgcttatggaggacccgatttctcctcaacattttttagtccgaccgggtcacctctcaatagtgccgcatacagcagcccaaaactgcggggtactcttcctttgcctccctgtgaagcacgcgaatgtgtcaactgcggggctacagctacacccctttggcgccgcgatagaaccggccactacctgtgcaatgcttgtgggctgtatcacaaaatgaatggacagaaccgtcctctcattagaccaaaaaagcgcctcatcgtgtcgaagcgagccggcacacagtgcactaattgccagacgaccaccactacactctggaggaggaatgcctctggggaccctgtctgtaatgcctgcggtctgtattataagctgcatcaggtgaacaggcctttgaccatgcggaaggacggaatccagactcgcaatcgcaaggcttccgggaaaggcaagaagaaaaggggcagttctttaggcggtacgggcgctgctgagggaccggccgggggattcatggtagtggccgggggctcagggtctggcaattgcggtgaggtggcctccggactgacactaggtcctcctggaaccgcacacctgtaccagggcttgggtcctgtagtgttgtctgggcccgtctctcatctgatgccattccctggacctctgctggggagcccgaccgggagcttccctacaggaccaatgccgcccaccacttcgacaaccgtagtggctcctctttcttcatag

SEQ ID NO: 15312 - DNA, 369 bp, synthetic construct
  misc_feature 1..369: note = Description of Artificial Sequence: Synthetic coding sequence
  source 1..369: mol_type = other DNA
tgacagaacagacctctgattaggccaaaaaagagacttatagtttcaaagcgtgccggcacgcaatgtaccaattgccaaactactactaccaccctttggaggcgtaacgcttctggtgaccctgtgtgcaacgcctgtgggctttattataaactccaccaggtgaacagaccacttactatgcggaaggacggcatccaaacccggaatcgcaaagcatccggcaaaggcaaaaagaaacgtggcagctctttgggagggacaggcgccgctgagggccctgcccttctctggtggctgaggagcgcacacgaggggacagaacacgggctgcaacggcgcggaggagtgctgctgttactgtag

SEQ ID NO: 15313 - DNA, 1332 bp, synthetic construct
  misc_feature 1..1332: note = Description of Artificial Sequence: Synthetic coding sequence
  source 1..1332: mol_type = other DNA
atggaggtgacagccgatcagccccgatgggtctcgcaccatcaccccgcagtgttgaacggccagcatccagatacacaccaccccgggttgagtcatagttacatggatgcggcccagtaccccctgccagaggaagtggacgttctctttaatatcgatggccaggggaatcatgtcccaccctattacgggaactccgttagggctactgtacaacggtatcccccaacacaccatgggagtcaggtatgcagacccccattattgcacggctctcttccttggctcgacggcggcaaagcgttgggatctcaccataccgcctctccctggaacctctctcccttttctaaaacgtctatacaccatgggtcacctgggcctctgtcagtgtacccacccgcttccagcagctcactgagtggaggacatgctagtccacacttattcacgttcccgcctactcctccaaaagatgtcagtcctgatcctagccttagcacacctggttcagcgggctctgccaggcaggacgaaaaagagtgtttaaagtaccaggtacccctccccgactcaatgaagctggaaagttcccatagccggggcagtatgaccgctctcggtggagccagttcttcaactcaccatcccattaccacataccccccatacgtcccagaatactctagcggactatttccaccttccagtctcttggggggtagtcccacaggattcggctgtaagagcaggcccaaagctcgctctagtactggaagagagtgtgtgaactgcggcgctactagtacgcctctgtggcgccgtgacgggaccggccactacctgtgcaacgcttgcggactctaccacaaaatgaatggacagaataggcccctgattaaacccaagcggcggttgtcagcagcccgccgggctggcacatcatgcgccaactgtcagaccactaccactacgctctggcggcggaacgccaatggagacccagtgtgcaatgcatgcggtctctattacaaactgcataacatcaatcgcccactcaccatgaaaaaggaggggattcagacgcggaacagaaagatgtcttccaagagcaaaaaatgcaagaaggttcatgatagtctggaagattttcccaagaatagctccttcaaccccgccgccctgagccgccatatgtcgtcactgtcccacatctcccctttctcgcattctagtcacatgctaacaacccctactcccatgcatcccccatctagtctgtccttcggaccccatcaccccagcagcatggtaactgcaatgggctag

SEQ ID NO: 15314 - DNA, 1335 bp, synthetic construct
  misc_feature 1..1335: note = Description of Artificial Sequence: Synthetic coding sequence
  source 1..1335: mol_type = other DNA
atggaagtgaccgccgatcaacctagatgggttagccaccaccacccagcagtactgaacggccaacatccagatacacaccatcccggactgagtcattcttatatggatgccgcccagtaccccctgcctgaagaggtcgatgtgctcttcaacattgacggccaaggaaaccatgttccaccttattacggtaactcagtgcgcgcaacagtgcaacgctacccccctacccatcacgggtcccaagtatgccggccgcccctcctgcatgggtcattgccatggctcgatggggggaaggctctgggatcccatcacactgcttccccctggaacctgtcccccttttccaagacctccatacatcatggaagcccaggccctttgtctgtctatcctccagcttcttcttcctccctaagtgggggacacgcttcccctcatctgtttactttccccccaactccccccaaagatgtctctcctgacccttcccttagtacgcccggttctgcgggatctgcacgccaggatgaaaaggaatgcctcaaatatcaggtcccactgccagacagcatgaagttggaaagtagccatagtcgagggtccatgaccgcacttggaggagcctcttcttccactcaccaccctattactacttacccaccctacgttcccgaatatagctccggcctgtttcccccttcctctctgttgggtggaagcccaaccggttttggctgtaagtcacgccccaaggcgcgaagtagcactgaaggaagagagtgtgtgaactgcggagcgacaagcacccccctctggcgacgggacggcacaggtcattacttgtgcaacgcttgtggcttatatcataagatgaatggccagaatcgacccctgatcaagcccaaacgcaggctttctgcggccagacgcgccggaacatcttgtgctaattgccagaccaccacgacaaccctgtggagacgaaatgctaatggagaccctgtctgtaacgcgtgcggactgtactacaaactccacaatataaataggcccttgaccatgaagaaggaggggatccaaacacgtaaccgaaagatgtcctcaaagtccaagaagtgtaaaaaggtgcacgatagccttgaggatttccccaagaacagcagctttaatccagctgcgctgagtaggcatatgtcctcacttagccatatatccccattcagtcactctagtcacatgctgacaacaccaactcctatgcatcctccgagcagcctgtcgtttggtcctcaccatccctcaagtatggttacagccatgggctag

SEQ ID NO: 15315 - DNA, 393 bp, synthetic construct
  misc_feature 1..393: note = Description of Artificial Sequence: Synthetic coding sequence
  source 1..393: mol_type = other DNA
atggaagttactgccgatcagcctcggtgggtatcacaccatcatcctgcggtgttaaatggccagcaccccgatacacatcatcccggcctctcacatagttacatggacgcagctcagtatccgttaccagaggaggtcgacgttctttttaacattgatggccaggggaatcacgttcccccgtactatgggaactctgtgagagctaccgtgcagcgataccctccaacccatcatggatcccaggtctgtcgccctcctctgttgcatggcagcctgccctggcttgatggtggaaaagccctcggttcacaccacactgcttccccctggaacctacgcccctgtcttcagtgcctgtgggccctcctgcaggcctctcaatgttag

SEQ ID NO: 15316 - DNA, 798 bp, synthetic construct
  misc_feature 1..798: note = Description of Artificial Sequence: Synthetic coding sequence
  source 1..798: mol_type = other DNA
atgcgccgagctgagttagccgggttgaagaccatggcctgggtgcccgcagagtcagctgtggaggaattgatgcccagactactacctgtggagccttgcgacttgaccgagggatttgatccaagcgtgccaccgcggacaccccaagagtatctacgcagggtgcaaatcgaggcggcccagtgcccagatgtggtggtggcccaaatagatcctaaaaagctcaagcggaagcaaagcgtcaacatctccctctctggctgccaaccagctccagaaggctactcaccaacactgcagtggcagcaacaacaggtggcccagttttcaactgtgagacagaatgtcaacaaacatcgctcccactggaaatctcagcagcttgatagcaacgtgaccatgcctaaatcagaagacgaggagggatggaagaagttttgtctgggagaaaagctgtgtgctgacggagctgtgggccctgccacgaatgaaagcccagggattgattacgtccaggccacagtgacctccgtcctagaatacctgagtaattggttcggcgagagagattttactcccgaactcggaagatggctatacgctctactcgcatgccttgagaaacctttgctgcccgaagctcactcgcttattagacagctggcacggcgttgtagcgaagtgaggttattggtggattccaaggatgacgaacgtgttcccgcactgaacctgctgatctgcttagtctctaggtatttcgaccaaagggaccttgctgatgaaccatcctag

SEQ ID NO: 15317 - DNA, 843 bp, synthetic construct
  misc_feature 1..843: note = Description of Artificial Sequence: Synthetic coding sequence
  source 1..843: mol_type = other DNA
atgagacgcgccgagcttgcagggcttaagaccatggcatgggtcccagcggagtctgctgtggaggagctcatgccgcggctcctgcccgtggagccctgcgacttaacagagggtttcgacccgtccgtcccacctcgtaccccacaggaatacctccgcagagtgcagatcgaggcagcacaatgtcccgatgtggtcgtcgcacagatcgaccccaaaaagctcaagagaaaacagagcgtgaatattagcctgagtggatgtcagcctgcacccgaaggttattccccaacacttcaatggcagcagcagcaagtggcacaatttagcactgtgcggcagaacgtcaacaagcaccgctcacattggaagtcacagcagttagactcaaatgtgactatgccgaagagcgaggacgaagaagggtggaagaaattctgccttggcgaaaagctctgcgcagatggcgcagtcgggcccgcaacgaatgaatcccccggcattgactacgttcagatcggatttcctcctcttctctctatcgtgtccagaatgaatcaggctaccgtcacatctgtgctcgagtacctctcaaactggtttggcgaacgggattttactcctgagctgggcagatggctttatgctctgctggcatgtctagagaagccgcttctgcccgaggctcattctcttattcgccagttggctagaaggtgctctgaggtaaggctgttggtggattccaaagatgatgaaagagtgccggctctgaatctcctgatctgccttgtctcccgctatttcgatcagagagatctggccgatgagcctagttag

SEQ ID NO: 15318 - DNA, 753 bp, synthetic construct
  misc_feature 1..753: note = Description of Artificial Sequence: Synthetic coding sequence
  source 1..753: mol_type = other DNA
atgaggagagccgagctcgccggcctgaagactatggcatgggtcccagccgagtcagctgtggaagagctcatgcctaggctactgccggtggagccctgtgatttaactgaggggtttgacccttctgtgccaccacgcaccccacaggagtacctgcgccgggtccagatagaggctgcacagtgtcccgacgtagtggtggcccagatcgacccaaagaagctcaaacgcaaacagtctgttaatatcagtttatccggctgtcagcctgcccccgagggctattcccctacgctgcagtggcagcagcaacaggttgctcagttttccaccgttcggcagaacgtgaataaacatcgaagccactggaaatcccagcagctggattcaaatgtcacaatgccgaaaagcgaagatgaagaagggtggaagaagttttgcttaggcgagaagttgtgcgccgatggggcggtcgggcctgctaccaacgagagtcctggtattgactacgtccagatcggattccccccgctgctttctattgtgagccgcatgaatcaggcgacagtaacctcagttctggagtatctgagtaactggtttggagagcgagactttacccccgagttagggaggtggctctacgccctgttagcctgcctggaaaaacctttactccccgaagcccacagcctgatcagacagctggcgcgtcggtgtagtgaagtgaggctcctcgtcgtgttctag

SEQ ID NO: 15319 - DNA, 768 bp, synthetic construct
  misc_feature 1..768: note = Description of Artificial Sequence: Synthetic coding sequence
  source 1..768: mol_type = other DNA
atggatgtcatggacggatgccagttttctccctccgaatacttctatgatggatcctgcattccgagccccgaaggggagtttggcgacgagtttgtgccccgggtggctgctttcggggcccataaagccgaactgcagggctccgacgaagacgagcacgttagggctcccacgggacaccatcaggccggccactgcctaatgtgggcttgtaaggcctgtaaacgaaaaagtacaacgatggatagacggaaggccgccaccatgcgggagagacgcaggcttaagaaggtgaatcaagcattcgaaaccctcaaacggtgcacaactacaaacccaaaccagaggctcccaaaggttgaaattttgaggaatgctattcgctacattgagagtttgcaggaactgctgcgggagcaggtggaaaactattatagcctcccagggcagtcctgtagcgagccaacatctcccacatctaattgctccgatggtatgcccgagtgcaactcacccgtatggtccagaaaaagctctacgtttgacagtatctactgccctgatgtgtctaatgtgtacgcaaccgataagaacagcctgtcatctctcgactgtttatctaacattgttgacaggataaccagttccgaacagcctggactccccctccaagacctagcctcgctgtcccctgtggcttctacggactctcaacccgcaactccgggtgcttcatcatctcgtctgatctaccacgtcctgtag

SEQ ID NO: 15320 - DNA, 1725 bp, synthetic construct
  misc_feature 1..1725: note = Description of Artificial Sequence: Synthetic coding sequence
  source 1..1725: mol_type = other DNA
ctgtcacccagtcttgggttcccagcccagatgaaccatcagaaggggccctctccaagtttcggggtacaaccatgcggcccacatgattcagcacgtggggggatgatcccacatccccagagccggggaccattccccacatgtcagctcaaatctgagcttgacatgctggtaggcaaatgtagggaggagcctctagagggggatatgtcgtcccctaatagcacaggcatacaggaccctttattgggaatgttggatggcagggaggacctggagcgcgaggaaaaacgggaacctgaaagcgtctacgaaacagattgtcggtgggacggctgcagtcaggaatttgactctcaggagcaactggtgcaccacatcaactccgagcatatccacggggaaaggaaggagtttgtgtgtcactggggaggttgctcgagggagctgcgaccctttaaagcccagtacatgcttgttgtgcatatgcggagacacactggggagaagcctcacaagtgcacttttgaaggatgccgcaaatcttactcacgcctggaaaacctaaaaacccacctgcgctcccacacaggggagaaaccctatatgtgtgagcacgagggctgtagtaaggccttctctaatgcttcggatcgtgcaaagcatcagaatagaacccattccaatgaaaaaccctatgtgtgtaagctgccaggctgtacaaagcgctataccgacccttccagtctcagaaagcacgtgaagactgtccacggcccagacgcgcacgtgacaaagcgtcataggggcgacggacccctcccacgggcgccgtccataagcaccgttgaaccgaaaagagagagagagggaggcccgatccgggaagaatcccgtttaactgtgcctgagggggccatgccacctcaccctcagcctttgttctcccattacccccagccttcaccgcctcaatacctacagagcggaccatacacccagccacccccagactatctcccttccgagccaagaccctgtctggacttcgattctcccacccactccacaggacaactcaaagctcagctggtatgcaactatgtccagtctcagcaggagctgctgtgggagggaggtgggagagaggacgctcccgcccaggaaccttcgtaccagtcgcctaaattcctcgggggctctcaggtcagcccctctcgggctaaggcccctgtgaacacttacggccccggttttgggcccaacctgcctaaccataaatccggctcctatccgacccctagtccctgccacgagaattttgtggttggcgctaatcgcgcctcacaccgagccgctgcccctcctagactgttgccccccctgcccacatgctacgggccactgaaagtgggcggaaccaatcccagttgtggtcacccagaggtggggcgactgggcggagggccagctctgtatcctccgccagaaggtcaggtgtgtaaccctctcgacagcctagatcttgataatacacagctggacttcgtggctatcctcgatgaaccccagggccttagtccacctccttcccacgaccagcgcggaagctcagggcataccccacctccctccgggccacctaacatggccgtgggtaatatgagcgttctgctgaggtccctccctggcgaaaccgagtttctgaattcctcagcctag

SEQ ID NO: 15321 - DNA, 390 bp, synthetic construct
  misc_feature 1..390: note = Description of Artificial Sequence: Synthetic coding sequence
  source 1..390: mol_type = other DNA
atgttcaacagcatgactccaccacctatatctagttatggggaaccctgttgccttcgccccctgccttcccagggtgctccaagtgtgggaacagaaggcctttcaggtccgcccttctgtcaccaagccaacctgatgtctggtccgcacagctacggcccagcgagagaaaccaattcttgtaccgagggaccgttattctcctctccacggagtgcagttaaactgaccaaaaaaagagccctctccatatcacctctgagcgatgcgtctctggacttgcagaccgtcatacgcacatccccatcctctctggtcgccttcatcaactcccgatgcacctcccctgggggaagttacgggcacctgtccattggaacgatgtag

SEQ ID NO: 15322 - DNA, 3198 bp, synthetic construct
  misc_feature 1..3198: note = Description of Artificial Sequence: Synthetic coding sequence
  source 1..3198: mol_type = other DNA
atgtttaattcgatgacgccacctcctattagctcctacggcgaaccgtgttgtttaagaccactgccctctcaaggagccccctccgtgggcaccgaagtcaagctgacaaagaaacgggctctttcaatcagtcccctctctgacgcatccttggaccttcagaccgtaatcaggacttctccttcgagcctggtggcttttatcaattccaggtgcacctctccaggaggctcttatggccacttaagcatcgggactatgagcccatcactaggcttcccggcccagatgaatcaccagaaaggacccagtccctcattcggcgtgcagccatgtgggcctcacgattcggcacgcggcggaatgattccccaccctcagagcaggggaccgtttcctacttgccagctgaagtccgaattggacatgctagtaggtaagtgtcgcgaggagccactggagggcgacatgagttcaccaaatagcactgggattcaggatccactgctgggaatgttggatggccgcgaagacctcgagcgcgaagagaaaagagagcctgagagcgtgtacgagacggactgtcgctgggacgggtgctcacaggaattcgactcgcaagagcagctggtccaccacatcaatagtgagcatatccacggagagagaaaggaatttgtctgccattggggaggctgctcaagggagttgagaccattcaaggcgcagtatatgttggtggtccatatgcgtaggcacacaggagagaagccgcacaagtgcaccttcgagggatgtcggaaaagctacagcaggttggaaaatcttaaaacgcaccttcgttctcacacgggtgagaagccctacatgtgtgaacatgagggatgctcaaaggctttctcgaacgccagtgacagagctaagcaccagaaccgcactcattccaacgagaagccttatgtgtgcaaactgcctggatgtaccaaacgttatactgacccctccagcctgcgaaaacacgtgaaaaccgtccacgggccagatgctcatgttacaaagcgacacagaggcgatggccccctgcctcgagccccttccatctctaccgtggaaccgaaacgcgaaagagaaggcggacccatacgcgaggagagcagattgacagtgcccgagggagctatgaagccccagcctagccctggagctcagtctagctgctctagcgaccattctccagccggctctgcagcgaacactgattcaggcgtagagatgactggcaacgcaggagggtctaccgaggatttgagctctctggacgagggcccctgtatcgccgggaccgggctgtcaaccctgaggcgcctagaaaacctgcgattggatcaactccatcagcttcgacccatcgggacccgcggcctcaaattacctagtttgagtcacacagggacgaccgtctccagacgcgtcgggccacctgtgtctcttgagagaaggagctcctcgagcagtagtattagcagtgcctataccgtgtctcggcgtagctctctcgcttccccctttccccctggcagccctccggagaatggagcatctagcctgcccggcctgatgcccgcacagcattatctgctcagagcacgttatgccagcgcccgaggtggcgggaccagtccaaccgccgccagcagcttggatcgaatcggaggccttcccatgccgccctggaggagtcgggcggaatatcccggttacaaccctaacgccggcgttacgaggagggcaagcgaccctgcccaagcggcggaccgcccagcgccagctagagttcaaagattcaaatcgttggggtgtgtccacacaccaccaacggtggcgggcggtgggcagaactttgacccatatctgcctacttccgtctactctcctcagccaccatccataaccgaaaacgctgcaatggatgcaagaggcctgcaagaagaaccggaggtgggtacaagtatggtgggatctgggctaaacccctacatggattttccaccgaccgacaccctgggatatggcggtccggaaggagccgcggctgaaccctatggtgcgcggggtccgggctcccttccactaggacctggacctccaacgaactacggccctaatccatgcccacagcaggcttcctatcctgatcccacccaggagacttggggggaattccccagtcactctggcctgtatcctgggcctaaggcgttggggggaacatattctcaatgtcctcggttagagcactatggacaggtccaggtgaagcccgagcagggatgcccggttggaagtgattccaccggcctagccccctgcctgaatgcccatcctagtgagggaccaccccacccgcagccactattttcacactatccccagccctcgccaccccagtatctgcaatcagggccctatactcaacccccgccagactatctgccaagcgaaccaagaccgtgcttggatttcgactccccaacccactccacgggccaactgaaggcccagctggtttgtaactacgtgcagtcacaacaggagctcctttgggaaggcggcggtcgagaggacgcccctgctcaggagccatcctatcaatccccaaaatttcttggaggttctcaagtgtccccttcaagagccaaggccccagtgaacacctacggtccgggatttggacctaatctgcccaaccacaagagcggatcttatcccaccccttctccctgccatgaaaactttgttgtgggtgcaaaccgcgcctcacatcgtgctgctgcaccccctcgcctgttacctcctctgcctacatgctacggtcctttgaaggttggcggaaccaatcccagttgcggccacccggaagtgggccgtctgggaggcggacctgctctgtatccaccgcctgaggggcaggtgtgtaaccccctggatagcttggacctggacaatacgcagttagattttgtggccatcctggacgagccacaggggctgagccccccacctagccacgaccagcggggttctagcggccataccccccctcctagcggccctcccaatatggccgtcgggaacatgtctgtgctactccgcagtctcccaggggagacggaattcctcaattcttcggcctag

SEQ ID NO: 15323 - DNA, 528 bp, synthetic construct
  misc_feature 1..528: note = Description of Artificial Sequence: Synthetic coding sequence
  source 1..528: mol_type = other DNA
atgtcgcccagtctgggcttcccggctcagatgaaccaccagaagggccccagcccctccttcggtgtccagccctgcggtccccatgactctgctaggggcggtatgattccccatcctcagtccaggggcccatttcccacatgtcagctgaaatctgagctggacatgctggtgggtaagtgcagagaggagccgctagagggtgacatgtcctcacctaactccacgggcattcaggatccgctcctggggatgctggatggtagagaggacttagaacgggaagaaaaacgagaaccggagtccgtctatgagacggactgtcgatgggatgggtgttctcaggaatttgacagtcaggagcagttggttcaccacataaattccgagcacatccatggggagcggaaagagtttgtttgccactgggggggctgctccagggagttgcgtccgtttaaggctcagtatatgttggtggtgcacatgaggcggcataccggagagaagccacacaaatgctag

SEQ ID NO: 15324 - DNA, 2937 bp, synthetic construct
  misc_feature 1..2937: note = Description of Artificial Sequence: Synthetic coding sequence
  source 1..2937: mol_type = other DNA
atgagtccctctttaggatttccggcccagatgaaccaccagaaagggcctagccccagcttcggggtccaaccctgtgggccacatgattccgcgcggggtggcatgatcccacatcctcaatcacgggggcctttccctacttgtcaactgaaaagcgaattggatatgcttgtcggtaaatgccgcgaagagcccctggagggcgatatgagttcccctaactccactggtattcaggacccgcttctcggcatgctcgacggcagggaagacttggaaagggaagaaaagcgcgagcccgaatcggtgtatgagaccgactgtcggtgggatggatgctctcaagagtttgattctcaggagcagctggtacatcacataaattctgaacatatccatggcgagcggaaagagttcgtctgccattggggaggctgcagccgggagctcaggccctttaaagcgcaatacatgctcgttgtgcacatgaggcgccacacgggcgaaaaacctcacaagtgcactttcgaaggctgcagaaagtcttattcgcgcctggagaaccttaaaacccatcttagatcccacaccggggaaaagccctatatgtgcgagcatgagggttgtagtaaagctttcagtaacgctagcgatcgcgctaagcaccaaaaccgaactcattcgaacgagaagccctacgtgtgtaaactccccggatgtactaaaaggtacaccgacccttcctctctgcgcaagcacgttaagaccgtacacgggcccgacgcccacgtgactaagaggcaccgaggcgatggccctcttccccgtgctcccagtatatctacagtggagcctaaaagagaacgagagggcggccccatcagggaggagagtcggctcaccgtgccggaaggcgccatgaagccacagccgtcacccggagcacagtctagctgcagcagtgaccattcccctgcagggtctgcggctaacacagatagcggtgtagagatgacaggaaacgccggtggctccaccgaagatctaagtagtctggatgaagggccttgcatcgcgggcaccggactgtcgactttgagacgactagagaacctcagactggatcagctgcatcagctgagaccgatcgggactagggggctcaaactacctagcctttctcacacgggtacaaccgtcagtcgcagggtgggccctccggttagcctggaaaggcgatccagctctagtagtagcattagttccgcctacactgtttcacggcgctcttccctcgctagcccatttccacccggcagccctccagagaatggagccagctcccttccaggcctgatgcccgcccaacactacctcctccgggccagatatgctagtgcaagaggaggaggcacctcgccaaccgctgcgtcatctcttgatcgcattggcggtctgccaatgcctccctggaggtcaagagcagagtatccgggttacaatcctaacgccggcgttacacggagggccagcgatcccgctcaagcagcagacaggcccgccccggccagggttcaaagatttaagtccttgggctgcgtccacaccccaccgacagtagctggcgggggccaaaacttcgatccgtacctgccaacctctgtatattccccgcagcccccgtctatcacagagaatgctgctatggatgcaagaggacttcaagaggaaccggaggtgggcacatcaatggttggctccggcctgaatccttatatggactttccacctaccgataccctggggtacggaggtccagaaggcgccgcggcagagccttatggggctcgggggcctggctctctcccgttaggtcctggcccaccaactaattacggccctaatccctgcccccagcaggcttcataccccgatccgactcaagagacgtggggggagttcccctctcacagcggcctgtaccctggcccaaaggccttgggcgggacctattcacagtgtccaaggctggagcattatggacaggtccaagtaaagccagagcaaggttgtcccgtggggagcgacagcactggcctggctccgtgcttgaatgcgcaccctagcgaaggtcctccacacccacagccgctgttcagccactacccccagcccagtcctcctcagtatctccagtccggaccatacacccaacctcctcccgactatctcccctctgagcccagaccctgtttggactttgacagtccaacacacagtactggacaattaaaggctcagctggtttgcaactatgtccagtcacaacaagaactcctgtgggaaggaggtgggagagaagacgctcccgcccaggagcctagctaccaatcccccaagttcctcggagggtcccaagtttcaccctcccgggccaaggctccagtgaacacatacggtcctggcttcggtccgaatctccccaatcataaatcgggttcataccctacacccagtccttgtcacgaaaattttgtcgttggcgcaaatagagcctcacaccgcgccgccgccccgcctagactgttacctcctcttccgacctgttatggccctctcaaggttgggggcacaaatccatcctgcgggcatcctgaagtggggcgcctgggaggcggtccagcactctatccccctccagaaggtcaggtgtgcaatccactagacagcctggacttggacaatacacagctcgatttcgtggctatcctcgatgagcctcagggactttccccccctccatcacacgaccagcgggggtcttccggccataccccgcccccatcaggccctccgaacatggcagtcggaaacatgagtgtgctgttaagatccctacccggtgaaacggaattcctgaatagttccgcgtag

SEQ ID NO: 15325 - DNA, 135 bp, synthetic construct
  misc_feature 1..135: note = Description of Artificial Sequence: Synthetic coding sequence
  source 1..135: mol_type = other DNA
atgtccggaccgcattcgtacggaccagcccgcgaaaccaattcctgtacagagggtcccctgttttccagtccacgcagcgccgtcaaactgaccaagaaaagggctctctcgatatccccactgagcgactag

SEQ ID NO: 15326 - DNA, 3198 bp, synthetic construct
  misc_feature 1..3198: note = Description of Artificial Sequence: Synthetic coding sequence
  source 1..3198: mol_type = other DNA
atgtttaacagtatgacaccccctcccataagctcctatggcgagccttgctgccttcggcccctgccgtcccagggggcccccagcgtcggtaccgaagtgaagctgaccaagaagcgtgctctgagtatctccccactgtccgatgcatccctggatctccagactgtcatcagaaccagcccttccagccttgtcgcatttattaatagcagatgtacctctcctggcggaagttacggtcacctgtcaattggtacgatgagcccgagcctcgggttccccgcgcagatgaaccaccagaagggacccagcccttctttcggggtacagccctgtggtccacatgattccgcccgcgggggaatgatccctcacccacagagcagaggcccatttcccacctgccaactcaagagcgagctggacatgctggtaggcaaatgccgggaggagcccctggaaggcgacatgagttccccgaactccaccgggatacaagaccctctgctcggaatgctggacggtcgcgaggacctagaacgggaggagaagcgggaaccagagtctgtgtacgagaccgattgtcgatgggacggctgctcccaggaattcgactctcaggaacaacttgtgcaccacatcaattccgaacacatccacggagagaggaaggaattcgtgtgccactggggtggctgttcgcgcgagttaagaccgtttaaagcccagtatatgctcgtggtgcatatgaggcgccacaccggagagaaacctcacaaatgcaccttcgaaggctgcaggaaatcatattctagactcgagaacctgaaaacacacctcagaagccatactggcgaaaaaccatacatgtgtgaacacgagggctgcagtaaagcctttagtaatgccagcgacagggctaagcatcaaaataggacacattccaatgaaaagccgtatgtgtgcaagctgccagggtgcaccaagagatatactgacccgtctagcctgaggaagcacgtaaagactgtgcatggtccggatgcgcacgtgactaagagacacaggggggatggccccctacccagagctcccagcatcagcactgtggaacccaagagggaacgagaaggcggaccaatccgggaagagagtaggctaaccgtgccagaaggcgctatgaaaccacagccatctcctggcgctcagagttcatgcagctccgaccactcacccgcggggtctgcggccaatacggacagcggcgtggaaatgacaggcaatgccgggggttctacagaggacttgagcagcttggatgaggggccctgtatcgcgggaacgggtttgagtactctccgaaggctcgagaacctgagactggaccagttgcatcaactgaggcctattggaacccgtggcctcaaactgcccagcctgtcacacacaggcacgacagtctcccgacgcgtcgggcctcctgtgtccctcgagagacgatcaagctcatcctcatccatcagcagtgcttacactgtcagccgaaggtcgtctctggcgagccccttccccccaggttcgccgcctgagaatggcgcgtccagcctgccagggctcatgcccgcccagcattatctcctgagagctcggtatgcgtccgctcggggtgggggaacgtcgcctactgccgcaagcagcctggaccgcataggcggcctcccaatgcccccttggagatcaagagccgaataccctggctacaaccctaacgccggcgttactcgaagggccagtgaccccgcacaggccgcagacaggcccgcccccgccagagtccagcggttcaaaagtttaggttgcgtgcacaccccacctacagttgctggagggggacagaacttcgacccatacctgccgaccagtgtgtactctccccagcccccctctataaccgaaaacgctgcaatggatgccagaggccttcaggaggagcccgaggttgggactagtatggtcggaagcggcctgaatccttatatggattttccccccacggacaccttgggctacgggggaccagaaggagctgccgcagagccctatggcgccagaggccctggatcgttgcctctgggtcctgggccgcctacaaattacgggcccaatccgtgccctcaacaggccagttaccccgaccctacacaggagacttggggtgagttccctagccattcgggtctgtacccaggacccaaggcccttggagggacatactcacagtgcccacggttggagcactacggccaagtgcaggtgaagcccgagcagggttgtccggtgggcagcgacagtaccgggctggcaccctgcctaaatgctcatccttcagaagggccaccccaccctcagcctctcttctctcactatccccagccatcccctccccaatacctgcagagtggcccctatactcaaccccctccagattacctgccgagcgaaccacgcccttgtctggatttcgactcgccgacacatagcactgggcagctgaaggcacagctggtctgcaactatgtgcagagccagcaggagctgctatgggaggggggcggccgcgaggacgccccggcccaggaaccctcttaccagtctcctaagtttctgggcgggagccaggtgtcaccaagccgcgctaaggcacctgttaacacctatggtcctggcttcggccccaacctgcctaatcacaagagcggatcctacccaactccctcaccgtgccacgaaaacttcgtggtaggggccaaccgagcttcccatcgtgcagctgcgccccccaggctactgcccccgctgcctacgtgctatggaccactcaaggtcggagggactaaccccagttgtggtcacccagaagttgggagacttggcggcgggcccgccttgtatccaccacctgagggacaggtctgcaacccactggacagtttggacctcgataatacccagttggactttgtagcaatccttgatgaaccccagggattaagcccaccacctagccacgaccagaggggaagctctggccatacccctcccccaagtggtccccctaatatggctgtcgggaacatgtctgtgctactccggtctcttcccggagagaccgaattcttgaatagttcagcttag

SEQ ID NO: 15327 - DNA, 1548 bp, synthetic construct
  misc_feature 1..1548: note = Description of Artificial Sequence: Synthetic coding sequence
  source 1..1548: mol_type = other DNA
atggccgagcaggttgccctctccagaacccaggtgtgcggtatccttcgggaagaactgtttcagggcgatgcctttcaccagagcgacactcacatcttcattatcatgggagcttcgggagatctagccaagaagaagatctatcctacaatttggtggctcttcagggacggattgttgcccgagaatacattcatcgtcggatacgccagaagtcgtctcaccgtggcggatattcgcaaacagagtgagcctttttttaaggccacacctgaggaaaagttgaagctggaggatttctttgcgcgcaattcctacgtggccggccagtacgacgacgcagcctcctaccagcgactcaatagccacatgaacgcactacaccttggcagccaggccaaccgcctattctacttagcactgccacccacagtgtacgaggcagtcactaaaaatattcacgagagctgcatgtcccagattggttggaaccgaattatcgtggagaaacccttcggtagggatctacaaagttcagaccgcctgtctaaccacatatcaagcctgttcagagaggatcagatatatcgcatcgatcactatcttggaaaagagatggtacagaacctgatggttcttcgattcgctaatcggattttcggtcccatttggaaccgggataacatcgcatgcgtgattttgaccttcaaagagccctttggtaccgaggggagagggggttactttgatgagttcggcattattcgagatgtgatgcaaaatcacttgctgcagatgttgtgtttggtggccatggaaaaaccggcttcgactaatagcgatgatgtgagggatgagaaggttaaggtgctgaaatgtattagcgaggtacaagcgaacaacgtagttctgggtcagtatgtgggaaacccagatggcgaaggggaagccacaaagggttacttggatgaccccacagtgccccgtggcagtacaacagctacgttcgctgccgtcgtgctctatgtggaaaacgagcgatgggatggagtcccattcattctcaggtgtggcaaggcccttaatgagaggaaggcggaagtccggctgcaattccacgacgtggccggcgacatcttccaccagcaatgtaaacggaatgagttagtgatccgggtgcagcccaacgaggccgtgtacactaagatgatgacgaagaagcccgggatgttcttcaatcccgaagagtccgagctggatctcacgtatggcaaccggtacaagaatgtgaagctgccagacgcctatgagcggttgattctcgacgtgttctgcggatcacagatgcacttcgtgagatccgatgaactgagagaggcttggcggattttcactcctctcttacatcagatcgagctggagaaacccaaacctatcccctatatctatggtagtaggggccctacggaggccgatgaacttatgaagagagtggggttccagtatgaaggcacatataagtgggtgaacccccataagttgtag

SEQ ID NO: 15328 - DNA, 1686 bp, synthetic construct
  misc_feature 1..1686: note = Description of Artificial Sequence: Synthetic coding sequence
  source 1..1686: mol_type = other DNA
atggccgagcaggtagccctaagccgcacacaagtctgcgggatcttacgggaggaactgtttcagggggacgcttttcaccagagcgatacccatattttcatcataatgggcgcttccggcgaccttgcaaaaaaaaagatctatccaacaatatggtggctcttccgcgacggcctgttacccgagaatacattcattgtcggatatgcacggtcgcgcctgacggtggcggacattaggaagcagagcgagccgttcttcaaagccaccccagaagaaaaactcaagctggaggatttcttcgcccggaacagttacgtggcagggcagtacgatgacgctgcctcctaccagcgcctgaactctcacatgaatgccctgcacctcggatcacaggccaatagattgttctacctggcactgccacccactgtgtatgaagcagtaaccaagaacatccacgaaagctgtatgtcccagatcggctggaaccgaataatagtcgagaagccttttggtagggatctccaaagttccgataggttaagtaaccatatcagttctctgtttagagaggaccagatctatcggatcgaccactacttagggaaggaaatggtccagaacctaatggtgctcaggttcgctaacaggatcttcggaccaatctggaaccgggacaacatcgcctgcgtgattcttacatttaaggagccgttcggcactgagggccgagggggatatttcgatgagtttggaataattaggggacccgggcgtcagggcggatcggggagcgaatcatgttctctgtctttgggatccctggtctggggcccgcatgctctggagccaggagagcaggggggagaactgcgtcgcgccctggcctcctctgtgcctcgcgacgttatgcaaaatcacctcttacaaatgctctgcttagtcgctatggagaagcctgcttctactaactctgacgatgtcagggacgagaaagttaaggtacttaaatgcatctctgaggtgcaagccaacaacgtcgttctgggtcaatatgttggcaacccggacggagaaggcgaagctactaaagggtatctggacgatcctaccgtacctcgtgggagcacgactgccacatttgctgccgtggtgctgtacgtggagaatgagcgctgggatggcgtcccatttattctgcgctgcggtaaagcactgaacgaacgtaaagcggaggtcagactgcagttccatgacgtggccggagatattttccatcaacagtgtaaacggaatgagctagtcattcgggtgcaacccaacgaggccgtgtatactaaaatgatgaccaagaaacccggcatgttcttcaaccctgaagagagcgagctggacctgacatacggaaaccggtacaaaaatgtgaaactgcccgatgcatacgagagactgatccttgatgttttctgtgggtcgcaaatgcacttcgtgaggagcgatgagctgagggaggcctggaggatttttacccctctgttacatcagattgagctggaaaaacctaagccgattccttatatctacggtagcagaggacccaccgaggccgatgagctgatgaagcgcgtgggtttccagtatgaagggacttacaaatgggtgaatcctcataagttgtag

SEQ ID NO: 15329 - DNA, 1638 bp, synthetic construct
  misc_feature 1..1638: note = Description of Artificial Sequence: Synthetic coding sequence
  source 1..1638: mol_type = other DNA
atggggcgcaggggcagcgcccctggaaatggtagaaccctacggggctgtgaacggggaggccgacggcgaaggtccgcagattccgtgatggccgagcaggttgccctgtcacgcacccaggtgtgcggcattctacgagaggagttgtttcaaggagatgcctttcatcagtctgatacccacatctttattattatgggggcttctggcgacctcgcaaaaaagaaaatctacccaactatatggtggctgtttagagatgggctgctgcccgagaatacttttatagttggctacgcgagaagcaggctgaccgttgctgacattagaaagcagagcgagcccttcttcaaggcgacccccgaggaaaaactaaagttggaggacttttttgcccgcaattcttacgtggcaggacaatatgacgatgccgctagttatcagaggctgaattcccatatgaacgctctgcacctggggtctcaggccaatcgcttgttttacctggcactcccgccaaccgtctatgaggcagtgactaagaatatccacgaaagttgcatgagccagattggctggaatcggatcatagtcgaaaagcccttcggtcgggacctccagtcgtcagacaggctgtctaaccatatttcttctctattcagagaagaccagatctatcgcattgaccactacttaggaaaagagatggtccaaaatctgatggtgctgcgctttgctaataggatctttggtcctatatggaaccgggataacatagcctgtgtgattctgacgttcaaggaacccttcgggactgaggggcgtggcggctactttgacgagttcgggattattagggatgtcatgcagaaccacctgcttcagatgctgtgtctggtggcgatggagaaacccgccagtactaactcagacgacgtgagagatgaaaaagtaaaagtgctcaagtgtataagcgaagtgcaagcgaacaatgttgtgcttggtcaatatgtggggaatcccgatggggagggagaggctactaagggatacttggacgacccgacggtgcccagaggatcaaccactgcaactttcgctgctgtggttttgtacgttgaaaacgagcggtgggatggtgtcccgttcatcctcaggtgtggcaaggccctcaacgagaggaaagctgaggtgaggctacagttccatgacgtagcaggagatatcttccatcagcagtgcaaaaggaacgagttggtcatccgcgtgcagccaaatgaggcggtgtataccaagatgatgaccaaaaaaccaggcatgttctttaatcctgaggagtcagagctcgatcttacttatgggaatcggtacaagaatgtgaagctccctgacgcatatgagcggttgatattggatgttttctgtggcagccagatgcacttcgtccgaagtgatgagctgcgggaggcatggcggatttttactccactgcttcaccaaatcgagttggaaaagcccaagcccatcccctacatttacggcagcaggggccccacagaagccgatgagttgatgaagagggttggattccagtacgagggcacatataagtgggttaaccctcacaaactgtag

SEQ ID NO: 15330 - DNA, 1548 bp, synthetic construct
  misc_feature 1..1548: note = Description of Artificial Sequence: Synthetic coding sequence
  source 1..1548: mol_type = other DNA
atggctgagcaggttgcactgagtcgaactcaggtatgtgggatcctgagagaggaactgtttcagggagacgcttttcaccagtccgatactcacattttcattatcatgggtgccagtggcgatctggccaagaaaaaaatttaccccaccatatggtggcttttccgggacggactgctcccggaaaatacctttattgtcgggtacgcaagaagtagacttaccgtggctgacatccgcaagcagtccgaaccgttctttaaagctaccccagaagagaaactcaaactcgaggatttcttcgcaaggaacagctacgtggccggacaatatgatgacgccgcatcatatcagcgacttaactcccacatgaacgctctccatctcggttcacaagcgaatcgattgttttatttagcgttaccgcccacggtctatgaggcagtcactaaaaacatacacgagagctgcatgtcccagattgggtggaataggattattgtggagaagccctttggacgggatctgcagagctccgacaggctgtctaaccacatttcctcactgttccgtgaagatcaaatctacagaattgatcattatttgggaaaggagatggtgcaaaatctgatggtgctccgatttgccaaccggatcttcggaccaatatggaacagagacaacattgcttgcgtgatcttgacctttaaggaacccttcgggaccgaaggcagggggggctatttcgacgaattcggaatcattcgcgacgttatgcagaatcacctccttcagatgctttgcctggtggctatggaaaagcccgccagcaccaatagtgatgacgtgcgagatgagaaagtgaaggtcttgaaatgcatctctgaggtgcaggccaacaatgtggtgctgggccagtatgtcggaaatcccgatggcgagggagaagctacgaagggatatctggatgatcctaccgttccacgcgggtccaccactgcaacctttgccgccgtggtgctgtacgtggaaaacgagcgttgggatggcgttcccttcattctgcgctgtggcaaagctctaaacgagaggaaagcagaggtccgactgcagttccatgacgtggctggagatatcttccaccagcagtgtaagcgaaacgagttggttatccgagtacagccaaacgaagcggtgtacacaaaaatgatgacaaaaaagcccggcatgttctttaaccctgaagagagcgagctggacctgacttacggaaacagatataaaaacgtaaagctccctgacgcctacgagaggttgatccttgatgttttctgcggcagtcagatgcactttgtccgcagcgacgaactgcgtgaggcatggaggattttcacacccctcctacaccagatcgaactggagaagccgaagcctatcccctacatctacggctctaggggacctaccgaagcagatgagctgatgaaacgggtgggcttccagtatgaggggacttacaagtgggttaacccccataagctttag

SEQ ID NO: 15331 - DNA, 771 bp, synthetic construct
  misc_feature 1..771: note = Description of Artificial Sequence: Synthetic coding sequence
  source 1..771: mol_type = other DNA
atggctgaacaggtcgctctatcgagaactcaagtgtgcggaatcctgcgagaggagctttttcagggagatgctttccatcaatccgacacccacatttttattattatgggagcatccggtgacctggctaaaaaaaagatttatcctacaatctggtggctgtttagagacgggttgttacccgaaaacaccttcatcgtcggttatgcgaggtctcgcctgacggttgcggatatacgcaaacaaagtgagccttttttcaaagcaactccggaggagaagctaaagttagaggatttcttcgccagaaattcctacgtcgccggccagtatgatgatgcagccagctatcagagactcaattcccacatgaatgctctccaccttggaagtcaagcaaatcggctcttctacctggcgctgccgcctactgtttatgaagcagtgactaaaaatatccacgagagttgcatgagccaaatagggtggaaccgaattatagtcgaaaagccctttggaagagacctgcagtctagcgacagactgtcaaatcatattagctccctctttagggaggatcagatttaccgtattgaccactacctgggaaaagagatggtgcaaaatcttatggtgcttagatttgcgaacaggattttcggacctatctggaatcgggataacatcgcctgtgttatacttactttcaaggagccctttggtactgaaggccgtggcggttacttcgacgagttcggcatcatctag

SEQ ID NO: 15332 - DNA, 681 bp, synthetic construct
  misc_feature 1..681: note = Description of Artificial Sequence: Synthetic coding sequence
  source 1..681: mol_type = other DNA
  modified_base 217: mod_base = OTHER; note = uracil
atggcccgcttgctgcaggcatcttgtcttctgtctttactcctcgcagggtttgtgagccagagtcgcggtcaagagaaatcgaaaatggactgccatggcgggatatctggcaccatttatgagtatggagcgctgacgattgacggagaggaatacatacctttcaaacaatacgcagggaaatacgtgctctttgtcaacgtggcatcctactgaggtctcaccgggcagtacattgagctcaacgccctacaagaggagcttgctcctttcggattggtgatactgggctttccatgtaatcaattcggcaagcaggagccgggggaaaacagcgagatcctacccacgctgaagtacgttcgccctggcgggggcttcgtgcccaacttccaactgtttgagaagggggatgtgaatggagaaaaggagcaaaagttctacacatttctgaagaattcttgcccaccgacatcagaattactgggaacttcagatcggctgttttgggaaccaatgaaagtacacgacattagatggaactttgagaagttcctagtgggccctgacggcattcccatcatgcgatggcatcaccgcacaacggtgtccaatgtcaagatggacatcctgagctacatgcggcgccaggctgccttaggcgtgaaacgaaagtag

SEQ ID NO: 15333 - DNA, 219 bp, synthetic construct
  misc_feature 1..219: note = Description of Artificial Sequence: Synthetic coding sequence
  source 1..219: mol_type = other DNA
atggctagactgctgcaagcctcatgtttgctcagcttgctcctggctggattcgtcagtcaaagccgcggccaggaaaagtctaaaatggattgccacggtggcatttctggtacaatctacgaatatggcgcactcacaattgatggggaggaatatatacctttcaagcagtatgccggtaagtatgtgctgttcgtgaacgtggcatcatactag

SEQ ID NO: 15334 - DNA, 633 bp, synthetic construct
  misc_feature 1..633: note = Description of Artificial Sequence: Synthetic coding sequence
  source 1..633: mol_type = other DNA
atgcctccctatactgttgtgtactttccagtccggggcaggtgtgctgccctgaggatgctattagccgaccaaggccaatcttggaaggaggaggtcgtcactgtggagacttggcaggagggaagcctgaaggcttcctgcctgtacggccagcttccaaagtttcaggacggtgacctgaccctgtaccaatctaacactatcctccggcatctcggtagaacacttggactgtacggtaaggatcagcaggaggccgccctggtagatatggtgaatgacggtgttgaggacctccggtgtaaatatatatccttaatctatacaaactatgaagccggtaaggacgattatgtgaaggccctccctgggcagttgaaaccattcgaaactttgctctcccagaaccagggaggtaagactttcatagtgggcgaccagatttcttttgctgactataatctactcgatttgcttctcatccacgaggtgctggctccaggctgtctcgatgcttttcctctgctcagtgcttacgttggccggctcagtgccaggccaaagctgaaggcattccttgcgtctcccgaatacgttaacttacctattaatggaaatggaaagcagtag

SEQ ID NO: 15335 - DNA, 2184 bp, synthetic construct
  misc_feature 1..2184: note = Description of Artificial Sequence: Synthetic coding sequence
  source 1..2184: mol_type = other DNA
atggccttccagaaagcggtcaagggaaccattcttgtgggcgggggggctctcgctaccgtgcttggcctgagccaattcgcccactacagaaggaagcaaatgaacttagcctacgtcaaggccgctgattgtatcagtgagccggtgaatcgcgaaccacccagtagggaggcacaactactgaccctacagaacacatcagaatttgacatactagttataggcggaggcgcaacagggagcggatgcgccctcgacgctgtgacccgcggattaaaaaccgctcttgtcgaaagggacgatttctccagtggtacttccagtcggtcaaccaaactgatccacgggggtgtccggtatctccaaaaggctatcatgaagctggacattgaacagtataggatggtgaaggaggcccttcacgaaagagcgaacctgttggagattgccccccacctttctgctcccctgcctattatgttgcctgtttacaaatggtggcagctcccatactactgggtggggattaaattgtacgatctggtcgcgggctctaactgcctgaagtcaagttatgttctctcgaaaagcagggcccttgagcatttcccaatgctgcagaaagacaaactggtgggcgccatcgtgtattatgacggacaacacaatgacgcacgaatgaacctcgctattgccttgacggccgcaaggtacggagcagccactgcaaattacatggaggttgtcagtttactcaagaagaccgatccacagacagggaaagtaagagtctcaggtgccagatgcaaggacgtcttgactggacaggaattcgacgtgcgcgctaagtgcgtaattaacgccactggaccgttcaccgatagcgtcaggaagatggacgacaaggacgccgctgcgatctgtcagcctagcgccggcgtacatatagtaatgcccggctattactcccctgagtcaatgggacttctcgatccagcaacctcagatgggcgggtcatcttttttctcccctggcagaaaatgaccattgctggcacgacagatacccccactgatgtgacccatcacccgattccatccgaggaagatatcaatttcatactgaatgaggtgcgcaattatttgtcttgcgatgtcgaagtgcggcggggggatgtacttgctgcttggtcaggtatacggcctctggtcacggatccaaagtctgcagatacccagtccatcagccgtaaccacgtcgttgatattagcgaaagtggtttgatcactatcgcgggggggaagtggaccacgtacaggagcatggcagaggacaccataaatgccgcagtgaagacacataatctgaaggccgggccatcgaggacggtcggcctgttcctccagggcggcaaagactggtctccgacactgtatattcgcttagtgcaagactatggccttgagtcggaggttgctcagcatctggcggccacatatggtgacaaggcatttgaagtggccaagatggctagtgtgaccggcaaaagatggccgatagttggtgtgcggctcgtgtcggaatttccttatatagaagccgaagttaagtacggaatcaaggaatacgcctgcaccgctgtggatatgattagtcggcgtaccaggttagccttcctcaacgtgcaggcagcagaggaggcccttccccggatagtagagctgatgggcagagaactaaactgggacgattataaaaaacaggagcagttggaaaccgcccggaaattcctctactatgagatgggctataagagccggtccgaacagctgacagataggagtgagataagcctgctgccaagcgatatagaccggtacaaaaaacggttccacaaattcgacgctgatcagaaagggtttattaccatcgttgacgttcagcgcgtcctggaaagtattaacgttcagatggacgagaacacgcttcatgaaatcctcaacgaggttgatctgaacaagaacgggcaggtggagctgaatgagtttcttcagctgatgtccgccatccagaaggggagggtttccggaagccgtctggccattctgatgaaaacagccgaagaaaacctggatcggagggtgcccattcccgtggatagatcctgcggtgggctatag

SEQ ID NO: 15336 - DNA, 1503 bp, synthetic construct
  misc_feature 1..1503: note = Description of Artificial Sequence: Synthetic coding sequence
  source 1..1503: mol_type = other DNA
atgaacttggccatagctctcaccgcagccagatacggagcagctacagccaattacatggaggttgtctctctgctgaaaaaaactgacccgcaaacagggaaagttagggtgtctggggcccggtgtaaggacgtgttaaccggtcaggagttcgatgtgagggccaagtgcgtgatcaatgccactggaccatttactgactccgtacgtaaaatggatgacaaggacgctgctgccatatgtcagcctagtgccggagtccacatcgtaatgcccggctactactctcccgagtccatgggcctgctggacccagctacttccgacggcagagtgattttcttcctgccctggcagaaaatgactattgctgggacgaccgatacaccgactgatgtgacccaccacccaatcccatcagaggaggatattaatttcatcttgaatgaagtgcggaattatttgtcatgcgacgtagaagtgcgaagaggggatgttctggctgcatggagcggcattcgcccgctggttaccgaccccaagtcagccgacacacagagcatctctcgtaaccatgtggttgacatttccgaatcaggactgatcaccattgccggtgggaagtggacgacatatcgctctatggccgaggataccattaacgcagctgtgaagactcataatctcaaggccgggcctagtcggacggtcggacttttcctccaaggcggcaaggactggagccccactctatacatccgtctcgtgcaggattatggcctggagtccgaagttgctcaacatctcgccgccacctacggggacaaagccttcgaggttgctaaaatggcctctgttaccggcaaaaggtggcccatcgtgggcgtgagactggtgagcgagtttccttacattgaggcggaggtgaaatacggcattaaagaatacgcctgcacagccgtggatatgatttcccggagaaccagactcgccttcctgaacgtgcaagccgccgaagaggcgttgccccggatcgtggagttaatgggaagggaacttaattgggatgactacaagaagcaggaacagctagagactgctcgcaagtttttgtattacgaaatggggtacaagagccgatccgagcagcttaccgaccgctccgaaattagcctgcttccctctgacatcgacagatacaagaaacgattccacaaattcgacgcggatcagaaggggtttataactattgtcgacgtacagcgcgtattagagtctataaacgtgcaaatggatgagaatacgcttcatgaaattctgaatgaggtggacctgaacaagaatggccaagtcgagctgaatgagttcttgcagctcatgagcgcaatccaaaagggacgagtcagcggaagcagattggctatcctcatgaaaaccgccgaagaaaatctcgaccgccgggtccctatcccggtcgacagatcgtgcggcggtctttag

SEQ ID NO: 15337 - DNA, 2184 bp, synthetic construct
  misc_feature 1..2184: note = Description of Artificial Sequence: Synthetic coding sequence
  source 1..2184: mol_type = other DNA
atggcttttcaaaaggctgtgaagggaactatcctcgtggggggtggagccctggctacggtactgggactttctcagttcgcccactatagaagaaagcagatgaatctggcttacgttaaggccgcagattgtatcagtgagcctgtgaacagagaacccccgtcacgggaggcacaactactgaccctccagaataccagtgagtttgatattctagtcattggaggtggtgcgactgggtcaggctgtgccctggacgctgtgactagagggctcaagacagcactggtggagcgagatgacttttcttccgggaccagcagtagatccactaagctgatccacggaggagtacgctacctgcagaaagccatcatgaagctcgacattgagcagtataggatggtcaaggaggcgctgcatgaacgcgccaacctgctcgaaattgctccacacttgagcgctccactccctatcatgctccccgtgtacaagtggtggcaattgccttattactgggtggggatcaagctttacgacctagtggctggatccaattgcctcaagagttcatacgtacttagcaagagcagagcgttagagcatttccccatgttacagaaggataaactggtcggggccatcgtgtactatgatgggcagcataatgacgctcgaatgaatctggcgatagcactgaccgcagcaaggtatggcgcagccaccgcgaactatatggaagtggtctcactgctgaagaaaacggacccgcaaactggcaaggtcagagtgtcaggagcgcgctgcaaggacgtcctgactggccaggaattcgacgtgcgggccaagtgcgtcatcaatgccactgggcccttcacagactctgtgagaaaaatggacgataaggacgctgccgctatttgtcagccctcggcaggggtccacatcgttatgcccgggtactatagccccgaatcaatgggactgttggatccggcgacctcagatggcagagttatctttttcctgccgtggcagaagatgacaattgcaggtactacagacacccctacagacgtcacgcatcatccaataccctctgaagaggacatcaatttcatactgaatgaggtgcgcaactatttgtcctgtgacgtggaggttagaagaggagatgtactggctgcctggagcgggattcgcccgctggtcaccgacccaaagtcagctgatacacagagtattagcagaaatcacgtggtggacatcagtgagagcgggctgatcaccatagcgggcggaaaatggaccacataccgctcaatggctgaggataccatcaacgccgctgtcaaaacccacaatctcaaggccggcccctctaggacagttggactgtttctgcaaggtggcaaggactggtctcctactctgtatattagactggtgcaggactacgggctggagtctgaggtggcgcaacacctggccgcaacatatggagacaaggctttcgaagtggccaaaatggctagcgtgacgggcaaaaggtggcctatagtcggtgtgcgccttgtttcagaattcccctatattgaagccgaggttaaatacgggattaaggagtacgcttgcacagcggtcgacatgataagccgtcggaccaggctggcctttttaaatgttcaagccgccgaggaggcactgccacgaatcgtggaactgatgggccgggaattgaactgggacgattacaaaaagcaagagcaactggagacggctagaaaattcttatactacgagatgggttataagtctaggagcgaacagctcacagatcgatctgagattagcctgctgccttcagacatcgataggtataagaagagatttcataagtttgatgcggaccagaagggtttcatcaccatcgtcgatgtgcaacgagttctggagtccataaacgtgcagatggacgaaaatacactgcacgagatcctcaacgaagttgacctgaataaaaacggacaggttgaactcaatgagttcctgcagctgatgagcgctatccagaaaggacgtgtatccggctccagactcgcgatcctaatgaaaactgccgaggaaaatctcgatcggagagtgcctatccctgtggacagatcttgcgggggcctctag

SEQ ID NO: 15338 - DNA, 2184 bp, synthetic construct
  misc_feature 1..2184: note = Description of Artificial Sequence: Synthetic coding sequence
  source 1..2184: mol_type = other DNA
atggctttccaaaaagccgtcaagggaactatcctcgtgggcggtggcgcactggcgacagtgcttggcctgtcacagtttgcacattacaggcggaagcagatgaacctggcgtatgttaaggccgcagattgcatcagcgagcccgtgaaccgggagccacctagcagagaggcacagttactcacattgcagaatacatccgagtttgatatccttgtgatcggaggaggagccaccggcagcggctgtgcgctcgatgctgtgactaggggactgaaaacagctctcgtggagagggatgacttctcatcaggaacttcatctagatctactaaacttatacacggtggtgtcagatatcttcaaaaagctattatgaaactggatattgagcagtataggatggtgaaagaggctctgcatgaacgggctaacttactggaaattgccccacacctctcagcaccactgcccattatgctgcctgtgtacaaatggtggcagctgccctactattgggtaggaattaagttgtacgatctggtagctgggagcaactgtttgaagtcctcttatgtgctgagtaaatcacgcgccctggaacacttcccaatgctgcagaaggacaaattggtaggagctatcgtgtactacgacggacagcacaacgatgcccggatgaaccttgctattgctttaacagcggccaggtacggcgctgcgaccgccaactatatggaggtcgtgtctctgctgaaaaagaccgaccctcaaaccggcaaggttagggtgtctggagccagatgcaaggatgtgctgaccggtcaagaatttgatgttcgggccaagtgtgttatcaacgcaaccggcccgttcacagacagtgtgcggaaaatggacgataaggatgccgccgccatatgtcagccctcggccggggttcatatagtgatgcccggctattactccccagaaagtatgggcctgcttgaccctgccaccagcgacggcagggtgatcttttttctgccttggcagaagatgacaattgctgggactaccgatacacccacagatgtcacccaccatcccattccctctgaggaagacataaattttatactcaatgaggtacggaattacctgtcatgcgatgttgaagttcggaggggagatgtgctagctgcatggtcagggatcagacctttagtaaccgatcccaaaagcgcagacacccaatctatcagccggaatcatgtcgtcgatatcagcgaatccgggctcatcacgattgccggtggaaaatggacaacataccggagcatggccgaggacactattaatgccgctgtgaagacccacaacctgaaagccggaccttctcgtacagtggggttatttctgcagggcggtaaagactggtcacctactctctatatacggctcgtacaggactatggcctcgagtccgaggttgctcagcatctggctgccacctacggggacaaggctttcgaagtagctaagatggcctctgtgacaggtaagagatggccaatagtgggcgtgagattagtcagcgaattcccctacatagaagccgaggtgaagtacggcatcaaggagtacgcctgcaccgcggtggatatgatctcccgccgtacccggctggcttttttgaacgttcaggccgccgaggaagccctgccacggatcgtggagctcatgggccgggaactcaactgggatgattataaaaaacaggaacagctggagacagcacggaagttcctatactatgagatgggatacaagtcgcgctccgaacagttaaccgataggtcggaaattagtcttctgccctccgatatagacagatataaaaaaagatttcacaagttcgacgctgaccagaaggggtttataaccatagtggacgttcaacgtgtgctggaatccataaatgttcagatggacgagaacaccctgcatgagattctgaatgaggtcgacttgaacaagaacgggcaggtggagcttaatgagttcctccaactcatgtccgcgattcagaaaggcagggtgagtggctctcggttggccatcctaatgaaaaccgcggaagagaatctcgatcgcagggtccccatccctgttgatagaagttgcggggggctttag

SEQ ID NO: 15339 - DNA, 330 bp, synthetic construct
  misc_feature 1..330: note = Description of Artificial Sequence: Synthetic coding sequence
  source 1..330: mol_type = other DNA
atggcctttcaaaaagcagttaagggcactatccttgtcggcggcggcgcgcttgccaccgtactcggactatcccaatttgcacattatcgacggaagcagatgaaccttgcatacgttaaagccgccgattgcatcagcgaaccggtcaaccgggagccccccagtcgggaagcgcagttgctgaccctgcagaatacctcggaattcgacatcctggtcataggcgggggtgcaacgggaagtgggtgcgctcttgatgcggtaacgcggggtctcaaaacagcactggttgagcgcgacgatttttctagcggtaccagctcttag

SEQ ID NO: 15340 - DNA, 2184 bp, synthetic construct
  misc_feature 1..2184: note = Description of Artificial Sequence: Synthetic coding sequence
  source 1..2184: mol_type = other DNA
atggctttccaaaaagccgtgaagggaaccattttggtgggtgggggggcccttgctactgtactcggactgagccaattcgcacactaccggcgcaagcaaatgaacctggcttatgtcaaggccgctgactgtatcagtgagcccgtaaatcgggaaccaccatcgcgggaggcacaacttctcacactgcagaatacctccgaattcgatatactggtgatcggcggcggtgctacaggctcgggatgtgccctggacgccgttaccaggggcttaaagacagcgctcgtggagagggacgatttttcctctggaacctcgtccagatcgaccaaactgattcacggaggagtgcgatacttacagaaagcaatcatgaagctggatattgaacagtaccggatggtcaaagaggctctccacgagcgcgctaacctgcttgagatagcccctcacttgagtgctcctctgcccattatgctgccggtttacaagtggtggcagctaccctactattgggtcggtatcaaactgtatgatctcgtggccgggagcaactgtctgaagtcctcctacgtgctgtcaaaatcccgggccttggaacatttccctatgcttcagaaggataagttggtgggggcaatagtttactacgatggacagcacaacgacgctcgcatgaatctggcgatcgcccttacggccgcgcgatacggggccgccaccgccaactacatggaggtggtctcactcctgaaaaagactgatccccagaccggcaaggtcagggtctcaggtgcccgctgtaaagacgtgctaacaggccaagagttcgatgtccgtgcaaaatgtgtcatcaacgccactggccctttcaccgacagcgtgaggaagatggacgataaggatgccgcagcaatttgtcagcccagtgctggagttcatattgtgatgcctggctattacagccctgaaagcatgggcctgttagaccccgcaacaagtgatggacgggtcatttttttcctcccatggcagaaaatgaccatagccgggacgactgatacacccactgacgtgacccaccatccaatcccatctgaggaggatattaatttcattctcaatgaggttcggaactacttaagctgtgatgtggaggtccgtcgcggcgacgtcctggcagcctggtcgggaattcggccactggtaacagatccaaaaagcgccgacacacagtccataagccgcaaccacgtcgttgacattagtgaatccggtctcataaccatcgcggggggaaagtggactacctatagatctatggctgaggatactatcaacgcggctgtcaagacacacaacttaaaggctggcccctccaggactgtgggcctctttctccaaggcggaaaggactggtccccgaccctctatattaggctggttcaggactatggtcttgaaagcgaagtggcgcagcatttagccgctacctacggagacaaagccttcgaggtggctaagatggcctctgtcaccggaaaacgatggcccattgttggcgtgcgtctggtgtcagaattcccttacatagaggctgaagtcaagtatggcatcaaggaatacgcctgcactgccgtggacatgattagcagacgcacacggctcgccttcctgaatgtgcaggctgctgaggaggcacttcccaggatagttgaattaatggggcgagagcttaactgggacgattacaagaaacaggagcagctggagactgcccgcaaatttctgtattatgaaatgggttataaaagcaggtcggagcagctgacagatcgatccgagatctcactcttgccgtccgatatagataggtacaagaaaaggtttcacaaatttgatgcggaccagaaaggcttcatcactattgtggatgtccagagagtgttggagagtattaacgtccagatggatgagaatacattacatgaaattttgaacgaggtcgacttaaacaagaatggacaagttgagctcaacgaattcctgcagcttatgtctgccattcaaaaaggcagagtatcaggctctcgattggccattcttatgaagactgcagaagaaaatttggaccggcgcgttccaatcccagtcgaccgaagttgtggaggattatag

SEQ ID NO: 15341 - DNA, 1140 bp, synthetic construct
  misc_feature 1..1140: note = Description of Artificial Sequence: Synthetic coding sequence
  source 1..1140: mol_type = other DNA
atggcatttcaaaaggccgtcaaggggaccatcctggtcggagggggagcattggccacagttcttggtctcagtcagtttgcacactaccggcgaaaacaaatgaatcttgcctatgtgaaggccgccgattgcatcagcgaaccagtgaaccgtgaacccccctcccgggaagcccagctcttgactttacaaaacacatctgagtttgatatcctggtaataggcggcggggccactggctcgggctgtgcgctcgatgctgttaccagaggccttaaaacggccctagttgagagagacgacttttccagcggcacatctagcaggagcacaaaactgattcacgggggagttagatatttacagaaggcaatcatgaagctagacatcgagcaataccggatggtgaaggaggctctgcacgagagagccaatcttctagaaattgcacctcatctttccgcacccctgccaattatgctgccagtctacaagtggtggcagcttccctactactgggtggggattaagctgtatgacttagtggctggttcaaactgtcttaagtcaagttacgtgctgagcaagagtagggcccttgagcactttcccatgctgcagaaggataagttagtgggagcaatagtctactacgatggacagcacaatgatgcacggatgaatttggccatcgctctgaccgctgccagatacggtgccgccaccgcgaactacatggaggtggtttccctcttgaaaaagaccgaccctcagactggtaaagtcagagtgtctggggccagatgtaaagatgtattgactggtcaggagtttgacgtcagggcaaaatgcgtgattaacgccaccgggccttttaccgactctgtccgtaagatggacgacaaggacgccgccgcgatctgtcagccatctgccggggtccatatcgtgatgcccggttattattcacctgaaagcatgggcctactggatccagccacctccgacggtcgcgttatctttttccttccctggcagaagatgaccatagctggtacaacggatacccctaccgatgttactcatcatcccatcccatctgaagaggatattaactttatcttgaatgaggtctag

SEQ ID NO: 15342 - DNA, 1263 bp, synthetic construct
  misc_feature 1..1263: note = Description of Artificial Sequence: Synthetic coding sequence
  source 1..1263: mol_type = other DNA
atgtccggtaggccccgcacgacgtcttttgccgagagctgcaagccagtgcagcagcctagcgcttttggctccatgaaggtgtccagggataaagacggctcaaaagtgacaacagtcgttgccactcccggtcagggccctgaccgcccacaggaagtttcttacacagatactaaagtcattggcaatggctcctttggggtcgtctaccaagctaaactgtgtgattccggggagctggtggctatcaaaaaagtgttgcaggataagaggtttaagaacagagagctgcaaatcatgcggaaattagaccattgcaatatcgtgcgtctgcgttacttcttctactctagcggtgagaagaaggacgaggtgtacctgaatttggtactcgactacgtacctgaaaccgtgtaccgagtggcccggcactatagccgggccaaacagaccctacctgtaatatacgttaagctgtacatgtatcagctgttccgtagtttagcatacattcattcttttgggatttgccatcgcgatattaagccccaaaatctactgctcgaccccgataccgctgtgctcaagctgtgcgattttggctccgctaaacagctggtgcgtggcgagcccaacgtctcatatatatgcagtaggtactatcgggccccagaactcatcttcggcgccaccgactatactagctccattgacgtgtggagtgccgggtgcgttctggccgagctattgctggggcagcctatcttcccgggagactctggggtcgaccaactggtggagatcattaaagtgctgggtacgccaaccagggagcagatcagagagatgaaccctaactatacggaattcaaatttccccaaatcaaggcccacccatggactaaagtgtttcggccaagaactccccctgaggccattgctttgtgcagtcgactgctagaatacaccccaaccgccaggcttacccccctggaggcctgcgcacattcattctttgacgagttgagggaccccaacgtcaagttgccgaacggacgcgatacccccgccctttttaacttcacgacgcaggagctgtcctcgaatccccccctggcgactatcctgatcccaccccacgcacgtattcaagctgccgcctctacacctaccaatgcaacggccgccagcgatgcaaacaccggagaccgaggacagaccaacaacgcagcttcagcaagtgcaagcaactctacctag

SEQ ID NO: 15343 - DNA, 1302 bp, synthetic construct
  misc_feature 1..1302: note = Description of Artificial Sequence: Synthetic coding sequence
  source 1..1302: mol_type = other DNA
atgtccggtcgaccccgaacaacgagcttcgccgagtcatgcaagccagtccagcagccttctgcattcgggtcaatgaaggtctccagagataaagacggaagcaaagttaccaccgtcgtggccaccccaggacagggtcccgataggcctcaggaggtcagctacacagacaccaaggtgatcggcaacggttcctttggggtggtgtaccaggcgaagctgtgtgatagcggcgagctagttgccattaagaaagtcctgcaggataagcgcttcaagaaccgggagttgcaaattatgcggaagctggatcactgtaatatcgttagactcagatattttttctacagtagcggtgagaaaaaagacgaggtttatctgaatctggtgttggattacgtgcctgagaccgtgtatcgtgtggcacgccactactctagagccaaacagacgttaccggttatttatgttaaactttacatgtaccagcttttcagaagcctggcctacattcactcgtttggaatatgccaccgcgacatcaagccccagaacttattgttggatcccgacaccgccgtattaaagttgtgtgatttcggaagcgcgaaacagcttgtgcgcggggaaccaaatgtaagttacatctgctctaggtactatcgggcaccggaactaatatttggagcaactgactacacctcctccatcgatgtatggagcgctggctgcgtgctcgccgagttgttgctgggacagcctatcttccccggagattctggtgtcgatcaactggtcgagataatcaaagtattggggacgccaacacgagaacagatccgcgagatgaatccaaattacactgagttcaaattcccgcagataaaggcccacccttggaccaaagattcatctggcacaggccattttacttccggcgtgagggttttcagacctaggacacctcctgaggccattgccctgtgtagcaggttattggagtacacacccacagccagactgacacccctcgaggcgtgcgcccattccttctttgacgagctcagagatccaaacgtgaagctccccaatgggagagatacgccggccctgtttaattttacaacacaggagttatcatccaatccgcctctcgccaccatactgataccacctcacgcaagaattcaggcagctgcatccaccccaactaacgcaacagccgcaagtgatgccaatacaggcgataggggccagacaaataatgcagccagcgcatctgctagcaatagcacttag

SEQ ID NO: 15344 - DNA, 315 bp, synthetic construct
  misc_feature 1..315: note = Description of Artificial Sequence: Synthetic coding sequence
  source 1..315: mol_type = other DNA
atgaatcccaattatactgagttcaaatttccacagatcaaagcacatccttggaccaaggtcttcaggccacgtacccccccagaggctatcgccctatgctccagattgctggaatatactcctaccgccaggctcactccactcgaggcctgcgcccactccttcttcgacgaactgcgggacccaaacgtcaagctgcccaatggcagggacacccctgcgttgtttaactttactacacaggatgcaaatactggagacagggggcagacgaacaatgccgcctcagcttccgcgagcaatagtacctag

SEQ ID NO: 15345 - DNA, 837 bp, synthetic construct
  misc_feature 1..837: note = Description of Artificial Sequence: Synthetic coding sequence
  source 1..837: mol_type = other DNA
atggaagaaaacatggaagagggacaaacacaaaaggggtgcttcgagtgttgtattaaatgcctcggagggatcccatacgcgagtctgattgctaccatccttttatacgccggggtagccttattctgcgggtgcggacacgaggccttgtccggaacggtaaatatcctccagacatatttcgaaatggcccggaccgccggtgacacactcgacgtgtttactatgatagacatatttaagtacgttatatatggcatagccgcagctttcttcgtgtacggcattctgctgatggtggagggattctttaccacaggtgccattaaggatttgtacggagacttcaagatcaccacctgcgggcggtgcgtctccgcttggtttattatgctgacctacttatttatgcttgcctggctcggagttacagctttcacgtccttgccagtttatatgtatttcaacctctggaccatatgcaggaacactactctggttgagggcgccaatctgtgtctggatctcagacaattcggcattgtgactataggagaagagaagaagatctgtaccgtgagtgaaaactttctaagaatgtgtgagtccaccgaacttaacatgacgtttcacctgttcattgtagcgctcgctggagctggtgctgccgtgatcgccatggttcactacctgatggtgctttctgcaaattgggcctacgttaaggatgcctgtcgaatgcagaagtatgaagacattaaaagtaaggaggaacaagagcttcacgatattcactccaccagatccaaagagcggctgaatgcctacacttag

SEQ ID NO: 15346 - DNA, 837 bp, synthetic construct
  misc_feature 1..837: note = Description of Artificial Sequence: Synthetic coding sequence
  source 1..837: mol_type = other DNA
atggaggaaaacatggaagagggacagacccagaagggatgttttgagtgttgcattaagtgtttgggcggcatcccatatgcctccctgatcgccaccatactcttgtacgccggcgtggccctattctgcggatgtgggcatgaggcgttatcgggtaccgtgaatatcctgcagacctacttcgagatggcgcgtaccgctggagacacgttggacgttttcactatgattgacatcttcaagtacgtgatctatgggatcgcagccgctttttttgtttatggcattttactcatggtcgagggattttttactaccggtgccatcaaggacctttatggtgactttaagatcacaacatgcgggcgctgcgtcagtgcttggttcatcatgctgacctacctctttatgctggcctggttaggcgttacagcattcacctccctgcccgtatacatgtacttcaatttgtggacaatttgccggaataccactttagttgaaggcgctaatttgtgtctggatctgaggcaatttggaatagtgacaataggggaagagaagaagatttgcacggtctccgagaactttctgaggatgtgtgaaagtaccgaactgaacatgacttttcacctttttattgtggcacttgccggcgcgggagcagctgtgattgctatggtccactatctgatggtgttgtccgctaactgggcctacgtcaaggacgcctgccgcatgcagaaatatgaagacatcaagtccaaggaagagcaagagctgcatgatattcattcgacgcgctccaaggagcgactgaacgcctacacttag

SEQ ID NO: 15347 - DNA, 33 bp, synthetic construct
  misc_feature 1..33: note = Description of Artificial Sequence: Synthetic coding sequence
  source 1..33: mol_type = other DNA
atggaagagaacatggaggagggccagacatag

SEQ ID NO: 15348 - DNA, 804 bp, synthetic construct
  misc_feature 1..804: note = Description of Artificial Sequence: Synthetic coding sequence
  source 1..804: mol_type = other DNA
atggggtgcttcgagtgctgtattaagtgccttgggggtatcccctacgcttctttgatcgctacaatccttctgtacgctggggtggcgctcttctgcggctgtggacatgaagccctgtccggaaccgtcaatattctccagacctacttcgaaatggctcgcactgccggcgacacactggacgtctttaccatgatcgacatcttcaaatacgtaatctacgggattgctgctgcctttttcgtgtatggaatcctgctaatggtggagggatttttcacaacaggtgccatcaaggacttgtatggtgatttcaagattacaacttgcggaaggtgtgtatccgcttggtttatcatgctgacatatctgtttatgctcgcctggctgggtgtgactgccttcacaagccttcctgtgtacatgtacttcaatctctggacgatctgccgaaacacaactcttgttgagggtgccaatttgtgtcttgatcttaggcaattcgggattgttacaattggcgaagaaaaaaagatctgtaccgtgagtgaaaacttcttgagaatgtgcgaaagcactgagcttaacatgacatttcacctgttcatcgtggcactggccggggcaggggcggctgtgattgccatggtgcattatctcatggtcctgtccgcaaattgggcatacgtgaaggacgcttgtcgcatgcagaagtacgaggatataaagtcaaaagaagagcaggagctccacgacatccattctacaaggtccaaagagcgtctcaacgcctacacatag

SEQ ID NO: 15349 - DNA, 390 bp, synthetic construct
  misc_feature 1..390: note = Description of Artificial Sequence: Synthetic coding sequence
  source 1..390: mol_type = other DNA
atggaagaaaacatggaagagggacagacacaaaagggatgcttcgaatgctgcataaaatgtctgggagggataccttacgcgtcattgattgcaacaattttactctatgcgggtgttgccctcttttgcggatgtggacatgaagccctctccgggaccgtcaatatccttcaaacatactttgaaatggcccggacagccggcgacactttggatgttttcactatgatcgatatattcaagtacgttatatatggcattgccgccgcatttttcgtttacggaatcctcctcatggtagagggcttcttcactacaggtgccataaaagatctgtacggcgatttcaagataacgacctgtgggcgctgcgtgtccgcttggtag

SEQ ID NO: 15350 - DNA, 816 bp, synthetic construct
  misc_feature 1..816: note = Description of Artificial Sequence: Synthetic coding sequence
  source 1..816: mol_type = other DNA
atgactgatcttgagggctgctttgaatgttgtataaagtgtctcggcggcatcccttatgccagcctgatcgcaactattctgttatacgccggggtggcgttattttgcgggtgtggccatgaggccctgagcgggaccgtgaacatcctacaaacctattttgaaatggcccgtactgctggtgatactttggatgtgttcaccatgatcgatatcttcaagtatgttatctacgggatagccgcggcattttttgtctacgggattctcctcatggttgagggatttttcaccacaggggccatcaaagatctgtacggcgatttcaagattaccacatgcgggcgttgcgtgtcagcctggtttatcatgctgacatacctgttcatgctggcctggcttggcgtgaccgcatttacctccctgccagtgtacatgtactttaacctttggacaatctgtcggaatacaacactggtcgagggcgccaacctctgcctggacctcaggcagttcgggattgtgaccatcggagaagaaaagaagatctgcaccgtcagcgagaactttctgcgcatgtgcgaaagcacggaactgaatatgacctttcacctgtttattgtggccttggcaggcgctggggctgccgtgatcgcgatggtccattacctaatggtgttgtccgcgaattgggcctacgtgaaagacgcgtgtcgtatgcagaagtacgaggacatcaaatcaaaagaagaacaggagctccatgacattcactcaacgagaagtaaagaaaggctgaacgcttacacctag

SEQ ID NO: 15351 - DNA, 1206 bp, synthetic construct
  misc_feature 1..1206: note = Description of Artificial Sequence: Synthetic coding sequence
  source 1..1206: mol_type = other DNA
atgatgggacttggaaatggtaggcgaagcatgaagagtcctccactcgttctggcggctctagtggcgtgtatcatcgtcctggggttcaactactggattgcaagctcacgaagcgttgatttacaaacgcgtatcatggagttagaggggcgggtgaggagggcagcagctgagcgaggagccgtcgaactgaaaaaaaatgaatttcaaggggaacttgagaaacagcgcgagcagctggataagatccagtccagccataacttccagctagagtcagttaataagctgtaccaggacgagaaagcggtcctcgttaataatataacaacaggcgaaaggctgatcagagtgctgcaggaccaactgaagactcttcagagaaattacggacgattgcaacaggatgtcctccagtttcaaaagaatcagaccaaccttgaacggaagttcagctacgatctcagccagtgtatcaaccagatgaaggaggtaaaggagcagtgcgaggagaggatcgaagaggtgacgaagaaaggtaatgaagctgtagcttccagagacctgtccgagaacaacgaccagaggcaacaactgcaagcgctctcggagccgcagccccggttgcaagctgcagggctgccgcacaccgaggttccccaagggaagggaaacgtgttgggaaacagtaagagccagactccagctccctcctcagaagtcgtgttggacagcaagcggcaagtggaaaaagaggaaacaaatgagatccaggtggtgaacgaggaaccgcagcgcgaccgcctgccccaggagcctgggagggagcaggtggtggaggaccggccagtggggggacgagggttcggaggtgctggtgagctcgggcagacaccccaggtgcaggcagccctgagtgtgagccaggaaaatcctgaaatggagggccctgagagagaccagttagtcatccctgatggtcaagaggaggagcaggaggctgcgggggaagggcggaatcagcagaaattaagaggggaggacgactacaatatggacgagaacgaagccgagagtgagaccgacaagcaggccgcacttgccggtaatgaccgcaatatcgatgttttcaacgtcgaagaccagaaaagggacacaatcaatctgctagaccagcgggagaagcgcaatcacaccctgtag

SEQ ID NO: 15352 - DNA, 1206 bp, synthetic construct
  misc_feature 1..1206: note = Description of Artificial Sequence: Synthetic coding sequence
  source 1..1206: mol_type = other DNA
atgatgggactgggtaacggtagaaggagtatgaaaagccctccgcttgtgctggctgcgttagtcgcctgcattattgttctcggcttcaactactggattgcttcttccagatctgttgacctccagacgagaattatggagttagaggggcgggttcgcagggctgccgcagagaggggtgccgttgaactaaagaaaaatgagttccagggtgaactggaaaagcagagagagcagctcgacaagattcaatctagccataattttcagcttgaaagtgttaacaagctgtaccaggatgagaaggcagttctggtgaacaacatcacaactggggaacggttaattcgtgtgctgcaggaccagctgaagaccctacagcgcaactatggcagactgcagcaggacgtgttgcagttccagaagaatcagaccaatcttgagagaaaattttcatacgacctctcacagtgtataaatcaaatgaaggaggttaaagaacagtgcgaggagcggatcgaggaggtaactaaaaaggggaatgaggccgtagcatctcgtgatctgtccgagaacaatgaccaacgccagcagctgcaggcactgtctgaaccccagccgcgcctccaggccgccgggcttcctcacactgaagtcccccagggaaaagggaacgtgctggggaactctaaatcccagacaccggccccatcttccgaagtcgtgctagatagtaaacgccaggtagagaaagaagaaactaatgagattcaggtagtgaatgaagaaccacaacgtgacaggttaccacaagagcccggccgcgagcaagtggtggaggataggcccgtcggtggacgtggtttcggtggcgctggagagctcgggcaaaccccacaggttcaggctgcactgtctgtctctcaggaaaatcctgagatggagggtccggaaagagaccagctcgtgatcccggacgggcaggaagaagagcaggaagccgctggcgaagggagaaatcagcagaaactgagaggcgaggacgattacaacatggacgagaatgaagccgagtccgaaactgataaacaggccgctctggcaggcaacgaccgcaacatcgatgtgttcaatgttgaagaccagaagcgtgatacgatcaacctcttagatcagcgagagaagagaaatcacaccctgtag

SEQ ID NO: 15353 - DNA, 243 bp, synthetic construct
  misc_feature 1..243: note = Description of Artificial Sequence: Synthetic coding sequence
  source 1..243: mol_type = other DNA
atgatgggactgggtaacggcagacggtcaatgaaatccccccctcttgtgttagccgctcttgtggcctgcatcattgttctaggcttcaactattggatcgctagcagtcgctccgttgacctgcagacccgaattatggaactcgagggccgcgtcagaagggcggcagccgagagaggagctgtcgaactgaagaagaatgagttccagggcgaactggaaaagcagcgggaacagtag

SEQ ID NO: 15354 - DNA, 366 bp, synthetic construct
  misc_feature 1..366: note = Description of Artificial Sequence: Synthetic coding sequence
  source 1..366: mol_type = other DNA
atgatggggctggggaatggtcgcaggtccatgaagtccccccccctcgtgctcgctgccctagtagcctgtatcatcgttttaggcttcaattattggatcgccagctctcgcagcgtggacctgcagactagaatcatggagctcgagggacgagtccgacgagcagcggccgagcggggggccgtggagttgaaaaaaaacgagtttcagggggagttagagaagcagagggagcagctggacaagatccagtcttctcacaacttccagttggagagtgtcaacaagctgtaccaggacgagaaagcagtgctggttaataatatcaccacgggagaacgcctgataagggtcttacagtag

SEQ ID NO: 15355 - DNA, 279 bp, synthetic construct
  misc_feature 1..279: note = Description of Artificial Sequence: Synthetic coding sequence
  source 1..279: mol_type = other DNA
atgaagccaatacaaaagttgttggctggcctcattctgttgacatggtgcgtcgagggatgtagcagccagcattggagttacgggctcaggccgggaggcaagcgagacgccgagaatttgattgactctttccaggagatcgtcaaggaggttggtcaattagccgaaactcagcgttttgaatgtacaactcaccaacccaggtctcccttaagggatctcaagggggcacttgagtccctgattgaggaggagactggtcagaagaagatctag

SEQ ID NO: 15356 - DNA, 279 bp, synthetic construct
  misc_feature 1..279: note = Description of Artificial Sequence: Synthetic coding sequence
  source 1..279: mol_type = other DNA
atgaagcctattcagaaactgctggccggcctgattcttctgacttggtgcgtcgagggctgcagtagccagcattggtcctacggccttcgccctggcggcaaacgcgacgcagaaaacttaatcgattccttccaggaaattgtgaaagaagtgggacaattagccgaaacacagagatttgaatgtacaacccaccagcccaggagtcccctcagggacctaaaaggcgcgctggagtcactaatcgaagaggagacgggacagaagaaaatttag

SEQ ID NO: 15357 - DNA, 774 bp, synthetic construct
  misc_feature 1..774: note = Description of Artificial Sequence: Synthetic coding sequence
  source 1..774: mol_type = other DNA
atgcccgcctccatgtttagtatagataacatccttgccgcgaggccacgttgtaaggattccgtactcccagtcgcccattctgcggctgcaccagttgtttttccagctctccacggggattcactgtatggagcaagcggcggtgcatcatccgattatggcgctttttacccaaggccagtcgcccccgggggtgctgggctgcctgcagctgtgtcgggttcacggctgggctacaacaattatttctatggccagcttcacgtccaggcagcacctgttggaccggcttgctgtggtgcagtgccacctcttggagctcaacaatgctcatgtgttccgaccccaccaggctacgagggccctggaagcgtgttggtgtcacccgtcccccaccagatgctcccttatatgaatgtggggactctatcaagaaccgagctccaattactgaatcagttacattgtagacgaaagaggcgccaccgaacaatttttaccgacgagcagctagaggctctggaaaatctcttccaggaaacgaagtatccagacgtcgggacacgagagcagttagctagaaaggttcacctgagggaagaaaaagtggaagtctggttcaagaaccgtcgcgccaaatggagaagacaaaaaaggagctcgtccgaggagtcagagaacgctgagaaatggaataagactagttcaagcaaggcctctcccgaaaaaagagaggaagaaggaaagtctgacctagactcagatagctag

SEQ ID NO: 15358 - DNA, 654 bp, synthetic construct
  misc_feature 1..654: note = Description of Artificial Sequence: Synthetic coding sequence
  source 1..654: mol_type = other DNA
atggcataccctggttatggagggggttttgggaatttttcaatacaggtgcccggcatgcagatgggacagcccgtccccgagactgggcctgctatcctcttggacgggtacagcggaccagcttattcagacacatattcatcagccggggacagtgtgtatacatatttctctgccgtggctggtcaggatggagaggtggacgcagaagagcttcagcgctgccttacgcagtctggcattaacggcacatacagtccgtttagtttagagacctgtcgtattatgatcgcaatgctggacagagaccatactgggaaaatgggatttaatgccttcaaggagctttgggctgcgctcaatgcctggaaggaaaatttcatgacagtagaccaagacggctccggtaccgtggaacaccatgagctgcggcaggcaattggccttatgggataccggctttcaccacagacgttgaccactatagtgaagagatatagtaaaaacggcaggattttttttgacgattacgtagcctgttgcgtcaaactgagagccttgaccgactttttccggaagagagatcacctgcagcaaggatccgctaactttatttacgacgatttcctccagggtaccatggctatttag

SEQ ID NO: 15359 - DNA, 438 bp, synthetic construct
  misc_feature 1..438: note = Description of Artificial Sequence: Synthetic coding sequence
  source 1..438: mol_type = other DNA
atggctacctgggccctgcttctgctggccgccatgttgttgggcaatcctggactggttttcagccgcctttcccctgaatattatgatctggcacgagcccacctgagagatgaggagaagtcgtgtccctgtctggcacaggagggtccacaaggggatctactcacaaagacccaggagctcggcagagactaccgaacatgcctcaccatcgtccagaagctcaagaaaatggtcgacaagcccacgcagcgatcagtgtcgaacgcggcgactcgggtatgccggaccggccgctccaggtggagagacgtgtgtagaaacttcatgagacggtaccagtcccgagtaacacagggtcttgttgccggcgagaccgcccagcagatctgtgaagatttgcgactctgcatcccgtctactggccctctttag

SEQ ID NO: 15360 - DNA, 393 bp, synthetic construct
  misc_feature 1..393: note = Description of Artificial Sequence: Synthetic coding sequence
  source 1..393: mol_type = other DNA
atggaaggcctagtattcagccgcttgagtccagagtattacgatctcgcgcgagcccatctccgtgacgaagagaaatcttgtccatgtctggcacaggagggaccacagggagaccttttaaccaaaactcaggaactgggacgggattatcgaacatgcctgaccattgtgcagaagctaaagaagatggtcgataagcccacgcagcggtccgtttccaatgcagcgacccgggtgtgtcggacaggcagatctcggtggagggacgtatgcaggaacttcatgcggaggtaccagagtagagttacccagggactcgtggctggggagaccgcccagcagatttgtgaggatctgcgactgtgtatcccgtcaactggcccattatag

SEQ ID NO: 15361 - DNA, 555 bp, synthetic construct
  misc_feature 1..555: note = Description of Artificial Sequence: Synthetic coding sequence
  source 1..555: mol_type = other DNA
atgagtagaaccgcctatacagtgggcgctctactgctcctactgggaaccctgctgccagcagccgaggggaagaagaaaggcagccaaggagcaattccacctcccgataaggctcagcacaacgattccgaacagacccaatccccccagcaacccggatctagaaatcgagggcgaggtcagggacggggcacggcaatgcctggcgaggaggtgctggagagctcccaggaggcactccatgttacggagaggaagtacctgaaacgggactggtgcaaaactcagcctctcaaacagaccatccacgaggagggatgcaatagtcgcaccatcatcaaccggttctgttatggacagtgcaactcattttacattccgcgacatatccgaaaagaggaagggtcctttcagtcatgtagcttttgcaaaccgaagaaattcacgactatgatggttacgctgaattgtcccgagctgcagccccctaccaaaaagaagagagttactagagtaaaacagtgccgatgcatttctatcgacttggactag

SEQ ID NO: 15362 - DNA, 432 bp, synthetic construct
  misc_feature 1..432: note = Description of Artificial Sequence: Synthetic coding sequence
  source 1..432: mol_type = other DNA
atgtcccgcaccgcctatactgttggcgcactgctgctgctgctcggtacgctactgcccgctgcagagggaaagaagaagggatcacaaggggctataccgcctccagacaaagccttgcatgtcaccgaacgcaagtacttaaagagagactggtgtaaaacacagccgctcaaacaaaccatccatgaagagggctgcaattcacgtactatcataaatagattctgctatggtcagtgtaacagcttctacatacctaggcatatccggaaggaagagggcagttttcagtcctgttcgttctgcaaacctaaaaagtttacaactatgatggtaacactcaattgcccggaactgcagccacctacaaagaagaagcgtgtcacaagagtaaagcagtgtagatgtatttctatcgatttagactag

SEQ ID NO: 15363 - DNA, 432 bp, synthetic construct
  misc_feature 1..432: note = Description of Artificial Sequence: Synthetic coding sequence
  source 1..432: mol_type = other DNA
atgagtcgtactgcttataccgtcggcgcccttttgctcctgctggggactttgctgccagccgccgagggcaaaaagaagggcagccaaggtgccatccctcctcctgacaaggctcttcatgtcacagagcgaaagtacctgaaacgagactggtgtaaaacccagccactgaagcagactattcacgaggaaggctgcaatagccgaaccatcatcaatcggttctgctatggccagtgcaactcattttatattccgcggcacattagaaaggaggaaggttcttttcagtcatgcagtttctgcaagcctaaaaaatttactaccatgatggtgactctcaattgccccgagctgcagccgcccaccaaaaaaaagcgcgtgacacgagtgaagcaatgtcgctgtatttccatcgacctggactag

SEQ ID NO: 15364 - DNA, 396 bp, synthetic construct
  misc_feature 1..396: note = Description of Artificial Sequence: Synthetic coding sequence
  source 1..396: mol_type = other DNA
atgacccttgaggaattcagcgccggggagcagaagacagaatcggatcccgataacgtcgtcttatgtctactggcggccgacgaggatgacgatagggatgtagcacttcagattcactttacgcttatccaggcattttgttgcgaaaatgacatcaacattctcagagtgtcaaacccaggtcgcctggcggaactgcttctcttagagaccgacgcaggcccagcggcgagcgagggcgctgaacagcctcctgatctgcactgtgtgctggttactaacccacattctagccagtggaaggacccagccctctcgcagctcatatgtttctgccgtgaatcaagatatatggaccagtgggtgccggtgattaacctgcccgaacggtag

SEQ ID NO: 15365 - DNA, 498 bp, synthetic construct
  misc_feature 1..498: note = Description of Artificial Sequence: Synthetic coding sequence
  source 1..498: mol_type = other DNA
atgaccctggaggagttctctgcaggtgagcaaaagaccgaacgaatggacaaggtcggtgatgctctggaggaggttctttcaaaagcccttagccagcggacaataaccgtcggcgtgtacgaggctgccaagctccttaatgtagatcccgataatgttgtgctttgtttacttgccgcagacgaggatgacgacagggatgttgcactgcagatccactttacacttattcaggcgttttgctgtgaaaacgatataaatatactgagagtgagcaatcccggacgtctggcagaactccttctcctcgaaacggacgctggccctgcagcctcggagggagcagagcagccacccgatttacactgtgtattggtaacaaaccctcacagcagccagtggaaggacccagctctgtctcaactcatttgcttttgccgtgaatcgagatatatggaccagtgggtgccagtgatcaatctccccgaaagatag

SEQ ID NO: 15366 - DNA, 3693 bp, synthetic construct
  misc_feature 1..3693: note = Description of Artificial Sequence: Synthetic coding sequence
  source 1..3693: mol_type = other DNA
atgtcagctctttgctggggccggggggccgccggcttgaaaagggctttgcggccatgcggccgccctggactacctgggaaagagggcacagccggcggagtttgcggccctaggcggtcttctagtgctagtcctcaggaacaggatcaggatcgcaggaaagactgggggcacgtggaactgctggaagttctgcaggcacgtgttagacaactgcaggcggagagcgtgtcagaggtcgtcgtgaacagggtagatgtcgcgcgattgcccgaatgtggtagcggagacggaagcttacagcctcccaggaaggtccagatgggagccaaagacgctacccccgtcccctgcgggaggtgggccaaaattctggaaaaggacaagcggacccagcaaatgcgcatgcaacgtctaaaggccaagctccaaatgcccttccagtcaggcgagttcaaggcgttgactcgccggctgcaggtcgagccacgtctcctgagcaagcagatggcaggatgcctggaggattgcaccagacaggctccagaatcaccgtgggaggaacagctggctcggctccttcaggaggcccccgggaagctcagcctagacgtggagcaggccccatcaggtcagcatagtcaggcgcaactttctggacaacagcagcgcctcctcgctttttttaagtgctgcttactcaccgatcagctgcctctagcccaccacctcttggtggtgcatcatggccagagacaaaagagaaagctgctgaccttggacatgtataacgctgtgatgcttggttgggcccggcaaggcgctttcaaggaactggtgtacgtgctgtttatggttaaggatgcaggattgactccggacctgttgtcatacgctgccgctctacagtgcatgggccggcaagaccaagatgccgggactattgagcgatgcttagaacaaatgagccaggaaggcctgaagttgcaagccctgtttaccgcagtgctgttgtcagaggaggaccgtgctaccgttcttaaagcagttcacaaggtgaaacctactttcagtctgccgccccagttgccgccgccagttaacacatcgaaacttctgcgtgacgtgtacgctaaggacgggcgggttagctaccccaaattgcaccttcctctgaaaaccttgcagtgtctcttcgagaagcaactacacatggaattggcaagcagggtgtgtgtggtcagcgtagagaagcctacactcccttcgaaagaggtgaaacatgcgcggaaaacactcaaaactctccgagatcagtgggagaaggccttatgcagggctctgagagagaccaaaaaccgactcgagcgcgaggtttacgagggaagattctcactgtatccgtttctgtgtctgctggacgaacgcgaagttgttagaatgctgcttcaggtgctccaggcactgccagctcagggcgagagctttacaactctagccagggagctctcagcccggactttcagtaggcatgtcgtgcagagacaacgcgtctccggtcaagtgcaggcactgcagaaccattatcggaagtacctgtgtcttctcgcctctgatgccgaagtgcctgaaccctgtctgcctcggcagtattgggaagaacttggcgcccccgaagcacttcgagagcagccttggccgctccccgtgcagatggaactgggaaaattgctcgcggagatgctggtgcaggccacgcaaatgccttgttctctggacaaacctcaccggagttctcgcctggttccggtgctgtaccatgtttattctttccgaaatgtccagcagattggcatcctcaaaccacacccggcctacgttcaactactggagaaggccgcagagccaactctgacattcgaggccgtagatgtgcctatgttgtgccctcctctcccctggacttctcctcatagcggcgcctttctgttgtctccaaccaaactgatgagaaccgttgagggcgcaacgcagcaccaggagttactggaaacatgccctcctacagcactgcatggagcccttgacgcgcttacgcagctgggcaattgtgcctggagggtgaatggcagggtattggatctggtactccagctattccaggccaaggggtgtccacaactcggggtgcccgccccaccttcagaggccccccaacctcctgaggcccacttgccgcattctgctgccccagccagaaaggccgagcttagacgggagctggcccattgccagaaagtggcgagagaaatgcattcactgcgcgctgaggcgctatatcgcctgtctctcgcccaacacctgcgggatagagtgttctggctgccccacaatatggactttcgaggtaggacctatccctgccccccacattttaatcatcttggatccgatgttgcgcgggcattgttggaattcgcccaaggccgaccccttggcccccacggtctggattggctcaagattcacttggtcaatctgacggggctgaagaagcgggagcccctcaggaagcggctggctttcgctgaagaggttatggacgatatactagactctgcagaccagccccttaccggcagaaaatggtggatgggcgctgaggagccttggcaaacactggcttgttgtatggaagtcgccaatgcggtgcgggcctccgatcccgctgcatacgtgagtcatcttcccgtgcatcaggatggtagctgtaacggactgcaacactacgctgcactgggaagagacagcgtcggtgcagcatccgtgaatctggagccatctgatgtgccccaggatgtgtacagtggggtcgcggctcaggtggaagttttcaggagacaggacgctcaaagaggcatgcgtgtggctcaagtgctggaaggatttattacccgcaaagtcgtgaaacagacggtgatgacagtggtctatggcgtcactcgctatggagggcgcctgcaaattgagaagagattacgtgaactttctgactttccccaggaattcgtgtgggaagcctcgcactaccttgtaaggcaggtgttcaagtcgctgcaggagatgttcagcggcacgcgcgcgattcaacattggctgactgaatctgctcggctgatcagtcacatggggagcgtagttgagtgggtcaccccactcggggtcccagtcatccaaccttaccgccttgatagtaaagtgaagcaaatagggggtggcatccagagcattacctacacacataatggggatataagtcggaagcctaatacacggaaacagaagaacggattccctccaaacttcatccacagcttggattctagccacatgatgctcacagctctgcattgctacagaaaggggctgacgtttgtttccgtgcatgattgctattggacacatgccgctgatgtgtcagtgatgaatcaagtttgccgagagcagttcgttcgcttacactctgaaccaatcctgcaggacctcagcaggttcttggtgaagcgattttgcagtgagccccagaaaattctggaggcctcccagctgaaggaaacattgcaggcagtccccaagccaggcgcctttgacctggagcaggttaaacggtcaacatactttttctcctag

SEQ ID NO: 15367 - DNA, 480 bp, synthetic construct
  misc_feature 1..480: note = Description of Artificial Sequence: Synthetic coding sequence
  source 1..480: mol_type = other DNA
atgacactggaggaggtgaggggacaggataccgttcccgagagcactgcaagaatgcagggcgcaggcaaggcattgcacgaactccttttgtccgctcagcggcaggggtgcctgacggcaggggtgtacgagagcgcaaaggtgttgaatgtcgatccagacaatgttacgttttgtgtcctggctgcaggagaagaggacgaaggagacattgctctgcaaattcattttacgttgattcaggccttttgttgcgagaatgatatagacattgttcgcgtaggggatgtgcagagactggcagctatcgtgggagccggcgaagaagccggggcacccggcgacctgcattgcattctgatcagtaatcccaatgaggatgcctggaaagacccagccttagaaaaacttagcctgttctgcgaggaatcgcgatcagtgaatgactgggttcctagcattacactgcccgagtag

SEQ ID NO: 15368 - DNA, 426 bp, synthetic construct
  misc_feature 1..426: note = Description of Artificial Sequence: Synthetic coding sequence
  source 1..426: mol_type = other DNA
atgcagggggctggaaaagcccttcatgaactcctcctgagcgcccagcgccagggctgtcttacggctggagtgtacgaaagtgcgaaagtgctgaatgtggatccggacaacgtgacattctgcgttctcgctgcaggcgaggaagacgagggggacatcgcactccagatacacttcactcttatccaagctttctgctgtgaaaatgacatcgacatcgtcagagtcggcgacgtgcagcggctggccgccatcgttggggcaggcgaagaagcaggcgccccgggcgatctgcattgtattctcatatccaacccaaatgaggatgcttggaaggatcctgctttagagaaactctctctgttctgtgaagaaagccgatcagtgaatgactgggttccttcaatcactctccccgagtag

SEQ ID NO: 15369 - DNA, 2085 bp, synthetic construct
  misc_feature 1..2085: note = Description of Artificial Sequence: Synthetic coding sequence
  source 1..2085: mol_type = other DNA
atgcagcccgcaatccaggtatggttcggtgaggaccttccgctgagcccacggtcaccactgacgccaagacatggacctggactggccaatgtgtgccaatacgatgaatggattgcagttcgacacgaagccaccctcttgcctatgcaggaggacctgtcaatttggttgagcggcctcctgggcattaaggtcaaggctgagaagttgcttgaagagctcgacaatggagtgctgttgtgccagcttatcgatgtgctgcagaacatggtcaaaacatgcaatagcgaggagtctgggaacttccccatgcgaaaggtaccatgcaaaaaagatgccgcttcggggagttttttcgcccgcgacaacaccgccaatttcctccattggtgtagggacataggcgtcgacgagacgtatttattcgagtcagagggtctcgttctgcacaaggaccccaggcaggtgtatctatgtttgctcgaaatcggccgtatcgtgtctaggtatggcgtagagccgcccgtgctggtcaaactggagaaggagattgagttggaagagacactgctcaataccagtgggcctgaagactccattagcattccaaaatcatgctgtagacatgaagaactgcacgaagccgtgaagcatatcgccgaggaccccccatgtagttgctctcatcggttttctattgagtacttatctgaagggcgctaccggttaggggacaagatcctgtttattcgtatgcttcacgggaagcacgtgatggtacgagtgggaggtggatgggacacgcttcagggatttctattgaagtatgacccatgcaggattctgcaatttgcaactctcgaacagaagattcttgcgttccaaaaaggagtatcaaacgagtcggtgcctgattccccagctcgaacacctcaaccaccagagatgaacccactgtctgcggtgaatatgttccagaagcaaaattcaaaaccatcagtccccgtctctatcccaaaaagcaaagaaaagcagggcagacctccaggagcacttgtgcccgcatcaagcctgaagggtggaaacctgggctctatgtccgtgcggagtaagctgccgaattcacccgcagcctcctcacatcctaaactgaagtctagcaagggtattacaaaaaagccccaagcacctagcaataatgcttcttccagtcttgcttcacttaatcccgtgggcaaaaacacctccagccctgcactgcctcggactgcgccttgtatatcagagtctccaaggaagtgtatcagcagccctaacacccctaaagccaaagtcataccagcccagaacagcgccgacctgcccgagtccactcttctgcccaataagtgttctgggaaaacccagcctaagtacctcaagcataatcatatttcttcgcgtgataacgctgtgagccatttggccgcacactcgaactcctcaagcaagtgtcctaagttgcctaaggccaacatacccgtcaggccaaagcctagctttcaaagcagcgcaaagatgactaaaacatcaagtaaaacaattgccactggcctgggaacccaatcacaacccagtgatggggctccccaggcgaagcccgtgcccgcccagaaactgaaaagtgctctgaatcttaaccagcccgtgtccgtgtcttccgtgtccccggtgaaggcaactcagaagtcaaaagataagaatatcgtgtccgccacaaaaaagcagccccaaaataagtcggccttccagaaaactggtccgtcctcattgaaatcacctggacgcacccccctgtctattgtgagcctcccgcagtctagcacgaagacacaaaccgccccgaaaagcgcccagacggtggctaagagccaacactctacgaagggacctcccaggagtggcaagacccccgcctccatcaggaagccgcccagctctgtgaaggatgctgattctggggacaagaagccaactgctaaaaagaaggaggatgatgaccattacttcgtcatgaccggctcaaagaaacctagaaagtag

SEQ ID NO: 15370 - DNA, 2085 bp, synthetic construct
  misc_feature 1..2085: note = Description of Artificial Sequence: Synthetic coding sequence
  source 1..2085: mol_type = other DNA
atgcaacccgccattcaggtatggtttggagaagacctgccgctatccccccggtcacctctgaccccccgccacggcccggggctggcaaatgtatgccagtacgatgagtggattgcagtcaggcacgaggcaactctcttgcccatgcaggaggacctgtctatttggctgagcggccttctcggcatcaaggtgaaggctgagaagctactggaagagctggacaatggggtgctgctgtgtcagcttattgatgtgctgcaaaatatggtgaagacttgcaattcagaagaaagcggcaactttccaatgaggaaagtgccctgcaagaaagatgcagccagcggatcctttttcgccagggacaatactgctaattttctccactggtgcagagatatcggcgttgacgagacctacttatttgaatccgaaggtctggttctacacaaggatcccagacaagtctatttgtgcttgctcgagatcggcagaatcgtgtctagatacggagtggagcctcccgtcctggttaagcttgagaaggaaattgaactcgaggagacacttctgaatacttcaggaccagaagattcaattagcattcccaagtcatgttgtcgccatgaggaacttcacgaagccgtgaagcacatcgccgaagatccaccgtgtagttgttcccatcgcttcagtatcgagtatttatctgagggccggtatcggctgggggacaagatactgtttatcaggatgctacacggcaaacacgtgatggtccgtgtgggcggcggttgggacacgctgcagggctttttgctcaagtacgatccttgccgcatactgcagtttgcgacgcttgaacagaagatcttggccttccagaaaggtgtctccaacgagtctgttccggactcccccgcaaggactccacagccccctgaaatgaatcctctgagtgcggtcaacatgttccagaaacagaattccaagccgtccgtccctgtgtctatccccaagtccaaggaaaagcagggcaggcccccaggtgctttagtgccagctagcagtctgaaagggggaaacctgggttccatgagcgtccgctcgaaactcccaaactcacccgctgcctcctcacaccccaagctcaaaagtagtaaaggcattaccaaaaaaccccaggcaccgagcaataatgcaagctctagtctcgcctctttaaatcctgtggggaagaacacatcctctcctgccttaccccgcacagcgccctgcatcagcgaatccccaaggaaatgcatcagcagtccgaacacccctaaggcaaaagttatcccagcccaaaatagcgccgatcttccagagtccaccttgctgcctaataagtgttccggaaaaactcagcccaagtacctcaagcacaaccatatatcttctcgagataacgctgttagccacctggccgcgcattctaactccagcagcaagtgccctaagttgcccaaggccaatatcccggtgcggccgaaaccgtccttccaatcctcagcgaagatgacaaagacctcttccaagacaatagcaaccgggctaggaactcagagccagccttcagacggcgcaccacaggctaagcctgtgccagcacagaagttgaaatctgcactgaaccttaaccagcctgttagcgtaagcagtgtgtcacctgttaaggccacgcagaaatcgaaggataaaaacattgtgtctgccactaagaaacaaccccagaataagtctgcctttcagaagactggaccttcatccctaaaaagcccgggacgaacccctctgtcgattgttagtctgccacagtctagcactaaaacgcagactgcgccgaagagcgcgcagaccgtcgctaagtctcagcacagcaccaagggcccccctcgaagcggaaaaacccccgctagcataagaaagccaccatcttccgtaaaggacgccgattctggcgataagaaacctacagctaagaagaaggaggacgacgaccactactttgtgatgacaggttctaagaaacctaggaagtag

SEQ ID NO: 15371 - DNA, 2085 bp, synthetic construct
  misc_feature 1..2085: note = Description of Artificial Sequence: Synthetic coding sequence
  source 1..2085: mol_type = other DNA
atgcagccagccatccaggtttggtttggagaggacctgcctttgagcccacggagtcctctgacaccccggcatggtccaggcctggcaaatgtgtgccagtatgatgaatggattgccgtcaggcacgaagccaccctgctgcctatgcaggaagatctgagcatctggctgtctgggttgctcggcattaaagtgaaagccgaaaaactgctggaggagctcgacaacggggttctgctgtgtcagctcatcgacgtcctccagaatatggtgaagacctgtaatagcgaagagagtgggaacttcccgatgcggaaagttccttgtaaaaaagacgccgcttcggggagcttcttcgcgcgagacaatactgctaacttcctgcattggtgccgcgatataggcgtcgacgagacatatctatttgagtcggaaggtctggtcctgcataaagaccctagacaggtctatctgtgtttgctggaaatcggacggatcgtatctcggtatggggtggaaccacccgtcctggtaaagcttgagaaagagatagaactggaggagactctcctgaacacatctggacctgaggatagcatctccatcccaaagagctgctgccggcatgaggaactgcatgaagccgtcaagcacatcgcagaggatcctccctgctcctgctcccatcggtttagcatcgaatacctgagcgaggggaggtaccgcctgggcgataagattttatttattcgaatgcttcacggcaaacacgtcatggtgagagtgggaggtgggtgggacacgctgcagggcttcctgttgaaatacgacccctgtaggattctccagttcgcaaccttggagcagaagatcctggcctttcaaaaaggggtgtctaatgagtcggtccctgattcccctgcacgaacccctcagccccccgaaatgaatccactgtctgccgtgaacatgttccaaaagcagaactcgaagccctcagtgccggtctcaatccctaagtctaaagagaagcaaggacggccacccggcgccttggtgccagcatcgagtttgaaaggaggaaatctaggttctatgtctgtcaggagcaagctgccaaacagtcccgctgctagtagccaccccaagctcaagagttccaagggaatcacaaagaagccccaggcacccagcaataacgcatcctcatccctagcaagccttaaccccgtaggaaagaacaccagttcccctgccctcccacgtaccgcaccctgcatctctgaatcccctcgcaaatgcatttcctcacccaacacacctaaagccaaagtgattcccgcacagaactcagccgatttgcccgaaagtacactgcttcctaacaaatgtagtggtaagacccaacccaaataccttaaacacaaccacataagttcccgcgataatgcggtgagccatttagctgcccactctaacagctcttcgaagtgcccaaagctccccaaagccaatattccagtcaggcccaaaccttctttccagtctagtgcgaaaatgaccaaaacttcttctaaaacaatcgcgaccggcctgggaacccagagccagcctagcgatggggcaccacaagcaaaaccagtccctgcacaaaagctgaaatctgcgcttaatctgaatcagccggtgagcgttagtagcgtgagccccgtaaaggccacacagaagtctaaggataaaaatatcgtcagtgcgactaaaaagcagccccagaacaaatctgccttccagaaaaccggaccatcttccctgaagagcccgggacgaactccgctgtctattgtgtcccttccacaatcttctacaaagacgcagacggcccctaagtccgcacagacagttgctaagagccagcactcgacaaagggcccccccagaagcggcaagactccggccagtatcagaaagcccccttcttccgtgaaggacgctgacagcggtgataagaagccaaccgcgaagaaaaaggaggatgacgaccattactttgttatgacagggtctaaaaaaccaagaaagtag

SEQ ID NO: 15372 - DNA, 150 bp, synthetic construct
  misc_feature 1..150: note = Description of Artificial Sequence: Synthetic coding sequence
  source 1..150: mol_type = other DNA
atgcagccagccatccaggtctggttcggagaggatctcccactgagccctcgcagccccttgactcctaggcacgggcctgggctcgcgaacgtctgtcagtacgatgagtggatcgccgttagacatgaggctaccctcctaccctag

SEQ ID NO: 15373 - DNA, 1611 bp, synthetic construct
  misc_feature 1..1611: note = Description of Artificial Sequence: Synthetic coding sequence
  source 1..1611: mol_type = other DNA
atgaatgcaagcctggaaagcttgtattccgcctgctctatgcagtccgacaccgtgccattgctgcagaatggtcagcacgcccggtctcagccacgcgcatcaggtcctcctcgcagtatccagccacaggtcagtccacgccagcgggtgcagaggtctcagccggtccacattctggctgtgcgtcgcctgcaggaggaagatcagcaattccgcacatccagcttacctgcgatcccgaaccctttcccagagctgtgtggacctggctcccccccagttctcacccctgggtctcttccccccagccaggctgccgcgaagcaggatgtgaaggtgttttccgaggacggaacaagcaaagttgtagagatcctggccgatatgacggcccgagacctgtgccaactgctggtttacaagtcacactgcgttgatgacaactcatggacactggtggagcaccacccacacctggggctcgagaggtgcttagaggaccatgaactggttgtgcaggtggagagcaccatggcctccgagtctaagtttttattccggaagaactatgccaagtatgagttttttaagaaccccatgaacttcttccctgagcagatggtaacttggtgccagcaatcaaacggcagtcaaactcagctccttcagaatttcttgaactctagttcttgtccagagatacagggtttcctgcacgttaaggaactcggaaagaagtcttggaagaagttgtatgtttgtctccgcaggtctggtctgtattgtagtaccaaagggactagtaaagagcctaggcacctgcagctcctggccgacctggaggacagcaatatcttctcgctgatcgcaggtcggaaacaatataacgccccaacagaccacggtttatgtatcaagcctaacaaagtcaggaacgaaaccaaggagctgcgactgctgtgcgcagaggacgaacagactcgcacttgctggatgactgcctttaggctcctgaagtacggaatgttgctttaccaaaattatcgaataccccaacagcggaaagctctgcttagccccttcagtacacccgtgcggtctgtatctgaaaactcattggtcgccatggacttcagcggacagaccggccgggtaatcgagaatcctgctgaagcccaatcagcggccctcgaagaaggacatgcctggagaaagagatccacccgcatgaacatccttgggtcccagtcccccttgcaccccagcaccttgagcaccgtcattcatcgaacacaacattggtttcacggcagaatcagtagagaggagagccacaggatcattaaacaacagggcctggtggacggcctctttctgctgcgtgactcccagagcaacccgaaggcctttgtgctgaccctctgtcatcaccagaaaatcaagaacttccagattcttccatgcgaagacgacgggcagaccttcttttctcttgatgacgggaacaccaaattctccgatttaattcaattggtggatttctaccagctgaacaaaggagtgctgccttgcaaacttaaacatcactgcatccgcgtggctctttag

SEQ ID NO: 15374 - DNA, 1647 bp, synthetic construct
  misc_feature 1..1647: note = Description of Artificial Sequence: Synthetic coding sequence
  source 1..1647: mol_type = other DNA
atggcgttggcaggatgtccggactcattcctgcaccacccatattaccaggacaaggtagagcagactcctcggagtcagcaggatcccgcaggtccaggacttcctgcgcagtctgacagattggcaaatcaccaggaagacgatgtcgacctggaagctctcgtgaacgacatgaacgccagtctggaaagtctctacagtgcatgcagtatgcaatccgacaccgttcccctcttgcagaatggtcagcacgccagatcacaaccaagagcaagcggacctccaagatccattcagccccaggtgagcccccgccagagggtgcagaggtcccaacctgtgcatatcctggcagtgagacggctgcaggaggaagaccagcagtttaggacctcgagcctgcctgccattccaaatccttttccggagttgtgcgggcctgggagtccccctgtcctgacgcccggcagcttgccccccagccaagccgccgctaaacaggacgtgaaagtgtttagcgaagatgggacgtccaaagtcgtcgagattctcgcagacatgactgctagggacctctgtcagctgctggtgtacaaatctcactgtgtggacgataattcttggacacttgtggaacatcacccacatttaggattagaaaggtgcctagaagatcacgagctggttgtccaggtagagagtaccatggccagtgaaagtaaatttctgtttcgcaagaactatgcaaaatatgagttcttcaagaaccccatgaacttttttccagagcaaatggtgacctggtgccagcagtctaacggcagtcaaactcaattgcttcaggagcccaggcatctgcaactgctggcagacctggaggactcaaacatcttctccctgatcgccgggaggaagcagtataacgcccctactgatcacggcctctgtatcaagcccaacaaagtcaggaatgagactaaggagctacgcctgctctgcgccgaagacgaacagacgcgcacctgctggatgacagcatttagattactgaagtacggtatgctgctctaccagaattaccgaataccacagcagcgtaaggcactgctcagcccctttagtactcctgtcaggagtgtgtctgagaacagtctcgtggctatggacttcagcgggcagaccggacgcgttatcgagaacccagctgaggctcaaagtgccgcactagaggaggggcacgcatggaggaagcgctccacccgaatgaacatactggggtcacagtctcctttacacccttcgacactcagtacagtgattcatagaacccagcattggttccacggcagaataagtagagaagagtcccatcggatcatcaaacagcagggactcgtggacgggctctttttactgcgggattctcagagcaacccaaaggctttcgtgttaaccctctgccatcatcagaagatcaaaaacttccagatactgccctgtgaggatgatggacagactttctttagtctcgacgatgggaacactaagttttccgacttgattcagctcgtcgatttttatcagctaaacaagggggtgttgccatgcaagctgaagcaccactgtatcagggtcgcactctag

SEQ ID NO: 15375 - DNA, 381 bp, synthetic construct
  misc_feature 1..381: note = Description of Artificial Sequence: Synthetic coding sequence
  source 1..381: mol_type = other DNA
atgaatattctgggatcacagtctcccttgcatccctctaccctttcgaccgtgatccatcggacacagcactggtttcacggacggatctcgcgtgaggagagccacaggataatcaagcagcaaggactggtggacggcctcttcctgcttcgggatagccagtctaaccctaaagcttttgtgttaacattgtgccaccaccagaagattaagaatttccaaatcctcccctgtgaggacgacggccagacttttttctctttagacgacggtaataccaaattttctgatcttatccaacttgttgatttttaccagcttaataaaggagttcttccttgtaagctcaaacatcactgtattagggtggctttatag

SEQ ID NO: 15376 - DNA, 1611 bp, synthetic construct
  misc_feature 1..1611: note = Description of Artificial Sequence: Synthetic coding sequence
  source 1..1611: mol_type = other DNA
atgaatgcctcattagagtcactctatagtgcctgtagtatgcaatcagatactgtgcctctactgcagaacggtcaacacgctaggtctcagccaagggcaagtgggccaccaagaagcattcagccccaggttagcccacggcaacgcgtccagcggtcccagccggtccatatcctagccgtgagacgcctacaggaggaagatcagcagtttagaaccagcagtctgcctgcgattccaaaccccttcccagaactatgcgggccaggatcccctcctgttctcactccagggagtcttccccctagccaagccgccgctaaacaagatgtcaaggtgttttcggaggatgggacaagcaaggtagtggagatcctagccgatatgaccgcaagggacttatgtcagttactcgtatataaatcgcactgtgtggatgacaattcctggactctggtagaacaccatcctcacctgggactggaaagatgcctggaggaccacgagctcgtggttcaggtcgaaagcacaatggcttctgagtccaaatttctctttagaaaaaactatgccaagtatgaattttttaagaatcctatgaattttttcccagagcagatggtaacctggtgtcagcaaagcaacggatcacagacccaacttctgcaaaacttcctgaattcatcttcgtgccctgagatccagggcttcctgcatgttaaggaactcggcaagaagtcatggaaaaaactctatgtctgtctcaggcggtccggattgtattgttctaccaagggtacctctaaggagccacggcacttgcaactgctggctgatttagaggatagcaacatcttttcgctgatagcaggcagaaagcagtataacgcacccaccgaccatggcctctgcataaaacctaataaagtgagaaatgagaccaaagaactccgcctcctatgcgccgaagacgaacagacaaggacttgctggatgactgcttttaggctgctcaagtatggcatgctgctttaccagaactataggatccctcagcagcgcaaagctttactgtcccctttcagcactccggtccgttccgtgtccgagaacagtttggttgcaatggatttttctggccaaactgggcgggtcatcgagaacccagctgaagcacagagtgccgcccttgaagaggggcacgcatggcgcaagaggtccactcggatgaacatcctgggttcacaatccccactacacccatcgactctgtcaaccgttattcacaggacccagcactggtttcatgggcgtatttctcgcgaggaaagccaccgtatcataaagcagcaggggcttgtggatggcctttttctgcttcgggacagtcaaagcaaccctaaagcattcgtgcttacattgtgtcatcaccagaaaattaaaaattttcaaatccttccctgtgaggacgatggccaaacctttttcagcctcgacgacggaaacacaaagttcagtgacctgatccagctcgtggatttttaccagctgaataaaggcgttctgccgtgtaagctgaagcatcactgtattcgggtggcgctgtag

SEQ ID NO: 15377 - DNA, 1785 bp, synthetic construct
  misc_feature 1..1785: note = Description of Artificial Sequence: Synthetic coding sequence
  source 1..1785: mol_type = other DNA
atggctctggccggatgtccggatagcttccttcaccacccctactatcaggataaggtcgaacagactccacgatcgcagcaagaccctgctggccctgggttacctgctcagagcgaccggctggcaaaccatcaggaagatgatgtagatctggaggctttagtaaatgacatgaatgcctctcttgagtctctttactctgcttgttcgatgcaatccgacactgtgcccctgctgcaaaacggtcagcatgctaggtctcagcctcgggcatccggaccaccgcgaagcatccagccccaggtgagcccgcgccagcgagtacaacgaagccagccggtccacatactggccgtgagaaggctgcaagaggaggaccagcagttcagaacatcttccctccccgcaattcccaatccctttccagagctctgtggacccgggtctcctcctgtgctgacccctgggtccctccctcctagccaggccgccgctaaacaggatgtaaaggtgtttagcgaagacggaacgtccaaggtggtggaaatcctggctgacatgacagcaagagatctgtgccagttgcttgtgtacaagagccactgcgttgacgacaatagctggacactcgtggagcatcacccccacctggggctggaacgctgccttgaggaccatgagcttgtggttcaggtagaaagcactatggctagcgagtctaaatttctatttaggaaaaattacgccaagtacgagttttttaagaatcctatgaatttctttccggaacaaatggtgacatggtgccaacaaagcaatggctcccagacacagcttcttcagaactttctgaatagttcctcgtgtcctgagattcagggctttctacatgtgaaggaactgggcaagaaatcttggaagaagctgtatgtatgcctgcggaggtccggcctgtattgctcaacaaagggcacctctaaggagccgcgccatctgcagctcctggcagatctggaagacagcaatattttttccctaatcgcgggtaggaagcagtataatgctccgacggaccatgggctctgtatcaagccaaataaagtgcgcaatgagacaaaggaactcagactcctctgcgctgaggacgagcagacgcggacctgttggatgactgcctttcgtctcctgaagtacggcatgctgctgtatcagaattataggatccctcagcagcgaaaagcgttgctgagtccattctcaacacccgtcaggagcgtcagtgaaaactcactggtagcaatggactttagcggacagaccggaagagtcatagagaacccagcggaggcacagagcgccgcactggaagaaggacacgcttggcgcaagcgcagcacacggatgaatattctaggctcacagtctccgcttcaccccagcaccctcagtacagtgatccataggacccagcactggttccacgggagaatcagcagagaagaaagtcacagaattattaagcagcagggcctagtggatggattatttcttctccgagattcgcagtccaatccaaaggcctttgttttgaccctgtgccatcaccagaagatcaagaacttccagatcctcccctgcgaggatgacggccagacattcttcagcctggatgatggcaacaccaagtttagtgacctcatccagttggtggacttctaccagttgaataagggggtcctgccatgcaagctgaagcatcattgcattagggtggccctgtag

SEQ ID NO: 15378 - DNA, 1785 bp, synthetic construct
  misc_feature 1..1785: note = Description of Artificial Sequence: Synthetic coding sequence
  source 1..1785: mol_type = other DNA
atggccctagccggttgtcccgactcttttctgcaccatccatattatcaggacaaggttgaacaaacccctaggtcccaacaggacccagccggtccaggcctccccgcgcaatctgatcggctggctaatcatcaggaggatgatgtagatttggaagctctggtgaacgacatgaacgcctctctggaaagcctatactctgcctgtagtatgcagtccgataccgtacccctcctccagaacggccagcacgcaagaagccagcctcgagcgtccgggcccccccgctctatccagccacaggtgtccccgcgccagcgcgtgcagcgctctcaaccagtacacatcctcgcagtgaggcgcttgcaagaggaggatcagcaatttcgtacctcaagtctgcccgccattccgaacccttttccagagttgtgcggtcctgggagtcctcctgtgctgacccccggatccttgccgccgagccaggccgcagctaagcaggatgtaaaggtattcagcgaggacggaacttccaaagtggtggagatccttgcggatatgaccgcaagggatctgtgtcagctgctggtgtataagagccattgcgtagatgataacagctggactttggtagaacaccacccccatctcggcctggaacgatgcctggaggatcacgaactggtggtccaagtagaaagcacgatggcctcggagtctaaattcctcttccgaaagaactatgccaaatatgaattcttcaagaaccctatgaacttctttccagagcagatggtcacatggtgtcaacagtcaaatgggtcccaaactcagttgctgcagaactttctcaattcgtctagttgtcctgaaatacaggggttcctgcacgtaaaagaactgggcaaaaaatcctggaaaaaactttatgtctgtctgaggcgcagcggcctgtactgcagtaccaagggaacttccaaagaacccagacatctgcagctgttggctgatttagaggacagcaacatttttagtcttattgctggcaggaaacagtacaatgcaccgactgatcatggactgtgcatcaagcctaataaagtgcgcaacgagacaaaggagctcaggctactttgcgctgaggacgaacaaaccaggacttgctggatgacagctttccgcttgctgaaatacggcatgctcttgtaccaaaattatcgcattccccagcagagaaaagctctgttgagtccctttagcacccctgtgcgctctgtgtcagagaactcgcttgtcgctatggacttttcggggcagactggacgcgtcatcgagaatccagctgaggcccagagcgccgcgctggaggagggacacgcatggaggaagcgctccacacggatgaatatactgggatctcagtcaccattgcacccctctacccttagtacagttatccatcgtacgcaacattggttccatgggcggatttcacgagaagagtcacacaggattattaaacagcaaggtctcgtcgatggcctctttctgttacgcgacagccaaagtaatcccaaggctttcgtgttgaccctgtgccaccaccaaaaaatcaaaaacttccagattctgccctgtgaagatgacgggcagactttcttctctctagatgatggcaacacaaaattcagtgatctcatccagttggtcgacttctatcagctgaataagggagtcctgccctgtaagctgaaacatcactgtattagagtggccttatag

SEQ ID NO: 15379 - DNA, 1611 bp, synthetic construct
  misc_feature 1..1611: note = Description of Artificial Sequence: Synthetic coding sequence
  source 1..1611: mol_type = other DNA
atgaacgccagccttgagtctctctattccgcgtgctctatgcagagcgatactgtgccactgctccagaacggacagcatgcccgatcccaaccacgcgcaagtgggcccccacgctcgatccaaccacaggtgagccccagacagcgtgtgcagcggagtcagcccgtccacatcctggccgtcaggcgcttgcaggaagaggatcagcagtttaggacctcctccctgcctgccatcccaaatccatttcctgaactttgtggccccggaagtcctcctgtgctcactccgggctcactacccccctctcaggctgccgctaaacaggatgtcaaagtgtttagcgaggatggtactagcaaagtggtggagattctggcggacatgaccgcgcgggacctgtgtcagctcctcgtatacaagtctcattgcgtagacgacaattcatggactctggttgaacaccatccccatctggggctcgagagatgcttggaagaccacgaattggtcgtgcaagtcgaaagtacaatggcttccgaatccaaattcctgttccggaagaactacgctaagtacgagttctttaagaatccaatgaactttttcccagaacagatggtaacatggtgccagcagtcgaacgggagtcagactcaacttcttcaaaattttctcaactctagtagctgcccagaaatccagggctttctacacgtgaaagagcttggcaagaagtcatggaaaaagctgtacgtctgcctcagaagaagtggcctctattgcagcaccaaaggcacctctaaggagccccgccatcttcagcttttagcggatctggaggactctaacatatttagtctgatcgctggaaggaagcagtataacgcccctaccgatcatggcctctgcatcaagcccaacaaggtgaggaacgaaacaaaagaacttagactcctgtgtgctgaggacgagcagacccgaacgtgctggatgacagcatttcggctgttaaagtatggcatgctcttgtaccaaaactataggatccctcaacaaagaaaggccctcctgagccctttctcaacgccagtcagaagcgtgagcgagaactccttagtagctatggacttcagcggacagacaggacgcgtgattgagaatccagccgaggcccagtccgcagctctggaagaggggcacgcctggcggaagcgatctacccgtatgaacattcttggatcccagtcccccctgcatccttccacactgagcaccgtgattcatagaactcagcattggttccacggacgcatctcaagggaagaaagtcatcgcatcataaagcaacaaggactggtcgatggactgttcctactccgggactctcagagcaatcccaaggcgtttgtgctcacactatgtcaccaccagaagattaagaattttcagatattgccatgcgaggacgatggacaaacatttttcagcttggacgacggcaacacaaagttctcagatctgatccagttagtcgatttttaccaactgaacaaaggagttctgccatgcaagctgaagcatcattgcatccgcgtggccctctag

SEQ ID NO: 15380 - DNA, 1611 bp, synthetic construct
  misc_feature 1..1611: note = Description of Artificial Sequence: Synthetic coding sequence
  source 1..1611: mol_type = other DNA
atgaacgcttctctggagtcgctgtactcagcttgctctatgcagagcgatactgtgcccctgctccagaatggccaacacgccagatcccaaccacgtgcctccggtccgcctagatccatccagccccaggttagtcctagacagagggtgcaacggagccagccggtgcacattctggctgtacggcgcctccaggaggaggaccaacagttccgaaccagtagtcttcccgcaatccccaatcctttccctgaactgtgtggccctggcagccccccagtgctgacccctgggagccttccaccatcccaggctgcagccaagcaggacgtcaaagtgttctctgaagacgggaccagtaaggtcgtggaaattctggcagacatgaccgccagggacctttgccaattgcttgtgtataagtcgcattgtgtggacgataatagttggacactcgtggaacaccatccacatcttggcttggaaaggtgtctggaggatcacgaattggtggtccaggtagagagcacaatggcaagcgagtctaaattcttattccgcaagaattacgctaagtacgaatttttcaagaaccctatgaatttctttcctgagcagatggtcacctggtgtcagcagtctaacggatcccaaactcagcttctgcagaattttcttaatagcagcagttgtcctgaaatccagggctttttgcatgtcaaggaactgggcaagaagtcctggaagaagttatatgtatgcctgcggcgatctgggctgtactgttccaccaagggaacgtccaaggaacccagacacctgcagttgctggccgacctcgaggattctaatatatttagccttatagcagggcgcaaacaatataacgcacccactgatcacgggctctgcattaagccgaacaaggtgcgcaacgaaacaaaggaactcagattgctatgtgcggaagacgaacagacgcgcacatgctggatgacggccttcaggctgctaaaatatggaatgttgctgtatcagaactacaggatcccacagcaacgcaaagctctcctgtctccattctccacccccgtgagatctgtcagtgagaactcgctcgtggcgatggactttagcggacagactggaagggttatcgaaaacccagcagaagcccagagtgctgccctcgaggagggacacgcttggcgtaaacgctccactaggatgaatatactgggatcacagagcccactgcacccatctacgctgtctacagtgattcacagaacacaacattggttccacggtagaatatcacgggaggagtcacacagaatcatcaagcagcagggactcgtggacggacttttcctcttgagggatagccagagtaatcccaaagctttcgtgctaacgctctgtcatcatcagaaaattaaaaactttcagattctgccctgcgaggatgatggccagacgttcttttctttggacgacggtaatacaaagttctccgatctcattcagctcgttgatttctaccagttgaacaaaggtgtgttaccctgcaagctgaaacatcattgtatcagagtagccctgtag

SEQ ID NO: 15381 - DNA, 1767 bp, synthetic construct
  misc_feature 1..1767: note = Description of Artificial Sequence: Synthetic coding sequence
  source 1..1767: mol_type = other DNA
atgcaggctgcaggacccttgtttcgctctaaggataaggtggaacagacacctaggtctcagcaggaccccgccggccctggactcccagctcagtctgataggctcgcaaaccatcaggaggatgacgttgaccttgaagcacttgttaacgatatgaatgccagccttgaatccttgtacagcgcctgctcaatgcagtctgacacagttccccttctgcagaatggacagcatgccaggtcacaacctcgggccagtggcccccccaggtctattcaacctcaagtgtcccctaggcaaagagttcagcgctcccagcctgtgcatatcctcgccgtgaggaggctccaagaagaagaccagcagtttagaacgtcttctcttcctgcaattccaaaccccttcccagaactgtgcggcccgggcagtccaccagtcttaacccccggctctctgcccccctcacaagctgctgccaagcaagatgtaaaggtgttctccgaggacggtactagtaaagttgtggaaattctcgccgacatgactgccagagacctgtgccagctcctcgtctacaaatcccattgcgtggacgataatagctggaccctggtagaacaccacccgcacctaggactggagcggtgcctcgaggaccatgagctggtcgtccaggtggagtctaccatggcttccgaatctaaatttctcttcagaaagaactatgccaagtatgagttctttaagaatccaatgaatttcttccctgagcaaatggtgacctggtgccaacaatctaatggttcccagacacagctcctacaaaacttcctgaactcttcttcatgtcctgagatccaaggatttctccatgtgaaagaactcggtaagaaatcctggaagaaactgtacgtgtgcctgcggaggagcgggttgtattgttctaccaaggggacttccaaagagcctcgacacctgcaactcctggcggacctcgaggattctaatattttctcactgatcgcaggccgaaaacaatataacgctcccactgaccatggcctgtgtattaagcccaacaaggtaagaaacgagactaaggagcttagattgctctgcgctgaggatgaacagacccgaacgtgctggatgacagcctttcggctgctgaaatatggcatgctcctgtaccagaattatcgaattcctcagcagagaaaagccctcctcagccccttctcaacacctgtgcggtctgtcagtgagaatagtctggtggcaatggactttagtgggcagaccgggcgcgtgatcgaaaatcccgctgaggctcagtccgctgccctcgaggaaggccatgcatggcgcaaacgctctaccaggatgaacatcctgggatcgcaaagcccccttcacccttctacattgtccactgtgatacaccgcactcagcactggttccatggcaggatctcacgggaagaatctcacaggattataaagcagcaaggattggttgatggattgttcctactccgggattcacagtcaaaccccaaagcttttgtcttgacactctgtcaccatcagaagattaaaaatttccagatacttccatgtgaagacgacggccagacctttttttctctggacgatggcaacactaaatttagtgaccttattcagctggttgatttctatcagctaaataagggcgtgctgccttgcaaactgaaacaccactgcatccgagtggctttgtag

SEQ ID NO: 15382 - DNA, 1611 bp, synthetic construct
  misc_feature 1..1611: note = Description of Artificial Sequence: Synthetic coding sequence
  source 1..1611: mol_type = other DNA
atgaatgcaagtttagagtccttgtacagtgcttgttctatgcagagcgacacagttccgttgctgcagaatggacagcatgctcggtcccaaccacgtgcctctgggcctcctcggagcatccaacctcaggtcagcccccgccaaagagtgcagcgatcacagccagtccatatcctggccgtacggagactgcaagaggaggaccaacagttcaggacctcctctctgccagccatccccaatccctttcctgaactgtgtggaccgggatcccctcctgtgctcacaccgggatccttgcccccaagccaagccgccgccaagcaggacgtaaaggtcttttctgaagacggaacaagcaaagtggtagaaatcctcgccgatatgaccgcccgagacctgtgtcagctattggtctataaaagccactgtgtggatgataatagctggaccctggtagaacaccacccacacttgggcctggagcggtgcctggaagatcacgaacttgtcgtgcaggttgagtccacaatggcaagcgagtctaaatttctcttcagaaaaaattacgccaaatacgagtttttcaaaaacccaatgaacttctttcccgagcagatggtgacctggtgccagcagagtaatggcagtcagacacagcttcttcagaacttcctgaatagcagctcatgcccggaaatacagggctttctccacgtcaaagagcttgggaaaaaatcatggaaaaaactctacgtgtgtctgcggagaagtggactatactgttcaacgaaaggaacttccaaagaaccgcggcacctccagctgcttgccgaccttgaggacagtaatatcttttcgctgattgccggaagaaaacagtacaacgccccaaccgatcatggactgtgcataaagcccaataaagttcgaaacgagaccaaagagctgagactcctgtgcgctgaggacgagcaaacccgcacatgttggatgactgccttccggctccttaagtatggcatgctcctgtaccagaattataggatcccacagcagagaaaagccctgctcagtccattctcgacccccgttcggagcgtgagtgagaattctttagtcgccatggacttctcagggcaaaccggccgggtcattgaaaatcctgcagaagcccagtcggcagccctggaagaggggcatgcctggagaaagcgctcaacgcgcatgaacatcctcgggagccagtcccccctgcatccgtcaactctgtccactgtgatacaccggacacagcactggttccatggccgaatcagcagggaagagagtcataggattatcaagcagcagggcctcgtggatggcctgtttctgttgcgggattcccagtcgaatcctaaggcttttgtgctgactctgtgtcaccaccagaaaatcaaaaatttccagatactaccttgcgaggatgacggtcagacatttttctccttagatgatgggaacaccaagtttagcgatctgatacagcttgttgatttctatcagctcaataagggggtcctcccttgcaaactgaaacatcactgtatccgggtggccctatag

SEQ ID NO: 15383 - DNA, 1611 bp, synthetic construct
  misc_feature 1..1611: note = Description of Artificial Sequence: Synthetic coding sequence
  source 1..1611: mol_type = other DNA
atgaatgcgtcactggagtccttatacagtgcatgctccatgcaaagtgatacagtaccattgctgcagaatgggcagcatgctcgctctcagccacgcgcatccggccctcctcgcagcatccagcctcaggtctctccccgccagcgcgtgcagcgtagccaacccgtccacattctcgccgtgcggagacttcaggaggaggaccaacagttccgaacctctagccttccggccatcccaaaccctttccccgagctgtgtggcccagggtcaccccccgtgctcactccagggtcactgccgccctcacaggctgcagctaagcaggatgtgaaggtcttttctgaggatggcacatcaaaagtggtcgagatcctggccgacatgactgcgcgtgacctttgtcagttgctcgtctataaatcacactgcgtagatgacaactcctggaccctggtggaacatcacccccatctgggacttgagcgctgccttgaggatcacgaacttgtggtgcaggtggagtctactatggccagcgagtccaagttcctgttccggaaaaactatgccaaatacgaattctttaagaaccccatgaacttctttccagagcagatggtgacgtggtgtcagcagtccaacggctcacagacccagctgctccagaattttctgaatagctcctcctgtcccgagatccaaggcttcttacacgtaaaggagcttgggaaaaagtcctggaagaagctttacgtgtgcttaaggcggagtggcctctactgctctacaaaaggcacttccaaagaaccaaggcacctccagttgttggccgacctcgaggacagcaacatattctccctgatcgccggtagaaaacagtataacgcccctacagaccatgggctgtgcattaagcctaacaaagtgcgaaatgagaccaaagagcttaggctgctgtgcgctgaagatgaacagacccggacatgttggatgactgcctttcgtctcttaaagtacggtatgcttctgtatcagaattaccggattcctcagcagagaaaagccttgctcagcccattcagtacccctgtgaggagcgtgagcgaaaactcactagttgcgatggacttttctggacagaccgggcgcgtcattgagaacccggccgaggcccagtcagcagctctcgaggagggacacgcttggaggaagagatctacacggatgaacattcttggctctcagtcgccactgcaccccagcactctcagcacagttatacatcggacccagcactggttccacggccggatcagtagagaggagtcgcacagaattatcaaacaacaggggctcgtggacggactctttttgctgcgagatagccaatccaatccaaaggcttttgtcctcactctgtgccaccaccagaagattaaaaattttcagattctcccatgcgaggacgatggacagacatttttcagcctcgatgacggcaatactaaattctccgatctcatccagctggtggacttctatcaactcaacaaaggagtccttccctgtaagctcaaacaccactgtattcgggtggctttatag

SEQ ID NO: 15384 - DNA, 345 bp, synthetic construct
  misc_feature 1..345: note = Description of Artificial Sequence: Synthetic coding sequence
  source 1..345: mol_type = other DNA
atgcaggcggctggcccccttttcaggtctaaagacaaggtggagcagacccctcggagccagcaggaccccgctggccctggactccccgcccaatcagacaggctagctaatcaccaagaagatgatgtggatcttgaagcactcgtgaacgacatgaatgcttcattagaatccttatactcagcgtgcagtatgcagtccgacacagtgccactacttcagaatggacagcacgccaggtcacagcctcgggcaagcggaccacctaggtcgatccagccgcaagtcagtcctaggcaacgggtccagcggtcccaacccgtacacatcttggcggtatag

SEQ ID NO: 15385 - DNA, 1767 bp, synthetic construct
  misc_feature 1..1767: note = Description of Artificial Sequence: Synthetic coding sequence
  source 1..1767: mol_type = other DNA
atgcaggcggccgggcccttgttccgatctaaggacaaggtagagcagactccacgctctcagcaggatccagccggcccaggactccctgctcagtctgacaggctagccaatcaccaggaagacgacgtcgacctggaagccctggtcaatgacatgaatgcctcccttgaatccctatattccgcttgttccatgcagagtgataccgtgcccttattgcagaatggacagcatgcaagaagccagcctcgcgctagtggcccccctcgctccatacagccacaggtaagtcctcgtcagcgtgtgcagagatcccagccagtccacatcctggccgtccgtcgactgcaggaagaggaccagcagttccgcacttcctccttgcctgccattccaaacccattccccgaactctgtggcccaggtagtccgccagtcttaactccggggtccttgcctccatcccaggctgccgccaagcaggatgtgaaggtattctctgaagatgggacatctaaagtagtagagatcctcgctgatatgacagcccgagacttgtgccaactgttggtgtacaaaagccattgtgtggacgacaatagttggaccctcgtggaacaccaccctcacctgggcttggagagatgtttggaggatcacgagctcgtcgtgcaagttgagtcaactatggcgagtgagagcaaatttctattccgaaaaaattatgccaaatacgagtttttcaagaacccaatgaatttttttcccgagcagatggtgacctggtgccagcagtccaacggctcccagacccagctcttgcagaacttcctcaactcctcttcctgtccagaaattcagggctttttacacgttaaagagttagggaaaaagagttggaaaaagctgtacgtgtgcctgcgccgctcaggattgtattgcagcacaaaggggaccagtaaagaaccacgccatttacagctacttgcagacctggaggactccaacatctttagcctgattgccggaaggaaacagtataatgcacctacagaccacggattgtgcataaaacctaataaggtgcgaaacgagactaaagagctgcgcctcctctgtgccgaagatgagcagactagaacctgttggatgaccgcatttcgtctactcaagtacggaatgttgctctaccagaattaccgcatcccccagcaacggaaagccctcctcagtcctttttccacccccgtcaggtcagtgagcgagaactcgctggtggcaatggacttctccggccaaacgggaagggtcatcgagaacccagctgaagcccagtctgccgcattggaggagggccatgcttggcgcaagcgctctaccagaatgaacatcttgggaagccagtcacccctccaccctagtactctgagtactgtgatccatcggacacagcattggttccatggtaggatttcccgcgaggagagccatcgaattattaaacagcaaggattggttgatggattattcttgcttagggacagccagtctaaccctaaggcctttgtgctcactctgtgtcaccaccagaagatcaaaaactttcagatcctgccttgtgaagacgacggacagaccttcttttctttggatgatgggaacacaaaattttctgacctaatacagctcgtcgacttctaccagttgaataaaggagttctaccctgtaaactcaaacaccactgcatccgagttgcactgtag

SEQ ID NO: 15386 - DNA, 531 bp, synthetic construct
  misc_feature 1..531: note = Description of Artificial Sequence: Synthetic coding sequence
  source 1..531: mol_type = other DNA
atggaagcaatcgcaaagtacgatttcaaggcgacagctgatgatgagttaagttttaagcgcggcgacatcctcaaagtgctgaatgaagagtgcgaccagaattggtacaaggcagaactcaacgggaaagatggcttcataccgaaaaactacatagagatgaaaccccacccatttggtaacgacgtgcagcattttaaggtgctccgggatggcgcgggcaagtatttcctctgggtggtaaaatttaattccctgaatgagttagtggattaccaccgctcgactagcgtatctagaaaccagcaaatcttccttagggacattgagcaagttccccagcaacccacctatgtgcaggcactcttcgactttgacccccaggaagacggggaattgggcttccggcgcggtgactttatccacgtgatggataattcggatccaaactggtggaagggcgcttgccacggccaaacaggcatgttcccgagaaattacgtaacccccgtgaaccgcaacgtgtag

SEQ ID NO: 15387 - DNA, 654 bp, synthetic construct
  misc_feature 1..654: note = Description of Artificial Sequence: Synthetic coding sequence
  source 1..654: mol_type = other DNA
atggaggccattgccaaatacgacttcaaggcgacagcggatgatgagttgagcttcaagcgaggtgacatcctaaaggtcctcaacgaggagtgcgatcagaactggtataaggctgagctcaacggtaaggatggctttatccctaaaaattacatcgagatgaagccccatccttggtttttcggcaagatccctagagccaaagccgaggaaatgctgtctaaacagaggcacgatggagcttttttgattcgagagtctgagtcagcacccggggattttagcttgagtgtgaagttcggaaatgatgtccagcatttcaaggtgctcagggacggcgccggaaaatactttctgtgggtggttaagtttaatagtctaaatgagctagtggactaccacaggtccacctccgtgagtcgtaaccagcagattttcttgagggatatagagcaagtaccccagcagcccacatatgtgcaggccctcttcgactttgacccacaggaagacggggaactgggctttagaaggggcgattttattcatgtgatggacaatagtgatcccaattggtggaagggggcttgtcacggacaaactggaatgtttcctcgaaactatgtcacccccgttaacaggaatgtttag

SEQ ID NO: 15388 - DNA, 654 bp, synthetic construct
  misc_feature 1..654: note = Description of Artificial Sequence: Synthetic coding sequence
  source 1..654: mol_type = other DNA
atggaagctatcgctaagtatgatttcaaggccaccgctgacgacgaactgagttttaaaagaggggatatcctgaaagtgcttaatgaggaatgcgatcaaaattggtacaaggccgaacttaacggaaaggatggctttattcccaaaaattatatagagatgaagccgcatccctggttttttggaaagatcccaagagccaaggccgaggagatgctgtcaaaacaaaggcacgatggagcctttctgatccgggaatccgagtcagcacctggtgacttcagcctttctgtcaaattcggtaacgacgttcagcactttaaagtgctgagggatggcgccggaaaatactttctgtgggtcgtaaaatttaatagcttgaacgagcttgtagactaccatcggtccacatccgtcagtagaaatcagcaaatattccttcgcgacatcgagcaggtgccacagcagcctacatacgtccaggcactgtttgacttcgaccctcaggaggacggcgaactgggatttagacggggcgatttcatacacgttatggacaacagtgaccccaactggtggaagggggcctgtcatggccaaacagggatgttccctaggaactatgttacccccgtcaatcggaatgtttag

SEQ ID NO: 15389 - DNA, 654 bp, synthetic construct
  misc_feature 1..654: note = Description of Artificial Sequence: Synthetic coding sequence
  source 1..654: mol_type = other DNA
atggaggccattgcaaaatacgatttcaaggccacagccgatgacgaactgtcttttaaacgcggggatatccttaaagtactgaatgaagaatgcgaccagaactggtacaaggcagaactcaacggcaaggacggttttatacctaagaactatatcgagatgaaaccgcatccttggttttttggtaaaataccccgcgccaaggccgaagagatgctgtccaagcagcgccacgacggggcttttctgatccgggagtcagaatcggctcctggagatttcagcctgtctgtgaagttcggcaacgatgttcagcatttcaaggtcctgagggacggtgcaggaaagtatttcctttgggtagtgaagttcaacagtctcaacgaactcgtcgattaccacaggtcaacttccgtttcgcggaaccaacagatttttctgcgggatatcgaacaggtgccgcagcagcccacctacgtgcaggcattatttgatttcgatccccaggaagatggcgaactgggctttagacgaggagacttcattcacgtgatggataattctgaccctaattggtggaaaggggcttgtcacggccagacagggatgtttcccagaaactacgtgactcctgtcaatcgcaatgtgtag

SEQ ID NO: 15390 - DNA, 222 bp, synthetic construct
  misc_feature 1..222: note = Description of Artificial Sequence: Synthetic coding sequence
  source 1..222: mol_type = other DNA
atgcccgcccttcacatcgaggatctgccagagaaggagaaacttaagatggaagtagagcagctgaggaaagaggtgaagttacagcgtcaacaggtgtccaagtgtagcgaagagattaagaactacatcgaggaacggagtggggaggatcccctggtgaagggcatccccgaggataagaacccgtttaaagaaaagggctcatgtgttatcagctag

SEQ ID NO: 15391 - DNA, 432 bp, synthetic construct
  misc_feature 1..432: note = Description of Artificial Sequence: Synthetic coding sequence
  source 1..432: mol_type = other DNA
atgagcggtcgtgggaagacaggcgggaaggcccgcgctaaggccaagagccgatcctcacgggctggcctccaatttcctgtggggagggtgcataggctcctgagaaaagggcactatgctgaaagagtgggcgccggcgccccagtgtacttggcagccgtgctcgagtacctaacagccgagatcctcgagctggcaggcaatgctgccagagataacaagaaaactagaattataccaaggcacctgcaactggcgattcggaacgacgaagagctgaataagctgctgggcggtgtcaccattgcccaaggcggtgtgctgcccaacattcaggctgtgctgctgccgaagaagacttccgccacagtgggccccaaagctccgtctggaggaaagaaggccacgcaagcaagccaggagtattag

SEQ ID NO: 15392 - DNA, 432 bp, synthetic construct
  misc_feature 1..432: note = Description of Artificial Sequence: Synthetic coding sequence
  source 1..432: mol_type = other DNA
atgtccgggaggggcaaaactggcggaaaggctagggcaaaagccaagtcccgcagctcaagagccggccttcaatttcctgtcggaagagtgcacagattgctaagaaaggggcactacgccgagcgagtgggagccggcgctcctgtgtatctagccgctgtgttggagtacctgacagctgagatcctcgaattggccggcaatgctgcccgagataacaaaaaaactcggattatcccgcgacatcttcagttggccatacgcaacgacgaggagctcaacaagcttttaggaggggtgacaatcgcacaggggggggtcttgcccaatatccaggcagtcttactacccaagaaaacatctgctacagtaggaccaaaggctccctccgggggaaaaaaggccacacaggcatcacaggagtactag

SEQ ID NO: 15393 - DNA, 276 bp, synthetic construct
  misc_feature 1..276: note = Description of Artificial Sequence: Synthetic coding sequence
  source 1..276: mol_type = other DNA
atgtgcccttgtccattacacagagggcgcggacctcccgccgtgtgtgcatgctcagctggtaggctgggactgcgctcttccgccgcccagcttactgctgcccggctgaaggcactgggggacgagctgcaccaaagaactatgtggagacgtagagcccgctcacgcagagcgcccgccccgggagctctgcccacatactggccatggctgtgtgcggccgctcaggttgctgcgcttgcagcttggttgttagggaggaggaacctatag

SEQ ID NO: 15394 - DNA, 618 bp, synthetic construct
  misc_feature 1..618: note = Description of Artificial Sequence: Synthetic coding sequence
  source 1..618: mol_type = other DNA
atgaccgaaaggagggtgcctttctctctgttaaggggcccaagctgggatccattcagagattggtaccctcactcccggctcttcgatcaggctttcgggctgcctcgcctgccagaggaatggtctcagtggctcggcggctcttcatggcccggatacgtgcgacctctgcctccagccgcaattgagtctcctgctgtagcggcacctgcttatagtagggcccttagccgacaactctcatcaggtgtgtcagaaatcagacataccgccgatcgctggagagtgtctctcgacgttaatcatttcgcacccgatgagctaaccgttaaaactaaagacggtgtcgtggaaattacaggtaaacatgaagaacgccaggatgagcacgggtatatcagccgttgcttcacacgaaagtatactctccctcctggggtcgaccctacacaggtgtctagctccctgtcacccgagggtacactaacagttgaagcgcctatgcctaagctagctactcagtctaatgagattaccatcccggtgacatttgagtcacgggctcagctaggcggacctgaagccgccaagtccgacgaaacagctgcaaagtag

SEQ ID NO: 15395 - DNA, 513 bp, synthetic construct
  misc_feature 1..513: note = Description of Artificial Sequence: Synthetic coding sequence
  source 1..513: mol_type = other DNA
atgacagaacgtcgcgtgcctttcagtttgcttcgtgggcctagttggcctggttacgtgcgacccctgccacctgctgccatcgagtcacccgcagtggccgccccagcttattcccgcgccctctctagacagttaagcagcggcgtgtccgagataaggcacacggcagatcgatggagagtctctcttgacgtgaaccacttcgcaccagatgagctcactgtgaagacaaaggatggtgtggtggagataacgggcaaacacgaggaaagacaggacgagcacggatatatcagtaggtgttttacccggaagtataccttaccccccggtgtagaccctacacaagtgtcttcatcgctgtcacccgaagggacgcttacggtggaggccccaatgccaaaactggcgacgcagtcaaacgaaataaccatacccgttacatttgagagccgggcacagctgggtggccctgaagcagccaagtcagacgaaactgcagctaagtag

SEQ ID NO: 15396 - DNA, 1926 bp, synthetic construct
  misc_feature 1..1926: note = Description of Artificial Sequence: Synthetic coding sequence
  source 1..1926: mol_type = other DNA
atggcaacggctaaaggcattgcaattggcattgatctgggaaccacgtattcttgtgtgggcgtgttccagcatggcaaggtggaaattatcgccaatgatcagggcaaccggaccaccccctcttatgtggctttcacagacactgaaagactcataggagacgcagccaaaaatcaggtagccatgaatccgcaaaacacggtatttgacgcgaagaggctgattggccggaagttcaacgacccggtggtgcaggctgacatgaaactctggccctttcaggtcattaacgagggaggaaagccaaaggtgctggtcagctataaaggcgagaataaggccttttaccccgaagaaatatcatcgatggtcttaaccaagctcaaggaaacagccgaagctttcctgggacatccagttacaaacgccgtgattacggtccctgcgtactttaacgattcgcagagacaggctaccaaagacgctggagtcatagcaggattgaatgtgcttcgtatcatcaatgagccaacagccgcagccattgcctacgggttagacaagggtggccaaggagaacgtcacgtactgatcttcgacttgggcggggggacttttgacgtgtcaatcctaacaatagatgacggtatcttcgaggtgaaagcgaccgctggcgatacccacctcgggggtgaggacttcgacaaccgcctcgtgagccatttcgtcgaagagttcaagagaaaacataaaaaagatatcagccagaataagcgagcagtgcgacggctgcgtaccgcctgcgagcgggccaaacgaactctatccagcagcacgcaagcaaacttggagatcgattccctgtacgagggcatcgatttttacacctccatcactagagcacgtttcgaagagttgtgcgctgacctattcagaggaaccctggagcctgtcgagaaggccctgcgtgatgccaagatggataaggccaagatacacgacatcgttcttgttggcggctcaactagaatacccaaggttcagaggctcctgcaggactactttaatggacgggatctgaacaagagcattaatccagacgaagccgtcgcttatggcgcagccgttcaggccgcaattctaatgggggacaaatcagagaaagttcaagacttgctgctgctggatgttgctccactttctctgggactggagaccgctgggggagtcatgaccgcattaatcaagagaaacagtactatacccactaagcagacgcagatctttacaacgtactccgataaccagcccggcgtgctgattcaagtgtatgagggtgagagagccatgaccaaagacaacaatcttcttgggcgctttgacctgactggcataccccccgcacctcggggcgtacctcaaattgaagtaacatttgatatagacgcaaacggtattttgaatgtgactgccatggacaaatccaccggaaaggtcaacaagatcacaatcaccaatgataagggcaggctgagcaaagaggaaatcgagcggatggtgctcgacgccgagaaatacaaggccgaggacgaggtacagcgagaaaagatcgctgccaagaatgcactggagtcttacgcttttaacatgaaaagcgtggtatctgacgaaggactcaagggcaaaatttctgagagtgataaaaataagattctagacaagtgcaacgaactgttaagttggctcgaagtgaaccagctcgcggaaaaagatgagtttgaccacaagcgcaaagagctgaaacaaatgtgtaaccccataattaccaagctctaccaaggcgggtgtacagggcccgcgtgcggaaccggttacgttcctgggagaccggctacgggccctacgattgaggaggtcgactag

SEQ ID NO: 15397 - DNA, 1599 bp, synthetic construct
  misc_feature 1..1599: note = Description of Artificial Sequence: Synthetic coding sequence
  source 1..1599: mol_type = other DNA
atggctaccgccaagggaattgccatcggcattgacttgggcaccacttacagctgtgtgggggtgtttcagcatgggaaagttgagatcattgccaatgaccaagggaaccgaaccaccccatcctacgtcgcctttaccgataccgagcggttgatcggggacgctgctaagaaccaggtggccatgaacccccagaacacagtgtttgacgccaaaagacttatcgggaggaaattcaacgaccccgtggtgcaggccgacatgaagctttggccatttcaagtgatcaacgagggggggaaacccaaggtgctggtctcttataagggcgaaaacaaagccttttacccagaggagatcagttcgatggtcttaactaaactcaaggaaaccgccgaggcctttctgggacatccggtgacaaacgcggtgattacagttcccgcctacttcaatgacagccagcggcaggcgacaaaagatgcaggagttatagcaggcctgaatgtgctgcgcattataaacgaacctacagctgctgccattgcctacggcctggacaaaggggggcagggcgagcggcatgtgctcatttttgacctgggcggaggcacctttgacgtgtctatactgacaatcgatgacggaatttttgaagtgaaggccaccgccggggatacccacttgggcggtgaagattttgataacagacttgtcagtcacttcgtagaagagtttaaacgaaagcacaaaaaggatattagccaaaacaagagagcagttcggagactgagaaccgcttgcgagcgggccaagagaaccctctccagtagtacacaggctaaccttgagatcgatagtttatatgaaggcattgacttctacacaagcatcaccagagcccgtttcgaggagctgtgtgcagacttatttaggggaaccctggaacctgtcgaaaaggccctgagagacgctaaaatggacaaggcaaagatccacgatatcgttttagtgggcgggtctacacgcatcccgaaggtgcaaagactcttgcaagattattttaatgggcgggacctaaataagagtatcaatcctgatgaggctgtggcatacggagctgccgtgcaggccgcaatcttgatgggggacaagtcagagaaagtacaggatctcttgctcctcgacgttgctccattgtccttgggattagaaacagccgggggagtaatgacagcgctgatcaaacggaattccacaattcccaccaaacaaacccaaatctttacgacatactccgacaaccagccgggcgtgctcatacaggtctatgagggtgagcgtgccatgaccaaagataacaatctgctgggcaggtttgacctaaccggtatcccccccgcgccaagaggtgttccacagatagaagtcacgtttgatattgatgccaacggtattctgaatgtgacagcgatggataaatctaccgggaaagtgaacaaaattacaatcacaaacgacaaagggagactgtccaaggaagagattgaaaggatggtgctcgacgctgagaagtacaaagccgaagacgtttag

SEQ ID NO: 15398 - DNA, 1926 bp, synthetic construct
  misc_feature 1..1926: note = Description of Artificial Sequence: Synthetic coding sequence
  source 1..1926: mol_type = other DNA
atggcaaccgcaaaaggtatcgctattggcatcgacctaggcaccacctactcatgtgttggagtgttccagcacggaaaagttgagatcatcgccaatgaccaggggaatcgcactactcctagctatgtggccttcaccgacacggaaagactcattggagacgccgcgaaaaaccaagtagcgatgaacccccagaacacagtcttcgacgcaaagagactcattggacgaaaattcaatgatcccgtcgtgcaggccgacatgaagctgtggccattccaagtgattaatgaaggggggaaacccaaagtcttggtgagctacaaaggagagaacaaagctttttacccggaagaaatttcttctatggtgctaaccaagcttaaggagactgctgaagcgttcctaggccacccagttactaatgccgtgattacagtgcctgcttattttaacgacagccagcggcaggccactaaagatgcaggagtcatagctggactgaatgtcctgagaatcattaacgagcctactgccgccgctattgcttacggcctcgacaaggggggccagggagaaagacacgtactgattttcgatttgggagggggtacctttgatgtgagtattctgactatcgacgatggaattttcgaagtcaaggccaccgccggagacacccacctgggaggggaagactttgacaaccgcctcgtctcccacttcgtggaggaattcaagcggaagcacaaaaaggatatctcccagaacaaacgagccgtccgtcggctccgcaccgcctgcgagcgggctaagaggacactgtccagctctacacaagctaacctagaaatcgacagtttgtatgagggcattgacttctacacttctattacaagagccagatttgaagaattgtgtgccgacttgttccggggaaccctggaacctgtcgagaaggctctgagggacgcaaaaatggacaaggcgaagatccatgatatcgtcctggttggggggtcaacacggattccaaaagtgcagaggctgttacaggactactttaatggccgcgatctgaataaatcaatcaatcctgatgaggcagtcgcttatggggccgcagtgcaggccgcaattctcatgggtgataaatctgaaaaagtgcaagatctcctcctgttagatgttgctcccctctctctggggctggaaacagccggcggtgtcatgaccgctttaattaagagaaacagcacgattccaactaaacagacccagattttcaccacatattcagataaccagcccggagtgttgatccaggtttatgagggggaacgcgccatgacgaaggacaacaaccttctgggacggtttgatctgaccgggattccccccgctccgagaggggtgccccagattgaggtgacattcgatattgacgccaacggcatcctcaacgtgactgctatggacaagagcaccggcaaggtcaacaagattactattacgaatgacaaggggcggttaagtaaagaggaaattgagaggatggtgctcgatgccgagaagtataaggcagaagatgaagtgcagagggagaagattgcggccaagaacgcactggagagctatgcattcaacatgaagtccgtggtatcagatgagggcctgaaaggtaagatttcagagtccgacaaaaataagatactcgacaagtgtaacgagctcctcagctggctggaggtgaatcagctcgcagaaaaagacgaattcgatcacaaacggaaagagttaaaacagatgtgtaatcccataattacgaaattgtaccaaggcggctgtacaggacccgcctgtggcactggatatgttcccggacgaccggcaacagggcctaccattgaagaagtagactag

SEQ ID NO: 15399 - DNA, 699 bp, synthetic construct
  misc_feature 1..699: note = Description of Artificial Sequence: Synthetic coding sequence
  source 1..699: mol_type = other DNA
gctaaggggattgcaatcggcattgacctggggacgacatacagctgtgttggggtgttccagcatggaaaagttgaaattattgccaacgaccaagggaatagaactactccatcctacgtcgctttcactgacacagagaggctgattggcgacgccggggtgatcgctggattgaacgtcctgaggatcatcaatgagcccactgccgctgcaatcgcatacggactggacaagggaggccaaggcgaaagacacgtgctaatattcgacctgggaggcggcacatttgacgtctcaatcctcacgattgacgacggtattttcgaagttaaggctacagcaggggatactcaccttggcggcgaggacttcgataaccgtctggtcagtcatttcgtggaggaatttaaaagaaagcataagaaggacatcagccagaataaaagagccgttcggcggctacgcaccgcgtgcgagcgcgccaagcggactttaagcagctctacccaggccaatttggaaatagactcactgtatgaagggatcgacttttacacatccattacgcgggcccggttcgaggaactctgcgctgacctgtttcgcggaacattggagccggtggagaaaggggcacctcctgctagcccccggtgctccggctgcttccgcactacctcaatggatgttatctag

SEQ ID NO: 15400 - DNA, 1074 bp, synthetic construct
  misc_feature 1..1074: note = Description of Artificial Sequence: Synthetic coding sequence
  source 1..1074: mol_type = other DNA
atgaaagagaacaaggagaattcctccccaagtgtcacttctgctaacctggaccacaccaagccatgctggtattgggataaaaaagatctcgcgcacactccctctcaactggagggccttgaccctgcgaccgaggcacggtaccgacgggagggcgctcgctttattttcgatgtgggcacaagacttggactccactatgacaccttggcaacagggataatctactttcacagattttatatgtttcactccttcaaacagttccctagatatgtcactggggcatgttgcctgttcctggctggaaaggttgaagagaccccaaaaaagtgcaaagacattattaagacggcaaggtcgctcctgaatgatgtccagtttggacaattcggagatgatcccaaggaggaggtgatggtcttagaacgtatccttttacagacaattaaattcgatctgcaagtagagcacccatatcagttcctcttgaaatatgctaagcagttgaaaggcgacaaaaacaagattcagaagctcgtgcagatggcctggactttcgtgaatgacagaacatctctctgcactaccctctctctccagtgggaaccagaaatcatcgcggtcgccgtgatgtacctggctgggagactctgtaagttcgaaatacaagagtggacgtctaagcctatgtaccggagatggtgggaacagtttgtgcaagatgtgcccgttgacgtgctcgaggatatttgccaccaaattctggacctctactcacagggtaaacagcaaatgccacatcatacccctcatcagctgcagcagcctcctagccttcaacctacgccccaggtgcctcaggtacagcaatctcagccctctcagtcatcagagcctagtcaaccccagcagaaggacccaccgctgattctgttgcaaggttgggcttgccggcagccggcaacccacctactcccaagccctttggaggattctctgctgtgccccaggccatttccccatccagcatgtctccagctaggaggatggggaggacagccaggatag

SEQ ID NO: 15401 - DNA, 2565 bp, synthetic construct
  misc_feature 1..2565: note = Description of Artificial Sequence: Synthetic coding sequence
  source 1..2565: mol_type = other DNA
atgccgccctgctccggaggggacggctccacccccccgggcccctctttacgcgatcgggactgtcccgcgcagtccgcagagtaccccagggaccggctggacccaagaccaggtagcccctcagaagcctcctctcctccttttctgcggagtagagcccccgtgaactggtaccaggagaaggctcaggtgtttctctggcacttaatggtcagcggcagtaccacattgctgtgcttgtggaaacagccatttcacgtgtccgcattccccgtaacggcgagcctggcgtttcgccagtcacaaggagcaggtcagcacctctataaagatctgcagccatttatattgctgcggctcctcatgccagaagagacacagactcaggaccaacccatggaagaggaagaggtagagactttcgcgttccaagctgaaatcgcgcagctgatgagtctcataataaacacattctacagcaataaggagatcttcttaagggaattaattagcaacagtagtgacgccctcgacaagatacggtacgagagtctgacagacccgagtaagctagattcagggaaggaactgcatataaacttgatccctaacaaacaagatcgcactttgacaatcgttgacacagggattggcatgacgaaggctgacctgatcaataatctcggcactatcgccaagtcaggcaccaaggctttcatggaagccctccaagcaggcgctgacatctctatgatcggccagttcggcgtcggtttttactcagcttaccttgtggctgagaaggttaccgtcataactaagcataacgatgacgagcagtacgcatgggagagttcagcgggcggaagtttcacagtgcggacagatacgggagaaccaatgggccgtggaaccaaggtgatattgcacctgaaggaagatcaaaccgagtacctagaagagcgcaggatcaaagaaatcgtaaaaaagcactcccagttcatcgggtacccaatcacattgttcgtggagaaagagcgagataaggaggtgagtgatgacgaagctgaggaaaaggaagataaggaagaggaaaaagagaaggaagagaaggagagcgaggacaagccagagatcgaggacgtgggtagcgacgaagaagaggaaaagaaagatggtgacaagaaaaaaaagaagaagatcaaggagaagtacatcgatcaggaagaattaaataaaactaagcctatatggacgcggaatcctgatgacatcactaatgaggaatacggagagttctataaaagtctgacaaacgactgggaggatcatctggctgtcaaacacttttcggtcgagggtcaattggagtttagagctctgcttttcgtgcctcgcagggcgccatttgatctcttcgaaaacagaaagaagaagaataacattaagctgtatgtaagacgcgtgtttattatggacaactgtgaggaacttataccagagtatcttaacttcattaggggggttgtggattctgaggatcttcccctcaacatcagtagggagatgctgcaacagtccaagattctgaaagttatccgcaaaaacctggtgaagaagtgccttgagctgttcactgaactggccgaagataaagagaactataagaagttctatgagcaattcagcaagaacatcaaattgggtatccatgaggactcccaaaataggaaaaagttgagcgagttgctcagatactacaccagcgccagtggagacgagatggtttctctgaaggactactgtactcgaatgaaggagaatcagaagcatatctactacatcacgggtgaaactaaggatcaggtcgccaattccgccttcgtagaacggctgaggaagcatggccttgaggtcatctatatgattgaacccatcgatgaatactgcgtgcagcagctgaaagaattcgagggcaagaccctggtttcagtgaccaaagagggactggagcttcccgaagacgaggaagaaaagaaaaagcaggaagagaagaaaacaaaattcgaaaacctgtgcaaaattatgaaggatatcctggaaaaaaaggttgagaaggtggttgtgtcgaatagactcgttaccagcccctgctgcattgtgacctccacctacggctggacagccaatatggagaggattatgaaggctcaggctctgcgtgacaattcgacaatgggatacatggctgctaaaaaacacttagagattaaccctgaccacagtataatcgaaaccttgcgccagaaggccgaagctgataagaacgataaatctgtgaaggatttggtaatactgctttacgagacagctctcttatcaagcggattctctctggaagacccacagacacacgctaatcgcatttaccgaatgattaagcttggattgggcatagatgaggatgaccccactgccgacgataccagtgcggcggtcacggaagagatgcccccccttgaaggcgacgacgacacctccaggatggaggaagttgattag

SEQ ID NO: 15402 - DNA, 1242 bp, synthetic construct
  misc_feature 1..1242: note = Description of Artificial Sequence: Synthetic coding sequence
  source 1..1242: mol_type = other DNA
atggggcgggggactaaagtgatcctgcacctgaaagaagaccaaactgaatacctggaggagaggcgcatcaaagagatcgtgaaaaagcattcgcagttcattggataccctataaccttgttcgtggagaaagaacgcgacaaggaggtctcagacgatgaggctgaggaaaaggaagacaaggaggaggaaaaagagaaggaggagaaggagagcgaggataagcctgaaattgaagacgtgggatctgatgaggaggaagaaaagaaagacggagataaaaagaaaaagaaaaagatcaaagagaaatacattgaccaggaggaattgaataagaccaaaccgatatggacacgaaaccctgacgacatcacaaatgaggagtatggggagttttataagtcgcttacgaacgactgggaggatcacttggccgtcaagcacttcagcgtagaaggccagctagagtttagggccctcttattcgttcctaggcgagctccgttcgatcttttcgaaaatagaaagaaaaagaataatatcaaactatacgtccgtcgcgttttcattatggataattgcgaagaacttattcctgagtacctaaattttattcggggcgtagtagatagtgaagaccttcctctgaacatctctcgagagatgctccagcagagcaagatcctgaaagtgatcagaaaaaatcttgtgaagaaatgcctagagttgtttactgaactggccgaggacaaggagaactataagaaattttatgagcagttcagtaaaaacataaaactcgggatacatgaggacagccagaatcgaaagaaactttcagaactgcttaggtattatacaagtgcatccggcgacgaaatggtctctctgaaggactactgcactcggatgaaggagaatcagaagcatatctactatattacaggggagactaaggatcaggtcgccaacagcgcatttgtggaacggctgagaaagcacggtcttgaggttatctatatgattgagcccattgacgaatactgtgtccagcagcttaaggaattcgagggcaagacattagtatccgtaacaaaggagggcttagaactccccgaggatgaggaagaaaaaaagaagcaggaagagaagaaaactaagttcgagaatctttgcaaaatcatgaaagatattctggagaagaaagttgaaaaagtttgtgagtattctatcagttag

SEQ ID NO: 15403 - DNA, 2412 bp, synthetic construct
  misc_feature 1..2412: note = Description of Artificial Sequence: Synthetic coding sequence
  source 1..2412: mol_type = other DNA
atgagggctctgtgggtgctgggtctgtgttgtgtgctgctcacctttgggtctgtaagagctgatgacgaggtggacgttgacggcacagtagaagaagatcttggtaaaagtagagaagggtcaaggaccgacgacgaagttgtgcaacgggaggaagaggcgattcagttagatggcctgaacgccagccagattcgtgagttgagagagaagagtgagaagtttgccttccaggccgaagttaatcgcatgatgaaactcattatcaacagtctgtacaagaataaagagattttcctgagagaactgatctccaatgcctccgatgcgctcgataagatccgattgatctccctgacagacgagaatgccctctctgggaacgaagaactgactgtcaaaatcaaatgtgacaaggagaagaacttgctgcatgtgaccgacacgggagtcgggatgacccgcgaggagctggtgaagaatctcgggactatcgccaagtcaggcacttctgagtttcttaataagatgacagaggctcaagaagacgggcagtccaccagcgaactgatcgggcagttcggagtgggattttactcagcgttccttgtcgccgacaaagtaattgttacttcaaaacacaacaacgatacccagcacatttgggaaagcgactctaacgaattcagtgtgatcgcggacccacgagggaacaccttaggcagagggaccaccataacacttgtgctgaaggaggaggcttccgactacttggagctggatacaatcaaaaatctggtaaaaaagtattcacagtttatcaattttcccatctatgtgtggtcctccaaaaccgaaaccgtcgaagaacccatggaggaagaggaggctgccaaagaggagaaagaagaaagcgatgacgaagctgccgtagaagaagaagaggaggagaaaaagcctaagacgaagaaggtcgagaagacagtgtgggactgggagctgatgaatgatatcaaacctatctggcaaaggccttccaaagaggtggaggaagacgagtataaggcattctacaaaagtttcagcaaggagagtgatgatcctatggcctatatccactttactgcagaaggcgaagttacatttaaaagcatcttgttcgttcccacttctgcaccccgggggctttttgatgaatacgggagcaagaagtctgactacatcaaactgtatgtgagaagggtttttattacggacgattttcatgatatgatgcctaagtacctgaacttcgtaaagggggtggtggatagcgacgacctgccactcaatgtttcccgggagaccttgcagcagcataaacttctgaaggtgatccggaagaagctggtcagaaaaaccctagacatgatcaagaaaatagcagatgacaagtacaatgacaccttttggaaagaatttggtacaaacatcaaactcggcgtcatcgaggaccatagcaatcggacaagactcgccaagttgcttagattccagagctcgcaccaccccaccgatatcaccagcttggatcagtatgtcgaacggatgaaggaaaagcaggataaaatttatttcatggccggttcgtctagaaaggaagccgaaagcagccccttcgttgagagattgctgaagaaggggtacgaggtgatatatttaaccgagcccgtggatgagtactgtatccaggccctccctgaattcgatggcaaacgctttcagaacgtggcgaaggagggcgtgaagtttgacgagtctgagaagactaaagagtccagggaggcagttgaaaaggagttcgagcccctgctcaactggatgaaagacaaggctttgaaagacaagatcgaaaaggcagtggtctcacaaagactgaccgagtctccatgcgcattagttgcgtcacaatatgggtggtccgggaatatggagagaattatgaaggcccaggcataccagaccggtaaggatataagtactaattactacgcaagccagaagaaaactttcgagatcaatccgcgacaccctcttattagagacatgctgcggagaataaaggaagacgaggatgacaaaacggttctagatctagccgtggtccttttcgagacagcaacgctaagatctggttacctcttacccgacactaaggcctacggcgacaggatagaaaggatgcttcgactctctctgaacattgaccctgatgcaaaggtagaagaagagccagaagaagagcccgaggaaacagccgaggatacaacagaggatacagagcaggatgaagatgaagaaatggatgtcgggacggacgaagaagaagaaacagccaaggagagcactgccgagaaagacgaactgtag

SEQ ID NO: 15404 - DNA, 1662 bp, synthetic construct
  misc_feature 1..1662: note = Description of Artificial Sequence: Synthetic coding sequence
  source 1..1662: mol_type = other DNA
atgagagcgctttgggtgctgggcttgtgctgtgtgttgctgacttttggaagtgttcgcgcagatgatgaagtggatgtggacggcacagtggaagaagacttaggaaagtctcgagagggctcccggacagatgatgaggctgccaaagaagaaaaagaggaaagcgatgacgaagcggcagtggaggaagaagaagaagagaaaaagccgaagactaaaaaagttgagaaaaccgtgtgggactgggagctgatgaacgatattaagccaatatggcagaggccaagcaaagaggtggaagaggacgagtataaggcattctataagtcgttttcgaaggaatcagacgaccctatggcctacatacacttcaccgcggaaggcgaggtgacttttaagtcaattctgtttgtaccaacaagcgctcccagaggcctcttcgacgagtacggcagcaaaaaaagcgattacatcaaactgtacgtgaggagagtgttcattacggacgatttccatgatatgatgcccaagtacctgaactttgtgaagggagtggtggattctgacgatcttccactgaacgtttctcgtgagactctccaacagcacaaactgttgaaggttatccgcaaaaagcttgttaggaagactcttgatatgataaagaaaattgccgacgacaaatacaacgacacattttggaaggagttcggcaccaacatcaagttaggtgtcattgaagaccactccaaccgtaccaggctggcaaagcttctgcggttccagagttcccatcatcctaccgacataacatctcttgaccagtacgtggagcggatgaaagagaagcaggataagatctacttcatggcgggcagctcccgaaaggaggcggaatcctctccttttgtagaaagattattaaaaaagggttatgaggtgatatacctgactgagccagtggatgaatactgcattcaggcccttccagaattcgatggaaaacgctttcagaacgtggcaaaggagggagtaaagtttgacgagtctgagaagaccaaggagagccgggaggcggtggaaaaagagtttgagccactactgaactggatgaaagacaaggctttgaaggacaaaatcgaaaaggctgtggttagccagaggctgacagagtccccatgcgcgctggtggccagccaatacgggtggagcgggaatatggagcggatcatgaaggctcaggcttaccagaccggaaaagacatttcaaccaactactatgcgtcacaaaagaaaacctttgaaattaatccccgccatccccttattcgtgacatgctcaggcggataaaagaggacgaggacgacaaaaccgttctagacctcgcagtcgttctcttcgaaacagccacactgagatcaggctatctattaccagacactaaggcttatggcgatcggatcgaacgcatgttgcggctgtcccttaatatcgaccccgatgctaaggtagaagaggagcccgaagaagaaccggaggagaccgcagaggacacaacggaagacactgaacaagacgaagatgaagagatggatgtgggcaccgacgaggaggaggaaaccgctaaggagtcaaccgccgaaaaggatgaactgtag

SEQ ID NO: 15405 - DNA, 948 bp, synthetic construct
  misc_feature 1..948: note = Description of Artificial Sequence: Synthetic coding sequence
  source 1..948: mol_type = other DNA
atgagagcgttatgggtgttaggcctctgctgtgtcctgctgacatttggctccgtgcgagctgacgacgaggtggacgttgatggtacggtggaggaggatctgggcaagtcaagggaggggagccggacagatgacgaagtcgtacagagggaggaggaagccattcagcttgatggcctgaacgcttcccagattagagagttgagagaaaaatcggagaagttcgcctttcaggcagaggtgaatcggatgatgaagctgataataaattccctatacaaaaacaaagagattttcctgagagagctgatctcaaatgcttcggacgcgcttgataaaatcagactcataagcctcacagatgaaaacgctttgagtggaaatgaagaactgaccgtcaagataaaatgcgataaggagaagaacttgcttcatgtgacagatacaggcgtcggtatgaccagggaggaactggttaaaaacctcgggaccatagctaagtcaggcacttcagaatttctcaataaaatgaccgaagcacaggaggatgggcaatctacaagtgagcttatcggccagtttggggttgggttttactctgccttcttagtcgccgacaaggtaatcgtgactagtaagcacaataatgacacccagcacatctgggagagcgatagcaacgaattcagcgtcatagcagaccccagggggaataccctgggccgcggaacgaccataacactggtgttaaaggaagaagcatcggactatttagaactggacaccatcaaaaaccttgtgaagaagtactctcagttcattaattttcccatctacgtgtggtcctccaaaaccgagactgtcgaagagcccatggaagaagaagaggccgcaaaggaagagaaggaggagtcggatgacgaggccgcagcgcgacgccgctag

SEQ ID NO: 15406 - DNA, 483 bp, synthetic construct
  misc_feature 1..483: note = Description of Artificial Sequence: Synthetic coding sequence
  source 1..483: mol_type = other DNA
atgtcagaggttcggccactgtctagggatatcctgatggagaccctgctgtacgagcagctgcttgagccccctaccatggaggtcttagggatgactgattccgaggaagatctcgacccaatggaggactttgactcactggagtgcatggagggctctgacgccctggctcttcgacttgcctgcattggggacgagatggatgtctccctgcgcgcccccaggctcgcccagctgagcgaggtggctatgcacagtctgggcttggcatttatatacgaccagactgaagacatccgggatgtcctcagaagctttatggatggcttcacgaccttgaaagagaatatcatgaggttttggagatcccccaaccccgggtcgtgggtgtcgtgtgaacaagttctgctggctctccttctgttactggccctgcttctgccactgttatccggaggtctgcacctgctgttgaaatag

SEQ ID NO: 15407 - DNA, 564 bp, synthetic construct
  misc_feature 1..564: note = Description of Artificial Sequence: Synthetic coding sequence
  source 1..564: mol_type = other DNA
atggaacgacctcagcctgacagcatgccccaggacctgtcagaagctctaaaagaggctactaaggaagtgcacacacaggcggagaacgcggagtttatgaggaatttccagaaaggccaggttacacgcgatggattcaaactagtcatggctagtctctaccacatctatgttgcgttggaggaagagatcgagagaaataaagagtccccagttttcgctcccgtttatttcccagaggagcttcaccgtaaggccgcattggaacaagatctcgctttctggtacgggccaagatggcaggaagtgataccgtacaccccggccatgcaacgttatgtgaagaggttacacgaggtgggcaggaccgaacccgaactgttagtggctcacgcctacacgagataccttggggacttatccggcgggcaggttctcaaaaagatcgcgcagaaggcattggacctcccttcaagtggcgagggtctcgctttcttcacattccctaacatcgcatcagccactaaattcaaacaattgtatcggtcaagaatgaattag

SEQ ID NO: 15408 - DNA, 1581 bp, synthetic construct
  misc_feature 1..1581: note = Description of Artificial Sequence: Synthetic coding sequence
  source 1..1581: mol_type = other DNA
ctcggaggcagatcaagctgcgaggaccccggctgtcctagagatgaagaacgggctccccggatggggtgtatgaaatctaagttcctgcaggtaggcggcaacactttttcaaagaccgaaacctctgccagtccacactgtccagtttacgtcccggacccgaccagcacaataaaaccggggcccaactcccataattctaacactccgggcattagagaggccgggtctgaggacattattgtggtggccctgtacgactacgaagcaatccaccacgaagacctgtcctttcagaagggcgatcaaatggtggttctggaggagtccggcgagtggtggaaggccagatccctggctacccgcaaggaaggctatatacctagcaattacgtggctcgtgtcgatagcctagagaccgaggagtggttctttaaaggcatcagccggaaggatgccgagagacaattactggccccaggaaacatgctgggttctttcatgatccgcgattctgaaaccactaagggctcctactcgctctcagtgagggattacgatcctagacagggggacactgtcaaacactataagattaggacactagacaatggaggcttctatatcagtccaaggagtaccttcagtacactgcaggaactggtggatcattacaaaaagggtaatgacggtctgtgccaaaagctttccgtcccttgtatgtcgagcaagccccagaaaccctgggagaaagacgcatgggagattcctcgagagtcactaaaactcgagaaaaagctcggagctgggcagtttggcgaagtgtggatggcgacatacaacaagcacacaaaagtggccgtcaagaccatgaagcccggttcaatgagcgtagaagcttttctggcagaagcgaacgtgatgaagaccctgcagcatgataagctggtgaaactgcacgccgtcgtgaccaaggaaccgatttacataatcacagaattcatggccaagggttctctcctagacttcttgaagtcagatgagggatctaagcagcccctacccaagttgatcgactttagcgcacagattgccgaggggatggcatttattgagcagagaaactacatccatagagacctcagagctgccaatatactcgtgtctgcgagccttgtatgcaagatcgcagactttggattggcacgagtgattgaagataatgagtacaccgcgcgagaaggagcaaaattccccatcaagtggacagctcccgaagccattaatttcggctcctttacaattaagagcgacgtttggtcatttgggatactcctgatggagatcgttacatacggccgcattccttaccccggcatgagcaaccccgaagtgataagggcactggagagggggtatagaatgcctcggcccgagaactgcccagaagaactctacaatatcatgatgaggtgctggaagaatagaccggaggaacgcccaactttcgagtatattcagtccgtgttggatgatttctatacggccacggagtctcagtaccaacagcagccctag

SEQ ID NO: 15409 - DNA, 1578 bp, synthetic construct
  misc_feature 1..1578: note = Description of Artificial Sequence: Synthetic coding sequence
  source 1..1578: mol_type = other DNA
ctcggcggacgatcttcctgcgaagatccaggatgccccagggacgaagaaagagctcctcgaatgggctgcatgaaatcaaagttcctacaggttggggggaatactttcagcaaaaccgaaacctccgcctccccacattgccccgtgtatgtacctgaccctacttcgaccataaaacctgggcctaacagtcacaactcaaacacacctggaataagggaaggaagcgaggatattattgtggtcgccttgtatgattatgaggccatccatcatgaagacctcagtttccaaaaaggggaccagatggtggttctcgaagaatccggagagtggtggaaggcccggtctctcgctactcgtaaggagggctacatcccttctaattacgtagcccgggtggatagcctggagacagaagagtggttcttcaagggcataagcagaaaggacgccgagagacagctcctcgcaccaggcaatatgctgggcagtttcatgattagagactccgagaccaccaaagggtcctactctctgtcagtaagagactatgacccacgccagggagatactgttaaacactacaaaatccgcaccctggataatggcggcttttatattagccccaggtccacgttctccacgctacaggaactggtagaccattacaagaagggcaacgacggactgtgtcagaagctgagcgtcccctgcatgagcagcaaacctcagaagccctgggagaaggacgcctgggagattcctagagagtctcttaaattggaaaaaaaactgggtgctggacagttcggggaagtttggatggccacttataacaaacacactaaagtggctgtgaagaccatgaagcctgggagtatgagtgttgaagcctttttggccgaggccaacgtcatgaagacactacagcacgataagctggtgaaactccatgcggtggtgacgaaagaacccatctacatcattacagagttcatggccaaggggagtctcctggactttctgaaaagcgacgagggcagtaagcagcctctgccaaaattgattgatttcagcgctcagattgcagagggaatggctttcatcgagcagaggaattacattcatcgcgacctgcgcgccgctaatatcttagttagcgccagcctggtgtgcaagatcgccgattttggcttggccagggtgatcgaggacaacgaatacaccgccagagagggcgccaagttccccattaagtggaccgcacccgaggctataaacttcgggtcctttactataaagtcagacgtctggagtttcggcatactgctgatggaaatagtcacatatggaagaattccttatcccggcatgtctaatccagaagttatccgggccttggaacgtggctacagaatgcctagacccgagaattgccctgaggagctatacaatatcatgatgaggtgctggaaaaaccgcccagaggagaggccgactttcgagtacatccagagcgtgctggacgacttctataccgccacggaaagtcagtaccagcagcagccttag

SEQ ID NO: 15410 - DNA, 1515 bp, synthetic construct
  misc_feature 1..1515: note = Description of Artificial Sequence: Synthetic coding sequence
  source 1..1515: mol_type = other DNA
atggggtgcatgaagagcaaattcctgcaggtgggcggcaacaccttttctaagactgaaaccagcgcttctccccactgccctgtatacgttcctgatcccacaagcacaatcaagccaggccccaatagccacaatagtaacacccccgggatccgggagggcagcgaagacataatcgtcgttgctttatacgactacgaggccatccaccatgaggatttgagctttcaaaaaggcgaccagatggttgtcctagaggagagcggggagtggtggaaagctcggagccttgccacacggaaggaagggtacataccttctaactatgtggcacgggtagactctctggagacggaagagtggtttttcaaaggcatcagccggaaggacgccgaacgccagctcttggccccaggcaatatgctgggctctttcatgataagagattccgaaacgactaagggctcttattctctttcagtgagagattatgacccaagacagggtgataccgtgaagcattataaaatcagaaccctggataatggtgggttttacatttcccctcgcagcaccttctctaccctccaggagctggtcgaccactacaaaaaaggtaacgacgggctctgccaaaagctgagtgttccatgtatgtcctccaagcctcagaagccgtgggagaaagatgcatgggagataccccgcgaatcgctgaaactcgaaaaaaagctgggcgcaggccagttcggggaagtgtggatggctacctataacaagcataccaaggtcgctgtcaaaacaatgaaaccagggtcgatgtctgtggaagcatttcttgcggaggccaacgtcatgaaaacactgcaacacgacaaacttgtcaaactgcatgccgtggtgaccaaagagccaatctatatcattactgagtttatggccaaaggatcccttctggactttctaaaaagcgacgaaggaagcaagcagcccttgcccaagctcattgattttagtgcccagatcgcggaaggtatggcctttatagaacagagaaattatatacatcgcgatctgcgagctgcgaacatcctagtttctgcctccctggtctgtaaaattgcggactttggcctggcacgtgtcatcgaggataacgagtacactgcacgagagggagccaagttccccatcaagtggacggctccagaggccattaactttggatcatttaccattaaaagcgacgtatggtcctttggcatactcttaatggagattgtaacctacggccgcattccataccccggtatgtccaaccccgaggtcatcagggctctggagaggggctacaggatgcctcgtccagaaaattgccctgaggagctgtacaatatcatgatgcgctgttggaaaaacaggcctgaggagaggccgaccttcgagtacatccaaagcgtcctcgatgacttctacacggctaccgaaagccaatatcagcagcagccatag

SEQ ID NO: 15411 - DNA, 1518 bp, synthetic construct
  misc_feature 1..1518: note = Description of Artificial Sequence: Synthetic coding sequence
  source 1..1518: mol_type = other DNA
atgggctgcatgaagtctaagttcctgcaggtcggcggcaatactttcagcaagaccgagacctctgcttctcctcactgcccagtgtacgtgccagatcctacgtcaacaatcaaacccggtccaaattctcacaactccaacaccccaggtattcgcgaagctggctctgaagacattattgtggtggcactgtacgattatgaagctatccaccacgaggacctgtcctttcaaaaaggggaccagatggtagtgttggaggagtctggcgagtggtggaaggcgcgaagcctggctacaaggaaggagggctacataccatccaattacgtggcgagagtggactccctggaaaccgaggaatggttttttaaaggcatttccaggaaggacgccgagcggcagctccttgcccccggaaatatgctgggcagcttcatgatccgtgactcagaaactaccaaggggtcttattcactcagcgtacgggattatgaccctcggcaaggcgataccgtaaagcattacaaaatccgaacactcgacaatggcggtttctatatctctcctcgaagcaccttttcaacactgcaggagcttgtggaccactacaagaaggggaacgatggcttatgccagaagctgagcgtcccgtgcatgtcttccaaaccccagaaaccatgggaaaaggatgcctgggagatccccagagaatccctgaagcttgagaaaaaactcggcgccggccagtttggggaagtgtggatggcaacttataataagcatacaaaggtcgcggtcaagacaatgaagcccggatctatgtcagtagaggcgtttctggccgaggctaatgtcatgaagacactccagcacgataagctcgtgaagctccacgctgtcgtaacaaaggagcccatatacattatcactgagtttatggccaagggtagtctgctggacttcctgaaaagtgacgaagggtcaaaacaacctcttcccaagctcattgacttttctgcacaaattgccgagggcatggcttttattgagcaacggaattacattcatcgcgacctccgcgccgctaacatcctggtaagtgcaagcctcgtctgcaaaatagcggactttgggcttgccagggtcatcgaggataatgagtacaccgcccgcgaaggtgcaaagtttcctataaaatggacagcccctgaagcgattaacttcggctcttttactattaagagcgacgtgtggagtttcggcatcctcctaatggagattgttacatatggaagaatcccatatccagggatgagtaaccccgaggtgatcagggccttagagcgaggatatagaatgcccaggcctgagaactgccccgaagagctctacaatattatgatgcgctgttggaagaacagaccagaggagcgcccaacatttgagtacatccagtccgtgctcgacgatttctatacagcaactgagagccaatatcagcagcagccatag

SEQ ID NO: 15412 - DNA, 1521 bp, synthetic construct
  misc_feature 1..1521: note = Description of Artificial Sequence: Synthetic coding sequence
  source 1..1521: mol_type = other DNA
atgatgggatgtatgaagtctaagtttctccaggtcggggggaatacgtttagcaaaacagagacctctgcatcgccacactgtcccgtgtatgtccccgatcccacttctactattaagcctggccctaattcgcacaatagtaatacacctgggataagggaggccggaagcgaagacattattgttgtcgcattatacgactacgaggcaattcatcacgaagatcttagctttcagaaaggcgatcagatggtggtcctcgaggaatcaggagaatggtggaaagcacgctcgctggctaccagaaaagaagggtacatcccgtccaactacgttgccagagttgattccctggagactgaagaatggtttttcaaaggtatctctcggaaagatgccgagagacagctgcttgcccctggaaacatgctggggtctttcatgattcgagactctgaaacaactaagggaagctactccctgtctgtgcgagactacgatccacggcagggggacacggtgaagcactataaaatcagaactctggataatggtggcttctacatctctcctagatctacattcagcaccctccaggagctggttgatcactacaagaagggtaatgacggattgtgccagaaactgtcagtcccctgtatgtcatccaaacctcaaaagccatgggagaaggatgcatgggagatacccagggaatccctgaagttagaaaagaagctaggtgctggtcaatttggcgaggtgtggatggctacttacaacaagcacaccaaagtcgcagttaagactatgaagccgggcagtatgagtgtggaggccttccttgccgaggccaacgtgatgaaaaccctgcagcatgataagttggtaaaactgcatgctgtggtgacaaaagaacctatctacatcatcactgaattcatggccaagggctcactgctcgattttctgaagtccgatgaaggatctaaacagccactccctaagctaatcgacttctccgcccaaatcgctgaaggtatggccttcatcgagcaacggaactatatacatagggatctgcgcgctgctaacattctagtgtcggcatccttggtgtgtaagatcgccgattttggacttgctagggtcattgaagacaatgaatatactgcgagggagggagccaaattcccaatcaagtggaccgcgcccgaggcgattaattttggctcctttacgattaagtcggacgtttggtccttcgggatactgctgatggagattgtaacctatggtaggattccttacccaggcatgagcaaccctgaggtcatccgagccctggagaggggatatcgcatgcctaggcctgagaattgccctgaggagctttataatatcatgatgcgttgctggaaaaacagacccgaagaacggccaacattcgaatatatacagagcgtacttgatgacttctacaccgccacagaaagtcaatatcagcagcagccatag

SEQ ID NO: 15413 - DNA, 1518 bp, synthetic construct
  misc_feature 1..1518: note = Description of Artificial Sequence: Synthetic coding sequence
  source 1..1518: mol_type = other DNA
atgggctgtatgaaaagtaaatttctgcaagtgggaggtaacacttttagcaagacggaaacatctgccagcccccactgccctgtgtatgtacctgatcccacttctactatcaagccgggccccaatagccataatagcaatactcctggcattcgagaagccggaagcgaagatataattgtcgttgctctgtatgattacgaagccatacaccatgaagacctgtcttttcagaaaggagatcaaatggtcgttctcgaggagtcaggtgaatggtggaaggcccgctccctagccacgagaaaggagggctacattccaagcaactatgttgcacgtgttgatagtcttgaaactgaggaatggttcttcaagggcatttccagaaaagatgccgaaagacaactgctagcgccggggaatatgctcgggtccttcatgattcgggactctgagaccacgaaaggctcctattcactgagtgtccgcgactacgatccacgacaaggagacacagtcaagcactacaagatccgaaccctggacaatggtgggttttatatctctcccagatcaacattctcaaccctgcaggagctggtcgaccactataagaaaggcaatgacggactgtgtcaaaaacttagcgtcccctgtatgagcagtaaaccccagaagccttgggagaaggatgcctgggaaattccacgcgaatctctgaagctggaaaagaagcttggcgcagggcaattcggggaggtctggatggcaacttataacaagcatacgaaagtggccgttaaaacaatgaagcccgggtccatgtcggtggaagcctttctggctgaagccaatgtgatgaagacccttcagcacgataaattagttaaactgcatgctgtggtcacgaaagagcccatctatattattaccgaatttatggcaaaagggtctctgctggattttctcaagtccgacgagggttctaagcagccgctcccgaagttgattgacttctctgctcagattgcagagggaatggcgtttattgagcagagaaactacattcaccgggatttgagggccgcaaatatcctcgtgtcagcctccctcgtctgtaagatcgctgacttcggcctggcacgggtgatcgaggacaacgaatacaccgccagagaaggagccaagttcccaatcaaatggacagcacccgaggcgattaactttggcagttttaccattaagagcgacgtttggagtttcggtatccttctgatggagattgtgacttacgggcgaattccatatcctgggatgtctaaccccgaggtgattagggctctggagcgagggtatcggatgcctagacccgagaactgccccgaggaactttacaacattatgatgaggtgttggaaaaaccgacccgaagaacgcccaacattcgaatacatccagagtgtgctggacgacttctacacagccacagaatctcagtaccagcaacaaccctag

SEQ ID NO: 15414 - DNA, 1632 bp, synthetic construct
  misc_feature 1..1632: note = Description of Artificial Sequence: Synthetic coding sequence
  source 1..1632: mol_type = other DNA
atgttactgcggtccaagccagctctaccaccgcctctgatgcttctgctgcttggacctctggggccactgagtcctggagccctgccaaggcctgcacaggcccaggatgtggtggacctcgacttctttactcaggagcctttgcacctagttagcccaagttttctcagtgtgaccatcgacgccaatctggctactgatcctcgctttttgattctgctgggctcccctaaactccggactctagctcgcggactcagcccagcctacctgcgttttggcgggacaaaaactgactttctcattttcgatccaaagaaggagagtaccttcgaagaacggtcttattggcagagtcaggtgaaccaggacatttgcaagtatggctccattcctccagacgtggaagaaaagctgcgcctcgaatggccctatcaggaacagttactgttgcgggaacactaccagaagaagttcaaaaatagcacctacagtagatcttcagttgacgtgctgtatacgtttgccaactgctccgggctggatttgatctttggcctaaatgccttactaagaactgccgacctccaatggaattcatcaaacgcacaactgctgcttgattattgctccagtaaagggtataatatttcatgggagctgggcaacgagcctaacagttttctgaagaaggctgatatcttcattaacggcagtcagcttggcgaggatttcatccaactgcataagctgctccgaaagagcactttcaaaaatgcaaaactctatggccctgacgtcggccagcctcggaggaaaacagccaaaatgcttaaatccttcctaaaggcgggcggcgaagtgattgattccgttacctggcaccactactatctcaatggacgcacagctacaaaagaagatttcctgaaccccgacgtgctagatattttcatttcatcagtccagaaagtattccaggtagttgagtccaccaggcctggcaagaaagtgtggcttggtgagacctccagtgcctatggcggtggcgcaccattgctctccgacacctttgcagccggtttcatgtggctggacaaactgggcttaagtgcgcgtatgggaatcgaggtcgtaatgcggcaagtattcttcggcgctggaaactatcacctggttgacgagaacttcgacccgcttcctgattattggctatccctgctgtttaaaaagttggttggaacaaaggtacttatggcatcagttcagggctcgaaaaggcgcaagcttagggtgtatctccactgtaccaacacagacaacccaagatacaaagaaggggacctcaccctgtacgctatcaacctgcacaatgtgacaaagtacttgcggctgccttatcctttttctaacaagcaggtggacaaatatctgcttcggcccctcggcccacacggcctgctatccaagtctgttcagcttaatggccttaccctgaagatggtcgacgaccagactctcccccctctcatggagaagccccttcgcccgggcagctcactaggccttcctgcatttagctatagctttttcgtgatcaggaacgccaaggtggccgcctgtatttag

SEQ ID NO: 15415 - DNA, 1632 bp, synthetic construct
  misc_feature 1..1632: note = Description of Artificial Sequence: Synthetic coding sequence
  source 1..1632: mol_type = other DNA
atgctgctgagatctaagcccgccctgcctccccccttgatgttgctgttactgggacccctgggaccccttagcccaggcgccctgcctaggcccgcccaggcacaagatgttgttgatctcgattttttcacgcaggagccactccatctggtctctccttccttcctctctgtcacaatcgacgccaacctggcaactgatcccagattccttattctgttggggagtcctaagctgagaactctcgcacggggcttatccccggcgtacctacgcttcggtggtacaaaaacagactttttaatcttcgaccctaagaaggaaagtacttttgaggaaaggagctattggcaaagccaggtgaatcaggatatttgtaaatatggtagtatcccgcctgacgtggaagagaaactcagactggaatggccgtaccaggaacagctgctgctgagagagcactaccaaaagaaatttaaaaattctacatactctcgctcttccgtcgacgtcctctatacgtttgcgaattgtagcggcctggatttaatcttcggcctgaacgcactgttgagaaccgctgacctgcagtggaactcaagtaacgcacagctgctcctggactattgctcttctaagggttacaatatctcctgggagctcggcaacgaaccgaacagcttcttgaaaaaagctgatattttcattaacggaagtcaactaggggaagacttcatccagttgcataagctacttcggaaatccaccttcaaaaatgccaaattgtatggtcccgacgtgggacaacctcgccgtaagacagccaagatgctaaagtcctttctgaaggccggcggagaggtgatagatagcgttacatggcatcactactacctaaacggaagaaccgccaccaaagaggatttcctcaatcccgatgttctggatatttttataagctcagtccagaaggtgtttcaagtagtggaaagcaccaggcccggtaagaaagtttggctgggagagacctctagtgcgtatggaggaggcgcccccttgctgtctgataccttcgcggctggatttatgtggttggacaaattggggctctccgctcgcatgggaattgaggttgttatgcgccaagtgtttttcggagcaggcaactatcacctggtcgatgagaattttgatcccctgcctgactattggctctccctcttgtttaagaaattggttggaacaaaagtcctgatggcttctgtgcagggaagtaaaagacgcaaactccgtgtgtatctgcattgcacgaataccgataacccgagatataaggagggggatctgaccctctacgcgatcaacctgcataacgtaaccaaatatctcagactgccctacccattctcgaacaagcaggttgataaatacctgttgcgccctcttggaccacacggcttactgtccaagtctgtacagttgaacggtctgaccctgaagatggtggatgaccagaccctccctccactgatggaaaagcctctgcggccgggctcgtcacttggtcttcctgccttctcttattctttttttgtcatcagaaatgcaaaagttgcagcgtgtatctag

SEQ ID NO: 15416 - DNA, 294 bp, synthetic construct
  misc_feature 1..294: note = Description of Artificial Sequence: Synthetic coding sequence
  source 1..294: mol_type = other DNA
atgttgctgctgctgggacctcttggccccttgtcaccaggcgccttaccaaggcccgctcaggctcaagacgtggtcgacctagacttttttacccaggagcctctgcatttagtcagtccttcgtttctgtcagtgacccgcccgggcaagaaggtgtggctaggagagacttcttcggcttatggaggtggcgctcccctcctgagtgacacctttgcagctgggttcatgtggctggacaagttgggcctgtctgcccgcatggggattgaagtcgtcatgaggcaatag

SEQ ID NO: 15417 - DNA, 1410 bp, synthetic construct
  misc_feature 1..1410: note = Description of Artificial Sequence: Synthetic coding sequence
  source 1..1410: mol_type = other DNA
atgcttttgcggtctaaaccagcactgccccctcccctcatgttgctactgcttgggcccttgggacctctatcccccggcgccctacctagacctgcccaggcccaggacgtcgtggatctggacttttttactcaagaacccttgcacttggtaagcccttcattcctttccgtaacaatagacgctaacctcgctacagatccacgttttcttatcctcttgggtagtccaaagctgcggacgctggcccgtgggttatctccagcataccttcgtttcggaggcaccaagacagacttcctaatctttgaccctaagaaggaatctacattcgaggaaaggagctattggcagagccaggtgaaccaggacatctgcaaatacgggtcaattccacccgacgtcgaagagaagttgaggctggaatggccttaccaggagcagctgctcctgagggaacattaccaaaagaagttcaagaactccacgtatagtaggagctcagtggacgtgttgtataccttcgccaattgctccggacttgacctcatcttcggtctgaatgctcttctgcgtactgccgatctccagtggaacagctctaatgcacagctgctgctggattattgctcatctaaggggtataacatttcttgggagctgggaaacgagccgaattcatttctaaagaaggctgatatttttatcaacggatctcagttgggtgaggacttcattcaactgcataagctgcttcgcaagagtacattcaagaatgcaaagctctacggacccgatgtgggacaaccccgaaggaagacagccaagatgctcaagtccttcctcaaggcagggggggaggtaatcgatagcgtcacatggcatcattattacctgaatgggcggaccgctacaaaggaagacttcttgaatcctgacgttctggacatctttatcagtagcgtgcagaaggtgttccaggactactggcttagcctgctgtttaagaagttagtggggaccaaggtcctgatggctagtgtgcagggctctaagagaagaaaactccgagtctatctgcattgtacaaacaccgataatccaaggtataaagaaggagatttaaccctttatgcgatcaacctgcataatgtaaccaagtacctgaggctcccataccctttcagtaataaacaagtagataaatatttattaagacccctgggccctcatggattgttaagcaagagcgttcagctgaatggcctgactctcaaaatggtcgacgaccagacacttccacctctgatggagaaacccctgagacctgggtcaagccttggtctgcctgctttcagttacagcttcttcgtgatccgcaatgcgaaggtggcagcctgcatatag

SEQ ID NO: 15418 - DNA, 1458 bp, synthetic construct
  misc_feature 1..1458: note = Description of Artificial Sequence: Synthetic coding sequence
  source 1..1458: mol_type = other DNA
atgctgcttcgcagcaaaccagcactacccccccctctgatgttactcctcttgggcccacttggcccactctctcccggcgctctgcctcggccagcccaagctcaagacgtcgttgatttggactttttcacgcaggaaccactgcacctcgtgagtccctcatttctgagcgtgacaattgatgcgaacctcgcgacagaccctagattcctgatccttttaggtagtcctaagctaagaacattggcccgaggactgagcccggcatacttgagattcggcggcaccaagactgactttctgatctttgatccaaagaaggagtccacatttgaggagaggtcctactggcaatcgcaggttaaccaagatatttgcaagtatggctcaatccctcctgatgtcgaggagaaactacgcttggagtggccataccaggagcagctactcctgcgggaacattaccagaaaaaatttaaaaattctacatatagcaaacccaactcatttctaaaaaaagccgatatctttataaacgggagccagttgggcgaggactttattcagcttcataaacttctgcgaaagagtaccttcaagaatgctaaactttatgggcccgacgtcgggcagcccaggagaaaaaccgctaagatgctgaaatcattcctgaaagccggcggcgaagtcatagacagtgtgacatggcaccactactacctgaacggcagaacagccacaaaggaggactttttaaatcctgacgtgctagacattttcataagttccgtccagaaagtttttcaggtcgtagaaagcaccagacccgggaagaaagtgtggcttggagaaaccagtagcgcttacggaggcggggcccccctgttaagtgacacatttgccgcaggctttatgtggcttgacaagcttggcctgtccgccagaatgggcatcgaggtggtgatgaggcaggtcttctttggggctgggaattatcatttagtggacgagaactttgatcctctgcccgattactggctttctttgctgttcaagaagctggtcggaaccaaagtgttaatggcaagcgtgcaggggagtaagagacgaaaactcagagtctatctgcattgcaccaataccgacaatccacggtataaagaaggcgatctgaccctatacgctatcaatcttcataatgttaccaagtacctcagattaccctatccctttagtaacaagcaggtagacaagtacttgctgcgccctctgggtccccacggcctgctgagtaagagcgtgcaactaaatggccttaccttaaaaatggtcgatgaccagactctccctccactgatggagaaacctctgcgacctggctcctctctagggctgccagcttttagctactcgttttttgtgattagaaacgctaaagttgcagcatgcatttag

SEQ ID NO: 15419 - DNA, 1062 bp, synthetic construct
  misc_feature 1..1062: note = Description of Artificial Sequence: Synthetic coding sequence
  source 1..1062: mol_type = other DNA
atggagaaaactctcgaaacagtaccgctggaaaggaaaaaacgggagaaagagcagtttaggaagctattcatcggcggcttgtctttcgagacgaccgaggagtcgcttcgaaattactatgagcagtggggcaaactgaccgactgcgtggtaatgcgagatcctgcttctaagcggtctagaggcttcggtttcgtgaccttttccagcatggcagaggtggacgcagccatggctgccaggccccacagtatcgacggaagggtagtggagcctaagcgtgctgtggccagagaagagagcggcaaaccaggcgcccatgttaccgtcaaaaagttgtttgtgggcggaattaaggaagacactgaagaacaccacctccgcgattacttcgaggagtacggaaaaattgatactattgagattatcactgaccgccagtccggcaaaaagcgcgggttcggctttgtgacgtttgatgaccatgacccggttgacaagatcgtgttgcagaaataccacacgatcaatggccacaatgcagaagttcggaaggctctgtcccgtcaggaaatgcaagaggtccagtcttcccgcagtggaaggggcgggaatttcggtttcggggattcgcgaggcggcgggggaaacttcggacccggccctggctcaaattttcggggcggatccgatggttatggctccgggaggggcttcggggatggctacaatgggtacggcggcggcccaggtggcggtaatttcggcggcagtcccggatatggcgggggacgaggaggatatgggggaggaggccccgggtatgggaatcaggggggcggctacggaggaggctacgacaattacggtggcgggaattacggttcagggaactacaatgatttcggaaactataaccagcagccaagcaactacggccccatgaaaagcgggaactttggaggcagcagaaatatggggggcccatatggcggcggtaattatgggcctggtggaagcggcgggagcggaggatatggagggcgctccagatattag

SEQ ID NO: 15420 - DNA, 1026 bp, synthetic construct
  misc_feature 1..1026: note = Description of Artificial Sequence: Synthetic coding sequence
  source 1..1026: mol_type = other DNA
atggagagagaaaaagagcagtttaggaagctgttcattggaggtctatcttttgagaccaccgaagagtctctgagaaactattatgaacagtggggcaaactaactgactgtgtggtgatgcgggaccctgcaagtaaacggtcgagaggttttggcttcgtaacattttccagcatggcagaggtagacgccgccatggccgcccgcccgcattccatcgatggacgtgtggtggaaccaaaaagggcagtcgcccgagaggaatcggggaagccaggggcccacgtcaccgtcaagaaactcttcgtcggcgggatcaaggaggacacagaggagcaccacctgagagattacttcgaagagtatgggaagatcgataccatcgagatcataaccgatcgtcagagcggcaaaaagcgtggatttgggttcgtgacgtttgatgatcacgaccctgtggataagatcgttctccaaaaataccacactataaatgggcataacgcagaagtacggaaagctttaagccgtcaggaaatgcaggaggttcagtcgagccgatctggaaggggaggcaacttcggctttggtgactccagggggggcggcggcaacttcggacctggccccggcagcaacttccgcggggggtctgatggatacggaagcggacgcggttttggcgacggctataatggctacggaggaggcccaggtggaggaaatttcggagggtcccccggatatggaggcggcaggggcggctatggtgggggggggcctggatacgggaatcaggggggcgggtatggggggggctacgataactacggcggcggaaattacggctccggcaactacaatgactttgggaactacaaccagcagcctagtaactacggacccatgaaatctggaaacttcggtggaagcagaaatatgggcggcccttacggcgggggcaactatggcccgggggggtccggggggagtggtgggtatggagggcgcagccgctattag

SEQ ID NO: 15421 - DNA, 1062 bp, synthetic construct
  misc_feature 1..1062: note = Description of Artificial Sequence: Synthetic coding sequence
  source 1..1062: mol_type = other DNA
atggaaaaaactttggagacagtgcctctagagcggaaaaagagggagaaggagcagttcaggaagctctttataggaggactatctttcgaaaccaccgaagaaagtctaagaaattattacgagcagtggggtaaacttacagactgcgtggtgatgagggatccagcatccaaacgttcccggggctttggcttcgtcaccttctcttcgatggcggaagtcgacgccgctatggccgccagaccccacagcatcgacggccgagtggtggagcctaagcgtgccgtggccagagaagagagcgggaaacccggcgctcacgtcacagtcaaaaaactgttcgtgggtggcatcaaggaagacacggaagagcaccatcttagagattacttcgaggagtacggcaagatagataccatcgagatcattacagatcggcaatccggaaagaaacgcggatttggctttgttaccttcgatgaccacgatccagtagataaaatcgttctgcaaaagtaccacactatcaatggccacaacgctgaagtgcggaaagccctcagtaggcaagagatgcaggaagtgcaatccagcaggtcaggccggggaggcaatttcggatttggcgacagtcggggtggaggcggtaactttggacctggcccaggaagcaacttccgcgggggctctgacgggtatggctctgggaggggatttggggacggctacaatggttacgggggagggcccggcggcggtaacttcggcggctccccaggttacggtggagggcgcggagggtatggcggtggtggtccaggttatggcaaccagggcgggggctatggaggggggtacgacaattacggcggcggcaattacgggtctgggaactataatgacttcggcaactacaatcagcagccatcaaattatggcccaatgaagtcagggaatttcggtgggtcgcgcaatatgggtgggccatatgggggcggtaactacggtccgggagggtctggggggtctggaggctacggtggccgatctagatattag

SEQ ID NO: 15422 - DNA, 750 bp, synthetic construct
  misc_feature 1..750: note = Description of Artificial Sequence: Synthetic coding sequence
  source 1..750: mol_type = other DNA
atggaacgcgaaaaagaacaatttaggaagctgttcatcggagggctgagtttcgaaactacagaagaatctctccgcaattactacgaacaatgggggaagttgacagattgtgttgtgatgcgagatcccgccagcaagagatcccggggttttggctttgtgacatttagcagcatggccgaagtagacgctgcaatggcggcccgtcctcatagtatagacggccgcgtcgtcgaacctaaaagagccgttgccagagaggagagtgggaaacccggcgcacacgtgaccgtaaagaaactattcgtcggagggatcaaagaggataccgaggagcaccacctgcgggactattttgaggagtatgggaaaattgacactatcgagataattacagacaggcaaagtggcaagaagaggggattcggttttgtcacgtttgacgatcacgatcccgtcgataagatcgtgcttcagaaataccacacaatcaatggtcataacgcagaagttcgtaaggctctttcaagacaggagatgcaggaagacttagaggtcgcaatcctagaagttgcgcctgtgatggaggaagaggaagaggacatggtggttgaagatcttgacatggccacaagggtcggcgcaacggaggtggtcatgaccacaatggaagaagaaataatggaggtggaaattacaatgattctggagatcatcacgtctaacctcctgactacagttcagtag

SEQ ID NO: 15423 - DNA, 846 bp, synthetic construct
  misc_feature 1..846: note = Description of Artificial Sequence: Synthetic coding sequence
  source 1..846: mol_type = other DNA
atgtctgaagagcagtttggcggcgacggtgcagcaggaaacggaggaggacgccgagccggcgagcaagaaggcgctatggttgcggctacccagggggccgcggcacgggaagctgagccaggcccgggcgcagagcccagattggaagctccgaagggtgctgagtctgagggcgctaaaattgatgcatctaagaacgaggaggacgagggtaaaatgttcattggtggcctgtcttgggacacgacaaagaaggacttgaaggattacttcagcaaattcggggaggtggtggattgcactctgaagttggaccccattaccggccgttctagggggttcggtttcgtgctgttcaaagaatccgagtcagtcgataaagttatggaccagaaggagcacaaattgaatggtaaggttattgacccaaagcgagcaaaggctatgaaaacaaaggagcctgtaaagaagatttttgtgggcggtctgtcccccgacactcccgaggagaagatcagagagtatttcgggggctttggcgaagtggagtctatcgaattacccatggacaataagactaataagcgaagggggttctgcttcatcaccttcaaggaggaggagcctgtgaaaaaaattatggaaaagaagtatcacaatgtgggcctttccaaatgcgaaattaaggtcgccatgtccaaggaacagtatcagcagcaacagcagtgggggagtaggggtggctttgcaggacgagcccgcggtcggggcggggaccagcaaagcggttacggaaaagtgagtcgcaggggtggccaccaaaacagttataagccatactag

SEQ ID NO: 15424 - DNA, 1068 bp, synthetic construct
  misc_feature 1..1068: note = Description of Artificial Sequence: Synthetic coding sequence
  source 1..1068: mol_type = other DNA
atgtctgaagagcaattcggcggagatggagccgcagccgccgccaccgccgccgtcggcggcagtgctggtgaacaggaaggagcaatggtcgccgctacgcaaggggcagccgcagctgccggtagcggcgccggaactggagggggtacagcatctggaggtaccgagggcggcagtgctgagagcgaaggcgccaagatcgacgcctccaagaatgaagaggatgaagggcactctaatagttctccacgccattctgaggctgctaccgcccagagggaggaatggaaaatgttcattggcggtctctcctgggacaccacgaaaaaagatttaaaggactacttctctaagtttggtgaggttgtggattgtactctgaaactcgatcccataaccggacgcagccggggatttggttttgtgttgttcaaagagagcgagagtgtggataaggtcatggaccagaaagaacacaaactgaacggtaaagtcatcgacccgaagcgagcgaaagcgatgaaaaccaaggaacccgtcaagaagattttcgtagggggactttctcctgatacccctgaggagaagattagagaatattttggtggcttcggggaggttgagtcaattgagctccctatggataataagacgaacaagaggagaggattttgttttatcacatttaaggaagaagagcctgttaagaaaatcatggagaagaagtatcacaacgtgggtctgtccaaatgtgaaatcaaggttgcaatgtctaaagagcaatatcaacagcagcagcagtggggctcccgcggtggctttgcaggtagagcgcggggtcgagggggtggcccatcacagaactggaatcagggctatagcaattactggaatcagggttatggtaactacggatacaacagtcaggggtacggtgggtacggcggctacgattacaccggatacaataactactatggctacggcgactatagtaaccagcaatctggctacggcaaagttagtagaagggggggacatcaaaactcttataagccatactag

SEQ ID NO: 15425 - DNA, 1011 bp, synthetic construct
  misc_feature 1..1011: note = Description of Artificial Sequence: Synthetic coding sequence
  source 1..1011: mol_type = other DNA
atgtccgaggagcaatttggcggggacggagccgctgctgctgccaccgccgctgtcggcggtagcgctggcgagcaggagggagctatggtggctgccacccagggcgctgctgccgcagccggttctggcgcaggaaccggtggcggaaccgcctcagggggcacagaagggggatctgcagaaagtgagggcgcaaagattgacgctagtaagaacgaagaagacgaaggcaaaatgtttatcggcgggttgtcatgggacactaccaagaaggacttgaaagattattttagcaagtttggtgaggtcgtagactgtactcttaaactggatcccattacagggaggtctagaggcttcgggttcgtgctgttcaaggagtccgagtctgtcgataaagtaatggaccagaaggagcacaagctgaacggcaaagtgatagaccccaaacgcgctaaagccatgaagacgaaggagccagtgaaaaaaattttcgtcggtggcttgagccccgacactcctgaggaaaagattagagaatactttggcggctttggagaggtggagtccatcgagcttcctatggataacaagaccaacaagcgcaggggattttgtttcattacttttaaagaagaggagccggtgaaaaagatcatggagaagaagtatcacaatgttggtctttcaaaatgtgagatcaaggtcgcaatgtctaaagaacagtaccagcagcaacaacaatggggatcacgcggcgggtttgcgggcagagcgagggggaggggtggcggaccctctcagaactggaatcaaggttacagcaattactggaatcaggggtacgggaattatggctataacagccagggctacggaggatatgggggttatgattacaccggctacaataactattacggatacggagattactccaaccaacagtcggggtatgggaaagtcagtaggcgcggcggccaccagaactcatataagccctactag

SEQ ID NO: 15426 - DNA, 921 bp, synthetic construct
  misc_feature 1..921: note = Description of Artificial Sequence: Synthetic coding sequence
  source 1..921: mol_type = other DNA
atgtcagaagaacagtttggcggtgacggggccgctgcggccgccaccgcggcagtgggcggctctgctggcgaacaggagggagcaatggtggcagccacacagggggcggccgcagctgcaggcagtggtgcaggaactggcgggggtacagcaagcggcggtacagagggcggcagcgctgagtccgagggggctaaaattgatgctagcaaaaatgaggaagatgagggccacagcaatagcagccctcggcatagcgaagcggcaactgcccagagggaggagtggaagatgttcattggggggctgtcctgggacacaaccaaaaaagacctcaaagactacttttcgaaattcggtgaagtggtggactgtacacttaaactcgaccctatcaccggacggtcccgcgggttcggattcgttctgttcaaagaatctgagagtgtggataaggtgatggaccagaaagaacacaagttaaacgggaaggttatagacccgaagagagcaaaggccatgaaaaccaaagagcctgtgaagaaaattttcgtcggggggttgagcccagacacacccgaggaaaaaattagggagtacttcggaggattcggcgaagttgagagcattgaactgcccatggacaataagacaaacaaacgcagggggttttgcttcattactttcaaagaggaagagcctgtgaaaaagatcatggaaaagaagtaccataatgtcggcctttccaagtgcgaaattaaggtggcaatgagtaaagagcagtaccaacaacaacagcagtggggctccagagggggattcgccggaagagcccgaggtaggggcggggatcagcaaagcgggtacgggaaggtaagccggagaggtggacaccagaactcctataaaccatattag

SEQ ID NO: 15427 - DNA, 468 bp, synthetic construct
  misc_feature 1..468: note = Description of Artificial Sequence: Synthetic coding sequence
  source 1..468: mol_type = other DNA
atgtcggaggagcagttcggtggcgacggagccgctgcagcggcaaccgccgctgtcgggggcagtgcaggagagcaggagggagctatggtcgccgcgacacaaggagccgcagctgctgctggcagcggggctggcacaggaggcgggacggccagtggtggcacagagggaggcagcgcagaatccgaaggggccaaaatcgatgccagtaaaaatgaagaggacgagggaaagatgttcatcggcggcctgtcttgggatacaacaaaaaaagatttgaaggactacttctccaagtttggtgaggtcgtggattgcacactgaagctcgaccccattaccggtcgcagcagggggtttgggttcgtgcttttcaaggagagcgaaagcgtggataaggtaatggatcagaaggagcataaattaaacggcaaggtaatcgaccccaaaagggctaaggcctag

SEQ ID NO: 15428 - DNA, 666 bp, synthetic construct
  misc_feature 1..666: note = Description of Artificial Sequence: Synthetic coding sequence
  source 1..666: mol_type = other DNA
atgtcggaagagcagttcgggggggatggcgctgctgccgctgccactgcagcagttggcggttccgccggggaacaggagggggcaatggtggccgcaacacaaggggccgccgccgcagctggatccggcgccgggactgggggcggtacagcttcaggcggcacggaaggaggtagtgccgaaagcgaaggtgctaaaattgatgccagcaaaaatgaagaagacgaaggccatagcaattccagtccccggcactcagaagctgccactgctcagagggaggaatggaagatgttcataggcggcctcagctgggatactaccaagaaagatctgaaagattatttttctaagttcggtgaggtcgtcgattgcacactgaaactagatcccataacggggcgcagcagaggcttcgggtttgtgttgttcaaagagtccgagagcgtcgataaggtcatggaccagaaagaacacaaactaaacgggaaggttatcgacccaaaacgcgctaaagcaatgaagacaaaggaacccgtaaaaaagatattcgtcggaggactctcccccgatacaccggaagaaaaaatacgggagtactttggaggcttcggagaagtagaatccatagaactgcccatggacaacaaaaccaataagtag

SEQ ID NO: 15429 - DNA, 633 bp, synthetic construct
  misc_feature 1..633: note = Description of Artificial Sequence: Synthetic coding sequence
  source 1..633: mol_type = other DNA
taaaaaatgtttattggaggcctctcatgggacactacgaagaaggacctgaaagattatttcagcaaattcggcgaggtggtggattgcacacttaaactcgatccaattaccgggcggagtagagggttcggcttcgtcttatttaaggagagcgaatctgtcgacaaagtgatggatcagaaggaacataaattgaacgggaaagttatcgaccctaaacgggcaaaggccatgaaaacaaaggagccggttaaaaaaatcttcgttgggggtctgtctcctgataccccagaggaaaagatcagagaatattttggtggctttggagaggtagagagtatcgagctgcccatggacaacaaaaccaataaacgacgggggttctgcttcattacatttaaagaggaagagccagtgaaaaaaatcatggaaaagaaataccataacgtcggccttagtaagtgcgagatcaaagttgcaatgagcaaagagcagtatcagcagcaacagcagtgggggtcccggggcggtttcgcagggagagctagaggccggggaggggatcagcagtccggatatgggaaggtaagccgccgtggaggtcatcaaaacagctacaagccttactag

SEQ ID NO: 15430 - DNA, 606 bp, synthetic construct
  misc_feature 1..606: note = Description of Artificial Sequence: Synthetic coding sequence
  source 1..606: mol_type = other DNA
atggaccagaaggaacataaactcaatggaaaggtcattgaccccaagcgcgcgaaggccatgaagactaaggagccagtcaagaagattttcgtgggcggcctgtcgcctgacactccagaggagaagataagggagtactttgggggctttggagaggtggaaagcattgagctgccaatggataacaagacaaataagcgacggggcttttgtttcattacatttaaagaggaggaacccgtcaaaaaaataatggagaaaaagtaccataacgttgggctgtcaaaatgcgagatcaaggtcgcgatgagtaaggaacagtaccaacaacagcaacagtgggggagccgaggcgggtttgcagggagggcacgtggcagaggtggaggcccttcccagaattggaatcagggctacagtaactactggaatcaaggatacggaaattatgggtacaattcccaggggtacggaggctatgggggctatgactacacaggttataacaactattacggctatggggactatagcaatcagcagtccgggtatggtaaagtgtctcgccgtggggggcaccagaactcctataagccctactag

SEQ ID NO: 15431 - DNA, 912 bp, synthetic construct
  misc_feature 1..912: note = Description of Artificial Sequence: Synthetic coding sequence
  source 1..912: mol_type = other DNA
atgagcgaagagcaattcggtggcgatggtgccgccgccgccgccaccgcagctgcaagcggaggcacagagggcggtagcgctgagagtgaaggtgccaaaattgacgcctccaaaaatgaggaggatgaaggtaagatgttcattggcggcctcagttgggacaccactaagaaagatcttaaagactacttcagcaagttcggggaggtggttgattgcacactcaaattagacccaattacgggtcggtctcgggggtttggcttcgtgctcttcaaggagagcgaaagcgtcgacaaggtgatggaccagaaggagcacaaactcaatggaaaggtgattgatccaaagcgagctaaggccatgaagacaaaggagcctgtgaagaaaatcttcgtgggaggacttagtccagacactcccgaagaaaagattcgcgaatattttggtgggttcggagaggttgagagtattgagctccccatggataacaaaacaaataagaggagaggattttgctttatcaccttcaaagaggaggagcctgtgaagaagattatggagaaaaagtaccacaacgtcggactaagcaaatgcgaaattaaggtggccatgtctaaagagcaataccagcagcagcaacagtggggttcccgcgggggtttcgccggtcgcgcacgcgggcgcggaggggggccctcacagaattggaaccagggatatagcaactactggaaccaggggtacgggaattacggctataactcacagggatatggtggctatggtgggtatgactacacggggtacaacaactattatgggtatggcgattatagcaatcaacagtccggctatggaaaagtttcccggcgaggcggccaccagaattcctataaaccatactag

SEQ ID NO: 15432 - DNA, 1974 bp, synthetic construct
  misc_feature 1..1974: note = Description of Artificial Sequence: Synthetic coding sequence
  source 1..1974: mol_type = other DNA
atgcctcgttacactgtccacgtcaggggggagtggctggccgttccttgtcaggacgcccagctaaccgtgggctggctggggagagaagcagtacgcaggtacatcaaaaataagcccgacaacggaggatttacaagcgtggacgacgcccattttctggttcgccgttgcaagggactcgggctgctcgataacgaggacaggttggaagtggccttggagaataatgagtttgtggaggtagtgatcgagggggacgctatgtcaccggactttatccctagccagcccgaaggcgtctacctctactctaagtatcgtgagcccgagaagtacatcgaactagatggagatcgcctgacgaccgaagacctggttaacctcgggaagggcagatataagatcaagctcaccccaactgctgagaaacgggtgcagaaatccagagaggtaatcgattccattattaaggaaaagacggtggtttatggaataaccaccgggtttggcaagtttgcgaggacagtgattcccatcaacaaattgcaagagctgcaggtgaatctagtcagatctcatagtagtggcgtgggcaagcccttgagtcccgaaagatgcagaatgcttctggcgctgcgcattaatgtactggcaaagggatattctggcattagcttggagaccctgaaacaggtgatagaaatgttcaatgcttcctgtctgccatacgtgcctgaaaaaggtacagtgggggccagtggtgatttagctcctctatcacatctcgcattgggactcgtgggcgagggcaagatgtggagtcccaaaagcggctgggctgacgccaagtatgtcctggaagcgcacggccttaaacctgttattctaaagcccaaagaaggcttagcgctcattaatggaactcagatgatcacttctctgggctgcgaggctgtagagagagctagtgccatcgcaagacaggccgacatagtcgccgctctgacactggaagtgctcaaaggtacaacaaaagcatttgacactgatatacatgccttgagaccacaccgcggccagattgaggttgcattccgcttcaggtctctcctggacagtgaccaccatccctcagaaatcgccgagtcacaccgcttctgcgatcgtgtgcaagatgcctacacacttcgatgctgtcctcaggtccatggggtcgtgaatgacactatcgccttcgtgaaaaacatcataactacagaattaaacagtgcaaccgacaaccccatggtgttcgccaacagaggggagacagtctcaggtggcaactttcacggagagtacccggccaaagccctggactatcttgcaatcggaattcatgaactggccgctatctcagaacgccggatcgaacggctatgtaacccttccctctctgaactgccagccttcctggtggctgagggcgggttgaattcaggcttcatgatagcacactgcacggctgctgcgctcgtgtccgagaacaaggctttgtgccacccctccagcgtggactccttgtctacttcagcagcaacagaggaccacgtaagcatgggagggtgggcggccagaaaagcactgagagtcattgaacacgtcgagcaggttttagctatcgagctgcttgcagcctgtcaaggcattgagtttctgcgaccactgaagactacaacgcctttggaaaaggtctatgatcttgtcagatccgtagtgcgcccctggatcaaggaccggttcatggctcccgatattgaagccgcccatagactgctcctcgagcagaaggtgtgggaagtggcagccccttacattgagaaatataggatggagcatattccagagagcaggcccctgagccccaccgcattctctcttcagtttctgcataaaaagagcacaaagatccctgaaagcgaagatctgtag

SEQ ID NO: 15433 - DNA, 1776 bp, synthetic construct
  misc_feature 1..1776: note = Description of Artificial Sequence: Synthetic coding sequence
  source 1..1776: mol_type = other DNA
atgccaaggtacacggtacacgtgcgcggggaatggttagctgtgccatgccaggacgcccagcttaccgtgggatggctggggagagaagccgtgcggagatatatcaaaaacaaacctgataacgggggattcactagcgtcgacgacgcccattttctagtcagaagatgtaaaggtctcggtttgcttgataacgaagatagactcgaggtggcactcgagaacaacgagtttgtagaggtagtaatagaaggcgatgccatgagtccagatttcataccctcccagccagagggcgtatacttatactctaagtacagagagccggaaaaatatatcgaactcgatggggatcgacttacaaccgaggacttagtgaatctggggaagggtcgttacaaaatcaagctgactcctaccgcggagaagcgagtccagaaatcacgggaagtcattgacagcataattaaagaaaagaccgtggtgtacggcatcacaactggctttggaaaatttgcaaggacggtgattcctattaataagctccaggaattgcaagtcaaccttgtgaggagtcacagttccggggttggcaaacccttatcccctgagagatgtcgcatgctgttagcgttgaggataaacgtgctcgccaagggctattccgggatctcattggagactctaaagcaggtgattgagatgttcaatgcgtcttgcctgccctatgtacccgagaaggggactgtgggtgcatccggcgaccttgccccactgagtcatttagctctcgggctggtcggggagggaaaaatgtggagtcccaagtccgggtgggccgatgcaaagtatgtcctcgaggctcacgggcttaagcctgtgatcctgaagcccaaggagggccttgccctgattaacggtacccagatgataacctcccttggctgtgaggctgtcgaacgcgcgtctgccatagctcggcaggcagacattgtggccgctttaactttggaggtgcttaaggggacgaccaaggcctttgatacagatattcacgcacttcgtccacatagagggcaaattgaggtggcctttcgttttaggtcactgctggattctgaccaccacccaagcgaaatcgctgagagtcatcgcttttgtgaccgtgtccaggatgcatacactctccgctgttgtcctcaggtgcacggcgttgttaatgatacaattgcctttgtgaaaaatataatcactacagaacttaattctgctacagataatcctatggtgttcgctaatcgtggcgagaccgtttccggagggaacttccacggggaataccctgcaaaggctttagattacctggccattggcatccacgaattggcagcaattagtgagcgacggatcgaaagactctgtaacccaagcctgtctgagttacctgcgttccttgtggcagagggcgggttgaactctggtttcatgatcgcacattgtacagccgctgctctggtgtctgagaacaaagcattgtgtcaccctagtagcgtggatagtctatcgactagcgccgcgaccgaggatcacgtctcgatgggtggctgggcagcacggaaagcactgagggtgatcgaacacgtggaacaagtgttggctattgagctcttggcagcctgtcagggcatcgagtttctgaggcccctgaaaaccacaactccgctcgagaaagtctacgacctggtgagaagcgtagtgagattcgggaaatag

SEQ ID NO: 15434 - DNA, 1350 bp, synthetic construct
  misc_feature 1..1350: note = Description of Artificial Sequence: Synthetic coding sequence
  source 1..1350: mol_type = other DNA
atgctcttagcactaaggataaatgtgttggctaagggctactcagggattagcctcgaaacactgaagcaggtcatagagatgttcaacgcgtcctgcctaccatatgtaccagaaaagggaactgtgggtgcctccggtgatctcgcccctctgagtcacctggcccttggcttagtgggggaaggcaagatgtggagcccaaagtccgggtgggcagatgcgaagtacgtgctggaggcccacggattgaagcccgtgatacttaagccgaaggaagggctagcactcattaacggtacacagatgatcacctccctcgggtgtgaggccgttgagcgggcctccgcaatcgcccggcaagctgacattgttgctgctctgacgctggaagtgctgaaagggacaaccaaggcattcgatacagacatccacgctctccgcccacacagaggtcagattgaggttgcttttaggtttcgcagcttactggatagtgaccaccatccaagtgaaattgccgaaagccaccgattctgtgacagagtacaggatgcgtacacccttaggtgttgcccacaggtccatggggtggttaatgacaccatcgcattcgtgaagaatattattacaaccgaactgaactccgccacagataatcctatggtcttcgccaacagaggcgaaaccgtatccggagggaactttcacggggaataccctgccaaggcactcgactacctcgcaattgggattcatgaactggcggccatatccgaaaggagaatcgaacggctgtgcaacccaagtctctctgagctgcctgcctttctggtcgccgagggagggcttaacagcgggttcatgatcgctcattgtactgctgccgcattggtctctgagaataaggctctgtgtcacccttcatctgtagattcactttcaacctcggctgctactgaagaccatgtgtcgatgggtgggtgggcagcccgtaaggcactgagggtcatcgaacacgtggaacaggtcctggcaatcgagctcctggccgcttgtcagggtatcgagttcctgcgacctctcaaaaccactacaccattggagaaagtgtatgacctggtgcgctctgtggtgagaccatggattaaggaccgcttcatggctcccgatatcgaggctgcacatcgactgcttctggaacagaaggtgtgggaagtggcggccccttatattgaaaaatatcgcatggagcacattcccgagagcaggccgctgagtcctacagccttcagcctgcaatttctccataagaagagtaccaagattcccgaaagcgaagacctttag

SEQ ID NO: 15435 - DNA, 1260 bp, synthetic construct
  misc_feature 1..1260: note = Description of Artificial Sequence: Synthetic coding sequence
  source 1..1260: mol_type = other DNA
atggctggcttcggagcgatggaaaagttcctcgtggaatacaagtctgccgtagaaaagaagttagccgagtacaaatgcaacactaacacagcaatagagcttaagctcgttagattccccgaagacctcgagaatgatatacgcacgttttttcccgaatacacgcatcaactcttcggggacgatgaaacggcatttggttacaagggattaaagattttgctgtactatatcgccggttccttgtcaacgatgttcagagtggagtatgccagcaaagtggatgagaatttcgactgcgtggaggccgacgacgtggaaggtaaaataaggcagatcattcccccaggcttctgtaccaataccaacgattttctgagcttgctcgaaaaggaggtcgattttaaaccattcgggacgctcttacacacgtattccgttctgtcacccacgggcggtgagaactttacctttcagatatacaaggcagacatgacatgccggggcttccgtgagtaccacgagaggctgcagactttcctgatgtggttcatagagactgcatcttttattgacgtggacgatgagcgatggcattacttcttggtgtttgaaaaatataataaagatggcgcgaccctcttcgccaccgttggatacatgaccgtctacaactattacgtttatcctgacaaaacacgaccaagggtttctcagatgctcatcctgacacccttccaagggcagggacacggagcccagctactggagactgttcatcgctactacaccgagttcccaactgtgctggacattaccgcagaggacccatccaaatcgtacgtgaagttacgagacttcgtgttggtcaagctttgccaggatctgccttgcttcagtagggagaagctgatgcagggctttaacgaggatatggctattgaggctcaacagaaattcaagattaataagcagcatgcccgacgggtgtacgaaatcttgcggctgctggttacagacatgtcagatgcagagcagtaccggtcctatagattagatataaagcgccgcttaattagcccatataagaagaagcagagggaccttgcaaaaatgaggaagtgcctcaggcccgaggaactgacaaatcagatgaaccaaatcgagattagtatgcagcacgagcagctggaggagtcttttcaggaactcgtggaggattaccgacgggtcatcgagaggctggcgcaagagtag

SEQ ID NO: 15436 - DNA, 1005 bp, synthetic construct
  misc_feature 1..1005: note = Description of Artificial Sequence: Synthetic coding sequence
  source 1..1005: mol_type = other DNA
atgtttagagtcgaatacgcctcgaaagtggacgagaattttgattgtgtagaagcagacgatgtcgagggtaagatcaggcagatcattcctccaggcttctgtactaataccaatgactttctcagcttgttagagaaggaggttgattttaaacctttcggtacacttctgcacacatatagtgttctgagtcccactggaggcgagaatttcacctttcagatttataaagccgatatgacttgccgcggttttcgcgagtatcatgagcgcttgcagacttttctgatgtggtttatcgagaccgcttcctttattgatgtagacgatgagcgctggcattattttcttgtgtttgagaagtacaataaagacggggcgaccctttttgctaccgtgggatacatgactgtgtacaactactacgtgtatcccgacaaaactaggcctcgagtgagccaaatgcttatcttaactccttttcagggacaggggcacggcgctcagctgctagagaccgttcacagatactataccgagttccctaccgtgttggacataacggctgaggatccttccaagtcctatgttaagctgcgagatttcgtgctcgtgaagctctgccaggatcttccttgtttttctagggagaagcttatgcaagggttcaacgaggacatggcgatcgaggctcaacaaaagtttaagattaacaaacaacatgctcgccgagtgtatgaaattctgagattacttgtgacagacatgagtgatgccgagcagtaccgcagctatcgactggatattaagcgcaggctaatctccccgtacaaaaagaagcaaagagatttagctaagatgcgcaagtgcttgagaccagaggaactcacgaatcagatgaaccagatcgagatttccatgcagcatgagcagctggaggaaagcttccaagagctagtcgaggactaccgaagggtgatcgaacgccttgcacaggagtag

SEQ ID NO: 15437 - DNA, 870 bp, synthetic construct
  misc_feature 1..870: note = Description of Artificial Sequence: Synthetic coding sequence
  source 1..870: mol_type = other DNA
atgaccgttagcttccacaaatatggtgaatacttcccagggaccggtgatctgcgcgacatcggtgctggtaaaggcaaatattacgcagtgaactatccactccgagacggaattgacgacgagtcctacgaagctatttttaagcccgttatgtcaaaggtaatggaaatgttccaaccctctgccgtggtgttacagtgtggctcagatagcttaagtggtgaccgcctgggctgtttcaaccttaccattaagggacatgcaaaatgtgtggaattcgtgaagtcttttaatctcccgatgctcatgctgggggggggtgggtatactataaggaatgtagcgcgctgttggacatacgaaaccgccgtggccttggataccgagattcccaatgagttgccatacaacgactacttcgaatattttggacctgattttaagctgcacatttccccctccaacatgaccaaccaaaacaccaatgaatacctcgagaagattaaacagcgtttgttcgaaaacctccgtatgctgccccatgcccccggggtgcagatgcaggccattcccgaagacgccatcccagaggagagcggggacgaggacgaggacgatccagataaacgaatcagtatttgcagtagcgacaagagaatcgcttgcgaagaagaattcagcgattctgaggaagagggggaagggggccggaagaacagcagcaacttcaaaaaggccaaacgtgtgaaaacggaggacgagaaagagaaggaccccgaggagaaaaaggaggtaaccgaagaagagaagactaaggaagagaagccagaggctaagggcgttaaggaggaggttaagctcgcttag

SEQ ID NO: 15438 - DNA, 1449 bp, synthetic construct
  misc_feature 1..1449: note = Description of Artificial Sequence: Synthetic coding sequence
  source 1..1449: mol_type = other DNA
atggctcagactcagggaactcgccgtaaggtgtgctactactatgacggagatgtcggaaactactattacggacaggggcacccaatgaagcctcacagaatccgtatgactcataatctcctgctcaattatggcctgtataggaagatggagatatatagaccccacaaagccaatgctgaagagatgaccaagtaccattcagatgactatattaagttcctcaggtctatcaggccggacaacatgtctgagtacagcaagcagatgcagaggttcaacgtcggcgaagactgccccgtgtttgacgggttatttgaattctgccagctgtcgactggtggcagtgtggctagtgcagtaaagctaaataaacagcagacggatatcgccgtcaactgggcgggcggcctgcatcacgctaagaaaagtgaagcttccgggttttgctacgttaatgacatcgttctggcaattttagagctgctcaagtaccatcagcgcgtactctacatcgatatcgacatccaccatggcgatggagtcgaggaagctttctacaccaccgaccgagtcatgacagtgtcctttcacaagtatggtgaatactttcctggcaccggggatttgcgggacattggagccggaaaggggaagtactatgccgttaattaccccctgagggacgggatagacgacgagagctacgaggccatttttaagccagtcatgagtaaggttatggagatgtttcaacctagcgcagtagtgttgcaatgcggaagtgattctctctcaggcgacaggttggggtgcttcaatctaacaataaagggccatgcaaaatgtgttgaatttgttaaatcgtttaatttgccaatgttgatgctgggaggcggggggtacactattaggaacgtggcacgctgctggacatatgagacagcggtggctctggacactgaaattccaaacgaactgccgtacaacgactattttgagtacttcggacctgacttcaagttgcatattagcccaagcaatatgactaatcagaacacaaatgagtatctcgagaagatcaagcagcggctgtttgagaatctccgaatgcttccacacgcccccggagtgcaaatgcaggccattccagaagatgccatacccgaggagtcaggggatgaggacgaagacgacccagacaagaggatttcaatctgttcctctgacaaaaggatcgcatgtgaagaagaattttctgacagtgaggaggaaggcgagggaggccgtaagaactcttctaatttcaagaaggccaaaagggtgaagacagaggatgagaaagaaaaggatccggaagagaaaaaggaagtgaccgaggaagagaaaaccaaggaagaaaagccagaagctaaaggagttaaagaggaggtgaagctggcttag

SEQ ID NO: 15439 - DNA, 636 bp, synthetic construct
  misc_feature 1..636: note = Description of Artificial Sequence: Synthetic coding sequence
  source 1..636: mol_type = other DNA
atggctcaaacacaaggcacacggcgaaaggtgtgttattactacgacggggatgttggtaattattactacggccaaggccatcctatgaaacctcatagaatccgaatgacacataacctcttgctgaactatgggctgtatcgcaagatggaaatctatcggccgcacaaggctaacgcagaggagatgacgaaataccatagcgatgattatatcaagttcttaagatccattcgaccagataacatgtctgagtatagcaagcaaatgcagcgcagttcagccgtgaagctaaacaagcagcagactgatatcgccgtgaattgggctggtggtctccaccatgcaaaaaaatctgaggcgagtggtttttgctacgtgaatgacattgttctggctatactggaactgttaaaatatcatcaacgcgtgctgtacattgatatcgacatccatcatggcgacggtgtggaagaggctttctacaccactgaccgggtgatgacggtctcattccacaaatatggcgagtacttccctggcacgggagacctgagagacattggtgctggaaaggggaaatattatgccgttaattaccccctccgtgatggaattgacgatgagagttag

SEQ ID NO: 15440 - DNA, 1044 bp, synthetic construct
  misc_feature 1..1044: note = Description of Artificial Sequence: Synthetic coding sequence
  source 1..1044: mol_type = other DNA
atgcttcatactacccagctttatcagcacgtgcccgagacaagatggccgattgtttactccccccgctataatattacttttatgggactcgagaaattacacccatttgacgcaggtaagtgggggaaggtaatcaacttcttaaaggaagagaagctgctgagcgacagtatgttggtggaggctcgcgaggctagcgaggaggacctgctggttgttcacacccgcaggtatcttaacgagttgaaatggtcgttcgcagtagctactatcacagagattccgccggtcatattcctgcccaattttttggtccagcgcaaagtgctccgccccctgaggacgcagactgggggaacaattatggccgggaagctggccgtggaaaggggttgggcaatcaatgtgggcggcgggttccaccattgttcttcagaccgcggcggaggtttctgcgcttatgcagacataactcttgccatcaaattcttgttcgaacgagtggaaggaatttctcgggcaacgataatcgacctggacgctcatcaagggaacggacacgagagggatttcatggacgacaaacgagtgtacattatggatgtgtacaatcgccacatctacccgggcgatcgctttgctaaacaggctattcggagaaaagtggagctcgagtggggcaccgaggatgacgagtacctggataaggtcgaaaggaacattaagaagtctttacaagagcacctacccgacgttgtcgtctataacgcagggactgacattctcgaaggagatagactggggggtttgtctatttcccctgctggcatagtcaagagagatgagctggtgtttaggatggttcggggaaggcgtgtgcctatactgatggtgacatctgggggatatcagaaacgcacagctagaatcatcgctgactccattctcaacctcttcggattaggcctgattggccctgaatctccatccgtctccgcacagaatagcgataccccgctgctgcccccggccgtgccgtag

SEQ ID NO: 15441 - DNA, 711 bp, synthetic construct
  misc_feature 1..711: note = Description of Artificial Sequence: Synthetic coding sequence
  source 1..711: mol_type = other DNA
atgggtctggagaagttacacccgtttgacgccggcaaatggggcaaagtcatcaactttttgaaagaagagaagctgttgagcgacagtatgcttgtagaggccagagaagcctccgaagaagatctgctagtcgttcatacacgacgctacctgaatgaactgaagtggtcctttgctgtggcaaccatcactgagatccctcccgtgatattcttgcctaattttttggtccagcgcaaggtgctcaggcccctgcggacacagacaggcgggaccattatgggagtggcaagtaccaccgctccggctaccgtggcgggcgcctccgtccccatgcggacctccagaagtcctagtagcttctgtctctctgtgtggcgcgcttctcctggccttccctctctcattctcatgcctattcgagccatgggtatgagtgagacgagctggactactagtgtctgtacatcctggatgagcactacggccacatctacccagggcaccgccttaccatctagaccgtccggggggcggtggagttggtcaggcgcacaacggatgatgagcacttggatcagatggcgagggaccagcagaaacccctctagatcaacctgtcccacatggtggtatactatgcaggctcccacaagttctcgcggaaccgcgctgggtggctgcccatccgcgcagcgcgcctcctag

SEQ ID NO: 15442 - DNA, 960 bp, synthetic construct
  misc_feature 1..960: note = Description of Artificial Sequence: Synthetic coding sequence
  source 1..960: mol_type = other DNA
atggggctggaaaagctacaccctttcgacgccggcaaatggggaaaggttataaattttctcaaagaagaaaaactattgagcgattctatgcttgtagaggccagggaggctagcgaggaggacctgctggtggtacataccaggagatatcttaatgagctgaaatggtcttttgcagtggcaaccatcaccgagatacctcctgttatctttctgcctaactttctcgttcagcggaaggtgctgaggccactgcggacacagacaggcgggacgattatggcaggtaagctggccgtggagcgcggctgggcgatcaacgtcggcggtggcttccatcactgctcgagcgacagaggaggaggattttgcgcctacgccgatataactctcgccatcaagttcctcttcgaacgcgtagaaggcattagcagggctaccataatcgatctagacgcccatcaggggaatgggcacgaaagggacttcatggacgacaagcgcgtgtatatcatggatgtatacaatagacacatctaccctggcgataggtttgcaaagcaagctatacgacggaaagttgagctcgagtggggaacggaggatgatgaatacctggataaagtcgagcgcaatattaagaaatccctccaggagcacctgcctgatgtggtggtgtacaacgccggcacagatatcttagagggagaccggttaggcggattatccattagtcccgctggaattgtgaagcgtgacgagctggtatttcgaatggttaggggcaggcgggtgcccatcctcatggttacctctgggggctatcagaaaaggaccgcaagaattatcgcggatagcatactgaatctcttcggactggggctaattggcccggaatccccctcagtgagcgcacaaaatagcgacacccccttactgcctccagccgtgccatag

SEQ ID NO: 15443 - DNA, 468 bp, synthetic construct
  misc_feature 1..468: note = Description of Artificial Sequence: Synthetic coding sequence
  source 1..468: mol_type = other DNA
atggatgacaaacgggtttatattatggatgtgtacaacaggcatatttatcccggggataggtttgcaaagcaggccattaggaggaaggtcgaattggagtgggggacagaagacgatgaatatctggacaaagtcgagagaaacattaagaagtctctgcaggagcatctcccagacgtagtggtgtacaacgccgggactgacatcctggagggagataggctggggggattgtcaatctcccctgcgggtatcgtaaagcgcgatgaactggtcttcagaatggtacgcggccgccgcgtgcctatactaatggtcacctctgggggataccagaagaggacagcacgaatcatcgccgattctatactgaacctcttcggactgggcctgatcgggcccgagtctcctagcgtgagtgcccagaattcagatacaccccttctgcctcctgctgtaccctag

SEQ ID NO: 15444 - DNA, 891 bp, synthetic construct
  misc_feature 1..891: note = Description of Artificial Sequence: Synthetic coding sequence
  source 1..891: mol_type = other DNA
atgggtcttgaaaagcttcatcctttcgacgctggcaaatggggtaaggttatcaatttcctgaaggaggaaaaattactgtccgattctatgctagtggaggccagagaggcttctgaagaagacctgctcgtcgtgcacacgcgacggtacctgaacgaactcaagcggaaggtgttgaggcctcttaggactcagaccgggggtacaatcatggcagggaagttggccgtggagcggggatgggcaattaatgttggcgggggcttccatcattgctcgtccgaccggggtggggggttttgcgcctacgctgatattaccctcgccattaaattcctctttgagagagttgaagggatctccagagccacaataattgacctagatgcacatcaggggaatggccacgagagagattttatggacgacaagcgggtgtatatcatggacgtgtataatcgacatatatatcctggggaccgctttgccaaacaggccatcaggcgcaaagtggaattggaatggggaacagaggacgacgagtacctggacaaggtggagcggaacataaagaagagcctccaggaacatttacccgacgtagttgtctacaacgccggcaccgatatactggaaggagatcgcttaggaggtctgtctatcagtcctgcgggaatcgtaaagagggacgagctcgtctttagaatggtccggggcaggagggtgcccatcctcatggtgacatcgggcggatatcagaagagaaccgcacgcattatcgctgattccattctgaacctattcggacttgggcttatcgggccagagtcaccctctgtgagtgcccagaatagcgacaccccccttttgccccctgccgtgccgtag

SEQ ID NO: 15445 - DNA, 1377 bp, synthetic construct
  misc_feature 1..1377: note = Description of Artificial Sequence: Synthetic coding sequence
  source 1..1377: mol_type = other DNA
atgaagcctcaccggatacgaatgacccataatctcctgctaaattacggcttatatagaaagatggaaatttataggccacacaaggcaacagctgaagagatgactaagtaccactccgatgagtatatcaagtttcttaggtctatccgcccagacaacatgagtgagtattccaagcagatgcagagattcaacgtgggtgaggactgtcccgtattcgatggactgtttgagttctgccagctgagcaccggagggtctgtggccggtgccgtcaaacttaaccgtcaacagactgacatggccgtcaactgggccggagggctccaccacgcgaagaagagtgaagcatccggtttctgctatgtgaatgacatagtcctcgcaatactggagcttctgaaatatcatcaacgcgttctctacatagacatcgatatccaccatggtgacggagtggaggaggcgttctatacaactgaccgggtgatgacggtgtcctttcacaaatacggtgagtactttcctggaaccggcgatttgagggatatcggagcaggaaaaggaaagtactatgccgttaattttcccatgcgcgacggcatcgacgatgaatcctatggccagatcttcaaacctattattagcaaagtgatggagatgtatcagccaagtgccgtggtgctacagtgcggagcagacagcttgtccggggacagactgggctgcttcaacctgacggttaagggccacgctaaatgtgtggaggtggtcaagacgttcaacctcccactgctcatgttgggaggcggtggatacaccataagaaacgtggctcggtgctggacttatgagacagcagtcgctttggactgtgagattccaaatgagctgccttacaatgactactttgagtactttgggccagattttaagttacatatcagtccatccaatatgaccaaccaaaatactcccgagtacatggagaagatcaagcagaggctgttcgagaacctcaggatgttgccgcacgcgccaggtgtacaaatgcaggcaatacctgaggatgctgtgcacgaagactccggtgacgaagacggggaggatcctgacaagcgcatttccattcgggcttcagataagcgtatcgcgtgcgacgaagaattcagcgacagcgaagacgagggcgaaggcggacggaggaatgtggctgatcataaaaaaggcgccaagaaggctaggatcgaagaggacaaaaaggagaccgaagacaagaaaactgacgtcaaggaagaggacaagagcaaggataacagtggggagaagactgataccaagggcactaagtccgaacagctgagcaatccctag

SEQ ID NO: 15446 - DNA, 1749 bp, synthetic construct
  misc_feature 1..1749: note = Description of Artificial Sequence: Synthetic coding sequence
  source 1..1749: mol_type = other DNA
atgcggagcccaccatgcgggctgctgcggtggttcggcggcccacttctggcatcgtggtgtaggtgccatctgcgattcagagcctttggcacatcagccggatggtacagagcctttcctgctcccccacctttgctgccccccgcctgtccgtcaccccgcgactacagaccccatgtgagcctctcgcccttcttaagccggccttcaaggggtggttcgtctagctcctcctcgagtcggaggcgtagtccagtcgcagccgttgctggtgagcctatggcatacagccagggcgggggtaagaaaaaagtttgttactattatgatggggacatcggaaattattactatgggcagggacatcccatgaagccccatcgaatccgcatgacccacaacctgttactgaattatggcctttatcggaaaatggagatttacaggccacataaggcaacagcggaagaaatgacaaagtaccattctgatgagtacatcaagttcctgcggagcataaggcctgataacatgtccgagtacagtaagcagatgcaacgctttaacgttggcgaggattgtcccgtgtttgacggactcttcgagttctgccaactcagtactggcgggtctgtcgccggcgcagttaaattgaatcggcaacaaacagacatggctgtgaactgggccggcgggcttcaccacgcgaaaaaaagtgaggcctccggattctgttatgtcaacgacattgtcctggctattctggaactcctgaaataccatcagagggtgttgtatattgatattgatattcaccatggagatggcgtggaggaggctttctacactaccgaccgggtgatgacagtgtcctttcataagtatggagagtacttccctggaactggggacttgcgagatatcggagcgggcaagggaaaatattatgccgtgaatttccccatgagagatggtattgacgacgagtcttacggacaaatttttaagcccatcattagcaaagtcatggagatgtaccaacctagcgccgttgtcttacagtgcggcgcagattcattgtccggcgacagactggggtgctttaaccttacagtgaagggccatgcgaagtgcgtggaggttgtcaaaacctttaatttacctctcctgatgctggggggaggtggctacaccattagaaacgtcgccagatgctggacctacgagactgccgtggcccttgactgcgagatacccaatgagctcccatataatgattactttgaatacttcggccccgacttcaagctacacatatctccttcaaacatgacaaatcagaacaccccagaatatatggagaagatcaagcagagactatttgagaatctcaggatgctgcctcacgctcccggcgtgcaaatgcaggcaatccctgaggatgctgtacacgaagacagtggagacgaggacggcgaggatccagataagagaatctctataagagcaagtgataaaaggatcgcctgcgacgaggaattctctgactctgaggatgaaggggaaggggggaggaggaacgtagcagatcacaagaaaggggctaagaaggcccgaatcgaagaggataaaaaagaaacagaagataaaaaaaccgacgtgaaggaggaggataaaagtaaggataacagcggcgagaagacagatacgaaaggaaccaagagcgaacaactgtccaacccttag

SEQ ID NO: 15447 - DNA, 1467 bp, synthetic construct
  misc_feature 1..1467: note = Description of Artificial Sequence: Synthetic coding sequence
  source 1..1467: mol_type = other DNA
atggcctacagccaaggcggaggcaaaaaaaaggtgtgttactactacgatggcgacattggaaactactattatggccagggccaccccatgaaaccccataggatccgaatgacacataatctcctgcttaactatggtctgtatcgaaaaatggagatttatcgcccacacaaggcgaccgcagaagagatgaccaaataccatagcgatgagtacattaagtttttacgatctatcagacctgataatatgtctgaatatagtaagcagatgcaaagatttaacgtcggcgaagattgccctgtgttcgatggattattcgagttctgccagctgtccaccggaggctcggtggcaggcgccgtcaaactcaatagacaacaaaccgacatggccgtgaattgggctggcggtttacatcatgccaaaaagtcagaggcctctggcttctgttatgtgaatgatatcgttctggctatcctggaactgctgaagtatcaccagagggtgctgtatatcgacatcgatatccaccacggcgacggcgtggaggaggcattttacactaccgatagagttatgacggtaagctttcacaagtacggtgaatactttcctggcaccggtgacctgagggacatcggggcgggtaaaggtaaatattacgctgtcaactttccaatgcgagatggcattgacgatgagtcctatggacaaatatttaaacccattatttcaaaggtgatggagatgtaccaacccagcgcagttgttctccagtgtggggccgactcactgtccggggacaggcttggctgctttaatctgaccgtgaagggccatgccaaatgcgttgaagtggtgaaaactttcaacttaccgctcttgatgttaggggggggagggtatactatacgcaacgttgccagatgttggacttacgagacagctgttgcccttgattgtgaaatcccaaatgagttgccctacaatgactactttgagtacttcggcccagatttcaagctccacatctcacccagcaatatgacaaatcagaacaccccagagtacatggagaaaataaagcagcgtttgttcgagaacttgcgaatgctaccacacgcccccggggtacagatgcaggccattccggaagatgcagtgcatgaggactcaggtgacgaggatggggaagacccggataagaggattagcatccgggcgtctgacaagagaatcgcttgcgatgaagagttctcagactcagaagatgaaggggagggtggtcggcggaatgttgcagatcacaaaaagggagctaagaaagccaggattgaggaagataagaaggaaactgaggataaaaaaacggacgttaaggaggaggataagtctaaagataactctggcgaaaagacagatacaaagggcactaagagcgaacagctgtcaaatccgtag

SEQ ID NO: 15448 - DNA, 1377 bp, synthetic construct
  misc_feature 1..1377: note = Description of Artificial Sequence: Synthetic coding sequence
  source 1..1377: mol_type = other DNA
atgaagccacaccggattcgcatgactcacaaccttctgctgaattacggactttaccgcaagatggaaatttatagaccccacaaggctaccgccgaagaaatgactaagtaccactcagacgaatacataaaattcttgcggtctattcggcctgataatatgtcagaatacagtaagcagatgcaacggtttaacgtaggggaagactgccccgtgttcgacgggctattcgaattttgtcaactctccacgggagggagcgtggctggcgcggttaaactcaatcggcagcaaaccgacatggcagtgaactgggcagggggtctacaccacgctaaaaagtcggaagccagcgggttctgctacgtgaatgatatagtacttgcaattctggaattgctgaagtatcaccagcgggttttgtatatagatatcgacatccaccatggggacggagtggaagaggcgttttacaccacggatcgtgtgatgacggttagctttcacaaatacggagaatactttccgggaaccggcgacttgagggatattggtgcaggcaaaggcaaatactacgcagtgaatttcccaatgcgcgacggaattgacgatgagagctatggccagatattcaaacctataatatccaaagttatggaaatgtatcagcctagcgcagttgttcttcaatgcggagccgactcactgagtggtgataggctgggatgcttcaatttgactgtcaagggccatgcgaaatgcgtggaagtcgtgaagactttcaatctgccgcttcttatgctgggcgggggaggctacaccatccgaaatgtcgccagatgttggacatatgagactgctgtggcgcttgattgcgaaatcccaaatgagctgccctacaacgattattttgagtattttgggcccgattttaagctccatatcagcccttcaaatatgactaatcaaaacacccctgagtacatggaaaagatcaaacagcggctgttcgagaatttgcggatgctcccgcatgcccccggcgtgcagatgcaggccatccctgaggacgccgtgcacgaggacagtggtgacgaagatggtgaggatcctgacaagcggatctcgattcgcgcatctgacaaacgcatagcctgcgatgaggagtttagcgactccgaagacgaaggggaaggtgggcgaagaaatgtggccgaccacaaaaagggcgccaaaaaagcgcgaatcgaggaagataagaaggaaactgaagacaaaaagactgacgtgaaagaagaagataaaagtaaagacaactccggggagaagactgacaccaaggggacaaagagcgagcagctctccaacccctag

SEQ ID NO: 15449 - DNA, 1287 bp, synthetic construct
  misc_feature 1..1287: note = Description of Artificial Sequence: Synthetic coding sequence
  source 1..1287: mol_type = other DNA
atggctaaaacagtggcctatttctatgaccccgacgtgggcaattttcattatggcgcaggacaccctatgaagccccacagactggcactgacacactcactggtcctgcactatggcctctataaaaagatgatcgtctttaagccgtaccaggccagtcagcatgacatgtgccggttccactccgaggactacattgatttcctccagcgagtctcacctacaaacatgcaggggttcacgaagtcacttaatgcattcaatgtgggcgacgattgccctgtgttccccggactctttgaattctgctcaaggtatacgggcgcttccttgcagggcgccacccagctgaacaataagatctgcgacattgctattaattgggctggtggcctgcaccacgctaagaaattcgaggcaagcggattctgctatgtaaacgatatcgtgatcggaattctggaactactaaagtaccaccctagagtcctgtacatagacatagatattcaccacggggacggcgttcaggaagccttttacctcacggatcgcgtgatgacagtgtcttttcataaatacggaaactactttttcccaggcaccggggacatgtatgaagtgggggctgagtccgggcggtattactgcctaaacgtccctctgcgggacgggattgatgatcagagctacaagcacttgttccaaccagtaattaaccaggtagtcgacttctaccagcccacctgtattgttctgcaatgcggggctgatagcctgggctgtgatcgtcttgggtgttttaacctttccattagagggcacggcgagtgcgtggagtacgttaaatcgttcaatatcccattgcttgtgcttggcggaggtggctatactgtaaggaatgtggcccgatgttggacatacgagactagcttgctcgtcgaggaagctatcagtgaggaactgccttacagtgaatattttgaatattttgctcctgactttacgctgcatcctgacgtgtcaacacgcatcgaaaaccagaattcccgacaatacttggatcagatccggcagaccatcttcgaaaatttgaaaatgcttaaccatgcaccgtccgtgcagattcacgatgtgcccgctgatctgctgacctacgatagaactgatgaagccgacgcagaagaacgcgggcccgaggaaaattattccaggccggaggctccaaacgagttctacgacggggaccatgacaatgacaaagaaagcgatgtcgagatttag

SEQ ID NO: 15450 - DNA, 3255 bp, synthetic construct
  misc_feature 1..3255: note = Description of Artificial Sequence: Synthetic coding sequence
  source 1..3255: mol_type = other DNA
atgtccagccaatcacacccagatggcttgtctgggcgtgatcagcccgttgagctgctcaacccagcgagagtgaaccacatgccttcgaccgtagacgtggccacagccctcccactgcaagtggcgcccagcgctgtgcctatggacctccgcctggatcaccaattttcactgccagtggccgaaccagctctgagagaacagcaactgcagcaggaacttttggcattgaagcaaaagcagcagatccagcgacagattctgatcgccgagtttcagaggcaacatgagcagctgtcccgccagcacgaagcacaactgcacgagcacataaagcagcagcaggagatgctcgcaatgaaacaccagcaggaactacttgagcatcaaaggaagctcgagagacatcggcaggagcaggagctcgaaaagcagcacagagagcagaaactgcagcagttgaaaaacaaggagaagggaaaagagagcgcagtggcctcgacagaggtgaaaatgaaactccaagagttcgtgcttaataaaaaaaaagcactggcccaccggaaccttaatcattgcattagctccgatcctaggtattggtatgggaaaacccaacattccagtctggatcaatcttcacccccacagagcggcgtcagtaccagctataatcaccccgtcttgggcatgtacgatgccaaggatgatttccccctccgaaagacagccagcgaaccaaatcttaagctgcggtcaaggttgaagcagaaggtcgcagaacgccgatccagccccttgttgaggagaaaggacggtccagtggtgaccgctctgaaaaaaaggccactggacgtcacagacagtgcatgtagctccgcccctggctcgggaccttcttcccctaacaactccagtggctcagtcagcgccgaaaatgggatcgcgccagccgtgccgtccatccctgctgaaaccagtctggcccaccggcttgtggccagggagggctcggctgcgccactgcctctgtatacctcacccagccttcctaacatcacattgggcttgcctgcaactgggccttcggccggcaccgctgggcagcaagacgctgagcgcctgacgttgccagccctccagcagcggctttcactttttcccggaacccacctcacaccgtacctcagcacttccccactagagagggacggtggagcggcacactcacctctgctccagcacatggttctcttggagcaacctcccgctcaggccccactggtaacaggtctgggcgccttacctctccacgcacagtcactcgtcggggccgaccgagtgtccccatccattcacaaacttagacagcatcgaccccttggccggacacagagcgccccactgccccaaaacgcccaggcccttcagcacttggttatccaacagcaacaccaacagtttctcgaaaagcacaagcagcagttccagcagcaacagctacaaatgaacaaaatcatccctaaacctagtgaacccgccaggcagcccgagtctcaccctgaagagacagaggaggaactgcgtgagcatcaagcactgttggacgagccgtacctcgaccgcctccccggccagaaggaggcccatgcccaggccggcgtgcaggtgaagcaggagcctatagagagcgatgaggaagaggctgagccacctcgcgaggtggaacctggacagagacaaccaagtgagcaggagctgttattcaggcagcaagccctgctgctcgagcaacagcgcatccatcaactccggaattaccaagccagtatggaggcagctggaatcccggtgagtttcggcggccacagaccgctctctagagctcagtctagtcccgcttccgccactttcccagtgagcgtacaggaaccacctacaaagccacgctttaccactggattggtgtatgacaccttgatgctgaaacatcaatgcacttgcggcagttcttcttcccatcccgaacacgcaggtcggattcagtctatttggagcaggctgcaggagaccggacttagagggaaatgcgaatgtatcagagggcgtaaagccaccctggaagagctgcaaacagtccatagcgaggcacatacgctcttatacggcacaaacccactgaaccggcagaagctggactcaaagaagctcttagggtccctcgcatctgtattcgtcaggctaccctgcggcggagtcggagtggactctgacacaatctggaatgaagtgcacagtgcaggtgcggcgcgtcttgctgtgggatgtgtcgtcgagttagtgttcaaagtggccacaggggagctgaaaaatggatttgcagtggtacggccccctggacatcacgccgaggagagcactcccatgggattctgctactttaattctgtagccgttgctgcgaagctactgcagcagcgcctctcagtgtccaagatactaatagtagactgggacgtgcaccatggcaacggcacgcagcaggcattctactcggacccgtccgtgctgtacatgagtctgcaccgctatgacgacgggaacttctttccaggatccggtgcccctgacgaagtaggcacgggcccaggggttgggttcaatgtgaatatggcgttcacagggggcttggatcccccaatgggagacgcagagtacctcgcggctttccgcaccgtagttatgcccattgcatcagagttcgctcctgacgtagtgctcgtttcctcgggctttgacgcggtggaagggcaccctactccacttgggggttataatctgtcagccagatgttttggataccttactaaacagctcatgggacttgctggtggcagaatcgtgctagccctcgagggagggcacgacttgacggccatctgcgatgcatccgaagcatgcgtaagcgcactcctgggtaacgagctcgatcctctccctgagaaggtgttacagcagcgacccaatgctaacgccgtgcgcagcatggagaaggttatggaaattcattcaaaatactggcgatgcctgcagaggactacatccaccgcaggccgttctctcattgaagcgcagacatgtgagaacgaagaagccgaaacagtgaccgccatggcttctctgagcgttggggtgaagccagccgaaaagagacccgacgaggagcccatggaggaggagccacccttatag

SEQ ID NO: 15451 - DNA, 1941 bp, synthetic construct
  misc_feature 1..1941: note = Description of Artificial Sequence: Synthetic coding sequence
  source 1..1941: mol_type = other DNA
atgctcgctatgaaacatcagcaggaactgctggagcatcaaaggaagctggaacgccaccggcaggagcaggagctcgagaaacagcatagagagcagaaactgcaacagctcaagaataaggaaaagggcaaggaaagtgcagtggcttccacagaggtcaagatgaaacttcaagaattcgtcttgaacaaaaaaaaagctttggctcatcgcaacttaaatcactgtatctcttcagatcccagatactggtatggtaaaacccaacacagcagtcttgatcagtcaagcccaccccagtctggcgtgagcacgtcctataaccaccctgtgctcggtatgtacgacgctaaggacgacttcccattgcgcaaaacggcttccgagcccaacctgaaactgagatctcgtctcaagcagaaagtagcagaaaggcgtagttctcccctgctgagacggaaagacggacctgtggtcactgcgttaaagaagcgcccacttgatgtgacagactccgcttgttcatccgcccctggtagtggacctagctcccctaataattcatctggttctgtatccgccgagaacggtatagcacctgcagtcccttccatccccgctgagacctccctcgcccacaggctggtggcaagagagggctcagccgccccactccccctctatacctcccctagcttacccaacatcactctaggcctgcccgctactggaccatcagccggaacagcagggcagcaggacgccgagagattaactcttccagccttacagcaacggctctcgctgtttcctggaactcatctcaccccctatcttagcaccagccctctggaacgcgacgggggagctgcccattctcctctgttgcagcatatggtgcttttagaacagcctcctgcacaggctcccctcgtcaccggcctcggcgccctgccactgcacgctcagtccctcgtcggcgccgaccgggttagcccttccatccacaagctacggcaacataggcctttaggccggacccagagtgcccccctgccccagaatgcccaggccttacaacatttagtcatccagcagcagcaccagcaatttctggaaaagcacaagcagcagtttcaacagcagcagctacagatgaacaagatcattccaaaaccatcggagcccgcgagacagccagagtcacatcctgaggagacggaagaggaactgagagagcaccaagcactgctggacgaaccctatcttgatcggctgcccgggcagaaagaggcccatgcccaagccggagtacaggtgaagcaagagcccatcgagagcgatgaagaggaagccgagccacctagggaagtggagcctggccagaggcaacctagcgaacaagaactgctcttccgtcagcaggccctcctgctggagcagcaacgcatacaccagctgaggaattaccaagcgagtatggaggctgcaggtatcccagtctcctttggcgggcatcggccactgagccgcgcacagtcgagcccagcgtcggcgacctttccagtaagcgtgcaggaaccccctacgaagccccggttcaccacaggcctcgtctatgacacgctgatgctgaaacaccaatgtacctgtggttcatcttcatctcaccccgagcatgccgggcggatccagagcatttggtctagactccaggaaacgggcctccgcggtaagtgcgagtgtattcgcggccggaaggcaacccttgaagaactccagacagttcacagcgaggcccacactcttctctatggaaccaatcccctaaacaggcagaaacttgactctaaaaagcttctggggtccctcgcctcggtgtttgtgcgcttaccttgcggcggggtgggtgtgtctgtgccattaatgtgtaaatag

SEQ ID NO: 15452 - DNA, 2919 bp, synthetic construct
  misc_feature 1..2919: note = Description of Artificial Sequence: Synthetic coding sequence
  source 1..2919: mol_type = other DNA
atgctagcaatgaagcatcaacaggagctgttagaacaccaacgcaaactagaaaggcataggcaggagcaagagcttgaaaagcaacaccgcgaacaaaagctgcaacagcttaagaacaaggaaaagggtaaagagtcggccgtggcctctacagaggtgaagatgaaactacaagaatttgtcctgaacaaaaaaaaggccctcgcacaccgaaacctgaatcattgtatttcctccgatccacgttactggtacggtaagactcagcattctagtctcgatcagagctcccctccccagtccggcgtttctactagttataaccacccggtgttgggaatgtacgacgccaaggatgatttccctttgcggaaaactgccagtgagcctaatttgaaactcaggtcgcgcttgaagcagaaagtggcagagagaaggagctctccactgttaaggcgaaaggatgggcctgtggtgaccgcactgaagaaacgacccttggacgtcacagacagtgcttgcagttctgcaccgggaagcggaccgtcctcccctaacaatagttcgggtagcgtgagcgccgagaacggtatagcacctgctgtgccctctattccagccgaaacatccctcgctcatcggctggtagccagggagggtagcgccgcccccctgcctctatacacttcgcccagcctccctaacatcaccctgggactgccggccacgggccccagcgccggcactgccgggcagcaggacgctgaaaggctgacattgcccgcactgcagcaaagactgtctctgttccccggaacacacctcaccccttacctgagcacatcaccactcgagcgggacggaggagccgcccacagtcctttgcttcagcacatggtcctgttggaacagcctcctgcacaggcgccacttgtgacagactggtatttgtccggattaggagctctgccattgcacgcccaatctttggttggcgctgacagagtctccccttccatccacaagctgcggcaacatagaccccttggccggacccagtcagccccccttcctcagaacgctcaggccctgcagcacctggtgatccagcagcaacaccagcaattcctggagaaacataaacaacagttccagcagcagcagctgcagatgaataagattattccaaagccctctgagcccgcaagacagccagaaagccaccccgaggagactgaggaggaactgcgggaacatcaggcattactggacgagccatatcttgacagattgcccggccaaaaggaggcccacgcgcaggccggggtgcaagtcaagcaggaacccattgaaagcgacgaggaggaggcagagccaccacgcgaggtcgaaccgggccaacgccaacccagtgagcaagagctgctgttccgacagcaggctctgttgctggaacaacagcgcattcaccagctccgcaactatcaggctagcatggaggcagcgggaatccccgtgtcctttggtgggcacaggccactatcccgtgcccagtcttcccccgccagcgctacgttccctgtcagcgtacaagaaccaccgacaaagccccgattcaccactggattagtctatgacaccctgatgctcaagcaccaatgtacttgcggatcttcatcaagccacccagaacatgctggccgaattcagtccatttggagcagattacaagagactggccttagaggcaagtgcgaatgcatacggggtcgcaaggcgacactagaggagcttcagacagtacattccgaggcccataccctgctctacggaaccaacccgctaaacagacaaaaactggactcgaagaaactgctgggatcgctggcatccgtctttgtgagattgccatgtgggggtgtcggtgtggactcagatacaatctggaacgaggtgcactcagccggcgcagctagactggccgtgggttgtgtcgtcgagctggtctttaaggtagctacaggagagctgaaaaatggattcgctgtggtgcgtccacctggacaccatgccgaagagagtacccccatgggtttctgttattttaacagcgtcgccgtagccgctaagttgctacaacaacggctgtcagtgtctaagattctcatcgtggattgggatgtacatcatggcaatgggacacagcaggccttttattcggacccgtcggtgctttatatgtctctgcacaggtatgacgatgggaatttttttccagggagcggcgctcccgatgaagtggggaccggtccaggcgtgggctttaacgttaacatggcatttactggtggtctggaccctcctatgggcgacgccgaatatctggcagcctttcgcaccgtggtgatgccaatcgccagcgaatttgcccctgacgtggtgctagtctcttcggggtttgatgctgtggagggtcaccctacaccactcgggggctacaatctgtcagcccgttgcttcggctatctcaccaagcagctcatgggtttggccggtggccgaatcgtcctggccctggagggcggacacgaccttacagccatctgcgacgcatcagaagcttgcgtctctgccctcctgggcaatgagttagacccactgcccgaaaaagtgctccagcagagacctaatgccaatgccgtgcgttctatggaaaaagtgatggaaatccacagcaagtattggaggtgtttacagaggaccacatcaaccgctggccgatccctgatagaggctcagacttgcgagaacgaagaagccgagacagtcactgccatggcctcactctctgtaggtgtgaagccggctgagaaaaggcctgacgaagagcctatggaggaggagcctcccttatag

SEQ ID NO: 15453 - DNA, 2214 bp, synthetic construct
  misc_feature 1..2214: note = Description of Artificial Sequence: Synthetic coding sequence
  source 1..2214: mol_type = other DNA
atggacgtcgcaacagcgctgcctctccaggtggctccttccgccgtcccaatggacctccggctcgaccaccagttcagcctgcctgtggccgagcccgcactgcgagagcagcaactgcagcaggaactcctcgccctgaaacagaagcagcagatccagcggcagattctcatcgcggagttccagcgacagcacgagcaactgtctcgacagcacgaggcgcagctccatgaacacattaaacaacaacaggagatgttagcaatgaagcatcagcaggagctgttggagcaccaacgaaagctggagcgccacaggcaggagcaagagctagagaagcagcatcgggaacagaagctgcaacagttgaagaataaggaaaagggcaaggagagcgcggtggcctcaacggaggttaagatgaagctccaggagtttgtccttaataaaaagaaagccctggcccaccgaaatttgaatcactgtatctcctccgaccccaggtactggtatggcaagacacaacatagcagcttggaccagagctcacctccacagagtggcgtgagcaccagctacaatcacccagtgctagggatgtacgatgcgaaagacgacttcccgcttagaaaaacagcttcagaacccaacctcaagctgcggagtaggctgaagcaaaaggttgccgaacgtagatcatcgcccctcctcagacgcaaagacggtccagtggtgactgctctgaagaaacgacctcttgacgtgaccgactccgcttgcagtagcgcccccgggagcggcccaagtagtcccaataattcgtctggcagtgtttctgcagagaatggaatcgcccctgctgtccctagtattcctgccgaaacaagcctggcgcataggctcgtcgcccgagagggcagtgcggcccccctgcctttatacacctctccttccttgcccaacatcaccctgggcctgccagctacgggaccaagcgcaggaactgctggccagcaggacgccgaacgcttgaccctgcctgccctgcagcagcgtctatccctgttcccaggcacacatttaaccccttacctgagtacctctccccttgaacgagacggaggagccgcccactcacctcttttgcagcacatggtcctcctcgaacagccacccgctcaggcgcctctcgtgaccgattggtacctgtcagggttgggcgcactgcctctccatgcccagagccttgttggagcagatcgcgtgtctccatccatccacaagcttaggcaacatcggcccctgggtaggacacaaagcgctccgctcccacaaaacgcacaggccctgcagcatctggttattcaacaacagcatcagcagttcctcgagaaacataaacagcagttccagcaacagcagttgcagatgaacaagatcatacctaagccaagcgagcccgcacgacagccagagagccaccccgaggagacagaggaggagctccgcgaacaccaggcactcctggacgaaccatatctcgaccggctcccgggtcagaaggaggcccacgctcaggcaggggtgcaagtgaaacaagagcctatcgagagcgatgaagaggaggccgagcccccacgggaagttgagccgggacagagacagccatccgagcaggagctcctgttccgccagcaagctctgctgcttgaacaacagcgcatacaccagctgagaaactaccaggcgagcatggaggctgccggcattccggtctccttcggtgggcacaggccccttagccgcgcccagtcctcccctgcctcagctacgttccccgtaagtgttcaggaaccgcccaccaaaccacgctttaccaccggacttgtctatgacacactgatgctgaaacaccagtgtacctgcggcagcagcagttcccatccagagcacgccggtaggatccagagtatttggagccgtctgcaggagacgggcctgcggggaaaatgcgagtgtatcaggggcaggaaagcgacccttgaagaactccagacagtacattctgaggcacacaccctgctgtacggcactaatccactaaatcgccaaaagctggactcaaaaaaattgttaggaagcttggctagtgtattcgtgcggctcccctgcggtggagttggggtcagcgtcccactgatgtgcaaatag

SEQ ID NO: 15454 - DNA, 2007 bp, synthetic construct
  misc_feature 1..2007: note = Description of Artificial Sequence: Synthetic coding sequence
  source 1..2007: mol_type = other DNA
atggtcttgctggagcagcctcccgcccaggccccacttgtcactggtctgggcgctctgcctctgcatgcccagagtcttgtcggcgccgaccgggtctccccttcgattcataaactcagacagcacagacccctaggacgcacccaaagcgcaccactgccacaaaacgctcaggctctgcagcatttagtgatccagcagcagcatcagcaatttctggagaaacacaaacagcagtttcagcagcagcaactgcagatgaacaagatcatccccaaacctagtgagcccgcccgccaaccggagtcacatcctgaggaaacagaagaggagctcagagagcaccaggccttactagacgagccttacttagacaggctgcccgggcagaaagaggcccatgcccaggcgggcgtgcaggttaagcaggagccgatagaatctgatgaggaagaagcagagcctcctcgcgaggttgaacctggtcagcgccaaccatcagagcaggagctcttgttcagacaacaagcactgcttctggagcaacagagaattcaccaacttcgtaactatcaggcgtccatggaggctgccggtatccctgtgagcttcggggggcaccgtcccctgtccagagcacagtcgtcgcccgccagtgccactttccctgttagcgtccaggaacccccaactaagccccgctttactactggcttggtctatgatacattaatgctgaaacatcagtgcacgtgtgggagttcaagttcccaccccgagcacgctgggagaatacagtccatttggtcacggctgcaagagacgggactaagagggaaatgcgagtgtattcgcggcagaaaggcaaccctcgaagagcttcagaccgtgcactccgaagctcacacactcctctatggcacgaacccactcaacagacagaagttagacagcaagaaactgctcggatcactggctagcgtttttgtcaggctgccttgtgggggagtgggcgtcgatagcgacacaatttggaacgaggtacactccgcaggggcagcgcgattagccgtggggtgcgtggttgaactggtgtttaaggtcgccaccggcgagcttaaaaacggctttgcagtggtgcgacctcccggccaccacgctgaggaatcaactcccatgggattttgctacttcaattctgtggcagtggccgctaagttgctgcaacagcgcctttctgtgagcaagattctgattgtggactgggatgtgcaccacgggaacggcacacagcaggccttctactcagacccctctgtattgtacatgagcctgcatcgttatgatgatggaaactttttcccaggtagcggtgctcccgatgaagtaggcactggacccggtgttggctttaacgtcaacatggcctttacaggcggcctggaccctcccatgggcgatgccgaatatcttgcggctttccggactgtggtgatgccaatcgctagtgaattcgcaccagatgtggttttggtctcgtccggatttgacgcagtggagggacatcccacaccactaggcgggtacaacctctccgcgaggtgtttcgggtacttaactaaacagctcatgggactagctggcgggaggatcgtgttggccctggagggggggcacgatttgactgccatatgcgacgcctcagaagcttgtgtgagcgctttactgggcaacgagctggatccactgccagagaaagtgctccaacagcggccaaacgcaaacgccgtgcggtcgatggagaaggtgatggaaattcattccaaatattggcgctgcctccagaggaccaccagcaccgctggccgcagccttatcgaggcacaaacctgtgagaatgaggaagcggaaactgttaccgctatggcatctctctccgtaggtgtgaagcccgccgagaagcgcccagatgaggagccgatggaggaagaaccccccttgtag

SEQ ID NO: 15455 - DNA, 90 bp, synthetic construct
  misc_feature 1..90: note = Description of Artificial Sequence: Synthetic coding sequence
  source 1..90: mol_type = other DNA
atgagttcacaaagccacccagacggactctctggccgagaccagcctgttgaactgctcaacccggctcgagtgaaccacatgccatag

SEQ ID NO: 15456 - DNA, 3648 bp, synthetic construct
  misc_feature 1..3648: note = Description of Artificial Sequence: Synthetic coding sequence
  source 1..3648: mol_type = other DNA
atgacatccacagggcaagactccaccacaacccgccagcgccgcagtcggcagaacccccagtcaccgcctcaagattcatccgtgacatccaaacgcaatattaaaaagggagcggtgccaaggtcaatcccaaatctggctgaagttaaaaagaagggtaagatgaagaaacttggccaggctatggaggaggacctcatcgtaggtctgcagggcatggatctgaatctggaagcggaagctctcgccgggacaggactcgtacttgacgagcaactgaatgagtttcactgcctgtgggatgattcctttccagaaggcccagaacggctgcacgccatcaaggagcagctcatccaggaaggtctgcttgatcggtgcgtgagtttccaagctaggtttgccgagaaggaggagttgatgctggtgcactctctggaatatatcgatttgatggaaacaacccagtacatgaacgaaggcgaactgagagtactcgccgatacctacgacagtgtgtacttacatcctaatagctactcgtgtgcctgtctggcctcagggtctgtgctgagactcgtggatgccgtactgggagccgagatccgcaatggaatggctattattcgccccccaggacaccatgctcagcactcgttaatggacggctattgtatgttcaatcacgtagcagtcgctgcacgctatgcccagcagaaacaccgtatcagacgtgtgttaattgtggactgggatgttcatcatggccaaggaacacagtttacattcgatcaggatccgtctgtgctgtatttctcaatccatcgctacgaacagggaaggttctggcctcacttgaaagcatctaattggagcactaccgggttcgggcaaggtcaaggatatacgattaacgtgccctggaatcaggtgggtatgcgggatgccgattacatcgctgcttttctgcatgttctgttaccggtggctctggagttccagccgcagctggtgttagtagccgccggttttgatgccctgcaaggagatccaaagggggagatggctgccactccggctggttttgcgcaactgacccacctcctgatgggattggccggcgggaaattgatactctcactggagggagggtacaacctgagggcccttgcagagggcgttagtgcttctctacacacgctcctcggcgatccatgtcccatgttggagtcaccaggcgccccctgcagatccgctcaagccagtgtgtcatgtgcgctcgaagcattagagcctttttgggaggtgcttgtgaggtcaaccgagactgtggaacgggacaacatggaggaggacaacgttgaggaaagtgaggaggagggaccctgggagcctccagtcctccctattcttacttggccagtgttgcaatcaagaacagggttggtgtatgatcagaacatgatgaatcactgcaacctgtgggacagccatcacccggaggtaccccagcgtattttgcgcatcatgtgccggctggaagagctgggcctggcaggtcggtgcttgacactgacaccccggcccgcgacagaagctgagctgctcacctgtcactctgctgagtatgtaggacaccttcgagccacggaaaaaatgaagactcgcgaattgcacagagagtcctctaacttcgatagcatctatatctgccctagtacgttcgcgtgtgcccagctcgcgaccggagcagcctgtcggctcgtggaggcggtcctaagcggtgaggtgttaaacggagccgctgtcgttcgcccccctggtcaccatgctgagcaggacgcagcctgtggcttttgcttttttaactccgtggccgtagcagcacgccacgcccaaacaatatcagggcacgctctgagaattctcattgtagattgggatgtccatcatggcaatgggacccagcatatgtttgaagacgacccatccgtcctttacgtctcactgcaccggtacgaccacggtaccttcttccccatgggtgacgaaggggcttcgagtcagatagggagggcggccggcactggcttcaccgtgaacgtcgcctggaatggtccgcggatgggagacgccgattatctagcagcctggcaccgcctcgtactgccgattgcctacgaatttaatcctgagttggtcctggttagcgccggcttcgatgctgccaggggcgacccattaggcggctgtcaggtgtcccccgaggggtacgcccacctgacacacctccttatgggactggcctccggacggatcatccttatcctcgagggcggttataacctcacaagtatctccgagtctatggcggcctgcacccgtagtctgctgggagacccaccgccattgctcacactgcctaggcctcccctaagcggggcactggcctctattacggagacgattcaggtccaccggcgatattggagaagtcttagggtgatgaaggtagaggaccgggagggcccctctagcagcaagcttgttacaaagaaggcaccccagccagccaagcctcgcctggcggaacgcatgaccactcgagagaagaaggttttagaggccggtatgggcaaggtcacttccgcaagctttggggaggagtcaacccctgggcagactaattctgaaaccgccgtcgtggctctcacacaagatcaaccttccgaggccgctactggcggcgcgactttggcccagacgatcagcgaagctgccattggtggcgcgatgctggggcagaccacaagtgaagaggccgttggaggcgccacgccagatcagacgacctctgaggaaaccgtgggcggagcgattctggaccagactacatcagaggatgctgtcgggggtgcgacacttggacagaccacttccgaagaggctgtaggtggagcaacattggcccaaactacttcggaggcggccatggagggtgcaactctggaccagacgacctcggaggaggccccaggaggcaccgagttgattcagacaccactggcctcttccactgaccaccagactccgccaacaagccccgtacaaggcaccacaccccagatctccccatcgacgctgattgggagcctgcggacgttagagctgggttcagaatcacaaggtgcctctgagagtcaggcacccggagaggagaacctcctcggggaggccgccggtggacaggatatggccgactcaatgctgatgcagggaagcagaggcctcacggaccaggccatcttctatgctgtaacccccctgccctggtgtccgcatttggtggccgtttgccccataccagccgctgggctggacgttacccagccatgtggagactgtggcaccatccaagaaaattgggtgtgtttgtcatgctaccaggtgtattgtggtagatacatcaacgggcatatgctccaacatcatggcaactcaggccatcccttagtcttgagctatattgacctgagtgcatggtgctactattgccaggcttatgtacaccatcaggccctgctcgacgtgaagaatatagcccaccaaaataaattcggcgaagacatgccgcacccacactag

SEQ ID NO: 15457 - DNA, 633 bp, synthetic construct
  misc_feature 1..633: note = Description of Artificial Sequence: Synthetic coding sequence
  source 1..633: mol_type = other DNA
atgacatcgaccggccaggattcaacaaccacaaggcagcggcggtctaggcagaatccccaaagccccccccaggactcaagcgttacatccaagcgcaacattaagaagggagcggtgcccaggagcattcctaatctggctgaagtaaaaaaaaaggggaaaatgaagaagttaggccaggccatggaagaggatcttatcgtggggctgcagggaatggatctgaacctggaggccgaggcattggctggcactggattggttttagatgaacagctgaatgaatttcattgtctttgggacgattcctttccggagggccctgaacgcctgcacgcaattaaggagcagctgatccaagaggggttgctggaccggtgcgttagttttcaggcccgtttcgccgagaaagaggaattaatgttggtacactccttagagtatatcgatctgatggagaccacgcagtacatgaatgagggcgaactgcgagtgctggcagacacatatgattcagtctatctgcaccccaactcctatagctgtgcctgtctcgcatcaggaagtgtgttacggctggtggatgccgtcctgggcgctgagattaggaatggcatggcaataatctag

SEQ ID NO: 15458 - DNA, 3648 bp, synthetic construct
  misc_feature 1..3648: note = Description of Artificial Sequence: Synthetic coding sequence
  source 1..3648: mol_type = other DNA
atgacctccactggacaggatagcacaaccactaggcagagacgctcacggcagaatcctcagagcccacctcaggactctagcgttacatccaaacgtaatatcaagaagggtgcagtgccgagaagcatccccaacctagctgaagtgaaaaaaaaggggaagatgaaaaagctgggccaagcaatggaagaagacttgattgtgggactccaggggatggatctgaaccttgaagctgaggcactggctgggaccggtctcgtactcgatgagcagctgaacgagttccactgcctctgggatgatagctttccggagggccccgagcgtcttcatgccattaaggaacagctgatccaggaaggtcttctggatagatgtgtgtcttttcaagctaggttcgcagagaaggaggagctcatgttggtacacagtttggaatacattgacctaatggaaactactcaatacatgaatgaaggtgaactacgggtcttggcagacacctacgactctgtgtaccttcatcctaactcttattcttgcgcttgcctagcttcgggcagtgtgctgcgactggtcgacgctgtgctaggagctgagatcaggaacggcatggccatcattcgtcccccaggacatcatgcacagcactccctgatggatggctactgcatgttcaaccacgtggctgtggctgcccgctacgcccagcagaagcaccgtatcagaagagtccttatcgtggactgggacgttcaccacggtcagggaactcaatttacgtttgaccaggacccgtccgtactgtatttctcaatacatcggtacgaacagggtcgcttttggccacatttgaaagcaagcaattggagcacaaccggatttgggcaaggccaagggtatacgattaatgtcccctggaaccaggttggcatgcgcgacgctgactatatcgcagcgttcttacatgtactgctgcctgtagctcttgagtttcagccgcagctggtgctagttgccgctggatttgacgcattacagggcgaccctaaaggcgaaatggccgcaacccctgccgggtttgcccaacttacacatctcctgatgggcttggcagggggaaagcttattctgagcttagagggaggctacaacctgcgcgccctggccgagggagtgagcgcaagtctccatacactgctcggggatccatgcccaatgctggagtcacctggagcaccctgcaggtccgcacaggcctctgtgtcttgcgcactggaggcactggagcccttctgggaggtactggtccggagcactgagactgtcgagcgcgacaatatggaagaagataacgtggaggagagcgaagaggaagggccatgggagccgcccgtgctacctatcctgacatggcctgtcttgcaaagccggacagggttggtttatgaccagaacatgatgaatcattgtaacctctgggactctcatcatcccgaagtgcctcaacggatacttagaattatgtgcaggcttgaggaactgggcctcgccgggcgttgtctgacactgactccccgtccagcgacagaggcagagcttttaacctgtcactccgccgaatatgtgggacacctgagggccaccgagaagatgaaaacaagagaattgcatcgtgaatcttccaacttcgacagtatctatatctgcccctccactttcgcctgcgcccagctggccacgggggccgcgtgccggctggtggaggcggtgctgagtggcgaggttctcaacggagcggctgtggtgcgtccacctggacatcacgccgagcaggatgccgcctgtggtttctgttttttcaattcagttgcagtggccgcccgtcatgcccagaccatctccggacacgctctgcgcatactgatcgtagattgggatgtacatcacgggaacggcacccagcatatgttcgaggatgaccccagcgttttgtacgtgagtctgcacaggtatgatcacggaacgttctttcccatgggagatgaaggagcaagtagtcaaattgggagggccgcaggcactggttttacggtcaacgtggcttggaatggcccacgcatgggagacgccgattacttggccgcttggcatcgcctcgtccttcctattgcctacgagtttaatccagagctcgtgctggtttctgctgggtttgacgcggcccggggggacccactgggcggctgccaggtctcaccagaaggatatgctcatctaacgcacttactgatggggctggcctcgggaagaattatcctaatcctagagggcggttataaccttacgagtataagtgagtccatggcagcatgcacgcggtccctattaggtgaccctccacctttattaacacttccccggcctcctttgtccggagcccttgcttctatcacagagactatccaagtgcacaggagatactggcgcagcctgagggtaatgaaggtcgaagatcgcgaaggcccctcaagctccaaacttgtgactaaaaaagctccccaacctgccaagcctaggttagcggagagaatgactactagagaaaaaaaagtcctcgaggcagggatgggaaaggtgacatctgccagctttggtgaagagtcgaccccggggcagaccaacagcgaaaccgcggtcgtcgctctgacccaggatcagcctagcgaagcagccacagggggcgccactttggcacaaaccattagcgaggcagccattgggggagctatgctcgggcagaccacctctgaagaggctgttggtggtgcaacacccgatcaaacaacctcagaggaaacagtggggggagccattctggatcaaaccacttccgaagatgctgtcggaggcgcaactctgggccagaccacatctgaagaagcggtggggggcgccaccctcgcccaaactacgagcgaggccgctatggaaggagcaaccctcgatcagactacgtccgaagaagcacccggcggcacagagttgatacagacccctttggcctctagcacagaccatcagacccccccgacatctccagtgcaagggacaactccccagatcagcccatctacacttataggtagtttgagaaccttagaactgggctccgaatctcagggcgccagtgaaagccaggcgcccggagaggagaatctgttgggtgaggctgctggtggtcaggacatggcggacagcatgcttatgcaagggtctcgtggcctgaccgaccaggccattttctatgcagtcacccctctgccttggtgcccccacctcgtcgcggtatgtccaatccccgcggccggcctcgatgtcactcagccctgcggagattgcgggactattcaagagaactgggtgtgcctcagctgctatcaggtatattgtgggcgctatatcaacgggcacatgttgcagcaccacgggaactctggccacccgctagttctgtcctacattgatctctctgcgtggtgttactattgccaggcctatgtgcatcaccaggcactcctcgatgtgaagaatattgcccatcagaataaattcggtgaggatatgccacatccacactag

SEQ ID NO: 15459 - DNA, 633 bp, synthetic construct
  misc_feature 1..633: note = Description of Artificial Sequence: Synthetic coding sequence
  source 1..633: mol_type = other DNA
atgacttccactgggcaagacagcacaaccacaaggcaacggagatctaggcagaatccccagagccctccacaggatagctccgttacgagcaaaaggaatattaagaaaggtgctgtgcctcgatctatacccaatctggccgaggttaaaaagaagggcaaaatgaagaaactgggacaagccatggaagaggatctgatagtgggactgcaagggatggatctgaatctggaagccgaggcccttgctggcacaggacttgtcctagatgaacagctaaatgagttccactgcctctgggatgactcgttccctgagggccctgagaggctgcatgctataaaggagcagttgattcaagagggactcctcgataggtgtgtgtcttttcaggcccgcttcgccgagaaggaggaacttatgctggtccattccttggagtatattgatctaatggagaccactcaatacatgaacgaaggggaactgcgggtactcgccgacacctatgactcagtatatctgcatcctaacagttacagttgtgcctgcctagccagcggaagtgtactgcgcctcgtggatgcagtcctgggagctgaaatccgaaatgggatggcaattatatag

SEQ ID NO: 15460 - DNA, 891 bp, synthetic construct
  misc_feature 1..891: note = Description of Artificial Sequence: Synthetic coding sequence
  source 1..891: mol_type = other DNA
atgaagaaactggggcaggccatggaagaggatttgattgtcggtctccagggcatggacctcaacctcgaggccgaagccttggccgggaccggtttggtgttggacgaacagttgaatgagtttcactgtttgtgggacgatagttttcccgagggcccggagcgcctgcacgccatcaaggaacagctcatccaagaaggcctgctcgatcggtgtgttagctttcaggccaggttcgcagagaaggaggagctgatgcttgtacatagcctcgagtatatcgacctcatggagacgactcagtacatgaatgaaggggagctcagggtgctggctgacacatacgacagcgtttatctgcaccccaattcatactcgtgcgcttgcctcgcaagtggctcggttctccgtctggttgatgctgtgttgggggctgagatacggaatggaatggctattattcgccctccgggacaccatgcccagcactcgctgatggatggctattgtatgttcaatcatgtcgccgttgccgccaggtacgcacagcagaagcatagaattcgccgcgtgttgatcgtggactgggacgttcaccatggccaggggactcagtttacgtttgaccaagacccttctgtgttgtacttcagtatacataggtacgagcaaggccggttctggcctcacctcaaggcctcaaattggtcaacaaccgggtttgggcagggacagggatacaccatcaacgttccctggaatcaagtggggatgcgagatgccgactacattgctgcctttctccacgtcctgttacccgtggcactggaggtgctgggaatctggggtgtgctgggtggcggcgtcgctctgaaagtgcgactgtag

SEQ ID NO: 15461 - DNA, 429 bp, synthetic construct
  misc_feature 1..429: note = Description of Artificial Sequence: Synthetic coding sequence
  source 1..429: mol_type = other DNA
atgacaagcactggacaggactccaccactactcgtcagaggaggtcaagacaaaatccacaatcccctcctcaggactcatcagtgacttcaaagcggaacatcaagaagggtgccgttccacggtcaatccccaatcttgctgaagtgaagaagaagggcaaaatgaagaaattgggccaggctatggaagaggatctcatcgttgggttacaaggcatggacctgaacttagaggccgaggccctggcgggcactggactggtgctggacgagcagcttaacgagttccactgcttgtgggacgatagcttccctgaggggcccgagcgactgcacgcaattaaggagcaattaattcaagagggcctgctggatcgttgcgtgagcttccaggcacgcttcgcagagaaggaggagctcatgtag

SEQ ID NO: 15462 - DNA, 810 bp, synthetic construct
  misc_feature 1..810: note = Description of Artificial Sequence: Synthetic coding sequence
  source 1..810: mol_type = other DNA
atgacatctactgggcaggacagcaccacaacccgacaacggcggagtaggcagaatcctcagagcccaccccaggacagctccgtaactagtaaacggaacataaaaaaaggggctgtaccacgctccatccccaaccttgctgaggtgaaaaaaaaaggcaagatgaagaagttgggtcaggcgatggaggaagacctcatcgttggccttcaaggaatggatctgaatctcgaagctgaagctttagccggtactgggcttgtactcgacgaacaactcaatgaatttcactgcctgtgggacgactcctttcctgaggggccagagcgattacatgcaattaaagaacagcttatacaggaaggccttctggaccgatgtgtcagctttcaggccagattcgctgaaaaagaggagctaatgcttgtgcattctttagagtatatagatctgatggaaacaacccaatacatgaacgaaggtgagctcagagtgctggctgatacatatgatagtgtgtacctccatccaaattcttattcctgtgcgtgtctggcctccggcagcgtgctccgactcgttgatgcagttttgggggccgagatcagaaatggcatggccattatcagacctcccggacatcatgctcaacacagcttgatggacggctattgtatgttcaatcatgtggccgtagccgctcgatacgcccagcaaaaacacagaattaggcgtgtgctcatcgtggattgggacgtgcatcacggccaaggaacccagtttacgtttgaccaggatcctcggtag

SEQ ID NO: 15463 - DNA, 2454 bp, synthetic construct
  misc_feature 1..2454: note = Description of Artificial Sequence: Synthetic coding sequence
  source 1..2454: mol_type = other DNA
atgacgtctacaggacaggactccaccacgacacggcagcgccgatctcgccagaatccccagagccctccacaggatagctcagttacgtctaagcggaatattaaaaagggggccgtcccaaggagcatccccaatctggctgaggttaaaaagaaggggaagatgaagaagctcggccaggccatggaggaagacctgatcgtagggctgcaaggaatggatctgaacctcgaggcagaggcccttgccgggactggactcgtgctggatgagcagttgaacgaattccactgtctgtgggatgattcgttccctgaaggtcctgagcgcctgcacgctatcaaggagcaactgatccaagagggtctccttgaccgctgtgtcagcttccaggcacggttcgcagagaaggaagagttgatgctcgtgcactccttggagtatattgacctgatggaaacaacccaatacatgaatgagggtgaactaagggtcctagctgatacatatgattctgtttacctccaccccaattcctatagctgcgcctgcctggccagtggctctgtgctgcgcctggtcgatgccgtgctcggtgccgaaatccgaaatggcatggcaatcatccgacctcccgggcatcacgctcagcactcattaatggatggatattgcatgtttaaccatgttgcagtagccgctcgctatgcccagcagaagcatcgaatcagacgcgtgcttatagtggattgggatgtgcaccacgggcaggggacgcagttcaccttcgaccaggacccaagcgtgttgtacttcagtattcataggtacgagcaaggacgcttctggccccacctgaaggcatccaattggtccacaactggattcggccaagggcagggctacactatcaatgttccttggaaccaggtggggatgagagatgctgattacatcgccgcctttcttcacgtgttactccccgtcgcactagagtttcagcctcagttagtcttggtcgccgctggtttcgatgcccttcagggcgatccaaaaggggagatggctgccacccccgccggcttcgcccagctcacccacctgttaatgggtttggccggaggcaaactcatcctgagcctggaggggggatacaacttgagggctctcgctgaaggggtgtctgcttctctccatacccttttaggcgatccttgccccatgctggaatcccccggagccccatgtcggtccgcgcaagctagcgtaagttgcgcactcgaagcattggaacctttctgggaggtgcttgtgcgtagcactgagaccgtggaaagggacaatatggaagaggataacgtggaggaaagcgaggaggaagggccctgggaacccccggtgctacctatcctcacatggccagtcttgcagagtcgtacaggcctcgtatatgaccagaatatgatgaaccactgcaacctctgggacagtcaccatccggaggttccacaaaggatccttcggatcatgtgtaggctggaggagttgggtcttgctggcaggtgtctgacgctgacgcctcggccagctaccgaagccgaactacttacttgtcattccgctgaatacgtaggccacctccgggcaacggagaaaatgaaaacccgcgaactccaccgagagtccagtaatttcgatagtatttatatctgtcccagcaccttcgcctgcgcccagctcgctactggcgcagcctgtcgactcgttgaggcagtgctcagcggcgaggtgctcaacggtgccgccgtagtgagaccgccgggtcaccatgcagaacaggacgcagcctgtggtttctgctttttcaattccgttgctgtagccgccagacacgcccagaccattagtggtcacgcccttcgtatcctaatagttgactgggacgtgcatcacgggaatggaacacagcatatgtttgaggatgatcctagtgtcctgtacgtgagtttacatcgttacgaccacggcacattctttccgatgggagacgagggcgcatcctcgcagatcggtagggctgccggaaccggatttacagtgaacgttgcatggaatggtcctaggatgggggatgccgattacctggccgcctggcatcgcctggtgctgcctatagcgtatgaattcaacccagaattggtgctggtgtcagcaggtttcgacgccgcacgtggcgatccattagggggttgccaggtgagccccgagggttacgcacatctgactttgccaattgcctgtctgcgcgggaccactactcctgcccagaaagagaggggagccgcccagtggccacaggagggagccgatatcatgagaatcacccttgctggcggtgaacttacaggaagacacgggaaagtggcatatgtcatcaagtataagctctag

SEQ ID NO: 15464 - DNA, 156 bp, synthetic construct
  misc_feature 1..156: note = Description of Artificial Sequence: Synthetic coding sequence
  source 1..156: mol_type = other DNA
atgaccagtacaggacaggactcaactaccacacggcaacgacgatcaaggcagaacccacaaagccctccccaggatagctctgtgacctccaagaggaacatcaaaaaaggagcagtcccaagaagtatacctaacctggctgaagtcaagtag

SEQ ID NO: 15465 - DNA, 516 bp, synthetic construct
  misc_feature 1..516: note = Description of Artificial Sequence: Synthetic coding sequence
  source 1..516: mol_type = other DNA
atgacctctaccggacaggacagcacaacaacccgtcagcgtagatcgaggcaaaatccccagtccccacctcaggattcctccgtcacaagtaagagaaatatcaagaaaggcgcagtgcccaggagtatccctaatttggcggaggtgaaaaaaaagggtaagatgaaaaaattgggccaagccatggaggaggacctaatcgtagggctgcagggtatggacctgaacctcgaggccgaggcactggccggaactggcctggtgctggacgaacaactgaatgagtttcattgtctctgggatgattcctttccggaaggaccagagcggctacacgcaattaaagaacagctcattcaggaaggactgctagacaggtgcgtgtcttttcaggcccgttttgcggaaaaggaagaactcatgctggtgcacagcctggaatacatcgacctcatggagacaacgcagtacatgaatgagggagaactgagagtcttggccgacacttactag

SEQ ID NO: 15466 - DNA, 486 bp, synthetic construct
  misc_feature 1..486: note = Description of Artificial Sequence: Synthetic coding sequence
  source 1..486: mol_type = other DNA
atgacgtcaaccggccaggactcaaccaccacacgccagaggcgctctaggcagaatccgcagtctccaccccaagatagctcagtgacatccaagagaaacatcaagaagggcgctgtcccacgtagtattcctaacctggccgaagtgaagaaaaaagggaaaatgaaaaagctgggacaggcaatggaggaggatctcatcgttggcctccaaggaatggacctaaatcttgaagctgaggcattagcaggtactggccttgtcctggatgagcagttaaacgaattccactgcctgtgggacgatagcttcccagaagggcctgagagactccatgcaatcaaagaacagcttatacaggagggactgctcgaccgctgtgtctctttccaagcacgtttcgctgaaaaagaggaacttatgctggtgcactccctcgagtacatagatttaatggaaacaacacaatatatgaatgaatag

SEQ ID NO: 15467 - DNA, 504 bp, synthetic construct
  misc_feature 1..504: note = Description of Artificial Sequence: Synthetic coding sequence
  source 1..504: mol_type = other DNA
atgacctccactgggcaagactctacaacgacccgccagcggcgctctcgacagaatcctcagtcacccccacaggacagtagcgtgacaagtaaaaggaacattaaaaagggtgcagtgccacggtccattcccaatctggctgaagttaagaagaaaggcaaaatgaaaaagcttggtcaagctatggaagaagatcttatcgtgggcttgcagggaatggatctcaatttagaagctgaggccctggccggtaccgggcttgtcctcgacgagcagctcaacgaatttcactgcctttgggatgatagcttcccagaagggccagagcgcctgcacgccatcaaggagcaactcattcaggaaggcctgctggataggtgcgtgtcatttcaggcgcgctttgctgaaaaggaagaactgatgctcgtgcactcactggagtatatagacctaatggagaccacacaatatatgaatgagggagagctgagggtcttgtag

SEQ ID NO: 15468 - DNA, 3690 bp, synthetic construct
  misc_feature 1..3690: note = Description of Artificial Sequence: Synthetic coding sequence
  source 1..3690: mol_type = other DNA
atgagtggagctaacagaggaagaggacaagccagttcgacaatgacgtcaacaggacaggactctactaccacccgccaacgccgcagccgccagaatccccaatccccgccacaggatagtagcgtgacctctaaacgaaatattaaaaaaggggccgttcctcgctctattcctaatctggcggaggtcaagaaaaaaggcaagatgaagaagctgggccaagctatggaggaagacttgatcgtgggcctccagggcatggacttaaatcttgaagctgaagcacttgccggaacagggctggtgttggatgaacagctcaacgaattccactgcctatgggacgattcattccctgaaggtcccgagagactgcacgcaatcaaggagcagctgattcaggagggtctcctggatcggtgtgtaagtttccaggccagatttgccgagaaggaggagttgatgttggttcacagtttagaatatatcgacttgatggagacgacccaatacatgaacgagggcgaactgcgagtccttgccgatacttatgattctgtctatttgcacccaaatagctacagctgcgcgtgtctggccagcgggagcgtgctgagacttgtcgacgcagtgttgggtgcagaaatcagaaatggaatggccatcatccgccccccaggtcaccacgctcagcactctttaatggacggttactgcatgtttaatcatgtggccgtggcagctaggtacgctcaacagaaacacagaatcagacgcgtgttaattgtagactgggatgttcatcatggccaggggacccagtttacattcgaccaagaccccagcgtcctgtacttttccatccacaggtacgaacaagggcgcttttggcctcacctgaaagcaagtaattggtcgaccaccgggttcggacagggtcaagggtataccatcaatgtgccgtggaatcaggtgggcatgcgtgacgcagactacatcgccgccttcctacacgtgttgctcccggtggctttagagtttcagccccaactagtgctggtcgccgctgggttcgacgcgctgcaaggcgaccctaagggagagatggctgctactccagctgggtttgcccaactgactcatctcttaatggggttagccggcggcaaactgatcttatctctggaaggcggttacaatttacgtgccctggcagaaggcgtgagtgcaagtttgcacacactgttaggagacccatgtcccatgttagaaagtccaggcgcaccctgtagatctgctcaggcgtctgtcagttgcgctctggaggctctggagcccttctgggaagtgttggtgcgcagtacagagacggtcgagagagataacatggaggaggacaacgtcgaagagtcagaggaggaagggccctgggagcctccagtgctccctatcttgacttggcctgtgctgcagtcaaggacgggtctggtgtatgaccaaaatatgatgaatcactgcaacctgtgggactcccaccacccagaagtcccccagcggatactgaggattatgtgccgcctggaggaactcggcttagcaggcagatgccttacgctgaccccacgacccgcaaccgaggctgaacttttgacctgtcactccgccgaatacgtcggtcacctccgggccaccgaaaaaatgaagacgagggagctccaccgggaatcttccaatttcgattcaatatacatttgcccaagtacttttgcttgtgctcaactagccaccggggcagcatgtagattagtcgaggccgtgctttctggggaggtgctgaatggcgcagctgtggtgcgcccgccaggacaccatgccgagcaggacgccgcatgcggcttttgctttttcaattccgttgctgtggcagcccgccacgcccagaccatctccggccacgccctgcggatcttaattgtcgattgggatgtgcaccacggaaacgggactcagcatatgtttgaagacgacccctccgttctgtacgtcagtctacacagatatgatcatggcacgttcttccctatgggagacgaaggagccagcagccagataggaagagcagctgggacaggattcaccgttaatgtggcttggaatgggccccggatgggcgacgccgactatcttgcggcctggcacaggctggttctgcctattgcatatgagttcaaccctgaactcgtactggtttccgccgggtttgatgccgcccggggggaccctttgggtggatgccaagtgtcccccgagggatacgcccatctgacacatctcctgatgggcctggctagcggacgaattattcttatattggaggggggttataatctgacaagtatctccgagtccatggcggcatgtactcgcagcctactgggggatccaccacctctcctgaccctgcctagaccccctttgtccggtgcattggcttctatcacggagacaatccaggtccaccgccgttactggcgttctctacgggttatgaaagtagaggaccgtgaagggccatcgtcgtccaagctggtgacaaaaaaagctccacagcccgctaagccccgtctggcagaacgcatgactactagagagaagaaagtgctggaagcaggaatgggaaaggtgacatccgcgagtttcggcgaggaatcaacacctggacagacgaacagcgagacagcagtcgtggcactgactcaggatcaaccaagcgaggctgctacaggaggcgccacattagcccagaccatctccgaggccgctattggaggcgccatgcttggacagaccaccagcgaggaggcggttggtggcgcgaccccagatcagacaacatccgaagaaactgttgggggcgctatcttggatcagacgacctccgaagatgcggttggtggagctaccctcggacagaccactagcgaggaagctgtgggcggcgccaccctggcccaaacaacatctgaagccgcaatggaaggcgccacgttggaccagaccacatccgaggaggcccccggcggcacagagttaattcagactccgcttgcctcctctaccgaccatcagactccccccacttcccccgtccagggtacaactcctcagatctccccttctacccttataggatccttaagaacgttagaactgggatcagaatcccagggggccagcgaaagccaggctcccggcgaagaaaatctgctgggggaggccgccgggggccaggacatggccgactccatgctgatgcaagggagccggggtctcaccgatcaagctattttttatgccgtcaccccccttccttggtgtccccaccttgtggcagtctgccctattccagccgccgggctggatgtgacccagccctgcggtgattgtggtactatccaggagaactgggtgtgtttatcctgttaccaggtgtactgcggacggtacatcaacggccacatgctgcagcaccacggaaattctggacatcctctcgttttgagctacatcgatctctccgcttggtgttattattgtcaggcctatgtgcatcaccaagcgctgctggacgtgaaaaacatcgcccaccaaaacaaattcggggaagatatgccccatccccactag

SEQ ID NO: 15469 - DNA, 2976 bp, synthetic construct
  misc_feature 1..2976: note = Description of Artificial Sequence: Synthetic coding sequence
  source 1..2976: mol_type = other DNA
atgcatagtcctggcgccgatggaacccaggtttcccccggcgcccactactgctccccaaccggtgccgggtgcccccgcccatgtgcggatacacctggaccccaacctcaacccatggatcttcgcgtgggccagagacccccagtagagccaccaccggaacccactttactagcgcttcagcgaccccagcgtctccaccatcatctctttctggctggtttgcagcagcagcgttcagtcgaaccaatgcggctatcgatggatacccccatgccagagctgcaggtcgggccccaagagcaggagttacgccagctcttacacaaggataagtctaagcgcagcgcagtggcaagctccgtggtaaagcagaagctggctgaagtgatactgaagaagcagcaggcggctcttgagcgaactgtccaccccaacagtcccggaatcccataccgcacccttgaacccctcgagacggaaggtgctacaaggtctatgctgagtagcttcctgccgcctgttccctccctccccagcgatcctccagaacactttcctctgaggaagaccgtgagtgaacctaatctcaaacttcggtataaaccaaaaaaatccttggaacgacggaagaatcctctactacgcaaggagtctgcccctccatccctccggcgcagaccggccgagaccctgggagattcatcacccagttcctcgtctactcccgccagcggatgcagtagtcctaacgatagcgaacacggtcccaatcccatcctaggttccgaagcgctgcttggccagaggttaagattacaggagacatccgttgcgccttttgcgcttcccaccgtcagtttgttaccagctattacattgggtctgccagccccagcacgcgcagatagcgacagaagaacccaccccactcttggtccacgaggccccattctgggtagccctcatacccctttatttcttccacacggacttgaacctgaggccgggggaacccttccttcacgactccagcccattctccttctggacccctcgggatctcacgctccccttctgacggtaccggggctgggtcctttacctttccatttcgcacagagcctcatgaccacagagagactttccggtagtgggctgcactggcctctaagccgtacaagaagcgaaccgcttcctccttccgccactgcacccccccccccggggccgatgcagccacggctggagcaactcaagactcatgttcaggtaattaagcggtccgctaaaccgtcagaaaagcctagattaaggcaaataccatccgccgaggacctggagactgatggcggcggacccggacaggtcgtggacgacgggcttgagcaccgggaactcggccacggacaacccgaagcccgggggcctgcacctttacagcagcatccgcaggtgcttttgtgggaacagcagcgcctggccggacgcctgcctcgagggtcaacaggggatacagttctcttgcctttagctcaaggcggtcaccggccactgtctcgagcgcagtctagccccgccgctccagcttccttaagcgcccctgagcctgcctcgcaagctagagtgctaagctctagcgaaacacctgctcgcacccttccttttactaccggactcatttacgattctgtgatgcttaaacatcagtgctcgtgcggagacaatagtcggcatcccgaacacgccggccgcatccagtccatttggtccagactccaggagcgtgggctacggtcccaatgcgagtgcctgagggggcgcaaagcttctctcgaggaactccagtcagtgcacagtgagcgccacgtgctcctgtacggcactaaccccctcagtaggctcaagctcgataacggcaaattggccggcttactggcccaaagaatgttcgtgatgctgccttgcgggggcgtaggggttgacacggataccatttggaacgagttgcactcttccaatgcagcaaggtgggccgcaggttcggttacagatctcgccttcaaggtggcctcccgcgaattgaagaacgggttcgccgtggtgaggcccccaggccaccatgccgaccattccacagcgatggggttttgcttctttaacagcgttgccatagcctgcaggcagttgcaacagcaaagtaaagctagtaaaatactaattgtggactgggatgtccatcatggaaatggtacgcagcagaccttttatcaggatccttcagtgctctatatttctctgcatcggcatgacgatggtaacttttttcctggtagtggggcagtggatgaggtcggtgcaggttctggtgagggctttaacgtaaacgtcgcgtgggccgggggtctcgatccacccatgggcgatccagagtatctcgcagcctttagaatcgtcgtgatgcctattgcgagggagttttctcctgatctggtcctggtgtctgccgggttcgacgcagccgaaggccatcctgcacccctgggcggataccatgtgtccgcaaaatgcttcggatacatgacacagcagttgatgaacctcgccggtggggcagtcgtgctcgcacttgaagggggccacgatctcacggctatctgtgacgcatccgaggcctgcgtcgcagctttgctcgggaatagggtggacccattgtctgaggagggatggaagcagaagcccaatctgaacgccatcagatcattggaggccgtgatccgcgttcactctaagtattggggctgcatgcagagactggcaagctgtcccgactcctgggtgccaagggtaccaggcgccgacaaagaagaggttgaggcggtgactgctttagcctctctgagtgtagggatcttggccgaagaccgaccatccgagcaacttgtcgaggaagaagaaccgatgaacctttag

SEQ ID NO: 15470 - DNA, 2865 bp, synthetic construct
  misc_feature 1..2865: note = Description of Artificial Sequence: Synthetic coding sequence
  source 1..2865: mol_type = other DNA
atgcacagccccggagcggatgggacccaggtgagtccaggagcccactattgttcgcctaccggtgctggatgccccagaccatgcgctgatacccctgggccccagccacaaccaatggatctccgcgtcggacagcggccccccgtggaacccccaccagaacccactctcttggcccttcagcggcctcagaggctccaccaccacctcttccttgccggccttcaacagcagaggtctgtggagcctatgcgtctgtccatggatactcctatgccagaactccaggtcggtccccaggagcaggaactgcggcagttgttgcacaaggacaagtctaaaaggagcgctgtcgcaagttccgtggttaagcagaaactcgccgaggttatactcaagaagcagcaagctgctcttgagcggactgttcaccctaactcccctggaatcccctatcgaacgctcgagcccctcgagacagagggcgccactcgcagtatgctctcgtccttcctgccccctgtgcccagtttgccttcagaccctccagaacactttcctctcaggaagactgtgagcgagcccaacctgaaactgagatacaagcccaagaagtcactggagagaaggaagaatcctcttcttcgcaaagagtctgctcccccgtccctcaggcgacgaccggctgagaccctgggtgactcatctccctccagttcgtctaccccagccagcgggtgctcttcacctaacgattccgagcacggccctaatcctattctggggagcgaggcagactccgatcggaggacacatcccaccttaggccctcgaggacctatactgggatcgcctcatacacctctgttcctgccacatggcctggagccagaagctgggggcaccctaccctcacggcttcaacccatcttgcttctggaccccagcggaagccacgcccccctgctgactgtgccagggctcggtcccctaccttttcactttgcccaatcacttatgacgaccgagcgcctatctggatccggcctccactggccgctgtcaaggacacgaagtgagccgctgcccccctccgcaactgcccctcccccacctggaccaatgcagccacgcctggaacagctgaagacacacgtgcaagttattaaaaggtcagctaagccctcggagaagccacggctgcggcagattcccagtgctgaggacttggagaccgatgggggaggccccggccaggtggtggacgatggattggagcaccgggaactcggtcacgggcagccagaggcccgagggccagcccctctccaacagcatccacaggttctcttatgggagcagcagcgactggccggtcgacttccccggggtagcacaggagacacggtacttctcccattggcccagggcgggcatagaccgctttcccgagcccagtcctccccagctgctcctgcaagcctgtcagcaccagagccagctagtcaggcccgggtgctctcctcgagtgaaacccccgccaggacactgcccttcaccacaggcttaatatatgattcagtgatgcttaagcaccagtgctcctgtggcgataatagccgccaccccgagcacgcgggacggatacaaagcatttggtctcgactgcaggaaagagggctgcgttctcagtgtgagtgtctcaggggcagaaaagcgagccttgaagaacttcagtctgtgcacagcgagaggcatgtgcttctttatggaaccaatcccctcagtagattgaagctggacaatggcaagctggcaggcttattggcccagaggatgtttgtcatgcttccttgtggaggcgtcggtgtcgatactgatactatttggaacgaacttcacagtagcaatgccgctcgatgggcagccggctcagtaacggatctagcattcaaagttgccagcagggaactgaaaaatggttttgccgtggtgcggccacctggtcaccatgcggatcactccacagctatggggttttgcttttttaattctgtggccatcgcctgtaggcagctgcagcaacaaagtaaagcgagtaagatcctgatagtggattgggatgtacatcatggtaacgggacccagcagacattctaccaggacccttccgtgctatacatttcgctgcataggcacgatgatgggaacttcttcccaggctcaggcgccgtggacgaggtgggggccggctctggcgaaggttttaacgtgaacgttgcttgggccgggggcctcgatcctcctatgggagatcccgagtacctagccgctttcaggatcgtggtcatgcctatcgcaagggagttttcacctgatcttgtgctcgtgtcagcaggatttgacgccgccgaagggcaccctgcacccctgggagggtatcacgtcagtgccaagtgctttggatatatgacccaacaactgatgaatctcgctggcggagctgtggtgctcgctctggagggaggacacgatctgactgcaatctgtgatgcttcagaggcatgcgtggccgctttactcggaaaccgggtggacccgctcagcgaagaagggtggaagcaaaaacctaacctcaacgccatcaggagcctagaagccgtgattcgcgtccattccaagtactgggggtgtatgcagcgactcgcatcttgtcccgattcctgggtgccaagagttccaggagcagacaaagaggaagtcgaggccgtaacggcgctggcgtccctcagcgttggcatattggccgaggaccgcccgagtgaacagctggtggaggaagaggaacccatgaacttatag

SEQ ID NO: 15471 - DNA, 3045 bp, synthetic construct
  misc_feature 1..3045: note = Description of Artificial Sequence: Synthetic coding sequence
  source 1..3045: mol_type = other DNA
atgtctgatctacgcaaaagagaactgggagctctgttcacaagcaggggtacgggcggggtggagtgggacggaacccaggtgtctccaggagcccactactgcagcccaaccggagcagggtgtccacgcccatgcgcagatacccctggtccacaaccacaacccatggatctgcgcgtaggtcagaggccaccagttgagccgccgcccgaacccactttgctggccctccagcggccccagagactgcaccaccacctgtttcttgccggcctgcagcagcagaggtccgtggaacccatgcgcctcagcatggacacccctatgcctgagcttcaagtggggcctcaggagcaggaacttcgccagttgttgcacaaggataaatccaagcgctctgccgtggcgtcgagtgttgtgaaacagaaactggcagaggttatcctcaagaagcagcaggccgcattggaaaggactgtgcaccccaatagcccgggcatcccttaccgcaccctagagcccctcgagacagaaggcgctacaagatctatgctctcctcttttctcccccccgtgcctagccttccctccgacccgcccgagcactttcctttacgcaagacagtctctgagcccaacctaaagctgcggtacaagcctaaaaagagcctggaacggcggaagaacccccttctgagaaaagaaagtgcacccccctccttacgcaggaggcctgcggagactttgggcgattcctccccctcgtcaagtagcactcctgccagcggctgctcaagtcctaacgattcggagcatggccccaacccaatcttgggtagcgaagcactactgggacagcggctacgcctgcaggaaacatctgtggcacctttcgctttaccaactgtgagcttgttacccgctatcactttgggtttacccgctccagctcgggccgattctgaccgcagaacccacccaactcttggcccccgcggccccatactgggaagtccacacacaccactgtttcttcctcacggcttggagcctgaggccgggggcacccttccgtcacggctgcagccaatcctcttgctggaccctagtgggtctcacgccccgctgctaacagttccagggttgggtcctcttcccttccattttgcacagagtctaatgacgacagagcgtttgtctggctccggcctccattggccacttagtcgaacccggtccgagccattgcctccctcagctaccgccccgcctcccccggggcctatgcagccacgactggagcaactcaaaactcatgtgcaggtaattaagcgctctgctaaaccatcagagaaacctagattgcgacagataccctccgccgaggacctcgagactgacggtgggggtcccggacaggtggtagacgatggcctcgagcaccgcgagcttggccacggccagcctgaggcacgcggtccagctccactgcaacagcacccccaggtgctattgtgggagcagcagaggctcgccggtcgtctgcctagagggtccaccggcgataccgtgctccttccattggcccaggggggccatcggcccctaagtcgggcccagtcttctccggctgcgcctgcatccttgagcgccccggagccagcgagccaggcccgagtgttgtctagttccgaaacgcccgcccgcaccttgccattcacaaccggcttaatttatgattccgtcatgttgaaacatcagtgctcctgtggtgataattcccggcacccagagcacgccggcagaattcaaagcatctggtccaggctgcaggagagaggtctgagatcacaatgcgaatgtctccgcggccggaaagcaagtcttgaggaattacagtccgtgcattctgaacggcacgtcctcctctacggcacaaatccactgtctcggctcaaactggacaatggcaaactagctggccttttggcacagaggatgtttgtgatgttgccatgtggcggggtgggcgttgacacagacacaatttggaatgagctgcattcctccaacgccgcccgctgggcggcgggctcggtgacggatcttgcattcaaagtcgccagcagggagctgaaaaacggattcgccgtcgtccgtcccccgggtcaccatgccgaccacagcacggctatgggcttctgtttcttcaattcggtggccatcgcctgtagacagctccaacaacagtccaaggcaagtaaaatactgatagtagattgggatgtgcatcatggtaatggaacacagcaaaccttctatcaggatcccagtgtgctttatatcagcctccataggcacgatgacggcaatttctttccagggtccggcgccgttgacgaggtgggggcaggcagcggagagggctttaacgtgaacgtggcgtgggcaggaggcctggaccctccaatgggtgatcctgagtatttagcagcgttcagaatcgtggtcatgcctatcgccagagagttttcccccgaccttgtcctggttagcgccggatttgacgccgctgaaggacatccagccccccttgggggatatcacgtatcagcaaagtgctttggctacatgacccagcagcttatgaacttggcaggcggcgcagtcgtccttgctctcgagggaggccatgaccttacagcaatctgtgatgcttcggaagcttgtgtcgccgctcttttaggcaatagggtggatccgctcagcgaggaaggttggaaacaaaaacccaatctaaacgctatcagaagtctagaggccgtgatacgggtgcacatgggggcactgacactgagtcagattccaggccatggttcctcacagcagcaagcaggcggggctttttcatggcctggccacccttgccgagcagccgtggtaatggtgaatactggggccgcatgcagcgcgtggccccctgtgcagacgccagggtgcctggagtgccagggcttgacaaagaaaaaatggcgccagtag

SEQ ID NO: 15472 - DNA, 402 bp, synthetic construct
  misc_feature 1..402: note = Description of Artificial Sequence: Synthetic coding sequence
  source 1..402: mol_type = other DNA
atgcatagtcctggggcgggatgccccaggccgtgcgcagacacccctggcccacaaccacagccaatggacctgcgtgtaggccaacgacctccagtcgagcctccgcctgaaccaaccctcctggccttgcagcgcccacaaagacttcaccaccatctgttcctagccggccttcagcagcagaggtctgtggagccgatgagattatcaatggatacccctatgcccgagctccaagttggaccacaggagcaggagctcagacagcttctgcacaaagataagagcaagcggagcgcggtagcatcttcagttgtaaagcagaagcttgctgaggtgattctgaaaaagcagcaggccgccttagagcggacagtccacccaaactcacccggttag

SEQ ID NO: 15473 - DNA, 2859 bp, synthetic construct
  misc_feature 1..2859: note = Description of Artificial Sequence: Synthetic coding sequence
  source 1..2859: mol_type = other DNA
atggatctgagagtgggacaacggcctcctgttgagccgcctcctgagcctacattgcttgccctgcagaggccccaaaggctgcatcaccacctctttttagccggactccagcagcaacgctcagttgagccgatgcggctttccatggatacccctatgccagaactccaggttgggccgcaagagcaagagctacggcaactgctgcacaaggacaagtctaagcggtcagcggtggcttcatctgttgttaaacagaaactggcagaggtgatcctgaagaaacagcaggccgccttggagcgaacagttcaccctaattcacctggtatcccgtaccgaaccctcgaaccgttggagactgagggtgccacccgaagcatgctgagctcatttcttccaccagtcccttctctgccctccgacccaccggagcattttcctctgcggaagacggtgagtgagccaaacctgaagcttcgctataaaccgaagaagtccttggagaggcgtaagaatccactgctccggaaggagagtgctcccccatcccttagacgccgtcccgccgagacactgggggacagtagcccctcaagctcttctacccccgctagtgggtgttccagtccaaatgacagtgagcatggccccaacccgatcctgggatccgaggcgcttctcggtcagcgactgagactgcaggagacctccgtggccccttttgcactgccaaccgttagtctgctccccgcaattacactgggccttccggcccctgcgcgcgccgatagtgatcggcgcacgcatcctacgttgggcccgcgcggtccaattcttggtagtccgcatactcctctgttcctgccccatggtcttgagcctgaggctgggggcacactgccaagccggctgcagcctattttgctgctggatccgagcgggtcccatgctccgttgctcaccgttccaggactcggccccctgccattccattttgcacagagtctcatgaccaccgaaagactctcagggagtggactgcactggcccctgtcaaggacacgcagcgagcccctgcccccctcagcgacggctcctcctccgccgggccccatgcagcctagattggaacagctcaaaactcacgttcaggtgatcaagaggtccgctaaacctagtgagaagccgagactgaggcagataccctcagccgaagatttggaaaccgatggaggtggacctgggcaggtggtggatgacggcctggaacatagagaactggggcacggccagcctgaagcccggggacctgccccactacagcagcatccacaagttctgctttgggaacaacaacggctggcagggagacttccccgcggttcaaccggcgataccgtgctgctcccactggcgcagggagggcacagaccactttccagggctcagagcagccccgccgcgccagccagtctttcagccccagagcctgcttcccaggctagagtgttgtcctcatctgaaacacccgcccgaacattaccatttaccaccggactgatatacgattctgtgatgcttaagcatcagtgctcttgcggggataatagcaggcatcctgaacacgcaggaaggatacagagcatttggtctcggctgcaagagagaggcctgcgaagccagtgtgagtgcctgagagggcgcaaggcaagccttgaagaactgcagagtgtccattctgagcgccacgttcttctgtatggaactaacccactctcaaggttaaagctagataacggaaagttggctggactgctggcgcaacgtatgttcgtgatgctgccctgcggaggcgtgggtgtggacacagatacaatctggaacgagctgcattcaagtaatgccgctagatgggccgccgggtccgttacagatctggcatttaaagtcgcctcccgcgagctgaaaaatggctttgctgtggtgcgacccccggggcaccatgcggaccattccactgccatggggttctgctttttcaactctgtggccatagcatgccggcagttgcagcaacagagtaaggcgtcaaagattctaatcgtggattgggatgtacaccacggcaacggaacccaacagacgttttaccaagatcctagcgtgctgtacattagcctgcacaggcacgatgacggcaacttcttccctggttccggtgccgtagacgaggtaggcgcgggctcaggcgagggattcaacgtgaacgtggcgtgggccggcgggttagatcccccaatgggcgatccagagtaccttgccgccttccgtatagtagtcatgccaatcgcccgggaattcagtccagatctggtgctggtttcagcaggattcgatgccgccgaagggcatcccgcccctttaggcggctaccacgtatccgccaaatgcttcggctatatgacccagcagcttatgaacttggcaggcggagccgtcgtgctggctcttgagggtgggcacgacttaaccgcaatttgcgatgcctccgaggcctgcgtggctgccctcctcggcaaccgcgtggacccactcagcgaggaaggctggaagcagaagcccaacctgaacgccatcaggtcacttgaggctgtcattcgggttcatagcaaatactgggggtgtatgcaacggctcgcttcttgcccggactcgtgggttcctagggtacccggtgctgacaaggaggaggtggaggcagtgacagccctggccagtctctcagtgggcatccttgctgaagacagaccctcggagcagctcgtggaagaagaggaacccatgaacctgtag

SEQ ID NO: 15474 - DNA, 2925 bp, synthetic construct
  misc_feature 1..2925: note = Description of Artificial Sequence: Synthetic coding sequence
  source 1..2925: mol_type = other DNA
atgcacagcccaggagctggatgtccacgtccctgtgcagacacccccggcccacagccccagcccatggacctgcgggtgggacaacgcccacctgtggagcccccacctgagcccaccttactggccctgcaacggccacaaaggttacaccaccacttattccttgcgggactccaacaacaaagaagcgtggagccaatgcggctgagtatggacactcctatgcctgagttgcaagtgggtccgcaggagcaggagttacgacagcttctgcacaaggacaagagtaagagaagcgctgttgcttcctcagttgtcaaacagaaactggctgaagtcattcttaagaaacagcaggcagcacttgagcggaccgtccacccaaactcaccagggatcccttaccgaactctcgaaccattagaaacagagggcgccaccaggagcatgctctcgtccttcctgccccccgtcccctcgctgccgtcagaccccccggagcatttccccctccgcaaaaccgtatccgagccaaacctgaaattgcgttataaaccgaagaagagcctggaacgtcgtaagaatccccttctaagaaaagagtctgctcctccaagcctgaggcgccgccctgcggagacattaggagattcttctccaagttcatcctccactcctgcctctggatgtagtagccccaatgactccgaacacgggcccaatccgattttaggcagtgaggccctgttgggccaacgactcagattacaagaaacctcggttgcacctttcgctctgccgacggtgtcgctgctccccgcgatcacactcggcctcccggcccctgccagagccgattccgatcgacgtacccaccctaccttaggccctcgcgggcccattctgggctctcctcacacccccctctttcttccgcacgggctggaaccagaggcaggcggaactctgccctccagactacagcctattctgctgcttgacccctctgggtctcatgctccactgctcactgttcccggtcttggccctctaccttttcactttgctcagagcctgatgacaacggagcgcctatcgggtagcgggctccattggccgctatcaagaactcggagtgagcctttgccacctagtgcaaccgcccccccaccccccgggcccatgcaacctcgcttggaacagctgaagactcatgtgcaggtgatcaagagaagcgccaaaccgagtgaaaagcctaggctgcgacagataccttctgccgaggatcttgagactgacggcggaggccctggtcaggttgtcgatgatggccttgaacatagggagcttggacatgggcaacctgaggcgcgcggccctgcgccactgcagcagcatcctcaggtcctgctctgggagcagcagaggctggcaggccgccttcctcgtggatccactggggacacggtcttactcccactcgcgcagggagggcataggcccctgtcccgggctcagagctcacctgccgctcccgcctctctctctgcacccgaacctgccagccaggcacgcgtgctgtcctcttccgaaacccctgcccgcaccctcccatttactaccggtctcatatatgactccgtcatgctgaagcaccagtgcagttgtggagacaacagtcggcacccggagcacgccggcagaatccagagcatctggagcaggttacaggagcgcgggctgcgttcgcagtgtgaatgcctccgcggacgtaaggctagcctagaagagctccagagcgtgcatagtgagcgacatgtattgctgtacggcaccaatcctttaagcaggctcaagctggataatggcaaacttgccggtctactggcacagcgtatgttcgtgatgttgccctgtgggggtgtgggagtggacaccgacacaatctggaatgagctgcacagtagcaacgccgcacgctgggctgctggcagcgtgacggaccttgcatttaaagtggcaagtcgtgagctaaagaatggatttgctgtggttagaccccccggacatcacgccgaccatagtactgccatgggattttgtttcttcaattccgtggccatcgcttgccggcagttgcagcagcaaagcaaagccagcaagatcctaatcgtggactgggatgtccatcatggaaatgggacacagcagactttctaccaggaccctagcgtcctctatatttcccttcatagacatgatgatgggaacttttttcccggatccggggcagtggatgaggttggcgcaggtagcggagagggttttaatgtaaacgtggcctgggcggggggcttagatccccctatgggtgatccagaatatcttgctgctttcagaatcgttgtgatgccgatcgctcgggagttttcccccgacctcgtgcttgtaagcgccggtttcgatgcagccgagggacacccggcacccctcggcggctaccacgtcagcgccaaatgttttggctacatgactcaacaactgatgaatctcgccggcggcgcggttgtcttggccctggaaggtggccacgatctgaccgccatatgtgatgcatcagaggcttgcgtagccgccctcttgggaaacagagtcgatcctctctccgaagagggctggaagcaaaaacctaatctcaacgccattaggtcgttggaagcagtcatccgtgtgcactctaaatactggggttgtatgcagagattagcctcctgtcctgattcctgggtacccagggtgcccggagcagacaaagaggaagtagaagccgtgacagccctcgccagtctgagcgttggcatactcgccgaagaccgtccatctgagcagctggtggaggaggaagaaccaatgaatttatag

SEQ ID NO: 15475 - DNA, 819 bp, synthetic construct
  misc_feature 1..819: note = Description of Artificial Sequence: Synthetic coding sequence
  source 1..819: mol_type = other DNA
atggaagaacctgaggagcctgcagattcaggacaaagtctggtgcccgtttacatttactctccggagtacgtctcaatgtgcgatagccttgccaaaatccccaagcgtgcatccatggtccactccctcatcgaagcatatgctctccataagcagatgcggattgtgaaacccaaggtcgcatctatggaggaaatggctacctttcatacagatgcctatctccagcacctgcagaaggtatcccaggagggggacgatgatcaccccgatagtatcgaatatgggcttggttatgactgcccagcaaccgaggggatttttgactatgccgccgcaattggaggcgctaccatcacagccgcccagtgcctgatagacggtatgtgcaaagttgcaatcaattggtctggcggttggcatcatgctaaaaaagatgaagctagcggattctgctatctcaacgacgctgtgctgggcatcctccgcctcaggagaaagtttgaaagaatactttacgtggatctcgacctgcatcatggcgacggtgtggaagatgcctttagcttcacatccaaggtgatgacggtctcgctccacaagttctctccgggcttctttccaggaaaatccgatgtgagcgatgtggggctggggaaaggacggtactactctgtgaacgttccaattcaggatggaatccaagatgaaaagtattatcagatctgcgagtcagtacgtacatcttgtccaaaatctagacccgtggaggccgctgccgccgcttgcctcccacaccttcacagcttagtctag

SEQ ID NO: 15476 - DNA, 1134 bp, synthetic construct
  misc_feature 1..1134: note = Description of Artificial Sequence: Synthetic coding sequence
  source 1..1134: mol_type = other DNA
atggaggagccggaggagcctgcagactccggccagtcattggtgccggtctatatttactcccccgaatatgtgtctatgtgcgacagtctggccaagatccctaaaagagcctcaatggtgcactctctgattgaggcctacgctcttcacaaacagatgagaatcgtcaaacccaaagttgcttctatggaggagatggcgacatttcataccgacgcctacctgcaacatctccaaaaggtgtcccaggaaggggatgacgaccatcctgacagtattgaatacggcctgggatacgattgtcctgccaccgagggcatcttcgattacgccgcagcaatcggcggagctacaattactgcagcgcaatgccttattgatggaatgtgcaaggtggccatcaattggagcggtggttggcaccatgctaagaaggacgaggccagtggcttttgctatctgaacgacgccgtactgggaattctccgcctgaggcgaaagttcgaacgaatcctctatgtcgacctagacctgcatcacggcgacggagtggaggacgcgtttagctttaccagcaaggtcatgacagtttccctgcacaaattctctccaggttttttccctggtaccggagacgtgtcagatgtcggactcggcaagggccggtattactcagtcaacgtgccgatccaagacggaatacaggatgagaaatattatcagatttgcgaatcagtactcaaggaggtgtaccaagcattcaacccaaaggctgtcgtactacagctgggtgctgacacaatcgctggcgaccctatgtgtagctttaatatgacccccgttgggatcgggaaatgtctaaaatatattttgcagtggcagctagcgacattgatcctgggcggggggggatataatttggcgaataccgcccggtgttggacttatctgacaggggtcatcttaggcaagactctgtcgtcagagatacctgatcatgagtttttcactgcctacggtccagattacgttttagagatcaccccaagctgtagacctgatcgaaatgagccacatcgaatccagcagatcctgaactatatcaaaggaaacctcaaacacgtggtgtag

SEQ ID NO: 15477 - DNA, 861 bp, synthetic construct
  misc_feature 1..861: note = Description of Artificial Sequence: Synthetic coding sequence
  source 1..861: mol_type = other DNA
atggaggagcctgaagagcccgccgactcaggtcagtctctggtacctgtgtacatttattccccagagtatgtcagcatgtgcgactctctggcgaaaattccaaagcgtgcctccatggtgcactcccttatcgaagcgtatgctctgcataagcagatgcgggacgaagcttcagggttctgctacctaaacgacgcagtactcggtatactccgactcaggcggaaatttgagcgcatactctatgttgatctggacctgcaccacggagacggagttgaagacgcattttcatttaccagcaaagtcatgaccgtgtccctgcacaaattttcccctggtttttttcctggcacgggggacgtatctgatgtgggccttgggaaaggcagatactactcagtcaatgtgccaattcaggatgggatacaagatgagaaatattatcagatctgtgaaagcgtcctgaaagaagtgtaccaggccttcaatcctaaagccgtggtcctgcagctcggtgccgatacaatcgctggcgacccgatgtgctccttcaacatgacacccgtagggatcgggaaatgcctgaagtatattctgcagtggcagttagctactctaatcctggggggtggcggctacaacctggctaataccgcccgttgttggacctatctgaccggcgtgattttgggtaagactctgtcgtccgaaatccccgatcacgaattttttacagcctacggtccagactatgtactggaaatcactccgtcctgccggcctgatcgcaatgaaccccacaggatccaacagattctgaactatatcaaaggtaatctgaaacatgtagtgtag

SEQ ID NO: 15478 - DNA, 549 bp, synthetic construct
  misc_feature 1..549: note = Description of Artificial Sequence: Synthetic coding sequence
  source 1..549: mol_type = other DNA
atgacagtcagcttgcataagttctccccagggttcttccctgggacaggagacgtgagtgatgttggcctgggcaaaggacggtactattccgtcaatgtgccaattcaggatgggatccaggacgagaagtattatcagatctgtgagagtgtcctgaaagaagtttaccaggcattcaatcccaaagccgtggtgctgcagctgggcgctgatacgatcgcaggagaccccatgtgcagctttaatatgaccccagtgggcatcggcaaatgtctcaaatatattttacagtggcaactggccaccttgatccttggtggaggaggatacaacctggcaaacaccgcacgatgttggacctacctgaccggagtcatactgggaaagacactttcctccgagatcccggatcatgaattcttcaccgcctatggtccggattacgtcctggagatcacaccatcatgcagaccagatcgaaacgaaccccacaggatccagcaaatccttaactatattaagggtaacctaaaacatgtcgtttag

SEQ ID NO: 15479 - DNA, 441 bp, synthetic construct
  misc_feature 1..441: note = Description of Artificial Sequence: Synthetic coding sequence
  source 1..441: mol_type = other DNA
atggaagagcccgaggagccggccgacagcggacaaagcctggtgcccgtgtatatttacagcccggaatacgtgtctatgtgcgacagcctggcaaaaatacccaagagggcatcaatggtgcatagcctgatcgaagcttacgcccttcacaagcagatgcgcatagtcaaaccaaaagtggcctcaatggaagagatggctaccttccacactgacgcctacctgcaacacttgcaaaaagtttctcaggaaggcgatgatgatcatcccgattcaatcgagtacggtctcggctacgattgccccgctactgaaggcatttttgattatgcggctgccattgggggcgccacaattacagctgcacagtgcctgatagatggaatgtgtaaggtggcaattaactggtcaggaggctggcatcacgccaagaagtag

SEQ ID NO: 15480 - DNA, 477 bp, synthetic construct
  misc_feature 1..477: note = Description of Artificial Sequence: Synthetic coding sequence
  source 1..477: mol_type = other DNA
atggaagaaccggaggagccagccgatagtggacaaagcttagtgcccgtttatatttactcccctgagtatgtcagcatgtgcgacagtcttgcgaaaatcccaaaaagggcttcaatggtccactctctcatagaagcctacgcactgcacaagcagatgaggatcgtcaaacccaaagtggccagcatggaggaaatggccacattccatactgatgcttacctgcagcatttgcagaaagtcagtcaagaaggcgatgatgatcacccggatagtatagagtacgggcttggctacgactgccccgcgaccgaggggatcttcgattacgctgcagccatagggggggcgactatcacagctgctcagtgcttgattgacggtatgtgtaaagtcgcaataaactggagcggcggctggcaccacgccaagaaggagacctgtgtctacgtggccctctacaaggctttctag

SEQ ID NO: 15481 - DNA, 420 bp, synthetic construct
  misc_feature 1..420: note = Description of Artificial Sequence: Synthetic coding sequence
  source 1..420: mol_type = other DNA
atggaagagcccgaggagcccgctgacagtgggcagtcactcgtaccagtgtatatatactcaccagagtacgtctctatgtgcgatagcttggctaagattccgaagcgagctagcatggtccactccctcatcgaagcctacgcactccacaagcagatgcgtgatgaagctagcggtttctgctatctgaatgatgccgtgctgggcatactgcggttgcgccgaaaattcgagaggatcctttacgtagacctggacctgcatcacggagacggtacaggggatgtttcagatgtcggactggggaagggacggtactattcagtaaacgtgcccattcaagacggtatccaggacgaaaagtattaccaaatctgtgagcgctacgaacctccagctcctaatccgggactctag

SEQ ID NO: 15482 - DNA, 771 bp, synthetic construct
  misc_feature 1..771: note = Description of Artificial Sequence: Synthetic coding sequence
  source 1..771: mol_type = other DNA
atggaggagccagaggagccagctgatagcggccagtctcttgtacccgtttacatatacagccctgaatacgtttccatgtgtgactcactcgcaaagattcccaaacgagcctcgatggtacacagcctcatcgaggcctacgcacttcacaagcagatgagaattgtgaagcccaaagtagccagcatggaagaaatggctacatttcatactgatgcgtatttgcagcacctgcagaaggtatctcaagaaggggacgacgatcaccctgatagtatcgagtacggcctgggatacgactgtcccgccactgaaggcatattcgactatgcagctgccatagggggtgcgactattaccgcagcccagtgtctcatagatggcatgtgtaaagtggccatcaattggagtggcgggtggcaccacgcaaaaaaagacgaggcctcgggcttctgctatctgaacgatgctgtattagggatcctaaggctgagacgtaaatttgagagaattctctatgtggaccttgaccttcatcacggcgatggtgttgaggacgctttttccttcacatcaaaagtaatgaccgtctcactgcataaattctccccgggcttctttcctggtactggcgatgtgtcagacgtgggccttggtaaaggtcgttactactctgtaaatgtcccaatccaagatggtatccaggacgagaagtattaccagatttgtgagaggtatgagccgcctgctccaaacccaggactgtag

SEQ ID NO: 15483 - DNA, 831 bp, synthetic construct
  misc_feature 1..831: note = Description of Artificial Sequence: Synthetic coding sequence
  source 1..831: mol_type = other DNA
atggcaggtccagctgctctgtcagcggctgccgccgcggcactggccgccgccctcttactgctgagacgagaagatccaggtcccggagcggggccgtcaatggccgagaccgaagctctttcaaagcttagggaagactttcgtatgcagaataagagcgtctttatcctgggcgcaagcggcgagacgggacgcgtcctgctgaaggagatcctcgaacaaggcctgtttagtaaagtcacactgatcggacgaagaaagctaacattcgatgaagaggcctacaagaatgtgaaccaagaggtagtagattttgagaagctggacgactacgccagcgcctttcagggacatgacgtcggattttgctgtctcggaaccacacgaggcaaagctggagcggagggctttgtgcgggtcgaccgagattacgtgttgaaatcagccgagttggctaaggccggaggatgtaagcactttaatctcctgtccagcaagggggcagacaaaagtagtaattttctgtaccttcaggttaaaggggaagtggaggccaaggtagaagagctgaagtttgatagatactctgtcttcaggcctggagtgctgctctgcgatcggcaagagtcccgccctggtgaatggcttgtcaggaaattctttggcagcctacccgactcttgggcaagtggccatagtgttcctgttgtgactgtggtgcgcgctatgctcaataatgttgtgagaccgcgcgacaaacagatggagctcctcgaaaacaaggcaattcacgacctcggcaaagctcatggatcattgaagccgtag

SEQ ID NO: 15484 - DNA, 729 bp, synthetic construct
  misc_feature 1..729: note = Description of Artificial Sequence: Synthetic coding sequence
  source 1..729: mol_type = other DNA
atggccgaaaccgaggcactgtccaaactccgcgaggatttcaggatgcaaaacaaatcggtgtttatcctgggagccagcggagagacgggccgagttctgctaaaagaaatcctggaacaggggctgttttctaaagtcaccctgatcggccgccggaagttaacctttgatgaagaagcttacaaaaatgtgaaccaggaagtggtggattttgaaaaactcgacgactatgccagcgcctttcagggtcacgacgtcggcttctgttgtctgggcactaccagaggaaaggctggcgcggagggcttcgtccgcgtggaccgcgattatgtacttaagagcgccgagctggccaaggccggcggttgcaaacacttcaacctcctgtcttcaaaaggcgcggacaagtcatctaactttctgtatctgcaggtcaagggagaggtcgaagccaaggtagaggagcttaagttcgatcgctacagcgtctttcgaccaggggtcctgctctgtgatagacaagaaagtaggcctggtgagtggttggtccggaagttctttgggtctttgccagactcctgggcttcaggacacagtgtgcccgttgtgaccgttgtacgcgctatgctaaacaatgtcgtccggccaagggataagcagatggagctgctagagaataaggcaatacatgacctcggtaaggcccatggatcactgaagccctag

SEQ ID NO: 15485 - DNA, 729 bp, synthetic construct
  misc_feature 1..729: note = Description of Artificial Sequence: Synthetic coding sequence
  source 1..729: mol_type = other DNA
atggcagagacagaggctctcagtaaattgcgggaagattttcgaatgcaaaataagagtgtgttcattctaggtgcttccggggaaacaggcagagttctgctcaaagaaatcctggagcagggactctttagtaaagttacgctcattgggcggcggaagctgacttttgacgaagaggcctacaagaatgtgaaccaggaggtcgtcgactttgaaaaactggacgactatgcatcagctttccagggccacgacgtcggattttgctgcctaggcacaacacggggaaaggcaggcgccgaggggtttgtgcgagttgatcgtgattacgttctgaaatcagccgaactggccaaagccgggggatgtaaacattttaatctccttagttcaaaaggtgccgataagtctagcaacttcctgtatctgcaggttaaaggggaggtggaagctaaggtggaagagctcaagtttgaccgatattctgtcttcagacccggcgtgctcctgtgcgacagacaagaaagcaggccgggcgagtggctggttaggaaattttttggctcattgcccgactcttgggcgagcggacattcagtgcctgtagttacagttgttagagctatgctaaacaatgtggtacggcccagggataaacaaatggagttgcttgagaacaaggccatccacgacctcggaaaggcacatgggtccctgaaaccatag

SEQ ID NO: 15486 - DNA, 729 bp, synthetic construct
  misc_feature 1..729: note = Description of Artificial Sequence: Synthetic coding sequence
  source 1..729: mol_type = other DNA
atggcagaaactgaagctttatcaaagcttcgggaagatttccgcatgcagaacaagtcggtcttcatcctgggcgcatctggtgagacaggaagggttttgctgaaagagatcttagaacagggactgttttcaaaggtgactctgatcggcagaagaaagctgacatttgacgaggaagcctataagaatgtcaatcaggaggttgtcgactttgaaaagctggatgattatgcaagcgctttccaagggcacgacgtcggcttttgttgtctgggcaccactcgcggaaaggctggcgccgaaggctttgtgagagtcgatcgcgattacgttttgaaaagcgccgagctcgctaaagctggcggctgcaaacattttaacctgttatcttctaagggggcagacaaatcttcaaactttctgtatctgcaggtgaagggagaagtagaggccaaggtggaggaattaaaattcgatcggtattctgtttttcgcccgggggtgcttctctgcgaccgacaagagtcccggcccggcgaatggctagtcaggaaatttttcggaagcttgcccgattcctgggccagcggccacagtgtgcccgtagtgacagtcgtgagagctatgctgaataatgtagtgaggcctcgcgacaagcagatggagctgttggagaataaggccattcatgacttggggaaggctcatgggtccctcaagccatag

SEQ ID NO: 15487 - DNA, 402 bp, synthetic construct
  misc_feature 1..402: note = Description of Artificial Sequence: Synthetic coding sequence
  source 1..402: mol_type = other DNA
atggcggagacagaagctctgtcaaaacttagagaggacttcagaatgcagaacaaaagtgtctttatcctgggagccagcggcgaaactggtagggtcctactcaaggagatcctcgagcagggcctcttttcgaaagtgaccctgatcgggcggagaaagctaaccttcgatgaggaagcttacaaaaacgtgaaccaggaggtagtggactttgagaagctggatgattacgcttccgcgtttcagggccacgatgttggattttgttgcttgggaacaacacggggcaaagctggagctgtgaggaaggcttatgcattatttcctttctgttggcctgtgattagccgtatcctttttcttctcacccttttcctttgtgcctgctgcaatgcctag

SEQ ID NO: 15488 - DNA, 402 bp, synthetic construct
  misc_feature 1..402: note = Description of Artificial Sequence: Synthetic coding sequence
  source 1..402: mol_type = other DNA
atggctgagactgaagcgctgagcaagttgagagaggacttcagaatgcaaaataagtctgttttcatcctgggcgcctcaggagagaccggaagagtccttctgaaggagattttggagcagggcctgttctccaaagttactttaattgggcgccgcaaattaactttcgatgaggaggcctacaagaacgtaaaccaggaagtggtggattttgagaagcttgacgattatgcctccgcctttcagggccatgatgtgggattctgctgtctcggcaccactagaggaaaggcaggagcggtccggaaggcttacgcactcttccctttctgctggcccgtcatctccagaatactgttcctcctcacgctgtttttgtgcgcatgttgcaatgcgtag

SEQ ID NO: 15489 - DNA, 402 bp, synthetic construct
  misc_feature 1..402: note = Description of Artificial Sequence: Synthetic coding sequence
  source 1..402: mol_type = other DNA
atggccgaaaccgaggcattaagcaaacttagagaagatttcagaatgcaaaataaaagcgtgttcatcttaggggccagcggagagacaggcagagtcctgcttaaggaaatcctagagcaaggccttttctccaaagtgaccctcattggacgcaggaaactcacctttgatgaggaggcatataaaaacgtcaaccaagaagtggttgatttcgaaaaactcgatgactatgctagcgcgtttcagggccacgatgtggggttctgttgtctgggtacaacaagaggcaaggcaggcgccgtcagaaaggcctatgcccttttcccgttctgttggcccgtgatttccagaattctgttcttacttacactgttcctttgtgcttgctgcaacgcctag

SEQ ID NO: 15490 - DNA, 1080 bp, synthetic construct
  misc_feature 1..1080: note = Description of Artificial Sequence: Synthetic coding sequence
  source 1..1080: mol_type = other DNA
atggcagagcatggcgcgcactttacagccgcgtcagtggcagacgaccagccatctattttcgaagtggtcgcccaggactctctgatgaccgccgtccgcccagctctccagcatgtggtgaaagtgctggcagagagcaatcccacccattacggattcctgtggaggtggttcgacgagattttcaccctcctcgacctcctgctgcagcagcactatctgtcacgaacaagcgccagcttttctgagaacttttatggactcaagaggattgtgatgggtgacacacataaaagccagcgactggccagtgctggactacccaaacaacagttgtggaaaagcatcatgttcttagtgctcctgccgtacctcaaagtgaagcttgagaagctggtcagttcccttcgggaggaagacgagtacagtatccatccgccgagttctaggtggaagcggttttaccgagcttttctcgccgcctatccttttgtcaatatggcctgggagggttggtttctggtccagcagctgcgttatatccttgggaaggctcagcatcactctccgctcctacggctggctggcgtacagctcgggcgcctcactgtccaagacatccaggcccttgaacacaaaccggcaaaggcctcgatgatgcagcaacctgccaggtccgtgtccgaaaagatcaattccgccctcaagaaagctgtgggtggtgtggcactgagcctgagtactggcttatccgtaggtgttttttttctgcagtttttggattggtggtattcttcagagaaccaggaaacaatcaagtcccttacggctctacccacacctccaccacccgtccaccttgattacaatagtgactctcccctcctcccaaagatgaaaaccgtctgtcctctgtgtagaaaaaccagagtgaatgacaccgtgctggcaactagtggatatgtgttttgttataggtgcgtcttccactatgtgcgcagtcatcaagcttgtcccattacgggatatcctactgaggtccagcacctgattaaactgtatagccctgagaattag

SEQ ID NO: 15491 - DNA, 1374 bp, synthetic construct
  misc_feature 1..1374: note = Description of Artificial Sequence: Synthetic coding sequence
  source 1..1374: mol_type = other DNA
atggtatctaaactgacaagtctacagcaggaactgctgtccgcactgctgtcttccggagttaccaaagaggtactggtccaggctctggaagaattgctcccaagcccaaatttcggagtgaaactggagacattgccattgagccccggaagcggagccgagccagatactaaacccgtctttcacaccttgactaatggacatgccaagggaaggctgagcggcgatgagggaagcgaagatggcgatgactatgacacccctcccattctgaaggagcttcaagccctgaataccgaggaggccgccgagcaacgcgctgaagttgatcgcatgttgtccgaggacccatggcgggccgcaaagatgatcaaaggatatatgcagcaacacaatattcctcagagagaggtggtggatgtcactggactcaatcaatctcatctgagccagcatcttaacaaaggaactccgatgaagacacaaaaacgagccgccctgtacacctggtatgtgaggaaacagagagaaattttgcggcagttctctcaacaaagccacggacctggacaaagtgacgatgcttgtagcgaacccacaaacaagaaaatgcgtcggaacagattcaagtgggggccagcctcccagcagatcctgtatcaagcctacgacagacaaaaaaatccctcaaaagaggaacgggaagccctcgtggaagaatgcaatagagccgaatgcctgcagcgcggcgtgagcccatctaaggcgcacggactcggatccaatctggtcactgaggtcagagtttataattggttcgcaaacagacgaaaggaggaagccttcaggcagaaactggccatggatgcttattcaagcaatcaaacccactcgctcaacccactgttgagtcacggaagtcctcaccaccagccctcttcctcacccccaaataaactttctggtgtgagatattcacaacagggcaacaatgaaattacgtcctctagcactatctcacatcatggaaactcggccatggtcacaagtcaaagcgtcctgcagcaagtatccccggcctctctcgatcccgggcacaaccttctaagccctgatggaaaaatgatcagcgtcagcggcggaggactccctccagtcagtactttaactaacatccactccttgtcacaccacaatccgcaacagagtcagaatctcatcatgacccctttgtcaggagtgatggccatcgcccagatgagctccacgagtctggtcatgccaacccaccacctgctgagagcccagcagcagggtccctgttttccgcaccatcacccactcggaagctgccacggaaaagcccaatag

SEQ ID NO: 15492 - DNA, 1338 bp, synthetic construct
  misc_feature 1..1338: note = Description of Artificial Sequence: Synthetic coding sequence
  source 1..1338: mol_type = other DNA
atgctgagcgaggacccctggcgggctgccaagatgatcaagggatacatgcaacagcacaacattcctcaaagagaagtggtggacgtgacaggactcaatcagagccaccttagccaacacttaaacaaaggaacaccaatgaagacacagaagcgcgccgctctatatacctggtacgtcagaaaacaacgggagatcctgcgccaattcaatcagaccgtccagtccagtggtaatatgactgacaagagtagtcaggatcagctactcttcctgttcccggagttttcccagcagtcccacggaccgggccaatccgatgatgcatgttccgaacccacgaacaagaaaatgcgtcggaacaggtttaagtggggcccagcctcccagcagatactgtatcaggcatacgatagacagaaaaaccccagtaaagaggaacgggaggcgctagtggaagaatgtaatagggccgaatgcttgcagcggggagtgtcaccaagcaaggcccacgggctgggctccaatttggtgacagaagttagagtctacaactggttcgcgaacaggcgtaaggaagaagcattccggcagaagctggctatggacgcgtattcgagcaatcaaactcacagcctaaatccactcttaagtcacggatccccacaccatcagcccagtagttccccaccgaacaagcttagcggagtgagatactctcagcaggggaacaacgaaataactagtagcagtacgataagccatcatggaaattccgcaatggtcacttcgcagtctgtgttacagcaagtttcgcctgcatccctagatccgggccacaacctgctctcacccgacgggaaaatgataagcgtctccggaggcgggctgccccctgtctccacactaactaacatccactccttgagccatcataacccccaacagtcacagaatctgataatgacacccctctccggagtcatggctattgctcagtccctcaacacatcccaagctcagagcgtacccgtgattaatagtgtggccgggtcactcgcggccctccagccggtgcagttttcccaacaattacatagtcctcatcagcagcctctgatgcaacagagccctggcagccacatggcccagcagcctttcatggccgccgtcacccagctgcaaaactcacacatgtatgctcacaagcaggagccaccacaatattctcacaccagcagattccccagtgccatggtggtgactgacacatcttcaatttccaccctgacaaatatgtcctccagcaagcagtgccccctgcaggcatggtag

SEQ ID NO: 15493 - DNA, 1278 bp, synthetic construct
  misc_feature 1..1278: note = Description of Artificial Sequence: Synthetic coding sequence
  source 1..1278: mol_type = other DNA
atggtctccaaacttacatcgctacagcaggagttactttcagcattgctgagcagtggggtaacaaaagaggtgttggtgcaggccttagaagagttattaccatccccaaatttcggggtaaaattagagactctccccttgtctcccgggtccggcgccgagcccgatacaaagccggtctttcataccctcacgaacggccatgccaaggggcggctgagtggcgacgagggaagcgaagatggagatgattatgatacacctcctattttgaaggaattgcaagcgctgaatacagaggaggccgccgaacaacgggcggaagttgatcgcatgttgagcgaggatccctggagagcagccaaaatgataaaaggatatatgcagcagcataacatccctcagagagaagtcgtagatgttactggtctgaaccagagccacctgagccagcatcttaataagggtacccctatgaagacacagaagagggctgccctgtacacatggtacgtcagaaagcagagggagattttgcgccaattcaatcagaccgtgcagagcagcggaaacatgactgacaagagttcccaagaccagctcctttttttgtttcccgaattctctcaacagtctcacggtcccgggcagagtgatgatgcatgcagtgaacccactaataaaaagatgcgtaggaacagattcaagtggggcccagcatctcagcagatcctgtatcaggcatatgatagacagaagaacccttcaaaagaagaacgtgaggccttggtcgaggagtgtaatcgcgccgagtgtctccaaagaggggtgagcccttcaaaggcccacggtcttgggtccaacctcgtcacagaggtaagagtgtacaactggttcgcaaaccgacgtaaggaggaggcctttcgccagaagctcgcaatggacgcatactcaagcaaccagacccattcgctgaatcctctgctgagccatggctctcctcaccatcagcctagcagttcgccgcctaataagttatctggagtgaggtactcgcagcagggcaataatgagattaccagtagctcgacaatttcccatcacggcaattccgcaatggtgaccagtcagagtgtcctgcagcaggtcagcccagccagcctcgatccaggccacaatcttctcagccctgacggaaagatggatctgtctttgaggcggaggtttgctccatcccagcatctcgatgagtacccgcaacccctgccaccgtag

SEQ ID NO: 15494 - DNA, 1596 bp, synthetic construct
  misc_feature 1..1596: note = Description of Artificial Sequence: Synthetic coding sequence
  source 1..1596: mol_type = other DNA
atggtgtcgaaactcactagtttacaacaagagcttctcagcgcattactttcaagtggagtgacaaaggaggtgcttgtccaagccttggaagaactcctgccaagcccaaactttggggttaagctggaaacactgccgctgtccccaggtagcggtgcagagccggacacaaaaccggtgtttcacaccttgacgaatggccacgccaagggacgtttgtctggtgacgaaggaagcgaggacggagacgattatgataccccacctatactgaaggagctgcaggcccttaacaccgaagaggccgctgagcaacgcgcagaagtggatcggatgttgtccgaagacccttggcgcgccgctaagatgattaagggatacatgcaacagcataatatacctcaaagggaggttgtggacgtgacgggtctcaatcagagtcacctctcccagcacctgaacaagggcaccccgatgaagacacagaagagagcagctttgtacacgtggtacgtgcgcaagcaaagggaaatcctgcggcagttctcacagcagtcacacggtccaggccagtctgacgatgcttgcagcgaacccacaaataagaaaatgaggcgcaacaggttcaaatggggcccagcctcccagcaaatcctgtaccaggcttacgaccgccagaagaacccttcgaaggaggaacgcgaagcacttgtcgaggaatgcaaccgcgctgagtgtctacagaggggcgtgtctccatcaaaggctcatgggctggggagtaacctggttaccgaagtgcgcgtgtataattggttcgcaaataggcggaaagaagaggcgttccgtcagaagctggctatggacgcttatagttccaatcagacccacagcctgaatccgcttctcagccacggctcgccgcatcaccaaccgtcgtcttcgcccccaaataagctatctggagtgagatacagccagcagggcaacaatgagatcacatctagctccaccatctcacaccacggaaatagtgctatggtcacctcgcagtcggtcctgcagcaggtgtcacctgcgtccctcgatcctgggcataatcttctgagtcctgatggcaaaatgattagcgtttctggagggggattgccaccagtgtccacactgacaaacatccacagcttatcccatcacaacccacagcagtcccagaacctcattatgactccgcttagtggcgtcatggccattgcccagtccctgaatacctcccaggcccagagcgtgccggtgatcaactctgtcgctgggagcctggcggcactacagccagttcaattcagtcagcaactccactctccccatcagcagccgttgatgcaacaaagtcctggctcgcacatggcacagcagccctttatggccgccgtgacccaactccaaaattcgcatatgtatgctcataaacaggaacccccccagtattcacacacatcacgctttccatcagctatggtagttaccgatacatcgtctatcagtacattgactaacatgtcaagttctaaacagtgtcctctgcaggcgtggtag

SEQ ID NO: 15495 - DNA, 843 bp, synthetic construct
  misc_feature 1..843: note = Description of Artificial Sequence: Synthetic coding sequence
  source 1..843: mol_type = other DNA
atgaaatttcgcgcgaagatcgtggatggggcgtgcctgaatcacttcactcgcatatctaacatgatcgccaagctggcaaagacgtgtacgctgcgtatatctccagataaactgaacttcattctgtgcgataagctggccaatggcggcgttagtatgtggtgtgagctagagcaggaaaatttcttcaatgaattccagatggagggcgtctcagcggagaacaacgagatctacttagagctcacctctgagaacctgtcaagagccttaaagactgcccagaatgcacgagctctaaagattaagctcactaacaagcattttccatgtcttaccgtgtccgtcgagctcctctcaatgtcctcatcctcccgcatcgtgacacatgacatacctattaaagtgattccacgcaagctctggaaggaccttcaggagccagttgtgccagaccccgatgtttctatatacctcccagtgttaaagactatgaagagtgtagttgaaaagatgaagaatatttctaaccatttagttatcgaagccaacctcgatggcgaactcaaccttaagatcgaaaccgaacttgtgtgcgtgaccacacactttaaggacctgggcaatccacccctcgcctccgaaagtacacacgaagaccggaacgtggagcacatggccgaggttcacatcgatatccgaaagctgctccagtttctcgcagggcagcaggttaatcccaccaaggccctgtgcaatatcgtgaacaataagatggtccacttcgaccttctgcacgaagatgtgtcccttcagtattttattcccgcattgtcctag

SEQ ID NO: 15496 - DNA, 780 bp, synthetic construct
  misc_feature 1..780: note = Description of Artificial Sequence: Synthetic coding sequence
  source 1..780: mol_type = other DNA
atgatcgccaaactggccaagacatgtactttgcgaatatccccagataaactcaacttcatactgtgcgataaacttgccaatggaggcgtgagcatgtggtgtgaactggaacaggagaatttcttcaatgagttccaaatggaaggggtgagcgctgagaataatgagatttatctcgagcttacctcagaaaatctcagtcgggctttaaagaccgctcagaacgcgagggcgttgaagatcaagctgacgaacaaacattttccatgtttgaccgtgagcgtcgaactgctatcaatgagttcatccagtcgtatagtgacccatgacatccccataaaagtcattcccagaaaactttggaaagacctccaggaacctgtcgtgcctgacccggacgttagtatctacctgcctgtactcaaaacaatgaagagtgttgtggagaagatgaagaacataagtaatcacctggtgattgaggccaacctggacggagaattgaatcttaagattgaaacagagcttgtctgcgtgactactcacttcaaggaccttggtaatcctccactcgcatcagagtctacccatgaggatagaaatgtggagcacatggcagaggtccacattgacattcggaagcttctgcagttccttgctgggcaacaggtgaaccctactaaagcgctatgcaacatcgttaacaataaaatggtccatttcgacctacttcacgaagacgtatccctccagtatttcattcctgctctgagttag

SEQ ID NO: 15497 - DNA, 843 bp, synthetic construct
  misc_feature 1..843: note = Description of Artificial Sequence: Synthetic coding sequence
  source 1..843: mol_type = other DNA
atgaaattccgcgccaaaatcgtggacggagcctgtctcaaccatttcacccgcataagcaatatgatcgcaaaactagctaagacctgtaccctccggatctcacccgacaaactgaactttattctgtgtgacaaactggcaaacgggggggtctcgatgtggtgtgagctggaacaggaaaactttttcaatgagttccaaatggagggggtgagcgctgaaaacaatgagatatatcttgagctgaccagtgaaaatttgtcacgggcattgaagaccgcccaaaacgctcgggcattgaagattaagctgacaaacaagcattttccttgccttaccgtcagtgtcgaactcttgtctatgtcgtcctcctctcgcatcgtcactcacgatatccctatcaaggtgattccccggaagctctggaaggacctccaagaaccggtcgtacctgaccccgacgtgtccatctacttacctgttcttaagactatgaagtcagtggtggagaaaatgaagaacatatccaaccaccttgtcatcgaagccaatttggacggcgagcttaacctgaagattgagacagagttagtctgtgtcacgacccatttcaaagacctgggaaaccctccacttgcctccgaatctactcatgaggatcgcaatgtggagcatatggcagaggttcacattgatatccggaaactcctccaatttctggccgggcaacaagtgaaccccactaaggcactgtgtaacatcgttaacaataagatggtgcacttcgatctcctccatgaagacgtcagtctccagtacttcatacccgcgctttcttag

SEQ ID NO: 15498 - DNA, 780 bp, synthetic construct
  misc_feature 1..780: note = Description of Artificial Sequence: Synthetic coding sequence
  source 1..780: mol_type = other DNA
atgatcgcaaagttggccaaaacttgcacactccgcatctcacccgataagttgaatttcatcctgtgcgacaagctcgccaatggcggggtttccatgtggtgcgaacttgagcaggagaacttctttaatgaattccagatggagggcgttagtgcggagaataatgaaatctacctggagcttacttctgagaacctgtcacgcgccctcaagacagcgcaaaatgccagggcactcaagattaagctgacaaataaacacttcccatgcttgactgttagcgtggagctcttgtctatgagcagctcatccaggatcgtgacccacgacataccaatcaaggtaatcccgaggaaactgtggaaggacttgcaggaacccgtggtccccgatcctgacgtgagcatctacctgcctgttctaaagaccatgaagtctgtggtcgagaaaatgaagaacataagcaatcatctcgttattgaggcaaacctggacggggaactgaacctcaagatagaaactgaattggtctgtgttacaactcactttaaagacctgggtaatccgcccctggctagcgagtcgactcacgaagaccgcaacgtagaacatatggcagaagtccatatcgatataaggaaattactccagttccttgcggggcagcaggtaaatcccactaaggcactctgcaacatagtgaacaacaagatggtccacttcgacctgctacatgaagacgtgtctctgcagtactttatccccgcactgtcctag

SEQ ID NO: 15499 - DNA, 2130 bp, synthetic construct
  misc_feature 1..2130: note = Description of Artificial Sequence: Synthetic coding sequence
  source 1..2130: mol_type = other DNA
atgtcattcccaaaagccccgctgaagcggtttaacgacccctctggctgcgccccaagtccaggcgcctatgacgtcaagacgctggaggtcttaaaggggcccgtaagcttccagaagtcccagcgcttcaagcagcaaaaagagtctaaacagaacctgaacgtggacaaagacaccactctgcccgccagtgcccgtaaggtgaagtccagcgagtccaagataagggtgcttctccaagagcgaggagcacaggaccgtagaattcaggacttggaaacagagctcgagaaaatggaggcccgcctgaatgctgccctacgggaaaagacttctctttctgctaacaatgctacacttgagaaacagttgattgagctcacaagaaccaacgagctgctaaagtccaaattcagcgaaaacggaaaccagaaaaatttacggatcctttctctggaacttatgaagttacggaacaaacgcgaaaccaaaatgagggggatgatggccaaacaagagggcatggagatgaaattacaagttactcagagatctctggaagagagccagggaaagattgcccagctcgaaggcaaactggtcagcattgagaaggagaaaatcgatgagaagtcagagacagagaagcttctggaatatattgaggaaataagttgtgccagcgaccaggtcgaaaagtataagcttgatatcgcccagctggaggagaatctgaaagaaaagaacgacgagatcctttcgctgaagcagtctctggaagaaaacatagtgatcctcagcaagcaggtggaggatctgaacgttaagtgccagctcctggagaaagagaaagaagatcacgtgaatagaaatcgagagcataatgagaatctaaatgccgaaatgcagaatctgaagcagaagttcatcctggaacagcaagaacgcgagaagctgcagcagaaggagttacagatcgacagcttactgcagcaagaaaaggaattgtcttcttccctgcaccaaaagctgtgttcctttcaggaggagatggtaaaggaaaagaatctatttgaggaggagctgaagcagaccctcgacgaactagacaaacttcagcagaaggaagagcaagctgaaagactagtaaagcagttagaagaagaagcaaaaagccgcgctgaagaattaaagcttctagaggagaagctcaaggggaaggaagccgagttagagaaatccagcgcagcacacacacaggccacgctcctactacaggagaagtatgatagtatggtgcagtcccttgaagacgtgacagctcagtttgaatcttataaggccctgacagcaagcgagatcgaggatctcaagcttgagaactcctcactgcaggagaaggccgctaaggcaggcaaaaatgcggaagacgtgcagcatcagatcctcgcaacagagtcatcaaatcaggagtacgttcgaatgttattggatttgcagactaaatctgccctaaaagagacggagataaaggaaatcactgtatccttcttacaaaagatcacagatcttcagaaccagctcaagcagcaggaggaggacttccgtaagcaactggaagacgaagagggccgaaaggctgaaaaggagaacactacggcagagctgacggaggagattaataagtggaggctgttgtacgaggagctctataacaaaaccaagccattccagctccaactagatgccttcgaggtggaaaagcaggccctgttgaatgaacatggcgcggcccaggaacagttgaacaagatacgggatagttacgcaaagctgttgggccaccagaacctcaagcagaagatcaaacacgtagttaaactcaaggatgagaatagccagctcaagtccgaggtgtcgaaattgagatgtcagctggctaagaagaaacagtctgagactaagctgcaggaagaactaaacaaagtcctgggtattaagcatttcgatccttctaaagccttccatcacgagagcaaagaaaacttcgccctgaagactcccctaaaagaaggcaacacgaattgctacagagcaccaatggaatgccaggagagctggaagtag

SEQ ID NO: 15500 - DNA, 2175 bp, synthetic construct
  misc_feature 1..2175: note = Description of Artificial Sequence: Synthetic coding sequence
  source 1..2175: mol_type = other DNA
atgtcatttccaaaggcacccttgaagcgcttcaatgacccctccggctgtgcaccctcaccaggcgcatacgatgtcaagactctagaggtgttaaaaggaccggtttctttccagaagtcccagaggttcaagcaacagaaggagtcaaagcagaatttgaacgtggacaaagacactactctccccgcatcagctaggaaggtcaagagcagtgaatctaaggagtcccagaagaatgacaaagacttgaaaattttggaaaaggagatcagggttctactccaggaacggggcgcacaagataggcggatccaggatctggagacggagttggaaaagatggaagcccgcttgaatgccgccctgcgagagaaaactagtctatcagccaataatgctactcttgagaaacagctcatcgaactgacccgcactaacgaattactgaagtccaagttctctgaaaatgggaaccaaaagaacctcagaattctgtctttagaactgatgaaactacgcaacaagagggagacaaagatgaggggtatgatggccaagcaggaaggcatggaaatgaagctgcaagtcacccagcgtagcctcgaagagtcacagggcaagatagcgcagctagagggcaaactggtgtctattgaaaaggagaaaatcgatgaaaagtctgaaacagaaaaattgctggagtacattgaggaaatcagctgcgcttccgatcaggtcgagaagtacaagctcgatattgcccagctggaggagaacctgaaagagaagaacgacgagatactctccttgaagcaatccctcgaagaaaacatcgtcattttgagcaagcaagtggaagacctcaatgttaagtgtcagcttctcgaaaaggagaaggaagatcacgttaacagaaacagagaacacaatgagaacctgaacgctgaaatgcagaatttaaagcaaaagtttatccttgagcagcaagagcgggagaagctgcaacagaaagaactgcaaatcgacagcttgctgcagcaagaaaaagagctgagttcatccctccatcagaaactgtgttcgttccaggaagagatggtgaaagaaaaaaaccttttcgaagaggagttgaagcaaactctcgacgaattggataagctccagcagaaagaagaacaagccgagcgactggtcaagcagcttgaggaggaagcaaaatcaagggctgaggagctgaagctgttagaagagaagctcaaggggaaagaagcagagttagaaaagtcctctgccgcccacacccaggctacgctactgttgcaggaaaaatatgattctatggtccagtcactcgaggacgtgaccgctcaatttgaaagctataaagccttgacagccagcgagattgaggacctgaagctggagaactcttccctccaggagaaagccgccaaagccgggaagaatgcggaggatgtccagcatcagattttggccaccgaatcatccaatcaggaatacgtgaggatgctcctagacctgcagacgaaatctgcgctgaaagagaccgagataaaagagatcaccgtttcctttctccagaaaattaccgatcttcagaaccaactcaagcagcaagaggaagattttcggaaacagctagaggacgaggaaggaagaaaagcggaaaaagagaacacaactgcagagctcaccgaagagatcaataagtggagactcctgtatgaggaactttataataaaaccaagccatttcagctgcagttggatgccttcgaagtagagaagcaggccctgcttaatgagcatggggctgcgcaggaacagttgaacaagatcagggattcttatgcgaagttgctgggtcaccaaaatctaaagcagaaaatcaagcacgttgtcaaactgaaagatgagaattcccagttgaaaagtgaggtgtctaagcttcggtgccagttggcgaagaagaaacaatctgagacaaagctccaagaggagctgaataaggtgcttggcatcaagcacttcgatccgtctaaggcctttcaccatgagagcaaagagaacttcgccctgaagaccccactcaaggagggcaatactaattgctacagggcaccaatggagtgtcaggagtcgtggaagtag

SEQ ID NO: 15501 - DNA, 2178 bp, synthetic construct
  misc_feature 1..2178: note = Description of Artificial Sequence: Synthetic coding sequence
  source 1..2178: mol_type = other DNA
atgtccttccccaaagccccattgaaaagatttaacgacccttctgggtgcgccccaagccccggggcatatgatgtgaaaaccttagaggtcctcaagggacctgtgtcctttcagaaaagccagcggtttaagcagcaaaaagaatcgaaacagaacctgaacgtggacaaggacaccacgttgcctgcctcagcccgcaaggtgaaatcgtcagagagtaagaaagaaagccagaagaatgacaaagatctgaagattctagaaaaagaaattcgagttctgttgcaagagcgtggagcccaagatagacggatccaggacctggaaacagagctggagaagatggaagcaaggctaaacgctgccctgcgagaaaagacatctctgagtgcaaacaatgccactttggagaagcagcttatcgagctcacccggaccaacgagctcctaaagagcaagttcagtgaaaatggcaatcagaaaaatcttcgaatcctaagtctcgagttgatgaagctcaggaataaacgggagaccaaaatgcgtgggatgatggccaagcaggagggcatggagatgaagctgcaggtgactcaacgctccctcgaagagtcacaaggtaagatagcacagctcgagggtaaactcgtgtcgatcgaaaaagagaaaatagacgagaagtccgaaactgagaaactcctggagtacatagaggagatctcctgcgcatcagaccaggtagaaaaatacaagctagacatcgctcagctggaggagaatctcaaggagaaaaatgatgagatactatcccttaagcaatcactggaagagaacatcgtgatactatctaaacaggtagaagatctgaacgtgaaatgccagctactggagaaagagaaagaggaccacgtgaatcgcaaccgagagcataacgaaaatctaaacgccgagatgcagaatctgaagcagaagttcatattggagcagcaagagcgagagaagctgcagcagaaggagctgcagatcgattctttactccagcaggagaaggaactgtcctctagcctccaccagaagttgtgttcattccaagaggagatggtgaaggagaagaatcttttcgaggaggaactcaagcagactctcgacgaactggacaaactgcagcagaaggaggagcaagctgaacggctcgtcaagcagctagaggaggaggctaagtcaagggctgaggagctcaagctgctggaggaaaagttgaaagggaaggaagctgagttggagaagagttctgcagcacatactcaggccaccttactcctgcaggagaagtacgactctatggtccagtccttggaggacgtgactgcccaattcgaaagctataaggccctgaccgcgtccgagattgaggacctcaaactggaaaatagttctctgcaggagaaggcagctaaggcaggaaagaatgcagaagatgtgcagcatcagatcctcgccaccgagagctcaaaccaggagtacgtacgtatgctgctagatctgcagacaaaatcggccctgaaggagaccgaaatcaaagagattacagtatcctttcttcagaaaattacagatctccaaaaccagcttaagcagcaagaagaggacttccgaaagcagctggaggatgaagaaggcaggaaagcggaaaaagagaacacaacagccgagctgacagaagagataaacaagtggcgcctgctctacgaggaactgtacaacaaaactaagccttttcaactacaacttgacgccttcgaggtagagaaacaagcccttctgaatgaacatggtgccgcccaggaacagcttaataaaattcgagactcctacgcgaagctgctgggccatcagaatttgaagcagaagatcaaacatgttgtgaagctcaaggacgaaaactctcagctaaagtccgaagtctccaagctcagatgccagctcgcaaagaagaagcaatcggaaactaaactgcaggaggagctcaacaaggtgctcggcatcaaacattttgacccatcaaaggccttccaccacgagagcaaagaaaattttgccctgaagactcccctgaaagaaggtaacacaaattgctatcgggctccaatggagtgccaggagagttggaaatag

SEQ ID NO: 15502 - DNA, 2106 bp, synthetic construct
  misc_feature 1..2106: note = Description of Artificial Sequence: Synthetic coding sequence
  source 1..2106: mol_type = other DNA
atgtcctttcctaaggcaccactcaagcgctttaacgatcccagcggctgtgcgccgagtccgggggcatatgacgtcaagactctggaggttctgaaagggccagtgagctttcagaagtctcaaagatttaagcagcagaaggagtccaagcagaatctaaacgttgataaagataccacactgcctgcgtccgccagaaaagtgaagtcgtccgagagcaaaaaggagtcacaaaaaaatgataaggatctgaaaatattagagaaggaaatcagggtgttgctgcaggagagaggagcccaagaccgtcggatacaggatctggagactgagctcgagaaacaattgatagaactgacgagaacaaacgagcttcttaaatctaaattctctgagaacggcaaccagaaaaaccttagaattctgtctctggaactgatgaaactgcggaacaagagagagacaaagatgcgggggatgatggctaagcaggaaggaatggagatgaaactccaggtgacgcagagatcactggaagagtcacaggggaagatcgctcagctggagggcaaactggtctccatagaaaaggaaaaaatcgacgagaaaagcgagacagagaagttactggagtatattgaggagatttcctgtgcctctgaccaggtggagaaatacaagctcgacattgcccagctggaggagaacttaaaagagaaaaacgacgagattctctccttgaagcaatcactcgaggagaacattgtgattctctccaagcaggtggaggaccttaacgtcaagtgtcagttgctggaaaaagagaaggaggaccatgtcaaccggaacagggaacataatgagaacttgaatgccgagatgcaaaacctaaaacaaaagttcattctggaacagcaggaaagggaaaaactccagcagaaagaactacaaatcgattctttgcttcagcaggaaaaggaattgtcatcgtcattacatcagaaactgtgctcttttcaggaggaaatggtgaaggaaaaaaaccttttcgaggaggagctgaaacaaaccctggacgaacttgataagctccagcagaaagaggagcaggcggaaaggctcgtaaagcaactcgaggaagaggcaaagagccgtgccgaagagcttaagctgctggaagaaaagctgaaaggcaaggaagctgaacttgagaagtccagtgcagcgcacacgcaagccacacttctcctgcaggaaaaatacgattctatggtgcagagcctagaggacgtgaccgcacagttcgaatcctataaggctcttaccgcgtcagaaatcgaggacctgaaattggaaaattcatcattgcaggaaaaagccgcaaaagccgggaaaaacgcggaggacgtgcagcaccagatcttggctacagagtcctctaatcaagagtacgtacgcatgctgctcgacctgcagactaagtccgctttgaaggaaaccgagattaaggagattactgtttcctttttgcagaagatcacagacttacaaaaccagttgaaacagcaggaagaggactttcggaaacagcttgaggatgaggaagggagaaaagccgagaaagagaacaccacggcagagttaacagaagaaatcaataaatggcgcctgttgtatgaggagctgtataacaagacgaagccttttcagctgcagttggatgctttcgaggtcgagaagcaagctctgcttaacgagcacggtgcagcccaagaacagctcaacaagattagagacagctatgctaagctcttggggcatcagaacctgaagcagaaaattaagcacgttgtcaaactgaaggatgaaaattcccagctgaaatctgaagtcagcaaacttcgttgccaactcgcgaagaagaagcagtcagaaacgaagttgcaggaggaactaaacaaggttctggggattaagcattttgatccttccaaagcgttccaccatgagagcaaggaaaattttgcgctgaagactcccttaaaggaggggaatacgaattgctacagggctcctatggagtgccaggagtcatggaaatag

SEQ ID NO: 15503 - DNA, 1917 bp, synthetic construct
  misc_feature 1..1917: note = Description of Artificial Sequence: Synthetic coding sequence
  source 1..1917: mol_type = other DNA
atgactctgcttatccgggtgttactccaggaacggggtgcccaagatagacggattcaggatctcgagactgaactggagaaaatggaggcgcgtctgaacgctgcccttagagagaaaactagcctcagcgccaataacgcgactttagagaaacaactcatagagctaactcgcaccaatgaactcttaaaaagtaagttttctgaaaacgggaatcaaaagaacctgcggatcctcagtttagagctcatgaaactaaggaataaacgcgaaaccaagatgcgcggtatgatggctaagcaagaaggcatggagatgaagcttcaggttacacaaaggtcgctggaggaaagccagggcaaaatagcgcagctggaaggcaagctggtgtctatagagaaggaaaagattgacgaaaagagcgagacagagaagctcttggagtacatcgaagaaatctcttgtgccagcgatcaggttgaaaaatacaaactcgacattgctcagttggaggaaaatctgaaggaaaaaaatgatgagatcttgtcactgaaacagtccttagaagagaacattgttatcctgagcaagcaggtggaggatcttaatgtcaagtgtcagctgctcgagaaggagaaggaggaccacgtcaatcggaaccgggagcacaatgagaacctaaacgcagaaatgcagaacctgaaacaaaaatttattctggagcagcaggaaagggaaaaattacaacagaaggagctgcagatcgattctcttctccagcaagaaaaggagctgtcatcttctctgcatcagaaattgtgctcattccaagaagaaatggtgaaggaaaagaatctcttcgaggaggagctaaagcagaccctggatgaactggataaattgcagcagaaagaagagcaggcggagagactcgttaaacagctcgaggaggaagccaaatctagagcggaggagctgaagctgctagaggaaaagcttaaagggaaagaagccgagttagaaaaatcaagcgccgctcacacccaggcaacattgcttctgcaagagaagtacgactccatggtgcagtccctcgaggatgtgacagcacaattcgaatcctacaaggctctaactgcatccgaaatcgaagatcttaaactggagaacagttcgcttcaggagaaagcggccaaagccggaaaaaatgcggaagatgtccaacatcagatcctggcaacagaatctagcaaccaagaatacgtgcgcatgctccttgatctccaaaccaagagcgccctcaaggagacggaaattaaggaaatcacagtgagcttcttgcagaaaattaccgacctgcaaaaccagctgaagcagcaggaggaggacttcaggaagcagctggaagatgaagaaggccggaaggctgagaaagaaaatactacagctgagctcacggaggagattaataagtggaggttgttatacgaagagctctataataaaacaaagccttttcagttgcagttggatgcctttgaggtggagaagcaggcgcttctgaatgagcatggagcagcccaggaacagctgaacaagattagggactcctatgcgaagttactcggccatcagaatctgaaacaaaaaatcaagcacgtggtgaaactgaaggatgaaaatagtcagctgaaatccgaagtatctaaactcaggtgtcagctggctaaaaagaagcagtcggagaccaagctccaagaagaactaaataaggtcctgggcattaaacatttcgatccttcgaaggctttccaccacgagagtaaagagaactttgcccttaagacaccactgaaagaaggcaataccaattgctatagggctccaatggagtgtcaagagtcttggaagtag

SEQ ID NO: 15504 - DNA, 996 bp, synthetic construct
  misc_feature 1..996: note = Description of Artificial Sequence: Synthetic coding sequence
  source 1..996: mol_type = other DNA
atgtcatttcctaaggctccactcaaacgcttcaacgatccatctggatgtgctccaagcccaggcgcctacgacgtcaaaacgttggaggttcttaaagggcccgtatcatttcagaaaagccaaagattcaagcagcagaaagaatctaagcagaatctgaacgtggacaaagacacaacccttcccgctagcgcacggaaagtgaaatctagcgaatccaagattcgcgttctgctgcaggaacggggcgcgcaagatagacggatccaggatttagaaaccgagcttgagaaaatggaggcgcggcttaacgccgcacttagggaaaagacttccctttccgccaacaacgccacactagagaaacagttaattgagcttaccaggacgaacgagctcctcaaatctaagttctcagagaatggcaaccagaaaaacctccggattctatcactcgagttaatgaaactgagaaataaaagagagactaaaatgcgggggatgatggcaaagcaggagggtatggagatgaaactccaggtcactcagcggagccttgaggaatctcagggcaagatcgcccagttagaaggtaaattggtgtctatcgagaaggaaaagatcgacgagaaatcagagacggagaaactcttggagtacatcgaagaaatctcatgcgctagcgaccaagtggaaaaatacaaactggacattgcccagctggaagagaatcttaaggagaaaaatgatgagatcctgtctctgaaacagtctctcgaagagaacatagtcattctgagtaaacaagtagaagacctgaacgtcaaatgtcagctcctcgagaaggagaaggaggaccacgtcaataggaatagagaacacaacgaaaacctcaacgctgaaatgcaaaaccttaagcagaagttcatactggaacagcaggaacgtgagaagttacagcagaagaagaagcagatgcggaggaaaaagtag

SEQ ID NO: 15505 - DNA, 537 bp, synthetic construct
  misc_feature 1..537: note = Description of Artificial Sequence: Synthetic coding sequence
  source 1..537: mol_type = other DNA
atgcatgtcaatggaaaggtggctctcgtgaccggggccgcacagggcatcggtagagcatttgccgaagcactcctgcttaagggggcaaaagttgctttagtggattggaaccttgaggccggcgtgcaatgcaaggctgcccttgacgagcaattcgagcctcagaagaccttattcattcagtgcgacgttgctgaccagcagcagctgagggacacatttaggaaggtcgttgatcactttggacgcctggatatactggtgaataatgccggcgtgaataatgagaagaattgggagaagacccttcaaattaatctggtctccgtgatcagcggtacatacctcggattggattatatgagtaaacagaacggaggagaagggggcatcatcatcaacatgtcttctctggccgggttaatgccagtggctcagcagcctgtgtactgcgcgtccaagcacggaattgttgggtttactcggtctgctgctcctaccatcgattgccagtggatcgataatacacattag

SEQ ID NO: 15506 - DNA, 801 bp, synthetic construct
  misc_feature 1..801: note = Description of Artificial Sequence: Synthetic coding sequence
  source 1..801: mol_type = other DNA
atgcacgtgaacggcaaagtggcccttgtcactggagctgctcaaggcatcgggagggcattcgcagaggctcttcttttaaagggcgctaaggtcgccctggtggattggaatcttgaagcaggcgtccaatgcaaggcagcactggatgagcagtttgagccgcagaagacactgttcatccagtgcgacgttgctgaccaacagcaattgagagatacgttccggaaggtcgttgaccacttcgggcgcctcgatatactagtgaacaatgcgggtgtaaacaacgagaagaactgggaaaagacgttacagatcaacctggtgagtgtcatctcaggcacctacctgggccttgactacatgagcaaacagaacggaggcgagggcggcatcattattaatatgtcatccctcgcaggcctgatgcccgtggcccagcagccagtgtactgtgcaagcaaacacggaatcgtgggctttacccggtccgccgccctggctgcaaacctcatgaattccggcgtccggctcaatgcgatatgtccaggttttgtgaacacggctattctggagtctatagaaaaagaagagaacatgggacagtatatcgagtataaggaccacattaaggacatgataaagtattacgggatcctcgaccctcccctgattgccaatggcctgattacactcattgaggacgacgcactgaacggcgccataatgaagatcacaacctcgaaggggatccattttcaggactatgacaccacccccttccaggctaagacccagtag

SEQ ID NO: 15507 - DNA, 438 bp, synthetic construct
  misc_feature 1..438: note = Description of Artificial Sequence: Synthetic coding sequence
  source 1..438: mol_type = other DNA
atgtcaaagcaaaatggtggcgaagggggcatcataataaatatgtcaagccttgctggtctcatgccagtagcgcagcagccagtgtactgcgcatcgaagcatggtatcgtgggctttacgcggagtgctgctttggccgccaacttaatgaacagtggggtgaggctgaacgccatctgcccgggattcgtgaataccgctattttggagtccatcgaaaaggaagagaacatgggacagtacatcgaatataaagatcatattaaggacatgattaaatactatggtattttggatccgccgctgattgctaacgggctcattaccttgatagaggatgatgcactaaatggggcaattatgaaaatcactacctcaaaagggattcacttccaggactacgacacaaccccgttccaggcaaagacccagtag

SEQ ID NO: 15508 - DNA, 438 bp, synthetic construct
  misc_feature 1..438: note = Description of Artificial Sequence: Synthetic coding sequence
  source 1..438: mol_type = other DNA
atgagtaaacagaacgggggggaggggggaattatcattaatatgtcgagcctggccggtttaatgcccgtggctcaacagcccgtgtattgtgcctctaagcacggcatcgtcggatttacccgatctgccgctctcgcagccaatctgatgaacagcggagtgcgcctgaacgctatttgccctggttttgtgaatacagcgattttggagtctatcgaaaaggaggagaatatgggacagtacatcgagtataaagaccatattaaagatatgatcaaatattacggtatcctcgacccccccttaattgcaaacggcctgatcacgctaattgaggacgacgctctgaacggcgcgatcatgaaaatcacgactagcaagggcatccattttcaggattatgacactaccccctttcaggctaaaactcagtag

SEQ ID NO: 15509 - DNA, 432 bp, synthetic construct
  misc_feature 1..432: note = Description of Artificial Sequence: Synthetic coding sequence
  source 1..432: mol_type = other DNA
atgcacgtaaacggaaaagtggcgcttgtgacaggagcggctcaggggattggaagggcctttgccgaggccctcctacttaaaggagctaaggtggcgctcgtcgactggaaccttgaggctggagttcaatgcaaggctgctttagacgagcagttcgaacctcagaagaccctcttcatccagtgtgacgtggcggatcagcaacaactccgcgatacgtttagaaaggtggtggaccatttcggtcgactggatatcctggttaacaatgccggagtgaacaacgaaaaaaactgggagaagacactgcagattaacctggtaagcgtcatctcgggtacctacctgggcttggactacatgtccaagcagaacgggggagagggcggaattatcatcaacatgagcagcttggcagcccatcactag

SEQ ID NO: 15510 - DNA, 2202 bp, synthetic construct
  misc_feature 1..2202: note = Description of Artificial Sequence: Synthetic coding sequence
  source 1..2202: mol_type = other DNA
atgacctttcctgaggccgacatcctgctcaagagtggagagtgcgcagggcagacaatgctcgacacaatggaggcaccaggccattcaagacagcttctgctccaacttaataaccagcggactaagggcttcttgtgcgacgtcattatcgtggtccagaacgctctgtttcgagctcataaaaacgtgcttgccgcaagcagcgcttatctcaagtcactggtggttcacgacaatctcctcaacctggatcacgacatggtgagtccggccgtcttccgcttggttctggatttcatttacacaggacgcctggctgacggagcagaagctgctgctgcagccgcagtagctcctggagcggagccttccctcggagccgtgctggccgcagcgtcctacctgcagattccggaccttgtagccctctgcaagaagcgcctgaaaagacatggtaagtactgccacctgcgaggtggcgggggaggtggcggagggtacgctccttacggacgcccggggcggggcctgcgagcggctactccagtaatccaggcgtgctatccgtctccagtcggccccccaccccccccagcggccgagcccccctcaggacctgaagctgctgtcaacacccactgcgcagaactgtatgcctctggtcccggccctgctgcagctttatgtgctagcgagcgcaggtgctccccactgtgtggactggacctcagtaagaagtccccgcctggatctgcggccccagaaagacccttggcggagagagagctgcccccccgccctgactcgccgcctagcgctggccccgccgcatacaaagaacctcccctcgcactgccatctctgcctccgctcccgtttcagaaactggaggaagcagccccaccctccgacccatttcggggagggtcgggctcccctgggcctgagccacccggtagacccgacggcccttcactcctttatcggtggatgaagcatgaaccaggtctcggctcatacggggacgaacttggacgtgagagagggagtccctcggagcgatgcgaagagaggggaggcgacgcagctgtgagtccaggaggaccaccactggggctggccccgccaccgagataccccggatccctggacggtcctggagctgggggcgacggcgatgattacaagagctcatcagaagaaacaggctcatccgaggacccctccccccccggggggcacttagaaggctacccctgtccacatctggcttatggagagcccgaatctttcggggataatctctatgtctgtattccctgcggcaaggggtttccctctagcgaacagttaaatgcccatgtggaggcgcacgtggaggaagaagaggcactctacggcagggcggaggcagcagaagttgcggccggcgcagcaggactgggcccccccttcggagggggaggtgacaaggtggctggagcacccggcggcttgggggagctgctgagaccttacaggtgtgcctcttgcgacaagagctataaggatccggcaactttaaggcagcatgagaagactcattggctgactcggccctacccatgtactatttgtggaaagaaatttacccagcggggaacaatgaccagacatatgaggtcacaccttgggctgaaaccattcgcatgcgatgcgtgcggcatgcgctttaccaggcagtatagactgactgagcacatgcgcatccacagtggagagaaaccgtacgagtgtcaggtgtgcggaggaaagttcgcccagcaaagaaacttgatttcccacatgaaaatgcatgctgtaggaggggccgcaggggctgctggggctctggcaggactgggagggctgcctggagtgcccggaccagacgggaaaggcaagttggactttccagagggagtgttcgcagtcgctagacttactgctgaacagctctcacttaaacagcaagacaaggcagcggccgcggagcttctcgctcaaaccacccacttcctccacgaccccaaagtggccctagagtcactttaccctctggcaaaatttacagccgagctaggcctgtctcccgacaaggccgctgaagtcctgtcacagggggcccacctggcggccggtccggacggccgcaccatagataggttcagtcctacttag

SEQ ID NO: 15511 - DNA, 2145 bp, synthetic construct
  misc_feature 1..2145: note = Description of Artificial Sequence: Synthetic coding sequence
  source 1..2145: mol_type = other DNA
atgctcgataccatggaggccccagggcattcacgccagttactgctccagctcaataatcaaaggacaaaagggttcctgtgcgacgtaattattgtagtgcagaacgcactgttccgtgcacataagaatgtcctagccgccagttctgcgtatctcaagtctctggtagtccatgacaacctccttaatctggatcacgatatggtatcaccagctgtattccgattagtgcttgactttatatacaccggaagacttgcggacggagccgaggctgccgctgccgcagcagtggctccaggggcagagccttcattgggcgccgtactggccgccgcctcctatctgcagattccagacctggtggccctgtgtaagaagcgtctcaagaggcatggcaaatattgccatcttcgaggtggaggaggtgggggtggagggtatgctccttatggtcgacccgggcgcgggctccgagccgccacccctgtaattcaagcatgttaccctagccccgtgggcccacctccccccccagctgccgagcctccctccggacccgaagctgctgtgaacacccactgcgcagagctgtacgcatccggaccagggcccgctgccgcattgtgtgcaagtgagcggcgatgctcgccgctgtgcggccttgatctgagcaaaaagagccctcccggtagtgcagctcccgaacgaccattggcagagcgagagctgccgccccgccccgattctccaccatctgccgggcctgccgcctataaggaaccaccgctagccttgccctctctgccgccccttcccttccagaaactggaggaggctgccccacctagcgaccccttcagaggcgggtcagggtccccagggcctgaaccccctggccgtccagatgggccttctctgttatatcgctggatgaagcacgaacccgggctcggttcctacggagatgagctgggaagggagcgtggttccccctccgagaggtgcgaggaacgaggcggggacgctgccgtgagtcctggcggaccaccgttgggcctggctcctcctccgcgttaccccgggagcctcgacggacccggggctggtggtgacggagatgactacaaatccagctctgaagagaccgggtcctccgaagatccatcccctcctgggggccatctggagggctacccatgtccacaccttgcctatggcgagcccgagagtttcggggacaacctttacgtgtgcatcccttgtgggaaggggttcccctccagtgagcaactgaatgcccatgtggaggctcatgtcgaagaagaggaagctctttatggccgggccgaggcagccgaggtcgcggccggcgcggcaggactggggcccccttttggaggcggcggagacaaagtcgcaggtgccccagggggcctgggggagctgctgcggccttatcgatgtgcctcttgtgacaagagttacaaagacccggctactctgaggcaacatgagaaaacccactggcttacaagaccttacccctgcactatctgcggaaaaaagtttacccagagaggtacaatgactcgacacatgcggtcacatcttggcctgaagccttttgcatgcgatgcgtgtggaatgcggttcacccggcagtataggctgactgagcatatgcggattcatagcggggaaaaaccctacgaatgccaggtctgcggtggtaagtttgctcaacagagaaatcttatctcccatatgaagatgcatgccgtgggcggtgcggcaggcgccgctggcgcgctcgccggcctcgggggcctgcctggggtaccaggccctgatggaaagggcaagctagattttccagaaggggtatttgccgtggcgcgcctgacagccgagcaactttctttgaagcaacaagataaggccgcagcggctgaactactcgctcagaccacccatttcttgcacgacccgaaagtggccttagagtctctgtacccgttggccaagtttactgccgaactcgggctgtcgccagacaaagcggccgaggtcctcagccaaggcgctcatctcgcagctggtcctgacggccggacaatcgatcggttctcaccaacttag

SEQ ID NO: 15512 - DNA, 2208 bp, synthetic construct
  misc_feature 1..2208: note = Description of Artificial Sequence: Synthetic coding sequence
  source 1..2208: mol_type = other DNA
atggagggggctgggggtgcaaatgacaagaaaaaaatttccagcgagagaaggaaggagaaatccagggatgcagctcgtagtcgaagatctaaagagtccgaggtgttttacgaactggcacatcagctgcctttgccacacaacgtgtctagccatctggacaaggcctcagtaatgcggctgacgattagctatttacgcgttaggaaactgctagacgcaggtgatttagatattgaggatgacatgaaggcccagatgaactgcttctatctgaaggccctcgacggcttcgttatggttctcacagacgacggagacatgatttacatttccgacaacgtcaacaagtacatgggactgactcagtttgagctgacagggcattcagtcttcgattttacccacccatgcgaccacgaggagatgagagaaatgctgacacatcgaaacggcttagtgaaaaaaggtaaagagcagaatacacagagaagcttctttcttagaatgaaatgcactctgaccagtcgcggacgaacaatgaatatcaaatctgcaacttggaaggtgctccactgcaccggccacatacatgtgtacgacaccaactcgaatcagccacagtgcggttacaaaaagccgccaatgacctgtttagttctgatctgcgaaccaatccctcacccaagtaatatcgagatacctctggactcgaaaaccttcttatcaaggcactcactggacatgaaattctcatactgcgacgaacggatcacggaattgatgggatatgagcccgaggaacttttgggcaggagcatttatgaatactatcacgcgctcgactcggatcatctgaccaagacccatcacgatatgttcaccaaaggtcaggtgacaacagggcagtatcgaatgttagccaaacgcggcggttacgtctgggtagaaacacaggcgacagtgatttacaacaccaaaaactctcagcctcagtgtatagtgtgcgtgaactacgtggtgtccggcataattcagcacgatctgattttcagtctgcagcagacggagtgtgtccttaaaccagtggaatcttctgacatgaagatgactcagctctttactaaggtggaaagcgaagatacatcttcactgttcgacaaactgaaaaaagagcctgatgcactgactctcctggcaccggcagccggcgatacaatcatctccctcgactttggaagtaatgatacagagactgacgaccagcaattagaggaagtcccactttacaatgacgtgatgctaccttcccccaatgagaaacttcagaatatcaacttagctatgtcccccctacccactgccgagacgcctaagccactgcgatcctctgccgaccccgcattgaatcaggaagtcgctttaaagcttgagccaaaccccgaatctctggagctgagcttcacgatgcctcaaattcaagaccaaaccccaagcccttctgacggctccacccgacagagttcccctgagcctaatagtcccagtgaatactgtttctacgtcgactcagacatggtcaacgaatttaaattggagttggtggaaaagctttttgcagaggacaccgaggccaagaatccgttctcgacacaggataccgacctcgacctggagatgctggccccttacatccctatggatgatgactttcagttgcggtcgtttgatcagctgtctcctctagaatcttcaagtgccagtcccgaaagtgcatccccccaaagtactgtgaccgtgtttcagcaaactcagatacaggaacccactgctaatgccacgactactaccgcaactactgacgagctaaaaacagtaacaaaggaccgtatggaggacatcaaaatacttatcgctagccccagcccgacgcacatccacaaagaaacaacttcagccacttcctcgccttaccgggacactcaaagtcgaacagcctcaccaaatagagcaggaaagggcgtgatcgaacagacagagaagtcccatccccgcagtcctaacgttctctctgttgctctttcccagcgcacaacagttccggaggaagagctgaatcctaaaatcttagctctccagaatgcccaacgaaaacggaagatggagcacgacggtagcctgttccaggctgttggcatcatctag

SEQ ID NO: 15513 - DNA, 2481 bp, synthetic construct
  misc_feature 1..2481: note = Description of Artificial Sequence: Synthetic coding sequence
  source 1..2481: mol_type = other DNA
atggaaggcgccggcggagcaaatgataagaagaaaattagttctgagcggaggaaagagaaatctcgcgatgccgcacgatcccgtagaagcaaggagagtgaagttttctacgagctcgcgcaccagctgcccctgcctcataatgtgtcatcccacttagacaaagcctccgtaatgaggctgacaatcagctacttgcgagtgcgaaaactgctggacgccggggacctggatattgaggacgatatgaaggcacagatgaattgcttctacttgaaagctttggatggatttgtaatggtgctgacagatgatggcgatatgatctatatctccgataacgtcaataaatatatgggtttgactcagtttgagctcaccggacactcagtttttgatttcacacacccttgtgaccacgaggaaatgagagaaatgttaactcataggaatggcttggtaaagaaaggcaaggaacagaacacccaacggtctttcttcttaagaatgaaatgcacattaacaagtcgaggacggacaatgaacatcaaatccgctacctggaaggtcctccattgcactgggcatatccacgtctacgatacaaactcaaatcaaccccagtgtggctataagaagccccccatgacctgtttggtcctgatttgtgaacctattccccatccttcaaatattgaaatccctctcgacagtaagactttcctctcgaggcactcgctggacatgaagttttcatattgcgatgagcggataaccgaactcatgggctacgagcccgaggagcttctgggaagatccatctatgaatactatcacgcccttgattccgaccacctgactaaaacccatcatgatatgttcaccaaggggcaagtcaccaccgggcagtacaggatgctggccaaaagggggggttatgtctgggtggaaacccaggctacagttatctacaatactaagaattcccaaccccaatgcattgtgtgcgtgaactacgtggtctcaggcattatccagcatgacctgatattttcattacaacaaactgaatgtgttctgaaaccagtggaatccagcgatatgaaaatgacccagctgttcacaaaagttgaatcagaggacacatcctcgttattcgacaaacttaagaaggagcctgacgccctgactctgttggcccctgccgccggcgatactatcatttctctggatttcggctccaatgacactgaaaccgatgatcaacaattggaggaggtgccgctgtacaacgacgtcatgctgcctagccctaacgaaaagcttcaaaacataaatcttgctatgtcccctctgcctacggccgagacacctaaacctcttcgaagcagtgcggaccctgcccttaaccaggaagtcgccctgaagctcgagcccaaccccgaaagcctggagttaagcttcaccatgccacagatccaagatcaaaccccaagtcccagcgatggctccactcggcagagttctcccgaaccgaactcaccatcagagtactgtttttacgttgattcggatatggttaacgagtttaaactggaactcgtcgagaagttgttcgcagaagatactgaggctaaaaatccattttccacacaggacaccgatctcgacctggagatgcttgctccatatattcccatggacgacgattttcagttgcgcagcttcgaccagctgtccccacttgaatcttcatccgctagtccagagtccgcgagcccccagtctacagtgaccgttttccagcaaacccagatccaggaacccactgccaacgcgaccactaccacagcaaccacggatgaactgaaaacagtgacgaaggatcgcatggaagacatcaagattctgatcgcatctccgtctcccacacatatacacaaagagacaacgtccgctacttcatctccgtacagggatacacagtcccggactgcctcaccaaaccgggcgggcaaaggtgtgattgagcagactgaaaagtctcacccgaggtctccaaacgtcctgtccgtggcacttagccagcggactaccgtgccggaggaagaacttaacccaaaaatcctggctttacagaatgctcagaggaagagaaaaatggagcacgacggctccctgtttcaagcggtcggcatcggcaccctcctgcagcagccggacgatcatgctgctaccaccagcctcagctggaagcgcgtaaagggatgcaaatcttccgagcagaacggcatggagcaaaaaacaatcatcctgatcccctctgatctcgcctgtcgactgttaggccagtctatggacgagtccggcctcccccagttgacaagttacgactgcgaagtgaacgctcccatacagggctcccgcaatctactccagggtgaggagctcctgagggccctcgatcaggtgaattag

SEQ ID NO: 15514 - DNA, 2304 bp, synthetic construct
  misc_feature 1..2304: note = Description of Artificial Sequence: Synthetic coding sequence
  source 1..2304: mol_type = other DNA
atgcgcctcactattagttacctccgggtcagaaaactgttggatgctggcgacctggatattgaggacgacatgaaagcccagatgaattgcttctacctgaaggccctcgatgggttcgtgatggtcctgacggatgacggggatatgatctatataagtgacaacgtcaataagtacatgggcttgacccagtttgagttgaccggtcattccgtttttgattttacgcacccgtgtgaccacgaggaaatgcgggagatgttaactcatcggaacggtcttgtgaagaagggcaaagaacagaatacccagcggtccttttttttgcgcatgaagtgcactctgacgtcgcgaggaagaactatgaacattaaaagtgctacctggaaggtcctccactgtacaggacatattcatgtctatgatacaaactccaatcagccccaatgcggatataagaaaccccccatgacatgcctggtcctgatatgtgagccgatccctcacccaagtaatattgagataccattggacagtaaaacctttctgtcaagacattcactcgacatgaagttcagctattgtgatgaacggatcacagaattaatgggttatgagccagaggagttgctgggccgatctatctatgagtactaccacgctctcgatagcgaccacctcacaaaaacccaccatgacatgttcacaaaagggcaggtgactacaggccagtaccgtatgctagccaagagagggggttacgtctgggtggagactcaggctacagtaatctataatacgaaaaatagtcaaccgcagtgcatcgtatgcgtaaattatgtagtttctggcatcattcaacacgatctgatcttttccctgcaacagaccgagtgcgtcctgaaacctgtggagtcctccgacatgaagatgacccagctttttactaaagtggagagcgaggacacatcgagtctgttcgacaaactgaaaaaggaaccggacgcgttaacccttctggcgccagctgcaggagataccatcatctctttagactttggctcaaatgatacggagaccgatgaccagcagctagaggaagttccgttatataacgatgtgatgttgccttccccaaatgaaaaactccagaacatcaacctggctatgtcccctctcccgacagcagaaactcctaagccactgagatcatctgcagacccggctctgaaccaagaggtcgcgctcaagttagaacctaacccagaatccttagagctgtccttcacgatgccacaaatccaggatcagactcctagtccttctgatgggtccaccagacagtcatcacctgaacctaattccccatccgaatattgcttttacgtggattccgatatggtgaacgaattcaagcttgagctggttgagaaacttttcgccgaagatacagaggccaaaaaccccttttctacgcaggataccgaccttgacctcgagatgttagcgccatacattcccatggatgacgacttccagcttcggagcttcgaccagctatcaccgctggagtcatcctccgcaagtcctgagagtgcctctcctcaaagcaccgtcaccgtcttccagcaaacgcagattcaagagcccaccgcaaatgcgacaactaccaccgccaccactgatgagttaaagacagtcacgaaagaccggatggaagatatcaaaatattaatcgcctctccttcccctacacacattcacaaagagactaccagcgcaacctccagtccttatcgggatacgcaatctagaacagcgagtccaaatcgggccggcaaaggggtgatagaacagaccgaaaaatcgcatcctcgctcccctaacgtccttagcgtcgctctatcccagaggacaaccgtgccagaggaggagttaaatcccaaaatcctcgctttacagaatgcccagagaaagaggaaaatggagcacgacgggtccttattccaggctgttggtatcggcaccctgctgcagcagcctgatgaccacgctgccacaacatcccttagttggaagagagtaaaaggctgcaagagtagtgagcaaaatgggatggagcagaagaccatcatactgattccatccgatctcgcttgtcggctcctggggcaaagcatggatgagtctggtttgcctcagctaacttcctatgactgcgaggtcaacgcacccattcaggggtcacgtaacttactgcagggagaagaactcttacgcgccctcgaccaggttaactag

SEQ ID NO: 15515 - DNA, 2484 bp, synthetic construct
  misc_feature 1..2484: note = Description of Artificial Sequence: Synthetic coding sequence
  source 1..2484: mol_type = other DNA
atggaaggagccggcggcgcaaacgataaaaagaatagaatctcgagtgagcgacggaaggagaagtccagggatgcagcccgtagccggaggagcaaggaatcagaggttttctatgagctggcccatcagcttcctctgcctcataacgtctcttcccacctggataaagcctccgtcatgcgcctgactatttcatacctcagggttaggaaacttctggatgcgggggatctcgatattgaggatgatatgaaggctcagatgaactgcttctaccttaaggccctggatggatttgtaatggtgttgacagacgatggagacatgatatacatatcagataacgtgaacaagtacatggggctcacgcaatttgagctgacaggccactccgttttcgacttcactcatccctgcgaccatgaggaaatgagggagatgttgactcatcgcaatggtcttgttaagaagggcaaagaacagaacactcagaggtcattctttctgcgaatgaagtgtactctgacctcgcgtggtcgcacaatgaatattaagagtgctacctggaaagtcctccactgcacagggcacattcatgtatatgacaccaactctaaccaaccccaatgcggctataagaagccccccatgacatgcctggttctcatatgcgaacctatcccacacccttctaatatagaaatccccttggatagcaaaaccttcctgagccgccactccctggacatgaagttctcgtattgtgacgaacgtattacagaacttatgggctatgagccagaggaactcctcggtaggtctatctacgaatattaccatgcactggacagcgaccatctgacgaaaacgcaccatgacatgtttaccaagggccaagtgacaacggggcagtacaggatgctggctaaacgggggggatacgtttgggtcgaaacccaggcaacggtgatttataacactaagaacagtcagccacagtgtattgtgtgcgtgaattacgtcgtgtcaggaatcatccagcacgatctgatattttcgctgcaacagaccgaatgcgtccttaaaccggtggagagctccgacatgaagatgacacagctgttcactaaagtcgagagtgaagacacctcttcactcttcgataagttgaagaaggagccagatgccctgacattactggcacccgccgcaggagacaccatcatctcgctggactttggttcaaatgatactgaaacagatgaccaacagttggaggaggtgcctttgtacaatgatgtcatgcttccgtctcctaacgagaagctgcagaacattaacctggccatgtcacctctgcccactgctgaaacacccaagcctttgcggagcagcgcggatcctgcgctcaaccaggaggttgctcttaagctggagccaaatccagaaagcctagagttgtcattcaccatgccacagatccaggaccagacaccttcgccgagcgatggaagcactagacaatccagccctgaaccaaactcacctagcgagtattgtttttatgtggatagcgacatggtcaacgagttcaagctggagctcgtggagaagttgtttgccgaagacactgaagctaaaaatcccttctcgactcaagatacggatctggacctggaaatgctcgcgccctatataccgatggacgatgactttcaactgagaagcttcgatcaactgtccccactggagtcatctagtgcctcaccagagtcagcctctccccagagcacagtgacagtttttcaacagacccagatccaggagcccactgcgaacgccaccactaccaccgcgactaccgatgaactaaagaccgtgacaaaagaccgcatggaggatattaaaattctgatcgcctctcccagccccacgcacatccacaaagaaacaacctcagcgacaagttctccataccgagacacacagagcagaactgcttcccctaaccgtgcagggaaaggtgttattgagcagacagagaagagccacccgcgaagcccaaatgtgttgagcgtagctctgtcgcagcgaacgaccgtccccgaagaggaactgaatcccaaaatcctcgccctacagaacgcacagaggaaaaggaagatggagcacgacggcagcctatttcaggccgtggggattggcactctgttacagcagccagacgatcatgcggcgaccaccagcctgtcctggaagcgcgtaaaggggtgcaagtcatccgagcagaacggcatggaacaaaagaccattatcttaatcccatctgatcttgcatgtaggctgttgggacagtcgatggatgaatcaggcctcccacagctgacctcctatgattgcgaagtcaatgcccccatacagggttcccgcaacctccttcagggcgaggagctgttgcgagctctggatcaggtcaattag

SEQ ID NO: 15516 - DNA, 2553 bp, synthetic construct
  misc_feature 1..2553: note = Description of Artificial Sequence: Synthetic coding sequence
  source 1..2553: mol_type = other DNA
atgtccagtcagtgcaggtctctggagaacaagtttgtgttcttaaaggagggtctcggcaattctaagcctgaagagctggaggaaatacgtatcgagaacgggagaatctcatcagaacgccggaaggaaaaatcaagggatgctgctaggtccaggcgatccaaagaatcagaggttttttacgaactggcgcaccaactgcctctcccacacaacgtgtccagccatttggacaaggctagtgtaatgcgactgacgatttcataccttcgcgtgcgaaaacttttggacgcgggagacctggacattgaggacgatatgaaggcacagatgaattgcttttacctgaaggctctcgatgggttcgtcatggtcctcactgatgatggagatatgatttacatctcggataatgtgaacaaatatatgggcctcactcaatttgaactcaccggccattctgttttcgacttcactcatccatgtgaccacgaagaaatgcgggagatgttgactcaccgaaatggtcttgtgaaaaaggggaaggagcaaaacacacagcgaagcttttttctcagaatgaaatgcacgctgacgagtagaggcagaacgatgaacatcaaatcggccacctggaaggtactgcactgcacaggccacattcatgtttatgacacgaattctaatcaacctcagtgcggctataaaaaaccccctatgacttgcctggtgctaatctgtgaacctattccgcaccctagtaacattgagatccccctggatagcaaaacttttttgtcaaggcacagcctggacatgaagttcagctactgtgatgagcgcatcaccgagctcatggggtatgagcccgaagagctcctcggccgtagtatctacgagtattatcacgccctagattctgaccatttaacaaagacacaccacgacatgtttacaaaaggccaggtgacaaccggacagtatcggatgcttgctaagagaggtggctatgtttgggtggagactcaggccactgtgatatacaatactaaaaatagtcagccgcagtgcatcgtctgtgtgaactacgtggtatctggtattatacagcatgatctaatcttttccctgcagcaaactgagtgtgtcctgaagccagtggaatccagcgatatgaagatgacgcagctgtttacaaaagtagagagtgaggatacgagctcgctgtttgacaagctcaagaaagaacccgatgccctgacgttgctggcccctgcagccggagacaccattatcagcctggactttggatctaacgacacagagactgatgatcaacagttagaggaggtaccactgtacaatgatgttatgctgcccagccctaacgagaagctacagaacatcaatctggcgatgtcccccctgcctacagcagagacccctaagccactgcgtagcagcgccgatccagccctgaatcaggaagttgctttaaagcttgaaccaaaccctgaaagcctggaactctctttcactatgccccagattcaggatcagacaccatcaccgtctgatgggagcacccggcagagcagtccagaacccaactccccatccgaatactgtttctacgtggactctgatatggtaaatgaatttaagctcgaactcgtggaaaaacttttcgcagaagataccgaggccaagaatccttttagcacacaggacacagatctggatctggagatgttggctccgtatattccaatggacgatgactttcagctccgctcttttgaccagcttagccctttagaatcgtccagtgccagtccagagtcggcatctccccaatccactgtgaccgtgttccagcagacccagatacaagaaccaactgctaacgccaccacaaccactgccactacggatgaactgaaaacagtgacaaaagatcgtatggaagacattaagattctgatcgcgtcaccatcccctacgcacattcataaggagaccaccagtgccaccagcagtccctacagagacacccaatctcggaccgctagcccgaatagagctgggaaaggagtgatcgagcaaactgaaaagagtcatccccgatctcctaacgtgctctccgtggcgttgagccagcgcaccaccgtccccgaagaggagctgaatccgaagatcttggccctccagaatgcccagcggaagcgtaagatggaacatgatggctctctgttccaggccgtcggaatcggcaccttgctgcagcaacccgacgatcacgccgccaccacatccctatcttggaagagagtgaagggctgtaaaagttcagagcagaacggaatggagcagaaaacgatcatactgattccctctgatctcgcctgcagactgcttggacagagcatggacgagtcagggctcccccagctgacaagctacgattgtgaagtgaacgctcccattcagggctcccggaacctgttgcagggcgaggaacttctgagagcgctggaccaggtaaattag

SEQ ID NO: 15517 - DNA, 1734 bp, synthetic construct
  misc_feature 1..1734: note = Description of Artificial Sequence: Synthetic coding sequence
  source 1..1734: mol_type = other DNA
atgaaattcagctactgcgatgaaagaattaccgagttaatggggtacgaacctgaagaacttcttggacgctcgatctacgaatattatcacgctctggattctgatcatctgaccaagacccatcacgacatgtttaccaaggggcaagtcactaccggccaataccgtatgctcgcaaaacggggagggtacgtttgggttgagacccaggccacggtcatatataacacaaagaacagccagcctcagtgtatcgtgtgcgtgaattacgtcgtgtccggcattattcagcatgatttaatcttctctttgcagcaaaccgaatgcgtgctgaaaccagtggaatctagcgatatgaagatgacccagttatttacaaaggtggaaagtgaagatactagttccttatttgataagctaaagaaggaaccggatgccttgacacttctcgctcccgcagccggggacactattatcagcctggattttggctctaacgacaccgaaactgatgaccagcagctagaggaggtgcctttgtataacgatgttatgttacccagtcctaatgagaagttgcaaaatattaatcttgccatgagcccccttccaactgcggagacaccaaagcccctccggtcaagcgccgatccagcactcaaccaggaggtcgctttaaagctcgagcctaatcctgagtccctggaactctccttcactatgcctcagattcaggaccaaacaccaagcccttcggacggatctacccgacagtcctctccagagcctaacagtccttccgaatattgtttttacgtagactcagacatggtgaacgaattcaagcttgagctggtggagaaattgtttgcagaggatactgaggctaaaaaccctttttccacccaagacacagacctggatctggagatgctggctccttacattccaatggacgacgactttcagcttcgttcattcgatcaactcagcccattggaaagtagtagcgccagtccagaaagcgcatcaccccagtccacagtcactgtgttccagcaaacacagatccaagaacctaccgccaatgccaccaccacaacggccactaccgatgagttgaagaccgtcaccaaagacaggatggaagacatcaagatcctcatagccagtccctctcccacgcacattcacaaagagaccacgtcagccacctccagtccctatcgcgacacacagtccagaactgccagtcccaatagagcaggaaagggtgtcattgagcagacggaaaaaagccatccacggagccctaacgtcctgagtgttgcactctcacagcgcaccactgtcccagaggaggagctcaatcccaagatccttgctctacaaaatgcccagcggaaaagaaaaatggagcatgatggcagcctgtttcaagccgtgggcataggaacgttgctgcagcaacctgacgaccacgcggctactaccagtctgtcttggaaacgagtgaaggggtgtaagagctcagagcaaaacggcatggagcaaaaaacaataatccttatcccctccgatctggcctgtaggctgcttgggcaatctatggacgaaagcgggctgccacaactgacaagctatgattgcgaagttaacgcccccattcagggctctcgcaacctgctccagggtgaggagctgctgcgcgcgctggaccaggtcaattag

SEQ ID NO: 15518 - DNA, 2304 bp, synthetic construct
  misc_feature 1..2304: note = Description of Artificial Sequence: Synthetic coding sequence
  source 1..2304: mol_type = other DNA
atgcgactgacgatttcgtacctcagggtccgaaagctgctagatgccggcgatctggacattgaagatgacatgaaagcacagatgaattgcttctatttgaaggctctcgatggatttgtgatggtgctcactgacgatggagacatgatatatatctcggacaacgtgaataaatacatgggactgactcagttcgaattgactggacattctgtcttcgactttacacacccctgcgaccatgaagagatgagggaaatgctgacacacaggaacggcctggtaaagaagggcaaggaacagaacactcagcggtctttctttctccggatgaagtgtacgctgaccagcaggggtagaactatgaatatcaagtccgctacatggaaggtcctccactgcactggccacatccacgtatacgacacgaactccaaccaaccacagtgtgggtataagaagcccccaatgacatgtctcgtactaatctgtgaacctataccacacccatcaaacattgaaattccccttgactcaaagacctttctatctaggcactccctagacatgaagttttcctactgcgacgagagaatcacagagctgatgggctacgagccagaggagctgctaggtcgctctatatatgagtactaccacgcactggatagtgaccacttaacaaagacacatcacgatatgttcactaagggtcaagtgactaccggtcagtatagaatgctggcaaagaggggaggctacgtgtgggtggaaactcaggcaaccgtgatctataataccaagaactctcagccacagtgcatcgtatgcgtaaattatgtagtgtcaggtataatccagcacgacttgatcttctctctccagcaaacagagtgcgtgttgaagcccgtagagtcctctgatatgaagatgacgcaacttttcactaaggtggaatccgaggacaccagctctctgtttgacaagttgaagaaggaaccggacgcacttacccttttggcccccgctgcgggcgacacgattatttctctcgacttcgggagtaacgatacagagaccgacgaccagcaactcgaggaggtgccactgtataatgacgttatgcttccaagtcctaacgagaaactgcaaaacattaacttggccatgtctcccctgccaacagccgagaccccaaaaccactgcgcagcagcgccgatcccgctctgaaccaggaggtggccttaaagctggaaccgaaccctgagtccctggagctgtcttttaccatgccccagattcaggaccagaccccatcgccttctgacggctccacgagacagagcagccccgaaccaaatagtccgagtgaatattgcttctacgtggactcagacatggttaatgaatttaagctggaattagtagaaaaactgttcgccgaagacacagaggctaagaatccattctctacacaggacaccgacctggaccttgaaatgctggccccctacatccctatggacgacgatttccagctgaggtcgtttgaccagctatccccccttgagagttcaagcgcgtcaccggagagcgcgagtcctcagtctaccgtgaccgtcttccagcaaacccaaattcaggagccaactgcaaatgccactacaactactgctactaccgatgagctcaagactgtcactaaagaccggatggaggacatcaagatcttgattgcctccccaagccctacacacatacataaggagacaacctccgctacatcttcaccatatagagatactcagtcgagaaccgccagtccgaatcgcgccggaaaaggagtaattgaacagactgaaaagtctcaccctcgatctccaaacgtgcttagcgtggcgctttcgcagcgtaccacggtgcctgaagaggagctgaacccaaagattctagcactgcagaacgcacagcgcaagcgtaagatggagcacgatggctcactattccaagccgtggggatcgggacactcctgcagcagccagacgaccacgccgcaaccacctctctttcatggaagcgggtgaagggctgtaagagttctgaacagaatggcatggaacagaaaacaattatcttgatcccttctgacctggcctgtcgccttctgggccagtccatggatgagagcggccttccccaactcacatcgtatgattgcgaagtgaatgctccgattcaggggagcagaaaccttctccagggcgaggagctactacgcgccttggaccaggttaattag

SEQ ID NO: 15519 - DNA, 1296 bp, synthetic construct
  misc_feature 1..1296: note = Description of Artificial Sequence: Synthetic coding sequence
  source 1..1296: mol_type = other DNA
atggaggatatccagaccaacgcagagctgaagagtacacaggaacagagtgtgccggccgaatcagcagctgtgttgaacgattattctcttacaaagtcacacgaaatggagaatgtggacagcggagagggaccggcaaacgaggacgaagatattggcgacgattcgatgaaagtgaaggatgagtacagcgaacgggacgagaatgtactcaagtccgaaccaatgggtaacgcggaagaacccgaaatcccctatagctattcaagggagtataacgaatatgaaaacattaaactcgagcgacatgtggtgtcctttgattcgtcgcgcccaactagtggaaaaatgaattgtgatgtgtgcggtctgtcttgcatctcatttaatgtgcttatggtacacaagcgctcacatacaggagaacggccctttcagtgcaatcaatgcggcgcctcttttactcaaaaaggcaacctgctgaggcacattaagctgcacacaggggaaaagccctttaaatgccacctgtgcaattatgcatgtcaaagaagagatgctttgaccgggcatcttcgaacacatagtggcgaaaaacggcactgttttgatgtgaattataacagttcttatatgtatgagaaggaatctgagttaatccagacccgaatgatggatcaggctataaataacgccatctcctatctgggcgcagaggcactaagacccctcgtccagacgccccccgcgccgacttctgagatggtgcctgtgatctctagcatgtatcccatcgccctcactagagcagaaatgtcaaatggtgcccctcaggagttggagaaaaagtctatccacctgccagaaaaaagcgtaccaagcgaaaggggtctgtccccgaacaattcagggcatgatagcaccgacacagatagcaaccatgaagaaagacagaaccacatctatcagcagaaccacatggtcctctctcgggctcgcaacgggatgcccctcttgaaggaagtgcccagaagttatgagttacttaaaccaccacccatctgccccagagacagcgtcaaggtcattaataaggagggggaagtgatggatgtttacaggtgtgaccattgtcgcgtgttattcctggattatgtcatgttcactattcacatgggttgccacgggtttagggaccccttcgaatgcaacatgtgtggctacagaagtcacgaccggtacgaattctcttcacacatcgcgagaggtgaacatagggcactcttgaagtag

SEQ ID NO: 15520 - DNA, 1245 bp, synthetic construct
  misc_feature 1..1245: note = Description of Artificial Sequence: Synthetic coding sequence
  source 1..1245: mol_type = other DNA
atggaggatatacaaaccaacgctgagcttaaatccacccaagagcagagcgtcccagctgagagcgcagccgtgctgaacgattatagtttgaccaaatcacacgagatggagaacgtcgatagtggcgaaggaccagcaaacgaggacgaggatataggcgacgactctatgaaggtaaaggatgagtatagcgaacgcgacgagaacgtcctcaagtcagaaccaatgggtaatgctgaggaacctgaaatcccttactcttatagtcgggaatataatgaatacgaaaacatcaagttggagcggcacgtggtttcctttgatagtagtaggccaactagtggcaaaatgaactgtgacgtatgtgggttgtcgtgtattagttttaacgtgctgatggtgcataagaggagtcacacagcctctgctgaagctagacacattaaagccgaaatgggatcagagcgggccctggtcctggacaggttggcctctaacgttgcaaagcgtaaaagtagcatgcctcagaagtttattggtgagaagagacactgtttcgacgtgaattacaacagctcgtatatgtatgagaaggagagcgagctcatccagacccggatgatggaccaggccattaataacgccattagctatctaggggcagaagccctccgcccgctggtgcaaactcctcctgctcctaccagcgagatggtcccagtcatcagctccatgtacccgatcgcattaacccgggctgagatgagcaatggggcacctcaggagctcgagaaaaagtcaatccatctaccagagaagagcgtgccatctgaaagagggctgtccccaaataattccgggcacgacagcaccgataccgacagcaatcacgaagaacgtcagaaccacatatatcagcagaaccatatggtgctctctcgtgccaggaatgggatgccactcctcaaagaagtaccaagaagttatgagcttctgaagcctcccccaatctgccctcgcgattccgtgaaggttattaataaagaaggagaagtgatggatgtctaccggtgcgaccattgccgcgtcctcttccttgactacgtgatgtttacaattcatatggggtgtcacggcttccgggatcctttcgaatgtaatatgtgcgggtatcgtagtcatgataggtatgagttctcatcccatatagcccgcggcgaacacagggctttgttgaagtag

SEQ ID NO: 15521 - DNA, 1413 bp, synthetic construct
  misc_feature 1..1413: note = Description of Artificial Sequence: Synthetic coding sequence
  source 1..1413: mol_type = other DNA
atggaagatattcagactaacgcggagctaaaatccacacaggaacagtccgttcccgctgaaagcgcggccgtcctgaacgactacagcctcactaaaagccatgaaatggaaaatgtggactccggagaggggcccgcaaacgaagatgaggacatcggggacgattccatgaaagtgaaggatgaatacagcgagcgggacgaaaatgtcctcaagtccgaacccatggggaatgccgaggagcccgaaattccatatagctactctcgcgaatataacgaatacgagaatatcaaattggaacggcacgttgttagcttcgacagctcccggcccacaagtggcaagatgaattgtgacgtttgcggcctcagttgtatttccttcaacgtgttgatggtccacaagcgttcgcataccggagaaagacccttccagtgtaatcagtgcggggcatcctttacgcagaaagggaatttgcttaggcacatcaaactccacactggggaaaagccctttaaatgtcacctgtgtaattacgcatgccaaaggcgggatgcactaacaggacatctcaggacccacagtgtggaaaagccttataagtgtgagttctgtgggaggtcttacaagcagcggtcgtcactagaagagcacaaagagagatgtcggactttcctccagagtactgaccccggtgacacaggggagaaacgacattgcttcgacgtcaattataatagctcatatatgtatgagaaagagagcgagctgatccagacaagaatgatggaccaggcaattaacaatgctatctcctacttgggtgcagaagctctccgtccgctcgtacagacaccgccagcccctacatccgaaatggtgcccgttattagcagtatgtatccaattgcgctcacaagggccgagatgtcaaatggtgcgccacaagaactggaaaagaaaagcattcacttacccgagaaatctgtgcctagcgaaaggggcctgtcccccaacaactccgggcacgacagcacagatacggactcgaatcacgaggagagacagaatcatatctaccagcagaatcatatggtcctgtcccgggctcgtaatggcatgcccctcctaaaagaggtcccgaggtcatacgagcttctcaaacccccccctatctgccctcgcgacagtgtcaaagttatcaacaaggagggcgaggtgatggatgtctacagatgcgatcattgccgtgtgttgtttctggactatgtgatgtttaccatccatatgggttgccatggcttccgagaccctttcgagtgcaacatgtgcgggtatcgctctcacgatcgttatgaattttctagtcatattgcgagaggcgagcacagggcactgcttaagtag

SEQ ID NO: 15522 - DNA, 1413 bp, synthetic construct
  misc_feature 1..1413: note = Description of Artificial Sequence: Synthetic coding sequence
  source 1..1413: mol_type = other DNA
atggaagatatccagacaaacgccgaacttaaatcaacacaggagcaaagcgtgccagccgagtcagccgccgtgctgaacgactattccctgaccaagagtcatgaaatggagaatgtagactccggggaggggcccgctaatgaagacgaggacatcggggatgacagcatgaaggttaaagatgaatactccgagcgggatgaaaacgtcctgaagagtgagcccatggggaatgctgaagagccagaaatcccctatagttacagccgcgaatacaatgaatacgaaaatatcaagctggagagacacgtggttagctttgattcttccagacctacatccggtaagatgaattgtgacgtgtgcggcttgagttgtattagcttcaacgtgctcatggttcataagagaagccataccggcgagcgcccattccagtgcaaccagtgcggagcttcgttcacccagaagggcaatctcctgaggcacatcaaattacataccggcgagaaacctttcaagtgtcatttatgcaattatgcctgccagaggagggatgccctcacaggacacttgcgaacccactctgcctccgccgaagcccgacacattaaagctgagatggggagtgaacgcgccttagtacttgaccggctggcctcaaacgtagcaaagagaaagagcagcatgcctcaaaagtttatcggcgaaaagaggcattgctttgatgtgaattacaattccagctacatgtacgaaaaagaatctgagctgattcagacacggatgatggatcaggccattaacaatgctatctcttatctgggcgcggaggccctgaggcccttagtgcagacccctcccgcccccactagcgagatggtccctgttatctcttctatgtatcctatcgcgctaactcgggctgagatgtctaatggggcaccacaagaactggaaaagaagtcaattcacctcccggaaaaaagtgtgccatcagagaggggcctgtctcccaataatagcggccatgatagcactgacacggacagcaatcatgaggaacggcagaaccacatttaccaacaaaatcacatggttctgtccagagcacgaaatggcatgccactgctcaaggaagtaccgcgctcctacgagctcttgaagccccctccaatatgcccccgggattctgtaaaagttattaacaaagagggcgaagttatggacgtttatcgctgtgatcattgcagagttctcttccttgattatgtcatgtttaccatccatatgggatgccacggttttagggacccatttgagtgcaatatgtgcgggtataggagccatgaccgatacgagttctcatcacacatcgcaaggggcgagcatagggctctcctaaagtag

SEQ ID NO: 15523 - DNA, 1101 bp, synthetic construct
  misc_feature 1..1101: note = Description of Artificial Sequence: Synthetic coding sequence
  source 1..1101: mol_type = other DNA
atggaggacatccaaacgaatgccgaactcaaatctactcaggaacaaagcgttcccgccgagtccgctgcagtacttaatgactattctttgactaaatcacatgagatggagaacgtggactcaggagaggggccggccaacgaagacgaggacattggcgtggagaagccctacaaatgtgagttttgcggtaggtcatataagcagagatcatctctcgaggagcacaaggaacggtgtcgaacctttctccagtccacggatccaggggatacggcctccgcagaggcccgtcatattaaggccgaaatgggttccgaaagggcgttagtattggacaggctggcttccaatgtcgccaagagaaagtcctccatgccccagaagtttatcggagagaagaggcactgcttcgatgtgaactataacagttcatacatgtatgaaaaggagtccgaactgatccagacaagaatgatggatcaagcaatcaataatgccattagctacctgggcgccgaagcactgcgcccgttggtgcaaactccacccgcacctacttccgagatggttcccgtgatatcctcaatgtatcctattgcattgacgagggcagaaatgagtaacggcgccccgcaggaactggaaaaaaagagcattcacctgccagagaagagtgtgcccagcgagcgagggctatctccgaacaacagcggccacgacagcacggacacagactctaaccacgaggaacggcagaatcacatatatcagcagaatcatatggtcctgtccagggccaggaacggaatgccgttacttaaggaggttcctagaagctacgaacttctgaaaccccctccaatttgcccgcgggattctgtcaaggtgattaacaaggaaggggaagtcatggatgtgtaccgctgcgaccactgtcgcgttctgtttctcgattatgtgatgttcactatccatatgggctgtcacgggtttcgggatccttttgagtgcaacatgtgtggataccgctcccacgaccgatatgaattctcaagccacatcgcgcggggggaacacagggccctgctgaagtag

SEQ ID NO: 15524 - DNA, 1128 bp, synthetic construct
  misc_feature 1..1128: note = Description of Artificial Sequence: Synthetic coding sequence
  source 1..1128: mol_type = other DNA
atggaggacatccagacgaatgctgagctgaagtcaacacaggagcagtctgtgccagcagaatcagccgctgtactgaatgactacagtctgaccaagtctcatgaaatggagaatgtcgattccggcgaggggcccgcgaatgaggatgaagacattggggatgattccatgaaggtcaaagatgagtactcagaacgcgacgagaacgtcctgaagagcgagcctatgggtaacgccgaagaaccagagattccatatagctactcacgcgaatacaatgagtacgagaatataaaattggaaagacacgttgtgagctttgattcctccagacccacatcaggaaaaatgaactgcgatgtatgtggactgagttgcatcagttttaatgtgctgatggtgcataaaaggtctcataccggtgagaagagacactgcttcgacgtcaactataactccagctacatgtatgagaaagaaagcgagctcatccagacacggatgatggatcaggcaattaacaacgctatcagctacctgggtgccgaggccctgcgaccacttgtgcagacccctcccgcaccgacatcggaaatggtacctgtgatcagttcaatgtatccaatcgctctgacgcgtgctgaaatgtccaatggggctccccaggagttagagaagaaaagcattcacttacctgagaagtctgtcccctctgagaggggcctttcaccaaataacagcggccacgatagcaccgatacagactccaaccacgaggagcggcagaaccacatataccaacagaatcatatggttctcagccgggcaagaaacggtatgcccctgctgaaggaggtgccccgatcatacgaattgctgaagccaccccccatttgtcctcgagactccgtcaaagtcattaataaagagggcgaagtcatggacgtctaccgatgtgatcattgccgcgtgctgttcctcgattacgtgatgtttacaatccacatgggatgtcacggtttcagggatccttttgagtgtaatatgtgcgggtaccgctcccacgacaggtacgaattcagttcacacattgcccgaggggagcacagagccttgttgaaatag

SEQ ID NO: 15525 - DNA, 867 bp, synthetic construct
  misc_feature 1..867: note = Description of Artificial Sequence: Synthetic coding sequence
  source 1..867: mol_type = other DNA
atggaagacattcagaccaatgctgaattaaagtctacgcaggaacagagcgttcctgccgaatccgctgcggttctgaatgactattctttaaccaaatcccatgagatggagaacgtggattccggggagggccctgccaacgaagatgaggatattgggggagagaagagacactgtttcgacgtgaattataattcatcttacatgtacgagaaggaaagcgagctcatacagacacggatgatggatcaggctatcaataacgcaataagttacttgggcgccgaagcgctgaggcctctcgtccagaccccaccagcaccgacgtccgaaatggtgcccgtcattagtagcatgtatcctatagccctcaccagggctgaaatgagcaacggcgcaccgcaggagcttgagaaaaagagcatccatctgcctgagaaatccgttccatcagagcggggtctgtcaccaaacaacagcggccatgactccaccgacactgactcaaatcatgaagagcgccagaaccatatctaccagcaaaaccatatggtgctgagccgggctagaaacgggatgcccctgctgaaggaggttcctcgctcatacgagctgttaaagcctcctcctatttgccctagggattccgtaaaagtcattaacaaagagggcgaggtgatggacgtctatcgatgcgatcattgcagagtgctattcctggattatgttatgttcactatccacatgggctgtcatggatttagggacccgttcgagtgcaacatgtgtgggtaccggagccatgaccggtatgagttttctagccatatcgccagaggcgagcatcgggcactgctcaagtag

SEQ ID NO: 15526 - DNA, 1269 bp, synthetic construct
  misc_feature 1..1269: note = Description of Artificial Sequence: Synthetic coding sequence
  source 1..1269: mol_type = other DNA
atggaagatattcaaacaaacgcagaactgaagtctacccaagaacagtccgtgcctgctgaaagtgcggcagtgctaaacgactactctttaactaaatcacatgaaatggaaaacgtagatagcggggaggggccagccaacgaagacgaagatataggtggggaacgacctttccagtgcaatcagtgcggcgcgtccttcactcaaaaagggaacctcctgaggcatattaagctgcacaccggcgagaaaccctttaaatgtcatctgtgtaactatgcatgccagcggagggatgctctgaccgggcacctgcgcacacactctgttgaaaaaccttacaagtgcgagttctgtggccggtcctacaagcagcggagctccttggaggagcacaaagaaaggtgcaggactttcctgcaaagtacggatcccggcgatacagcatcagctgaggcgcgccacataaaggccgagatgggctcagagcgggcgctggtactggaccggttggcgagcaatgtggcaaaaagaaagagttcaatgccacagaaattcattggggagaaaagacactgtttcgatgtgaactacaattctagctatatgtacgaaaaggagagcgagttgatccagacgcgcatgatggatcaagccatcaacaacgccatatcctatctgggcgctgaggcgctgcgacctctggtgcagactcctccggccccgacttcagaaatggtacctgtgataagttctatgtaccctatcgcactgacccgcgcagagatgtctaatggtgccccccaggagctggagaaaaagagtatccatctgccagagaaaagtgtgccatccgagaggggcttatcaccaaataattctggacacgattccaccgacaccgactctaatcacgaagaaagacaaaatcacatctaccagcaaaaccacatggtgctttcacgagctagaaatgggatgcccctcttgaaagaagtgcccaggtcgtatgagttgctgaaacccccgcctatctgccctcgcgattccgtgaaggttataaataaggagggggaagtgatggatgtctaccgctgcgaccattgcagggtactctttcttgattacgttatgtttacaattcacatgggttgtcacgggttcagggaccccttcgaatgcaacatgtgcggctatcgcagtcacgataggtatgaatttagttcccacatcgccaggggcgagcacagagcacttctgaaatag

SEQ ID NO: 15527 - DNA, 984 bp, synthetic construct
  misc_feature 1..984: note = Description of Artificial Sequence: Synthetic coding sequence
  source 1..984: mol_type = other DNA
atggaagacattcaaaccaacgccgaacttaagtcgacacaggaacagtccgtacccgctgagagcgccgctgtccttaatgattactcccttacaaagtcccatgagatggaaaacgtcgactcgggggaagggcctgccaatgaggacgaggacatcggggccagcgccgaagccaggcatatcaaagcagaaatgggatctgaaagagctttggtgttagacaggttggctagcaacgttgcaaaacgcaaatcctctatgccccagaaattcatcggggagaagcggcattgtttcgacgtgaattataatagcagctatatgtatgaaaaggaaagcgaactcatccagactcggatgatggaccaggcaattaataatgcgatttcctatttaggtgctgaggctctcaggcctctcgttcaaacacctccggcgcccacaagtgaaatggtgcccgtgatttcatccatgtatcctattgcacttacccgcgccgagatgtctaatggagcacctcaagagctggaaaaaaaatccatccatctccctgaaaagtctgtgcctagtgagcgcggactctcacctaataattccggccacgacagtacagacaccgattctaaccatgaagaaagacagaatcatatatatcaacagaaccatatggtgctcagccgggccaggaatgggatgccactgcttaaggaagtgcccagaagctatgagctgctcaagcccccaccaatctgccctcgcgactcagtcaaagtgatcaacaaagagggcgaggtgatggacgtttaccggtgtgaccactgtcgggtactgttcctggactatgtgatgttcactatccatatgggatgccatgggttcagagacccattcgaatgcaacatgtgcggatatcgtagccacgacaggtatgaattttccagtcacattgcccgaggggagcaccgggctctgctgaaatag

SEQ ID NO: 15528 - DNA, 1392 bp, synthetic construct
  misc_feature 1..1392: note = Description of Artificial Sequence: Synthetic coding sequence
  source 1..1392: mol_type = other DNA
tgacaggagcaaagcgtacctgcagatgacagcatgaaggtgaaggacgagtatagtgaaagagatgaaaacgtcttaaagagcgaacccatgggcaatgccgaagaaccagagattccgtacagctattcaagagagtataatgagtatgagaatatcaagctggaacgacacgtagtctccttcgatagtagccgaccaacctctgggaagatgaattgtgacgtttgtggtctgtcctgtattagtttcaatgtcctgatggtgcataaacgaagccacaccggcgagcgtccattccaatgcaaccagtgcggagctagttttacacaaaaggggaacctcttgcgccacataaagcttcatacaggggagaagccattcaaatgccacctgtgtaactatgcctgtcagagaagggacgccttgacaggacatctgcggacccactccgtcgagaaaccctataaatgcgaattctgcgggaggtcttacaaacagagaagtagtctagaggagcacaaggaacgatgcagaacattcctgcaatcaacagaccccggggacacagcctcggctgaagcccggcatattaaggccgagatggggtctgaaagagcattagtgctggatcgcttagcatctaatgtggctaagcgtaagtcttctatgccccagaagttcattggagaaaagcgccattgtttcgacgtaaattacaattcctcatatatgtatgagaaggaatccgaactaattcaaaccaggatgatggaccaggctattaataacgctatctcatatctgggagcagaagcgctcagaccactagttcagacgcccccggccccaacatcagagatggtgccagttatttcctccatgtaccccattgccctgacgcgtgccgaaatgagtaacggagcccctcaggaactggagaagaagtccattcacctgcccgagaaatctgtgccctctgagagaggactcagcccaaataacagcggccatgacagcactgacacagactctaaccacgaagaacgccagaatcacatttaccaacagaatcatatggtgttaagcagggcccggaatggcatgccgctgctgaaggaagtcccacggagctatgagttgctcaagcctccccccatttgtccacgcgactcagtgaaggtaattaataaagagggcgaggtcatggatgtatatcggtgcgatcattgtcgggtgctcttcctggactacgtgatgtttactatccacatgggctgccacggtttccgggatcccttcgagtgtaatatgtgcggttatagatcacacgaccggtacgaattttcctcacatatcgcacgcggcgagcatagagctctgctcaagtag

SEQ ID NO: 15529 - DNA, 1275 bp, synthetic construct
  misc_feature 1..1275: note = Description of Artificial Sequence: Synthetic coding sequence
  source 1..1275: mol_type = other DNA
tagcaggagcagtccgttcccgcagacgacagcatgaaggtgaaagacgaatacagtgaaagagatgaaaacgtgctaaaatcagaacctatgggtaatgcggaagaacccgagatcccatacagctactccagggagtataatgagtatgagaacattaaattggagaggcacgtggtgagcttcgacagtagccgtccaacaagcggaaagatgaattgtgacgtgtgcgggctgagctgcatcagtttcaacgtactgatggtgcataagagatcccataccggagagagaccgtttcagtgcaatcagtgcggcgcatccttcacccagaaaggaaatctactcaggcacatcaagctgcacacaggagagaagcctttcaagtgccacctctgtaactatgcctgccagagaagagatgcccttacgggacatctcaggacgcacagtgccagcgctgaagctagacacatcaaagccgagatgggctccgaacgtgccctggttctggaccgactcgcttccaatgtagccaagagaaagagttccatgccacagaagttcatcggggagaagcgtcactgtttcgatgtgaactataattctagttacatgtacgaaaaggaatctgagctcatccaaactcgaatgatggatcaggctattaacaacgccatttcttacctgggtgctgaggctttacgtcccctagttcaaacaccgcctgcccccaccagcgagatggtgccagtcatcagtagcatgtaccccatcgccctgacgagggcagaaatgagcaatggagctcctcaggaactggaaaaaaagtccatccatctgcctgagaaaagcgttcctagtgaaagagggctgagccctaacaattccgggcacgacagcaccgacacagattcaaatcacgaagagcggcagaaccacatctaccagcagaatcatatggtgctgtctagggccagaaacggaatgcctctgctaaaagaagttcctcgctcttacgagctgcttaagcctcccccaatttgtccaagggactccgtaaaagtgatcaataaggaaggagaagtgatggacgtgtataggtgcgaccattgtcgcgtgttgtttctggattacgtcatgttcaccatacacatgggctgtcacggcttccgcgacccatttgagtgcaacatgtgcgggtatcgaagtcacgatagatacgagttctctagccacatagctaggggcgagcatagagccctgctgaaatag

SEQ ID NO: 15530 - DNA, 1362 bp, synthetic construct
  misc_feature 1..1362: note = Description of Artificial Sequence: Synthetic coding sequence
  source 1..1362: mol_type = other DNA
atggaagatatccagactaatgcggagttaaagagcacccaggagcaatctgttcccgcagaaagtgcagctgttctgaacgactattctctcaccaaaagtcacgaaatggaaaacgttgactctggcgaagggcctgcaaatgaggacgaagatatcggcgacgattcgatgaaggtaaaagacgagtactcggagcgcgacgaaaatgttcttaaatccgaaccgatggggaatgctgaagaacctgagattccgtacagttacagccgggagtacaatgaatatgagaatattaagctagagagacacgtggtctctttcgatagctcacgtcccactagtgggaagatgaactgcgatgtctgcggactgagttgcatttcttttaacgtgctgatggttcacaagcggtcccacaccgtcgagaaaccctacaagtgcgaattttgtggcagaagttacaagcagagatcatctttagaagagcataaagagagatgcaggacctttctccaaagtacagaccctggagatacagccagcgcagaggcccggcatatcaaggctgagatgggcagtgagcgggccctcgttctggacagacttgcctccaatgtggcaaaacggaagtcgtccatgcctcagaaatttatcggggagaaaaggcactgcttcgacgtcaactataattctagctacatgtatgaaaaagagtctgaacttattcagactaggatgatggatcaggccattaacaacgcaatttcttacctgggcgccgaagccttgagacccttggtccaaacacctcccgcaccaacgtccgagatggttccagtgatctcctccatgtaccccattgctttaacgagagctgagatgtccaatggcgccccacaggaactggaaaagaaaagtatccacctgccagaaaagagtgtccccagtgagagaggtctgagccctaataattccggccatgactccacggacactgactctaatcacgaggaaaggcaaaaccacatctaccaacagaatcatatggtgctgtccagagcacgtaacgggatgcctttgctgaaagaggtgcctcgttcctacgagctgcttaagccacctccaatttgcccccgggattctgttaaagtgatcaataaggaaggtgaagtgatggatgtctaccgatgcgaccactgtagggtgctttttttggattatgttatgtttaccattcacatgggttgccacggtttcagggaccccttcgagtgtaacatgtgcggctacaggagtcatgatcgctacgagttctcttcccacattgcccggggcgagcacagagctctcctcaagtag

SEQ ID NO: 15531 - DNA, 1530 bp, synthetic construct
  misc_feature 1..1530: note = Description of Artificial Sequence: Synthetic coding sequence
  source 1..1530: mol_type = other DNA
atggaggatatacagactaacgctgaactgaagtccacacaggaacagtccgtccctgcggagtccgcagccgtgctgaatgattatagcctgacaaagagccacgaaatggaaaacgtcgattccggcgagggccccgcaaatgaggatgaggacatcggcgacgatagtatgaaagtgaaagatgagtatagcgagcgcgatgagaacgtgttgaagtccgaacctatggggaacgccgaggaaccagaaataccatactcatatagcagggagtacaatgaatacgagaatatcaagttagagaggcacgtagtctcatttgactcaagcagaccaacctccggcaaaatgaactgcgatgtctgcggcttgtcctgtatttcattcaatgttctgatggtccataagagatcacacaccggggaaagacctttccaatgtaaccaatgtggggcctcgttcacacagaaaggcaacctccttcgccacatcaaactgcacaccggggagaagccattcaaatgccacctatgcaactatgcctgtcagcggagggatgctctgacgggccatctacggacccacagcgtcgaaaaaccctataagtgcgagttctgtggtaggtcttacaagcagaggtccagcctggaagagcataaggagcggtgtcggactttcctccagtccacagacccaggtgacactgcatcggctgaggcgaggcacattaaagcagagatgggctctgagcgagccttagtactcgatagattagcctcgaacgtggcaaagcggaagtccagtatgccacagaagttcatcggagagaaacgccattgttttgacgtgaattacaatagctcatacatgtatgaaaaggagagcgagctgattcagacccggatgatggaccaggccatcaataatgcaatcagttaccttggtgctgaggcccttcgtcccctggtgcaaactcctcccgcacccacctccgaaatggtccccgtgatttcctccatgtatcccattgccctcacacgagcagagatgtcaaacggtgcgccccaagaactcgaaaagaaatcaatccacctgccagagaagtccgttcccagtgaacgtgggctttcgcccaacaactcgggccacgactctactgacacagacagcaaccatgaagagagacagaaccatatttatcagcagaaccatatggtgctgtccagagctaggaacgggatgcctttactaaaagaggtaccacgctcctatgagcttcttaagccacccccaatctgcccacgggacagcgtcaaggtgatcaataaggagggcgaggtgatggacgtataccgatgcgaccattgtagggtcctgtttctagattatgtgatgtttaccatccatatgggatgtcacggtttcagagatccattcgaatgtaacatgtgcggataccgctcccacgacagatatgagtttagcagtcacatagcccggggggaacaccgggcccttctgaagtag

SEQ ID NO: 15532 - DNA, 1428 bp, synthetic construct
  misc_feature 1..1428: note = Description of Artificial Sequence: Synthetic coding sequence
  source 1..1428: mol_type = other DNA
atggaagatatccagaccaatgcagagctgaaatccacccaggaacagtctgtccctgctgatgattctatgaaagttaaagacgaatacagcgaacgcgacgagaacgtcctgaaaagcgaaccgatgggcaacgcagaggaaccagaaattccttacagctattctcgcgagtacaatgaatatgagaacattaaactcgagcgccacgtggtctccttcgattccagccggcccacaagcggaaaaatgaactgtgacgtctgtggcctttcatgcatttcctttaacgtcctcatggtgcacaaacggagccacaccggagaaagaccgttccaatgcaatcagtgcggcgcctccttcacacagaagggcaatttgcttcggcacataaagctccacaccggcgagaagccatttaagtgccacctttgcaactatgcctgtcaaagacgcgatgcattgaccggacatctgcggacacattctgtcgagaagccttataagtgtgagttttgtggccgctcatacaagcagcgcagctctctggaggaacacaaagagaggtgcaggacgttcctccagtcgactgaccctggcgacaccgcttctgcagaggctcgccacatcaaagccgaaatgggatctgaacgtgccctcgttcttgatagactggccagtaacgtcgcgaaacgcaaatccagcatgccccaaaagttcatcggagagaaacggcactgcttcgatgtgaactacaacagctcctacatgtatgagaaggaaagcgagttaatccagactcgcatgatggaccaggcgattaataatgcaatcagttacctgggggctgaggcgttgcgtccgctcgtacagacgcctccggcaccaacctctgaaatggttcccgtaatttcatcaatgtacccaatcgctctaacacgggccgagatgtccaatggagcccctcaggagctggaaaaaaagagtatacatctgccagaaaagagcgtcccctcagaaagagggctgagccccaacaacagcggccacgattccacagatactgacagcaatcacgaagaacgacagaatcatatttatcagcaaaatcatatggtcttgtctagagcaaggaatggtatgcccttactgaaggaagttcctcgcagctatgagcttctgaaacccccaccgatctgccctagggatagcgtgaaggtaattaacaaagaaggcgaagtgatggatgtctacagatgtgaccactgtcgcgtgttgtttctggactacgttatgttcaccatccatatgggctgccatggattccgggaccccttcgagtgtaacatgtgcggctaccgttcccacgacaggtacgagtttagttctcacatcgcccggggggaacacagggccctgctgaagtag

SEQ ID NO: 15533 - DNA, 450 bp, synthetic construct
  misc_feature 1..450: note = Description of Artificial Sequence: Synthetic coding sequence
  source 1..450: mol_type = other DNA
atgaaagtcgcctccggttctacggccacggctgctgccggtccctcctgcgcgttgaaagcgggaaaaaccgcgtctggggctggcgaggtggtgagatgcctgagcgaacagagcgtcgcgatctctcggtgtgctggcggcgccggcgcgcgtctgcccgctctgctggacgagcaacaggtaaacgtccttttgtatgacatgaacgggtgttacagtcggctaaaagagctcgtccccaccctgcctcaaaaccggaaggtttcaaaagttgagatcctgcaacacgtcatcgactatatcagggaccttcagctggaattgaatagcgaatccgaggtggggacccctggcggacgtggcctcccagtccgggctccactaagcacactaaacggtgaaattagcgcgctgactgccgaagtccgtagtagatccgaccactag

SEQ ID NO: 15534 - DNA, 468 bp, synthetic construct
  misc_feature 1..468: note = Description of Artificial Sequence: Synthetic coding sequence
  source 1..468: mol_type = other DNA
atgaaggtggcctccggatcaaccgccaccgctgctgccggtccttcctgtgctcttaaggcgggcaaaaccgcttcaggagcaggagaagtggtacgatgtctttccgaacaaagcgtagcaatctctaggtgtgccggaggggccggtgccagactccctgctttgcttgatgagcagcaggtgaacgtgctgctgtatgacatgaatggctgctacagcagactgaaagagttagtgccaactcttcctcagaataggaaagtgagtaaggtggaaatattacagcacgtcatcgattacatcagggatttgcaacttgagctcaacagcgagagcgaggtgggcacacctggaggacgggggctccctgtcagagcgcccctgtctaccctgaacggagagatcagcgccttgactgccgaggcggcgtgcgtccctgcagatgaccgaatcctatgccggtag

SEQ ID NO: 15535 - DNA, 738 bp, synthetic construct
  misc_feature 1..738: note = Description of Artificial Sequence: Synthetic coding sequence
  source 1..738: mol_type = other DNA
atggcagcgggtatgtacctggagcattaccttgactccatcgaaaaccttcccttcgagctccaaagaaacttccagcttatgcgcgacttagaccagcgaactgaagatcttaaagcagaaatcgacaagctggccacagagtacatgtcctcagcaaggagtctctcatctgaggagaagttggccttgttgaagcagattcaggaagcctatgggaaatgtaaggagttcggggacgataaggtccagttggcaatgcagacgtatgagatggtggataagcatattagacgtctggatactgacctcgcccgatttgaggcggatttgaaagagaaacagattgagagtagtgactatgattctagctcttctaaggggcgcacccagaaggaaaaaaaagctgcgcgtgccagatctaaaggaaagaattccgacgaagaagcaccaaaaaccgcccagaaaaaacttaagttggttcgaactagtcctgagtacgggatgcctagcgtgaccttcggaagcgtgcatccctctgacgtccttgacatgcctgttgatccaaacgaacctacttactgcctttgccatcaggttagctatggggagatgattgggtgtgataaccctgattgtagcattgagtggtttcacttcgcttgtgtgggcctgactaccaaacctagaggcaagtggttttgtcctcgatgtagccaggaacgaaagaaaaagtag

SEQ ID NO: 15536 - DNA, 840 bp, synthetic construct
  misc_feature 1..840: note = Description of Artificial Sequence: Synthetic coding sequence
  source 1..840: mol_type = other DNA
atgttgtcccccgcgaatggagagcagctgcatctggtcaactatgtcgaggactatttagattctatcgaatctttgcccttcgatctgcaacgcaatgtgtccctgatgcgcgagatcgatgccaagtatcaggagattcttaaggagctggatgagtgttatgaacgcttttcccgcgagacggacggagctcagaaacgccgcatgctacattgcgtgcagagggctttgatcaggagtcaggaactcggcgatgagaagatccaaatcgtttcgcagatggttgaactggtggaaaaccggactagacaggtggattcacatgtggaactttttgaagcacaacaggaattaggggacaccgcgggcaactccgggaaggccggggcggatagacctaagggggaggctgcagcccaggctgataaacctaattccaagagatcacggaggcagcggaacaacgaaaatcgcgaaaatgcttcctcaaaccatgaccacgacgacggcgcctcaggcacaccgaaggagaagaaagccaagaccagcaagaagaaaaaaaggtctaaggccaaagccgagcgggaagcctcccctgcagatttgcccattgaccccaacgagcctacctactgcctctgtaatcaggtgtcgtacggcgagatgataggatgcgataacgacgaatgtccaatcgagtggttccacttcagctgtgtgggcttgaatcataaaccgaagggaaaatggtactgccccaagtgcagaggcgaaaatgaaaagaccatggataaagctctggagaaatcaaagaaggagcgagcgtacaacagatag

SEQ ID NO: 15537 - DNA, 708 bp, synthetic construct
  misc_feature 1..708: note = Description of Artificial Sequence: Synthetic coding sequence
  source 1..708: mol_type = other DNA
atggagatcctgaaggaactcgatgaatgctatgagcgcttcagcagggaaactgatggcgctcagaaaaggaggatgctccattgcgtgcagagagcactgataagatcccaggagctgggtgatgaaaaaatacagattgtgagccagatggtggagctggtggaaaaccggacccgccaagttgacagccatgtagagttatttgaagcccaacaggagttgggcgacacagctggtaattcggggaaggctggggcagataggcctaagggagaagccgccgcacaagccgacaagcctaattcaaaaaggtccaggcgccaacggaacaacgagaacagagaaaacgcatcatctaatcacgatcatgacgacggggcatcaggtactccgaaagaaaagaaagctaaaacctctaaaaaaaagaaacgaagcaaggccaaggctgagcgggaagcaagtcccgcggatctgcccatcgaccctaatgagccaacatactgtctgtgcaatcaggtctcctatggggagatgatcgggtgtgataacgatgagtgtcccattgaatggttccatttcagttgcgtgggactcaaccataaacctaagggtaagtggtactgcccaaaatgcagaggtgaaaatgaaaagaccatggacaaagcactcgagaaaagcaaaaaggagcgcgcttataacagatag

SEQ ID NO: 15538 - DNA, 1269 bp, synthetic construct
  misc_feature 1..1269: note = Description of Artificial Sequence: Synthetic coding sequence
  source 1..1269: mol_type = other DNA
atgtcattcgtcgagtgtccttaccatagtccagccgaacgcctggtggctgaggctgatgaaggcgggccaagtgccatcacaggcatgggactgtgcttccgctgcctgctctttagcttttccggaaggtccggagtggaaggtggaagggtagacctgaatgtgtttgggagcctgggactccagccctggatcggcagtagcagatgttggggtggaccgtgtagttccgcattacgatgtggctggttttcctcctggcctccaccctccaaaagtgcgatacctataggcggtggctcacgtggagccggaagagtgagtcggtggcccccacctcactggttagaggcatggagagttagtcctctcccacttagccctctcagcccagctacatttggtcggggttttattgcagtcgccgtgatccctgggctgtgggcccgcggacgaggatgcagctcggataggcttcccagaccggctggacctgctcggcgacaattccaggcagcaagtttgctgactcggggatgggggcgagcttggccctggaaacagattcttaaggagcttgacgagtgctacgaaagattttccagagaaactgatggagcccagaagaggcgtatgctgcattgtgtccagagagcgctcattcggtcccaggagctcggggacgagaaaatccagattgtctcacagatggttgaactggttgaaaatcggacgcggcaggtggacagtcacgtcgagctgtttgaggctcagcaggagttgggcgacacagctgggaacagtgggaaggccggagccgaccggccaaaaggcgaggccgccgcacaggccgataagccaaatagcaagcggtcccgccgacaaaggaacaacgagaaccgcgaaaacgcgtcctcaaaccacgatcatgatgatggcgcctccgggacgccaaaagagaagaaggccaagaccagtaaaaaaaagaagcggtctaaggccaaggcagagagagaggcttcccctgccgatctgcctatcgaccctaatgagcccacctactgcctctgcaaccaggtgtcatacggtgaaatgattgggtgtgataacgacgagtgtcctatagaatggtttcacttctcttgcgtcggactcaatcacaaaccaaaaggcaagtggtactgcccgaagtgcagaggcgagaatgaaaaaacgatggacaaagcactcgaaaagtcaaagaaggaacgcgcttataatcggtag

SEQ ID NO: 15539 - DNA, 633 bp, synthetic construct
  misc_feature 1..633: note = Description of Artificial Sequence: Synthetic coding sequence
  source 1..633: mol_type = other DNA
atgctacattgtgtacagagggcactcatcagatcccaggagctgggggacgaaaaaatccagattgtgtcccagatggtcgaactagtggagaatcgcaccaggcaggtcgatagtcatgtcgagttatttgaggcccagcaggaactcggagatacagcaggtaattcaggaaaggcaggggccgaccgcccaaaaggcgaagccgccgcacaagctgacaagcctaacagcaagcgcagcaggcgccagcgcaataacgagaatagggaaaatgcatctagcaatcatgatcacgacgacggagcaagcggcactccgaaagagaaaaaagctaagacgtctaaaaagaaaaaacgaagcaaagctaaagctgagcgggaggcatctccagctgatctgcccatagatccaaatgagccgacatattgcttgtgtaaccaagtcagttatggtgaaatgattggatgcgacaatgatgaatgcccaattgagtggttccacttttcgtgcgtcggactgaaccacaagcccaagggcaaatggtactgtcccaaatgtagaggggaaaatgaaaagactatggataaggcactggaaaaaagcaagaaggaaagagcctataatcggtag

SEQ ID NO: 15540 - DNA, 747 bp, synthetic construct
  misc_feature 1..747: note = Description of Artificial Sequence: Synthetic coding sequence
  source 1..747: mol_type = other DNA
atggctgctggcatgtatctggagcactacctggacagcatagagaacctgccatttgaactccaacggaacttccagctgatgcgggatttggatcaaaggacagaggacctgaaagccgaaatcgacaaactcgccacagaatacatgtccagcgccagatcgctgtcctccgaagaaaaactcgccctgctgaaacaaatccaagaggcttacggcaaatgtaaggaattcggggacgataaggtgcagctggctatgcagacttacgagatggtcgataagcacatacgacggctggatacagatctggctcggttcgaagccgaccttaaggagaaacagattgagtcatctgactatgacagcagctcctcgaaaggaaagaagtctagaactcagaaagaaaaaaaagcagccagggcgaggtctaaaggtaagaactccgatgaggaggcccccaaaaccgcgcagaagaagctcaagcttgtccgcacctcgcctgaatatggcatgcccagcgtaacctttggctccgtgcaccccagcgatgtcctggacatgcctgtggacccaaacgagcccacctattgtctatgtcaccaagtctcctacggcgagatgatcggatgtgacaatcccgactgctcaattgagtggttccacttcgcatgcgtgggattgaccactaagccgcgggggaagtggttttgcccccgctgctcacaggagaggaaaaagaaatag

SEQ ID NO: 15541 - DNA, 750 bp, synthetic construct
  misc_feature 1..750: note = Description of Artificial Sequence: Synthetic coding sequence
  source 1..750: mol_type = other DNA
atggccgcaggtatgtatctggagcactatctggatagtatagagaatttgccgtttgaacttcagcggaatttccagcttatgagagatcttgaccagaggacggaagatctgaaggcggagatcgacaaactcgcgacagaatatatgagttcggcacggtcgctgagctctgaggaaaagctcgccctcctgaagcagattcaggaagcatatggtaagtgcaaggagtttggtgacgataaagtgcaactggcgatgcagacctacgaaatggtagacaaacacatcagacggctggacacggacctggctagattcgaggcggatttgaaggaaaaacaaatagaaagcagcgactatgactctagcagttccaagggcaagaaaaaaggacggactcagaaggagaaaaaagctgctagggcccgaagtaaaggcaagaacagcgatgaggaggcgccaaaaacagcccaaaaaaagctaaaactcgtcagaacaagtccagagtacggtatgccatcggtgacttttggttcggtccatccttctgatgtcttggacatgcctgtcgatccaaatgaaccaacctactgcctatgccatcaggtgtcgtacggggaaatgatcgggtgcgataaccccgattgcagcattgagtggtttcacttcgcttgtgtagggctcaccactaagccgagagggaagtggttttgccctcgatgttctcaggaacggaagaaaaagtag

SEQ ID NO: 15542 - DNA, 741 bp, synthetic construct
  misc_feature 1..741: note = Description of Artificial Sequence: Synthetic coding sequence
  source 1..741: mol_type = other DNA
atggctgcgggtatgtacctcgagcattacctggatagtattgagaacctgccattcgagcttcagcggaatttccaactaatgagagatctggatcagcggacagaggacctgaaggcagaaatcgacaaactcgcgactgaatatatgtcgtccgctcgaagcctgagtagtgaggagaaattagccctgctcaaacagatccaagaagcctatggcaagtgcaaggaatttggagacgacaaagtgcagctagcgatgcagacctatgaaatggtcgacaagcatatcaggagactcgataccgacctggctaggtttgaagctgatttgaaggaaaaacagattgagagttccgattacgacagctccagcagtaaagaaggccgcactcaaaaagaaaagaaagcagccagagctcggagcaaaggaaaaaattccgatgaagaggcccctaagacagcccagaagaagttaaagctggtcagaacctcccctgaatacggcatgccctctgttacttttgggtccgtgcatccctccgacgtgctagacatgcccgtggatcctaatgaacccacctactgtctgtgccatcaggtgtcgtatggagaaatgattggatgcgacaatccggactgtagcatcgagtggtttcactttgcctgcgtcgggctgacgactaagcctcgagggaaatggttctgtcccagatgctctcaagaaagaaaaaagaagtag

SEQ ID NO: 15543 - DNA, 540 bp, synthetic construct
  misc_feature 1..540: note = Description of Artificial Sequence: Synthetic coding sequence
  source 1..540: mol_type = other DNA
atggccgccggtatgtatctggagcactacttggattctattgaaaacctgccattcgagctccagcgcaactttcagttaatgcgcgacctggatcaacggacagaagatttaaaggctgagatcgacaagctcgctacggagtacatgagtagcgctcggagtctttcctcagaggaaaagctcgccctgttgaagcaaattcaggaagcctatggcaagtgtaaagagttcggcgatgacaaagtgcagctcgcaatgcagacgtacgaaatggtcgacaagcatattagaaggctggataccgatctcgcccggttcgaagccgacctcaaagaaaagcagatcgagtcatcagattatgattcttccagttctaaggggaaaaagaaaggacgcacgcaaaaggaaaagaaggctgcaagggctcgttccaaggggaagaacagtgacgaggaggcccctaagacagcacagaaaaagctcaagttagtccggaccgtcccgttatccggctccatcctccctgtgtggggatag

SEQ ID NO: 15544 - DNA, 678 bp, synthetic construct
  misc_feature 1..678: note = Description of Artificial Sequence: Synthetic coding sequence
  source 1..678: mol_type = other DNA
atggcagctggcatgtacctcgagcactatctggataaccttaaagccgagatcgacaagttggccaccgagtatatgagcagcgcaagatccctgagctcagaggaaaagctcgcgctgctaaagcagatccaggaagcgtatgggaagtgtaaagagtttggcgacgataaagtgcagctagccatgcagacctacgaaatggtagataaacatattagaaggttagacaccgatttagccaggtttgaggcagacctaaaggagaaacaaattgaaagcagcgattatgacagctcctccagtaaaggcaagaaaaagggaaggacccagaaagagaaaaaggcagccagagctcgatctaaggggaaaaactcggacgaggaggcacccaagacggcccaaaagaagctcaagctggtgagaacctctcccgaatacggaatgccttccgttaccttcggctccgttcacccgtccgacgttctggatatgcccgtggatcctaacgagccaacatactgtttgtgccatcaggtatcctacggggagatgatcgggtgtgacaaccccgattgctctattgagtggttccattttgcctgcgtggggctgaccaccaaaccccgcggcaagtggttttgtccacggtgcagtcaagagaggaagaaaaaatag

SEQ ID NO: 15545 - DNA, 3729 bp, synthetic construct
  misc_feature 1..3729: note = Description of Artificial Sequence: Synthetic coding sequence
  source 1..3729: mol_type = other DNA
atggcctccccccccgaatcagatggattctccgatgttcgcaaggtgggctatctcagaaagcctaagagtatgcataaaagatttttcgtgttgagggcagctagcgaagcaggcgggcctgcccgcctggaatactacgaaaatgagaaaaagtggcgacataaatcttcagctcctaagcggtctatcccattggagtcctgctttaacatcaacaagagggcagactccaagaacaagcatctagtagcgctgtacactcgagacgagcacttcgctatagccgcggactccgaggcagaacaggattcttggtatcaagccctgctgcagctgcataaccgggccaagggtcaccacgatggcgccgccgctcttggagccggtggtggcgggggctcatgtagcggatccagtgggctgggggaggccggggaggacctgtcatacggagacgtgcctcccgggcctgctttcaaggaggtatggcaggtgatactgaaacctaagggactcgggcaaacaaagaacctgatcgggatctacagactgtgtctgacgtccaagaccatctcattcgtcaagctgaattctgaggcagctgctgtagtgcttcagttgatgaacatccgtagatgtggccattctgaaaactttttctttatcgaagtgggccggagcgcggtaaccggcccaggcgagttttggatgcaagtcgacgacagtgtggtggctcagaacatgcacgagactattcttgaagcaatgagggcaatgagcgacgagttcagacctagatccaaaagccagagctcatcaaattgcagcaacccgattagtgtgcccctgcgtcggcaccacttgaataacccaccaccaagccaagtaggcctcacccggcggtcccgtaccgagtcaattactgccacctcacctgcctcaatggtgggagggaagcccggctcctttcgtgtccgtgcatcgtcagatggcgaagggacgatgtcacggcctgccagcgtcgacggtagtcctgtgtccccatcaaccaaccggacccacgcccacaggcaccggggaagcgctaggctgcatcccccgcttaaccacagccgatctatcccgatgcccgcaagtaggtgtagcccttccgccaccagtcccgtaagcctatccagttcttccacgtccggtcatgggtccacatccgattgcctgtttccaaggaggtcgtccgccagcgtttccggcagccctagcgacggtggattcatatcatccgacgagtatggctcctcaccctgtgatttcaggagttccttccgtagcgttacaccagacagtcttggccacacgcctccagctagaggcgaggaagagcttagtaattacatctgcatgggggggaaaggaccttctaccctgactgccccgaatggacactacattctgtccagaggcggaaatgggcacaggtgtacccctgggacaggtctgggaactagccctgcactggctggcgacgaggccgcctccgccgccgacctggacaacagattcaggaagagaacacactctgccggtaccagccccacaatcacccaccaaaagacccctagccagagtagcgtagcaagcatagaggagtataccgagatgatgccggcctaccctcccggaggaggttccggcggacgcttgccgggacaccggcatagcgccttcgtgccgacaagatcatatcctgaggaagggcttgaaatgcacccactggaaagacgaggcggccatcaccgaccggattcctcaaccctgcacaccgatgacggctacatgcctatgtcacctggcgttgcgcctgttccaagtggtcggaaggggtctggggattacatgcctatgtcaccaaagagcgtttcagcaccacagcagatcatcaatccaatccgacgccatcctcaacgggtggatcccaacggatacatgatgatgagccctagtggggggtgtagccccgatataggaggcgggcccagcagttcatcctcatcttctaacgcagtcccctcaggtacttcctacggaaaactgtggacaaatggcgttggggggcaccactcccatgtcttaccacacccaaagcctcctgttgagagcagtggtgggaaactgctgccttgcactggggactatatgaacatgtccccagtaggagattcaaatacttcctccccttccgactgctactatgggcccgaggatccgcagcataagccagtattatcgtactattccctgccacgatcgttcaagcacacacagaggccaggggagcccgaagaaggggcacgtcaccaacatttgcggttgtctacttccagcggccggttgctttatgcagccactgctgatgacagctcatcctcaacgtcctccgacagcctgggcggcggctattgtggcgccaggttagagccctctttgcctcatccccatcaccaggtcctgcaaccacatttacctcgaaaagtagacacggccgcccagactaatagtagactggcacgacccacccggctcagtctcggggatcccaaggcttccactctgccgagggctagggaacaacagcaacagcaacagcctctgctgcatccgcctgagccaaaaagccctggagagtatgtcaacatcgaatttgggagcgaccagtcgggctacctctctggccccgtcgcctttcacagcagccctagtgtgaggtgcccctcacaactccaaccagccccccgggaagaggaaactggtacggaggagtacatgaaaatggacctgggccctggccggagagctgcctggcaagagagtacaggagtggaaatgggaaggctaggacctgcaccacccggggccgccagcatctgtagacccacacgcgccgttccttcctcacgcggcgactacatgactatgcaaatgagctgccctagacagtcttatgtcgacacaagccctgcagctccagtgtcctatgcagatatgcgaaccggcatagctgccgaggaggtaagcctgcccagagctactatggcagccgcatcctccagtagtgcggcatctgctagtccaaccggacctcagggagctgcggagctggcagcccactccagtttgcttggtgggccccagggacccggtggcatgtcagctttcaccagagtgaatctatctcccaacagaaatcagagtgctaaagtgattagagccgatccccaggggtgtagacggagacacagctctgagaccttttccagcactcctagcgccactagagtgggtaacaccgtgcctttcggcgccggggctgctgtcggtggaggagggggaagttcctccagctcggaagatgttaagagacactccagtgcaagctttgagaatgtgtggttgagaccgggtgaactcgggggtgccccaaaagagcccgcaaaactttgtggtgccgctgggggcctcgagaatggacttaattatatcgacctcgacttggtgaaggattttaagcaatgtccccaagagtgcacgccagagcctcaacccccaccgcccccccctcctcatcaaccgctcggctctggcgaatcttctagcacgcgccgatccagtgaagatttaagcgcatatgcctcaattagtttccagaagcagcctgaggaccgccaatag

SEQ ID NO: 15546 - DNA, 588 bp, synthetic construct
  misc_feature 1..588: note = Description of Artificial Sequence: Synthetic coding sequence
  source 1..588: mol_type = other DNA
atgggcaaaatctcatccctccctactcagttatttaagtgttgtttctgcgactttttgaaagtgaagatgcatactatgtccagttctcacctgttttacttggcgctgtgtctgcttactttcaccagttccgcaactgctggaccagagactctgtgtggagctgagctggtagacgctctgcagttcgtgtgtggagaccgggggttttattttaacaaacccactggatacggttcttcatcgcgtcgggccccccagacagggattgtggatgagtgctgttttcggagctgcgacctgcgaaggctggaaatgtattgcgcacccttaaagccagctaaatccgcgcggtccgtccgcgcgcagcgacacacagacatgcccaagacgcagaaataccagcccccttcaaccaataagaacaccaagtcccagagaaggaagggttggcctaagacacatcctggcggcgaacagaaggagggcaccgaagcatcgctgcaaatccggggaaaaaagaaggagcaaagacgggaaatagggtctcggaatgccgagtgtagaggtaaaaagggaaagtag

SEQ ID NO: 15547 - DNA, 462 bp, synthetic construct
  misc_feature 1..462: note = Description of Artificial Sequence: Synthetic coding sequence
  source 1..462: mol_type = other DNA
atgggcaaaattagctcgttgccaacacagctcttcaagtgctgtttctgcgactttcttaaggttaagatgcacactatgtcatcctctcacctgttctacctagccttgtgcctgcttacattcaccagttccgccaccgccgggccggaaaccctgtgcggagctgagctggtggacgctctccaatttgtgtgcggagatcgtggattttattttaacaagccaacgggctatggttctagtagccggagagccccacaaaccgggattgtcgacgagtgctgcttcagatcctgcgatctgagacggctcgagatgtactgcgctccactgaaaccggcaaaatctgcacgaagtgtcagagctcagcgccataccgatatgccgaaaacccagaaggaagtgcatcttaaaaatgctagccgcggctctgcaggcaacaaaaactatagaatgtag

SEQ ID NO: 15548 - DNA, 477 bp, synthetic construct
  misc_feature 1..477: note = Description of Artificial Sequence: Synthetic coding sequence
  source 1..477: mol_type = other DNA
atggggaagatttcctccctcccaacccagctgtttaagtgctgtttttgcgatttcctgaaggtgaagatgcacaccatgtcctcctctcacctgttttacctcgccctgtgcctcctaactttcacatcctccgcaactgccgggcccgagacgctctgtggagctgaattggtggacgcccttcagtttgtatgtggggatcgcggcttctactttaataagccaaccggctacggatcttcgagtagacgagcaccacaaaccggaatcgtcgatgagtgctgtttccgatcatgtgatctccgcagactggagatgtattgcgcacctctcaagccagccaagtccgcaaggtcggtgcgcgcccagcggcacaccgacatgcctaagacacagaaatatcagcccccctcaacaaataaaaacactaaaagtcaacgtcgcaaaggcagcactttcgaagagcgcaaatag

SEQ ID NO: 15549 - DNA, 420 bp, synthetic construct
  misc_feature 1..420: note = Description of Artificial Sequence: Synthetic coding sequence
  source 1..420: mol_type = other DNA
ttgaaggtgaaaatgcacaccatgagctcttcacacctcttctatctcgccctgtgcctgctcaccttcacgagttctgccaccgccggaccagaaaccctgtgcggcgcggagctcgtggatgcactgcagttcgtttgcggcgacagagggttctattttaataaaccaaccggatacgggtcttcctcccgaagagctccgcagacaggcatcgtggacgagtgctgtttccgatcatgtgatttacgacggctggagatgtactgcgcaccgctgaagcctgccaagtccgctagatctgtacgtgcccagcgccacacagacatgccaaaaacccagaagtatcagccgccatccacgaataagaacaccaaaagccagaggagaaagggcagcacattcgaagagcggaagtag

SEQ ID NO: 15550 - DNA, 414 bp, synthetic construct
  misc_feature 1..414: note = Description of Artificial Sequence: Synthetic coding sequence
  source 1..414: mol_type = other DNA
atgattacgccgacagtaaaaatgcatactatgagctctagccatttgttctaccttgccctttgtctgctgaccttcacttcctctgcaaccgctggccctgagaccctttgcggcgcggagctcgtggacgccttgcagtttgtgtgtggcgaccggggattttacttcaacaagcctacaggatatggatcttcttctagacgcgcgcctcagaccggcattgtagacgagtgctgctttaggtcgtgcgatctgcggaggctggagatgtattgtgccccgctaaagccagccaaaagcgcacgaagcgtgcgagctcagaggcataccgatatgcctaaaacccaaaaagaggtgcacttgaaaaatgcatctcggggaagcgcaggcaataaaaactataggatgtag

SEQ ID NO: 15551 - DNA, 477 bp, synthetic construct
  misc_feature 1..477: note = Description of Artificial Sequence: Synthetic coding sequence
  source 1..477: mol_type = other DNA
atgggtaaaatcagcagcctccccacacagctctttaagtgttgtttttgtgacttcttaaaggtgaaaatgcacaccatgtcatctagtcatcttttctacctagccctttgcttactcacctttacaagcagcgccactgctggtccggagaccctgtgtggcgctgagctagtcgacgcactgcagttcgtctgcggggataggggcttttactttaacaaacctaccggatacggatcttcttctcggcgtgcgccccaaactgggatcgttgacgaatgttgttttcgaagttgtgatctgagacgcttagagatgtattgtgcgcccctcaagcctgctaagtctgctcggagcgtgcgtgcccagcgccacactgacatgccgaagacacagaagtaccaacccccctctaccaacaagaacaccaaaagccagcggaggaaaggcagcacctttgaagagagaaaatag

SEQ ID NO: 15552 - DNA, 4104 bp, synthetic construct
  misc_feature 1..4104: note = Description of Artificial Sequence: Synthetic coding sequence
  source 1..4104: mol_type = other DNA
atgaaatcagggtccggtggcgggtccccaaccagtctgtggggcctactgtttctcagtgctgcgttgtccttgtggccaacatcgggcgaaatttgcggtccaggaattgacattagaaacgattatcaacaactcaaacgcctggagaactgcaccgtgattgagggataccttcacatcctactgatcagcaaggctgaagactatagatcttatcgctttccaaagctgaccgtgataactgaatatctccttttgtttagggtggctggcttggaaagcctcggcgatctgttccctaatctgaccgtgattcggggctggaagctgttttacaactatgcactggtgatcttcgagatgactaatttaaaagacatagggctttacaacttacggaacataactcgtggcgcgatcaggatcgagaagaatgccgacctgtgctacttgtctactgtcgactggtcgttgatcttagacgcagtctctaacaattacatagttggcaacaaaccgccaaaggagtgcggcgacctctgccccggaactatggaggagaagccgatgtgtgagaaaacaacgatcaacaatgagtataactacagatgttggaccaccaataggtgtcagaagatgtgtccttctacatgcggtaaacgcgcctgcacagagaacaatgaatgctgtcatccagaatgtctgggctcctgctccgctcccgataacgacacagcttgtgttgcatgtcgacactattactacgcaggggtgtgcgtgcccgcctgcccccccaacacctatcggttcgagggctggaggtgtgtggatcgtgacttctgtgccaatatacttagtgccgagtcaagtgactccgagggtttcgtgatccacgatggtgaatgcatgcaagagtgcccctccggcttcatccggaacgggagtcagagcatgtactgtatcccctgcgagggcccctgccccaaagtgtgcgaggaagaaaagaagactaagactatagactcagttacaagcgctcagatgctccaggggtgtaccatttttaaagggaacctgttaatcaacattcggcggggaaataacattgcttccgagttggaaaactttatggggctcatcgaggtcgtgacaggctatgtgaaaatcaggcacagccatgctctcgtgtctttgagcttcttgaagaatctgcggttaatactcggtgaagagcaacttgaaggaaactactcattctacgtgctcgacaaccagaacctccagcagctgtgggactgggatcatcgtaatctcacaatcaaggcaggcaagatgtatttcgcctttaatcccaagctgtgcgtatccgagatctacagaatggaggaggtcaccggaactaagggccgccaatccaaaggtgacatcaacacaaggaataacggcgagcgagcctcttgtgagtccgacgtgctacattttactagcaccactacatctaaaaatcgcataattattacttggcatcgatatcggcctcccgattatcgcgatctgatctcctttacggtttattataaggaggccccatttaagaatgtcacagagtacgatggccaggatgcttgtggcagtaactcctggaatatggtagatgtagacttgcctcctaacaaagacgtggagcccgggatcctcctgcatgggctcaagccatggacccagtacgccgtttacgtcaaagctgtaacccttacaatggttgaaaatgatcacattagaggggctaagagcgagatactatacattcgcactaacgcctcagtaccatccatcccactggacgttctgtctgcttccaattcaagctcccagctgattgtgaagtggaaccctccctccttacccaacggcaacctatcctattatattgtaagatggcaaagacagcctcaagacggttatctttaccgtcataactactgttcaaaagacaagatacccataaggaagtacgcagacggtactatagatatagaggaggtgaccgaaaatccaaagacagaagtctgcggaggtgaaaagggcccttgctgtgcttgcccgaaaacggaggctgaaaagcaggctgaaaaggaggaggctgaataccgaaaggtcttcgaaaactttctccataattcaatttttgtgccccgtcccgaaagaaagagacgggacgtcatgcaagtagccaatacaacaatgtcctcccggtcacgaaacactacagcggcggacacctataatataaccgaccccgaggagctggagaccgagtatcccttcttcgaaagccgcgtcgataataaggagagaacagtaatttccaatttacgcccgtttaccctgtatagaatcgatattcactcatgtaaccacgaggcagagaagctggggtgttccgcctccaatttcgtctttgcacggacaatgcccgcggaaggcgccgacgacattccgggtcccgtgacttgggaacctagaccggagaattcaatttttctgaaatggcctgagccagagaaccctaacgggcttatcctgatgtacgagattaagtacggttcacaggttgaggaccagagggagtgtgtgagtaggcaggagtataggaagtacggaggagccaagttgaacaggcttaatccagggaactacacagctaggatccaggctacaagtctaagcgggaacggatcttggactgacccggttttcttctacgtgcaagcaaagactgggtacgagaattttatccacttaattatcgctctgccagtggccgtcctgctcatcgtgggcggcctggtgatcatgctgtatgtgttccaccgtaagcgaaacaacagtcgcttgggcaacggggtcttgtacgcttcagtcaacccagaatactttagtgccgcggatgtgtatgtccccgacgagtgggaggtggccagggagaaaatcacaatgtcccgggaactaggccagggtagcttcgggatggtttatgagggcgtcgctaagggggtggtaaaggacgagccagaaactcgagtcgccattaagacagtcaatgaggccgctagcatgcgggagcgcattgagtttctcaatgaagcctccgtcatgaaagagttcaattgtcatcacgtagtgagactgcttggggtggtgtcccaggggcaacctaccctcgtcatcatggagctgatgacgcggggagacctcaaatcctacctgcgctccctgcggccagagatggagaacaatccagtattagctcccccatccttgtctaagatgatacagatggctggggagatcgccgacgggatggcctacctgaacgccaacaagttcgtgcacagggacctggctgccaggaactgtatggtggcagaggacttcactgttaaaatcggtgactttggcatgaccagagacatttatgagactgattattaccgaaagggtggtaagggccttctgcccgtcaggtggatgtctcccgagtccctcaaggacggagtcttcaccacctatagcgatgtctggagtttcggagtagtgctgtgggaaatcgctacccttgcagagcaaccataccagggcctgagtaacgagcaagtcctcaggtttgtgatggagggcggactactggacaaacctgacaattgcccagacatgctcttcgagctgatgaggatgtgttggcagtataaccctaagatgaggccatcttttctcgaaatcatttcatccatcaaggaggaaatggagcccggcttccgcgaagtgtccttttactactctgaagagaataaattacccgaaccggaggagcttgacctcgagcctgagaacatggaatcagtcccgctggacccgagcgcttcatccagctcactgccgctgcccgataggcatagcggtcacaaagccgagaatggccccggacccggcgttcttgttttgcgggcaagctttgacgaacgtcagccttacgcccacatgaacggcggtcggaagaacgaaagggctttacccctccctcagagcagcacatgctag

SEQ ID NO: 15553 - DNA, 543 bp, synthetic construct
  misc_feature 1..543: note = Description of Artificial Sequence: Synthetic coding sequence
  source 1..543: mol_type = other DNA
atggggattcccatgggaaaaagcatgcttgtgcttcttacctttttggcctttgcatcttgttgcattgccgcataccggccaagcgaaactctctgtggcggcgagctggttgatactctccagttcgtgtgtggtgacagagggttctattttagtaggccagcctccagggtgtctaggagatccagaggcattgtcgaagagtgttgcttccggtcgtgcgacctcgcgttgctggagacctattgcgccactccagctaagagcgagcgcgacgtgagtactccccctacagttctcccagacaactttccccgctatcctgttggcaaattctttcagtacgacacatggaaacaatctacacagaggctcagaaggggattgcctgcactgctgagagcacggcgtggacacgtattggccaaggagctggaggccttcagggaagctaagcgacaccggccactgatcgccctgcccacccaggacccagcccatggcggagcgcccccagagatggcgtcgaataggaagtag

SEQ ID NO: 15554 - DNA, 543 bp, synthetic construct
  misc_feature 1..543: note = Description of Artificial Sequence: Synthetic coding sequence
  source 1..543: mol_type = other DNA
atggggattccgatgggcaagtccatgctcgtattgcttaccttcctggcatttgcaagctgctgcatagcagcttacagaccctccgaaaccctctgtggtggggagttggtggacactttgcagttcgtgtgtggcgaccgagggttctattttagtcgaccggctagccgggtttccaggcggagcagaggcatcgtggaggagtgctgctttcggtcctgtgatctcgccctgctcgagacatactgtgcgactcctgcaaaatctgaaagagacgttagtacccctcccaccgtactgccagataatttcccccgataccccgtgggaaaattctttcagtatgatacctggaagcaatccacccagcgcctgcgcaggggcctgcctgccctgctacgcgcaagaagagggcacgtactggccaaagagctggaggcattccgtgaggcaaaacggcaccggcccctcatagccctgcccacacaggaccctgcccacggtggcgccccccccgaaatggcctccaataggaagtag

SEQ ID NO: 15555 - DNA, 552 bp, synthetic construct
  misc_feature 1..552: note = Description of Artificial Sequence: Synthetic coding sequence
  source 1..552: mol_type = other DNA
atgggcataccaatgggcaaatctatgcttgtgctgctgacttttctcgcctttgcatcttgctgtatcgcggcgtacaggccctctgagactctctgtggtggcgaattagtcgacacgctgcagtttgtgtgtggcgacagaggattctacttcagattgccagggaggcccgcttcccgggtgtcacggcgcagcagaggcatcgtcgaggagtgctgcttccgctcctgcgacctcgccttgcttgagacttactgcgccactcccgccaagagcgagagggacgtgtccactccaccgacagttttaccagacaattttcctcgctatcccgtcggaaaatttttccagtacgacacctggaagcagagtacccaaaggctccgcagaggtctccccgcccttctccgtgcgcggcggggccacgtcctggctaaagagttggaggcattcagagaggctaagcgccaccgacccctgatcgccctccccacccaggatcctgcacatggaggggcaccgcctgagatggcttctaacaggaaatag

SEQ ID NO: 15556 - DNA, 552 bp, synthetic construct
  misc_feature 1..552: note = Description of Artificial Sequence: Synthetic coding sequence
  source 1..552: mol_type = other DNA
atggggattccaatgggcaagagtatgctggttctgctgaccttcttagctttcgcttcatgctgtatcgccgcgtatcgcccctctgagacactctgtggcggagagctggtagacacactgcagttcgtgtgcggagatagaggcttctatttccggctccctggccggcccgcttctagggtcagtcgacggtcccggggaattgtagaggaatgctgctttcgcagttgcgacctcgcgctgctggagacctattgcgctacaccagccaaatccgagagagacgttagtactccacccacagtgttgccagataacttcccacggtatcctgtcgggaagtttttccagtatgacacctggaagcagagcacccagcgtttgagaaggggtctgccagctctcctgcgtgcccgacgggggcatgtgcttgctaaagagctagaagccttcagggaggccaagcgccacaggcccctaatagccctccccacacaggatccggcgcatggaggagccccccctgaaatggcttcaaacagaaaatag

SEQ ID NO: 15557 - DNA, 543 bp, synthetic construct
  misc_feature 1..543: note = Description of Artificial Sequence: Synthetic coding sequence
  source 1..543: mol_type = other DNA
atgggcattcctatgggaaaatcgatgctggtgctgctgacattccttgcgtttgcttcttgttgtatcgctgcgtaccggccttcggaaactctgtgcggtggtgagctggttgacactttacagttcgtatgcggcgatcgcgggttttattttagcaggccggcctccagggtgtctagacgctccagaggcatagtggaggagtgttgcttccgctcttgcgatctggcactcttggagacctactgtgcaaccccggctaaatcggagagagacgtgagcacaccccctacagtattgcccgacaatttcccaaggtatccagtcggaaaattcttccagtacgacacctggaagcagagcacgcagaggctgagacgcggccttcctgccctactaagagcacgccgcgggcacgtgttagccaaagagttggaagcattcagagaggccaagcggcacagaccactgattgccctgccaacccaggaccccgcacatggtggcgcaccacctgagatggcctccaatcgaaagtag

SEQ ID NO: 15558 - DNA, 552 bp, synthetic construct
  misc_feature 1..552: note = Description of Artificial Sequence: Synthetic coding sequence
  source 1..552: mol_type = other DNA
atgggcatcccgatgggcaaaagcatgctggtgttactgacattcctggcgttcgcaagctgctgtatagcagcgtaccggcctagcgaaacactgtgcggtggagagcttgtagatacattgcagtttgtgtgcggagataggggcttttacttcagattgccggggagaccagcatccagggtatctcgtaggtcacgtgggatcgttgaggaatgctgctttaggagctgtgatcttgcactgctagagacctattgcgccaccccagctaaatccgagcgtgacgtaagcactcccccgacagttttgccagacaatttccctagataccccgttggaaagtttttccagtatgatacatggaagcaatccacccaacgcctgaggagaggattgcccgctctgctcagggcaagacggggccacgtcttagcgaaagaactggaggccttccgcgaggcaaagcggcatagacctctgattgcactgcccacacaagatcctgcccatgggggcgccccccccgagatggcgtctaatcggaagtag

SEQ ID NO: 15559 - DNA, 543 bp, synthetic construct
  misc_feature 1..543: note = Description of Artificial Sequence: Synthetic coding sequence
  source 1..543: mol_type = other DNA
atgggaatcccaatggggaagtctatgctagttctgttgacattcctggcatttgcctcttgctgtatcgccgcctacagaccttccgaaacactctgtgggggagagctggtggacaccctgcagtttgtgtgtggggatcgaggcttttatttctcccgcccggcatctcgggtttcccgtagaagccgcggaatcgttgaggagtgctgttttcgctcctgtgaccttgcacttctggagacctactgtgctactcctgccaagtcagagagggacgttagtaccccacctactgttctgcccgacaactttccacggtacccagtgggaaagttttttcagtacgatacctggaaacagagtacccagcgcttacggcgcggactgcccgctctcctgcgggcacggagggggcacgtgctggccaaggagctggaggcattcagggaggccaaaaggcaccgacccttgatcgcactgcctactcaagacccagcacatggcggagctccaccagagatggcctcaaatagaaagtag

SEQ ID NO: 15560 - DNA, 552 bp, synthetic construct
  misc_feature 1..552: note = Description of Artificial Sequence: Synthetic coding sequence
  source 1..552: mol_type = other DNA
atgggcattcccatggggaaatccatgctagtcctgttgaccttcttagcattcgcttcttgctgtatcgccgcctatcgtccgagcgagaccctgtgtgggggagagctggttgacactcttcagttcgtttgtggggatcgcggtttttatttccgcctgccggggcggcccgcctccagagtgtcgcgcaggtcacgggggatcgtggaggagtgctgcttccgaagctgtgatctcgctcttttagaaacctattgtgcaacccctgcaaagagcgagcgcgacgttagcactcccccaacagtcctccccgacaattttcctagatatcctgtgggcaaattctttcagtatgatacctggaagcagtcgactcagcgcctgcgccgcggcctgcccgccctgttacgtgctaggagagggcacgtgctggcgaaagagttggaagccttcagggaagcaaagcgccacaggcctctcatcgcccttccaactcaggaccctgcccacggaggcgccccacctgaaatggcctccaatcgtaagtag

SEQ ID NO: 15561 - DNA, 543 bp, synthetic construct
  misc_feature 1..543: note = Description of Artificial Sequence: Synthetic coding sequence
  source 1..543: mol_type = other DNA
atggggatccctatgggcaaaagcatgttagtgctgcttaccttcttggcatttgcaagctgctgcatcgcggcgtatcgcccctcagagacgttatgcggaggtgaactggttgatacgcttcagttcgtttgcggagataggggcttctattttagccggcccgcctcccgggtctcacgacgatctagaggcatagtcgaggagtgctgttttcgctcatgtgacctcgcactcctcgaaacgtattgtgccactccagccaagagtgagagggacgtgagcacccctccgaccgttctgccagacaattttccacgatacccagtggggaagttctttcagtacgatacatggaaacaatcaacacagcgtctgagacgcgggctgccagctctcctgagagccaggagagggcatgtgctcgctaaagaactcgaggcatttagagaggctaagaggcatcgtcctcttatcgcactgcccacacaagaccctgcacatgggggggcaccacccgaaatggctagtaatcgcaaatag

SEQ ID NO: 15562 - DNA, 543 bp, synthetic construct
  misc_feature 1..543: note = Description of Artificial Sequence: Synthetic coding sequence
  source 1..543: mol_type = other DNA
atggggatccctatggggaaatctatgttggtgttgctaaccttcctagccttcgccagctgctgcatagctgcctatcgaccgtctgaaacactgtgcgggggcgaactagtggatacccttcagttcgtgtgtggggataggggattttatttttctcgacccgctagtagagtcagccggaggtcacgtggcatagtcgaggaatgttgctttcgttcctgtgacctcgccctgctcgaaacatattgcgccacgccagccaaatccgagcgcgatgtgtctacacctcccacagttcttcctgataatttccctcgataccccgtgggcaaattcttccagtatgacacttggaaacagagcacacagcgcctacggagaggcctcccggccttactgagagcccgcagggggcacgtgctcgctaaagaattggaggcgttccgggaggcgaagcgccatcggcctctgattgcgctgcccacacaggatccagcccatgggggtgcaccaccagaaatggcctctaatagaaagtag

SEQ ID NO: 15563 - DNA, 711 bp, synthetic construct
  misc_feature 1..711: note = Description of Artificial Sequence: Synthetic coding sequence
  source 1..711: mol_type = other DNA
atggtctccccagacccgcaaattattgtggttgcccctgagacggaactggctagcatgcaggtgcagcgcaccgaggacggcgtgacaattattcagatcttctgggtcggccgcaaaggcgaactactgcgcaggactcctgtgagtagtgcgatgcagactcctatgggtatcccgatgggcaagagcatgctcgtactgctgacgtttttagcatttgcgtcttgttgtatcgccgcttatcggcccagtgagacactgtgcggaggtgagcttgttgacacccttcagttcgtttgcggggacaggggcttctattttagccggccagcttcccgagtgagtcgccggtcccggggtattgtggaagaatgctgcttccgcagctgcgacctcgcacttctcgagacatattgtgcaactccagctaagagtgagcgtgacgtgagcactcctcccaccgtcttgcccgataatttccctcgctaccctgtgggaaagttctttcagtacgatacctggaaacagtcaacccagaggctgagacgtgggttgcctgcactgctcagggctagacggggccatgttctcgccaaggagcttgaggcttttcgcgaggccaagcggcacagaccactcattgcactccctacccaagatccggcccacggcggcgcaccccccgagatggcctctaatcgcaaatag

SEQ ID NO: 15564 - DNA, 876 bp, synthetic construct
  misc_feature 1..876: note = Description of Artificial Sequence: Synthetic coding sequence
  source 1..876: mol_type = other DNA
atgcagagagctcgtcccactctgtgggctgctgcccttacgttgttggtcctgctaaggggaccccccgttgcaagagctggcgcgagcagcgccggcctcggaccagtcgtcagatgtgaaccttgcgacgcacgggccctggcccagtgtgctccaccgcctgccgtgtgcgcagaactggtcagggagcccggttgtggctgttgtcttacttgcgctctgtccgaagggcagccctgtggcatttacacagagagatgtggtagtggcctgagatgccagccctccccagatgaggctcgccctctgcaagcccttttggatgggcgtggactgtgcgtcaatgcctctgccgtgtcgagactgagagcatatctgctgcctgctccccccgcgccagggaatgccagcgaatccgaagaggataggtccgcgggttctgtggaatcaccttcggtgtcttctacccaccgggtgtccgaccccaagttccaccctcttcattccaagataattatcattaagaagggccacgccaaggacagtcaaagatataaggtggactacgagtcccagtcgacagatacacagaacttctcttctgagagcaagcgcgagactgagtatggaccatgcagaagagagatggaggataccctgaaccatctgaaatttctgaacgtgttgtcccctcgaggagtacatattccaaactgcgacaagaagggcttctataagaagaagcagtgtcggccaagcaaaggccgaaagcggggattttgctggtgcgttgacaaatatgggcaacccctccctggatacaccaccaaaggaaaggaggacgttcactgctatagcatgcagtctaaatag

SEQ ID NO: 15565 - DNA, 894 bp, synthetic construct
  misc_feature 1..894: note = Description of Artificial Sequence: Synthetic coding sequence
  source 1..894: mol_type = other DNA
atgcagcgtgccagaccaactctgtgggcggcagctctgactttgctggtgcttctgcgcggaccccccgtggctagagcaggagccagctcagccgggctgggcccagtggtgaggtgcgagccctgtgacgcacgcgccctagctcagtgcgccccacctcccgccgtgtgtgctgaactggtgagggaacccggttgcggttgctgtttaacttgtgcgctcagcgaggggcagccttgtgggatctataccgaacgctgtgggagtgggctacggtgtcagccctctcctgatgaggccaggcctctgcaggctctcctcgatggaagaggtctctgtgtgaacgcgtcggcggtgtcgcgcttgagagcttaccttctgcctgctccaccagcccctggggaacctcctgcccccggaaatgcatctgaatctgaagaggatcggtccgctggctccgttgagtcccccagcgtcagctcaacccatagagttagtgatcccaagttccacccgctgcactcaaaaattatcattatcaagaagggacatgccaaagacagccagcggtacaaggtggattatgaatctcagagcactgacacccagaactttagcagcgaatctaagagagaaacagagtacgggccttgccggcgcgagatggaggacactcttaatcatctcaaattcctgaatgtgttgtcccctcgaggcgtacacatccccaactgtgataaaaaaggtttctacaagaagaagcagtgtaggcccagcaagggacgcaaacggggcttctgctggtgtgttgacaaatacggccaaccccttccaggctacacaaccaaagggaaggaggacgtacactgttactcaatgcaatctaagtag

SEQ ID NO: 15566 - DNA, 585 bp, synthetic construct
  misc_feature 1..585: note = Description of Artificial Sequence: Synthetic coding sequence
  source 1..585: mol_type = other DNA
atgcagcgcgccagacccttgcaggcactattggatggaagaggactttgcgtcaatgctagtgctgtgagtagactgcgggcctacttactgccggccccccccgcgcccggtaatgctagtgaatctgaggaagaccgcagtgcgggctccgtagagagtccttccgtaagttctacacaccgggtgtcagatcccaagtttcatcctctgcacagtaaaattatcattattaagaaaggccacgcgaaagactcccagagatataaagtcgattacgagtcccagagcactgatacccagaactttagctctgagtccaaacgagagaccgagtatggcccatgcaggcgggagatggaggacactctgaatcatctgaaattcctaaatgtgctgtcaccgcgcggcgtgcacatacctaactgtgataaaaaaggattctacaagaagaagcagtgtagaccttccaaaggccgaaagaggggattctgctggtgtgtagataagtatggccagccgctgcctggatatacaactaaaggaaaagaggacgtgcattgttactcaatgcagagcaagtag

SEQ ID NO: 15567 - DNA, 462 bp, synthetic construct
  misc_feature 1..462: note = Description of Artificial Sequence: Synthetic coding sequence
  source 1..462: mol_type = other DNA
taaagcgaggaggatagatctgcaggaagcgttgagagtccttctgtgtcctcaacgcacagagtgagcgacccaaagtttcaccccttgcactccaagattattattattaagaaagggcatgctaaagactcacaacgttataaggttgactacgaatcccagtcaactgacactcagaatttttcaagcgagtcaaaacgtgagaccgaatatggcccttgcaggcgtgaaatggaagacacacttaatcacctgaaatttttaaacgtcttgagtcccagaggagtgcatatccccaactgcgataagaagggcttctataagaagaagcagtgtcgtcccagtaagggcagaaagcggggattctgctggtgcgttgataagtacggacagccgttacccgggtacactaccaagggaaaagaggatgtccattgctactccatgcagtccaaatag

SEQ ID NO: 15568 - DNA, 432 bp, synthetic construct
  misc_feature 1..432: note = Description of Artificial Sequence: Synthetic coding sequence
  source 1..432: mol_type = other DNA
tgagagtcccctagcgtgtcctccactcaccgggtgtcagaccccaagttccatcctttgcactccaaaattataatcataaagaaaggacatgccaaagatagccagagatataaagtggattatgagtctcagtcgaccgacacacaaaatttttctagcgaaagtaagagggagactgaatatggaccatgtaggagagaaatggaagatacactgaaccacctcaagttcctgaatgtgctctcacccaggggggtccacattccaaactgcgacaagaagggcttctataaaaagaaacagtgcaggccgtccaaaggcaggaagagagggttttgttggtgtgtggataagtatggccagcctctgccggggtacaccactaagggcaaagaggatgtgcattgctatagtatgcaatccaaatag

SEQ ID NO: 15569 - DNA, 792 bp, synthetic construct
  misc_feature 1..792: note = Description of Artificial Sequence: Synthetic coding sequence
  source 1..792: mol_type = other DNA
atgcagagggcacgtcccaccctctgggcagcctgtgagccatgtgacgcacgggcacttgcacagtgcgcaccgcccccggccgtttgcgccgaacttgtgagagaaccgggatgtggctgctgcctgacctgcgccctgtccgaaggacagccatgcgggatctatacggaacgttgtgggtcaggacttcggtgtcagccgtctcccgacgaagccagaccgctacaagcattattggatggaagggggttgtgcgtgaacgcctccgcagtgtctcgcttaagggcatacttgcttcctgccccccccgctccggggaacgccagtgagtccgaagaggacaggtctgccgggtctgtcgaatcaccatctgtgtccagcactcacagggtaagtgatcctaagttccacccccttcactctaagatcattattattaagaagggacacgctaaggattcacagaggtacaaggtagattatgagagccaaagtacggatacacagaacttctcctcggagagtaagcgtgagacggagtacggtccctgtcgccgggaaatggaggacaccttaaatcatctcaaattccttaatgtcctgtctcccagaggagtgcatatccccaactgcgataagaagggcttttataaaaagaaacaatgccgtccaagcaaaggacgtaagcgaggcttttgctggtgtgtggacaaatacggccagcctctccccgggtacaccacaaaaggtaaggaagatgttcattgctatagcatgcagagcaaatag

SEQ ID NO: 15570 - DNA, 834 bp, synthetic construct
  misc_feature 1..834: note = Description of Artificial Sequence: Synthetic coding sequence
  source 1..834: mol_type = other DNA
atgagagccctgcgacttggggcggaagatcaacctctcccagcttggattccccagctgcgtgccgtctattgccgtcctatccccgccaggcctgcatgtcaggccgcgtgtcctggctgtagacggcatgccgccggggccacccatgccctgggccggtgcgccgacagcgccggggctgcgccgagggctgccggcggggccggttggagggagctggggggactcggcagccgaggtgctctgcgggccgtacgccatcttcaccgggcacttctggacgggcgaggcctctgtgtgaatgcctcagccgtgtcacgcctccgcgcctacctgctgccagctcccccggcgcccgggaacgcatcagagagtgaagaggatcgtagcgctggttctgtggaaagtccctctgtctcatccacccatcgagtttctgacccaaagtttcatcctctacatagtaagataatcatcatcaagaaaggccacgccaaagactcacagcgctataaagtcgattacgagagtcagtctactgatacacagaactttagctcagagagtaagcgggagacagaatatggaccctgccggagagagatggaagatacattaaaccatctgaaatttcttaatgtcctatctcctcgaggggtccacattcctaactgtgataagaaaggattttacaagaagaagcagtgtaggccttcgaaagggcgcaagcgcggtttctgttggtgcgttgataagtacggacagcccctgcctgggtacacgacaaagggtaaagaggatgtacattgttattcaatgcagagcaagtag

SEQ ID NO: 15571 - DNA, 570 bp, synthetic construct
  misc_feature 1..570: note = Description of Artificial Sequence: Synthetic coding sequence
  source 1..570: mol_type = other DNA
atgcaacgcgcccgccccactctgtgggccgctgcattgacattattagacggcagaggcctgtgcgcctaccttctgcctgcaccacccgcccccgggaatgccagcgaatccgaggaagatcgatcagcagggagcgtggagtctcccagtgtctcctccacccatagggtgtccgaccccaagttccatccattgcattcaaagatcattattattaagaagggacacgccaaggattcacagaggtataaggtcgattacgaatcacaatccacggatacccagaacttcagtagcgaaagcaaacgggaaactgaatacggaccttgtcggcgggagatggaggataccctgaatcacctcaaattcctaaacgtactaagtcccaggggagtccacatccctaactgcgacaaaaagggattttacaaaaagaagcagtgccgaccttccaaaggaaggaagagaggcttttgttggtgtgttgacaagtacgggcaaccgctgcctggttataccacgaaggggaaagaggatgtacactgttacagcatgcagtcaaagtag

SEQ ID NO: 15572 - DNA, 807 bp, synthetic construct
  misc_feature 1..807: note = Description of Artificial Sequence: Synthetic coding sequence
  source 1..807: mol_type = other DNA
atgcagcgcgcaagaccaaccctttgggcggccgccctgactctcctcgtgctgctcagaggacctcctgttgctcgggcaggggcttcatcagccggactgggtcccgtagtgcgtcgcgaacccgggtgcggatgctgcctgacatgcgccttgagcgaaggacagccctgcgggatctataccgaacgctgtggtagcggtctgagatgccagccttcacctgacgaagcccggcccctccaggccctgcttgacgggaggggactgtgtgtgaacgcctcggctgtttctcgcctgcgcgcttacctcctgccggctcccccggcgcctggaaacgctagcgagtcagaggaggacagatccgccggctccgtggaatctccttccgtcagcagcacccatcgggtatccgatcctaagttccacccccttcactccaagattatcattattaaaaaggggcacgccaaggactcacagagatataaggtggactatgaatcccaatctaccgacacacagaatttctcttccgagagtaaaagggagactgagtatggcccctgccgtagagagatggaggacacactgaatcacctcaagttcctcaacgtcctcagcccacggggagtgcatatcccgaactgcgacaaaaaaggtttctacaagaagaagcagtgcagaccaagcaagggcagaaagcgcgggttttgctggtgcgtagataaatacggacagcctctcccgggatatacaaccaaagggaaggaagacgtgcactgctactccatgcagagtaaatag

SEQ ID NO: 15573 - DNA, 978 bp, synthetic construct
  misc_feature 1..978: note = Description of Artificial Sequence: Synthetic coding sequence
  source 1..978: mol_type = other DNA
atgcttcctcgagtcggctgtcccgccctgcccctgcctccccccccacttcttcccctgctattgctgctgctcggagctagcggagggggaggtggcgcacgcgcggaagtcctgtttaggtgtccaccctgtacacctgaaaggctggccgcctgtggcccgcctcctgtggctccgccagccgccgtagcagccgtggcgggtggcgctaggatgccttgtgcagaactggtgcgggagccaggctgtgggtgctgttctgtgtgcgcccggctggaaggagaggcgtgtggcgtgtataccccacgctgtggccaaggcctgcgatgctacccgcaccccggctccgagcttccactgcaggcactggtgatgggagagggaacttgcgagaagcgacgagacgctgagtacggtgcatctcccgaacaagtggccgataatggggatgatcattcggaaggagggctggtggagaatcatgttgacagtactatgaacatgctcgggggaggtggaagcgcaggtcggaaaccactgaagagcggaatgaaggagctcgccgtctttagggaaaaagtcacagagcagcaccgccagatgggcaaaggaggcaaacatcacctggggctagaagaacccaaaaaactaaggcctccccctgcccgcactccttgccagcaggaactggaccaggtcctcgagcggatatccaccatgcggctcccagacgagagaggacccctagaacacctgtattctctgcacatccctaactgtgataaacatggcctgtacaatctgaaacagtgcaaaatgagcctgaacggacagaggggggaatgctggtgcgtcaaccccaacactggcaagttgattcagggagcccctaccattcgtggcgatcctgagtgtcacctcttttataatgaacaacaggaagccagaggcgtgcacacacaacgaatgcaatag

SEQ ID NO: 15574 - DNA, 3099 bp, synthetic construct
  misc_feature 1..3099: note = Description of Artificial Sequence: Synthetic coding sequence
  source 1..3099: mol_type = other DNA
atggcctgggaggccagacgggagcctgggccccggagggcagcagtgagggaaacagtgatgcttctgctgtgcctgggcgtccctaccggccgaccctataatgttgacacggaaagcgctctgctctaccagggtccccataatactctgttcggctattcagttgtcttgcattcccacggtgcaaatcggtggttgctcgtgggcgccccgacagccaattggctagcgaacgcatccgtgatcaacccaggagctatctaccgatgtcgcattggaaagaatcctggacagacatgcgaacagctgcaactcggctctcctaacggcgagccctgtgggaagacatgcttagaggaaagggacaaccagtggctcggggtgacacttagccgccagcccggagaaaacggatccattgtgacttgcggacaccggtggaaaaacatattttacatcaagaacgagaataagctgcctacagggggatgctacggtgtgccaccggacctgaggactgaactgtctaagcgcatcgcgccctgctaccaggactatgtcaagaagtttggagagaacttcgcctcgtgccaagctggcatctcctcattctataccaaggatctcatagtgatgggcgcccccggtagcagctattggactgggtcactttttgtctataatatcacaacaaataaatataaagctttcttggacaagcagaatcaggtgaagttcggatcatacctcggatactccgtgggagccggtcacttccggagtcagcacactactgaggttgttggaggagccccccagcacgagcagatagggaaggcctacattttctccatcgacgagaaggagctcaacattctccacgagatgaaagggaagaagctcgggtcgtatttcggggcctctgtctgtgccgtagacctgaacgcggacgggttttccgatcttctggtcggcgcccccatgcagtcaaccattcgggaggaagggagggtttttgtgtacattaatagcggaagtggcgctgtgatgaacgcaatggaaactaacctcgttgggagcgacaaatatgctgcgagattcggtgagtccattgtgaatctgggagatatcgacaacgacgggttcgaggatgtggccattggggcccctcaagaggatgatttgcaaggtgccatctacatctataacggtcgggcggacggaatcagtagcaccttcagtcagagaattgagggcctccagatttcgaaaagcctgagcatgtttgggcagagcatctcagggcagatcgacgcggataacaatggctacgtcgatgtggccgtaggagcttttcggtcagatagcgccgttctgttacgcactcggccggtcgtgattgttgatgcctcattgtctcaccccgaatcggtgaatcgcactaaatttgactgcgtggagaacgggtggccctccgtgtgcatcgacttgaccctgtgtttctcttacaagggcaaggaggtcccagggtatatcgtcttattttacaatatgagcctcgacgttaaccgtaaggcagaatcaccaccccgattttacttttcatccaatggtacttctgatgtgatcacagggagcattcaagtctcaagcagagaggcgaactgcaggacacatcaggcattcatgcgcaaagacgtccgcgacattctgactccaattcagattgaggctgcctatcacttgggccctcatgtgatatcaaaaagaagcactgaggaattcccacctctgcagcccatcctccagcagaagaaagagaaagacatcatgaaaaaaaccattaactttgctcgcttctgtgcccatgaaaactgctcagctgatttacaggtatctgctaaaatcgggtttctgaagccccatgagaataaaacctatctcgccgtgggcagcatgaaaacactcatgttgaatgtgagcctgtttaatgcgggagatgacgcatacgaaaccacattgcacgttaagttacctgtgggtctttatttcattaaaattctggagctggaggagaagcagattaactgtgaagtcaccgataacagtggtgtggtgcagctcgactgcagcatcgggtacatttatgttgaccacctgagcaggatcgacatttcatttctgcttgacgtctcgagtctatcacgggctgaggaagatctgtctattaccgttcacgccacatgtgagaatgaggaagagatggataacctgaaacactctcgcgtgactgtcgcaatccctctgaagtacgaagtgaagttaacggtccacgggttcgtcaacccaacatcatttgtgtatgggtctaatgacgaaaacgagccggaaacttgtatggtggagaaaatgaacctgactttccacgtgattaatactggcaactccatggctccgaacgtcagcgttgaaattatggtacctaactcgttttctccccaaacggataaactcttcaacatattggatgtacagacaacgacaggagaatgtcacttcgagaactatcaaagagtgtgcgcccttgagcagcagaaaagcgccatgcagacgctgaaaggaatcgtgagattcctgtcaaaaaccgataaaagactgctctattgtatcaaggctgacccgcactgtttgaatttcttgtgtaattttggaaagatggagtctggcaaggaggcgtccgttcatatccagctggaaggcaggcccagcatactggaaatggacgagacgagtgctctgaaattcgagattcgggcgaccggcttccccgaacctaacccaagagttatcgaactgaacaaggatgaaaacgtcgctcacgtgctcctcgaaggcctgcaccatcagagacccaaacggtattttacgatagtgattatttcctcatcgctgctgcttggcctcatagtgctcctgttgatttcctatgttatgtggaaagccgggtttttcaaacgacagtacaagagtatcctgcaggaggaaaatagacgcgacagttggtcctatatcaatagcaaatcaaatgatgactag

SEQ ID NO: 15575 - DNA, 1854 bp, synthetic construct
  misc_feature 1..1854: note = Description of Artificial Sequence: Synthetic coding sequence
  source 1..1854: mol_type = other DNA
atggcttgggaagcaaggcgagaacccggtccaagacgcgctgcagtcagggaaacagtcatgctccttctgtgtctcggagtaccaactggccggccctacaacgtggacaccgagtcagcactgctgtatcagggcccccacaacactctttttggctattctgtggtgctacactcccacggagccaataggtggctgctcgttggagcacctacggctaactggcttgctaatgcttcggtgattaatccaggtgctatttacaggtgccgaatcggtaagaaccctgggcagacgtgcgaacagctccagctcggatctccgaacggagaaccatgtggcaagacatgtctggaggaacgcgacaaccagtggttgggggtaactctctccagacagcccggtgaaaacggttccatcgtgacttgcggacataggtggaaaaatattttctatatcaaaaatgaaaacaaacttcccactggcggatgttatggcgtccctcccgaccttaggacagaactgagtaagagaatcgctccatgttaccaggattatgtcaaaaagtttggagagaattttgcaagttgccaggccggcatcagttctttttacaccaaagatctaatagtgatgggagccccgggttccagttattggacgggttccctttttgtatataacatcacaactaataaatataaggcctttctggacaaacagaaccaggtcaagtttggaagctacctcggatactccgtgggagcggggcacttccgtagccagcatacaaccgaggtagtgggtggtgccccacagcatgagcagatcggaaaagcttacatttttagtatagatgagaaggagctcaacattttacatgaaatgaagggaaaaaaattgggaagctatttcggagcatctgtctgtgcagtggatttgaatgcggatgggttcagcgaccttttggtcggagcccccatgcagtccaccatccgcgaggaagggagagtattcgtttatattaatagtggttcaggggcagtgatgaatgcaatggagacaaacctggtcggttcagacaaatatgcggccaggttcggggaaagtatagtcaatttgggggacatagacaacgatgggttcgaggacgtggcaatcggggctccccaagaagacgacctccaaggagcgatctacatctacaacgggcgtgcagacgggatttccagcacattttcccaaagaatcgagggcttacaaatcagtaagtccttgtcaatgttcgggcagtccatcagcgggcagatcgacgctgataataatggctacgtggacgttgcagttggtgctttcaggtccgactctgctgtgctgttaaggacccggcccgtggtgattgtagatgcctccctgagccatcctgaatccgtcaaccgaactaagttcgattgcgtggaaaatggctggccctcagtctgcattgatcttaccctttgtttctcatacaagggaaaggaggtccctgggtacatcgtgctgttctacaatatgtccctagatgtcaacaggaaggcagagtcccctccaaggttttactttagtagtaatggcacatccgatgtgatcactggatccattcaggtatcaagtagggaggccaactgtagaacacaccaggcgttcatgcgaaaggacgtgagagacatcctgaccccgatccagatcgaagccgcataccacctcggcccccatgtcatcagtaagcgttccaccgaggagttcccgccgctgcaaccaatcctgcagcaaaaaaaggaaaaggatataatgaaaaagacgaagaagtag

SEQ ID NO: 15576 - DNA, 3150 bp, synthetic construct
  misc_feature 1..3150: note = Description of Artificial Sequence: Synthetic coding sequence
  source 1..3150: mol_type = other DNA
atgggatcgaggactccagaaagtcctctgcacgccgttcagctgcggtggggacctcggaggagacctccactactcccgcttctgcttctactacttccacctccgccaagagtgggcgggtttaacctcgatgccgaggcccccgccgttctgagtggacctcccgggtcgttctttgggttctctgtggaattctaccgacccggtacggatggtgtgagtgtgctcgtcggggcccccaaagctaataccagccaacctggggtacttcagggcggcgccgtctacctgtgcccttggggcgcgtctccaacccagtgcactccaatcgagtttgactccaaggggagtagactgctggaaagtagtctctcgtcatcagaaggggaggaacctgtcgagtataaatctttacaatggttcggcgccaccgttagggcacacgggtcctctatactggcgtgtgccccactgtattcctggcgcaccgaaaaggaacctctgtcggaccccgtggggacgtgctacttgagtaccgataacttcactaggatcctggagtacgcaccatgcagatctgatttcagttgggctgctggtcagggatactgccagggcggattttctgcagaatttacaaagactggaagggtggtactgggcggcccaggatcctatttctggcaagggcagatcttgtcagccacccaggaacagatcgctgagtcctactatcccgaatatttgatcaatttggtgcaaggccagcttcaaacccgacaggcctctagtatctacgacgatagttacttggggtacagtgtggctgtgggcgagttctcgggagatgatacggaagattttgttgcaggcgttcctaagggcaatctcacctacggctacgtgactatcttgaatggctctgacattcgtagcctgtataattttagtggtgagcagatggccagctacttcgggtacgcggtggccgcgacagacgtgaacggcgatggcctagatgacctactggtaggtgccccactccttatggatagaacacccgacggtagaccccaggaagtcggtagggtctacgtgtatttgcaacatcccgcggggatcgagcctacgccaacgcttacattgacggggcacgacgaattcggacgattcggctcatcactgactccgctcggcgatcttgatcaagacggttataatgacgtggcaattggcgcccctttcggaggcgagacacagcagggagtcgtgttcgtgtttcctggaggcccaggcgggctcggatctaagccttcccaagtacttcaacccttgtgggccgcaagccatactcccgattttttcggttctgcgctcaggggaggtagggatctcgacggaaatggataccccgacctgattgtgggctcctttggcgttgataaggccgtggtttacagagggcggcccatcgttagtgcaagcgccagcttgacaatcttcccagccatgttcaaccccgaggaacgcagttgttctcttgagggcaatcccgtggcgtgcatcaatctctcattctgtcttaacgcaagcgggaaacacgtggccgatagcataggattcacagttgagttgcagctcgactggcaaaaacaaaaagggggagtcaggcgcgctttgtttctggctagtcgccaggctacactgacccagacccttctaatccaaaacggagcacgcgaggactgtcgcgagatgaagatctacctgcggaacgaatcagagttcagggacaagctgagtccaatccatattgctctgaacttttccctggacccgcaagcccctgtcgactcccacggccttagacctgccctgcattaccaaagcaagagtcgaatagaagataaggcgcaaatcctactcgactgcggcgaggataacatctgcgttccagacctccagctggaggtcttcggcgaacagaatcatgtttacctcggtgataaaaacgccctgaatctcacctttcatgcccagaacgtcggcgaaggcggtgcatacgaggcagagctcagagttacagctccccctgaggctgaatactccggcctagtccgccatccggggaacttttcatcactgtcatgcgattactttgcggttaaccagtctagactgctcgtgtgcgatctcggcaaccctatgaaggcaggggcttcactgtgggggggacttaggttcaccgtgcctcacctgcgcgacactaagaagacaatacaattcgactttcagattctgagcaagaatctaaataattctcaaagcgatgtcgtctctttcagactcagtgttgaggcccaggcccaggtcacactgaatggggtgtctaagcctgaggcggtcctctttcccgtcagcgattggcaccctagggatcagccacaaaaagaagaggacctaggcccagccgtacaccacgtctatgagctcatcaatcaaggcccttcctccatcagtcagggcgtgcttgagctgtcctgcccacaggctttggagggccagcaattactgtacgtgacgagggtgaccggcctgaattgtacaacaaaccatcctatcaaccccaaagggctggagcttgaccccgagggcagtttgcatcatcaacaaaaaagggaggccccaagccgctcctccgcgtcatccggaccccagattcttaaatgtcctgaggcggagtgttttaggctgcgatgcgagcttgggcctttacatcagcaggaatcccagtctctgcagctgcacttccgggtgtgggcaaaaacctttcttcagagagaacatcagcctttttctctgcagtgtgaagccgtctataaggcgctgaaaatgccctaccggatccttccgcgtcagcttccccagaaggagaggcaagtggccacagcagtccagtggactaaagcagaagggtcctatggagtacccttgtggatcattatcctggcaattctctttggattactgcttctgggtttgctgatttacatcttgtataagctcgggttcttcaagaggagtctcccttatggcactgcaatggagaaggctcagctcaaaccgccagcaacgagcgacgcgtag

SEQ ID NO: 15577 - DNA, 3393 bp, synthetic construct
  misc_feature 1..3393: note = Description of Artificial Sequence: Synthetic coding sequence
  source 1..3393: mol_type = other DNA
atggccgccgccggccagctgtgtttgctgtatctgtccgccggattgctcagccggctgggggctgcttttaaccttgacactcgagaagacaatgtcataaggaagtacggggaccccggcagcttatttggctttagcctggcaatgcattggcagctccagcccgaggataaacggctgcttctagtgggcgccccccgcgctgaggctttaccgctgcagcgcgcaaaccggacaggaggcctctatagttgtgatataaccgcccgcggtccgtgtacacgcattgagtttgacaatgacgcagaccctacatccgaatccaaagaggatcagtggatgggtgtaaccgttcagtctcaggggcccggggggaaggtcgtgacctgcgcgcataggtatgaaaagcggcagcatgtgaatactaagcaggagtccagagatatttttggacggtgttatgtgctctctcagaaccttcgcatcgaagatgatatggatgggggcgactggtctttttgcgacgggcggctccggggccatgagaaattcggctcctgccagcagggggtcgccgctacctttacaaaggacttccactatatcgtgtttggcgcaccggggacttacaactggaaaggcatcgtccgggtggaacaaaaaaataatactttcttcgacatgaacatcttcgaagacgggccttacgaagtcgggggagaaactgagcacgacgaatcactggtaccagtgccagccaatagctacctgggcctcctcttcttaacctcggtgagttatactgatccagaccaattcgtatataagactcgtccaccacgggaacagccagatacctttcccgacgtgatgatgaacagctatttaggatttagtctagactccggtaagggcattgtgtccaaagatgagatcacgttcgtctccggcgcccctcgggccaatcattctggtgccgtagttcttttaaaaagagacatgaagagcgcccacctattgcctgaacacatattcgatggtgagggtctggcctcaagttttgggtacgatgtggctgtcgtcgacctgaataaggacggatggcaggacattgtgataggcgctccgcagtattttgacagggatggtgaagttggcggggcagtgtacgtatacatgaatcaacaggggcgatggaataatgtgaaaccgattcggttgaacggtacaaaagactccatgttcggcattgctgtcaaaaatatcggcgatatcaatcaggacgggtatcccgacattgctgtaggcgctccttacgacgatctcggcaaagtgttcatatatcacggctctgcaaacggcatcaatacaaagcccactcaggttctgaaaggaatatcgccctatttcggctacagtattgccggaaacatggacttggacagaaactcctaccctgacgtcgccgtcgggagtctaagcgactcagtgactattttcagaagtcggccagtgatcaacatccagaagaccataactgtgacgcctaatcgaattgacctccggcagaaaacagcctgtggcgccccttcgggtatctgtctgcaggtaaagtcatgctttgaatatactgctaacccagctgggtacaatcccagcattagcattgtgggtaccctcgaagccgagaaagaacggcgcaaatcagggctgtcctcgagagtacagttcaggaaccagggatctgagccgaagtatacccaggaacttacacttaaacgccagaagcagaaggtatgcatggaggagaccctgtggttacaggacaatatcagagacaaactgaggccaatccctatcaccgcttctgtcgaaattcaggagccatcctctcgtaggcgggtgaacagcctgcccgaggtgctgcccatactaaatagcgatgagcccaagacagctcacatcgacgtgcactttttaaaagagggatgcggagatgacaacgtgtgcaactccaaccttaagttggaatataagttttgtactcgcgaaggcaaccaggacaagtttagctacctcccaatccagaaaggagtgccagagctggtcctgaaagaccagaaggatatcgccctggagattaccgtaacgaactctcctagtaatcccagaaaccctaccaaagacggtgatgatgcgcatgaggctaaactgattgcaacattccctgacaccctgacatattcagcgtatagagagttaagagcttttccggagaagcagctgagttgtgtggcgaaccagaacggttcccaagctgactgtgaactagggaatccctttaagcggaatagcaacgtaacattctacctcgtgctgagtactactgaggttacctttgatacacctgatctcgatatcaatttgaaactggagacaacctcgaaccaagataatttagctcctataacagccaaggctaaggtggtcattgaactgctcctctctgtgtcaggcgtggcgaaaccttctcaggtgtactttggcggcactgtagtcggagaacaagcaatgaaaagtgaagacgaggtgggatcactcatcgagtacgagttccgagtgataaacctgggcaaacctctcacaaatctgggcaccgccaccctgaatatccaatggccgaaagaaatctccaacggtaaatggctgctatacctagtgaaggtagaatcaaagggacttgagaaggtcacctgtgagccacagaaagagattaatagcttgaaccttaccgaatcacataactcccgaaagaagcgagaaattaccgagaagcagatagacgacaacaggaagttctccttgttcgctgagcgtaaatatcaaaccctgaactgtagtgtgaacgtgaattgcgttaacatacgttgcccccttcggggcctggatagtaaagcctctctaatccttcgtagcagattatggaactccacgtttctggaggagtattccaaactcaattaccttgatatcctgatgagagctttcatcgatgtgacagccgcggcggaaaatatcagactccctaatgccgggacccaggtgagggtgactgtttttccctctaaaacggttgctcaatattccggcgtgccctggtggatcattcttgtcgccattctggcagggattttgatgttggctttgctggtgtttattctgtggaaatgtgggtttttcaaaaggagtaggtacgacgactccgtgccacgctaccatgcagtgcggataaggaaagaggagagggagatcaaagatgaaaagtacattgacaatctagagaagaagcagtggataaccaaatggaacgagaacgaaagttactcctag

SEQ ID NO: 15578 - DNA, 3222 bp, synthetic construct
  misc_feature 1..3222: note = Description of Artificial Sequence: Synthetic coding sequence
  source 1..3222: mol_type = other DNA
atggcagctgctggtcagctgtgcctgctgtatctgagcgcaggcctgctttcccgcctgggggccgcgtttaatctggacactcgggaagacaatgtaattcggaagtatggcgatcccgggtccctgttcggcttctccttggcaatgcactggcaactccagccagaggacaaacgacttctactggtgggcgcaccgagggcagaggctctaccgcttcaacgggctaaccgaacaggcggactatattcctgcgacatcacagctcggggaccctgtacccggattgaatttgacaatgacgcagatcccacgagcgagtccaaggaagaccagtggatgggggtgacagttcagtcacaggggcccggtggtaaagtggtgacttgcgcacaccgctatgaaaaacggcagcatgtgaataccaaacaagagagccgcgacatttttggtcgatgctacgtgttaagccagaatctgcggatcgaggatgacatggacggaggggactggagtttttgcgacggccgcttacggggccatgagaagtttggatcctgtcagcaaggcgtggcagcaacttttacaaaggacttccattacattgtctttggagcacctggcacctataactggaagggaattgtccgggtagaacagaaaaacaacaccttcttcgacatgaatatctttgaggacggcccctacgaggtgggtggggaaaccgagcacgacgagtccctggtcccagtgcctgccaattcatacctcggatttagtctcgacagtggtaagggtatcgtttctaaggacgaaattacttttgttagcggagccccccgggcgaaccacagcggggctgtggtgttgctgaagcgcgacatgaaatccgcccacctgttacctgagcacatttttgatggcgaaggactcgcttctagctttggttatgacgttgcagtggtggacttgaacaaggatggatggcaagatatagtgataggcgcgccgcagtactttgatcgggatggagaggtgggcggcgcggtgtacgtctacatgaaccaacagggcaggtggaataacgtcaagcccatccgactgaatgggaccaaagactccatgtttggaatagcagttaagaacattggagacattaaccaggatggataccccgacatagctgtgggcgcaccctacgatgacctggggaaagtgttcatttaccatggcagcgcgaacggcattaataccaaaccgacccaggttctgaagggtatctctccctactttggttattctattgccggcaacatggacctggaccgaaactcttacccagacgtggccgtcgggtcattgtcggattctgtaactattttccgcagtcggccagtgataaatattcagaaaacaattactgtaaccccgaacaggatagacctgcggcagaaaacagcctgcggagctccctcaggcatatgtctgcaggtgaagtcatgttttgagtacacagcgaatccggccggatataacccatccatatccattgttggaacacttgaggctgagaaagagagaaggaagtcaggactttcttccagggtccagtttaggaaccaggggtccgagccaaaatatacacaggagcttacgctgaaacggcagaagcagaaggtgtgtatggaagagaccctctggttgcaagataacatccgggataagctccgccccattccaattactgcaagcgtcgagatccaggaaccctcttcaagaaggagggtgaactccctccctgaagtgctcccaatcctgaactccgatgagccaaaaacagcacatatcgacgtgcacttcctcaaggagggttgtggcgacgataatgtttgtaactccaatctaaaactggagtataaattctgcacccgggaaggtaaccaggacaaattctcttatctcccgattcagaagggagtacctgagctcgttctaaaggatcagaaggacattgccctggagatcactgtcactaatagcccatccaaccctcgcaaccccactaaggacggcgacgacgctcacgaagcaaaactaatcgcaacattccccgacacactgacgtactctgcctatagggaactcagggcctttccagagaagcaacttagctgtgtggcaaaccagaacggtagccaggcagactgcgagctagggaatccatttaagcggaattccaatgtgaccttctatctcgtcttgtcgaccactgaggtgacctttgatactcctgacctcgacataaatttaaaactcgagactacaagtaaccaggataacctagctcccataactgcaaaggccaaagtcgtcatcgagcttttactgagtgtctctggcgtcgcaaaaccgagtcaggtttacttcggtggaaccgtcgtaggcgagcaggccatgaaatcagaggacgaggttggctccctgatagaatacgagttcagggtgattaacctgggaaagcctctgactaacctgggcactgctacccttaatatccaatggccaaaggagatcagtaatggaaaatggctgctgtaccttgtgaaagtggagtctaaaggactggagaaagtgacctgcgaaccccagaaggaaatcaatagcctcaacttgactgaatcccataactccagaaaaaaacgagagatcacagagaagcagattgatgacaacaggaagttctccctttttgccgagaggaaataccaaacgcttaactgcagcgttaatgtaaactgtgtaaacattcggtgccccttgaggggcctggacagtaaagcttccttaatccttcgatccaggctgtggaactcaaccttcctcgaagagtacagcaagctgaactatctggacatcctcatgcgggcctttatcgacgtcacagccgcagccgagaatatcaggttacctaatgcaggtacccaggtaagggtgaccgtgtttcctagcaagaccgtagctcaatattctggggtcccctggtggatcatactggttgccatcctcgcaggaatcctgatgctggcactgctcgtgttcattctctggaaatgtgggttctttaaaaggaataagaaagatcactacgatgccacataccacaaagctgagattcacgcccagccgagtgataaagagcgcttgacatcagacgcctag

SEQ ID NO: 15579 - DNA, 3207 bp, synthetic construct
  misc_feature 1..3207: note = Description of Artificial Sequence: Synthetic coding sequence
  source 1..3207: mol_type = other DNA
atggccgcagcaggacagctgtgtctgctctacctgagtgcagggctgctctccaggttaggtgcagcattcaacctcgatacaagagaagataatgtgatccgaaagtacggcgatcccggtagcctatttggcttctcgcttgcaatgcactggcagctgcaacccgaagataagcggctgctgttggtaggtgctccccgggccgaggctttacctttgcagcgcgccaaccgcactggaggcctgtactcttgtgatataacagctcgtggtccctgcactcgcatcgaattcgacaatgacgcagaccctacaagtgaaagtaaggaagatcagtggatgggcgtgacagtgcagtcccagggtcccggcgggaaggtggtgacctgcgcccaccgttacgagaagcgccagcatgtgaatacaaaacaggagagtagagatatttttggacgttgttacgtgttatcacaaaatttgcggatcgaagatgatatggacggaggggattggtccttctgcgatgggcggctccgcggccacgaaaaattcgggagttgccaacagggggtggctgcaacctttacgaaggatttccactacattgttttcggggcccccggaacctataattggaaaggactgctgtttttgacctccgtgtcctacacggatcccgatcagtttgtctacaaaactaggccccctagagagcagcctgacaccttccctgacgtgatgatgaacagttatcttggcttctctctggattccggaaagggcatagtgtcaaaagacgaaattaccttcgttagtggcgctccacgtgctaatcactcaggagctgtggtcttactgaagagagacatgaaatccgcccatttgctgcccgagcatatcttcgatggagaaggactcgcttcttcttttgggtacgatgtggctgtggtcgacttgaataaagacgggtggcaggacatcgttataggggctccacaatacttcgacagggatggggaggtgggaggcgccgtgtatgtctacatgaatcaacagggtaggtggaataacgttaagccgataagattgaatgggacaaaggattctatgttcggcatcgcggttaagaacataggggacatcaatcaggacgggtatcctgacatagcagtgggcgcgccctacgatgacctgggaaaagtattcatctaccatgggtccgcaaatgggattaacacaaaacctacccaagttctgaagggtataagcccttatttcggctactcaattgccggcaacatggatcttgacagaaactcataccccgacgtcgccgtggggagcttgagcgactcagtcaccatcttcaggagtagaccagtcatcaacatacaaaaaactattacagtaactcctaaccgcattgatctgagacagaagaccgcctgtggagccccatccggaatctgcctccaggtgaagtcttgttttgagtataccgccaacccagccggctacaacccgtccatttcaattgtgggcactttggaagccgagaaagagaggagaaagagcggcctgagttctagggtgcagtttcggaatcaaggatccgaaccgaagtacacccaggagctgactctgaaaagacaaaagcaaaaagtttgcatggaagaaacactgtggttgcaggataacatccgcgataagctgagacctatccctatcactgccagtgtcgaaatccaggagccatcttccaggagacgtgtgaactcgctccccgaggtgctcccgatccttaactctgacgagcccaagactgctcacatagacgtgcatttcctcaaggagggatgcggtgatgacaatgtgtgcaactccaacctaaaactggaatataaattctgtaccagagagggcaaccaagacaaattcagctatttgcctatacaaaagggagttcctgagctcgtcctgaaggatcagaaagacatcgctctcgagattactgtgactaatagtccaagtaacccccgcaatcccaccaaagatggcgacgacgctcacgaagctaaacttattgccacctttccggataccttaacctactcagcctaccgggagctgcgggcctttccagagaagcaattgtcgtgtgtggctaaccagaacggcagccaagctgactgcgaattaggcaatccctttaagcgtaactctaacgttaccttctacctggttttgtccaccacagaggtaacattcgatacacctgacctcgatattaatttaaagctggagacaacttccaaccaagataatcttgccccaataaccgccaaggctaaggttgtgatcgagctgctgctaagcgttagcggggtggccaagccctctcaggtgtattttggaggaaccgtcgtgggagaacaggcaatgaaatcagaagatgaggtcggatcgttgatcgagtatgaattcagggtgattaaccttggtaaaccattgaccaatctgggtacagctacgcttaacatacagtggcccaaagagatatcaaatgggaaatggctgctgtatttagtgaaggtagagtctaagggtcttgaaaaggtcacttgcgaacctcaaaaagagattaatagtttaaatctgactgaaagccataactctaggaagaaaagggagattacagagaaacaaatcgacgataaccggaagttttcgctgttcgcagaacggaaataccagaccctgaattgttcagtgaacgtcaattgtgtaaatattcggtgcccactgaggggccttgactccaaggcctcacttattcttcgatcacgattgtggaactctactttcctggaagagtactccaaactgaattacctggatatcctcatgagggcattcatcgatgtgaccgcggcggctgagaatatccggctcccaaacgcaggcactcaagtacgtgttactgtttttccttccaagacagtcgcccagtattccggggtcccatggtggatcattctcgtggcaatcctcgctggaatcctcatgctggccctgctggtcttcatcctgtggaagtgtggcttctttaaaaggaacaagaaagaccactatgacgcaacgtaccacaaggccgagattcacgcccagccatccgataaggagcggttgacaagcgatgcatag

SEQ ID NO: 15580 - DNA, 3339 bp, synthetic construct
  misc_feature 1..3339: note = Description of Artificial Sequence: Synthetic coding sequence
  source 1..3339: mol_type = other DNA
atggcggcagccgggcagctatgtctgctgtatctgtccgccggactgctcagccggctcggtgccgccttcaatctggacaccagagaggacaatgtgataagaaaatacggagaccccggatccctgttcggcttttcactcgcgatgcactggcagctgcaaccagaagacaagcgcctattactggtgggcgctccccgggcagaggcgcttcccctgcaacgagctaacagaacaggcggactttattcatgcgacatcacagctcgcggtccttgcacacggattgaattcgacaatgacgccgacccaacatcagagtctaaggaagaccagtggatgggggtcaccgtgcagagccagggtccaggcggcaaggtggttacctgcgcccaccgatatgagaagcgccaacatgtaaacaccaagcaggagtcccgtgacatcttcgggcgctgctatgtgctgagccaaaatctgcgcattgaggatgatatggacggcggagactggtcattctgcgacggaagactgcggggacatgagaagttcggctcctgtcagcaaggagtggctgccacctttacaaaggactttcactacattgtgttcggagctccagggacatacaattggaagggtatcgtccgagtggagcagaagaataacaccttcttcgatatgaacattttcgaggacggcccatatgaggtgggtggcgagacagagcatgacgaatcacttgtgccagtgccggccaattcgtaccttggactcctctttctgacatccgtgtcatatactgatccagatcaatttgtgtacaaaacacgtccccccagggaacaaccagacaccttccctgacgtcatgatgaatagttacctgggcttctcactggatagcggcaagggcatagtgtcaaaggacgaaatcaccttcgtttccggcgcgccacgtgccaatcattctggcgccgtcgtgttgctcaaacgggacatgaaatcggctcaccttctgcccgagcacatcttcgacggcgagggactggcctcctcgtttggatatgatgtggccgtggtagacctgaacaaggatggatggcaggatattgttattggcgcgccgcagtactttgatcgggacggagaagtcggaggagcagtgtacgtctatatgaaccagcaggggcggtggaacaacgtcaagcccattagactgaatgggacaaaggactcgatgttcggcatcgctgttaaaaatattggagatataaatcaggatggctaccccgacatcgctgtgggagctccatacgatgatttaggcaaggtgttcatctaccacggtagcgcaaacggcatcaataccaagccaactcaggttctcaaaggaatttccccttacttcggttactcaatcgcgggaaacatggaccttgacagaaactcttatcctgatgtggccgtcggcagtctcagcgactctgtgacaatttttaggagcaggcctgtaattaatatccaaaagaccatcacagttactcccaatcgcattgatctcagacagaaaactgcctgcggcgccccctctggaatctgcctacaggtgaagtcttgcttcgagtatacggcaaaccccgccggatacaatccaagcatttccattgttgggaccctggaggctgaaaaggagaggaggaagagtggcctgtcttctagggtccagttccggaaccagggatcagaaccaaagtacacccaggagctgactctgaaaagacagaagcaaaaggtgtgcatggaagaaactctttggttacaggacaacatcagagataagctccgtcctatccctattacagcgtccgtggaaatacaagaaccctcctctcggagaagggtgaattctctccccgaggttcttcctattctgaactcagatgaaccaaagacagcccacattgacgtgcactttctgaaagaaggctgtggcgacgataacgtctgcaactccaacctgaagctcgaatataaattctgtacaagagagggaaaccaggacaaatttagttatctgccaatacagaagggagtccctgagctcgtgctaaaagatcagaaggacattgcactggaaataacagttacaaattcgccttccaacccaagaaacccaactaaggacggcgacgatgctcacgaggccaaactgattgctacgtttcccgatactctgacctattctgcttacagggagctaagggcattcccagaaaaacaattgagttgcgtggctaatcagaacggcagccaagccgactgcgagctgggcaaccctttcaagcggaactctaatgtcaccttctacctggttctgagtaccactgaggtgacatttgatacccccgacttggacattaatttgaagttagaaacaacatcaaaccaagataatctggcacccataaccgccaaggcgaaggtcgtgatcgaactcctgctgtctgtatccggggtggcaaagccttctcaagtttatttcggagggaccgtcgttggtgaacaggccatgaagagcgaggacgaagtcggaagtctgatcgagtatgagtttagggtgataaatttggggaagccactgacaaacctgggtactgccactctgaatatccagtggccaaaggagattagtaatgggaaatggttgctctaccttgttaaggtagagtctaagggactcgagaaagttacatgtgagccgcagaaggagataaacagtcttaatctcaccgaatcccacaattcccggaaaaagagggagatcacagagaaacagatcgacgataacagaaagttctcactgttcgcagaacgcaagtaccagacactaaattgcagtgttaacgtgaattgcgtgaatatacgctgtccacttcgcggcctggatagcaaggcctctctgattctgagaagccgcctgtggaacagtaccttcctggaggagtactccaagcttaactacctggacatattaatgagagcatttattgacgtgactgctgctgcagaaaatatcaggttacctaacgccggcactcaggttcgcgtcacagtgttccccagcaagaccgtcgctcagtatagtggcgtgccatggtggatcattctggtggctatcctagcaggaatcttgatgctcgctcttctggtgttcatcctttggaaatgcggtttcttcaaaaggaacaaaaaagatcattacgacgccacttaccataaagcagaaattcacgcccagccaagtgacaaggaacgactcacttccgacgcctag

SEQ ID NO: 15581 - DNA, 3276 bp, synthetic construct
  misc_feature 1..3276: note = Description of Artificial Sequence: Synthetic coding sequence
  source 1..3276: mol_type = other DNA
atggccgcagccggccagctctgtctcttatacctttccgcggggctcctctcccggctcggggcagctttcaaccttgacacccgcgaggacaatgtaatcaggaagtacggagatcctggatccctgtttggtttctccctggccatgcattggcaactccagcccgaagataaacgcctgctgctggtgggcgccccccgcgccgaggccctgccattgcagcgtgctaatcggacaggtggattgtatagctgcgacatcactgcccgtgggccatgtacccgcatcgagttcgacaacgacgccgacccaacctctgagagcaaggaagaccagtggatgggggtcaccgtgcagtcacagggccccgggggcaaagttgtgacctgcgctcatcggtacgagaagagacagcatgtcaatacaaaacaggaaagccgggatatttttggaagatgctacgtgctgtcacagaacttgcgaatcgaggacgacatggacggcggagactggtcgttttgcgacggacggttacgcggccatgagaagttcggctcctgccaacagggcgtggccgctacctttaccaaagattttcactatattgttttcggcgcacctggcacctacaattggaaaggaattgtacgcgtggaacagaagaataatactttcttcgatatgaacatttttgaagacggaccctacgaggtaggcggcgagacagagcatgacgaaagtctggttcctgtaccagccaacagttatttagggttcagtctcgacagcgggaaaggcatcgtgtctaaagacgagataacattcgtctcgggagctccccgtgcaaaccactctggagcggtagttctcctgaaacgcgatatgaagtcagcccacctcctgcctgagcacatattcgatggcgaggggttggccagtagtttcgggtatgatgtggccgtggtggacttaaataaggatggatggcaagatatcgtgataggtgctcctcagtattttgaccgcgatggggaagtcggcggcgccgtctacgtctacatgaatcagcaggggaggtggaacaatgttaagcccatcagactaaatggaaccaaggacagcatgttcggaattgctgtgaaaaacatcggcgatatcaatcaagatggctaccctgacatcgcagttggcgcaccttacgacgatttggggaaagtcttcatatatcatggtagtgcaaatgggatcaatacaaaacccacccaggtcctgaaaggaattagcccttatttcggttattcgattgccggcaacatggatctggaccgaaactcatacccggacgtggccgtgggctccctcagcgactccgtcacaattttccgctctaggcctgttatcaatatccagaagacgatcactgtcaccccaaaccggatagaccttagacagaagacggcttgcggcgctccttccggaatatgcctgcaggtcaaatcctgttttgagtatactgccaatcccgcgggttataatccgtctatttctattgtggggacgcttgaggctgagaaggaacgaaggaaatccggcctatcctctcgtgttcagtttagaaatcagggtagcgagcccaaatatacacaggagctaacgctgaaacgacagaaacagaaagtttgcatggaggaaaccctctggctccaagacaacatacgggataaactaagaccgattcctatcactgcatctgtggaaatacaggaaccctcatctcgcagacgagttaactcccttccagaagtgttgccgattctgaatagcgacgaacccaagaccgcccacatagacgtgcattttcttaaagaggggtgcggtgacgataatgtgtgcaactcgaacctcaagctggagtacaaattttgtactcgggaaggaaaccaagataaattttcctacctccccatccagaaaggtgtgcctgaactggtgctgaaggaccagaaggacatcgccctcgaaattactgtgacaaacagcccgagtaaccccagaaacccaactaaagacggcgacgatgcccacgaggccaaactcatcgccacgtttccagacaccctgacgtacagcgcctacagagagctacgggccttccctgagaaacaattgtcctgtgttgccaatcagaacggaagccaggccgactgcgaactcggaaatccatttaagaggaacagcaacgtgactttctatctggttctctccacaacggaagtaacatttgacacacctgaccttgatatcaaccttaaactggagaccacaagcaaccaagataacctcgcccccatcacggccaaggcaaaggtcgtcattgagctgctgctctctgtgtccggtgttgccaagccgagccaggtgtacttcggtgggactgtagttggggagcaagccatgaaatcagaagatgaggtgggcagcctcatcgagtacgagtttcgggttatcaacctagggaaaccgcttacaaatcttgggacagctaccctaaatattcagtggccaaaagagatcagcaacggtaagtggctgctctacctcgtaaaagtcgaaagcaagggtctcgagaaagtaacctgtgagccacagaaggaaatcaactctttgaatctgacagagagccataattcacgaaagaaaagggagatcacagagaaacagatcgatgacaacagaaagttttcacttttcgctgaaagaaaatatcagacattaaactgcagcgttaacgtcaattgtgtgaatatccggtgtccactacgcggcttagactcaaaagcttccctcattctgcgctctaggttgtggaacagcactttcctagaagagtattccaaactgaactacttggatatcctgatgagggcttttatagacgtcaccgccgcagccgagaatattaggttaccaaatgccggcacccaggtcagggttaccgttttcccgagcaagacggtcgcccaatatagcggggtgccgtggtggataatccttgttgccatattggctggtatcctaatgctggccttactcgtctttattctgtggaagtgtggcttctttaaaaggtccagatatgatgattcggtgccacggtaccacgcagtcaggatcagaaaagaagagcgcgaaatcaaggatgaaaagtatattgataacctggaaaagaagcagtggatcacaaaatggaatgagaatgagagttactcttag

SEQ ID NO: 15582 - DNA, 2865 bp, synthetic construct
  misc_feature 1..2865: note = Description of Artificial Sequence: Synthetic coding sequence
  source 1..2865: mol_type = other DNA
atgggcgtgactgtccagtcacaaggaccaggcgggaaggtggtcacatgtgcgcatcgatatgagaaacggcagcacgttaacacaaaacaagagtctcgcgatatcttcggccgctgttacgtcttgagtcagaatctgcgtatcgaggacgatatggacgggggcgactggagcttctgcgatgggcggttgaggggccatgagaagtttgggagctgccagcagggggtggccgccacttttacaaaggatttccattacatcgtgttcggagccccaggcacgtacaattggaaggggctcttattcctcacaagtgtgagctataccgacccagaccaattcgtttacaagacccggccaccgcgggagcagcctgatacattccctgacgtaatgatgaatagctatctggggttctctctggattcagggaaaggaatagtgtccaaggacgagattacctttgtgagtggcgcaccccgagccaaccattccggagcagtggttctcctgaaacgtgatatgaaaagcgcccatcttctgcccgaacacatcttcgacggtgagggcctggcgtcttccttcgggtacgacgtcgccgtagtagacttgaataaggacggttggcaggatatcgttattggggcaccacagtacttcgacagggatggcgaggtgggaggcgcagtctacgtgtacatgaatcagcagggcaggtggaacaacgtcaaacccatccgattgaatggaacaaaagatagcatgttcggtattgcggtaaaaaatattggcgacattaatcaagatggctatccagacattgctgtgggggccccctatgacgatctgggcaaggtgttcatctatcacgggagtgctaacggcattaataccaaaccgacgcaggtcctgaagggcatttctccatacttcggttactccattgccggaaatatggatttggatcgcaatagctacccagacgtggcagtgggtagcttgtcagattctgtgacaatctttagatcaagaccggtgataaatattcagaaaacaatcacagtgacccctaatcgcattgacctacgtcagaaaacagcatgtggcgcaccaagcggtatttgtctgcaagtgaaatcctgctttgaatatacggccaaccccgcaggttacaacccttctatatctattgtcgggacactggaagcagagaaggagcgtcggaagtctgggctgtcatcaagggttcagtttcgcaatcagggcagcgagccaaagtatactcaggagctcaccttgaagagacagaagcagaaggtttgcatggaggaaacactttggctgcaggataatatccgggacaagctccgccccattcctatcactgcctccgtagaaattcaggaaccttcaagcagacggcgtgtgaattcactccctgaggttctgccaatcctgaattctgatgagcctaaaactgcgcacattgatgtgcactttctgaaggaagggtgtggggatgataatgtttgcaacagcaaccttaagctggagtataagttttgcacgcgggaaggaaaccaggacaagttttcgtatctaccaatccagaagggggtgcctgagttagtcctgaaagatcagaaggacattgcgctggaaataaccgtaacgaattccccgagtaatccccgtaatcctacaaaagatggagatgacgctcatgaagcgaagctcatcgccacatttcccgatacccttacatacagtgcctatagggagctcagggcttttccggaaaagcagctgtcctgtgttgccaaccagaacggctctcaggccgactgcgaactcggaaaccctttcaaacgtaatagcaacgtaactttttacctggtactgtccacaaccgaagtcacatttgacacaccggacttagacataaacttgaaactggaaaccacaagtaatcaggacaacctagctccaatcaccgctaaggcaaaagtggtcattgaattgttattgagcgttagcggcgtagccaaaccaagtcaagtgtacttcggtggtaccgtggtgggagaacaggctatgaaatccgaagacgaagtggggagtctgatcgagtacgagttccgagtgatcaatctgggaaaaccgctgaccaatcttggaaccgcaacactgaatatccaatggcccaaagaaataagtaatggcaaatggttactctatctcgttaaggtagagtcaaaaggtcttgagaaggtgacctgcgaaccccaaaaagaaatcaattccctgaatttgaccgagagccacaactcgcggaagaaacgtgagatcaccgagaagcaaatcgacgacaaccggaagttttccttattcgcagaacgcaagtatcagacactaaattgcagcgtcaatgttaattgcgtcaacataagatgcccactgagagggctggactctaaagcctccctgatcttacgatctagactttggaactctacattcctcgaagaatacagcaaactcaactatttggatatccttatgcgggcatttatagatgtgacggctgcggccgaaaatatcagactccctaacgcaggtacgcaggtcagagttacggtttttccaagcaaaaccgtggcccagtactccggcgttccttggtggatcattcttgtagcaatcctggccggaattctcatgctggccctcctcgtgttcatcttatggaagtgtggattctttaaacgaaataagaaggatcactatgacgctacctaccacaaggctgagatccacgcacagccaagtgacaaggaacgtctaacatctgatgcctag

SEQ ID NO: 15583 - DNA, 3393 bp, synthetic construct
  misc_feature 1..3393: note = Description of Artificial Sequence: Synthetic coding sequence
  source 1..3393: mol_type = other DNA
atggcagctgcagggcagctgtgtttactgtatctgagcgccggcctgctatcaagactgggggctgctttcaatctggatacccgggaggataacgtgattcggaagtacggcgatcctgggtcattgttcggattcagccttgccatgcactggcagctccaacccgaggacaaaagactcctcttggttggcgcccctcgtgccgaagcactcccactgcagcgggccaacagaaccgggggcttgtatagctgcgacatcacagccagaggcccctgcacaaggattgaattcgataatgacgcagatcctacatccgagtccaaggaggatcaatggatgggcgtcacggttcagagccagggccccggcggaaaggtcgttacctgtgctcacagatacgaaaagcggcaacacgttaataccaaacaggagagcagagatatctttgggcggtgttacgtactatcccagaacctgaggatagaagatgacatggacggaggcgattggtccttttgcgacggtaggctgcggggacacgagaagttcggatcctgccagcaaggggttgccgccacatttaccaaagacttccactacatcgtctttggtgcccctggaacctacaactggaaagggatcgtgcgagtggagcagaaaaataatactttcttcgacatgaatatcttcgaggacggaccctacgaggttgggggcgaaacagaacatgacgaatcacttgtacctgtcccagcgaacagctatctaggcctactgttcctgacctcagtgtcctacaccgatccagaccagttcgtctataaaacgaggcctccgcgcgagcagccagataccttccccgacgtgatgatgaacagttacttgggcttctctcttgacagcggaaaaggcatagtgtctaaggacgaaatcacctttgtctctggagccccacgggcaaaccactctggcgccgtggttctcctgaagagagacatgaagtccgcacacctcctccccgagcatatctttgatggggaagggcttgcatcgtctttcggctatgacgtcgctgtagtcgacctgaataaggatggttggcaggatatcgttatcggagctcctcaatattttgacagggacggcgaggtgggaggtgcggtctatgtttatatgaaccagcaggggcggtggaataatgtcaaacccatccggctgaacggaacgaaggacagcatgttcgggattgccgtgaaaaacattggggacattaatcaggacggatatcccgacatagccgtgggtgcaccatacgacgacctcggtaaagtgtttatatatcacgggtccgctaacgggatcaacaccaaacccacacaagtgctcaaaggaatctccccatattttggctatagcatagccgggaatatggacttagaccgtaatagctatcctgatgtggccgtgggtagcctgtcggattcagtaactatattcagaagtcgcccagtgatcaatatccagaagaccattaccgtaacccctaaccgcatcgacctgagacagaagacagcctgcggggctccaagcggtatttgtttgcaggttaagagttgtttcgagtatacagctaatccagcagggtacaatcctagcatttctattgtggggactctagaagctgagaaggaacggcgaaagtcaggactttcatctcgggttcagttcagaaatcaggggtctgaacccaagtatacccaggagctcacattgaagaggcagaaacagaaggtgtgcatggaggagacactgtggctgcaggataacattagggataaactccgcccaattcctattacagcatcggtcgagattcaggaaccctcctcaagaagaagagttaacagtctcccagaagtgttacccattctgaactcggacgaaccaaagacagcgcacatcgatgtgcacttccttaaagaaggttgcggagatgataatgtgtgtaacagcaatctcaagctcgagtacaagttttgcacaagagaagggaaccaggacaagttttcgtatctgccaatccagaagggcgttcctgagctcgtgctaaaagatcagaaagatatagcgctggagattacagttaccaattcaccctctaatccacgcaaccctaccaaggacggcgacgacgctcacgaggccaagctcatagccacattccccgacactctgacgtactccgcataccgggaactgagagccttcccagagaagcagttgtcctgtgtcgccaaccagaatggaagtcaagccgactgcgaattgggcaaccctttcaaacgcaacagtaatgtcactttttaccttgtgctgtccaccaccgaggtcactttcgacacccctgatctcgatattaatctgaagctcgagacgacctccaaccaggacaacctagcgcccattactgccaaggctaaggtcgtgatagagttgctcctctcagtgagtggggttgcgaagccttcccaggtgtactttggcggtactgttgtaggcgaacaggcaatgaaatccgaggatgaggtaggaagcctgatcgagtatgaatttagggttattaacctcggcaaacccctcacgaacctcggcacagccacactgaacattcagtggcctaaagagatatcaaatggaaagtggttgctgtatctcgtgaaggttgaatctaaggggctggagaaagtgacgtgcgagccacaaaaagagattaattcattaaatttaacagaatcccacaattcccggaagaaacgggagatcaccgagaagcagatcgacgacaataggaaattttccttgttcgctgagcgcaagtaccagactcttaactgtagcgtgaatgtaaattgtgtgaacatccggtgccctctccgcggcctagattctaaggcgtccctcatcctgagatctagactgtggaattcgactttcttagaggagtactctaagcttaactatctggacatcctcatgcgggccttcatcgacgttaccgctgccgccgagaatatccgccttccaaatgctggaactcaggtgcgcgttacagtattcccatccaaaactgtcgcccagtattcaggggtgccctggtggatcatcttggtagccattctggcaggcatcctgatgctggccctcttagtcttcatcctgtggaagtgtggattctttaaacgatcaaggtatgacgacagcgtgccgcgataccacgcggtgcgcattcggaaagaggaacgggaaattaaagacgagaaatacatcgataacctggagaaaaaacagtggatcacaaaatggaacgagaacgaaagctactcatag

SEQ ID NO: 15584 - DNA, 3261 bp, synthetic construct
  misc_feature 1..3261: note = Description of Artificial Sequence: Synthetic coding sequence
  source 1..3261: mol_type = other DNA
atggctgccgcaggccaattatgcctgctttatctcagcgcaggtcttctgagcaggctgggagctgcctttaacctggatacaagagaagacaatgtgataagaaaatatggagacccgggttcactgtttggattctctcttgcgatgcattggcaactacagcccgaagacaaacggttattgctagttggggcgcccagagccgaagccctgcctttgcagcgggctaatagaaccggcggactctatagctgcgatatcacagcccggggtccttgcacccggatagagtttgacaacgacgctgatccaacatcggaatccaaagaggaccagtggatgggcgtcacagtccaatcccaaggaccagggggaaaggttgtcacatgcgcccataggtacgagaagaggcagcacgtgaacacaaaacaggagagtcgggatatctttggcaggtgttatgtgctcagccaaaacttgcggatcgaggacgacatggacggtggtgattggagcttctgcgacggacggttgaggggacacgagaaatttgggagctgtcagcaaggcgttgcggctacctttacaaaggattttcattacattgtgtttggagcgcccgggacgtacaactggaagggactcctgttcttaacttctgtgtcttacacggatcctgaccagttcgtctacaaaactcgaccacctcgcgaacagcccgatacatttccagatgttatgatgaattcatacttgggattctctctggacagcggcaagggcatcgtttcgaaagacgaaatcacgttcgtctccggtgctcctcgggccaatcatagtggggccgtcgtgcttctcaagcgcgacatgaaatctgcgcatctcctcccggagcacatcttcgatggggaggggctggcgtcctcctttggttatgatgttgctgttgtcgacctgaacaaggacggatggcaagacatcgtgatcggcgctcctcaatacttcgacagggacggagaggtcggtggggccgtctatgtgtatatgaatcaacagggaagatggaacaatgtcaaacccatccgcctgaatggtaccaaagactcaatgttcggtatcgcggtcaaaaacatcggggatattaaccaggatggttacccggacatagcggtaggagcgccttatgacgacctaggtaaggtgttcatataccatggctctgcaaacggaattaacactaaacctacacaagtattaaaggggatttctccctactttgggtattcaattgccgggaacatggacctggatcggaactcctaccctgatgtggccgtcggttctctttctgacagcgtgaccattttcaggtctagacccgtgattaatattcagaagacaatcaccgtcaccccaaacaggattgatctccggcaaaaaaccgcctgtggagccccaagcggtatttgtctgcaggtcaagagctgttttgagtataccgctaatccagctgggtataacccttccatttcgattgtgggcacgcttgaggcagagaaagaacgccggaagtcagggctgtctagccgggtccagtttcgcaatcaggggtccgagccaaagtatactcaggagcttactctgaaacgccagaagcagaaggtctgcatggaggagacgctctggctgcaggataatatcagggacaaactgcggcctatccccatcaccgcatcagtagaaattcaggagccttcatccaggcgcagggttaattctctgccagaggtgctgcctattctgaactccgatgaaccgaagaccgcccacatcgacgtccacttcttgaaggaaggatgcggcgacgataacgtatgtaactcaaacctgaaactggaatataagttttgcactagggaagggaatcaggataagttcagctacctgccaatacagaagggtgtccccgagctggtcctgaaggaccagaaggatatcgcactcgagattaccgtaacaaattcccccagcaacccacgcaacccgaccaaggatggtgatgatgcccacgaagcgaagctgatcgcaacctttccagacacgttgacttatagcgcgtacagagagctgagggcatttccagagaagcagttgtcttgtgtggccaaccagaacgggagccaggctgattgcgagctgggaaacccctttaagagaaacagcaatgtgaccttttacctcgtcctcagtacaactgaagtgacttttgataccccagacctcgacatcaatctgaagctcgaaaccacaagtaatcaggacaatttggcgccgataactgcaaaagccaaggtagtgatcgagctactactgtctgtctccggggtggcaaaaccgagtcaggtctatttcggggggaccgtcgtaggcgaacaggccatgaagtcagaggacgaagttggatcactgatagaatatgaattccgcgtcattaacctcggtaaacccctgaccaacctgggcacagccaccttgaatatccagtggcccaaggagatttccaacggtaagtggctgctgtatctggtcaaggtcgaatccaaaggacttgaaaaagtcacctgcgaaccacagaaggaaatcaactcactgaacctgaccgagtcccacaactctcggaaaaagcgggagattacggagaagcagatcgacgacaacagaaagttcagcctgtttgcagagaggaagtatcagacactgaactgctccgtgaacgtcaactgcgtaaatatccgatgtcctctgcgcgggctggattcaaaggccagccttatactgcgcagccgcctgtggaatagcaccttcttggaggagtattcaaaactgaattacctggacattctgatgcgtgcatttatcgatgtgaccgccgcagccgagaacattagactgcccaatgctggaacccaggtgcgggttacggtgttcccatctaagacagttgcccaatactctggcgtgccctggtggatcatcttagttgctatcctggccggcattttaatgctagctctgcttgtgttcattctatggaagtgtgggttcttcaagcgtagtcggtatgacgactccgtgcctagatatcatgctgtaaggattaggaaggaggagagagagataaaagatgagaagtacatcgacaacctcgagaagaagcagtggataacaaagtggaatgagaacgagtcttatagttag

SEQ ID NO: 15585 - DNA, 3414 bp, synthetic construct
  misc_feature 1..3414: note = Description of Artificial Sequence: Synthetic coding sequence
  source 1..3414: mol_type = other DNA
atggcgggagctcggtctagagacccgtggggagcctcagggatttgctatctgttcgggagtctcctggtcgaattactcttcagcagagcggtagctttcaatctggatgtcatgggcgccttgcgcaaagaaggtgagcctggatctctatttgggttttcggtggcactccaccgccagctgcaaccaaggccgcaatcctggctgctggtgggtgctcctcaggcgctggccctgccaggtcagcaggctaacagaactggcggcctttttgcttgcccactgtcactggaagagactgactgttaccgtgtggatatcgatcagggagccgacatgcagaaggagagcaaggagaatcaatggctcggtgtgtccgtgaggagtcaaggccctggaggcaaaatcgtcacctgcgctcaccgatacgaggcccggcaacgcgttgatcagatcctggaaacccgggacatgataggcaggtgcttcgtgctgtcgcaggatctcgctatccgggacgagttagacgggggggagtggaaattttgtgaaggccgaccccaggggcacgaacagttcggcttttgtcaacagggaaccgctgccgcgtttagtccagactcccactacttgctatttggcgctcctgggacttataactggaagggcctcctattcgtaaccaatatcgactcctccgaccccgatcagttggtgtacaaaacactcgaccccgctgacaggcttcccggcccagccggagatctagcgctgaattcttatttaggtttttctattgactcggggaaaggcctggtgagagccgaagagctgagttttgtcgcgggagctccaagggctaaccataagggagccgtcgtgatcttacggaaggactctgctagcagattggtaccagaagtgatgctgagcggggaacggctaacaagcggcttcgggtatagcctggccgtggctgatctgaatagcgatgggtggcctgatctgatcgttggtgctccctacttcttcgaacgtcaggaggagcttggaggagctgtctacgtgtacctgaaccaagggggtcattgggccggaattagccctctgaggctgtgtggcagcccggattcaatgtttgggatttccctcgcagttctgggcgatctgaaccaggatggatttccggatatagccgtgggggctccgttcgatggcgacggcaaggtatttatctaccacggcagttccctaggcgttgtggccaagccctcccaagtccttgagggagaggcagtgggcattaagtcttttgggtactctctctctggtagcctggacatggacggcaaccagtatccagacctgttggtggggtccctggcggacaccgccgttttgtttagagcaaggccaatcttacacgttagtcatgaagtatctatcgcgccaagatcgatcgacctggaacaacccaattgtgccggggggcactccgtatgtgtggatctaagagtatgtttctcttacattgcggtccctagctcttactcccccaccgtagctctagactatgtgttggacgctgataccgacagacgcctacggggacaggtgccacgggttacattcctttcccgaaatcttgaagagcctaagcaccaggcatctggcactgtatggctgaaacaccaacacgacagggtttgtggcgatgccatgttccagttacaggaaaacgtaaaggataagcttcgggcgattgtggtgaccctctcttatagcctgcagacgccacggctccggcgccaggcgccaggccaagggttgccccccgtcgctcccatcctcaacgcccatcagccttctactcagagggctgagatacacttcctgaaacagggctgcggcgaagataagatttgtcagtccaacctgcagcttgtgcgcgcccggttctgcacaagagtatcagacactgaatttcagccgctgcctatggatgttgatgggaccaccgcactatttgctctgtctggccagcccgtgatagggctcgagctgatggtgacaaatctgccaagcgatcctgcccagccacaggctgatggggatgatgcgcatgaggcgcagttgctggtcatgctgcccgacagtcttcactatagcggcgtcagagcgctcgaccccgcagagaaacctctgtgtctctccaacgaaaacgccagccacgtcgaatgcgagcttgggaatcccatgaaacgcggggcccaggtcacgttttacttaatattgagcacatccggcataagcatcgagaccacagaattggaagttgaactcttgttagccacaattagtgagcaagaactccaccctgtcagcgcgcgtgcaagagtgtttattgaattgcctctatctattgctggcatggctatcccccaacagctgttcttttccggcgtggtgaggggagagagggctatgcagtccgagcgtgatgttggctccaaagtgaagtacgaagtgacagtcagtaatcaaggccaaagcctgcgcacattgggaagcgcatttttgaatataatgtggccacatgaaatcgccaatgggaaatggcttctttacccaatgcaggttgagttagagggtgggcaaggccccggacagaaaggcttgtgctcacccagacccaatatcctccatctagatgtagattctagagatcgtaggcgcagagagcttgaaccaccggaacagcaagagcccggcgaaagacaagaaccatccatgagttggtggccagtcagttcagccgaaaagaagaagaacataacccttgattgtgctaggggaactgccaattgcgtcgtgttctcctgtcctctctacagttttgacagggccgccgtgctgcacgtttggggccgcctgtggaattcaacttttctagaggagtattccgctgtgaagagcttagaggtgattgttcgtgctaatatcactgtgaagtcctctattaagaatctgatgcttagagacgcgtcaaccgtgattccggttatggtatatctggatcccatggctgtagtagctgagggggttccttggtgggtgattttacttgccgtactcgctggacttctcgtccttgcccttctggtgttactcctgtggaagatgggcttttttaagagggccaaacacccggaggccaccgtccctcagtaccatgcagtcaaaatacctcgcgaggacagacagcaattcaaggaggagaagaccggaacaatcctccgcaacaactggggctccccgagaagagaaggcccagatgcccaccccatcctggccgctgacgggcaccccgagcttggccccgatggccaccctggcccggggactgcgtag

SEQ ID NO: 15586 - DNA, 3489 bp, synthetic construct
  misc_feature 1..3489: note = Description of Artificial Sequence: Synthetic coding sequence
  source 1..3489: mol_type = other DNA
atggccggtgctcgcagtcgcgatccttggggcgcatctggaatctgctacctcttcggatctctcctggttgaacttctctttagtcgggcagttgcttttaatctggacgtaatgggggccctgaggaaggagggcgagcctggttccctgtttggtttttctgtggcgctccacaggcagctgcagcctcgtccccagtcctggttgctcgtgggagctccccaggccctcgcactgcccggacagcaggcaaatcggacggggggcctatttgcttgtcctctgtccctggaggaaactgactgttatagagtggatatcgaccagggtgccgacatgcagaaggaatctaaagagaaccagtggctgggagtctccgttagaagtcagggcccaggcggcaaaattgtcacgtgtgctcaccggtacgaggcgagacagagagtcgaccaaatactggagactcgggatatgatcggccggtgtttcgtcctctcccaggacctggccattcgggacgaactggacgggggtgagtggaaattttgtgaaggcaggccgcagggccatgagcagtttggcttttgtcaacaggggactgctgccgcttttagccctgattctcattacctgctctttggcgcccctggcacttacaactggaagggaactgccagagtagaactttgtgcccagggctccgcggatctcgcccatctggacgacggtccgtacgaggccggaggggaaaaggaacaggatcctcgactgataccggtgccagctaacagctactttgggctgctctttgtgaccaacattgactctagtgaccctgatcagcttgtgtataagactcttgacccagcagacagactccctggacccgctggcgatttagcgttgaattcctacctggggttcagcatcgattcaggaaagggtttggtgcgggccgaggagctgtcctttgtggctggagcgcctcgggctaatcacaagggcgctgtagtcatattaagaaaggattctgcgtcccggttggtcccagaggttatgctgtctggcgagaggcttaccagcggattcggttactccctcgcagtcgccgacctgaacagcgacggctggcccgacttaatcgtcggagccccttacttttttgagcggcaggaggagctggggggggcagtctacgtttacctgaaccaagggggccactgggccgggatatcacctcttcggctgtgtggttcaccggattccatgtttgggataagccttgcagtgctgggagatttgaatcaggatgggttccccgacatcgccgtgggagccccctttgatggcgatggcaaggtgttcatctaccatggatcttctcttggcgttgtcgccaagccatcccaggtgctcgagggcgaagcagtcggaatcaaatctttcggttatagtctgagcgggtcattagacatggacgggaaccaatatccggatctcctggtagggagcctggccgacaccgccgtgctgtttagagcccgtccaatattgcacgttagtcatgaagtaagcattgccccaagatccattgacctagagcagcccaattgtgcggggggccactctgtatgtgttgacctccgagtgtgctttagttatatcgctgtgccgagttcttactctccaaccgtggcccttgactatgtgttggatgccgacaccgatcgcagactgcgcggccaagtgcctcgcgtgacctttctcagtcgcaacctcgaagaacctaaacaccaggcaagcggaactgtttggctgaagcaccagcacgaccgcgtctgcggggatgccatgtttcaactccaggaaaatgtcaaggataagttgagggcaattgtggtcactctgtcttactcactacaaactccacgactcagacgccaggctccaggtcaaggtctgccacctgtcgcccccattctcaatgctcatcaaccctccacccagcgtgccgagatacatttcctgaagcagggatgcggcgaagataaaatttgccagagtaatctgcaactggttcgggcccgcttttgtacacgggtctccgacacggagtttcagcccttgcccatggacgtagacgggacaaccgcactttttgccctttccggccagcctgtgattggcctcgagttaatggtgacaaaccttcccagcgaccccgctcaaccccaggccgacggggacgatgctcacgaagctcaacttctggtgatgttacccgactccttacactattccggggtccgtgccctcgatccagcagaaaaaccgctctgcctgtccaatgaaaatgcttcccacgtagagtgcgaactgggcaatcccatgaagaggggtgcacaggttaccttttacctgatcctttctacctccgggatttctatcgagaccaccgaactcgaagtggagctgttgctggctacaataagcgagcaggaactccacccagtgagtgccagagccagggtgttcatcgagctcccactgtccattgccgggatggccatcccacagcagctgttctttagtggagtggtgaggggagaaagggctatgcagtccgaaagagatgtaggctctaaggtcaaatatgaggtgacagtttccaatcaggggcagtccctcaggacactaggctccgcgtttctgaacatcatgtggcctcacgagatcgccaatggcaaatggctcttgtatcccatgcaggtggaactcgagggaggtcagggacctgggcagaagggcttgtgcagtccgaggccgaacattctgcacttagatgtggattcgagagaccgaaggcggagggaacttgaacctccggaacagcaagagcccggcgaaaggcaggagccatccatgtcctggtggccagtatcctcggcagagaagaagaagaatatcacgctggattgcgcaagaggcacagcaaattgtgtagtgttttcttgccctttgtatagtttcgatagagctgcagtgctgcacgtatggggccgactatggaacagcacatttctcgaagaatactctgccgtcaaaagcctagaagtaattgtgcgcgcgaacatcactgttaagtcttccatcaagaacctgatgttgagggacgcctcaaccgtgatcccggttatggtgtacctcgaccctatggcggtcgttgcagagggggtaccttggtgggtgatcctcctggcagtgttggctggtctcctggtcctcgccctgctcgtgctcctgctgtggaagtgcgggttctttcatcgcagctcacagtcctcctctttccccactaactaccatagggcatgccttgccgtacaaccttctgctatggaggttggcggtccaggcaccgttggatgggacagctctaatggcaggtcaacaccaagacccccctgtccctctaccatgcgttag

SEQ ID NO: 15587 - DNA, 2976 bp, synthetic construct
  misc_feature 1..2976: note = Description of Artificial Sequence: Synthetic coding sequence
  source 1..2976: mol_type = other DNA
atggctggagctcgcagtcgggacccttggggcgcgtccggaatctgctacctttttggctccttgctggttgagctactgttcagcagggctgtcgcttttaatctcgatgtgatgggagctcttcgcaaagagggcgagcctgggtcactgttcggattctccgtcgcactgcaccggcaactgcagccaagacctcaatcctggctcctcgtcggtgctccacaggcgcttgctctgcctggacagcaggcaaaccgtaccggcggcttgtttgcctgtccccttagcctggaagaaactgattgttacagggtggatattgaccaaggagccgatatgcagaaggagtctaaggaaaaccagtggttgggagtgagcgtccgaagccagggccctggcggaaagatagtcacctgcgctcatagatacgaggctagacagcgagtggatcagattctggaaacaagggatatgatcggccggtgttttgtcctatcccaggacctggccattagagatgaacttgacgggggcgagtggaagttctgcgagggccgtcctcagggccacgagcagtttggcttctgccagcagggcactgcagcggctttctctcccgatagtcattatcttctgttcggagcccctgggacttacaattggaaggggaccgcacgagttgagttgtgcgctcagggatccgctgatctggctcacttggatgacggaccctacgaggcaggcggggaaaaggagcaagaccctcgacttatacctgtgccagcgaattcctactttggactcctcttcgtgaccaacatcgactccagtgaccccgatcagctggtctacaagacccttgacccagctgataggctcccaggccccgctggagatcttgccctgaatagctacctggggttttccattgatagtgggaagggccttgttagagccgaagaactgagctttgtagccggtgctccccgcgctaaccacaagggggctgtagttatactacggaaggattctgcaagcagactcgtgccggaggtcatgctgagtggcgaaaggctgacatcgggctttggatactctctagctgtggcagatctcaactctgatggatggcctgacctcatcgttggagcaccatatttcttcgagcggcaagaggagttgggtggggctgtgtacgtgtacctcaaccagggaggacactgggcagggatatcaccactccggctgtgtgggagtcctgatagcatgttcggtatctctctggccgtcctaggcgatcttaatcaggatgggtttcctgacattgcagtgggcgccccttttgacggggacgggaaggtgttcatctatcacggctctagcctgggagtggtggcgaagccctcccaggtgttggaaggcgaggcggtggggataaagagcttcgggtattccttatccggatccctggacatggatggaaaccaataccctgacctcctggtggggtccctggcagataccgctgtccttttccgtgcacgaccgattctccacgtgtcccatgaagtgtccatcgctcccaggagcatagacctggagcagcccaactgcgcgggcggtcatagtgtttgtgtagacctgcgcgtgtgcttctcctacatagcagtgccaagttcatactcccctaccgttgctctggactatgtgctggacgctgacaccgaccgccggctgcgagggcaagtgccacgggttacatttctcagccgcaacttagaggagccaaagcatcaggctctcgatccggcggaaaagccgttgtgtttgtccaacgagaatgcaagtcacgtcgagtgcgaacttgggaatccaatgaagcgtggggctcaggtaaccttctatctcattctgtccaccagcgggatcagcattgagactacggagcttgaagtggagctcttgctcgccaccattagcgagcaggagcttcaccctgtgtccgcccgagcccgggtatttatagaactgccccttagcattgccggaatggccatccctcagcagctgtttttctccggtgttgtgagaggagagcgcgctatgcagtccgagagagatgtcggctcgaaagtcaaatacgaagtcaccgtgagcaaccaggggcaatcgcttcggactctcgggagcgcgtttctgaatataatgtggccccatgagatcgcaaacggcaagtggctcctgtacccaatgcaggtggaattggagggcgggcagggccccgggcagaagggcctgtgttcccctaggccaaatatccttcatctggacgtcgatagtagggacaggagacgccgggagctcgaacctcccgagcaacaggagccaggtgaacggcaggagcctagcatgtcatggtggcctgtcagtagcgccgagaagaagaagaatataacactggactgcgcacgtggaacggcaaactgcgtcgtgttctcttgccccctgtattcttttgaccgcgctgctgtcttgcacgtctggggccgtctatggaattccacattcctcgaagaatattctgcagtcaaatccctggaagtaatcgtgagggcaaacatcacagtcaagagctcaatcaaaaacctgatgctgcgggacgcctcaacagtcatcccagtaatggtgtatctggacccaatggctgtggtcgccgagggcgtgccatggtgggtgattttgttggctgtgttagcaggtctgctcgtcttggcactgcttgttctgctgctctggaagtgtggcttcttccaccgctcctctcaaagcagctcatttcccactaactatcatcgcgcctgtttagctgtacaaccaagtgcaatggaggttggcggccctggcaccgttggctgggacagcagtaacggtcgctccactccaaggccgccctgccctagcaccatgcggtag

SEQ ID NO: 15588 - DNA, 3357 bp, synthetic construct
  misc_feature 1..3357: note = Description of Artificial Sequence: Synthetic coding sequence
  source 1..3357: mol_type = other DNA
atggccggagctagatctcgggacccttggggcgcttccggaatttgctatcttttcggaagtctgctggttgaactcctttttagcagggcggtggcatttaatctggatgttatgggagcactcaggaaagagggggaacccgggtctctgtttggcttcagcgtagccctgcaccgccagttacagccccggccccagtcctggcttctggtgggcgccccacaagccttggctttacccggccagcaggcgaacagaaccggaggcctctttgcctgtcccctatctcttgaggagacagactgctaccgcgtcgacatagatcagggtgccgatatgcagaaagaaagcaaagaaaatcagtggctgggtgtttctgtgaggagtcagggtcctggaggtaaaatcgtaacttgtgcccatagatacgaggcccgtcaacgtgtggaccagattttagagacccgggatatgatcggtcgatgctttgtcctctcccaggatttggctatcagagacgagctggatggtggagagtggaaattctgtgagggtcgtccccaggggcacgaacagttcggattctgccagcagggcacggcagctgccttctcaccagattcccattacctcctcttcggcgcgccgggtacgtataactggaagggccttctttttgttaccaatattgatagttcggatcccgaccagttagtttataaaacacttgacccagccgatcgcctgcccggccccgcaggtgacttagccctcaactcctatctgggtttctctatcgactcagggaaggggctggtgcgggctgaggagctttccttcgtggccggcgcaccaagagccaatcataaaggggccgtggttattttgaggaaggattcggcctcacggctcgttcctgaagtgatgctgagtggggagcgcttaacgtcgggctttgggtactccctcgccgtggccgacctgaattctgatggttggcctgacctcatagtgggcgccccttacttctttgagcgacaggaagagttaggtggcgcggtgtacgtgtacttgaaccaggggggccattgggcaggcatttcacccctccgactgtgcgggagccctgatagtatgttcggcatctccctcgccgtcctcggggatctcaatcaggatggatttccagacatcgccgtgggcgcaccgtttgacggggatggcaaggtgtttatttatcacggaagtagcttgggcgtcgtcgccaagccatcccaggtcctggaaggggaggcggttggtatcaaaagttttgggtactcactgtcgggttcactcgatatggacggcaaccaatatcccgacttactggttggctcacttgctgacacggccgttctgttccgggcacgcccaatactccacgtgtctcatgaggtgagcatagcgccccgctcaatcgacctggaacagcccaattgtgcaggcggacattccgtgtgtgtggatctcagagtctgcttcagctacatcgctgtgccaagctcctactccccaacggtggcattggactacgtcctggacgcggacaccgatagaaggcttagaggccaggttcctagagtcacctttttatctcggaatctcgaggaacctaaacaccaggccagcgggacagtctggctgaagcatcagcatgatcgggtgtgtggtgatgccatgttccagctacaggagaatgtaaaggacaagcttcgtgcgattgtagtgacactctcatactcccttcagaccccccggctgcggaggcaggctccgggtcagggccttcctcccgttgcacctatcctgaatgctcaccaaccaagcactcagagggcagaaatccacttcctcaagcagggctgtggtgaggacaaaatatgccagtctaaccttcaactggtcagggcaaggttctgtacgcgagtgagcgacaccgagttccaacctctgcccatggacgttgacggcacaacagcactgttcgccctgtccggccagccggttattggcctggaactaatggtcaccaatctgccttctgacccagcgcagccccaagccgatggtgatgacgctcatgaggctcaactgctcgtcatgctgccggactctcttcactatagcggggtgagggcccttgaccctgccgaaaagccactgtgcctttccaatgagaacgcttctcacgtggagtgcgaactggggaatcctatgaagcgcggcgcccaggtgaccttttatttgatactttcaacctcaggcatctccatcgaaactacggaactggaggtggaattgcttctggcaactatatctgagcaggagctacatcctgtgagcgcgagagctcgggtgttcattgagctgccactgagcattgcaggaatggccatccctcagcagctatttttctccggggtggtcagaggcgaacgcgctatgcagtcagaaagggacgtggggtccaaggtgaagtacgaggttactgttagcaatcagggacagtctttaaggactctgggatcagccttcctgaacatcatgtggccccatgaaatagccaatgggaagtggcttctctatccgatgcaagtggaactggaaggcgggcagggccccggccagaagggtttgtgcagcccacggcctaacatcttgcatctcgacgttgattctagagacaggcggcgaagagagctcgaaccgccagaacagcaggaaccaggggaacggcaagaaccaagtatgtcatggtggcccgtgagctccgcagagaagaagaagaatatcactctcgactgtgctcggggcacagctaactgtgtcgtgttcagctgccccctgtacagctttgaccgcgcagccgtgcttcatgtctgggggagattgtggaactcgacttttctggaggagtactctgcagttaagtccctcgaggtgattgttcgtgctaatattaccgtgaagagttcgatcaaaaacttaatgctgcgtgacgcctctaccgtgattcctgtcatggtgtacctggacccaatggctgttgtggccgaaggagtcccatggtgggttatcctgcttgccgttctggctggccttttggtgctggctctgctggtgctcttactctggaaatgcggatttttccatcggtcatctcagtccagctcattccctacaaactaccaccgcgcctgcctggctgtacaaccttctgctatggaggtggggggaccgggcacagttggctgggacagctctaatgggagaagtaccccccgtccaccctgtccaagcacgatgcgatag

SEQ ID NO: 15589 - DNA, 3369 bp, synthetic construct
  misc_feature 1..3369: note = Description of Artificial Sequence: Synthetic coding sequence
  source 1..3369: mol_type = other DNA
atggccggtgccaggagtcgcgatccatggggagctagcggcatatgctacctgttcggtagccttcttgtggagttgctgttcagtagagccgtggctttcaatttggacgtgatgggggctctgcggaaggagggcgaacctggatcactctttggtttcagcgtggcgttgcataggcagttacagcccaggcctcaatcttggctactggtcggagctccgcaggcattagcgctcccaggacagcaagccaatcggacgggtggtctgttcgcatgcccactgagcctggaggaaacagattgttacagagttgatatcgatcagggagccgatatgcagaaggagagtaaggaaaaccaatggttgggagtctccgtgcgttcacagggaccaggaggaaagatagtcacctgtgcccaccgctatgaagctagacagcgcgtcgaccaaattctggaaacccgagacatgatcggccgctgctttgtgctgtcccaggatctggcaattagagatgagctagatggcggggagtggaaattctgtgagggccgcccccagggtcatgagcagtttggattttgccagcagggcacagccgccgccttcagcccagacagccactacttgctcttcggcgcacctggaacgtacaactggaaagggactgcccgcgttgaactttgtgcgcaggggtcagccgacctggcacatctcgatgacggaccctacgaggctggaggcgaaaaggagcaggatcctaggttgatccctgtgccggccaacagctacttcgggttttcgattgattcaggaaagggactcgtgcgtgcagaagagttaagcttcgtagcgggagcccctcgggccaaccacaaaggagccgtcgtgattctgagaaaagactcagcttctaggctcgtgccagaagtcatgctatccggagaacgcctcacttccgggttcgggtactcactggctgtagctgatttaaactctgacggctggcccgacctgatcgtaggtgcgccatacttcttcgagagacaggaagagctgggaggagctgtgtacgtttacctcaaccagggcgggcactgggcgggaataagccctctcaggctgtgcggctcccccgacagcatgtttggaatttccctggccgttctcggagatctgaaccaggatggctttcctgacatcgccgtcggcgctccttttgatggggacggcaaggtcttcatttaccatggaagcagccttggggtcgtggcgaagccaagccaggtgttagaaggagaggccgttggtatcaagtcctttggttactccctgagcggctcactcgacatggacggtaaccagtaccccgacctgctcgttggaagtctggctgacactgctgtgctcttccgtgctcgccccattctccacgtgtcgcatgaggtgagcatcgctccccggtctattgatctggaacaacccaattgtgctggaggccattcagtgtgtgtggacctgagggtgtgctttagctacattgccgtaccttcttcatattcccctactgttgcactcgactacgttttagatgctgatactgatcgcagacttcgaggccaagtcccaagggttacctttctgagtcggaatcttgaggagcctaagcatcaggcgtcagggaccgtctggctcaagcaccagcacgacagggtgtgcggcgacgctatgtttcagctgcaggagaacgttaaggataagcttagagcgatagtcgttactctgtcttatagcctgcagactcccaggctgagaaggcaagcccctggtcaggggctgccacctgtggctccaatcctcaacgcccaccaaccatctacccaaagggcagagatccactttttaaagcaggggtgcggcgaggataagatttgccagtctaacttgcagctggtgcgcgccagattttgtacaagagtgagcgacaccgaattccagccactgcctatggacgtcgacggcaccaccgcacttttcgccctgtctgggcagcctgtgatcggtctggagctgatggtgactaacctgcccagcgacccagcacagcctcaggccgacggcgatgatgcacacgaagcgcagcttctcgtcatgctgcctgactcactccattactctggggtacgcgccctggatcccgccgagaaacctctgtgtcttagtaacgaaaatgcttcacacgtggagtgcgagctaggaaacccgatgaagcgaggagcccaagttacattttacttaatcttatccacttctgggatctccatcgaaaccacagagctggaggtggagcttctcctggctacgattagtgagcaggaactacatcctgtgagcgcacgcgccagagtctttattgagctgcccctcagtatcgccgggatggcaatcccccagcagttgttttttagtggagttgttaggggtgaacgtgcaatgcagagcgaacgtgacgttggctcgaaggtgaagtacgaggtaactgtgagcaatcaggggcaatcactccgcacccttgggtctgcctttcttaatattatgtggccccacgaaattgctaacgggaagtggctgctttatcccatgcaagttgagctcgagggaggccagggtcccggacaaaaaggtttatgcagccctagacccaacatcttgcacctggacgtagattcacgcgatcggcgccgcagggagttggaacccccagagcagcaggagcccggcgagaggcaggaaccctccatgagttggtggccggtgtccagtgcggaaaagaagaaaaatataactttagattgcgctaggggtaccgctaattgtgttgttttttcctgtcccctttactcttttgatagggcagctgtgctgcacgtatggggcaggctgtggaactctacctttctggaggagtactctgccgtgaagtctctggaagtcatcgtccgggcaaatatcacagtgaaatccagtattaagaacttaatgcttcgggacgcatctactgtgattcctgttatggtgtatctggatcctatggctgttgtggcagaaggagtcccctggtgggtgatacttctggcagtcctcgctggcctgctcgtgttagcactgctggtgctccttctgtggaaatgcggattcttccaccgatcctcccagtcctcgagttttcccaccaactaccatcgcgcttgcctcgccgtccagcccagcgcaatggaggtcggaggcccaggcaccgtgggatgggatagttccaacgggcgctccaccccacggcctccctgtccatctaccatgcgttag

SEQ ID NO: 15590 - DNA, 3135 bp, synthetic construct
  misc_feature 1..3135: note = Description of Artificial Sequence: Synthetic coding sequence
  source 1..3135: mol_type = other DNA
atggctccctttgcgaccccgatggttcaggctctcaccacaacaagaattcagcgacaggccgagggtttccagtgctggcgagagtgcggcactcgccgttctcctttcgagggcaaggaaacttgtgctcatcgctacgaggccaggcagagagtagaccagatccttgagacaagggacatgattgggcgatgtttcgttcttagccaggacctggctatcagagatgagctcgatggcggcgagtggaagttttgtgagggccgcccccaaggccatgagcagttcggtttttgccaacagggcacagccgctgcgttcagtcctgatagccactatctcctctttggcgccccgggaacatataattggaagggaacagccagagttgaactgtgcgcccaaggttctgcagacctggcgcatttagacgatggcccctatgaggccggaggagaaaaggagcaggacccaagactcattccagttccagctaacagttactttgggtttagtattgacagtggcaagggtctggtccgcgccgaggagctgtcctttgtggccggcgcacccagggcaaatcataaaggcgccgtggtcatcctgcgcaaagatagtgccagccgcctggtccctgaagtgatgctgtctggagaacggctgacttctggattcggctactcccttgccgtggcagacttgaactcagatggctggcctgatctgattgtgggcgcaccttacttctttgaaagacaggaggagcttggaggtgctgtgtatgtttatctgaaccagggaggccactgggccggaatctcgccgttacgactctgcggcagcccggactctatgttcggaatttcgttagccgtgctgggcgacctcaaccaggacggatttccagacattgccgttggagcacccttcgacggggatgggaaagtgtttatctatcatggtagctcgcttggggtcgtggcaaaaccctctcaggtgctggagggggaggctgtcgggatcaagtccttcggatactctctgtcgggcagtttagacatggatggcaaccagtaccctgatctcctggtcgggagcctcgccgacacggccgtgctcttccgtgctcggcccatcctccacgtttctcatgaggtgtcaatcgcacctagaagcatcgacctggaacagcccaattgcgcaggaggacactctgtctgtgtggatctgagggtgtgcttttcttacattgccgttccgtcctcctacagccctaccgtcgccctcgactatgtgctggatgccgatactgaccggagactgaggggacaggtaccacgggttacctttctctcccggaacctggaggagcccaagcaccaggcaagtggtacagtgtggcttaagcaccaacacgaccgcgtttgtggcgacgcgatgttccagctacaggagaatgtgaaggacaagctgagagccatcgtggtcacactgtcctatagccttcagactcctcggctgcgaaggcaggcacccggccagggcctgccccctgtggctcccatacttaatgcacaccagcctagcacccagagggcagaaattcactttctgaagcagggctgcggcgaggataagatctgtcagagcaacttgcagttggtgagggcccggttctgtacaagagtgagcgacactgaatttcaaccactgcctatggacgtcgatggaaccaccgcattattcgccctgtctggtcagcctgttatcggtctagagctgatggtaaccaacctcccctccgatcccgctcagccacaggccgacggagacgatgcccacgaggcccagttattagtaatgcttcccgattctttgcactactctggagtccgggcattagaccccgccgagaaacctctatgtttgagcaacgagaatgccagtcatgtcgagtgcgaacttggcaaccccatgaaacgcggggcacaggtcaccttttatctcatcttgagcacatccggcatcagcatcgaaaccaccgagcttgaggtggagctcttactggcgacgatatctgagcaggaacttcacccagttagcgccagagccagggtgttcattgagttgccactttcaattgctggaatggccatcccccagcagctgttcttcagcggtgtcgtgagaggagagagagctatgcagagcgaacgcgacgtggggagcaaggtgaagtatgaggtaactgtgtctaatcagggccagtccctgagaaccctgggctcagcctttcttaacattatgtggcctcatgaaatcgccaacgggaagtggttgctgtatcccatgcaggttgagctagaaggcggccagggccccgggcagaaggggctttgtagcccccgtcctaatattttacacctcgacgtcgattcacgtgaccggagacggagagagctggagccgccggaacaacaggagcccggggagcgacaggaacccagtatgtcttggtggcctgtctctagtgctgagaagaaaaaaaatatcactctggactgcgcccgaggcactgctaattgtgttgtctttagttgtccactgtattccttcgaccgggctgcagttttacatgtgtgggggcggctgtggaactccactttcctggaagaatacagcgctgtcaagagcctggaggttatagtgagagccaacattaccgtgaagtcttccattaagaatcttatgctgcgcgacgcgagtactgtgattcccgtgatggtttacctcgatcctatggccgtggtcgctgagggcgtcccatggtgggttattctgttggccgtgctcgccggattgctggtgctcgccctgttggtactattgctgtggaaaatgggcttttttaaacgggcgaaacaccctgaagcaacagtgccccagtaccatgctgtcaagattccaagggaagacagacagcagttcaaggaggagaaaacgggaaccattctgaggaacaattggggatctcctcggagagaggggccagacgctcaccctatcctggctgcagatgggcaccctgagctggggcccgatggccatccaggccctggaaccgcctag

SEQ ID NO: 15591 - DNA, 3426 bp, synthetic construct
  misc_feature 1..3426: note = Description of Artificial Sequence: Synthetic coding sequence
  source 1..3426: mol_type = other DNA
atggctggcgctcggtcgcgcgatccctggggcgcctccgggatatgttacttgttcggcagtttacttgtggagctgctcttcagtagggccgtggctttcaatttagacgtaatgggcgccctgcgtaaggaaggcgagcccggatccctattcgggttttccgttgcgctgcacagacagctccagccccggccccagagctggctgctagtgggggccccccaagcactggcattgccaggacagcaggccaaccgcacgggcggcctcttcgcctgtccactgtctttagaggagactgattgctacagagtggacatcgaccaaggcgcagatatgcaaaaagagtcaaaggaaaatcaatggttaggcgtcagcgtcaggagccaggggcccggcggtaagatcgtaacatgtgcccatagatacgaggccaggcagcgtgtggatcagatcctggaaacgcgcgatatgatcggacggtgcttcgtcctgtctcaggacctggcaattcgagacgagctcgacggaggggaatggaagttctgcgaaggcagacctcagggacacgaacagttcggcttttgtcagcagggaacagccgcggcgttctctcccgatagccactaccttctatttggggccccaggtacgtacaactggaagggcactgcccgtgtcgaactctgcgctcaaggcagtgctgatctggcgcacctggatgacggaccttatgaggccgggggagaaaaggaacaagacccacggctaattccggtccccgctaactcttacttcgggttcagcattgacagcggaaaaggactggttcgcgcagaggaactgagctttgttgcgggagcaccaagggctaatcacaaaggggccgttgtgatcctgagaaaggattctgcatccaggctggtccccgaagtcatgctgagcggtgagcgtttaacatcaggctttggctacagcctggctgttgcagacttaaattccgacgggtggcccgacctgatcgtgggtgcgccatactttttcgaaaggcaggaggagttaggcggagctgtctatgtctacctgaaccagggagggcattgggcaggtatttcccctctcaggctgtgcggatctccagattctatgttcggtatcagcctcgccgtactgggtgacttaaatcaggacggctttcctgacattgcggttggcgcacccttcgacggcgacggtaaggtgtttatttaccacggctccagcttaggagtggtagccaaaccttctcaggtattggagggagaggcagttggcattaagagtttcggatattcactgtccggtagtttggatatggatgggaatcagtatcccgatctcctggtagggagtcttgctgacactgccgtactgtttagagccaggcccatcctacatgtgtcacacgaagtgagtatagcccccaggtctattgaccttgaacagcctaactgtgctggggggcatagtgtgtgtgtggatctgagggtgtgtttctcttacatcgccgtgcctagttcttactctcctactgtggcgctcgactacgttcttgatgctgacactgaccgacggctgcgtgggcaggtgccgcgggtgacgttcttgagccgcaaccttgaagagcccaaacatcaggcatctggaacagtgtggctgaaacatcagcacgatcgtgtgtgcggcgatgcaatgtttcagctccaggagaatgtgaaagataagctacgggcaattgttgttacacttagctacagcctacaaactccgagactgagaagacaggctccaggccagggcctgccgcccgtggcccctatcctcaatgcccaccagcccagcacccagcgggccgagatccatttcctcaaacaaggctgtggggaggacaaaatctgccagtcaaacttacaattggttcgagcccggttctgcactagggtctccgacactgaatttcagcccttgcctatggacgtggacggcactaccgccctgttcgccctttctgggcagcccgtcattggtttagaattgatggtgacaaacctgccctctgatcctgctcagccacaggctgatggggacgatgctcatgaagcccagctgctggtaatgctgccagattccctgcactactctggtgtgagggctctggaccctgccgagaaaccactttgtctgagcaatgaaaacgcctctcatgtggagtgcgaactcggaaaccccatgaagcgtggcgcacaggtgactttctatcttattttgtccacatccggaatctccattgaaactaccgaactggaagttgaactgctcctggccaccatcagtgaacaagagcttcaccccgtgagcgcgcgcgcgagggtttttattgaacttccactgagtatagcagggatggctatcccgcaacagctgttttttagcggggtcgtgaggggggagagagctatgcagtcagaacgcgacgtcggttcaaaggtcaagtatgaggtaacagtgtccaatcagggtcagtctctgcgcacactgggatctgctttccttaacattatgtggccacacgagattgccaacggaaagtggctgctgtatccgatgcaggtcgaactcgagggcgggcagggtccagggcaaaagggcctgtgttctccccgccccaacattttacatttggacgttgactctcgagaccggcgacgcagagaacttgagccacccgagcagcaggagccaggtgaacgtcaagaaccgagcatgagctggtggcctgtttcttcagccgaaaagaagaaaaatatcaccctagactgtgcacgagggaccgcaaattgtgtggtgtttagctgtcccctttattctttcgacagagccgccgtgttgcacgtctggggccgactgtggaactctacctttctagaggagtatagcgccgttaaatctttagaagtgatagtaagggctaacatcaccgttaaatcaagcatcaagaacctgatgttgcgggatgcgtccaccgtcataccggttatggtgtacctggatccaatggccgtagtcgccgaaggcgtcccttggtgggttattcttctcgcagtgctggccggtctgttggttctggcattgctggtcctcctgctttggaaaatggggttcttcaagagggctaagcaccccgaggcaacagttccacaataccatgccgttaagataccacgtgaggacagacagcagtttaaagaagagaaaacaggaactatccttcggaacaattggggttcaccccgccgagagggccccgacgcacatccaattctggccgctgatgggcatcccgaacttgggccagacggccacccaggacccgggacagcttag

SEQ ID NO: 15592 - DNA, 3546 bp, synthetic construct
  misc_feature 1..3546: note = Description of Artificial Sequence: Synthetic coding sequence
  source 1..3546: mol_type = other DNA
atggccggggctagatctagggatccttggggggcatcggggatttgctacttgttcgggtctctgctcgtcgagttgttattttcacgtgccgtggctttcaacctagatgtcatgggcgccctgagaaaagagggagagccaggatccctgttcgggttcagtgttgctctgcaccgtcagctccagccaaggccacagagttggcttctggtgggagcaccacaggcactagctttacccggccagcaggctaatcgaacgggcggcctgttcgcctgccccctatccttggaggaaactgattgctaccgcgtggacatagatcagggggccgacatgcagaaagaatccaaggaaaaccagtggttgggtgtgagcgtgcgcagccagggccctggaggtaagattgtgacatgtgctcacaggtatgaagcgcgtcagcgcgttgaccagatattggaaaccagggacatgatcgggaggtgcttcgttttgtcccaggacttagcgataagggatgagctcgatggcggcgagtggaagttctgcgaaggcaggccgcagggccatgagcagtttggcttctgtcagcaggggacagctgcagccttctccccggactctcattatctcctttttggagcccctggtacctataactggaaagggactgccagagtagagctttgcgcccagggatcagctgaccttgcacacctggatgacgggccatatgaagccggaggcgagaaagagcaggatcctagattgatcccagtccccgcaaacagctattttggacttctcttcgtaactaacatagactccagcgacccagatcagttagtttacaagactctagatccggctgacagattgcctggacccgccggcgatttggcgttgaattcctatctgggctttagcattgacagtggcaagggattagttcgcgccgaagagctctccttcgtggccggcgccccacgtgcaaaccacaagggtgctgtggtcattttgaggaaagatagcgcctccaggctggtgcctgaggtcatgctttctggtgagcggctcactagtgggtttggctactctcttgccgtagccgatcttaatagcgacggctggccagacctaatcgtgggtgctccctacttttttgaacggcaggaagaattaggaggagcagtgtatgtgtatctgaatcagggtggacactgggcagggataagccccctgcgcctttgtgggtcccccgattctatgtttgggattagtctggcagtcctcggcgacctgaatcaagacggattccccgacattgctgtcggggcgccttttgatggggacggtaaggtttttatttatcatggatcttctcttggagtggtcgcaaagccttcccaggtcctggagggagaagccgttggtattaagtctttcggatacagtctatccggatcacttgatatggatgggaaccagtatcccgacctactggtagggagtcttgccgacactgccgtgctgtttcgcgctaggcccatcctgcatgttagtcatgaggtgagtatagcacctcgctccatagacctcgagcagccaaactgcgccggtgggcacagcgtatgtgttgacttgcgtgtatgctttagttatatcgcagtgcccagctcatacagtcctacagtcgccctcgactatgtgctcgacgccgatacagatagacggctcaggggccaggtccccagagtcacgttcttgtcgcggaacctggaggagcctaagcaccaggcctcaggaaccgtgtggctaaaacaccagcacgacagggtgtgtggcgatgccatgtttcagctacaggagaacgtaaaggataagctgcgcgccattgtggtcaccctgtcctactccctgcagacacctcgcctccgcagacaggccccgggccaggggctcccccctgttgcacctattcttaacgctcatcagccttccactcagcgagctgagatccacttcctgaagcaaggttgtggggaggataagatctgccagagcaatctgcaactagtcagggcgcgcttctgtacacgagtctctgatacagaatttcagccactgccgatggatgtggacggcacaacggctctgttcgcgctctcgggccaacccgttatcgggctagagctcatggttacaaacctcccttccgaccccgcccagccacaggcggacggggacgatgctcacgaggcccagctgttggtaatgttgcctgatagcctgcattacagcggcgtgagagccttggacccagcagagaagcccttgtgtttgagtaacgagaacgctagtcacgtcgagtgcgaattaggaaatcctatgaagaggggtgcccaggttacattctatttgattctctccacatcaggcattagtattgagacaacagagctcgaagtcgaactcttgctggcgaccattagcgagcaagagttgcacccggtgtcagcacgcgccagagtcttcatcgagctacctctcagcatcgcaggcatggctataccacagcagcttttctttagtggagtcgtgcgaggagaacgggctatgcagtctgagcgagacgtggggagtaaagtgaagtatgaggtgactgtgagtaatcaggggcaaagtctacgcacactaggatctgcgtttctgaatatcatgtggccccatgagattgccaacggaaagtggctgttgtacccgatgcaggtggaacttgagggaggccagggtcctgggcagaagggtctgtgttcacctcgacccaacatccttcacctggatgtggattcccgtgacaggcgcaggcgggaactcgagcccccagaacagcaggagcctggtgagcgacaggagccaagcatgagctggtggccagttagttccgctgagaaaaagaaaaacattaccctggattgtgctcgcggtacagccaactgcgtggttttttcctgtccgctgtacagcttcgaccgggccgcggtgctgcacgtttggggcaggctatggaactcgacctttctggaggagtactcagctgttaagagcctggaggtgatcgtcagagctaacatcacggtgaagtcctccatcaaaaatctgatgttgcgcgacgcttcaaccgtgattccagtgatggtctaccttgatccaatggccgtcgtcgcagagggagtgccctggtgggtgatactcctcgcagtgctggcaggtctcctagttctggcactgctcgtgcttctgttgtggaagatgggattcttcaaacgagctaaacatcccgaagcaaccgtgccccaatatcatgccgtcaaaatcccccgagaggaccgccagcagttcaaggaggaaaaaactggcaccattctgagaaacaattggggctcaccccgccgcgagggccccgacgctcatcccatccttgcagctgacggtcacccagagttgggtcccgacggtcaccctggccctgggacggcatag

SEQ ID NO: 15593 - DNA, 3147 bp, synthetic construct
  misc_feature 1..3147: note = Description of Artificial Sequence: Synthetic coding sequence
  source 1..3147: mol_type = other DNA
atggcctttcctccacgtagaaggcttcggttgggtccaaggggtttacccttgctgctgtcaggactgctgctgcccttgtgccgtgcctttaacctggatgtagattcgccggccgagtatagtggtccggaaggctcttatttcggttttgctgtcgacttcttcgttccctccgcctcgtcacggatgtttctgttagtaggcgcccctaaggccaacacgactcaacctgggatcgtggagggaggccaggtgctgaaatgtgattggtcttcaacacgacggtgtcaacccatagagtttgatgccacggggaacagagattacgccaaggatgacccccttgaattcaaaagccaccagtggtttggcgcttctgtgcgttcaaagcaggacaagattctagcatgtgcaccgctctaccattggaggacggagatgaaacaggagagagagcccgtgggtacctgttttctccaagatgggacaaagaccgtagaatatgctccatgtcggagtcaggacatagatgccgacggccagggcttttgccagggtggattctcaatcgacttcaccaaagccgaccgcgtgctgctgggcgggcctggctccttctactggcagggacagctcatcagcgatcaagtcgctgagatcgtcagtaaatatgacccgaatgtttattctatcaaatacaacaatcagttggcaacgcggacagcccaagcgatattcgatgatagctacttaggttatagtgtagccgtgggcgactttaacggggacggtatcgacgattttgttagtggggtgccacgagcagctcggactttaggtatggtgtacatctacgatggcaaaaacatgtcaagtttgtacaactttacgggcgaacaaatggctgcctattttgggttctccgttgctgctacagacattaatggggacgactacgccgacgtgttcataggtgcccctctgttcatggacaggggatctgacggcaagctccaggaagtgggacaggttagtgtatcactgcagcgcgccagcggggacttccaaactactaaattgaatggctttgaagtgttcgcccggttcgggtctgccattgctccactgggggacctcgatcaggacggctttaacgatatcgctattgctgctccctatggaggtgaggacaagaagggaatcgtgtacatttttaacggccggtcaacaggcttgaatgccgtccctagccagatcctggaaggtcagtgggctgccaggtccatgcccccgtccttcgggtattcgatgaagggagctacagatattgataaaaacggctatcctgacttaatcgtcggagcgttcggggtcgatcgagctatcctgtaccgagctcgcccagtgatcacggttaacgctggactggaggtttatcccagcattcttaaccaggacaataaaacatgcagtctacctggcactgctctgaaagtgtcctgcttcaatgtgcgattctgccttaaggcagacggtaagggcgttctcccaagaaaactcaatttccaggtcgaactgttactggataagttaaaacagaaaggggctatccgcagggctctgtttctgtactcgagaagccccagtcactccaagaacatgaccatctcaagaggcggtttgatgcaatgtgaagagttgatcgcatacctccgcgatgaaagcgagtttcgcgataagcttacacctattacaatctttatggaatatcgcctcgattaccggactgccgcagatactaccggcctccagcctattcttaatcaattcactcctgccaacatttctagacaggcgcacatactcctcgactgtggggaagataacgtgtgcaagccaaagttagaggtgtcagtggattccgaccagaaaaagatatacataggagacgataacccactaacattgattgtgaaggctcagaaccaaggggaaggggcctacgaggccgaattgatcgtgtccattcccttacaggccgactttataggcgtggtacggaataatgaagctctggccagattgagttgtgcctttaagaccgaaaatcagactagacaggtggtatgtgatctcggcaatccgatgaaagccggaacccaactgctggcagggttacgctttagtgtgcaccagcagagtgagatggatacctcagtgaagttcgacctgcagattcagtcaagcaaccttttcgacaaagtctcaccagtcgttagccataaagtggatctcgcagttttagctgcagtcgagattcgcggagtttcatctccggaccacgtgttcctgcctatccctaactgggagcataaggaaaatccggagacagaagaagacgtcggtcctgtagtgcagcacatttacgagctgaggaacaacggacctagctccttttccaaggccatgctacacctgcagtggccctacaaatacaataacaacaccctgctatacatcctgcactatgatatcgacgggccaatgaactgcacaagcgatatggagatcaacccgcttcggatcaaaatctctagccttcaaacaaccgagaagaacgacacagtggcaggacagggggagcgtgaccacttaataacaaagagagatctagcgctgtccgaaggagacattcacactcttgggtgtggcgtggctcagtgtcttaaaattgtgtgtcaggtaggacgactggatcggggtaaatcagcgattctctatgttaaaagcttgctttggactgaaactttcatgaacaaggaaaatcagaaccattcttactccctcaaatctagtgcctctttcaatgtgatagaattcccttacaaaaatctaccaatcgaggatatcacaaactctactttggttaccactaatgttacctgggggatccagcccgctcctatgcctgtgcctgtgtgggtgataatactggcggtgctggcaggcttattactgttggcagtgctcgtgtttgtaatgtatcggatggggttcttcaaaagagtcaggcccccacaggaggagcaggagagggaacagcttcagccccacgaaaacggagaggggaactctgagacctag

SEQ ID NO: 15594 - DNA, 3039 bp, synthetic construct
  misc_feature 1..3039: note = Description of Artificial Sequence: Synthetic coding sequence
  source 1..3039: mol_type = other DNA
atggcttttccaccacgacgacggttgcgtctcggaccacggggtcttcccctgctgctgagcgggctgttactgccgctttgtcgggcttttaatctagacgtcgactcccctgcggagtattctggcccagagggaagttattttgggttcgctgtggatttttttgtgccgtcagcctctagccggatgtttctgctggtcggggccccaaaagccaatacgactcagcccggaatcgtggaggggggacaggtcctcaaatgtgactggagtagcacacggcgctgtcagcctatagagttcgatgctaccggaaaccgtgactatgctaaagacgacccactagagttcaagtcgcaccagtggtttggcgctagcgtgagatccaagcaggacaagattctggcctgtgcaccgctttatcactggcggaccgagatgaagcaggagcgcgagccagtgggcacctgcttcctccaggacggtacaaagaccgtggagtacgccccctgtagatctcgacagctgataagcgaccaggttgctgaaatcgtgagtaaatacgacccaaatgtctattctatcaagtacaacaaccaacttgcgaccaggaccgcccaggcaatttttgacgacagctatttggggtattccgttgcagttggtgattttaacggagatgggatcgatgactttgtttctggagtccctcgcgcggctcggacacttggaatggtctacatatacgacggaaagaatatgtcttcgctgtacaacttcacaggcgagcagatggctgcttatttcgggttctcagtagccgctaccgatataaacggggacgattacgcagatgtgttcatcggcgcccccctattcatggatagggggtcagacggaaaactacaggaggtgggccaagtctcggtctcccttcagagagcttccggagactttcagacaactaagctcaatggattcgaggtctttgcccgatttggtagcgccatagctcctttgggagacttagatcaggatggatttaatgacatcgccatcgcagctccctacggcggtgaggataagaagggcatcgtgtacatttttaacggacgatcgaccggcctgaatgccgtgccctcacaaatccttgaaggacagtgggcagcaaggagtatgccaccttctttcggatattcaatgaagggtgctaccgatatagacaaaaatggatatccagacctcatcgtcggtgcctttggagtggatagagccatcctctatcgcgcccgcccggtcataaccgttaacgcaggactcgaggtgtaccctagcatcctaaaccaggacaacaaaacctgctcgttacctggaactgctcttaaggtctcttgttttaatgtgcgattttgccttaaagccgatgggaagggagttcttcccagaaaacttaatttccaagtggaactgctgctcgacaagttgaagcagaagggagctattaggcgggctctgttcctgtactcacgctcaccctctcacagtaaaaacatgacaattagcagggggggactcatgcaatgcgaagaactgatcgcgtatttaagggacgagtccgagtttcgcgacaaactgacacctattactattttcatggagtacaggttggattatagaaccgccgctgacaccactggccttcagccaattttgaatcagtttacacccgccaatataagtcgccaagcccacatcctgctcgactgcggggaggataatgtgtgtaagccaaaactggaagtgtcagttgactcagatcagaagaagatctatattggagatgataatccccttactcttattgtcaaggcccaaaatcaaggcgaaggtgcttacgaggccgaactgattgtcagtatcccactgcaggcagatttcatcggagttgttcgcaacaatgaggcgctcgcccgattgagttgcgcctttaaaactgagaatcaaaccagacaggtagtctgtgacctcggcaatcctatgaaagctggtacacagctgcttgccgggctgcgattcagtgtgcaccaacaaagtgaaatggacacctctgtgaaattcgatctacaaatacaaagctctaatctgtttgacaaagttagtcctgtagtgagtcataaagtcgatctcgccgtgctggccgccgtggagatccgcggcgtgtcctcccccgatcacgtcttcctgccaatccctaactgggaacacaaggaaaatccggagaccgaggaagacgtggggcccgtagttcagcatatatatgagctgagaaataacggcccctcatcattctctaaggcgatgttgcaccttcagtggccatacaaatataacaataatacgttgttgtatattctccactacgatatcgacggcccgatgaactgtaccagcgacatggagatcaatcctcttcgcataaaaatatcctctctgcagacaacagagaaaaacgatactgtggccggccagggggaaagagaccatctgatcacgaagcgcgacttggcactgagcgaaggggatatccacacactcggctgtggggtagcccagtgcctgaagatagtgtgtcaggtcggaaggctcgacagagggaagagtgccatcttgtacgttaaatctctgctgtggactgagacattcatgaataaggagaaccaaaatcattcttacagtctgaagtcctcagcgtcctttaatgtgatcgagtttccgtacaagaatctcccgatcgaggatattaccaatagcaccctggtcacaactaacgttacttggggcatccagcccgcgcccatgcctgtgccagtctgggtgatcatactggcggtgctggcggggctgctactattggctgtgctcgtctttgtgatgtaccgcatggggttttttaaaagagtccggccccctcaggaggaacaggaaagagagcagctgcagccccacgaaaacggtgaaggcaactcagagacctag

SEQ ID NO: 15595 - DNA, 3009 bp, synthetic construct
  misc_feature 1..3009: note = Description of Artificial Sequence: Synthetic coding sequence
  source 1..3009: mol_type = other DNA
atgctgttaggaaccctcctgttaatcctgtatatcctgatgctttgtagaatgttcctgctggtcggcgctcccaaagcaaatactactcagcctggaattgtggaagggggccaggtgcttaaatgcgattggtcgtctaccaggaggtgtcagcccatcgagttcgatgcaactgggaatagggattacgccaaagatgaccccctagaatttaaatcccatcagtggtttggcgcgtccgtccgctctaaacaggacaagatattggcctgcgcaccactataccactggcggacagaaatgaaacaagagcgcgagcctgtcggaacctgtttcctccaagacgggacaaagacagtcgaatatgcaccgtgccgctcgcaggacatcgacgccgatggtcagggtttctgccaaggagggttcagtattgattttacaaaagctgaccgcgttctgctcggcggtcccggaagtttttactggcagggccagctgatctccgaccaggtggcagaaatagttagcaaatatgatccaaacgtttatagtattaagtataataatcaactggcgacacgaactgcacaagctatattcgatgacagctacctaggctacagcgtggccgttggcgattttaacggagacggaattgatgattttgtgtcaggcgtccctcgagccgcacgcacgctgggaatggtgtatatatacgacgggaagaacatgtcatctctttataattttacaggcgagcagatggctgcgtactttggattttctgttgcagcaacagacatcaacggcgatgattatgccgatgtgttcatcggcgctcctctcttcatggacaggggatcagatggcaagctgcaagaggtgggccaagtgtctgtctccctgcagagggctagcggcgactttcagactactaaacttaatgggttcgaggtgtttgcgagatttggctctgcaattgcccccctgggtgacctggaccaggatggattcaatgatattgctatagctgccccttacggcggggaggacaaaaaaggaatagtgtacatttttaacggacggtccaccggtctgaacgccgtgccctcacaaattctggaaggccagtgggcagcccgctcaatgcctccctcttttggatacagtatgaagggcgcaactgatatcgacaaaaacgggtacccggatctgatagtgggcgcattcggagtggatagggcgatactttaccgggcccgaccagtcattacggtgaacgctggactggaagtgtatccttccatactgaaccaagacaacaagacctgttccttgcctggaacggcattaaaagtgtcttgttttaatgtcaggttctgcttgaaggccgatggcaaaggggtccttcccagaaagctgaacttccaggtcgagttgctgctggacaagttaaaacagaaaggtgccatcagacgagcattattcctatatagccgctctccctcccactctaagaacatgaccatcagcaggggtggtcttatgcagtgtgaagaactgattgcgtacttgcgagatgaatccgaattcagagacaagcttacacccatcactatttttatggagtaccggttagactataggacggcagcggacacaacgggattacaacctatccttaatcaattcacgccggcaaatatatctcggcaggcccatattctccttgactgcggcgaggacaacgtgtgtaagccaaagcttgaggtgagcgttgattccgaccagaagaagatttacattggcgatgataacccactcaccctaatcgttaaagcacagaatcagggagagggggcttatgaagccgaactcatagtcagcatccctctccaagctgatttcattggcgtggtccgaaataacgaggccctggcccgactgtcttgcgcgtttaagacagagaatcagactcgccaggtcgtgtgcgacctgggcaatcctatgaaggctggaacccagctcctggccgggttacgattcagcgtccatcagcagtcagagatggatacgagcgtcaaatttgacctgcagattcagagctctaatctcttcgacaaagtctcccctgtggtgtcccataaggtggacctagccgttttagcagctgtggaaatccggggggtcagctcccccgaccacgtttttctgcccattccaaattgggagcacaaagaaaatcccgaaaccgaggaggatgtgggccccgtagtgcagcatatttacgaactgagaaacaacggacccagtagcttttccaaagcgatgttgcacctccagtggccttacaaatacaataataatacactgctgtacatactgcactatgatattgatgggccaatgaattgtacttctgacatggagatcaatccacttcgaattaagatctcaagcttgcaaacaactgagaagaacgacaccgtggccggacagggtgagagggatcacctcattactaaacgggatttggccttgagcgagggcgacattcacaccctcggatgcggggttgcacaatgcttgaaaatcgtctgtcaagtcgggcgcctggatcgtggtaagtccgccattctctacgttaaatcgctcttatggactgagacatttatgaataaggaaaatcagaatcacagctacagcctcaagagttcagcttccttcaacgtcatagagtttccatacaagaacttgcccatcgaggatattacaaactctaccttagtgacaaccaatgttacttgggggattcagcccgcacccatgccggtgcccgtgtgggtgatcatcctggcagtcctggccggacttctcctgttggctgtcctagtgttcgtgatgtacaggatgggatttttcaaacgggtccgacccccgcaggaagagcaggaacgcgagcagctacagccgcacgagaatggagaaggcaacagcgagacctag

SEQ ID NO: 15596 - DNA, 1449 bp, synthetic construct
  misc_feature 1..1449: note = Description of Artificial Sequence: Synthetic coding sequence
  source 1..1449: mol_type = other DNA
atggcgtttcctcctcgccggcggctgcgcctgggcccgagagggcttcctcttctgcttagtgggttgcttctgcccctctgccgggcatttaatcttgatgttgattctcccgcagagtattccggacccgaaggtagctatttcggtttcgcagtcgacttcttcgtgccgtcagcatcctctaggatgttcttattggtcggcgcccccaaagctaacactacacaacccggtatcgttgagggaggccaggtcctgaaatgcgattggtcctcgacaagacgttgtcagcctattgagtttgatgccactgggaacagggactacgccaaggatgatccattggagtttaagagccaccagtggtttggagcaagcgtacgctctaagcaggataaaattttagcctgtgcccccctatatcattggcgcaccgaaatgaagcaagaacgcgagcccgtgggcacttgcttcctgcaggacgggacaaaaacagtagaatatgccccatgccgctctcaggacatcgatgctgatggacaggggttctgtcagggaggcttctctatcgattttacaaaggccgaccgtgtgctcctaggaggacctggctcgttttactggcagggccagctgatttctgaccaggtggcagagatcgtttctaagtacgacccaaacgtgtatagcataaagtacaataatcagcttgcaacgcggaccgcccaagcaattttcgacgattcctatttggggtacagcgtggcggtcggcgactttaacggcgatgggatagacgactttgtgagcggcgtgcctagggccgctagaacactggggatggtgtatatatatgacggcaaaaatatgtcatccctgtataacttcacgggcgagcaaatggccgcgtacttcggcttttcagtcgccgccacagacatcaatggcgacgactacgccgatgtgttcattggagcccccttgttcatggaccgtggatcggatgggaagttacaggaggtggggcaggtgagcgtgtctctgcagcgcgcctccggggattttcagacgaccaagctgaacgggttcgaggtgtttgcccgattcggcagtgctatagcccctctgggggaccttgaccaagatggctttaacgatattgcaatcgccgccccatacgggggggaggataagaagggtatcgtgtatatattcaatggacgcagtactggtctaaacgcggtgccctcccagatcctggagggccagtgggccgcgaggagtatgcccccctcgtttgggtattctatgaaaggcgctaccgacatagataaaaatgggtacccggacctgattgtcggagcatttggagtggatcgtgcaattctgtacagggctagaccagttattccaattttcgtgcaattgcaccacgtggtgcactag

SEQ ID NO: 15597 - DNA, 2397 bp, synthetic construct
  misc_feature 1..2397: note = Description of Artificial Sequence: Synthetic coding sequence
  source 1..2397: mol_type = other DNA
atgaacctgcaaccaatcttctggattggactgatatcatccgtatgttgtgtgtttgcccagacggacgagaatagatgcctaaaagctaacgctaaatcatgcggggagtgcattcaggctgggccaaactgtggctggtgcactaattctacctttctccaggagggaatgcctactagtgccaggtgcgacgatctggaagcgctgaagaaaaaaggctgtccaccagacgatattgagaatcccaggggatccaaggatatcaaaaagaacaaaaatgttacaaacagatcaaagggtacagcggagaagcttaaaccagaagacattacgcaaatccagccccagcagctggtcttgcgcttaaggagcggggaaccgcagacattcaccctgaagttcaagagggcggaagattaccctatagacctctattacctgatggacttgagctattctatgaaggatgacctggaaaatgtaaagtcgctggggactgacctcatgaacgaaatgcgccgtattacgtccgacttcagaatcgggttcgggtccttcgttgaaaagaccgtgatgccctacattagcaccacgcccgcaaaattaaggaatccatgcacatcagaacaaaattgcaccagtcctttttcctataaaaacgtgctttccctgaccaataaaggagaggtcttcaacgagctggtgggtaagcagagaattagcggtaatctcgacagccccgagggcgggttcgatgcaattatgcaagtcgcggtatgcggcagcttaattggatggagaaacgttactagactgctggtgttctcaacagatgcaggcttccactttgctggggacggaaaacttggcggcatcgtgcttccaaatgacggacagtgccacctcgagaacaacatgtacaccatgtctcactattatgactatcctagtatcgcacacctggtgcagaaactatctgaaaacaacatccagacaatctttgccgtaaccgaagagttccagcccgtttacaaagagttgaagaatctgatacctaagagcgccgtaggaacgttgagcgccaactcttctaacgtcatccagcttatcattgacgcttataattcactgagctcagaagtcatcctggagaacgggaagctgtctgaaggagtaaccataagctacaaaagttattgtaagaatggagttaacggtacaggagaaaacgggcggaagtgcagtaatatatcgattggcgacgaggttcagttcgagatcagcataacgagtaacaaatgcccaaagaaagattccgatagctttaagatcaggccattggggtttactgaggaggttgaggtgatcctgcagtacatctgtgaatgcgaatgccagtcggagggcatccccgagagtcctaaatgtcacgagggcaatgggacctttgagtgtggtgcttgtaggtgcaatgagggccgcgtgggccgacattgtgaatgctctaccgacgaagtgaacagcgaagatatggacgcatattgtaggaaagagaacagtagcgaaatttgttctaacaatggagaatgcgtatgtgggcagtgtgtatgtagaaaaagggacaacactaatgagatctattcagggaagttttgcgaatgtgataactttaactgcgaccggtcaaatggcctgatatgtgggggaaatggagtttgcaagtgtcgcgtgtgcgaatgcaaccctaactatactggcagtgcatgtgactgctcgctggatacttctacttgcgaggctagcaacggacaaatctgtaatggccgcggtatttgcgaatgcggagtttgcaaatgtacagatcctaagttccagggtcagacatgtgagatgtgccagacatgtctgggagtttgcgccgagcataaggagtgtgtgcagtgtagggcgttcaacaagggagaaaagaaagacacttgtacccaggaatgcagttacttcaacatcaccaaggtggagagcagagataagctgcctcagccggtccaaccggatcctgtttctcactgcaaagagaaggacgtggatgattgctggttttattttacctatagtgtcaatggcaacaacgaagtcatggtgcatgttgtggagaatcccgagtgtccgaccgggccagacataattccgatagttgcgggcgtcgtagctggaattgtgctgatcggactggcactgctcttgatctggaagttgcttatgattatccatgatcgaagggaatttgctaaatttgaaaaggaaaagatgaacgcgaaatgggacacaggggagaacccaatttataaaagcgcagtgacaacagtcgtgaatccaaagtacgaaggaaaatag

SEQ ID NO: 15598 - DNA, 2478 bp, synthetic construct
  misc_feature 1..2478: note = Description of Artificial Sequence: Synthetic coding sequence
  source 1..2478: mol_type = other DNA
atgaacctgcagccaattttttggataggtctgataagcagcgtgtgttgcgtttttgcccaaaccgatgagaatcggtgcctcaaggctaacgcaaagagttgtggggaatgcatccaggccggaccaaattgtggctggtgtaccaacagcaccttcctccaagagggtatgcctacatcagccaggtgcgacgacctggaggccctcaaaaaaaaaggctgcccacccgatgacatcgaaaaccctaggggatctaaggatattaagaaaaacaagaacgtgacaaaccgctctaaaggtaccgccgaaaaacttaaacccgaggacataacccagatacagcctcagcagctggtcttgaggctgcgcagcggggaaccccaaacctttacgctgaaatttaaacgggcagaggattatccaatcgatctgtactatttgatggacctatcttattccatgaaggacgacctcgagaatgtgaaatcactaggcaccgaccttatgaacgagatgcgccggattacgtctgacttcagaatcgggttcggcagcttcgtagaaaagacggtgatgccttacatctccacaactcctgctaagctgcgcaatccctgcacctcagagcaaaattgtacgtctccatttagctacaaaaacgttctttctctcaccaacaaaggcgaggtgtttaatgaactggtcggtaagcagcgcatctcaggcaacctcgactccccagaaggcggatttgatgccataatgcaagttgccgtgtgcggtagtctcattggatggcgcaacgtgacgcggctgttggtcttttccacggacgcaggatttcactttgcgggggacggcaaactggggggcattgtcttgcctaacgatggtcagtgccaccttgaaaacaatatgtacactatgtcacactattacgactatcccagtatagcccacttggtacagaagctgtccgagaataacatccagaccatttttgcagtgacagaagaattccagccggtgtataaggagttgaagaatctgatccccaagagcgccgtaggcacactttcggcaaactcatccaacgtgatccagctcatcatcgacgcctacaacagcctgtcatcagaggtcatactggaaaatggaaaactctccgaaggggtgactatttcctacaagagctactgcaaaaacggcgtaaatggtaccggggagaacggccggaagtgtagcaatatctcaattggcgatgaggtgcaatttgagattagcatcacttctaataagtgcccgaagaaagactcagacagttttaaaatccgcccgctggggtttactgaagaggtggaagtcatcttgcaatatatctgtgagtgtgagtgtcagtctgagggcatccccgaatcaccaaagtgccacgagggtaacgggacgtttgagtgcggggcctgcaggtgtaacgaaggcagagttggccgacactgtgaatgctctacagatgaggttaactccgaggatatggacgcgtattgccgaaaagagaattccagcgagatatgcagcaataacggagagtgtgtgtgtggccagtgcgtctgccgtaagagggataacactaacgaaatctactctgggaagttctgtgaatgcgacaactttaactgcgacaggagcaatgggctgatatgcggagggaacggcgtgtgcaaatgccgagtgtgcgagtgcaatcctaattatactggcagtgcttgcgactgttcattggacacgtcaacgtgtgaggcgagcaatgggcaaatctgcaatgggcgcggcatttgcgagtgtggcgtctgtaagtgtacagaccccaagttccaaggccagacttgtgaaatgtgccagacttgtctcggcgtatgtgccgagcataaagagtgcgttcagtgccgcgccttcaataagggtgagaaaaaggatacatgcacacaggagtgttcctactttaatatcactaaagttgagagtagggataaactccctcagcctgtgcagcctgaccctgtgtctcactgcaaagaaaaagatgtcgatgattgctggttctacttcacctatagtgtgaatggaaataacgaggtcatggtccacgtggtggagaaccccgagtgcccaactgggcctgacattattcccattgtggctggagtggtcgctggcatcgtacttattggcctcgctttactcttgatctggaagttgctgatgattattcacgatagaagagaattcgcaaaatttgagaaggagaaaatgaacgccaagtgggatacttcactcagcgtggctcagccgggcgttcagtggtgtgacatttctagtctccagccgctgacctcaagatttcagcaattcagctgcctcagccttccttcgacctgggactacagagtgaagatactgttcatcagggttccctag

SEQ ID NO: 15599 - DNA, 2397 bp, synthetic construct
  misc_feature 1..2397: note = Description of Artificial Sequence: Synthetic coding sequence
  source 1..2397: mol_type = other DNA
atgaatctgcagcccatattttggatcgggctcatcagctctgtgtgctgtgtgttcgctcagacagatgagaacaggtgcctcaaagctaacgcaaaaagctgcggagagtgtattcaggcaggccccaactgcggctggtgcacaaatagcacctttctgcaggaggggatgccgacttctgcccgttgtgacgacttagaggctttgaaaaaaaaggggtgcccgccagacgacattgagaacccaaggggctccaaggatattaagaagaacaaaaacgtgaccaatcggagtaaggggacggcagagaaattaaagcctgaggatattacacagatccagccacagcaactcgtcctccggctgcggtcgggcgagccccagacttttacgttgaagtttaagcgagccgaggattaccctatcgatctctactatctcatggatttaagttatagcatgaaagacgatttggagaacgttaagagtctagggacagatctgatgaatgagatgcggcggataacatctgatttcaggatcgggttcggctcgttcgtggaaaagacggtcatgccttatatctcgacaacacctgctaagttgaggaacccttgtacatcagagcagaactgtacatcccccttcagttacaagaatgtgttgtctctaacgaataagggggaagtcttcaatgagttggtcggaaagcagagaataagcggcaatcttgactcgcccgaaggtggctttgatgcaatcatgcaagtggccgtgtgcggtagcctcatcggttggcgcaacgtgacacgattgctggtcttctctactgatgcagggtttcactttgccggtgacgggaagcttgggggcattgtgctccccaatgacggccagtgccacctggaaaataatatgtacactatgtcacattattacgactacccttctatagcccaccttgtccaaaagctgtctgagaacaatattcagacaatttttgccgtgacggaggaatttcagcctgtctataaggagctgaaaaaccttattcctaagagtgccgttggcactctttcggctaattccagcaacgtcatccaactgataatagatgcctacaatagcttgagtagtgaagtcattctggagaacggaaagctgtcagaaggagtcactatttcctacaagtcctattgcaaaaacggagtgaacgggactggggaaaatggcagaaaatgctccaacatcagcatcggggacgaggtccagttcgaaattagcattacttccaataaatgcccaaaaaaggatagcgacagctttaagattagaccgttgggatttaccgaggaggtggaagtgattctgcagtacatttgcgagtgcgagtgtcagagcgaaggcatacccgaaagtccaaaatgtcacgagggcaatggaacttttgaatgcggcgcctgcagatgcaacgagggacgggtcggcaggcactgcgagtgtagcactgatgaggtgaatagtgaggatatggacgcatattgtcgcaaagagaactccagcgaaatctgcagcaacaatggggaatgcgtctgcgggcagtgtgtgtgccggaagcgggataacaccaatgaaatttactccggaaagttttgcgagtgtgataattttaattgcgaccgttcaaacgggttaatctgcggaggtaacggagtttgcaagtgcagagtgtgtgagtgtaaccccaactacactggctcggcctgtgactgctcactggataccagtacctgtgaggcatctaacggccaaatctgcaatggccggggcatctgtgagtgcggcgtttgtaaatgtacggaccccaaatttcaaggacagacatgcgaaatgtgccagacctgcctcggcgtgtgtgcggagcacaaggaatgtgttcagtgtcgtgctttcaataagggtgaaaaaaaagacacatgtacgcaagaatgcagctatttcaatatcacaaaggtggaaagccgggacaaattgccacagccagtgcagccagaccctgtgagtcattgcaaagagaaggacgtggatgactgctggttctacttcacctacagcgttaacgggaacaatgaagtgatggtgcacgtcgtggagaaccccgagtgtcctaccggtcctgatatcatacctatcgtcgctggcgtcgtggctggaattgttctgattggtttggctcttctgctcatctggaaactactcatgattatacacgaccgacgcgagttcgccaagtttgagaaggagaagatgaatgcgaagtgggataccggggaaaaccccatatacaaatcggcagtgaccacagtagtgaaccccaaatatgaaggcaaatag

SEQ ID NO: 15600 - DNA, 150 bp, synthetic construct
  misc_feature 1..150: note = Description of Artificial Sequence: Synthetic coding sequence
  source 1..150: mol_type = other DNA
atgaacctacagcccattttctggataggcctcattagctccgtctgttgcgtcttcgcacaaacagatgagaaccgctgtctaaaagccaacgccaaaagctgcggcgagtgtattcaagccggacccaattgcgggtggtgcacttag

SEQ ID NO: 15601 - DNA, 270 bp, synthetic construct
  misc_feature 1..270: note = Description of Artificial Sequence: Synthetic coding sequence
  source 1..270: mol_type = other DNA
atgaacctacagcctatattttggattgggctgattagcagcgtatgctgcgtctttgcccagacggacgagaatcggtgtctgaaagctaatgcaaagtcgtgtggggagtgcatccaggctggtcctaactgcgggtggtgtactaattctacgttccttcaggagggtatgcctacctcagcccgctgtgatgatctggaagctctgaagaaaaagggttgtccacctgacgacatcgaaaatcctcgtggatccaaagacatttag

SEQ ID NO: 15602 - DNA, 2406 bp, synthetic construct
  misc_feature 1..2406: note = Description of Artificial Sequence: Synthetic coding sequence
  source 1..2406: mol_type = other DNA
atgaatctccaacccattttttggatcggtcttatatccagcgtgtgttgcgtctttgcccagaccgacgaaaaccgctgcctgaaggctaatgccaagagttgtggcgaatgtatccaggctggccccaattgcggttggtgcaccaacagtaccttcctgcaggaaggcatgcccacatccgctagatgcgacgatctcgaggccctgaagaaaaagggatgtccccctgacgacatcgaaaatcctcgcggatccaaagatattaaaaaaaataagaacgtcactaataggtcaaaaggcactgccgaaaaactgaagccagaggatatcacccaaatccaaccacaacagttggtgctaaggctccggagcggggaacctcagacattcacactgaagtttaaacgggctgaagattatccaatagacctttattacctcatggacctgtcctatagcatgaaggacgatctggagaacgtgaagagcttgggcaccgacctcatgaacgagatgcggcgcataactagcgacttcaggatcggcttcggctccttcgtggagaagacagtcatgccttacatatctaccacacccgccaaacttcgcaacccttgcacttccgagcaaaactgtaccagtccatttagttacaagaacgtgctatccctgaccaataaaggagaagtgtttaacgagctggttggtaagcagcgcatctcgggaaatctggattccccggaggggggttttgatgccatcatgcaggttgctgtatgtggctcattgatcggttggcggaatgtgacacgacttttagttttttctaccgacgccggcttccacttcgccggcgacggtaaactcggaggcatagtgctcccaaatgacggacagtgccacctggagaacaacatgtacacaatgagtcactattatgattacccatcgattgcacacctcgtgcagaaattatccgagaataatattcaaacaatcttcgcagtcacagaggagttccagcccgtatacaaagaactgaagaacctaatacctaaaagtgcggtgggaactctatccgccaattcaagcaacgtcattcagcttataatagatgcttacaatagcctttcaagcgaggtgatcctggaaaatgggaaactctctgagggtgttaccatcagttacaagtcttactgcaagaatggcgtgaacgggacaggcgaaaacggcaggaaatgctccaatatttcgattggcgacgaggttcagtttgagatctctatcacaagcaacaaatgtcctaaaaaggatagcgattcattcaagatacgaccactgggtttcacagaggaagtcgaggtcattcttcagtacatatgtgaatgtgagtgccagtcagaaggaataccggaatcaccgaagtgtcatgaagggaatgggaccttcgagtgcggggcatgtaggtgcaatgaaggaagggtgggaagacactgcgaatgctccaccgacgaggtgaacagcgaggatatggacgcttattgtagaaaagagaattcttccgagatctgtagtaacaacggggaatgcgtgtgtggccagtgtgtatgccgcaaaagagataatacaaacgagatctatagtggcaagttctgtgagtgtgacaatttcaattgcgaccggagcaatggccttatttgcggcggcaacggagtgtgtaagtgtcgggtttgcgaatgcaatccgaactacaccgggagtgcctgcgactgctccttagatacttctacatgtgaggcatctaacggacagatttgcaacgggaggggaatttgcgagtgtggagtgtgcaagtgcacagatcctaagtttcagggacagacgtgcgagatgtgccagacttgtctgggcgtctgtgctgagcacaaggagtgtgtccagtgcagagccttcaataaaggcgaaaaaaaagatacgtgcacccaggagtgcagctattttaacatcacaaaggtggagtccagagacaaactccctcagcccgtgcagcccgacccagtgtctcattgtaaagaaaaggatgtcgacgattgttggttttacttcacatactccgtaaacggcaataacgaggtgatggttcacgtagtcgagaatcctgagtgtcctaccggaccagacattatcccaatcgtcgccggagtcgtggcaggtatcgtgctcattggcctcgccctcctgcttatctggaagctgctgatgatcattcatgaccgtagagagttcgccaaatttgagaaagaaaagatgaacgcaaaatgggatactcaggaaaacccaatttataagagtcctatcaataactttaagaacccgaactacggaaggaaggccggcctttag

SEQ ID NO: 15603 - DNA, 411 bp, synthetic construct
  misc_feature 1..411: note = Description of Artificial Sequence: Synthetic coding sequence
  source 1..411: mol_type = other DNA
atgaacctccaacccattttctggatcggcttgatttcgtcggtatgttgcgtctttgcacagactgacgaaaatcgttgcctgaaagccaatgcaaagtcatgtggggagtgtatccaggcaggacctaattgcggctggtgcaccaattcaacattcctgcaggaggggatgcctaccagtgcaagatgtgacgacttagaggctcttaaaaaaaagggatgccccccagacgatatagaaaatccgagaggatcaaaggatattaagaaaaacaaaaatgtgactaatcggtcgaagggtaccgccgagaaacttaaaccggaggatatcactcaaatacagcctcagcagctggtcctccgcctgaggagcggcgagccccagacgttcaccctaaagtttaaatag

SEQ ID NO: 15604 - DNA, 378 bp, synthetic construct
  misc_feature 1..378: note = Description of Artificial Sequence: Synthetic coding sequence
  source 1..378: mol_type = other DNA
atgaacctgcagccgatcttctggatcgggctgatcagttccgtgtgctgcgtgttcgcccagaccgacgaaaaccgctgcttgaaggccaacgccaagtcctgcggcgagtgcatccaggcaggacccaattgcggttggtgcacaaactccaccttcctccaggagggtatgcccacctctgccaggtgtgacgacctcgaagcgcttaaaaaaaagggttgtccgccagacgacatcgaaaacccccgggggagcaaggacatcaagaagaataagaatgtgaccaaccgctcgaagggcacagctgagaagttgaaacctgaagatatcactcagattcagccacagcaactggtgctcaggttacggtcttag

SEQ ID NO: 15605 - DNA, 492 bp, synthetic construct
  misc_feature 1..492: note = Description of Artificial Sequence: Synthetic coding sequence
  source 1..492: mol_type = other DNA
atgaacctgcagcccattttctggataggtctgataagtagtgtttgttgtgtattcgcccaaaccgacgaaaataggtgcctgaaagctaacgccaaatcatgcggggagtgcattcaagccggcccaaactgcggatggtgtacaaactccacctttctgcaggaaggcatgcctacatccgccagatgtgacgatctggaagctctgaagaagaaaggatgtccacctgatgatatagagaatccacggggctccaaggatataaaaaagaacaagaatgtcacaaatcggtccaaaggaactgcagagaaattgaagccagaggacatcacacagattcaaccacagcaattggtgcttaggttgcgaagtggagagccacaaacttttacgctgaagtttaagagagcggaagactatcccattgacctgtactatctcatggatctgagctacagcatgaaggatgacctagaaaacgttaagtag

SEQ ID NO: 15606 - DNA, 459 bp, synthetic construct
  misc_feature 1..459: note = Description of Artificial Sequence: Synthetic coding sequence
  source 1..459: mol_type = other DNA
atgaacttgcagcccatcttctggatcggtctgatttcttctgtatgctgcgttttcgcgcagacagatgagaaccgatgtctaaaagccaatgccaagtcctgtggtgagtgcatccaggccggacccaactgtggatggtgcacaaacagtgtttctaagaccttcctgcaggaggggatgcccacctctgcccggtgcgatgatctcgaggccctgaagaaaaagggatgtccgccagatgatatagagaacccacgggggtcaaaggatattaagaagaataagaacgtgactaataggagtaaaggtacagctgaaaaacttaagcccgaagacatcacacagatacagccccagcagctggtgcttaggttgaggagcggagaaccccaaaccttcacccttaagttcaaaagggctgaggactaccccatcgatctctattacctcatgtag

SEQ ID NO: 15607 - DNA, 315 bp, synthetic construct
  misc_feature 1..315: note = Description of Artificial Sequence: Synthetic coding sequence
  source 1..315: mol_type = other DNA
atgaatcttcaacctattttttggattggactcatctccagtgtctgctgtgtgtttgcccaaaccgacgagaatcggtgtctaaaagcaaatgcaaagtcttgcggcgagtgtattcaggccgggcctaattgcggatggtgtaccaactctacattcctccaggagggtatgcccaccagcgccaggtgtgatgatcttgaggcattgaagaagaaaggctgcccgccagacgatatcgaaaaccctcgagggtccaaggatatcaagaagaataaaaatgttaccaaccgcagtaagggcacagccgaatag

SEQ ID NO: 15608 - DNA, 432 bp, synthetic construct
  misc_feature 1..432: note = Description of Artificial Sequence: Synthetic coding sequence
  source 1..432: mol_type = other DNA
atgaacctgcagccaatcttctggattgggctcattagcagtgtctgttgcgtcttcgcacagaccgatgagaaccggtgtctgaaagccaacgctaagtcctgtggcgagtgcattcaggcaggacccaactgtgggtggtgcactaactccacctttcttcaagagggaatgcctacgtcagcgagatgcgatgacctggaggccctaaagaagaagggatgccctccggatgacatagagaacccccgcgggagcaaggacattaaaaagaacaagaatgtgaccaaccggtccaaaggtacagctgagaaactcaagccggaggacataacccagatccagccacagcagctggtgctccggctcaggtcaggggagccacagaccttcacattaaaattcaagcgcgctgaggactacccgatatag

SEQ ID NO: 15609 - DNA, 2310 bp, synthetic construct
  misc_feature 1..2310: note = Description of Artificial Sequence: Synthetic coding sequence
  source 1..2310: mol_type = other DNA
atgctgggtctccggcctcccctcctggccctggtgggcttgctgtcgcttgggtgtgtgctctcccaggagtgtactaagtttaaagtgagttcttgccgggagtgtatcgagagcggccctgggtgcacctggtgccagaaattgaactttacaggaccaggggatccagattcaattcgatgtgacactcggccccagttattgatgcggggctgcgccgccgacgacatcatggaccctacttctctggccgaaacacaggaggaccacaatggaggccagaaacagctctccccacagaaggtcaccctgtaccttagaccaggacaggctgcagcctttaatgtgacgttccgtagagccaaaggctatcctattgatctgtattacctgatggatttaagctactccatgttggatgatcttaggaacgtcaagaagctggggggcgatctactcagagcactcaacgagattaccgagagcgggagaattgggttcggctcctttgtcgacaaaacagtgctgcctttcgtcaatacgcatcctgacaagctcagaaacccatgccctaacaaggaaaaagaatgtcagcctccctttgctttccggcacgtactaaagctgacaaacaactctaaccaatttcagacagaagtggggaaacagctgatcagcggtaacttggacgcccccgaaggtggcctcgatgctatgatgcaggtagcagcctgccctgaggagatcggctggaggaatgtaacccgcctgttggtgttcgccactgatgacggctttcacttcgccggggacggcaaacttggagcaatcttgacaccaaatgatggacgctgccacctcgaagacaatttgtacaagcgcagcaacgagttcgattatccaagcgtgggccagctcgcccacaaattggctgaaaacaatattcagcccatttttgccgtgacatctcgcatggttaagacctatgaaaaactaacagagatcattcctaagagcgccgtgggggaactctctgaggactcctccaacgtggtacagcttataaaaaacgcatacaacaagctcagctcacgagtgtttttggatcacaacgcattaccggatacattaaaagtaacctacgattcattttgctcaaatggtgtcacacaccgcaatcagcctaggggcgattgcgatggggttcagattaacgtgcctattactttccaggtgaaagttaccgcaactgaatgcatccaggaacaaagctttgttattagagccttgggtttcacggatatagtaacggtccaggttctcccacagtgcgagtgtcgttgccgcgaccagagcagggatcgttccttgtgtcatgggaaaggcttccttgagtgtggcatatgccgctgcgacaccggttatatcggcaagaactgtgagtgtcagacacagggccgctctagccaggagctggaggggagctgcagaaaggacaacaactccatcatttgtagtggattaggagactgcgtgtgcggccagtgcctctgtcatacatcagatgtgcctgggaagttgatctatggacagtactgtgagtgcgacaccatcaactgcgagcggtacaacggccaggtatgcggtggccctggacggggtctctgcttttgtggcaagtgtcgatgccatccgggttttgaagggtccgcctgtcagtgtgaacgaaccaccgaaggctgccttaaccctcgtcgcgtcgagtgttccgggcgcggccgatgtcggtgcaacgtctgcgagtgccactcgggataccagctgcccctgtgtcaggaatgcccaggatgcccgtctccatgcggcaaatacatttcctgtgccgagtgcctgaaattcgagaaggggccttttggcaaaaactgcagcgccgcgtgtcccggattacaattgtccaacaacccagtaaaggggaggacctgtaaagagagagattccgagggctgctgggtagcatacaccctggaacagcaggacggaatggatagataccttatatacgtggacgaatctagagagtgtgttgctggacctaacattgccgctattgtgggaggcactgtggcgggcatcgtcctcatcgggatcctgttgcttgttatttggaaggccttgatacatttatctgacctgagggagtatcgcagattcgaaaaagaaaagctgaagtctcagtggaataatgacaacccattgtttaagagcgccactactacagtgatgaatccgaaatttgcagaaagttag

SEQ ID NO: 15610 - DNA, 969 bp, synthetic construct
  misc_feature 1..969: note = Description of Artificial Sequence: Synthetic coding sequence
  source 1..969: mol_type = other DNA
ggccgcctcggcaaagatctggccacgggagtcctcagccaggaatgcacaaaattcaaagtttcctcttgtagagagtgcattgagtcaggacccggctgcacctggtgccaaaagctcaatttcaccggacccggtgacccagacagcatacgctgcgacacgcgcccccaactgctgatgagagggtgtgcagccgacgacatcatggatcccacctccttggccgagactcaggaagatcacaatggaggacagaagcaattatctcctcagaaggtgacgctctacctgcgccccggccaggcagccgcattcaacgtaactttcaggagagccaaagggtatccgatcgatctctactatcttatggacctgtcatattccatgctggatgatttgaggaacgtgaagaaactgggcggagacctgctgcgggccttgaatgagatcactgaatctgggcgcataggctttggcagttttgtggacaaaactgtccttcccttcgtgaatacccacccagataaattgagaaacccttgccccaacaaagaaaaagaatgtcagccccccttcgcctttagacacgtgttgaaactgacgaataatagtaatcagtttcagacagaagtcggtaaacagctgatttccggcaacctagacgcgccagaaggagggctcgatgccatgatgcaggtggccgcttgccccgaggaaatcggctggagaaatgtaacaagattgctcgtattcgcaaccgatgacggctttcacttcgcgggagatggaaaattaggggcaatcctcacccccaatgacggcagatgtcacttggaagataacctgtacaagcgctctaacgagtttgactatccttccgtggggcaacttgcccataaacttgcagagaataacattcagcccattttcgccgttacctcgagaatggtgaagacatacgagtag

SEQ ID NO: 15611 - DNA, 2310 bp, synthetic construct
  misc_feature 1..2310: note = Description of Artificial Sequence: Synthetic coding sequence
  source 1..2310: mol_type = other DNA
atgctggggctgagacctcctttgctcgctttagtcggcttgttaagcctgggttgcgtgctttcacaagaatgcacaaagtttaaggttagctcatgccgcgagtgcattgagtcgggccctggctgcacctggtgtcaaaagctaaacttcaccggaccaggcgacccagactccattaggtgcgacacccgacctcaactgctcatgcggggatgcgcggccgacgacatcatggatccgacttctctggccgagacacaggaggatcacaacggagggcagaaacaactgtctccgcagaaagtgacactgtatctccggcctgggcaggctgccgctttcaacgtcacattccgacgcgccaaaggatatccgatcgacctgtactatctgatggacttatcgtactcaatgcttgacgatctgagaaacgtgaaaaagctcgggggggacctgttgcgcgccctgaatgaaattacagagagcggacgcatcgggtttgggagctttgtggacaaaacagtgctgccattcgtgaacacacaccctgataaactgcggaacccttgcccaaataaggagaaggagtgccaacccccttttgctttcagacatgtcctgaaacttaccaacaacagtaatcagtttcaaacagaggtcggcaagcaactgattagcggtaatcttgacgctccagagggcggactggacgctatgatgcaggtggccgcctgcccggaggagattggatggcggaatgtcaccagactcttagtgtttgcaaccgacgacgggttccactttgccggagacggtaaacttggggccattttaacccccaacgatggtcggtgccaccttgaagacaacctgtacaaacgttcgaacgaattcgattacccatctgtggggcagctcgctcataagctggccgaaaacaacattcagcccatcttcgccgtgacaagcagaatggtgaaaacttacgaaaaattgacagagatcatacccaagagtgctgtcggggagttgagtgaggatagctcaaatgtcgttcaactgatcaaaaatgcctacaacaagctcagctctagggtgtttctcgatcacaatgccctgccggacacattaaaggtgacttatgattcgttttgctcaaatggggtcacccaccgcaaccagccccggggtgattgtgatggcgtgcagattaatgttccgataacttttcaggtgaaggtcacggcaacggagtgtattcaggagcagtccttcgtgatccgggccctaggcttcaccgacattgtgactgtacaggtactcccacagtgcgaatgccgatgccgcgaccagtcacgggataggagcctctgtcatggtaagggtttcctggagtgtggaatttgtcgctgcgatactgggtacatcggcaagaactgtgagtgccagactcaaggcaggagcagtcaggagttagaggggtcctgcagaaaggacaataatagcattatctgttctggcttaggggattgtgtgtgtgggcagtgtttatgccatacttcagacgtgcctggcaagctgatctacggccagtattgtgagtgcgacaccatcaattgcgaaaggtacaatgggcaggtatgtggcggacccggccgtggattgtgcttttgcggaaagtgccggtgccatcctgggttcgaaggttccgcgtgtcaatgcgagcggaccactgagggctgtctcaatcccagaagggtggaatgcagcggtaggggccgctgcaggtgcaacgtgtgtgaatgtcatagcggctaccagctgccattgtgtcaggaatgccctggatgcccgagtccatgtggtaagtacatctcctgcgctgaatgcctaaagtttgagaaaggcccattcgggaagaactgctcggctgcctgccccgggcttcagttgtctaacaatcctgtgaaggggcggacttgcaaggaaagggactccgaggggtgttgggtggcctacactctggaacagcaagacggaatggatcgttacttaatttatgtggacgaatcacgggaatgtgtcgccggaccaaatatcgccgccatcgtgggaggcacggtcgcgggcatcgtgctcatcggcatactactcctagtgatatggaaagcccttattcacctttccgatctgcgagaatatagaagatttgaaaaagagaaactgaagtctcagtggaacaacgacaatccgctgttcaagtccgctacaacaaccgtgatgaatccaaagttcgctgagtcttag

SEQ ID NO: 15612 - DNA, 2310 bp, synthetic construct
  misc_feature 1..2310: note = Description of Artificial Sequence: Synthetic coding sequence
  source 1..2310: mol_type = other DNA
atgcttggattaagacctcctctcctggccctggtgggcctgctgtctttgggctgtgtgctgtcccaagagtgcactaagttcaaggtcagtagctgcagggagtgtatcgaatctggccctggctgtacttggtgccaaaaattgaactttacaggtccaggggatcccgactcaatcaggtgcgacaccagaccccaactgctcatgaggggatgtgccgcggacgatataatggaccccacttctctggccgaaactcaagaggaccacaatggaggacagaaacagctcagtccccagaaggtgacactttacctgcgcccaggacaggctgctgcattcaatgtgaccttcaggagggcaaagggttaccccatcgacctgtattacctcatggacctctcctattctatgctggatgatcttcgaaacgtaaagaagttgggaggggacttactgcgagctctgaatgagatcactgaaagtgggcgtatcggattcgggagctttgtcgataagaccgtgttgccgttcgtgaatacacaccccgataagcttagaaacccttgtcccaataaagagaaggaatgtcagccacctttcgccttcagacacgtgctgaagttaacaaacaatagtaatcagttccagacagaagttggtaaacagctgattagcggtaatctggacgcaccggagggcggcctggacgccatgatgcaggtggccgcctgcccagaggagatcggatggaggaacgtcacgcgcctgctcgtattcgcgaccgatgacggatttcattttgccggagacgggaaactcggcgcaattctgacaccgaatgatggccgatgtcatctcgaagacaatctgtacaaaaggagcaacgagttcgactacccatctgttgggcagctggcccataaactggctgagaataacattcagcctatctttgcagtcaccagtagaatggtgaagacttatgaaaaactgaccgagatcattcccaagtcagcagtgggggaactttcagaggacagcagtaatgtggtgcagttaatcaagaacgcgtacaacaaattgagctcccgggtgttcctggaccacaatgctcttccagataccctcaaagtcacctacgactccttctgttcgaacggggttactcatagaaaccaaccacgcggcgactgtgatggcgtccagattaacgtcccaatcactttccaagtgaaagtgactgctaccgaatgcatacaggaacagtctttcgtgatcagagcgctggggtttaccgacatcgttaccgtgcaggtgttgcctcaatgcgaatgccggtgcagggatcagtcacgagacaggtcactgtgccacgggaagggtttcctggagtgcggcatttgccggtgtgataccgggtacattgggaagaactgtgaatgccagacccagggccgatcttcccaggagctggagggttcatgtcgcaaagacaacaactcgataatctgctctggtttaggggactgcgtgtgtggccagtgcctctgccacacgtctgatgtccccgggaaactgatatatggtcagtactgcgaatgcgataccatcaactgtgaacgatataatggccaggtgtgcggtgggccaggtcgaggactgtgtttttgtggcaaatgtcgatgtcatcctggctttgagggctcggcatgccagtgtgagcgaacgaccgaagggtgcctgaacccacgccgtgtggaatgctcgggccggggcaggtgtcgatgcaacgtgtgtgagtgccacagtggatatcagctccctctgtgtcaagagtgtcccggctgtcccagtccttgtggaaaatacatctcatgcgctgagtgcctcaagtttgagaagggtcctttcggcaagaattgttccgcagcttgccccggcctgcagctgagcaataatccagtcaaaggccgtacgtgtaaggaaagagactcagagggctgttgggtcgcttataccttggaacagcaggacggaatggatcggtacctcatttacgtggatgaatcccgcgagtgcgtggctggtccgaacattgctgccatcgtgggcggcaccgttgctggaattgtactgatcgggatcctgctgctagtcatatggaaggcactcatacatctttccgatctgcgcgaataccgcagatttgagaaggaaaaactgaaatctcagtggaataatgataacccattattcaaatccgcaactactactgtcatgaaccctaagttcgctgagagttag

SEQ ID NO: 15613 - DNA, 2310 bp, synthetic construct
  misc_feature 1..2310: note = Description of Artificial Sequence: Synthetic coding sequence
  source 1..2310: mol_type = other DNA
atgctcggcctgcggcctccattgctcgccctcgtcggtctcctttccttagggtgcgtcttgtcacaagagtgcaccaaatttaaggtatcttcttgtagggagtgcatagaaagcggcccaggttgcacttggtgccaaaagcttaactttacaggacctggcgaccccgatagtatcaggtgtgacactcggccacaactgttgatgcgcggttgtgctgcggatgatatcatggatccaacctccctggccgagacacaagaggaccataacggaggccaaaaacagttgtcaccccagaaagtcaccctgtatctcaggccaggacaggctgccgcctttaacgtgaccttccgtagagccaagggatacccaattgacctttattacctcatggatctgtcttatagtatgctggacgacctgcgaaatgtgaagaagctgggcggcgatttgctccgagccctcaatgagataacagaatccgggagaatagggtttgggagttttgtggataagactgtgttgccattcgtgaatacacaccccgacaagctgcggaatccctgtccaaacaaggaaaaagagtgtcagcctcctttcgcctttcgacacgtgcttaaactgaccaacaactccaatcagtttcagacggaggttggtaagcaactgatcagtgggaatctagacgccccagaaggcggactggacgcaatgatgcaagtcgccgcctgcccagaagaaatcggatggaggaacgtgactcgactgctggtttttgcaactgatgacgggttccacttcgccggtgacgggaagctgggcgccatattgactcctaacgatggcaggtgtcacctggaggacaacctctataagagatcaaatgaatttgactacccctcagttgggcaactggctcataagctcgccgagaacaatatccagcccatcttcgccgttacctcccgcatggtaaagacttacgagaagctgacagagataattcctaaatccgcggtaggcgagttgtccgaggactcttccaacgtcgtgcagcttatcaagaatgcctataacaagttgtccagtagggtgttcctggatcacaacgccctcccagacaccctgaaagtcacctacgattcattttgcagtaacggggtgacccatcggaatcagccacgcggggactgcgacggagtgcagatcaacgtccctattacatttcaggtgaaagtaacagcaactgagtgtattcaggaacaaagcttcgtgatcagggcgctgggatttaccgacatcgtaaccgtgcaggtgctcccgcagtgcgagtgccgctgtcgggatcagtctagagacaggtcactgtgccatggaaagggctttctcgagtgtggcatttgccgctgtgatactggttatataggtaagaactgcgagtgtcagacacagggaaggtcttcccaggagctggagggctcctgccgtaaggacaataatagcataatttgttccggtttgggtgattgtgtatgtgggcagtgtctttgtcacacttccgacgtgccaggtaagcttatttatggacagtattgtgagtgtgatacaatcaattgcgaacgctataacggccaggtgtgtgggggtcccggcaggggcctctgtttctgtgggaaatgccgctgtcatcctggcttcgagggtagcgcctgccagtgcgaacggacaactgagggatgtttaaaccctcgacgcgtcgagtgtagcggtagaggccggtgtcggtgcaatgtttgtgaatgccattcgggatatcagctcccattgtgtcaggagtgccccggttgccccagcccctgtggcaagtatatcagttgcgccgagtgcctgaagttcgagaaggggccctttggcaaaaactgctcagccgcatgccctggccttcagctctctaacaaccccgttaagggccgcacatgtaaagagagagattccgaaggctgctgggtcgcttacaccctcgagcaacaggatgggatggacaggtatctgatctatgtggacgagagccgtgagtgcgttgccggacccaacatcgctgcaatcgtggggggaaccgttgccgggattgtactgatcggtattctccttctggtgatctggaaggctcttatacatctttccgatctgagagaatatcgcaggttcgagaaggagaaattgaagtcccagtggaacaatgacaacccactcttcaagagcgccactactactgtgatgaacccaaagtttgccgaatcctag

SEQ ID NO: 15614 - DNA, 2310 bp, synthetic construct
  misc_feature 1..2310: note = Description of Artificial Sequence: Synthetic coding sequence
  source 1..2310: mol_type = other DNA
atgctcggcctgagacctccactcctcgcacttgtcggcctgctgtccctagggtgtgtgctgagccaggagtgtaccaagtttaaggtgtccagttgtcgggaatgcattgagtccggacccggatgcacctggtgccagaagctgaactttactggaccaggagaccccgactccatcagatgtgatacacggcctcagctgctgatgagaggatgtgcggctgacgacattatggatccaacgtccctggctgagactcaggaggaccacaatgggggacagaaacaactctccccccagaaggttacactctatcttaggcctggccaagcggctgccttcaacgtgacatttcggagagcaaaaggttatcccatcgacttatactatctgatggatttgtcctatagcatgctcgacgacctccgaaatgtcaagaagctcggcggagatctccttcgcgcactcaacgaaattactgagtccgggagaatcggctttggttctttcgtagacaaaacagttctgccttttgtgaacacccatcccgataaattaagaaacccttgtcctaataaggagaaggaatgccagcctccattcgcttttagacacgtcctcaaactaactaacaactccaatcaattccagactgaagttggaaaacaactcataagcggaaatctggatgctcctgagggaggcttggatgctatgatgcaagtagccgcctgtccagaggagattggatggcgaaacgttacaagacttcttgtatttgctaccgacgatggattccatttcgcaggtgatggcaaactgggggcaatcctgactccaaacgacgggaggtgtcatcttgaagataacctgtacaagagaagtaatgaattcgattacccaagtgtgggacaattggcgcacaaactggcagagaataatatccagccgatttttgcagtgacaagtagaatggttaaaacttacgagaagctgacagagattatccctaaaagcgctgtcggggagctgtcggaggatagtagcaacgtggtccagttaatcaaaaacgcttacaacaaactgagttcccgagtgttccttgatcataacgcattgccagacacactgaaagtcacttacgatagcttctgcagtaacggggtcacccatcggaaccagccaagaggtgattgtgatggcgtgcaaattaatgtgccaattacttttcaggttaaggttacagctacagagtgtatacaagaacagtcctttgtgattagggccctaggcttcacagacatagtgacggtacaagtcctgccccagtgcgagtgcaggtgtagggatcaaagtagggatagatccctgtgccacggaaagggctttctggagtgcggcatctgccgctgtgacacaggatatataggcaagaactgcgagtgccagacacagggcaggtcctctcaagagctcgaagggtcttgtagaaaggacaacaatagcattatatgctcggggctcggggattgcgtgtgcggccagtgcctgtgccatacatctgatgtccccggcaagttgatatacggccagtactgtgagtgtgacactatcaactgcgaaaggtataatggccaggtgtgtgggggcccaggtaggggcctttgcttctgcggaaagtgcagatgccaccctggttttgagggatcagcctgtcagtgtgaacgaaccaccgaggggtgcctgaacccaagacgggtggagtgttccggcaggggcagatgtcgttgtaacgtatgtgaatgtcacagcggctaccagctgcccctgtgccaagaatgtcctggctgtcccagtccatgtgggaagtatattagctgcgcagaatgccttaaattcgagaaaggccccttcgggaaaaattgcagcgcagcatgtcccgggctacagctgagcaacaaccctgtcaaaggacgcacatgtaaggaacgggattcagagggatgttgggttgcttacacgctcgaacagcaggacgggatggaccgttacctgatctatgtggatgagtcccgcgagtgcgttgccggaccaaatatcgctgcaatcgttggcggaactgtcgccggaatagtgttaattggaattttgctgctcgtgatatggaaagcattaatccatctgagcgacctacgagagtatcggcggttcgagaaggaaaagctcaaatcacaatggaacaacgataacccgctctttaaatctgcaaccaccaccgtgatgaatcctaaatttgccgaaagctag

SEQ ID NO: 15615 - DNA, 363 bp, synthetic construct
  misc_feature 1..363: note = Description of Artificial Sequence: Synthetic coding sequence
  source 1..363: mol_type = other DNA
atgcttgggctgagaccccccctgctggcgctagttggactgcttagtctgggatgtgtgctctctcaggaatgtactaagtttaaagtgtcctcctgtcgagagtgcattgagagcgggcccggatgcacatggtgtcaaaagcttaactttaccggccccggagaccccgatagtatcaggtgcgacacccggcctcaactactgatgagaggatgcgctgcggatgacatcatggacccgacctctctggctgagactcaagaggaccataacggagggcagaagcaactgtcacctcagaaagtgaccctgtacctgcggcccggacaagctgccgctttcaatgtgacattcaggtag

SEQ ID NO: 15616 - DNA, 213 bp, synthetic construct
  misc_feature 1..213: note = Description of Artificial Sequence: Synthetic coding sequence
  source 1..213: mol_type = other DNA
atgctaggattgcgcccacctctgcttgcactcgtcggtctgctcagcctgggatgcgtcctctcgcaagaatgcactaagtttaaagtgtcttcctgtcgcgaatgtatcgagagtggccccggctgcacctggtgtcaaaaactaaacttcacgggccccggagatccagacagcatccgatgcgatacacgaccacagctactgatgtag

SEQ ID NO: 15617 - DNA, 150 bp, synthetic construct
  misc_feature 1..150: note = Description of Artificial Sequence: Synthetic coding sequence
  source 1..150: mol_type = other DNA
atgctgggcctgcggccgcccctcttggcgctggtaggtttgctctccctgggatgcgtgctgtcacaagagtgtactaagttcaaagtgtcctcttgccgagagtgcatagagagcggccctgggtgcacctggtgtcaaaaactctag

SEQ ID NO: 15618 - DNA, 483 bp, synthetic construct
  misc_feature 1..483: note = Description of Artificial Sequence: Synthetic coding sequence
  source 1..483: mol_type = other DNA
atgctgggtctgcgaccaccactgctcgccctagtgggcttgctgtcacttggctgcgttctctctcaggaatgcacgaaattcaaggtttcctcgtgcagagagtgtatcgagtcgggaccgggatgtacttggtgccagaagctcaattttacgggccccggcgatcctgattccatacgctgcgatacacgaccccagttgctgatgcgagggtgcgccgcggatgacataatggatcccacatcgctcgctgagactcaggaagaccacaatggtggtcagaagcagcttagcccccaaaaggtaactttgtaccttcggccagggcaagctgccgcctttaacgtaacctttcggcgcgccaaggggtaccctatcgatttgtactacttgatggacctctcttactccatgcttgacgatctgcgaaatgtcaaaaaacttggaggcgatttgcttcgcgccttaaacgagatctag

SEQ ID NO: 15619 - DNA, 501 bp, synthetic construct
  misc_feature 1..501: note = Description of Artificial Sequence: Synthetic coding sequence
  source 1..501: mol_type = other DNA
atgctggggctgcgaccaccactgctggccctggttggcctcctgtcacttgggtgtgttctctctcaggagtgtacgaagttcaaagtttccagttgtagagagtgcatcgaatccgggccagggtgtacctggtgtcagaaattaaactttacaggacccggcgaccccgacagcatccggtgcgacacccggcctcagctgctaatgaggggatgtgccgccgatgatatcatggatcccaccagcctggccgaaacccaggaagaccataatggcggccaaaagcaattgtcccctcagaaagtcacgctttatctccgtcccggccaggccgccgccttcaacgtgaccttcaggagggcgaagggctacccaattgacctttactatctgatggatttgtcgtactcaatgctcgatgatcttagaaatgtgaaaaagctgggcggagatttactgagggcactgaacgagattacagagtcaggaagaatctag

SEQ ID NO: 15620 - DNA, 1137 bp, synthetic construct
  misc_feature 1..1137: note = Description of Artificial Sequence: Synthetic coding sequence
  source 1..1137: mol_type = other DNA
atgctgggactgcgaccaccactcctcgctctggtgggcctcttgtcgctaggatgtgtccttagccaagaatgtacaaagtttaaggtgagttcttgccgcgagtgtatagagtctggccctggttgtacctggtgtcagaaactcaacttcaccgggcctggcgaccctgacagcattcgctgcgatactcgcccccagctattaatgcgcggttgcgcagcggatgatattatggacccgacgtctctggccgagacacaggaggatcacaacgggggccaaaaacaactcagtccgcaaaaggtaaccctgtacctcaggccgggctttggatctttcgttgataagaccgtgctcccttttgtgaatacacatccagacaagctgcgaaatccttgtcctaataaggaaaaggaatgtcagccccccttcgcattcagacacgtattgaaactgacaaacaacagtaaccagtttcagacagaagtggggaaacaactgatcagtggcaaccttgatgcccctgagggaggcttagatgccatgatgcaggtggccgcatgccccgaagagatcggatggaggaacgtgacacggctgcttgtctttgcaaccgatgacgggttccactttgctggcgacgggaaacttggagctattcttactccaaatgacggcagatgtcacttggaggacaacctctacaaaaggtccaacgagtttgactacccatctgtcggccaactggcgcataaactggccgagaacaacattcagccaatattcgccgtaacctcccgtatggtcaaaacatacgagaagctgaccgaaattatccctaagtcagcggtaggtgagctcagcgaggatagcagcaacgtggtccagttaattaagaacgcttataacaaactctcatctcgggtctttctggaccacaatgcactgccagacaccttgaaggtcacctatgacagtttttgctctaatggagtgacccaccgaaatcagcctagaggtgattgcgacggagtccagataaatgtgccaatcacatttcaggttaaagtaactgccaccgaatgtatacaagagcaaagcttcgttatcggtcgctgggcttctcgcacttag

SEQ ID NO: 15621 - DNA, 2367 bp, synthetic construct
  misc_feature 1..2367: note = Description of Artificial Sequence: Synthetic coding sequence
  source 1..2367: mol_type = other DNA
atgcgagcacgaccccgccccagacccctctgggccacagtgttagcgctgggagcgctggccggtgtcggggtggggggaccaaacatatgtacaacccggggggtcagttcttgtcagcaatgtcttgctgtttcgcctatgtgcgcctggtgtagtgacgaggctctgcccctgggatctccgagatgcgacctcaaggagaacttattgaaggataactgcgcacctgagagtatcgagtttcctgtgtccgaagcacgagtcctggaggatcggccacttagtgataaaggctcaggcgacagctcacaagtgacacaggtttccccccaacgcatcgcccttcgcctgcgtcccgacgattctaagaactttagcatccaggttcggcaggtagaggattaccccgttgatatttattacctgatggaccttagttactccatgaaagacgacctgtggagtatccagaacctgggtactaaacttgccacccagatgcggaagctgacaagtaatctgcgaattggatttggagcatttgtcgataaaccagtgtccccctacatgtatatttcgccacccgaagctcttgagaacccctgttacgacatgaagaccacgtgcttgcctatgttcggatacaaacacgtgctgaccctaactgaccaggtcaccaggttcaatgaagaagttaagaaacagagcgtgtctcgaaaccgcgatgcaccagagggcggattcgacgccatcatgcaggccacagtatgcgacgagaaaataggctggaggaatgacgccagtcacctcctcgtctttaccacagacgctaaaacccacatagcccttgatggacgcctggccggtatcgtccagcctaacgatggtcagtgtcacgtcgggtctgacaatcactatagcgcttccaccactatggattatccctcccttggcctgatgactgagaagctgtcccagaaaaatatcaatttgattttcgctgttaccgaaaacgtggtgaatctctatcagaactatagtgagttgattccagggaccacagtcggtgtcttatcgatggactcaagtaatgttttgcagctgatagtggacgcgtatgggaagatacggtcgaaagttgaactggaggtgcgggatctccctgaggaactttctttgtctttcaatgcaacttgcctaaacaatgaggtgatccctgggctcaagagctgcatgggtttgaaaatcggcgataccgtaagcttcagcattgaggcaaaggtaagggggtgcccccaagagaaggagaaatcatttacaattaaacccgttggattcaaggactctctgatcgtgcaagtaaccttcgactgtgactgcgcttgccaggctcaagccgaaccaaattctcaccgctgcaacaatggaaacggtacgtttgaatgtggagtttgccgatgtggtccaggatggctagggagccagtgcgagtgcagcgaggaggattaccgaccctctcaacaggacgagtgctctcctagggaggggcagcctgtgtgttcacaacgaggagagtgcctatgtggccagtgcgtgtgtcactcaagcgattttggtaagattacggggaagtactgtgaatgcgacgacttttcatgcgtgcggtataagggcgaaatgtgctccggccacggccaatgtagctgtggcgactgcttgtgcgatagcgactggacaggctattattgcaactgtaccaccagaaccgacacttgcatgagctcaaacggccttttatgctccggcaggggtaagtgtgaatgcggcagctgtgtttgtatccagcctggtagctacggcgacacctgtgagaaatgtcccacttgtccggacgcttgtaccttcaaaaaggagtgcgtggagtgcaagaagtttgacagaggcgcactgcatgacgaaaatacatgcaatcgttactgcagagatgagatcgagagcgtaaaggagctgaaggataccggtaaagacgcggttaactgtacttacaaaaacgaggatgattgcgtcgtcaggtttcagtactatgaggattcatctggtaaatctatcctgtacgtggtggaagagcctgaatgcccgaaggggcccgacattctcgtggtgctgctgtcagtgatgggtgctatcctcctgatcgggctggccgcacttttaatctggaaactcctgatcacaatccatgatcgaaaggaattcgcaaagttcgaggaagagagagctagagcgaagtgggatacagctaacaaccccctttacaaagaagcaacgtcgacatttaccaatataacttatcgcggcacatag

SEQ ID NO: 15622 - DNA, 2256 bp, synthetic construct
  misc_feature 1..2256: note = Description of Artificial Sequence: Synthetic coding sequence
  source 1..2256: mol_type = other DNA
atgtgtgcctggtgctcagatgaggcgctgcccctggggagtccaaggtgtgatctgaaggagaacctgctcaaggataattgtgccccagaatctatcgagttccccgtgtcagaggcccgtgttctggaggacaggccactgagcgataagggaagcggggactcttctcaggtgacccaggtaagtccccaaagaatcgcccttcggctgcgacccgatgacagcaaaaacttctcaattcaggtgaggcaggtagaggactacccagtggacatttattatctcatggacctgtcttattccatgaaagatgatttatggagcatccagaaccttggtacgaagcttgccacacagatgcgtaaattgacctctaacctcagaattggattcggtgcattcgtcgacaaacctgtatcaccatacatgtacatttctcctccagaggccctggaaaacccttgctatgacatgaagaccacttgcctgcccatgttcggatataagcacgtactgacgcttaccgaccaggtcactaggtttaacgaggaagtcaaaaaacagtcagtgagccggaatagggatgcccccgaaggcggcttcgatgctatcatgcaagccactgtttgcgacgagaaaattggttggaggaacgacgcatcacacttgctggtgtttaccaccgacgccaagacacatattgcactggacggacgattggctggaatagtgcagcccaacgatggtcagtgtcacgtcggctccgacaatcactacagcgctagcaccaccatggactacccaagcttagggctcatgaccgagaagctcagccaaaagaacataaacctcatctttgcagtgactgagaacgtcgtgaatttataccagaattattccgagctgatccctggtaccactgttggggtgctgtccatggacagtagtaacgtgctgcagctgatagtcgatgcttatggaaagattcgctcaaaagtggaattggaggtccgcgatctgccagaggagctctctctgagctttaacgctacctgccttaacaacgaagttattccaggattgaaatcatgtatgggcctaaaaatcggagacactgttagcttctccattgaagctaaagttaggggctgtccccaagagaaggaaaagagtttcacaatcaaacctgtgggcttcaaggatagcctgattgttcaagtgacatttgactgcgactgcgcttgccaagcccaggccgaacccaactctcataggtgcaataatggtaacgggaccttcgagtgtggtgtgtgtcggtgtggccccggttggctcggcagccaatgcgagtgcagtgaggaggactatcgtccctcccagcaggacgaatgcagtccacgggaggggcaacctgtgtgcagtcagagaggggaatgtctctgcggacagtgcgtgtgccattcaagcgactttggcaagattaccggcaaatattgcgaatgtgacgacttctcctgtgtcaggtataagggtgaaatgtgttccggtcatggccaatgctcctgcggagattgtctgtgcgactcagactggacaggctactattgtaattgtacgactcgcacggacacctgtatgtcctcaaatggactgctgtgctccggaagaggaaagtgtgagtgcggcagctgtgtatgtatccaaccaggctcttatggagatacgtgcgagaagtgcccgacctgcccggacgcgtgtacctttaaaaaagaatgtgtggagtgtaaaaagttcgataggggtgctctgcacgacgagaatacctgtaatcgttattgtcgcgacgaaattgagtctgtcaaggagctcaaggacacaggaaaggacgccgtcaattgcacttacaaaaacgaggacgattgtgtggtgagattccagtattatgaggattctagtggaaagagcatactgtacgtggtggaagagcccgagtgtcccaaggggccagatatcctggtggttctgctctcagtcatgggtgctatcttgctgatcggtcttgctgcattattaatttggaaactgcttataactatccacgataggaaagagttcgcgaagttcgaggaagagcgagccagggcaaagtgggatactgaaattctgttgtattactgctcctttatactggtgcaccagtctctggagagtctgcgtactgaatttacttctaagcagaaggatggtaattag

SEQ ID NO: 15623 - DNA, 2367 bp, synthetic construct
  misc_feature 1..2367: note = Description of Artificial Sequence: Synthetic coding sequence
  source 1..2367: mol_type = other DNA
atgcgggctcggccacggccacgaccactgtgggcgactgttctggctctcggagcccttgccggcgtgggggtgggtggccctaatatatgcaccacgcgtggggtttcttcctgccagcagtgcctggcagtaagtccgatgtgcgcttggtgctcggacgaggcgttacctttagggtccccacgctgcgacctgaaggagaatttattgaaggacaattgcgctccagagagcatcgagtttccagtcagcgaggctagggtattagaggaccgacccttaagtgataagggatccggggattctagtcaggtgacccaagtgtctccacagcgcattgccttgcggcttaggcccgatgactccaagaacttctctattcaagtgaggcaggtggaagattaccccgtcgacatctactatttgatggacctgtcatactcaatgaaggacgatctttggtccattcagaacctgggaaccaaacttgccacccagatgcggaaattaacctccaacctaagaatcggattcggtgcattcgtcgataagccagtaagcccgtacatgtatatttcaccaccagaagcactggaaaatccgtgctatgacatgaagacgacatgtctgcccatgttcggatataagcacgtcctgactctgaccgaccaggtaacccggtttaacgaggaggtaaagaaacagagcgtgagtagaaatcgagacgcgcccgagggaggattcgacgccatcatgcaggccaccgtgtgtgacgaaaagatcgggtggaggaacgatgcctcacacctactggttttcacaacggacgcaaaaacccacattgcgctggatggcaggctggcaggcattgtgcaacccaacgatggccagtgtcatgtcggtagtgacaatcattattctgcatctaccactatggactatcctagtcttggactcatgacagagaaattatcccagaaaaatatcaacttgattttcgctgtcaccgagaacgttgtaaatctctatcagaactacagcgaactcatacccggaacaacagtgggtgtgctaagcatggactcaagcaatgttttgcagttgattgtcgatgcttacggcaagattcgcagtaaagttgaactggaggtgagagatctccccgaggagttgagtctcagttttaacgctacatgcctgaacaacgaagtcattcccggtctcaagtcttgtatgggactcaagattggagataccgtttctttttccattgaagctaaagtgcgcggctgtcctcaagagaaagaaaaaagtttcaccattaagcccgtcggtttcaaggatagcctcatcgtccaggttaccttcgactgcgactgtgcatgccaggcccaggcagaacctaattctcaccggtgtaacaacggaaatggcacatttgagtgcggcgtttgtcggtgcggccccggttggttgggtagtcagtgcgagtgtagtgaagaggactatcggccatctcaacaggatgagtgttcaccccgggaaggtcagccagtgtgtagtcaacgcggggaatgtctttgcgggcaatgtgtatgccactctagtgatttcggcaaaattacaggaaaatactgcgagtgcgatgacttctcttgtgtgcgctataagggagagatgtgttcagggcacggccagtgctcctgtggtgactgtctctgtgattccgactggaccggatattattgcaattgtacgacaagaactgacacatgtatgagtagcaatggcctcctttgctccggtagagggaagtgcgaatgcggaagttgcgtttgtatccaacctggaagctacggcgacacatgtgagaagtgccccacctgtccagacgcttgtacctttaaaaaggagtgcgttgaatgtaaaaaattcgaccggggcgcacttcacgacgagaatacatgtaatcgctattgccgcgatgagatcgagtcagtgaaagaactcaaggacaccggtaaagacgccgttaattgcacttacaagaatgaagacgactgcgtcgttagattccagtactacgaggattcatcgggaaaatccatcctgtatgtggttgaggagcctgagtgccctaaagggccagacatcttggtcgtactgctctctgtgatgggcgccatacttctcattggcctcgccgctcttctgatatggaagcttctcatcaccattcacgacaggaaagagttcgcaaagttcgaagaagagcgtgctagagcaaagtgggatactgctaacaacccattatataaagaggcaacttcaacgttcacgaatataacctacaggggaacatag

SEQ ID NO: 15624 - DNA, 1359 bp, synthetic construct
  misc_feature 1..1359: note = Description of Artificial Sequence: Synthetic coding sequence
  source 1..1359: mol_type = other DNA
atggacgacatttttacccagtgcagggaaggaaatgctgtcgcagtgaggctgtggcttgacaatacggaaaacgatctgaatcaaggagatgatcatggtttttcccctctgcactgggcctgcagggagggtaggtccgcagtcgtcgaaatgctcatcatgagaggtgctagaattaatgtgatgaatagaggtgatgacacaccactccacttggcagccagccacgggcaccgcgacatagtgcaaaaactgctgcagtacaaagcggatatcaatgctgtgaacgagcatggtaatgtccccttgcactacgcctgtttctgggggcaggaccaagtggcagaggacttagtggccaacggcgcccttgtctcaatctgcaacaaatacggagaaatgccggttgacaaggcaaaagcacctttgagggaactgctgagagagcgggcggaaaagatgggtcagaacctgaaccgaattccctacaaagataccttctggaaaggcaccacgcgcaccaggcctcggaatggaactttgaataagcactctggaatagactttaaacagctgaatttcttgaccaaattgaatgaaaatcactcgggcgagctctggaaaggacggtggcagggcaatgatattgtcgtgaaggtgctgaaggtcagggattggagtacccgcaagagccgggattttaacgaagagtgcccaagactgagaatcttctcccatcctaatgtgcttccagttttgggtgcgtgtcagtcccctcccgcaccacatccaaccctgatcacccactggatgccgtacggcagcctgtacaacgtgctgcacgagggcaccaattttgtcgtcgaccagagccaagccgtcaaattcgccctggatatggctcggggcatggccttcctccatacgctcgagcctctgattcctaggcatgctctgaatagccgttccgtcatgatcgatgaagatatgacagctcgcataagtatggccgacgtgaagttcagttttcagtgccccggtagaatgtacgctcctgcgtgggtagcacccgaagccttacagaaaaaacccgaggacacgaataggcgctccgcagacatgtggagctttgctgtgctgctgtgggagctagttacgagggaggtgccctttgcagatctgagcaacatggagattggcatgaaggtagcgctagaagggctgcggcctacgataccccccggcatatctccccacgtttgtaagctaatgaagatttgcatgaacgaggatccagccaagagacctaaatttgatatgattgtaccaattctggaaaaaatgcaggataagtag

SEQ ID NO: 15625 - DNA, 1359 bp, synthetic construct
  misc_feature 1..1359: note = Description of Artificial Sequence: Synthetic coding sequence
  source 1..1359: mol_type = other DNA
atggatgacatattcacacagtgtcgggaaggtaatgccgtcgcggtgagactgtggctggataataccgagaacgatttgaaccagggcgacgatcacgggttctcgcctttgcactgggcctgtagagagggacggagtgccgttgttgaaatgctgattatgcggggcgcgcgcattaacgtgatgaaccgtggcgacgacacccccctccacttggcagcttcccatggacatcgggacatcgtgcagaaattgttacaatataaggcagacattaacgcagtgaatgagcatggcaacgtccctctgcactacgcttgcttttggggccaggaccaggtggctgaggatctcgtggctaacggtgcgctggttagcatctgtaataagtacggtgaaatgcccgtagacaaagccaaggcccctctgagggagcttctgcgagagcgagcagagaagatggggcagaatctcaaccgtattccgtataaggacactttctggaaaggcacaaccaggacacgaccaagaaatggcactctgaataagcactccgggatcgatttcaaacaacttaattttctgactaaactgaacgaaaatcattctggcgagctgtggaagggacggtggcaggggaacgacatcgtggtcaaggttctgaaagtcagggactggtccaccagaaagagccgcgatttcaacgaagaatgtcctcgactccggatattttcccaccccaacgtgctgcctgtgctcggcgcatgccagtccccccctgcgcctcatcccacgctgatcacccactggatgccgtacggttccctgtataacgtcctgcacgaagggactaacttcgttgtggatcagtcgcaggctgtgaagtttgctcttgacatggcccggggcatggctttcctccatactctcgaacctttgataccaagacacgccctgaactcccggtcggttatgattgacgaagatatgacggctcgtatcagcatggcagacgtgaaattttcctttcaatgtcctgggaggatgtatgctcctgcttgggtggcccccgaggccctacagaagaagcctgaggatacaaacaggcgcagcgctgacatgtggagttttgccgtcttgctctgggaactggtgacacgagaggtgccattcgctgatctgtccaacatggagatcggcatgaaggtagccctggagggactgcgacccacaattcctcccgggatctctccccacgtgtgtaaactgatgaagatctgtatgaatgaggacccagctaaacggcctaaattcgacatgatcgtgcctattttagaaaagatgcaggataaatag

SEQ ID NO: 15626 - DNA, 1359 bp, synthetic construct
  misc_feature 1..1359: note = Description of Artificial Sequence: Synthetic coding sequence
  source 1..1359: mol_type = other DNA
atggacgacatctttactcagtgtagggaggggaatgctgtcgctgtgcggctgtggctcgacaataccgagaatgacctcaatcagggtgatgaccatggcttcagcccccttcactgggcgtgtcgcgagggcaggagcgcagtcgtggaaatgctgatcatgaggggggccaggatcaatgtcatgaataggggcgacgatacccccctgcatctcgccgcatcgcatggccacagggacatagtccaaaaactcctgcagtataaggccgacatcaacgcggtgaatgagcatggaaacgtccccctacactatgcgtgtttctggggccaggaccaggtggcagaggacctggttgctaacggtgctctcgtttcaatctgcaataaatacggggagatgcctgtcgataaagccaaagcccctctacgcgaactcctgcgagaaagggcagagaagatggggcagaatctgaaccggattccctataaggacaccttctggaaaggaacaacccgcaccagacctcggaatgggacactgaacaagcactcgggcatcgatttcaagcaactgaatttcttaacaaaattgaatgaaaaccatagcggtgaactctggaaagggcgctggcagggaaacgatatcgtggtcaaagtgttgaaggtacgggactggagcaccaggaagagccgggatttcaacgaagagtgcccgcggctgcggattttcagccatcctaacgtgctgccagtgctaggggcctgtcagtctccacctgcaccgcatcccactcttataacacattggatgccctacgggagtttatacaatgtgcttcacgaagggacaaactttgtcgttgatcagtcccaggccgttaaattcgctctcgacatggcgcggggcatggcctttctgcatacgctggaaccccttattccgagacatgcccttaatagtcggtctgtaatgattgacgaggacatgactgcccgtatctcaatggccgacgtcaagttctctttccagtgccccggtcggatgtatgctcccgcctgggtcgcccctgaggccttacagaagaaaccagaagataccaacaggaggtccgctgatatgtggtcctttgcagttctgctctgggagttggtgacaagagaggtaccttttgcagacctaagtaacatggaaatcgggatgaaagtggcactggaaggtcttaggccgacaataccccccgggatatcgcctcacgtgtgtaagctgatgaagatatgtatgaatgaagacccagcaaaaaggcccaaattcgatatgatagtacctattctggaaaagatgcaggacaaatag

SEQ ID NO: 15627 - DNA, 957 bp, synthetic construct
  misc_feature 1..957: note = Description of Artificial Sequence: Synthetic coding sequence
  source 1..957: mol_type = other DNA
atgcctgtggataaagccaaagcccccttgcgagaactcctgcgtgaacgtgcagagaagatggggcagaatctcaatagaatcccatataaggacacattctggaaaggaacaacacgaaccagacctcgcaacggaaccctaaataagcactctggtatcgattttaagcagcttaacttcttgactaagctgaacgaaaatcattctggagagctttggaagggccgttggcagggcaatgacatcgtggtgaaggttctgaaagtcagagattggtctacgcgcaaaagcagggatttcaacgaagaatgtcccagactgcgcatattcagccatcccaacgtgcttccagtgcttggcgcatgccagtccccccctgctccccacccaactttgattacccattggatgccatatggctctctgtacaatgtcttacacgagggaaccaacttcgtggttgatcaaagtcaggctgtaaaattcgcccttgatatggcacgaggcatggccttcctgcataccctggaaccgctaattcctcgccacgccctaaattcaaggagcgtgatgatcgacgaggacatgacagcacgaatttccatggctgacgtgaagttcagcttccaatgtcctgggcgcatgtatgcaccagcctgggttgcgcctgaggccctgcagaagaaaccagaagacacaaacaggaggtcagccgacatgtggtcttttgccgtcctactgtgggagcttgtgacaagggaggtgcctttcgccgatcttagcaatatggagattgggatgaaggtggccttggagggcttgcggcccactatcccacctggaatttccccacacgtctgcaaattgatgaagatttgtatgaacgaggatcctgccaagagaccaaagtttgacatgatcgtccctattttggaaaagatgcaggataagtag

SEQ ID NO: 15628 - DNA, 978 bp, synthetic construct
  misc_feature 1..978: note = Description of Artificial Sequence: Synthetic coding sequence
  source 1..978: mol_type = other DNA
atgcctattacaaggatgcgcatgcgcccttggctcgagatgcagatcaatagcaatcaaatccccggcttgatttggattaataaggaggaaatgattttccagatcccatggaagcacgccgccaaacacgggtgggacattaataaggatgcttgcctgttccgctcgtgggccattcacaccggccgctataaagccggcgagaaggaacctgaccccaagacttggaaggctaatttccgatgcgctatgaacagcctcccggatatcgaggaggtaaaagaccagtcccggaataaggggtcctctgctgtgagggtgtatagaatgctgccacctctgactaagaaccagcgcaaggaaaggaagagcaagtcaagccgggacgcgaagtctaaggcaaagagaaagtcctgtggcgactcatcacctgacaccttttccgacgggctctcctcgagcaccctgcccgacgaccatagttcctataccgtgccgggctacatgcaggatctggaagtcgagcaggcgctgaccccagccctgtcgccatgcgcagtgagcagtaccctgcccgattggcatatccctgtggaagtagtgcccgactcaacttccgacctctacaatttccaggtgagccctatgccaagcacttcagaggccacaactgatgaggacgaggaaggcaaacttccagaagacattatgaagctactggagcagtcagaatggcagcctactaacgtggatggtaaaggatacctgcttaacgagcccggagtccagcctacctccgtttacggcgacttctcttgcaaggaggagcccgagatcgatagccctggtggcgatatcggtttgtcactacagagagtattcacggacttaaaaaatatggatgcaacatggctcgattccctgctgacaccagtgaggctgccatcaattcaggccattccctgtgctccctag

SEQ ID NO: 15629 - DNA, 978 bp, synthetic construct
  misc_feature 1..978: note = Description of Artificial Sequence: Synthetic coding sequence
  source 1..978: mol_type = other DNA
atgccaataactagaatgaggatgagaccctggctggagatgcagattaactccaatcagatccctgggttaatctggattaacaaggaagaaatgatttttcagatcccatggaagcacgctgccaaacacggatgggatattaataaggacgcttgtctattccgcagttgggctatccacacgggacgttacaaagccggcgagaaagagcccgatccaaaaacctggaaggcaaactttcgctgcgcaatgaatagcctccctgacatagaggaggttaaggaccaaagccgaaataagggaagctccgcagttcgcgtctatcgaatgctaccaccactgaccaagaatcaacggaaagaacggaaatctaaatcttctagagacgccaaatcgaaggccaaaagaaagtcttgtggtgactccagtcctgataccttcagtgacggcctcagtagctccactctaccggacgaccacagttcatacacggtacccggctatatgcaggacctagaggtggagcaagccctgacacccgcactgtccccctgcgctgtgagtagtacccttcccgattggcacatccccgtggaggtagtccccgacagcacatctgacctttacaactttcaagtctcccctatgccctcgacctctgaggcaaccacagatgaggacgaagaagggaaactacccgaggacattatgaaactgctggagcagagtgaatggcaacccactaacgtcgacggcaaaggctacctgttaaatgagccaggcgtccagccgacatcggtgtatggagactttagctgtaaggaggagcccgaaattgactccccagggggggacatcgggttgagcctccagcgagtgttcaccgatctgaagaacatggacgcaacctggctggactcactgttaacaccggtcagactgcccagcatccaagccatcccatgcgctccgtag

SEQ ID NO: 15630 - DNA, 579 bp, synthetic construct
  misc_feature 1..579: note = Description of Artificial Sequence: Synthetic coding sequence
  source 1..579: mol_type = other DNA
atgcctatcacaaggatgagaatgcggccatggttggaaatgcagataaacagcaaccagattccggggctcatttggattaacaaagaggagatgatctttcaaatcccatggaagcatgctgcaaaacatggatgggatattaacaaagacgcctgcctgtttcgcagctgggccatccacacgggtcgatataaagcaggcgaaaaagagcctgacccaaaaacatggaaagccaactttcgctgtgctatgaactctctgcccgacatcgaggaggtcaaggatcaaagtaggaataaaggctcatcagctgtgagggtgtaccggatgctgcccccactgactaaaaaccagaggaaagagagaaaatcaaagtcgtcaagggacgctaaatctaaggcgaagaggaagtcatgcggtgattcctctcccgacacgttctccgacggactgagcagctctacattgcctgatgaccatagtagctatacagtgcccgggtatatgcaggatttggaggtcgaacaggcactgacacctgccctcagtccatgcgcggtctcatccactctgtag

SEQ ID NO: 15631 - DNA, 1356 bp, synthetic construct
  misc_feature 1..1356: note = Description of Artificial Sequence: Synthetic coding sequence
  source 1..1356: mol_type = other DNA
atgaatcttgaaggcggcgggcgcggtggagagttcggaatgtctgctgtgtcctgcgggaatggaaaactgaggcagtggcttatcgatcagatcgatagcgggaaataccctgggctggtgtgggaaaacgaagaaaagtcaatttttcgcattccgtggaaacatgccggcaaacaggattacaatcgcgaggaagacgctgcactgtttaaagcatgggctttgttcaaggggaagtttagagaaggtatcgacaagcccgaccctcctacatggaagacccggctgaggtgtgctctgaacaagtccaacgattttgaagaactggttgaacgctcacagctggacatcagtgatccttacaaagtttataggatcgtgccggaaggcgccaaaaaaggagcaaagcagctcactctagaggacccacagatgtccatgtctcacccctacacaatgaccactccttacccctctcttcctgcccagcaagtgcacaattacatgatgcctccactcgaccgcagctggcgcgattatgtgcccgatcagccacatcccgagattccgtatcaatgccctatgaccttcgggccgagaggacaccactggcagggaccagcttgcgaaaatggttgtcaggtgaccgggactttctatgcgtgcgcacctcctgaatcccaggcccccggagtgccgacggagcccagtattcgttctgctgaggctctggcatttagtgactgccgactacacatctgtctatattatcgggagatcctagtcaaagagctaactacaagctccccggaggggtgtcggatcagccacggccacacatatgacgcctctaacctggaccaagtgctttttccctacccagaagacaacggacagaggaagaatatagaaaagctactttctcacctcgagcgaggggtggtattgtggatggcccctgatggtctgtacgctaaacggctttgtcagagcaggatctactgggatggacccttggccctgtgcaacgacagaccaaacaagctcgagcgggaccagacgtgcaaactcttcgacacgcagcaatttctttctgagctccaggcgttcgcccatcacgggagatcattaccacgttttcaggtcaccctgtgctttggagaggaattccctgaccctcagcgccagcgcaaattgattactgcgcatgtagagccactcctggccagacagttgtactattttgctcagcagaactcagggcactttctgagggggtacgaccttcctgagcacattagcaacccagaagattatcaccggtccatccggcactcatctatccaggaatag

SEQ ID NO: 15632 - DNA, 1443 bp, synthetic construct
  misc_feature 1..1443: note = Description of Artificial Sequence: Synthetic coding sequence
  source 1..1443: mol_type = other DNA
ttgggccctaccgccgccctttcctccgaaagtcgggctcgggccgctcaggcgggtggcggacccagagctcgggcgcgcactcgcggcatgaacctggagggcggaggtcgtgggggagaattcgggatgtcagctgtcagctgcgggaacgggaagctgcggcaatggcttatcgaccagatcgactccggcaaataccctggcctggtttgggagaacgaggaaaaaagtatcttccgcataccctggaaacatgccgggaaacaggactataatagggaggaggatgcagccctgttcaaggcttgggccttattcaagggaaagttccgagagggaatcgataagccggaccccccgacctggaagacacgcttgcggtgtgcacttaacaagtcgaatgatttcgaagaattggtcgagagaagccaactggatatatctgatccatataaagtatacaggattgtgcccgaaggagctaagaaaggggcaaagcaattaaccctcgaggaccctcaaatgtccatgtcccacccctacaccatgacaactccctatccatccctccccgcccaggtgcataactacatgatgccacccctcgaccgatcgtggcgtgattacgtgcccgatcagcctcacccagaaataccatatcagtgcccaatgacttttgggcctcggggtcaccattggcaggggcctgcttgcgaaaacggctgccaggttacaggtactttctacgcttgcgctccccccgaatctcaggcaccaggagttccaaccgagccaagcatacggtccgcagaagccctcgcattcagcgattgccggctgcatatatgcctttattatagagaaatacttgttaaagagctcaccacttcctctcccgaggggtgtagaattagccacggacacacgtatgatgcaagcaatctggaccaggtgctcttcccttatcctgaggataacggccaacggaaaaacatagagaagctgctgagtcatctcgagagaggcgttgtactctggatggcgccagatggtctctacgcgaaaaggctgtgccaatctaggatatactgggatggaccccttgcgctctgtaatgacaggccaaacaagctagagcgcgaccagacttgtaaactgtttgacacccagcagttcctgtctgagctgcaagcctttgcacaccatggaagatctttgccaaggtttcaggtaactttatgctttggcgaggagttccctgatccccagcggcagagaaagctgattaccgcccacgtcgaaccactgcttgcaaggcagctatattacttcgcacagcagaactccgggcactttctaaggggctacgacctccccgaacacatttctaaccctgaggactatcaccgtagcatccgacattcttctattcaagaatag

SEQ ID NO: 15633 - DNA, 1497 bp, synthetic construct
  misc_feature 1..1497: note = Description of Artificial Sequence: Synthetic coding sequence
  source 1..1497: mol_type = other DNA
atgaatcaaagcatccctgtggcaccaaccccgcctagacgggtgcggctcaagccttggctagtggcccaagtcaacagctgccaatacccaggactccagtgggtgaatggcgaaaagaagcttttctgtataccatggcggcatgcaacccgccacggaccctctcaggatggagacaataccatttttaaggcctgggccaaggagaccggcaagtataccgaaggcgtagacgaggctgatccagccaaatggaaagcaaacctccgctgcgccctgaacaaaagtcgggattttagactgatctacgacggtccacgggacatgccaccacaaccttacaaaatttatgaagtgtgtagcaatggaccagcccccactgactcccaacctccagaagattactcctttggtgccggggaagaggaggaagaagaggaagaactgcaaagaatgctcccgtctctgagccttacggaggacgtgaaatggccacctaccctgcagcccccgacactcaggcctcctacgctgcagccccctacacttcagcctcccgtggttctcgggccacccgcccccgatcctagtcccctcgctccccctcccggaaatcctgcgggattccgggagttactctcggaagtgctcgagcccggtccgttgcctgcgtcactaccgcccgctggtgagcagttactgccagacttgctgatcagcccccacatgttacccctcaccgacctcgaaatcaaatttcaatatcgagggagacccccgcgcgctctcactatcagtaatccacatggctgccgcctgttctactcccagctggaggcgactcaggaacaggtggaactattcggcccaatctctcttgagcaggtccggttcccttcccctgaagacatcccgtctgacaaacagaggttctatacaaatcagctgcttgatgtcctggatcgcggactcatcttacagttacagggccaggatctctacgctatccgcctgtgccagtgcaaggttttctggtccggcccttgtgcatcagctcatgattcctgccctaatcccatccagagagaggtaaaaactaaattgttcagtctggaacatttcctgaatgaactgatcctcttccagaagggccagacgaacactccgccaccattcgagatcttcttctgctttggagaagaatggcctgataggaagcctcgcgagaaaaaacttatcactgtccaggttgttccagtggcggccaggctcttactggaaatgttttccggggagctgagctggtccgccgacagtatccgcttgcaaatatcaaatcctgatttaaaagaccgcatggtggaacagtttaaagaattgcaccatatctggcaatcccagcagcgactccaacctgttgcccaggcaccccctggcgccggtctcggtgtaggacagggcccttggccaatgcatcccgctggcatgcagtag

SEQ ID NO: 15634 - DNA, 1545 bp, synthetic construct
  misc_feature 1..1545: note = Description of Artificial Sequence: Synthetic coding sequence
  source 1..1545: mol_type = other DNA
atgaaccaatccatcccagttgcccctactcctcctaggagagtgaggctgaagccatggttggttgcccaggtgaattcttgccagtacccaggcctgcagtgggtcaacggcgaaaaaaagttgttctgcattccctggaggcacgccacacggcacggcccgtcccaggacggcgacaatacgattttcaaagcttgggctaaagagacagggaaatacacagagggcgttgacgaagccgatccggccaaatggaaggccaacctgcgatgcgcattgaataagtcaagagattttcggcttatttacgatggaccccgggatatgccgcctcagccatataagatttatgaagtgtgctcaaatggacccgcccctactgacagtcagccccctgaagactactccttcggagcaggcgaagaggaggaggaggaggaggaactccaacggatgcttccatcactgtctctcaccgacgccgtgcagtctggtccacacatgactccctattctctcctgaaggaggacgtaaaatggccccccacgctccagcccccaacccttagaccgcctacgcttcagccaccgactctgcagcccccagtagtgctgggcccaccagctccagacccatccccgctggccccacctccaggcaacccagccgggttccgagaactgctgtcggaggtgctcgaaccaggcccactgccggctagtctgccaccagctggcgagcagctactcccggacctgcttatatctcctcatatgctgccacttacagatttagagatcaaattccagtatcgggggaggccaccacgggctttaaccatttcaaacccgcatggatgcaggctgttttactcccagctggaggcgacgcaggaacaggttgaattgttcggacctatttcattagaacaggtgcgtttccctagtccagaggacatccctagcgataagcagaggttttacacaaatcaactccttgatgtgctggaccgcggcctgatccttcagctgcaggggcaagacctgtatgcaataaggctatgtcagtgtaaggtgttttggtccggaccttgcgccagcgcccacgatagctgtccgaatccaatccagcgggaagttaaaacaaagttgtttagtttggaacactttcttaacgagctgatcctatttcaaaaagggcaaaccaatacaccacctcccttcgagatattcttctgttttggggaggagtggcctgacaggaagccacgggagaagaagctgatcacagtacaggtcgttcctgttgcagcacgcttgcttctggagatgttctccggtgagttatcttggtctgccgactccataaggcttcagatctccaatcctgaccttaaagacaggatggttgagcagtttaaggaacttcaccacatctggcagtcacagcagaggctccaacctgtagcccaggctccacccggggcaggtctgggagtgggccaggggccatggcctatgcatcccgctggcatgcagtag

SEQ ID NO: 15635 - DNA, 1497 bp, synthetic construct
  misc_feature 1..1497: note = Description of Artificial Sequence: Synthetic coding sequence
  source 1..1497: mol_type = other DNA
atgaatcagtccatcccagttgcccctactcccccacggagagtccggctgaaaccttggctggttgcccaggtgaattcttgtcagtacccaggactccaatgggtgaacggcgagaagaagctattttgcatcccttggcgacacgctaccaggcatgggcccagtcaggatggggacaatacaattttcaaagcgtgggccaaggagaccggtaagtacactgagggagtcgacgaggctgatcccgcaaagtggaaggccaaccttcggtgtgctttaaataaatcaagggacttcaggctgatttacgatgggcctcgcgatatgcccccccagccctacaagatctatgaggtctgcagtaacggtccagctccaactgactcccagcctcccgaggactactctttcggcgctggtgaggaggaggaagaagaggaagaactgcaaagaatgttgccttcgctttcacttaccgaagacgtgaaatggccaccaacactgcagcccccaacgctgaggcccccaaccctgcaacctccgacgctccagccgcccgtggtgcttggcccccccgctcccgaccctagccctttagctcccccacctggtaacccggccgggtttcgggaactactcagcgaagtcctggagcctggcccactgcctgcgtccttaccacctgccggagaacaactgctccctgatctcttaatctccccacatatgctccctttgaccgatctggaaattaaatttcaatatcggggacgacccccaagagcattgactatttcgaaccctcacggctgtcgcttgttttattcccaactggaggccacccaggagcaggtcgagctcttcgggccaataagtctggaacaggtacgcttccccagccctgaggatattccttcagacaaacagcgcttttataccaaccaactgctagacgtcctggacagaggtctcattctgcagctgcaaggccaggacctctatgccatcagactgtgccaatgtaaagtgttttggtccggcccttgcgcaagtgctcacgacagctgtcccaaccctattcagcgagaagtcaaaaccaaattgttcagcttggaacactttttgaacgaattgatccttttccagaagggccagaccaacaccccccccccctttgaaatctttttctgtttcggagaggagtggcccgatcgcaagccacgcgagaagaagctcatcactgtgcaggttgtcccagtagcggcaaggttgctgctggagatgttctccggcgagttgagctggagtgccgatagcattcgactccagatatccaatcccgatctcaaagatcggatggtggagcagttcaaggagttgcaccatatctggcaatcacagcagagacttcagccagttgcccaggcgcctccaggggctgggttgggagtagggcagggcccttggcccatgcaccctgccggaatgcagtag

SEQ ID NO: 15636 - DNA, 1467 bp, synthetic construct
  misc_feature 1..1467: note = Description of Artificial Sequence: Synthetic coding sequence
  source 1..1467: mol_type = other DNA
atgaaccagtctatcccagtcgccccaaccccgcctaggagggtgcggcttaaaccttggcttgtcgctcaggtcaatagttgccagtacccaggccttcagtgggtgaacggcgaaaagaaattgttttgcatcccatggcgccacgccacgcgtcatggcccatctcaggacggggataatactatcttcaaagcttgggctaaagaaaccgggaaatacacagagggcgtagatgaggcggatcccgccaagtggaaggccaacctacgatgtgcattgaacaagtctcgagacttcaggctgatatatgacggtccacgagacatgcccccacagccttataagatctatgaggtttgctcaaacgggcctgctcctaccgactcccaacccccagaagattactcttttggcgcaggggaggaggaagaggaagaagaagagctgcagcgcatgctcccttcactgtccctaaccgaggacgtaaagtggccgcccactttacaaccacccaccctacaaccacccgtggttctgggaccccctgcccccgatccgagccccctcgcccctccaccagggaaccctgccggtttcagagagttactatcagaagtgttggagcctgggcccctgccagctagtctgccccctgcgggcgagcagctcttgccagatttactgatttcaccccacatgctccctctgaccgatctggagataaagttccagtatcgcggcaggcctcctcgcgccctgaccatttctaaccctcacggctgtcgtttgttttacagtcagctggaagcaacacaggaacaggtcgagctgttcggacccatttctctggagcaagtccggttccctagcccagaggacatccctagtgacaagcagaggttttacactaatcaacttctggacgtcctagataggggactgattctgcagctgcagggccaggacctctatgctataagattgtgtcaatgcaaggtcttttggagcggtccatgcgcctcagcccacgattcctgcccgaatcccatacagcgcgaggtcaagactaaactgttttcactggaacattttctaaacgagttgattctgttccagaagggccagacgaacacaccaccgccttttgagatattcttttgctttggcgaagaatggccagacagaaagccaagagagaaaaagcttatcacagtgcaggtcgtgccggtggccgcccgcctgctcttagagatgttttcaggcgagctttcctggtccgcagactctatcaggctgcagattagcaatccggatctgaaagatcggatggttgaacagttcaaggagctgcatcatatctggcagtctcagcagaggctacagccagtggcacaggctccgccgggggcagggctaggagtcggacagggcccatggcctatgcacccagctggaatgcagtag

SEQ ID NO: 15637 - DNA, 684 bp, synthetic construct
  misc_feature 1..684: note = Description of Artificial Sequence: Synthetic coding sequence
  source 1..684: mol_type = other DNA
atgaatcagagcatccctgttgctcctacaccgccccgccgggtgagactcaaaccatggctggtggcccaagtcaattcctgccagtaccccgggttgcagtgggtcaatggagaaaaaaagctgttttgcatcccctggagacatgccacccggcacggacctagccaggacggcgacaacaccatctttaaagcttgggctaaagagacaggaaaatataccgagggagtggatgaagctgaccctgccaagtggaaagccaatctccggtgtgcccttaacaagtctagagatttccgtctgatctacgatgggcctcgtgacatgccgcctcaaccctacaagatctacgaggtctgctcaaatggaccagcgccgaccgacagtcagccacccgaggattattctttcggggctggcgaagaggaagaagaggaggaagagagaatgtcttccggcagacctctgtgctctcggcccttgtgtggacggttgctatgtagccggcctctatgctctagaccctggtgctgggttcccctactccagacacctgctccatggctgctgcctttggctactctcttggcctccggatccttctcacttcgaagctggagtttgggcccctgcctgcccgcatgtcccctccaggcgaattcaagttgccaaacatgctag

SEQ ID NO: 15638 - DNA, 474 bp, synthetic construct
  misc_feature 1..474: note = Description of Artificial Sequence: Synthetic coding sequence
  source 1..474: mol_type = other DNA
atgaatcagtctattcctgtagcacccactcccccccgtagagtgcggcttaagccctggcttgtggcccaggtgaattcttgtcaatatccaggactgcaatgggtgaatggggagaagaaactattctgtataccctggaggcacgccacacgccacggcccgtctcaggatggggacaacaccatattcaaggcttgggccaaagagaccggcaagtacacagagggagtggacgaagctgaccctgctaaatggaaggccaatctcagatgcgcactgaacaaatcccgagattttcgcctcatttatgacggcccacgggatatgccaccccagccatataagatttacgaggtgtgcagcaacggaccagctccaacggattcccagcctccagaagactacagcttcggcgctggggaagaggaggaagaggaggaggaaatgcagtgttctctcgcgcccacctag

SEQ ID NO: 15639 - DNA, 321 bp, synthetic construct
  misc_feature 1..321: note = Description of Artificial Sequence: Synthetic coding sequence
  source 1..321: mol_type = other DNA
atgaatcagagcatccctgtcgctcccacccctcccagacgggtaagactcaagccctggttagtggcccaggtcaacagctgtcagtacccaggcctgcagtgggtcaacggggaaaaaaagctgttctgcattccctggcggcacgctacccgccacggcccctcacaggacggagataacacgattttcaaggcttgggctaaggagactggtaagtataccgagggagtagacgaggctgacccagccaaatggaaagccaacctgaggtgcgccctgaataagtcccgggacttccggttaatttatgatggttag

SEQ ID NO: 15640 - DNA, 180 bp, synthetic construct
  misc_feature 1..180: note = Description of Artificial Sequence: Synthetic coding sequence
  source 1..180: mol_type = other DNA
atgaaccagtctatcccggttgcccccacaccccctcgcagagtccgtttaaagccctggctggtcgctcaggtgaactcctgccagtaccctggcttgcagtgggtcaatggtgaaaaaaaactgttctgtataccatggcgacatgctacccgccatggtccttctcaagacggatag

SEQ ID NO: 15641 - DNA, 1497 bp, synthetic construct
  misc_feature 1..1497: note = Description of Artificial Sequence: Synthetic coding sequence
  source 1..1497: mol_type = other DNA
atgaatcagagcatcccggtcgcgcccacaccaccccgccgagtccgactgaagccatggttagtcgcccaggtgaatagctgtcagtatccaggcttgcaatgggtgaacggggaaaagaaattattctgcattccttggagacacgcaactcgtcatggccccagccaggacggcgataatacgatattcaaagcgtgggctaaggaaacggggaagtatacagagggagtcgacgaggcggatccagcaaaatggaaagccaatctgaggtgtgctctgaataagagtcgggactttcgccttatctacgatggaccaagggacatgccacctcagccttataaaatttatgaggtctgctctaacgggccagctcctacagacagtcagccacccgaggattatagtttcggagcgggagaggaggaagaggaggaagaagagttgcagagaatgttgccctctctcagccttacggaggacgtgaagtggcctccgacgctgcaacctcccacactgcgcccacctacgttgcagccaccaactctgcagccgcccgtggttcttggacccccagctcctgacccaagtcctctggcaccaccaccagggaaccctgccggcttcagagaattgctgtcagaggtgctggagcccggccccctgcctgcaagcctgccacccgcaggggagcagttgctgcccgatctgttgatcagcccgcatatgctccccctgactgatcttgaaatcaaatttcagtatagaggccggccaccacgcgcactgacaatcagtaacccccacggctgtcgccttttttatagtcagctcgaagccacccaggaacaggtagaacttttcgggcctatcagcctggaacaggtgagatttccatcgcctgaggacattccctctgataagcagcgattttacacgaatcagcttctggacgtgctagaccgcgggctgattctgcagctgcagggacaggacctgtatgcaatacgcttgtgtcagtgcaaggtcttctggtccgggccgtgtgctagcgcccatgactcctgtcccaaccccattcaacgtgaggtgaagacaaagcttttctcccttgagcacttcttaaatgagctaattttgtttcaaaaagggcagactaacaccccacccccttttgagatctttttttgctttggggaggaatggcccgatcggaaacccagggaaaaaaagctgataacagtgcaagtggtccccgtcgccgcccggctattactggagatgttcagtggcgaacttagctggtcagctgattctatccgcttgcagatcagcaacccagatctgaaggaccggatggtggagcagtttaaggagcttcatcacatttggcagtcccagcagaggctgcaacccgtagctcaggcacctccgggcgctggccttggagtggggcaggggccctggccgatgcatccagctggcatgcaatag

SEQ ID NO: 15642 - DNA, 426 bp, synthetic construct
  misc_feature 1..426: note = Description of Artificial Sequence: Synthetic coding sequence
  source 1..426: mol_type = other DNA
atgaaccagtcaatcccggtggctccaacaccaccaagacgcgtccggttgaaaccatggcttgtggcccaggttaactcttgccaatatcctgggctccaatgggtgaatggggagaagaaactcttctgcatcccatggcgtcatgcaacccggcacggacccagtcaggacggagacaacactatctttaaggcctgggcaaaggagaccgggaaatacactgaaggggtggatgaggctgatcctgcaaagtggaaggctaacctgaggtgcgctctaaacaagagccgggattttagactgatctatgacggacctcgcgatatgccacctcaaccgtataagatttacgaagtgtgtagtaacggccctgcaccaacagattcccaacccccagaggattattcttttggagcgggctag

SEQ ID NO: 15643 - DNA, 459 bp, synthetic construct
  misc_feature 1..459: note = Description of Artificial Sequence: Synthetic coding sequence
  source 1..459: mol_type = other DNA
atgaaccaaagcatcccagtggctcctaccccccctcgccgggtgcggcttaaaccctggttggtcgctcaggtgaatagttgccagtacccgggccttcaatgggtcaacggcgaaaaaaagcttttctgtataccatggaggcatgccacgaggcacggcccgtctcaagatggagataacacaatctttaaagcttgggccaaggagaccggcaagtacacagaaggggttgatgaagccgatcctgccaagtggaaggcaaacctccgatgcgccctgaataagtctcgggatttccgcctaatatatgacggaccacgggatatgcctccacagccatataagatctatgaagtatgtagtaacggccctgctcctacagacagccagccaccagaggactactccttcggagctggagaagaggaggaggaggaggaggaggtgagtgtgtag

SEQ ID NO: 15644 - DNA, 1239 bp, synthetic construct
  misc_feature 1..1239: note = Description of Artificial Sequence: Synthetic coding sequence
  source 1..1239: mol_type = other DNA
atgaaccagtcgattccggtggcgcctactcccccccgcagggtcaggctaaagccttggttggtcgcccaggtgaactcttgtcaataccccggattgcaatgggtgaatggggagaagaaattgttctgtatcccgtggaggcatgccactagacacggcccctcacaggacggcgacaataccatttttaaagcatgggctaaagagacgggaaaatacactgagggcgtcgatgaggctgacccggccaaatggaaggctaacctgagatgcgccttaaataagtcaagagacttcagactaatatacgacgggccaagagatatgccgcctcaaccatataaaatctatgaagtctgttcaaacggaccagctcccaccgactcacaacctcccgaggactattcctttggagctggcgaagaagaagaagaagaagaagagttgcaaagaatgcttcctagtctgagcctcactgtcactgacttagaaatcaaatttcagtaccgggggcgaccccccagggcgctgaccatctctaaccctcatggctgcaggctcttttactcccaactcgaagctacacaagagcaggtggagctgtttggtcctatctccctggagcaggtccggtttcccagccctgaggacatcccgtcagataagcaacgattctatacaaatcagctgctggacgttctggatcgcggactgatacttcagcttcaggggcaggatctgtacgcgatccgactgtgccagtgcaaagtcttctggtccgggccatgcgcctccgcacacgacagttgtccaaatcctatccaaagggaagtgaagacaaaactctttagcctggagcacttcctcaatgaactcatcttatttcagaaaggccagacaaacacaccgccccccttcgaaatattcttctgcttcggggaagaatggccagataggaagccccgggagaagaagctgattactgtgcaggtggtccccgtcgcagccagactgctgctggagatgttctctggtgaactcagctggtctgctgattccattagactgcagatcagcaacccggacctgaaagatcggatggtcgagcagtttaaggagcttcaccacatttggcagagccagcagcggctgcagcctgtggcccaagccccccccggcgccggattaggggtgggacagggcccttggcccatgcacccagcaggcatgcagtag

SEQ ID NO: 15645 - DNA, 570 bp, synthetic construct
  misc_feature 1..570: note = Description of Artificial Sequence: Synthetic coding sequence
  source 1..570: mol_type = other DNA
atggcaagcccattcgccctactgatggtcttggtagtgctgagttgcaagagctcttgttctctagggtgcgacttgcctgaaacccactccctcgataataggcgcacacttatgctgctggcacagatgtctagaattagcccttcatcatgcctgatggataggcatgatttcggcttcccacaggaagagttcgatggaaatcaattccaaaaagcacctgctatctctgtgctacatgagttgattcaacagatattcaacctattcacgactaaagacagcagtgctgcatgggatgaagacttgctggataagttctgtaccgagctctatcagcagctcaatgatctggaggcatgcgtcatgcaggaagagcgagtgggagagactcccttaatgaatgctgacagtatccttgccgtgaagaagtattttagaaggataactctgtatctgacggagaaaaagtacagtccatgtgcctgggaggtggtccgcgcggagatcatgaggagtctctccctgagtactaacctgcaagagagattaagacgaaaggaatag

SEQ ID NO: 15646 - DNA, 516 bp, synthetic construct
  misc_feature 1..516: note = Description of Artificial Sequence: Synthetic coding sequence
  source 1..516: mol_type = other DNA
atgctagttaattttatcttgcgatgcggcctcctattggttacgctgtccctcgcaatcgcgaaacacaagcaatcctctttcactaaaagctgttacccccgcgggaccctgtcccaagccgtcgacgcgctctatattaaagccgcctggttgaaagccactattcccgaagaccggattaagaatatcaggctcctgaagaaaaaaaccaaaaaacagttcatgaagaattgccagttccaggagcagctgctgtctttcttcatggaagatgtgttcgggcaattacagctgcagggatgcaaaaagatccgcttcgttgaagacttccactctttacggcaaaagttgtctcactgcatcagttgtgcatctagtgcacgggagatgaagtctatcacccggatgaagcgcatattctacaggattggcaacaagggcatttataaggcaatttctgagctcgacatcctcctgtcctggattaagaaactgcttgagtcatctcagtag

SEQ ID NO: 15647 - DNA, 543 bp, synthetic construct
  misc_feature 1..543: note = Description of Artificial Sequence: Synthetic coding sequence
  source 1..543: mol_type = other DNA
atggctcttgctgacctctacgaggagggcggcggcggggggggggaaggagaggataacgctgacagcaaggagaccatttgtagaccatcaggtaggaagagctcaaagatgcaagcattcagaatttgggatgtgaatcagaaaaccttttacctgagaaacaaccagctcgtggccgggtacctccagggccctaatgtgaaccttgaggagaaaattgatgttgtccctatcgagccccatgcattgttcctgggcattcacggcggcaagatgtgtctcagttgcgtgaagagcggagacgaaactcggctgcagctcgaagccgtcaacattacagatctcagcgagaacaggaaacaggacaagcggtttgcatttattagaagcgacagcggtccaaccaccagtttcgagtcagccgcatgtccgggctggttcctttgcacagccatggaggcagatcagccagttagtctcaccaacatgccggacgaaggggtgatggttaccaagttttacttccaggaagacgagtag

SEQ ID NO: 15648 - DNA, 480 bp, synthetic construct
  misc_feature 1..480: note = Description of Artificial Sequence: Synthetic coding sequence
  source 1..480: mol_type = other DNA
atggctctggagacaatttgcagaccgtccgggcggaagtcaagcaaaatgcaggcttttcgtatctgggacgtcaaccagaagacattctacctgcgcaacaatcaattagttgcgggttacctccaggggcctaatgtcaatttggaggagaaaattgatgtagtccctattgagccccatgcgctattcctgggaatccatggagggaagatgtgtttgtcttgcgtgaagtcaggagacgaaaccaggctccaattggaggcggtgaacatcaccgacctgagcgagaatagaaagcaggataaacgatttgccttcatacggagtgactcaggccctaccacatcctttgagagcgctgcctgccccgggtggtttctgtgcactgccatggaagccgaccagccagtctcattaaccaacatgcccgacgagggagtcatggtcacaaaattctactttcaggaggacgaatag

SEQ ID NO: 15649 - DNA, 534 bp, synthetic construct
  misc_feature 1..534: note = Description of Artificial Sequence: Synthetic coding sequence
  source 1..534: mol_type = other DNA
atggaaatctgcagaggtctcaggagccatctgattaccttgctcctgtttctcttccattcagagacaatctgcaggccatcaggcagaaagtcctccaaaatgcaggcattccggatttgggatgtcaatcagaagacgttctacctgagaaacaaccagttggtggctggatacctgcaggggcccaacgtgaatcttgaggaaaagatagatgttgtccccatcgagccccatgcactgttcctggggattcatggaggaaagatgtgtctgagctgcgttaaatctggcgacgaaactagattgcagctggaggctgtaaatataacggacctcagcgaaaaccggaaacaggataagaggtttgcttttatccggtcagattctggacccacaacgtccttcgaatccgcagcatgcccgggttggttcctgtgcaccgctatggaagctgatcaacctgtcagtctgacaaatatgcctgatgaaggcgtcatggtaacgaaattctacttccaggaagatgagtag

SEQ ID NO: 15650 - DNA, 432 bp, synthetic construct
  misc_feature 1..432: note = Description of Artificial Sequence: Synthetic coding sequence
  source 1..432: mol_type = other DNA
atgcaggctttccgcatttgggatgttaaccagaaaacattttatctcaggaataatcaacttgttgccgggtatttacagggcccaaacgtgaatctcgaagaaaagatcgatgttgtgccaatcgagccgcacgccctgtttctcgggatccatggcggcaagatgtgtctgtcgtgcgtgaaatctggtgatgaaacccgtctccagctggaggcggtcaacatcacagacctgtcagagaatagaaaacaggacaaacggttcgcctttatcagatcggacagtggccccaccacttccttcgaaagcgctgcctgccctggatggttcttatgtactgccatggaagccgatcagcctgtgtccttaactaacatgcccgacgaaggagtgatggttacaaaattttacttccaggaagatgaatag

SEQ ID NO: 15651 - DNA, 1470 bp, synthetic construct
  misc_feature 1..1470: note = Description of Artificial Sequence: Synthetic coding sequence
  source 1..1470: mol_type = other DNA
atggaaccaggcctcgaacacgccctgcgtcgaacaccgtcttggtctagcctcggtggcagcgagcaccaggaaatgtcatttctggagcaggaaaattcatcttcctggcccagcccagctgtgacttcaagctccgagaggattcgcggaaagcgcagagcaaaggccctgagatggacaaggcagaaaagtgtggaggaaggggaacccccagggcaaggcgagggtcctcggagcaggccggccgctgaatcaacagggttagaggcgacgttccctaagaccactcccctggcccaagccgacccagctggagtaggcactcctcccaccggctgggactgccttccatcggactgcacagcgagcgcagctggttcttctaccgatgacgttgaattggctacggaattcccggcaacggaagcctgggagtgtgagttggaggggctgctagaagaacgccctgcactctgcttgagtcctcaggccccattcccaaagctgggctgggacgacgagctgagaaagccaggagcccagatctatatgagatttatgcaagaacatacttgctatgatgccatggcaacatcctcaaaactggtcattttcgacactatgcttgaaatcaaaaaggccttctttgccctcgtagccaatggcgtccgagccgccccactgtgggatagcaagaagcaaagtttcgtgggcatgctgactattacggattttatattggtgctgcacagatactatagatctcccctggttcagatttatgagatcgaacagcacaagatcgagacctggagggagatttacctgcaaggttgttttaagcctcttgtgtccatcagccctaatgatagtctgttcgaagcagtttacactttaatcaaaaacagaatccaccgactgccagtcctggacccagtgtcaggcaatgtgctgcacattctcacccacaagcgcttgctaaagttccttcacatcttcgggtcgttactgccccgaccttcctttctgtatcgcacaatccaggacttgggtatcggtactttcagagacctggccgtcgtgctggagacagcccccattctaaccgcacttgatatttttgtggaccgtagagtgtcagccttgccagtagtgaacgaatgcggccaggtggtggggctgtattcccggtttgatgtgattcatttggctgcgcagcagacctataaccacctggacatgtccgtaggagaggcactgagacagcgaacactgtgtctcgagggggtgttatcttgtcagccccatgagagtctgggtgaggtcatcgaccggattgcgcgcgagcaggtacaccggctcgtgctggtggacgaaacacagcacctactgggagtcgtctctctcagcgacattctgcaagccctggtcctcagtcctgcaggaatcgacgctctgggggcctag

SEQ ID NO: 15652 - DNA, 1710 bp, synthetic construct
  misc_feature 1..1710: note = Description of Artificial Sequence: Synthetic coding sequence
  source 1..1710: mol_type = other DNA
atgaaagtgctgctgcgcctgatatgcttcatagcattgctgattagctcattggaagccgacaaatgcaaggaacgggaagaaaaaattattctcgttagcagtgccaatgaaatcgatgtgcgtccttgcccactcaatcccaacgaacacaaaggaacaattacttggtacaaagacgattctaaaacccccgtctctactgagcaggcgagcagaattcaccagcacaaagagaagctctggttcgtgcccgccaaggtggaagattcaggccactattactgcgtggtgcgcaactcgagctactgccttcggataaagatttcagccaagtttgtggagaatgagcctaacctctgttacaacgcccaggccattttcaaacaaaaactccctgtggcgggggacggagggctggtgtgcccctatatggaatttttcaagaatgagaacaacgagcttccaaaactccagtggtacaaggactgtaaaccgctgttactggacaacatccatttttctggagtgaaagatcgactgattgtcatgaacgtcgccgaaaagcacaggggcaactacacttgccacgcatcttatacctatttgggcaagcagtacccaattacccgagtgatcgaatttatcacgctggaggaaaataaaccaacaagacccgtgattgtgagtcccgctaacgaaactatggaagtcgacctgggatcacagatccaattgatttgcaacgtgacaggccagttatcagacatcgcttattggaagtggaatggctccgtcatcgatgaagatgatccagttctgggcgaagattactatagcgtggaaaaccccgctaataaacgtaggtctacactcattactgttctgaatatatcagagatcgaatccagattctacaagcatccttttacttgcttcgccaagaatacacacggaattgatgctgcctatatacaactaatctaccccgtcacgaatttccagaaacacatgatcggaatctgcgtgactcttacggtaattatcgtgtgcagcgtctttatttataagatatttaaaatcgacattgttctgtggtaccgtgacagctgctatgacttcctccctattaaggcctcagatgggaagacttacgatgcctacatcctgtatccaaaaacagtgggggagggatccactagtgactgtgatatctttgtatttaaggtcctgcctgaagtgctggaaaaacagtgcgggtacaagctttttatctacggccgggatgactacgtgggcgaagatatcgtcgaggtcatcaatgagaatgtgaagaagtccaggagactaataatcattcttgtccgggagacaagcggattttcatggctggggggcagctctgaagaacagatcgccatgtacaacgctcttgtgcaggatgggatcaaggttgtacttctcgaactggagaagatccaagactatgaaaaaatgcctgagagtatcaaatttatcaagcaaaaacatggtgcaatcagatggagtggagatttcacccaaggtccccagtccgccaagacccggttttggaagaacgtgcggtatcacatgcccgtccagcggcgctccccgtcgtccaagcaccagctcctctcgccagccaccaaggaaaagcttcaacgcgaagcccatgtcccactggggtag

SEQ ID NO: 15653 - DNA, 549 bp, synthetic construct
  misc_feature 1..549: note = Description of Artificial Sequence: Synthetic coding sequence
  source 1..549: mol_type = other DNA
atgaaagtcctgctcagattgatctgcttcatcgcactgctgattagttcactcgaggcggacaagtgcaaggagagagaggaaaagattatcttagtatcctcagccaacgagatagacgtccgcccttgtccattaaaccccaatgagcataaggggacgatcacgtggtacaaagatgattctaaaactccagtgtccacagagcaggcctcccgaatccatcagcacaaagagaagctctggtttgtccctgcaaaggttgaggatagcggtcattactactgtgtggtgcgaaattccagctattgtcttagaataaagatatcagcaaagtttgttgaaaacgagcctaacctttgttacaatgcacaggctattttcaaacaaaaactccctgttgccggagatgggggtttagtttgcccctacatggagttttttaagaatgagaacaacgagttgcctaagctgcagtggtataaagattgtaaacctctgttattagacaacatccactttagtggggtcaaagatcgcttgatatag

SEQ ID NO: 15654 - DNA, 345 bp, synthetic construct
  misc_feature 1..345: note = Description of Artificial Sequence: Synthetic coding sequence
  source 1..345: mol_type = other DNA
atgaaggtgctcctaagattgatctgcttcattgccctgttaatctctagtctggaggctgacaaatgcaaagagagagaagagaagatcatcttagtgtccagcgcaaatgagatcgacgtgagaccttgccccctcaaccccaacgaacacaaaggtacgataacatggtataaagatgattccaaaacccctgtctccaccgagcaggcttcacggatccaccaacacaaggagaagctgtggttcgttccggctaaggtcgaggattcggggcactattattgtgtggtccgcaactccagctactgtttgaggatcaaaatctccgcaaagtttgtatag

SEQ ID NO: 15655 - DNA, 321 bp, synthetic construct
  misc_feature 1..321: note = Description of Artificial Sequence: Synthetic coding sequence
  source 1..321: mol_type = other DNA
atgaaggtcctcctgcgactgatttgtttcattgcacttctgatttcatctctggaggctgataaatgtaaagaacgagaggagaaaattattttggtctcatccgccaatgagatcgatgtacgcccatgtcccctgaatcccaatgagcacaaaggcaccataacctggtacaaagatgactcaaaaactcccgtcagtaccgaacaagcctcccgtatacaccagcacaaggaaaagctgtggttcgtcccagccaaagtggaagacagtggtcattattactgcgttgttcgcaactcttcctactgcttgcggtag

SEQ ID NO: 15656 - DNA, 243 bp, synthetic construct
  misc_feature 1..243: note = Description of Artificial Sequence: Synthetic coding sequence
  source 1..243: mol_type = other DNA
atgaaagtactcctgcggcttatctgctttatagctctgttaatttcttccctcgaagccgacaagtgcaaagaacgcgaggaaaagattattttagtgtcttcagccaacgagatcgatgttcgcccatgtcccctgaaccccaacgaacacaaaggtactatcacatggtacaaagacgattcaaagacccccgtgtctactgaacaggcctctaggattcatcaacacaaagagaagtag

SEQ ID NO: 15657 - DNA, 810 bp, synthetic construct
  misc_feature 1..810: note = Description of Artificial Sequence: Synthetic coding sequence
  source 1..810: mol_type = other DNA
atggctgaagtgcctgaattagcaagtgagatgatggcgtactacagcggaaacgaggatgatctcttttttgaggcagacggacccaagcaaatgaaatgtagtttccaggatctcgatttgtgtccactcgacgggggtatccagctgcgcatctcagatcaccattacagtaaggggtttagacaagcagcgtcagtggttgtggcaatggataaactgcggaagatgctagtcccttgccctcagacgtttcaggagaatgacctgtccacattcttcccattcattttcgaagaggaaccaattttttttgacacttgggataacgaagcctatgtgcatgatgctcccgtgcgcagtctcaattgtacactgcgggattcacagcagaaatctctggttatgtctgggccctacgaactgaaggccctgcacctgcagggccaggacatggagcagcaggtggttttctccatgtcctttgtacagggtgaggagagcaacgataagattcccgtggcactggggttaaaggagaagaacctctacctctcttgcgtgttgaaggatgataaaccaacattgcagctggagagcgtggatccgaaaaactatcccaagaagaaaatggagaaacgcttcgtgtttaacaaaatagagatcaataataagctggaatttgagagcgcacaattcccaaattggtacatctccacctctcaggcggagaacatgccagtatttctcgggggtaccaaaggagggcaagacatcacagactttaccatgcagtttgtgtctagctag

SEQ ID NO: 15658 - DNA, 336 bp, synthetic construct
  misc_feature 1..336: note = Description of Artificial Sequence: Synthetic coding sequence
  source 1..336: mol_type = other DNA
atggcggaggtcccagaactagcttccgaaatgatggcatactattcagggaacgaggatgacctgttcttcgaggctgacgggcccaagcagatgaaatgcagctttcaagatctggatttatgccccctggatggcgggattcagctgcgcatctccgaccaccattactctaaggggtttagacaggccgccagtgtagttgtggctatggacaagctgcgtaaaatgctcgtaccttgtcctcagacgtttcaggaaaatgaccttagtaccttttttccctttatcttcgaggaggagcctatcttcttcgacacatgggataacgagtag

SEQ ID NO: 15659 - DNA, 432 bp, synthetic construct
  misc_feature 1..432: note = Description of Artificial Sequence: Synthetic coding sequence
  source 1..432: mol_type = other DNA
atggctgaggtgcccgagttggcttctgagatgatggcctactacagcggcaatgaagacgacctgtttttcgaagccgatggccccaagcagatgaaatgctcattccaagatctggacttgtgtccactggatggagggattcagctgcgaatcagtgaccatcattactctaaggggtttcggcaggccgcctccgtcgtcgtcgcaatggacaaattacgaaaaatgcttgttccatgcccacagacattccaggaaaacgacctgagcaccttcttcccattcatattcgaggaagagcccatcttcttcgatacctgggacaacgaagcatatgtgcatgatgcccctgtaagatccctgaattgcacacttagagattcacagcagaaatcactggtgatgtccgggccctatgaattaaagtag

SEQ ID NO: 15660 - DNA, 378 bp, synthetic construct
  misc_feature 1..378: note = Description of Artificial Sequence: Synthetic coding sequence
  source 1..378: mol_type = other DNA
atggccgaagtgcctgagcttgcatcagaaatgatggcctattacagcggcaatgaggatgatttgttctttgaggccgacggacctaaacagatgaagtgcagcttccaggacttagatttgtgccccttggacggggggattcaattgaggatttctgatcaccactattcaaagggttttagacaggccgccagtgtagtggtggccatggacaaactacggaagatgctggtgccctgcccacagacatttcaggaaaacgacctgagcactttttttccattcattttcgaggaagaacccatctttttcgacacatgggacaatgaagcctacgtccacgacgcccctgttaggagcctgaattgcacctag

SEQ ID NO: 15661 - DNA, 762 bp, synthetic construct
  misc_feature 1..762: note = Description of Artificial Sequence: Synthetic coding sequence
  source 1..762: mol_type = other DNA
atgtggcccccaggcagcgccagccagccccccccctcccctgccgccgcgactggtcttcaccctgctgcccgtccagtcagtctgcagtgtaggctttcaatgtgccccgctcgcagcctcctgttggtggctaccctggtgctgctagaccatctgtccctggcccggaacctgcccgttgctacaccagaccccgggatgttcccctgcctgcaccattcccaaaacctgctgcgcgcggtcagcaacatgctccagaaggctcggcagactctcgaattctacccgtgtaccagtgaggagattgaccacgaggacataactaaagacaagacttccaccgttgaggcctgcctccccttagaactgactaaaaacgagtcatgtctcaattccagagaaacttcatttataacgaacggctcatgtctggccagcagaaagacaagctttatgatggccttgtgtctttcctctatttatgaggatctgaagatgtaccaagtggagttcaagacaatgaacgccaagttgcttatggatcctaagagacaaatcttcctcgatcagaacatgctggctgttatcgacgagctgatgcaggcactaaattttaattccgagacggtgccccagaaatcgtccctggaggagccagatttttacaagaccaagattaaactctgtatactgctacacgcatttcgaattagagccgtgactattgatagagttatgagctacctgaacgcttcctag

SEQ ID NO: 15662 - DNA, 720 bp, synthetic construct
  misc_feature 1..720: note = Description of Artificial Sequence: Synthetic coding sequence
  source 1..720: mol_type = other DNA
atgtggcctccaggatcagcaagtcaaccgccccctagccctgccgccgcgaccggcttgcaccccgcggcaagacctgttagtctccagtgcaggctgagtatgtgtccggcccggtccttgcttctagttgctacactggtgttgttggatcacctcagcttagcacgcaatctaccagtggctacaccagaccccggtatgttcccgtgcctgcatcattcacaaaacctcctgagggccgtgagcaacatgctgcaaaaggcacgccagacactggaattctacccctgcacttcagaggaaatcgaccacgaggatattaccaaggacaagacgtccaccgtcgaggcctgcctgccccttgaactaactaagaatggcagctgcctggccagtcgcaagacatctttcatgatggccttatgtctctcctccatatatgaggatcttaagatgtaccaggtggaattcaaaacaatgaacgctaaattattgatggaccctaaacggcagatctttttagatcagaatatgcttgccgtgatcgacgagctgatgcaggcattaaactttaacagcgagacagtgccccagaagagttccctggaggaacctgacttctataagacaaaaatcaagttgtgtatactgctgcacgcctttcgtatacgagctgttaccatcgaccgggtgatgagctacttaaacgcatcctag

SEQ ID NO: 15663 - DNA, 648 bp, synthetic construct
  misc_feature 1..648: note = Description of Artificial Sequence: Synthetic coding sequence
  source 1..648: mol_type = other DNA
atgtggcctccagggtcagcctcgcaaccgcctccctctcccgccgccgccacaggccttcaccccgccgccaggcccgtgagtttacagtgcagactgtcaatgtgccccgctcggtcactgctcctggtggctaccctggtactcttggaccatttgagtcttgctcgcaacctcccggtggctactcccgaccctggcatgttcccatgcttacatcactcccagaacttactgcgggctgtatcaaacatgctgcagaaaaacgagtcttgtctgaacagtcgcgaaacttctttcataaccaacggcagctgtcttgcatcacgcaagacgtccttcatgatggccctgtgcctgagttccatatacgaagatcttaagatgtatcaagtggagtttaaaactatgaatgccaaactgcttatggacccaaagcgccaaattttcctcgatcagaatatgttagcagtaatagacgaacttatgcaggcgctgaacttcaattctgagactgtgccacagaagtcctccctggaggaaccagacttttacaagacgaagattaagctctgtatacttctgcatgcattcagaattagagccgtgacaatagatagggttatgtcctacctaaacgcatcctag

SEQ ID NO: 15664 - DNA, 489 bp, synthetic construct
  misc_feature 1..489: note = Description of Artificial Sequence: Synthetic coding sequence
  source 1..489: mol_type = other DNA
atgcgcatctctaagccacatttgaggtcaattagcatccagtgttatctgtgcctgttgctaaacagccacttcctgaccgaggccgggatccacgtgttcattctcgggtgtttttccgctgggctgccaaagacagaggccaattgggtgaacgtgatctccgatctaaagaagatcgaagatctcatccagtccatgcatatcgatgcaaccctgtacaccgaatccgatgtacaccctagctgcaaagtgaccgcaatgaaatgctttttattggagctgcaggttatctcactggagtcaggggatgcatccatccacgacacagtggagaacctgatcattctggccaacaattcactctcatcgaatgggaacgtgacggaatcgggttgcaaggagtgtgaagagctcgaagaaaaaaacatcaaagagttcttgcagtctttcgtacacattgtgcagatgttcatcaacaccagctag

SEQ ID NO: 15665 - DNA, 489 bp, synthetic construct
  misc_feature 1..489: note = Description of Artificial Sequence: Synthetic coding sequence
  source 1..489: mol_type = other DNA
atgcggatatctaaacctcatctgcgaagcattagcatacagtgctatctgtgcctgctgctgaatagccatttcctgactgaagccggaatccacgtgtttattttgggatgttttagcgcaggattgcccaagaccgaggccaattgggtgaacgtcatctccgatctcaagaagatcgaggacctgatccagtctatgcatattgacgctactctctataccgaatccgatgtgcacccttcttgcaaagttacagctatgaagtgttttttattggagctgcaggtgatctctctcgaatcaggtgacgccagcatacacgacacagtcgagaacctaatcatcctggccaacaactctttgagttccaacggaaatgtgacagagagcggttgcaaagaatgtgaagaacttgaggagaagaatatcaaagagtttcttcaaagcttcgttcatatcgtgcaaatgttcataaatacatcctag

SEQ ID NO: 15666 - DNA, 408 bp, synthetic construct
  misc_feature 1..408: note = Description of Artificial Sequence: Synthetic coding sequence
  source 1..408: mol_type = other DNA
atggtgttaggaactatcgatctgtgctcatgtttttccgccggacttcccaagaccgaagcgaactgggtcaacgtcatatcagacctgaagaagattgaagatttgatccagagcatgcacattgatgcgaccctttacaccgagtcggacgtacaccccagctgcaaggtaaccgctatgaagtgctttctcctggagctccaagtgatcagtctggaatccggggatgcaagcattcacgataccgtggaaaatcttataattttagccaacaatagcctgtcatctaacggcaacgtgactgaaagcggctgcaaggagtgcgaggaactggaggagaaaaatattaaggaattcctgcaaagctttgtgcacatcgtgcagatgtttatcaacacaagttag

SEQ ID NO: 15667 - DNA, 408 bp, synthetic construct
  misc_feature 1..408: note = Description of Artificial Sequence: Synthetic coding sequence
  source 1..408: mol_type = other DNA
atggtattgggaaccatagacttgtgttcttgctttagcgccgggctccccaagaccgaggcaaattgggtgaatgtgatatctgacctgaaaaagatcgaggacctgattcagagtatgcacattgatgctactctgtatactgaatccgatgtgcacccaagctgcaaagtgaccgctatgaagtgtttcctgttagaactgcaagttatctcgctggaaagcggggatgcctctattcacgatacagtcgaaaacctgatcatactggctaataatagtctgtcaagcaacggtaatgtgactgaaagcggctgtaaagaatgcgaagagctcgaagaaaaaaacatcaaggaatttttgcagtcctttgtgcacatagtgcaaatgtttatcaatacttcatag

SEQ ID NO: 15668 - DNA, 408 bp, synthetic construct
  misc_feature 1..408: note = Description of Artificial Sequence: Synthetic coding sequence
  source 1..408: mol_type = other DNA
atggtcctcgggacgatcgatttatgctcctgctttagcgccggcctccccaaaactgaggcaaactgggtgaatgttatctcagacttaaagaaaattgaagacctgatacagtccatgcacatcgacgcaactctctacactgaaagcgatgtacatccctcctgtaaagtgaccgctatgaagtgttttttgttggaattacaggtcatttccctagagagcggagacgccagcattcacgatactgtggaaaacctcatcattctggcaaacaactctctctcgagcaacggtaacgtcacagaatcgggatgtaaggagtgcgaggagttggaggagaaaaatataaaagaattcctccaaagctttgttcacatagtccagatgttcatcaacacgtcctag

SEQ ID NO: 15669 - DNA, 489 bp, synthetic construct
  misc_feature 1..489: note = Description of Artificial Sequence: Synthetic coding sequence
  source 1..489: mol_type = other DNA
atgcggatttccaaaccccacctgagaagcatctcgatccaatgctatttatgcctcctcctgaacagccactttctgacggaggcaggcatccacgtcttcattctgggttgtttcagcgccggactgccgaaaactgaggccaactgggtcaacgttatatctgatctcaagaagatagaggatttgatccagagcatgcatattgacgccacactctacacagagagcgatgtccatcccagctgcaaggtcacagctatgaaatgttttctactggaactgcaggttattagtctcgaatcaggggatgcaagcattcacgacaccgttgagaacttaattatacttgctaacaactctctctcaagcaatggcaacgtcactgagagcggctgcaaggaatgcgaagaattagaagagaagaacatcaaagaattcctgcaatcgtttgtccacattgtacagatgttcattaacacaagctag

SEQ ID NO: 15670 - DNA, 582 bp, synthetic construct
  misc_feature 1..582: note = Description of Artificial Sequence: Synthetic coding sequence
  source 1..582: mol_type = other DNA
atggctgcagaacccgtagaggataactgcataaacttcgtagctatgaagttcattgacaatactctctattttatcgctgaagacgatgaaaatctcgagtccgattattttggaaaactagagagtaagctgtccgtgatccgcaatctaaacgaccaggtcttgttcatagaccagggcaaccggccactgtttgaggatatgaccgacagcgattgtagagacaatgctcctcggaccatttttataatctcaatgtataaagactcacaaccccggggaatggcagtgaccattagtgtcaagtgcgagaagatcagcaccttgagctgtgaaaacaagatcatttcttttaaggagatgaatccacccgataatatcaaggataccaaatctgacatcatttttttccagcgatctgtacctgggcacgacaataagatgcagttcgaaagttcatcatatgagggttacttcctagcatgcgaaaaagaaagggacttgttcaagctgattctaaagaaagaggatgagctgggtgacagaagcatcatgtttactgtgcagaatgaggactag

SEQ ID NO: 15671 - DNA, 570 bp, synthetic construct
  misc_feature 1..570: note = Description of Artificial Sequence: Synthetic coding sequence
  source 1..570: mol_type = other DNA
atggctgccgaacctgtcgaggataattgcatcaattttgtcgcaatgaaatttattgacaatacgctgtactttattgaaaatcttgagtctgactacttcggtaagctggagagcaaactttcagtgattcggaatctcaacgaccaggttttgtttatagatcagggtaaccgccctctcttcgaagacatgacagactccgactgtagggacaatgcacctcggaccatcttcatcatctccatgtacaaagactctcagccccgaggcatggccgtaactattagcgtcaagtgcgagaaaatctctaccctgtcctgtgaaaacaagattatctcatttaaggaaatgaatccacccgataacatcaaggatacaaagagtgacatcatcttcttccagaggagcgttcccgggcacgacaacaaaatgcagtttgagagctcttcctacgaaggttatttcctggcctgtgaaaaagagcgcgacctcttcaaacttatcttaaaaaaggaagatgagctgggcgatagatcgattatgttcacagttcagaacgaggactag

SEQ ID NO: 15672 - DNA, 582 bp, synthetic construct
  misc_feature 1..582: note = Description of Artificial Sequence: Synthetic coding sequence
  source 1..582: mol_type = other DNA
atggctgccgagcctgtcgaagacaattgcataaatttcgtagccatgaaatttatcgataacacgctatatttcatcgcggaggatgacgaaaatctggagtcagactacttcggtaaactcgagtcaaagctcagcgtgatccggaatctgaatgatcaagtgctgttcatcgatcaaggaaatcggccactgttcgaggacatgacggactcagattgtcgcgacaatgccccacgaactatctttattatctccatgtataaggactctcagccaaggggcatggcagtgactatatccgtcaagtgtgaaaagatctccacattatcttgcgagaacaaaataatcagcttcaaagagatgaatccccctgataatatcaaggacaccaagagtgatatcatatttttccagaggtcggtgcctggacatgacaataagatgcagttcgagtctagtagctatgaaggatatttcctcgcgtgcgagaaggagcgggatctttttaagctaatcctgaaaaaggaagatgagctgggtgatcggagtattatgtttaccgtccagaatgaagattag

SEQ ID NO: 15673 - DNA, 1782 bp, synthetic construct
  misc_feature 1..1782: note = Description of Artificial Sequence: Synthetic coding sequence
  source 1..1782: mol_type = other DNA
atggaaaccccacccctgcctccagcctgcacaaagcaaggacaccaaaaacccctagactctaaagacgacaataccgagaaacattgccctgtgacagtcaacccttggcatatgaaaaaggctttcaaggtgatgaatgagctgcgttctcaaaacctgttgtgcgacgtgacgattgtggccgaggacatggaaatttccgcccacagggtagtgttagctgcttgcagtccttacttccatgctatgttcactggggaaatgtctgagagcagggccaaacgtgtcaggattaaagaagttgatggctggacgttgagaatgctaatcgattacgtgtataccgccgagatacaagtgacagaggaaaacgtgcaggttctgctgcctgccgcaggactgctccaactccaggatgtaaaaaagacatgctgcgagtttcttgaatcccaattacatcccgtgaactgcctcggaattcgggccttcgccgacatgcacgcttgcaccgatctcctaaataaggccaacacctacgcagagcaacattttgcagacgttgttctgtcagaagaattccttaacctgggcatagaacaggtctgttctttaattagctcagataaactcacaatatccagcgaggagaaggtattcgaagccgtgatcgcatgggtgaatcacgacaaggacgtacggcaagagttcatggcaaggctaatggagcacgtccggctgcctctcttacccagggaatacttagtgcagagggtggaggaggaggccctggtgaaaaatagttccgcatgtaaagattatcttattgaagccatgaagtaccacttactccccaccgagcagcggattctgatgaagtccgtgaggactcggcttcgcacacctatgaacctgcctaagctaatggtggtggtcggcggacaggccccaaaagccataagatcagtggaatgttatgatttcaaggaagaacgctggcaccaggtagctgaactaccttccaggcgatgtcgggctggcatggtgtatatggccggcttggtttttgctgtcggcggtttcaacgggtcattgcgagtacgaaccgtcgacagttatgatccagtaaaggaccagtggaccagcgttgccaacatgcgggatcgacggtctaccctgggcgccgccgtgcttaacggactgctatatgcagtgggtggattcgacggcagcacaggactgagctcagtggaagcttacaatatcaagtcaaacgaatggttccacgtggctcctatgaacacccgaagatccagcgtaggcgtgggggtggtggggggactgttatacgctgtgggcgggtatgatggcgcttcaaggcagtgtctgagcacagtggaatgctataatgcaaccacaaacgagtggacatatatagcagaaatgtctacacgaagaagcggagccggcgtgggcgtactaaataatttgctgtatgctgttggcgggcatgatggtcctctggtgcgcaagagcgtggaagtgtacgatcctacaaccaacgcctggcgccaggtggccgacatgaacatgtgccgtcgaaatgcgggagtgtgtgcagtcaacggtctgttatatgtggttggaggagacgatggttcatgcaatctcgcaagcgtagagtattacaatcctaccactgataaatggacagtggtgagtagctgtatgtctacgggcagatcttatgccggcgtgaccgtcatcgataagcctctgtag

SEQ ID NO: 15674 - DNA, 1131 bp, synthetic construct
  misc_feature 1..1131: note = Description of Artificial Sequence: Synthetic coding sequence
  source 1..1131: mol_type = other DNA
atgaaagagaatgtcgcctctgccacagtcttcacactgctcctcttcctgaacacttgtcttcttaatggacagttgcctccaggaaagcctgagatatttaaatgccgttctccgaacaaggaaaccttcacatgttggtggagaccgggcacggacggcgggctgccaaccaactactcgctaacctatcatagggagggggaaaccttaatgcacgaatgcccagattatatcacaggcggtcctaactcctgccacttcgggaaacagtatactagcatgtggcgcacatatataatgatggtcaacgctacaaatcaaatgggtagttcttttagcgacgagctctatgtggatgttacgtatatcgtgcaacctgaccctccattagaactggccgtagaggtgaaacagccggaagatcgcaagccctacctgtggattaagtggtcccctccaacactgattgacctgaaaactggctggtttacacttctctatgaaatccggctcaaaccagagaaagctgctgaatgggaaattcattttgcagggcagcagacagagtttaaaatcctgtcgttgcaccccggacagaaatacttagtgcaagtacggtgcaaacctgaccacgggtattggtctgcctggtctcccgctacattcattcagatcccttcagattttaccatgaacgatacaactgtctggatttcagtagcagtgttgagcgcagtcatctgcttgattatcgtttgggcagtggccctgaaagggtactcaatggtcacatgcattttcccacctgtgcctgggcccaagatcaaaggatttgatgcccatctcctcgaaaaggggaaatcagaggaactgctttcagcactaggttgtcaggattttcccccaactagtgactacgaagatctgttggtggagtatctcgaagtagacgactccgaggaccaacacctcatgagcgtgcacagtaaagagcatccttcgcagggggatcccctaatgctgggagctagtcactacaagaacctcaagtcttatcgcccaaggaaaattagctcacagggcaggctagctgttttcacaaaggccacgctcactaccgttcagtag

SEQ ID NO: 15675 - DNA, 414 bp, synthetic construct
  misc_feature 1..414: note = Description of Artificial Sequence: Synthetic coding sequence
  source 1..414: mol_type = other DNA
atggggctgacctcccagttgctaccccctttgttctttctactagcttgtgccggaaacttcgtccacggtcacaaatgtgacatcacactgcaagagattatcaagaccttgaattccctgactgagcaaaagaacaccacagagaaggagaccttttgtagagcggccaccgttctgcgtcagttttactcgcaccacgagaaggacacacgctgcttgggcgcaactgcgcagcagttccaccggcacaaacagcttatccggttccttaagcggctcgaccgaaacctgtggggattagcaggcctgaattcctgtcccgttaaggaagccaaccaaagcaccctggaaaacttcctcgaaaggctgaagacgattatgcgagagaaatattccaagtgttcttcatag

SEQ ID NO: 15676 - DNA, 639 bp, synthetic construct
  misc_feature 1..639: note = Description of Artificial Sequence: Synthetic coding sequence
  source 1..639: mol_type = other DNA
atgaactccttctcaacctccgcatttggtcctgtggcctttagcctaggcttgctgcttgtccttccagcagcctttccagcaccggtcccccccggcgaagactccaaggacgtcgccgctccgcataggcagccactgacgtcttcggagcggatcgacaagcagatccggtacatcctggatgggatcagtgccctcaggaaagagacttgcaataagtctaacatgtgcgagtcctccaaagaggcactggcagagaacaaccttaacctgcccaagatggcagagaaagacggctgtttccagagcggctttaacgaagagacatgcctggtcaagattatcactggcttgctggagttcgaagtttaccttgagtacctgcagaatcgcttcgaaagttccgaggaacaagcacgggctgtacagatgtctaccaaggtactgatccagtttctgcagaagaaagcaaagaatctggatgccatcacaacacctgatcccacgactaacgcctcattgctcaccaagcttcaagctcagaatcaatggctgcaagacatgaccacacatttaattctcagatccttcaaagaatttctgcagtcctcccttagggctctgagacagatgtag

SEQ ID NO: 15677 - DNA, 369 bp, synthetic construct
  misc_feature 1..369: note = Description of Artificial Sequence: Synthetic coding sequence
  source 1..369: mol_type = other DNA
atgtgcgaaagcagtaaggaggcgctcgccgaaaacaatctgaatttgccgaagatggctgagaaagacgggtgttttcagtctggttttaatgaagaaacttgtcttgtaaaaattattactggtctgctggagttcgaagtgtaccttgagtatctccagaacagatttgaaagttctgaggagcaagccagggctgttcagatgtctaccaaggtcttgatccagtttctgcagaagaaggtaggcgtcagtagcttcccccagctgggcgtgggcgaggaccgactaaaggattccgtgttagataacagcggcatgcagtgccacttccagaagaggcggttacatgtcaataagcgcgtatag

SEQ ID NO: 15678 - DNA, 639 bp, synthetic construct
  misc_feature 1..639: note = Description of Artificial Sequence: Synthetic coding sequence
  source 1..639: mol_type = other DNA
atgaattcttttagtacctcagcctttgggccggtggccttcagtctgggccttctcctcgtgctgcccgctgctttccccgctcctgtgccgccaggcgaggattctaaagatgtggcagcccctcatcggcaacctttaacaagttctgaaagaattgacaagcagatccggtacatactggatgggatttccgcgctccggaaagaaacttgtaataagtccaacatgtgcgaaagctccaaagaggcactggcggaaaataaccttaatctcccaaaaatggccgaaaaggacggctgttttcagagtggtttcaatgaggaaacctgcctggtgaaaatcatcaccgggctgctggaattcgaggtgtatctagagtatctgcagaacaggtttgagagcagtgaggagcaggctcgtgcagtccagatgtccaccaaagtgctgatacagtttttgcagaaaaaggccaagaatcttgacgccatcacgacccccgatccaaccactaacgcctcactcttgactaagctgcaggcccaaaatcaatggctgcaggatatgacgactcatctgatacttcgctccttcaaagaattcctgcaatcatccctgcgtgctctcagacagatgtag

SEQ ID NO: 15679 - DNA, 597 bp, synthetic construct
  misc_feature 1..597: note = Description of Artificial Sequence: Synthetic coding sequence
  source 1..597: mol_type = other DNA
atgaacagtttcagtacatccgcatttggacccgtggccttctccctaggacttttgctagtactccccgctgcctttcctgctcccgtgccaccgggcgaggactcaaaggatgtggccgcccctcaccggcaaccccttacaagcagcgagcggatcgacaaacagattcggtacattctcgatggaatcagcgccttgaggaaggaaacttgtaataaatcaaatatgtgcgaatcatcgaaagaagcgctcgccgaaaataatctcaaccttcctaagatggccgagaaggatggttgctttcagagcggattcaatgaagaaacgtgcctcgtgaagataattacaggactgcttgaatttgaagtatatctggagtacctgcagaacagattcgagagctcggaagagcaggcccgagccgtccagatgagcactaaggtcctcatacaattcctccagaagaaggtgggcgtgagctcctttcctcagctgggagtcggagaagacaggcttaaggactcggtgctggacaattcaggaatgcagtgccacttccagaaacgtcgcctccatgtcaacaaacgcgtgtag

SEQ ID NO: 15680 - DNA, 759 bp, synthetic construct
  misc_feature 1..759: note = Description of Artificial Sequence: Synthetic coding sequence
  source 1..759: mol_type = other DNA
atgaattccttttccacctcaaagtgtcggaaaagtctggctctcgagttgccagccgccgtggagccttgcgtacgggaagggtgcgtcgcgcaggggggtctggcagggggccagcagcaacgtcaggccccttcctgtgctgtaagctccccattacgatccctgcccagtggaactggggcctttgggccggttgcgttttcactgggactgttgctggtgttacccgcagcttttcccgcgcctgtgcctccaggcgaggattccaaggatgttgcagcccctcatcgtcagcctttaacctcctctgaacgaatcgacaagcagataaggtatatccttgatggcatctcagccctgaggaaggagacctgtaacaagtccaacatgtgtgaatccagcaaagaggctttagccgagaacaacctgaatcttccaaagatggccgagaaagacgggtgtttccagtctggcttcaacgaagaaacttgtctggtgaagatcattaccggacttctggaattcgaggtttatttggaatatctacaaaaccgttttgaatcttctgaagaacaggccagggctgtgcaaatgtcaacaaaagtactgatccaattcttgcaaaagaaagttggtgtgtcttccttccctcagctcggcgtcggggaggaccgcctgaaagattctgtgctggacaacagtggaatgcagtgccatttccagaaacggcgtttgcacgtgaacaaacgggtttag

SEQ ID NO: 15681 - DNA, 459 bp, synthetic construct
  misc_feature 1..459: note = Description of Artificial Sequence: Synthetic coding sequence
  source 1..459: mol_type = other DNA
atgaatagcttctcaacgtccgcatttgggcctgtcgcattcagtctgggcctgttgttggtcctgccagccgcgttccccgccccggtccccccaggggaagactccaaggacgtggcagctccacacaggcagccgcttacctctagcgagcggattgacaagcagataaggtatatcctcgacgggatttcagccttacggaaggaaacctgtaacaagtcaaatatgtgtgagtcatccaaagaggccctcgctgaaaacaacctgaatctcccaaaaatggctgaaaaggacgggtgcttccagtctggattcaatgaagagacctgtctggtgaaaattatcaccggactcctggaattcgaggtgtacctcgaatacttacagaaccgctttgagtcctcagaggagcaggctcgcgcggtgcagatgtccacaaaagtactgatacagtag

SEQ ID NO: 15682 - DNA, 300 bp, synthetic construct
  misc_feature 1..300: note = Description of Artificial Sequence: Synthetic coding sequence
  source 1..300: mol_type = other DNA
atgaccagcaagctggcagtggctctgctcgccgccttcctgatttcggctgccttgtgcgaaggggccgtattgccacgttccgcaaaagaactccgctgccagtgcatcaaaacttactcaaagccttttcacccgaagttcataaaagaattaagggtcatcgagtccgggccccactgtgcaaacactgagattatagtaaagctgtccgacggaagagaactgtgtctagatccaaaggaaaactgggtgcagagggtggtggagaaattcctcaagagggccgaaaattcatag

SEQ ID NO: 15683 - DNA, 2139 bp, synthetic construct
  misc_feature 1..2139: note = Description of Artificial Sequence: Synthetic coding sequence
  source 1..2139: mol_type = other DNA
atggcaggaggacctggcccgggggaaccagccgctccaggagctcagcactttctgtatgaggtgcccccctgggtgatgtgtagattctacaaagtcatggacgctctggagcctgctgattggtgtcagtttgccgccctgattgtaagagaccaaaccgagcttcgactatgtgagaggagcggccagaggactgccagcgtgctgtggccctggatcaacaggaacgctagagttgccgacttggtacacatcctgacacaccttcagttactgcgcgcgagagacattataacggcttggcatcccccggcacctctcccgtcccctggaacaacagccccccgccccagcagcatcccagctccagccgaagccgaggcctggtctccacgaaaacttccgtcgtcggcatcaacattcctgagccctgccttccctggcagccagacgcactccggcccagaactgggcctggttccatcacccgctagcctgtggcctcctcctcctagtcctgccccatcttccacgaaacctggacccgagtctagcgtgtccttacttcaaggggcccggcctttcccattttgttggcccctttgcgagatatcgagaggaacgcacaacttctctgaggagctaaaaatcggtgaggggggctttggctgcgtttacagagcagtgatgagaaatacagtatacgccgtgaaacggttgaaggagaacgccgatctggagtggacagctgtgaaacagtcctttcttacagaagtcgagcagctgtcaaggtttagacacccgaacatcgtagactttgccggatattgcgcccagaatgggttctactgtctggtgtacgggttccttcctaatgggtctctcgaagataggcttcactgtcaaacacaggcttgtccccctttgagctggccgcaacgcctcgatatcctgcttggaactgcccgtgctatccagtttctgcaccaagattctccttctctgatccatggggacatcaaaagttccaacgtcctgctggatgaaaggctgacaccaaagctgggcgattttggattagcccgttttagcagattcgccggatcatcgccatcccagagttctatggtcgcccgcacccaaacagttcgaggaacccttgcctatctgccagaggagtacatcaaaaccggacgcttggcggtggacacagatacttttagctttggcgttgtagtccttgagactctagccggccagagagctgtgaagactcatggagctcgaactaaatacctgaaagatctagtagaagaagaggccgaggaagctggagtagccttgaggtctacccaatctaccctgcaagctggattggctgcggacgcttgggctgctcctatagcaatgcagatctacaaaaaacatcttgacccacgaccgggcccatgcccgccggagcttgggttggggctcggacagttagcctgctgttgcctgcatcggagagcaaaacggcggcctcccatgactcaggtctatgaacgtctagagaaactgcaggcagtcgtcgccggagtgcctggccattctgaggccgcaagttgtatccccccttctccacaggagaattcttacgttagcagcaccggacgcgcccacagcggtgctgcaccgtggcaaccactggcggctcctagcggcgcatcggcccaagctgctgagcaattacagagaggcccaaaccagcccgtagagtcggatgaaagcctggggggcctgtctgctgcactaagaagctggcacctgacaccctcatgtcctttggacccagctcccctgcgggaggccggctgccctcagggggacaccgctggagaaagctcctgggggtctggtcccggctctcggcctactgctgtggaggggctggccctgggtagttcggcctcatcaagtagtgagcctccccaaattattatcaaccccgctaggcagaagatggtgcagaaactggcgctctatgaggacggcgccttagactccctccagctcctctcctcctcctcactgccaggcctggggctagagcaggataggcagggccccgaggagtcagacgaattccagtcttag

SEQ ID NO: 15684 - DNA, 2082 bp, synthetic construct
  misc_feature 1..2082: note = Description of Artificial Sequence: Synthetic coding sequence
  source 1..2082: mol_type = other DNA
atggcgggcggaccagggccgggtgaacctgctgcgcccggggcacagcactttctttacgaggtcccaccatgggttatgtgccgtttttataaggtaatggatgcgctagagccagccgactggtgtcaattcggcggttggaggcgggccgcagggggtcgcgaggctcggggcttactggccccaactccggatgccccaagacccgcagctgccttaatcgtgagagaccagaccgaacttcgtctgtgcgaacgaagcggtcagagaaccgctagtgtcctctggccgtggatcaaccgcaatgcccgcgtggccgacctggttcatattctgactcatcttcagcttcttagggcccgcgacattatcactgcctggcatccgcccgcccccttgccttcacccggcacaacggctcctcggccatccagcatccccgcgccggccgaggccgaggcttggagtccacgcaagctgccctcgagtgctagtaccttcctgtctcctgcctttcccggatcacaaactcatagtggtcctgaacttgggctggtgccttcacccgcctccttatggcctccgcctcctagccccgcgcccagctctacaaagcctggacctgaaagtagcgtgtctctcctgcagggggcgagaccttttccattctgctggccactgtgcgaaatttcacgcggaacacacaacttctccgaggaactaaagatcggcgagggcggcttcggctgtgtatatcgcgcagtgatgcgaaataccgtctacgccgtgaagcgcctcaaggagaacgcggaccttgagtggaccgccgtgaaacaatcattcctcacggaggtcgaacagctgtcaagattccggcatccaaatatagttgacttcgccggatactgtgcacagaatggcttctactgcctcgtttacggatttctcccgaacggcagcctggaagaccgccttcactgccagacacaggcctgcccccctctgtcatggcctcagaggctggacattctgttaggtactgcaagagctattcagtttcttcatcaggatagtccctctttgatccatggtgacataaaaagcagcaacgtgctgctggatgagcgcctgactcctaaactcggagattttggcttggccagatttagccggttcgctgggagctcaccgtctcaatcctctatggtggcgcggacacagaccgtaagaggtaccctggcctacctgcccgaagaatatattaaaaccgggcgtctggccgtagatacagatacattctcgttcggcgtagtggtcttggagaccttggccggccaacgcgccgtgaagactcatggagctcgaactaagtatctcaaagatctggtcgaggaagaagcagaagaggccggcgtcgcattaagatccacccagagcaccctgcaggccggtttggctgctgacgcttgggccgcccccattgccatgcaaatttataagaagcacctaggacaactggcttgttgctgcctccacagacgagctaagcgacgacccccgatgacccaggagaattcctatgtatcgtcaacaggacgggcacactccggcgccgcgccttggcaacctctagcagcccccagtggagcatctgcgcaagcggctgagcagctgcagaggggaccgaaccagccggtggaatccgacgagtctctaggtggactgtcagctgctctgagaagttggcatctgaccccttcttgcccattggaccccgctcctctgagagaggccggctgcccccagggggacactgccggggaatcctcctggggttcagggccaggctcccggccaactgctgtggaaggactggctctaggatcgtccgcctcctcctcgtcagaaccacctcagattataataaatccagcaagacaaaagatggtccaaaaactggccctgtacgaggatggagcactggattctcttcaactgttgtcaagttcaagcctgccaggccttgggctggagcaggatagacagggtccagaagagagtgatgaattccagtcctag

SEQ ID NO: 15685 - DNA, 2049 bp, synthetic construct
  misc_feature 1..2049: note = Description of Artificial Sequence: Synthetic coding sequence
  source 1..2049: mol_type = other DNA
atggccgggggccccggccctggcgagccagcagccccaggtgctcagcactttctttacgaggtgcctccatgggtgatgtgtcgcttttacaaagtcatggatgccctggagcccgccgattggtgtcagtttgccgcactgattgtccgggaccaaaccgaactgcgactttgcgaaagaagtggacagcgcactgcctctgtgctttggccgtggattaacaggaacgccagagtggccgacctcgtccacatcttgacgcacttacagctgcttcgcgcccgcgacatcattacagcctggcacccacctgcaccactgccctcccctgggaccaccgcccccaggcccagctccatccctgctccagcagaggctgaggcctggagtccgcggaagctgccgagtagtgcctctactttcttgtcacccgctttccccgggtcccagacacattcaggaccagaactgggactggttccaagccctgcctccctgtggcctccaccccccagcccggccccctcatctactaagccgggccctgagtcaagcgtatccctactccaaggtgcccgccctttcccattctgttggcccctgtgcgagatctctagagggacccacaatttttcagaagaactgaagatcggagagggagggttcggctgcgtttatagagcagtaatgaggaatacagtttatgccgtcaagaggctcaaagagaacgctgatctagagtggactgccgttaaacagtccttccttacagaggttgagcagttatctcgttttaggcaccctaatatcgttgatttcgccgggtactgtgctcagaacgggttctattgtttggtgtacggattcctgccaaacggttctttagaggataggctgcactgccagactcaggcttgcccacccctgtcttggccacagcgtcttgatatcttgttaggaaccgccagagccattcagtttctgcaccaggactcgccctccctcatccacggtgacattaagtccagtaatgtgcttctcgacgagaggcttacccctaaactcggcgactttgggctggcccgcttctcacggtttgccgggtcctcaccatctcagagctctatggtggccagaactcagaccgtgagaggcacattagcatatttgccggaagaatacattaagacgggccgactggcagtggataccgacaccttttctttcggggtggtggttttagaaacattagccggacagcgagcagtgaagacccatggcgctcgtacaaaatatctaaaggacttggtggaggaggaagccgaggaggcgggggtggcgctgaggagcacccagtccacactgcaggctgggcttgcagcagacgcctgggccgcccccatcgctatgcagatatacaaaaaacacctggaccctcgccccgggccttgcccaccagaacttggcctaggcctgggacaattggcttgttgctgccttcatcgccgggcgaagcggaggccacccatgactcaggaaaactcttacgtctcctctacaggtcgcgcccactctggggctgccccgtggcagcccctcgccgccccatccggggccagcgcgcaagcagctgaacagctccagcgcgggcccaaccagccagttgaaagcgacgaatctcttggagggctctccgcagccctgcgcagctggcaccttacccccagctgtccattggatcctgctcctctgcgagaagccggttgtcctcagggcgatacagctggcgaaagctcatggggtagcggtccaggcagccgccccaccgctgtagaaggacttgccctggggtcctctgccagcagtagcagcgagcctcctcaaataataattaaccccgcccggcagaagatggtccagaagctggcactctatgaggacggagcactcgacagtctgcagctgctctcgtctagctctctcccaggtcttgggctggagcaagacaggcagggtccggaggaaagcgacgagttccagtcctag

SEQ ID NO: 15686 - DNA, 2127 bp, synthetic construct
  misc_feature 1..2127: note = Description of Artificial Sequence: Synthetic coding sequence
  source 1..2127: mol_type = other DNA
atggccggaggaccagggccaggcgagccagctgcccctggcgcccagcatttcttgtatgaggtgcccccatgggttatgtgtcggttctacaaggtgatggacgcgctcgagcccgccgactggtgccagttcggcggctggcgtcgcgctgctggagggagagaggccagggggctgttggccccgacgccggacgcgcccagaccagcggctgcattgattgtgagggaccagactgaactcaggctctgcgagagaagtggtcaacggaccgcatcagtgctgtggccatggattaacagaaatgctcgcgtggctgatctggtgcatattttaacccacctccagctccttcgggcccgggacattattactgcttggcatcctcctgctcccttgccttcacccggtactacagcgcccaggccaagctccatcccagcaccagcagaggcagaggcctggtcccccagaaaacttcctagttcggcaagtacgtttctgtctcctgcctttcccggctcccagactcactccggacccgagttagggttagtccccagccctgcgagtttgtggcctcctccaccttcaccagctcctagcagcaccaagcctggtcctgagagctcagtttccctcttgcaaggggcccgaccatttccgttttgctggccactgtgcgaaatttctagaggcactcataacttcagtgaagaacttaagattggcgaaggtgggttcggctgtgtctaccgcgctgttatgaggaataccgtgtatgcggttaagagacttaaagaaaacgcggaccttgaatggaccgcagtcaagcaaagctttttgaccgaggtggaacagctatcaaggttccgccacccgaatattgtcgacttcgccggatactgtgcacagaatggcttttactgtctcgtatacggatttcttccaaatgggtcactcgaggatcggttacattgccaaacgcaggcgtgtccacccctgagctggccacagagactggacattctgctggggactgcaagagctatccaatttctacaccaggatagtccttcattgatccacggtgacatcaaatccagcaacgtcttgctcgacgagcgactaacaccaaagcttggcgactttggactggcaagattttcccggtttgcagggtcatctccaagtcagagctccatggttgctcgcacccaaacggttcgtggaacactggcttacctccctgaggagtacataaaaaccggcaggctggccgtggatacagataccttcagctttggcgtagttgtgctggagactctcgccgggcagagggcggtgaaaacccatggcgctagaacaaagtacctgaaggatctggtcgaggaagaggccgaagaagcaggtgtggcccttaggtccactcagagcacccttcaggccggcctcgctgccgatgcttgggcggccccaatcgcgatgcagatttataagaagcacctagaccccaggcctggcccatgccccccagaactcggtttgggtctcggccaacttgcctgttgttgccttcacaggagagcaaaaagacgacctccaatgacccaggagaacagctatgtatcctctacaggcagagcccatagcggggccgccccctggcagccactggccgcaccgtcaggagcctccgcccaggcggccgagcaattgcaacgcgggcccaatcaacctgtggagtcagacgagagtttgggaggcctgtcagccgccttacggagctggcacctgacccccagctgtcctctggatcccgcaccacttcgggaagcaggttgcccacaaggcgacaccgccggcgaaagcagttggggaagcgggcctggttcaagaccaaccgccgtagaaggtctggccctaggatcctcggcatcttctagttccgagcctcctcagatcattattaaccctgccaggcaaaaaatggtgcagaagctcgccctttatgaggacggggccctcgactccctccagttactctctagctcaagcctgcccggcctggggttggaacaggaccggcaaggcccggaggaaagtgatgaattccaaagctag

SEQ ID NO: 15687 - DNA, 1902 bp, synthetic construct
  misc_feature 1..1902: note = Description of Artificial Sequence: Synthetic coding sequence
  source 1..1902: mol_type = other DNA
atggcgggtgggccagggcctggcgagcctgccgcacctggagcccagcatttcctatatgaagtccctccctgggttatgtgtcgcttctacaaggttatggacgccctggagcctgccgactggtgccaatttgcagctttaatcgtgcgcgaccagacagagctccgtctttgcgaacggagcggtcagcgcaccgccagtgtcctatggccatggatcaaccgcaacgcaagagtcgcggatctcgtgcatatcctaacccacctccaactgttaagagccagggatatcattaccgcctggcatcctccggccccactgccttcccctgggacaacggccccaagacccagctccatccctgcaccagctgaagccgaggcgtggagccctaggaagctaccatccagtgcatccacctttctgtcaccagcatttcccgggtctcagactcactcagggcccgagctgggtcttgttccatcccccgcctccctctggcctcctccccctagtcctgcaccctctagcaccaagccagggcccgaatccagcgtctctttgctgcaaggtgccaggccatttcccttctgttggcccctgtgtgaaatttcacgcggaacccataatttttccgaggaattaaagataggagaggggggcttcggatgtgtctaccgagccgtgatgagaaatacagtctacgccgtcaaaaggttgaaagaaaacgccgacctcgagtggacagctgttaaacagtcttttctaactgaagttgagcagctcagcagatttcgacaccctaacatagttgacttcgccggttattgcgcccaaaacggattctactgcctcgtatacggatttctgcctaacggatctcttgaggatcgcctgcactgccaaactcaggcttgcccacctctgtcctggccacagagactggacatcctcctgggcaccgccagagcaatacaattcctccaccaggactcaccgagcttgatccacggcgatatcaagagcagtaatgtgctgcttgacgagcggctgactcccaagctcggggacttcggcctggcgaggttcagccgctttgcaggatctagcccctcccaatcttccatggtggctcggacccagacagtacggggaacacttgcctatctgccggaggaatacatcaagacaggaagattagcggttgacacggacactttctcctttggggtggtggtcctggagactctagctgggcagagggcagtgaagacacacggagcgcgcacaaagtacctggtttacgagcgcttagaaaagctacaggctgtggtggccggtgtgcccgggcattctgaggctgcctcctgtattcctccctctccccaggaaaacagttacgtctcctcgaccggccgggctcactctggcgctgcaccctggcaacccctggccgcaccctcgggagcctctgctcaggcagccgagcaacttcagagggggcccaatcagcccgtcgagagtgacgagtccctgggcggcttgagcgcggcattgcgctcttggcacctgactccaagctgtcccctcgatccagcacctttaagagaagcagggtgccctcagggcgacaccgccggcgagtcttcttgggggtcagggcccggctcgaggcctactgccgtggagggattagccttaggctcctcagccagctcctcttccgagcctcctcaaatcatcatcaacccggcgaggcagaaaatggttcagaaactggctctgtacgaggacggagcgctcgatagtctgcagctcctcagctcttcttccctacccgggctcgggctggaacaggaccggcagggacccgaggaatcagatgagtttcagtcttag

SEQ ID NO: 15688 - DNA, 1245 bp, synthetic construct
  misc_feature 1..1245: note = Description of Artificial Sequence: Synthetic coding sequence
  source 1..1245: mol_type = other DNA
atgtcaaaaaagatctccggggggtcagtggtcgagatgcagggtgatgaaatgacacgtatcatctgggagctcataaaggagaagttgattttcccctacgttgagctggatttgcactcctacgacttaggcatcgaaaaccgggacgccactaacgaccaggtgacaaaggatgcggccgaagccatcaaaaagcacaatgtgggcgtcaaatgcgccaccattacaccggacgaaaagcgggtggaggagttcaagctaaagcagatgtggaagagccctaatggcacaattcggaacatcctgggaggcacggtgtttcgggaggccatcatctgcaagaatatcccacgcttggtttccggctgggtgaagcctattattataggtcgtcacgcttacggtgaccagtaccgggcgaccgatttcgtggtgccagggcccgggaaggtcgagatcacctacacccccagtgacgggacccagaaagtcacctatctcgtgcataacttcgaggaaggagggggagtggctatgggcatgtataatcaggacaagtctatcgaggattttgcgcactcatcattccaaatggcgctgagcaaaggttggccgctgtacctgtctaccaagaatacaatactgaaaaaatacgacgggcggttcaaggacatctttcaggagatttacgataagcaatacaagtctcagttcgaagcccagaaaatttggtatgagcaccgcctcatcgacgatatggttgcccaggcaatgaagtcagaggggggattcatttgggcctgcaagaattatgacggtgacgtacaaagcgattccgtcgctcaggggtacggctccctcggtatgatgactagcgtcctcgtttgcccggacggcaagacagtggaggcagaggcggcccatgggacagtgactcggcactaccggatgtatcagaagggccaggagacttctactaatccaattgcaagtattttcgcatggacacgcggactggcccaccgcgccaagctggacaataataaggaactcgccttcttcgctaatgctcttgaggaagtctctatagagaccatcgaggcaggtttcatgaccaaagacttggccgcttgtatcaaggggttgcctaacgtacagaggtctgactatttgaatacgttcgagttcatggataaacttggcgagaatctcaagattaagctggctcaagccaagttgtag

SEQ ID NO: 15689 - DNA, 474 bp, synthetic construct
  misc_feature 1..474: note = Description of Artificial Sequence: Synthetic coding sequence
  source 1..474: mol_type = other DNA
atgtctaaaaagattagcggtggcagtgtggtcgaaatgcaaggcgacgaaatgacacgcatcatttgggaactgatcaaagagaaactcatcttcccctacgtggaactcgacctgcactcctatgatctcggcatagagaaccgcgacgctactaatgatcaagttaccaaggatgctgccgaagctattaagaagcacaatgtgggggttaaatgtgccaccatcacccctgatgaaaagcgggtggaggaattcaaactcaagcagatgtggaagagtccgaacggcactatcagaaatatcctgggaggaacagtctttagagaggcgattatatgcaaaaatattcctaggctcgtatctggttgggtgaagccgattattatcggccgccacgcctacggagaccagtatcgcgcaactgatttcgtggtacccggacctggaaaggttgagataacttatacatag

SEQ ID NO: 15690 - DNA, 1245 bp, synthetic construct
  misc_feature 1..1245: note = Description of Artificial Sequence: Synthetic coding sequence
  source 1..1245: mol_type = other DNA
atgtcaaaaaaaatctctgggggaagcgtcgtggagatgcaaggggatgaaatgaccaggatcatctgggagctgataaaagagaaattaatctttccatacgttgagcttgacttgcactcatacgacttgggcattgagaatcgggacgcaacaaatgatcaggtaaccaaggatgccgccgaggctataaaaaagcacaatgtcggtgtgaaatgtgccacgatcacccccgacgaaaagagagtggaggaatttaagctgaagcaaatgtggaaaagccctaatgggactatccgcaatatcctgggcgggaccgtgtttcgagaggctattatttgcaagaacattcccagactagtgtctgggtgggtgaaacctatcattataggccggcacgcttacggcgatcagtatcgggcaacagacttcgtggtgccagggcccgggaaagttgagatcacctatacaccctcagatggtacacaaaaggtcacatatctcgtgcacaatttcgaggaggggggcggtgtcgccatgggcatgtacaaccaagacaagagcattgaagatttcgcccacagcagtttccagatggcactgagcaagggctggcccctctatctctctactaaaaatacgatcctcaagaaatatgacgggagattcaaagatattttccaggagatttacgacaaacagtataaaagccagtttgaggctcagaagatttggtatgagcaccggctcatagacgatatggtggcccaggctatgaagtctgaaggggggttcatctgggcatgtaagaattacgacggagacgtgcagtctgactccgttgctcagggctatgggagtcttggcatgatgacatctgtgttagtgtgtccagatggcaagacagtggaggccgaggccgcccatggtactgtgacgcgccactaccggatgtaccagaagggtcaggagacgtcaactaatcccatcgcgtcaatttttgcgtggaccagagggcttgcccacagggcgaaattggataacaataaagaattggcctttttcgccaatgctcttgaggaggtgtcgatcgagacgattgaggctggattcatgacgaaggacctcgctgcatgtatcaaagggttgcccaatgtccaaagaagcgattacctaaacacgttcgaattcatggacaaactgggcgagaacctgaaaattaagcttgctcaggctaaactatag

SEQ ID NO: 15691 - DNA, 225 bp, synthetic construct
  misc_feature 1..225: note = Description of Artificial Sequence: Synthetic coding sequence
  source 1..225: mol_type = other DNA
atgtctaagaaaatatcaggggggagtgtggtcgagatgcagggagatgaaatgactagaattatttgggagctaatcaaggagaaacttatcttcccatacgtggagctcgacctccacagttacgatctgggcatcgagaatcgggacgcaacgaacgaccaggttacgaaggacgcagcagaggcaatcaagaagcacaacgtgggcgtgaaatgcgcatag

SEQ ID NO: 15692 - DNA, 1245 bp, synthetic construct
  misc_feature 1..1245: note = Description of Artificial Sequence: Synthetic coding sequence
  source 1..1245: mol_type = other DNA
atgtctaagaagatatcaggcggcagtgtggtcgagatgcagggggatgagatgactcgtattatctgggagttgataaaggaaaaactaatcttcccctacgtggagttggacctgcatagttacgacctcggtattgagaatcgggacgccacaaacgaccaggtgactaaggacgccgccgaagccatcaaaaaacataatgtaggcgtaaagtgcgcaaccattacacctgatgagaaacgagttgaagagttcaaactgaagcagatgtggaaatcccccaatggcacaatcagaaacatcctgggcggaacggtgttcagggaagccatcatttgcaaaaacatccctcggctggtatctggatgggtgaagcctatcatcataggtcgtcatgcatatggcgatcagtaccgggccacggacttcgtggtgccagggcccggcaaggttgagattacatacacaccgtccgacggcacccagaaagtgacctatctcgtccacaactttgaggaaggcggaggtgtcgccatggggatgtataatcaggataagagcatcgaagactttgctcattcaagttttcagatggcactctctaagggctggcccctgtatcttagtacaaagaatacgatcctaaaaaagtacgacgggcggtttaaagatatcttccaggagatttacgacaaacagtataaatctcagttcgaggcccagaagatctggtacgagcataggttaatcgacgacatggttgctcaggcgatgaaatccgaggggggatttatttgggcatgcaagaactatgatggggatgtgcagtcagacagcgtggcccagggctatggctcactggggatgatgacctcagtgctggtctgccctgacggcaagaccgttgaagccgaggctgcacatggtaccgttacaagacactatagaatgtatcaaaaaggccaagagacaagtaccaatccaatcgcttctatatttgcctggacccgcggtctcgcccaccgtgctaaattagataacaacaaagagttagcattttttgctaacgcactggaagaggtctccatcgagaccatcgaggccgggttcatgacaaaggacttggcggcgtgtatcaaagggctgccaaacgtgcaacgcagtgactatctgaacaccttcgagtttatggacaaactgggggagaacctcaagatcaagctggcccaggctaaactgtag

SEQ ID NO: 15693 - DNA, 189 bp, synthetic construct
  misc_feature 1..189: note = Description of Artificial Sequence: Synthetic coding sequence
  source 1..189: mol_type = other DNA
atgtcaaaaaagatctcaggtggatccgtggtggaaatgcagggagacgagatgacaaggataatctgggagttaataaaagaaaaacttatttttccatacgtggaattggacctccactcctacgacctggggattgagaatcgcgacgcgacaaacgaccaagtcaccaaggacgccgccgagtag

SEQ ID NO: 15694 - DNA, 1359 bp, synthetic construct
  misc_feature 1..1359: note = Description of Artificial Sequence: Synthetic coding sequence
  source 1..1359: mol_type = other DNA
atggcgggttatctacgagtagtccggtcactgtgccgagcttcaggatctagacccgcctgggccccagccgctctcacggccccaactagtcaggagcagccacggaggcattatgctgacaaaagaattaaagtggccaaacccgtggtggaaatggatggcgatgagatgacacgaataatatggcagtttatcaaagagaagcttattctgccccacgtagacattcagctgaaatacttcgatctggggctacctaatcgcgatcagaccgacgaccaggtgactatcgattctgccctggcgacccagaaatatagtgtggcagtaaaatgtgctactatcacccctgatgaggctagggtcgaagaatttaaactgaaaaagatgtggaagtccccgaatggcacaatcagaaacattttgggcggcacagttttcagggagccaatcatatgcaagaatattccacgcctggttcccggatggactaaaccaatcaccattggtagacacgcccacggggaccagtacaaagccaccgatttcgttgctgaccgggccggaacctttaagatggtgtttacccctaaggacgggtctggagtaaaggaatgggaggtttataatttccccgctgggggagtgggaatgggtatgtacaatacagatgaaagcatttctggctttgcacatagttgttttcagtatgctatacagaaaaaatggcccctctatatgagcactaaaaatactattctgaaggcctacgacggccgcttcaaagatatctttcaagaaatttttgacaaacactacaaaacagacttcgacaaaaacaaaatctggtatgaacacagactcatcgacgacatggtggctcaggtcctgaagtcctccggcggttttgtgtgggcttgcaagaactatgatggagacgtgcagtctgatattctcgctcaagggtttggcagcctcggactgatgacttcggtgcttgtatgtcctgacgggaagacaattgaggctgaggctgcccacggaactgtcactaggcactaccgggaacaccagaagggtcgcccaacgtccacgaatccaatcgcttctatctttgcctggacgaggggtttagagcaccgggggaagctcgacggtaaccaggacttgatcaggttcgcacaaatgctggaaaaggtttgcgtcgaaactgttgagtccggtgctatgaccaaggacctggctggatgcatccacggtcttagcaacgtgaagcttaatgagcacttcctaaacaccaccgattttctggatacaattaaaagcaacctggaccgggctctgggccggcagtag

SEQ ID NO: 15695 - DNA, 969 bp, synthetic construct
  misc_feature 1..969: note = Description of Artificial Sequence: Synthetic coding sequence
  source 1..969: mol_type = other DNA
atgtggaaatcacccaacggtaccattcggaacatcctcggaggcactgtgtttcgggagcctataatctgtaaaaatatcccacggctggtaccgggctggaccaaacccattacgatcgggcgccacgcccatggcgaccagtataaggctactgattttgtggcagacagggctggcacattcaaaatggtgttcacacctaaggacggaagtggggtgaaggaatgggaagtttacaacttccctgcaggtggcgtggggatgggcatgtacaacaccgatgagtccatctctgggtttgctcacagctgtttccaatatgccatccaaaaaaaatggcccctctatatgtccactaagaacactatcctgaaggcatacgatgggagattcaaagatatattccaggagatattcgacaaacattataagacagatttcgacaaaaataagatttggtatgagcatcggctaatcgatgacatggtggcccaggtccttaagagctctggaggattcgtatgggcctgtaaaaattacgacggcgatgtgcagtctgatattctagcccaggggtttggcagtctcggcctcatgacatctgtgctcgtctgccctgatggaaaaaccatcgaggccgaagctgcccacggcactgtaacacgacattaccgtgagcaccagaaggggcggcccactagtacaaatccaatagccagcatttttgcctggacgcggggtttggagcatcgcggcaagctggatgggaaccaagacctgataaggttcgcgcagatgctggagaaagtttgcgtggagacagtcgaatccggagccatgacaaaggatctggccggctgtattcacggtctgtccaacgttaagcttaacgagcacttcctgaacacaactgacttcctggacactatcaaatccaatttggaccgcgccctcggcagacagtag

SEQ ID NO: 15696 - DNA, 1203 bp, synthetic construct
  misc_feature 1..1203: note = Description of Artificial Sequence: Synthetic coding sequence
  source 1..1203: mol_type = other DNA
atggacggggacgagatgacacgtattatatggcagtttatcaaggagaaactcatccttccccacgttgatatacagctaaagtatttcgatctgggtttacccaatagagatcagacagacgaccaggtaaccatcgactccgcacttgccacacaaaagtattctgtagccgtgaagtgcgctactatcacccctgatgaagccagagtggaagagtttaagcttaagaagatgtggaagtccccgaacggcacgatcaggaacatattgggcggcactgtcttcagggaaccaatcatctgcaaaaacatcccacgcctggtccctggttggaccaagccaataaccatcggccgccacgcacatggtgatcagtacaaagccaccgactttgtcgccgaccgggcaggaactttcaagatggtgtttacgcctaaagatggttccggggtgaaggagtgggaggtgtacaacttccctgcagggggcgtgggtatgggcatgtacaatacagatgaatctataagcggattcgctcattcttgttttcagtacgcgattcagaagaagtggccactctacatgtcaacgaagaacacaatcttgaaggcctatgacggcagatttaaagatatatttcaggagattttcgacaagcactataagaccgacttcgataagaataagatctggtacgagcaccgactcatcgacgacatggtggctcaggtcctaaaaagctccggcggatttgtctgggcctgtaaaaattacgatggagacgtgcagtccgatatattagcccaaggattcgggtcactcggcttaatgacctctgtgctggtctgtcctgacggcaagaccattgaggctgaggcggcccatggcaccgtcaccagacattacagggagcaccagaagggtcgaccaacgagtactaacccaattgcctccattttcgcctggacacgcggcctcgagcacagaggcaaactggatggcaatcaggaccttattcgctttgcccagatgctcgagaaggtctgtgtggaaactgtggaaagcggcgccatgaccaaagacctggccggctgtatccatggtttgagcaatgtaaaactgaacgagcattttctcaacacaaccgattttctcgatactataaaaagtaatctggaccgagctctgggccggcaatag

SEQ ID NO: 15697 - DNA, 3657 bp, synthetic construct
  misc_feature 1..3657: note = Description of Artificial Sequence: Synthetic coding sequence
  source 1..3657: mol_type = other DNA
atgaggagccccaggactagagggcgaagcggacgccccctctcattactgctcgcactcctgtgcgctctgagagccaaggtttgcggagccagtgggcagtttgagctcgaaatattgtcgatgcagaacgtgaacggcgagctacagaacggcaactgttgcgggggagctcggaatcccggggaccggaagtgcacacgtgacgagtgcgacacatactttaaagtgtgcctcaaggaatatcaatccagagtgacagccggcggtccctgcagttttggaagcggctctactcctgtaatcggcgggaacacattcaatctgaaagcttcccggggcaacgaccggaacaggatcgtgctccccttttccttcgcctggccgagatcctataccctcctggtggaggcctgggattccagtaacgataccgtgcagcccgatagcattattgagaaggcttcacacagcggtatgatcaatcccagtcgtcagtggcagactttgaaacagaacacaggagtggcccactttgaataccagatccgggtgacctgcgacgactattactacggtttcgggtgcaacaagttctgtcgtcctcgtgacgattttttcggtcattacgcctgtgaccagaacggaaacaagacctgcatggagggctggatgggaccagagtgcaatcgggccatctgccgccagggatgctcgccgaaacatgggtcctgcaagctgcctggggactgtcgatgtcagtatggatggcaaggcctgtactgcgataaatgcattccacacccaggatgcgtccacgggatatgcaacgagccgtggcagtgcctgtgcgagaccaactgggggggacagctgtgtgacaaggacctgaactattgcgggacgcaccagccctgcttaaacggggggacttgctccaatacagggccagacaagtaccagtgcagttgtcccgagggatatagcgggccaaactgcgagatagccgagcatgcctgcctgagtgacccttgccataacaggggatcctgcaaagagaccagcctgggtttcgaatgtgaatgttcacccggttggaccggaccaacttgctctaccaacattgatgattgttcccccaataattgttcccacggagggacatgccaagatctggtaaacggcttcaagtgtgtgtgcccgccacaatggaccggcaagacctgccaactggacgctaacgagtgcgaggccaagccatgtgtcaatgcgaaatcctgcaaaaatctgatcgctagctattactgcgattgtctgccagggtggatggggcaaaactgtgatatcaacatcaacgattgtctggggcagtgccagaatgatgcctcctgtcgcgacctggtaaatggttaccggtgcatttgtccccccggatacgccggggatcattgtgaacgggacatagacgagtgtgcttctaacccctgcttaaatgggggacactgtcagaatgaaatcaataggttccagtgtctgtgtccaactgggttttcaggtaatctgtgccagctcgatatcgattattgtgagcctaatccttgccagaatggggctcagtgttacaacagggcatcagactatttttgcaaatgcccagaggactatgaaggtaaaaattgttctcatttgaaggatcactgtcggactaccccgtgcgaggttatcgactcatgcaccgttgcaatggctagcaacgatacgcctgagggagtccgttacatttcctccaatgtatgcgggccacatggtaagtgtaagtctcagtctgggggaaagttcacgtgcgactgcaacaaaggcttcacaggaacttactgtcatgaaaatattaatgactgtgagagtaacccctgtaggaatggcggcacctgtattgacggagttaacagttacaagtgcatttgttccgacggatgggaaggtgcttactgcgaaacaaatatcaacgattgttcacaaaatccctgccataatggcggcacatgtagggacctggtcaacgatttttattgtgactgtaaaaatggatggaagggcaagacctgccactcaagggattcacagtgtgacgaggccacctgcaataacgggggaacgtgttacgacgagggcgatgcctttaagtgtatgtgccctggaggttgggagggtacaacttgtaacattgctagaaatagctcctgtctcccaaatccctgccacaatggaggaacctgcgtggtcaacggtgagtcttttacatgcgtctgcaaggaaggatgggaaggtcctatctgcgcacaaaataccaacgactgctcacctcatccgtgctacaatagtgggacctgcgttgatggcgacaattggtatcgctgtgagtgtgctccaggtttcgcgggtcctgattgccgcatcaatatcaacgagtgccagagctcaccttgtgcatttggcgccacctgtgtggatgagattaacgggtaccggtgtgtgtgccccccgggtcatagcggcgccaaatgccaggaggtttccgggcggccctgcataacgatggggtccgtgattccggatggcgcgaagtgggacgatgattgcaatacctgccaatgtctgaacggtagaatcgcctgcagcaaagtttggtgtggacctcggccttgcctgctgcacaagggccactctgaatgccccagtggtcagtcttgcattcccatactggatgaccagtgttttgttcatccatgtacgggcgtgggggagtgtagaagcagcagcctgcagcccgtaaaaacaaaatgcacatctgatagctattatcaagataactgtgctaatatcacatttaccttcaacaaggagatgatgagtccaggattaaccacagaacacatctgctctgaactccggaacctgaatatactgaaaaacgtatctgctgagtactccatctatattgcctgtgagccatcccctagtgctaacaacgagattcatgtggctatctcagctgaggacatacgcgacgacggcaatcccatcaaagagattacagataaaattatcgacctggtgtccaaacgcgacggaaactcgtctctgatcgcagccgtggctgaggtgcgtgttcaacgccggcctctgaaaaaccgcaccgacttcctggtaccattgctctcatccgtcctgacagtggcatggatatgttgtcttgtgactgcattctactggtgcctgaggaagaggcggaagccaggcagccacactcattccgcctctgaggacaatactacaaacaatgtccgcgaacaacttaatcagataaaaaatccaatcgagaaacatggggccaacacagtgccaattaaggactatgagaataagaacagcaagatgtccaagattcgcacccacaacagtgaggttgaagaggacgacatggataagcatcagcagaaggcgcggtttgctaaacagcctgcctacacattagtcgatcgggaagaaaagccaccgaacgggacccccaccaaacatcccaactggactaacaagcaagataatcgcgacttggagagcgcgcagagcctcaatcggatggaatacattgtctag

SEQ ID NO: 15698 - DNA, 3180 bp, synthetic construct
  misc_feature 1..3180: note = Description of Artificial Sequence: Synthetic coding sequence
  source 1..3180: mol_type = other DNA
atgattaacccatctcggcagtggcagacactgaaacagaataccggagttgcccacttcgaatatcaaataagggtgacctgcgacgactactactacggttttggttgcaacaagttctgcagaccacgcgatgacttttttggacactatgcttgcgatcagaacggtaacaagacctgcatggaaggttggatgggcccagagtgcaatagagcaatctgtagacaggggtgttcacccaaacatgggtcatgcaagctaccaggggactgtcgatgtcagtatggttggcagggcctctattgcgataaatgcattccacatcctgggtgtgtccacgggatatgtaatgaaccctggcagtgcctgtgcgaaactaattggggggggcagctgtgcgacaaagatctgaactattgcggcacgcaccagccatgtctgaacggtggcacttgttcaaacactggcccagataaataccagtgctcatgcccggagggctattccggtcctaactgcgaaatcgctgagcatgcctgtcttagcgatccgtgtcacaacaggggctcttgcaaagagaccagcttgggattcgagtgcgaatgctcaccaggatggactggacctacatgctctaccaacatcgatgattgcagcccaaataattgcagccatggcggcacatgccaggacctagtcaacggtttcaaatgtgtgtgtccaccacagtggacaggtaagacatgtcagcttgatgcgaacgaatgcgaggctaagccgtgcgttaacgccaaaagttgtaaaaatcttatcgcaagttactattgtgactgtctgcccggctggatgggtcagaattgcgatattaatatcaacgattgccttggacagtgtcaaaatgatgcctcttgccgtgatctggtgaatgggtaccggtgcatctgcccaccgggctatgccggagaccactgtgaacgggacatcgacgagtgcgcttcgaatccatgcctcaatggaggacattgtcaaaatgagataaatagattccagtgtttgtgccctacgggtttcagcgggaacctgtgccagttggacatcgattactgtgagccgaacccttgtcagaatggggctcagtgctacaatagggcatctgactatttttgtaagtgccctgaggactacgaggggaagaactgcagccacctcaaagatcactgcaggacaacaccctgtgaagttatcgatagctgcaccgtagccatggcctcaaatgacacgcccgagggcgtaagatatatcagctctaatgtgtgcgggcctcatggcaagtgcaaatcccagtctggagggaaatttacctgcgattgcaataaaggcttcacaggcacgtattgccacgaaaatatcaacgattgtgagagcaacccctgtaggaacggcggaacatgtatcgatggggtcaacagttacaaatgcatctgctcggacgggtgggagggcgcatattgcgaaaccaacatcaacgactgctcacagaacccctgccataacgggggtacatgtcgggacctcgttaatgatttctactgcgactgcaagaatggttggaagggcaaaacatgtcattctagagactctcagtgtgacgaagcgacctgcaacaatggcggtacttgctatgatgagggagacgcgtttaaatgtatgtgcccaggtggatgggagggtacgacttgcaacatcgcacgtaattccagctgcttgcctaatccatgtcataatggcggtacatgcgttgtgaacggagagagttttacgtgcgtgtgtaaagagggctgggaagggcctatctgcgcccaaaacaccaacgattgctctccacacccctgctacaattcaggaacctgcgtcgatggagacaactggtataggtgcgaatgcgctcctgggttcgcaggacccgattgtcggattaatatcaatgaatgtcaatcgtcaccctgcgcatttggcgccacctgcgttgatgagatcaatggataccgctgtgtgtgtccccccggacactctggcgctaagtgtcaggaagtgtccggccgcccttgcatcacaatgggctccgtgataccagacggtgccaaatgggatgatgactgcaacacatgtcaatgtctcaacgggcgcattgcttgctccaaggtctggtgcggcccacgcccctgccttctgcacaaaggccatagtgagtgcccgtcaggacaatcctgcattcctattctagacgaccagtgtttcgtgcacccttgtacaggagtaggggagtgtcgctcttccagcctgcagcccgtgaaaactaagtgtacctctgattcctactaccaggataactgcgcaaacattaccttcaccttcaataaggaaatgatgtcgcctgggctcaccaccgagcacatctgcagtgaacttcggaatttgaatatcctgaaaaatgtgtccgctgagtatagtatatatattgcctgcgaaccctcgcccagcgccaataacgaaatccacgtggcgatatcagccgaggatattagagacgacgggaatccaattaaagagattacggataaaatcatcgacctggtgtccaaacgtgatgggaactcttcactgattgcagccgtcgccgaggtcagagttcagcggagaccgcttaaaaatcgtactgactttctggtacctctgttgagcagcgttctaacagttgcttggatttgctgcctggtaacagcattttattggtgcttgagaaaaaggagaaagcctggatcacatacccatagcgctagtgaagacaacactaccaacaatgtgcgagagcagctgaatcaaatcaagaaccctatcgaaaagcatggtgctaatactgtgccgatcaaagactacgagaataaaaactccaaaatgagtaagattcgaacacataattctgaggtagaagaggacgacatggataaacaccaacagaaggctcgatttgctaagcagcctgcctatacattagtggacagggaagaaaagccacccaatggaacccctaccaagcaccccaactggaccaataagcaagacaatagggatttggagtcagcacagtctctcaaccgaatggagtatattgtctag

SEQ ID NO: 15699 - DNA, 3399 bp, synthetic construct
  misc_feature 1..3399: note = Description of Artificial Sequence: Synthetic coding sequence
  source 1..3399: mol_type = other DNA
atgggcatggcatgtctcacaatgaccgaaatggaagggacaagtacaagtagtatatatcaaaacggggatatcagtggaaacgccaattcaatgaagcagatcgaccccgttttacaagtgtacttgtaccactccctgggaaagtccgaggcagactatcttactttccctagcggcgagtacgtcgctgaggaaatttgtatcgccgccagcaaggcctgtggaataacacctgtttaccataatatgttcgcgctcatgagcgagaccgagcgcatctggtatcctcctaaccacgtttttcacatcgacgaatccactcggcacaatgtgctgtataggatcagattttacttcccaaggtggtattgctctgggtctaaccgtgcttataggcacggcattagcagaggcgccgaagcccctctgttggacgactttgtgatgtcatacctgttcgcccaatggcggcacgacttcgtccacgggtggatcaaggtccctgtgacacacgagacccaggaggagtgcttggggatggcagttttggacatgatgcgaattgccaaggaaaacgatcagactccactggcaatctacaattctataagttataaaacattcctgcctaagtgtatacgggctaagattcaggactaccatatacttacacgcaaacgtattaggtaccgcttcaggcgattcattcagcaattctctcaatgcaaggctactgccaggaaccttaagctgaaatatctcatcaatttggagacactccaatccgccttctacacggagaagttcgaggttaaagagcctggctccgggcccagcggggaggagatctttgctaccatcatcataaccgggaacgggggaatccagtggagtagaggcaagcataaggagagcgagaccctgacggagcaagatctgcaattgtattgtgattttcccaacatcatcgacgtgtctattaagcaggccaatcaggaggggtcaaatgaatctagagtcgtaactatccacaagcaagatggtaaaaatctagagatcgaactgagttctttaagggaagcactctctttcgtgtccctaattgacgggtactacagactgacagccgatgcgcaccattacctttgtaaggaggtggcaccacccgctgtactggaaaatatccagagtaactgtcatgggccaatcagtatggactttgcaatatccaaactgaagaaagctggaaatcagaccgggttgtacgtgctcaggtgctcccccaaggacttcaacaagtatttccttactttcgccgtggagagggaaaacgttatcgaatataagcattgcctgattaccaagaacgagaatgaggagtataacctgtccggcacaaagaagaattttagttctctgaaagatcttttaaattgttaccagatggagacagtcaggtcggacaatataatctttcagtttaccaagtgttgtccccctaaacccaaagacaagtccaacctcctggtgtttagaaccaacggcgtgtcagatgtgccgacgagtcctaccctccaacgcccaacccacatgaaccagatggtttttcataagattcggaacgaggatctcatctttaatgaatctctaggtcaggggacctttacaaagatctttaagggagttcggagggaagtgggggactatgggcagctgcacgagaccgaggtattattaaaagtgttggacaaagcgcacagaaactactccgagtcattcttcgaagccgcgagcatgatgtcaaaactgagccataagcacctggtgcttaattatggggtgtgtgtttgtggtgacgagaatatcctcgttcaggagtttgtaaaattcggctcacttgacacgtacttaaagaagaataagaactgcatcaacatcctgtggaaactggaagtcgccaagcaattggcatgggccatgcattttttggaggaaaatactctgatccacgggaatgtgtgcgcaaagaatatcctcctgattagagaggaggaccgtaagacaggaaaccccccttttataaagttgtccgaccccggaatctcaattaccgtgctgccgaaagacattctgcaggagagaattccttgggttcctccagagtgtatagaaaaccctaaaaatctgaacctggcaaccgataagtggtcatttggaaccacattgtgggagatctgtagtggcggtgataagccactttccgccctcgattctcaacgcaagctgcagttttacgaggacaggcatcagttgccagccccgaagtgggctgagctggcgaacctgattaataactgcatggactatgaacctgactttagaccctcctttagagcgattatccgcgaccttaactcactcttcacaccggattatgaactactaactgaaaatgatatgcttcccaatatgcgcataggtgctttagggtttagcggggcattcgaggatcgcgatccaacccagtttgaggagaggcatcttaagttcctgcaacaactcggaaaagggaattttggatcggtcgaaatgtgccggtacgatcccttgcaagataataccggcgaggtggtggcagtaaagaagttgcaacacagtacagaggagcacctgcgcgattttgaaagagaaattgagatcctaaaaagcctgcagcacgacaatattgtgaaatacaagggtgtctgttatagcgctggacgaagaaacctcaagttgattatggaatatttgccctatgggtccttgcgcgactacctgcaaaaacataaagaaaggatcgaccacatcaagctcctgcagtatacatctcagatttgtaagggaatggagtatcttggtactaagcgttatatccaccgggatttggctacacggaatatcctcgttgaaaatgagaatagagttaagatcggagacttcgggttgacaaaagtgctcccacaggataaggagtactataaagtcaaggaacccggcgagtctcccatcttttggtacgccccagagtctctgacagagtccaagttcagcgtcgctagcgacgtctggtcattcggtgtggtgctgtacgaattatttacctacattgagaaaagcaaatcgccacccgccgagttcatgcggatgataggcaacgacaagcaaggccagatgatagtgttccacctgattgagctcttaaagaataatggccgtctcccgcggcccgatggctgcccggatgagatctacatgataatgacggaatgttggaacaataatgtgaatcagcgccccagcttccgtgacctcgctctgcgcgtagaccagattagggataatatggccgggtag

SEQ ID NO: 15700 - DNA, 3399 bp, synthetic construct
  misc_feature 1..3399: note = Description of Artificial Sequence: Synthetic coding sequence
  source 1..3399: mol_type = other DNA
atggggatggcgtgcctgacaatgactgagatggaagggacctcgacctcctccatctaccagaatggagacatttctgggaatgcaaattctatgaaacaaatagaccccgtccttcaggtatacttgtaccattcgcttgggaagagcgaggctgactacctgacgtttccatctggagaatacgtcgctgaagaaatctgcatcgctgcaagtaaagcatgtggtataacgccagtttatcataacatgttcgcgttgatgtccgagacggagcggatttggtatccccccaaccatgtgttccacattgacgagtcgacacgtcacaacgtcctctaccggatacggttctacttcccccggtggtattgcagtggctccaatcgggcatatagacacggcattagccgcggagcagaagccccactgttagacgacttcgtgatgagctacctttttgcacagtggcggcacgactttgtgcatggatggatcaaggtacctgtcacacatgagacacaggaagagtgccttggcatggccgtgctcgatatgatgagaatcgccaaggagaacgatcagactcccttggccatctacaactcaatctcttataagacattcctaccaaagtgcatccgagctaagattcaagattaccatattctaacccggaaacgcatacgctatcggttccgtagatttattcagcagttctcccagtgtaaagcaactgcacgaaaccttaaacttaaatacttgatcaatctggaaacactccagtccgctttctatacagagaaatttgaagtgaaagaacctggaagtggaccatctggagaggagatcttcgccacaattatcatcacgggaaatggtggtatccagtggagcagaggaaagcataaggagtccgaaactctgaccgagcaggatctgcagttgtactgtgacttccctaacatcattgatgtgagtatcaagcaggccaatcaagagggctctaacgagtctcgggtcgtcacaatccacaagcaggacggaaagaatctggaaatagaattgagttcactgagagaggctctctcgttcgtgtcattaatagacggctactatagactgaccgccgacgcccatcactacctttgtaaggaggtggctcctcccgctgtcctggaaaatatccagagcaactgccacgggccgatctctatggactttgccatttcaaaactgaagaaggccggaaatcagaccggtctgtacgtcttacggtgttcaccaaaggactttaataagtatttcctgacatttgcagtggaaagagagaatgtgatagagtacaaacactgcctaatcacaaaaaatgaaaacgaggagtataatctctctgggacgaaaaagaatttcagttcgctgaaagatctgctcaactgctaccagatggaaaccgttaggtccgataacatcatctttcaatttaccaagtgttgccctccgaaacccaaagacaaatcaaatctgctggtatttagaactaatggcgtcagtgacgtgcccacaagccctacattgcagcggccgacgcacatgaatcaaatggtgttccacaaaatccggaacgaggatctcatattcaatgagtccctaggacaagggacttttactaagatattcaagggagttcggcgggaggtcggagactacgggcaactccatgagacagaggtgctgttaaaagtgttggacaaggcccacagaaactattccgagtcctttttcgaggccgcctcaatgatgtccaagttgtctcataaacacctcgtcctcaactatggagtgtgcgtgtgtggagatgagaatattcttgtgcaggagttcgttaagttcgggagtctggatacgtaccttaagaaaaataaaaactgtatcaatattctctggaagttagaggtggccaaacaactggcttgggctatgcacttcctcgaggaaaatacgttgatacatggcaacgtgtgtgctaaaaatattttgctgattcgtgaggaagacaggaaaacgggaaatcctccatttattaaactgtccgatcccggcatctcgattacagtgctgcctaaggacattctgcaagagagaatcccctgggttccccccgaatgcatcgaaaatccgaagaacctcaacctggcaaccgataagtggtcattcggcacaactctgtgggagatctgctcgggaggcgataaaccgctgagcgcattggattcccagcggaaattacagttctatgaggaccggcaccaattgcctgctccaaagtgggccgagctggcaaacctaattaataactgcatggactacgagcccgacttcagacccagtttccgggcaattatcagagacctgaattccctcttcacacctgattatgagttgctgacagagaacgacatgctgccgaatatgcgcattggcgccttgggtttcagcggagcttttgaggatagggatccaacacagttcgaagaacgacacctgaagtttctgcaacagctcgggaagggcaatttcggaagcgtcgagatgtgtagatatgaccccctgcaggataacacaggcgaagttgtggctgtcaagaagctccagcactctacagaagagcacctgcgggacttcgaaagggagatcgaaattcttaagtctcttcagcatgataacatagtgaaatataaaggagtctgctacagcgccggtagacggaatttaaaactgatcatggagtatctgccttacggctctcttcgggactacttacagaaacataaagagaggattgatcacatcaagttactccagtatacttctcagatttgtaaggggatggaatacttagggacaaaacgatatattcatcgggacctagccacgagaaacatcctagttgagaacgagaacagagtgaaaattggggactttggcctgacaaaagtactgcctcaggacaaagagtactataaagtgaaagagcccggcgagtctccaatattttggtatgctcctgaaagtctgacagagtcaaagttcagtgttgcttctgatgtgtggtcattcggggttgtcctatacgagctttttacatacatcgaaaagtccaagagcccccctgctgaattcatgagaatgatcgggaacgacaaacaggggcagatgattgtctttcacctcatagaactgctcaaaaacaatggccgactgccaaggcctgacggctgtcccgatgaaatctatatgatcatgaccgagtgctggaacaacaacgtcaaccaaaggcctagttttcgggatctggctctaagggtggatcagataagagacaacatggcaggctag

SEQ ID NO: 15701 - DNA, 2952 bp, synthetic construct
  misc_feature 1..2952: note = Description of Artificial Sequence: Synthetic coding sequence
  source 1..2952: mol_type = other DNA
atgagttacctcttcgcgcaatggagacatgacttcgttcatggctggataaaggtcccagtcacgcatgagactcaggaggaatgcctcggaatggcagtgcttgatatgatgcggattgctaaagaaaatgaccagacccctctggctatttataattcaatcagctataagacgttcctgccgaagtgtatccgggcaaagatccaagactaccatatcttaacgagaaagcggatcaggtatagatttagaagatttatccagcagttcagccagtgtaaggctacggccagaaatctcaaacttaagtacctgataaatctggaaacgctgcaatcggcattctacacggaaaagttcgaggtgaaagaacccggatcgggcccaagtggggaggagatctttgctactattatcattactggtaacggagggattcaatggtcccgggggaaacataaggagtcagaaacactaactgagcaggacctgcagttgtactgtgacttcccaaatataattgatgtaagtattaagcaggccaatcaggagggctccaacgaaagccgggtggtgacaatacacaagcaggacggtaagaatctggaaatagagctttcatctctaagagaggctctctcgtttgtgagcctgattgacggatactaccgattaacagctgatgctcaccactatctgtgtaaggaggtagccccacccgcggtgctcgaaaacatccaatctaattgtcatggtccgattagcatggattttgcaatttccaaactaaaaaaggcagggaaccagaccggcctgtacgtcctccgatgcagccccaaagacttcaataaatacttcctgacgttcgcagtggagagagagaacgtgatcgaatacaaacactgtcttattactaagaatgaaaacgaagaatacaacctatctggtaccaaaaaaaacttttcctctctgaaggatttactgaactgttatcaaatggagaccgttcgatccgataacatcatttttcagtttacgaagtgctgtcctcccaaaccaaaggataaatctaatctacttgtgtttcgcacaaacggggtgagtgacgtgccaactagtcccaccctgcaacgtccaacccacatgaatcagatggtgttccataagatccggaatgaggatctcatctttaacgagtccctaggccagggaacttttacaaagattttcaagggagttcgaagagaggtaggggactatggccagttgcacgaaaccgaagtacttctcaaggtgctggataaggcccaccggaactattctgagagcttcttcgaggcagccagcatgatgtcaaaactcagccacaagcacctcgtattgaactacggtgtatgcgtttgcggtgacgagaatatccttgtccaggagttcgtcaagttcggctcgcttgatacttatcttaaaaagaacaaaaactgcattaacattctgtggaagctggaagtcgctaagcagcttgcatgggccatgcatttcctcgaagagaacacgctgattcacggcaacgtctgcgccaagaatatacttttaatccgcgaagaagatcgtaagaccggcaaccctcccttcatcaagctcagtgatcccggcatcagtatcactgtcttgcctaaggacatcctccaggagcggatcccctgggtgccaccagagtgtattgaaaacccaaaaaaccttaacctggcaacagataaatggtcattcggcactacactgtgggagatttgctctggtggcgataaacccttaagcgctctcgacagtcaacggaagctgcagttttatgaggaccggcatcaactgccagcacctaagtgggctgaactggccaacctaatcaataactgcatggactacgagcccgatttcagaccttccttccgagcgattattagagatctaaacagtctattcacccctgactatgagttgctcacggagaatgacatgttgcccaatatgcgaatcggcgcacttgggttctcaggggccttcgaggacagagacccaacacagtttgaagaaaggcacctcaagtttcttcagcaactggggaaaggtaactttggctcagtagagatgtgccgctatgacccactccaggacaatactggggaggtggtggccgtgaagaaattacaacacagtacggaagagcatctccgtgattttgagcgagaaatagaaattctgaaaagtcttcaacacgacaatatcgtcaaatataagggagtctgttattccgctgggagaagaaatctcaagctgatcatggaatatctgccgtacggtagccttcgggattacttgcaaaaacacaaggagcgcatcgaccatattaagctgctccaatatacgagtcaaatttgcaagggaatggaatacctcggaactaaacgctacatccaccgagatctggccacacggaacattctggtcgagaacgaaaatagagtgaagatcggagattttgggctgaccaaagttctgccacaagataaggagtactataaggtcaaggagccaggggagtcgcctattttctggtacgcccctgagagtctgactgagagtaaattctccgtggcctcggatgtatggagcttcggcgtagtcttgtatgaactcttcacttatatagagaagagtaaatctcccccggctgagtttatgcggatgataggtaatgacaagcaggggcagatgattgtcttccatctcatcgagctcttgaaaaataacggcagactcccaaggccagatgggtgcccagacgaaatatacatgattatgaccgaatgctggaacaataacgtgaatcagcggccaagtttccgggatctggcgctgagggttgaccaaatcagagataatatggccggatag

SEQ ID NO: 15702 - DNA, 732 bp, synthetic construct
  misc_feature 1..732: note = Description of Artificial Sequence: Synthetic coding sequence
  source 1..732: mol_type = other DNA
atgacgggcattgccgccgcctcgtttttctcaaatacctgtcgattcgggggctgtggacttcactttcccactctcgccgacttaattgagcatatcgaggacaatcacattgacaccgatcccagagtgctggagaaacaagaactccagcaacctacatacgttgcactatcatacataaatcgcttcatgaccgatgccgcccggcgagaacaagagagtctcaagaaaaaaattcagcccaaactgtcactcactctctcgagctctgtttcaaggggtaacgtgtctacacccccccgtcatagtagtggttcactgactccgcccgtcacaccccctatcacaccgagctctagcttccgcagttccaccccaacaggaagcgagtatgatgaagaggaagttgactacgaggagtcagactctgatgagagctggacaacagaatcagctatcagttctgaggcaattctgtccagtatgtgtatgaacggaggcgaagaaaagccttttgcctgtccagttccgggctgcaaaaaaagatacaagaatgttaacggcatcaaatatcacgcaaagaacgggcatcgaacccagattcgcgtgcgcaaacctttcaagtgccgatgtgggaaaagctacaagactgcacaggggctccggcatcacacaatcaacttccatccccctgtcagtgccgaaatcatccggaaaatgcaacagtag

SEQ ID NO: 15703 - DNA, 1044 bp, synthetic construct
  misc_feature 1..1044: note = Description of Artificial Sequence: Synthetic coding sequence
  source 1..1044: mol_type = other DNA
atgtgcactaaaatggaacagcccttctaccatgacgattcttataccgcaacgggctacgggagagccccagggggtttgtctcttcacgattacaagctactcaaaccatcactcgctgttaacttggccgacccctaccgttcccttaaagcccccggcgcccgtggaccagggcccgaaggaggcggaggcgggtcatacttctccgggcaggggtctgacactggtgccagtctcaagttagcaagctccgagctggaacggcttatcgtgcccaactccaacggggtgattacgacgacccctacaccaccaggacagtacttctatcctcgtgggggcggaagcggggggggggccggaggagccggggggggtgttacagaagagcaggaaggcttcgccgacggcttcgttaaggcgctggatgatctccataagatgaatcatgtgacaccacctaatgtgtctcttggcgccactggcgggccgcccgccggccctggcggagtatatgcagggcccgaaccacctcccgtgtataccaaccttagctcttactcccccgcttctgcctcctccggaggagctggggccgccgtgggcaccggttcctcatatccgacaactacaatctcgtacctcccccatgctcctccattcgcgggagggcaccccgctcagcttgggcttgggcggggcgctagcaccttcaaagaagagccacaaacggtgcccgaggcccggtcgagggacgccaccccaccagtgagccccattaatatggaagaccaagagcggattaaagtggaacggaaacgcctgaggaacagactggccgccaccaaatgcagaaaacgtaagttagagcgcattgcccgcttggaagataaggtgaagacactaaaggccgagaatgcagggctgtcctcaaccgcgggcctcttgcgcgaacaggtagcccagctgaagcagaaagtgatgacacacgtgagcaatgggtgccagttgctcctgggtgtgaagggccatgccttttag

SEQ ID NO: 15704 - DNA, 996 bp, synthetic construct
  misc_feature 1..996: note = Description of Artificial Sequence: Synthetic coding sequence
  source 1..996: mol_type = other DNA
atgacagccaaaatggaaacaactttttacgacgatgctctcaacgctagcttcctgcctagcgaaagtggaccctacggctactccaatccgaaaattctgaagcagagtatgacactgaatcttgctgaccccgttgggtcactgaagcctcacctcagggctaaaaattctgacctgctcacctcaccggatgtgggcctgctcaaactggcaagccccgagctggaacggctgattattcagtcaagcaatggccacattacaactacccccactcccacgcaattcctgtgcccgaagaacgttaccgacgagcaggagggatttgccgagggctttgtgcgcgcgctagcagagttgcatagtcagaatacattgccatccgtaacaagcgccgcccaaccggtgaacggagccgggatggtagccccggccgtggcgagcgttgcgggggggtcagggagtggaggcttttctgcctcacttcacagtgagccccctgtgtatgcaaatctgagcaacttcaaccctggcgcgcttagctctgggggcggtgctcctagctacggggccgccggcctggctttcccagcccagcctcagcaacagcagcagccccctcatcacctaccccaacagatgcccgtgcagcacccccggcttcaagctctgaaggaggagccacagacagttccggaaatgccaggggaaacgcctccccttagtcccattgatatggaatcccaggagcggataaaagctgaacgcaagaggatgcgaaacagaattgccgcctcgaaatgccggaaaagaaaactggagcggattgccaggcttgaggagaaggtgaagactctcaaggctcaaaacagcgagcttgcttcaacagcaaatatgctgcgcgagcaggtcgcccagctgaaacagaaagtgatgaatcacgtgaattctggctgccagcttatgctgacacagcaattgcagacattctag

SEQ ID NO: 15705 - DNA, 831 bp, synthetic construct
  misc_feature 1..831: note = Description of Artificial Sequence: Synthetic coding sequence
  source 1..831: mol_type = other DNA
atgcgagccccccatctccacctctccgccgcttcaggggccagggcactggctaaactcttaccgctgttgatggcccagctgtgggccgctgaggcagccctcttgccccagaacgacaccagattagaccccgaagcatatgggagcccctgcgcgcggggaagtcagccctggcaggtgagtctattcaatgggctgagttttcattgcgccggcgtgctagttgatcagagctgggtacttactgcagcccactgcgggaataagccactatgggccagagtgggcgacgaccacctattgctgttgcagggcgagcagctccggaggactacgagaagcgtggtccatcccaagtatcatcaaggatccgggccaatcctgccaaggcggaccgacgagcacgatctgatgctcctgaaactcgcccggcctgtggtgttagggccccgtgtcagggctttgcagctcccttatcgctgcgcgcagccgggcgatcagtgtcaggttgccggctggggcaccaccgccgcccgcagggttaaatataataaggggctcacctgttctagtatcacaattctctctccaaaagagtgcgaagtgttttatccaggcgtggtgactaacaatatgatatgcgccggcctcgatcgtggacaggatccgtgtcagagtgatagcggcggcccccttgtgtgtgatgaaaccctgcaggggatactgtcctggggtgtgtacccttgtggatcagctcagcaccctgcggtgtacacccagatctgcaagtacatgtcctggatcaacaaggtcatcaggtccaactag

SEQ ID NO: 15706 - DNA, 831 bp, synthetic construct
  misc_feature 1..831: note = Description of Artificial Sequence: Synthetic coding sequence
  source 1..831: mol_type = other DNA
atgcgggcgcctcaccttcatctgagcgcagcctctggtgcccgggcactggcgaaactgctccccctgctgatggcacagctctgggctgccgaggcggctttactgccacagaatgataccagactggaccccgaagcatatggctctccttgcgctaggggctcccagccttggcaggtgagcctctttaatggtctgtccttccactgtgccggagtgctggtagatcagtcctgggtcctgaccgccgcccattgtggcaacaaacctctctgggcgcgggtaggcgatgaccacctacttcttctacagggagagcagctgaggaggaccaccaggagtgtagtacaccccaaatatcaccagggatctggtccaattctgccccggagaacagacgagcatgacctcatgttgctgaagttagcgaggcccgtggtgcttggcccccgggtgagagcgcttcaacttccttataggtgcgcccagcctggtgaccaatgtcaggtggctggatggggtaccacagcggctagacgcgttaagtataataagggcctgacttgtagctccatcacaatactctcaccaaaagaatgcgaggtcttttacccaggagttgtcacaaataatatgatttgcgccggactggatcgaggacaggacccatgtcagtcagattccggcggcccgttggtttgcgacgagacgctccaggggatcttgtcttggggggtttacccatgcgggtcagcccagcaccctgcagtgtacactcagatatgtaaatacatgtcatggattaataaggtgatacgatcaaactag

SEQ ID NO: 15707 - DNA, 831 bp, synthetic construct
  misc_feature 1..831: note = Description of Artificial Sequence: Synthetic coding sequence
  source 1..831: mol_type = other DNA
atgagggccccacaccttcacctgtcggccgctagcggagcacgcgcactggctaaactgctccctctattgatggcccagctgtgggccgccgaggcagcgctgctcccacagaatgacacacggcttgacccagaagcatacggcagcccatgtgccaggggctcccagccttggcaggtgtccttgttcaatgggctcagtttccactgcgctggagttctcgtcgaccaatcatgggtgctcacggccgcacactgcggcaacaaaccgctttgggccagagtgggcgacgaccatctgttgttgttacagggggagcagctgcgtcgcacaacccgctcagttgtgcaccctaagtatcaccagggatccgggccgatccttcctagacgcacagatgaacatgatcttatgctgctgaagcttgcccgccctgtagtcctggggcctcgcgtccgggcattgcagctgccgtatcgttgcgcacaacccggagaccagtgtcaggtcgccgggtgggggaccaccgcagcaagaagagtgaagtacaacaaggggctgacctgtagctcaattacaattttgagtcctaaagagtgcgaggttttttaccctggtgtcgtcactaataatatgatatgtgccggattagataggggccaagatccttgccaatccgatagtggaggacccctggtttgcgatgaaacattgcagggtatcttaagctggggcgtgtacccttgtggcagcgcccagcaccctgcggtttatacgcaaatctgtaaatatatgagttggatcaacaaagttatccgatcaaattag

SEQ ID NO: 15708 - DNA, 657 bp, synthetic construct
  misc_feature 1..657: note = Description of Artificial Sequence: Synthetic coding sequence
  source 1..657: mol_type = other DNA
atgtgggtgcccgtggtcttcctcacattatcagtcacatggatcggtgccgcccctttaatcctttccaggatcgtcggaggatgggaatgcgaaaagcacagccaaccatggcaggtcttagtggcaagcagggggcgggcggtgtgtggcggagttctggttcacccacagtgggtactgacagctgctcattgtatccgtaaaccaggcgatgactcgagccatgacctgatgcttttgcgtttgtctgaacccgctgaactgactgatgccgttaaagttatggacctccccacgcaggagccggccctcggcacaacttgttatgcgtctgggtggggctcaatcgagccagaggaattcctcacacccaagaagctgcagtgcgtggatttgcatgtgatatctaacgatgtgtgtgcccaggtacaccctcaaaaagtgactaagtttatgttgtgtgctgggaggtggactggaggcaagtctacctgctccggagattcaggaggaccccttgtatgtaatggcgttctacagggaattacgagttggggctccgagccatgtgccttgccggagaggccttccctctacactaaggtcgttcattatcgcaaatggatcaaggatacaattgtggcgaacccctag

SEQ ID NO: 15709 - DNA, 1590 bp, synthetic construct
  misc_feature 1..1590: note = Description of Artificial Sequence: Synthetic coding sequence
  source 1..1590: mol_type = other DNA
atgagtactaacgagaacgctaataccccagccgcacgcctccacagattcaagaacaaaggcaaagactcaactgagatgcggagacggaggattgaggtgaacgtggagctccgcaaagctaaaaaggacgaccaaatgcttaagaggcgaaacgtcagctcctttccggacgacgcaactagtccgcttcaggaaaataggaacaaccagggcaccgtgaattggagcgtggacgatatcgtcaagggtataaattcatcgaatgttgaaaatcagcttcaagccacccaggctgctaggaaactgttgtcacgggagaagcagccacctatcgacaatataatcagggccggattgattcctaagtttgtctcattcctgggcagaacagactgctcccccatacagttcgagagtgcctgggcactgactaatatcgcttcgggcacctccgaacagactaaggcagtagtggatggcggtgcaatccccgcttttatctcactgttggcatcaccacacgctcacattagcgagcaggccgtgtgggcgctgggcaacatcgccggagatggaagcgtgtttcgtgatctcgtgattaaatacggtgctgtggaccccctcctcgctttactggcggtgccagatatgagctccctggcatgcgggtatcttagaaatcttacctggaccctgagcaacctatgccggaacaagaatcccgcaccacccatcgatgcggtggaacagatactcccaacccttgttcgcctgctccaccacgatgaccctgaagtcctcgcggatacctgttgggcgataagttatctgactgacggaccaaacgagcggattggtatggttgtgaagaccggtgtcgtgccccagcttgtcaaactgctcggggcctcggaactcccaatcgtcacccctgccctacgagccattggaaacatcgttacgggcacagacgagcaaacacaggtagtgatcgatgccggggccttagctgtctttccctccctgttgacaaaccccaaaaccaacatccaaaaggaggcaacatggaccatgtcaaatatcacagctgggcggcaggaccaaatccagcaggtcgttaatcacggcctggttcctttcctggtatcagttctgtctaaggccgactttaaaactcagaaagaagctgtttgggctgtcacaaactacacctctggggggacagtggaacagattgtatacctggtccactgtggcatcattgaacccctcatgaacctgctgaccgccaaagatacaaaaattatacttgtcattctggatgcgatatccaatatcttccaggcagctgagaagctgggagagactgagaagttgagcatcatgattgaagagtgcgggggactggataagatagaagctctccagaaccacgagaacgagtccgtttataaagctagtctgtcactcattgagaagtacttctctgtggaagaggaagaagatcagaacgtggtgcctgaaaccacgagtgagggttacacattccaagtacaggatggggcccctgggacgttcaacttctag

SEQ ID NO: 15710 - DNA, 1590 bp, synthetic construct
  misc_feature 1..1590: note = Description of Artificial Sequence: Synthetic coding sequence
  source 1..1590: mol_type = other DNA
atgtccaccaatgaaaacgctaacacccctgccgccaggctccacagattcaaaaacaaaggcaaggacagtaccgaaatgcggagaaggaggatcgaagtgaatgtagaactgcgaaaagccaagaaggacgatcagatgctcaagcgtagaaacgtatcctcattcccagatgacgccacctccccccttcaggagaataggaataaccagggtaccgtgaattggagtgtagacgacatcgtgaaaggaattaacagctccaatgtcgaaaatcagctgcaggccacacaggctgcacgcaagctactgtcaagagagaaacagccgccaatcgataatatcatccgtgcaggcctcatcccaaagttcgtgagcttcctcggacggacagactgctcacctatccagtttgagtcagcttgggctctcaccaacattgccagcgggacatccgaacagaccaaagcggtggtggatggaggcgcaatccctgctttcatctctctactggcaagtcctcacgcccatatctccgaacaggcggtgtgggccctgggcaacatagcgggtgacggcagtgtctttcgcgatctggttatcaagtacggcgcagtggatcctctgctcgcactccttgccgtgcctgacatgagctccctcgcttgtggctacttaaggaatctaacatggaccttgagcaacctttgtaggaataaaaacccagcgccacccatcgatgcagtcgagcaaatcctccctaccctggtccggctgctgcatcacgatgaccccgaagtgttagcggacacttgttgggctattagctatttaacagacggccctaacgaaaggattggcatggttgtcaagacaggggtggttccccagctggttaaactgctcggtgcctctgagctcccaatcgtgacccctgctttgagagctatcggcaatattgtgactggcacagacgaacagactcaggtggttatcgacgctggagccctggccgtgtttccctccctgcttaccaatccaaagaccaacatccagaaggaggctacctggaccatgagcaacatcactgccggtcggcaagaccagattcagcaggtcgttaatcacggactagtcccattccttgtatcggtgctgagcaaggccgatttcaaaacccagaaggaagcagtatgggctgtgacaaactatacctctggcggtactgtggaacaaatagtctacctggtccattgcgggataatcgaacctctgatgaatttgttaacagccaaggatactaagataattcttgtgatcctcgatgcgatctcgaacatcttccaggcggctgagaagctgggagagacagaaaaattgtcaattatgattgaggaatgtggcggcctggacaaaatcgaagcgctgcagaaccacgagaatgagagcgtctataaagcatctctgtccctcatcgagaaatacttttcagtggaggaggaggaggatcagaacgtggttcctgagactacctccgaaggatatacctttcaggtccaggatggggctccaggaacctttaatttttag

SEQ ID NO: 15711 - DNA, 1968 bp, synthetic construct
  misc_feature 1..1968: note = Description of Artificial Sequence: Synthetic coding sequence
  source 1..1968: mol_type = other DNA
atgcccttaaagtggaagactagttctcctgccatctggaaattccctgtccctgtattaaagacatctcgttctacccccctttccccagcatacatctcccttgtcgaagaagaggaccagcatatgaagctgagtctcgggggcagtgagatgggcctgtcttcccacctgcaaagctccaaggcagggcccaccaggatttttacgtcaaatacacattccagcgttgtgctacaaggttttgaccagttgcgcctcgaagggctcctctgcgacgtgacgttgatgccaggtgataccgacgacgcattccctgtgcatagggtcatgatggcttctgcttccgactatttcaaggccatgtttactggaggcatgaaggagcaggatctaatgtgcatcaagcttcacggcgtatctaaggtgggcttaaggaaaatcatcgacttcatttatacagccaaacttagcctcaatatggacaatctgcaggacactctcgaggctgcaagtttcctacaaatccttcccgtgctggacttctgtaaagttttcctaatctctggagtcactcttgataattgcgtcgaggtgggtaggatagctaacacatataacctgacagaggtggacaagtatgtaaactctttcgtactgaagaacttcccagcattgctcagtaccggcgaattcctgaagcttcccttcgagcgcctcgccttcgtcctgagctctaactctcttaaacattgtacggagctggaactgtttaaggctacctgtagatggctgaggctcgaagagccccgtatggactttgccgcaaagctgatgaagaatattcggtttcctctgatgactcctcaggagctaattaattatgttcagacagtggacttcatgagaacggataacacctgtgtaaacctgctgctagaagcttcgaactaccagatgatgccttatatgcaacctgtgatgcagagcgatcggaccgcaattcggtctgacacaacgcatctcgtaactctgggcggggtgctgagacagcagctggttgtttctaaagagcttaggatgtatgacgaaaaagctcacgagtggaagtccctcgctccgatggacgcccctcgttatcaacacgggatcgcagttattggcaattttctgtatgttgttgggggtcagtccaactacgatacaaagggcaaaacagcagtggacactgtattccggtttgatccgcgctacaataagtggatgcaggtggcttcccttaacgagaagaggaccttctttcacctgagtgcattaaagggttatctgtacgccgttgggggcaggaacgctgcaggggagctccccacagtggaatgctacaacccacggactaacgaatggacatatgtcgccaaaatgagcgaaccgcattatgggcatgccggcactgtttatgggggcgttatgtatatttctggaggcattacgcatgacacattccagaaagaactgatgtgctttgatcccgacacagataagtggatacagaaggccccaatgaccactgtgcgcgggctgcactgtatgtgcacggtgggggaacggctctatgtgatcggcggcaatcacttccgggggacgtccgattacgacgatgtgctgtcttgcgagtactattcccctatactggatcagtggaccccgatcgcagctatgttaagaggccagtctgatgtcggggttgcagtttttgagaacaagatatacgtggtgggaggctatagctggaataaccgttgcatggtagaaattgtgcagaaatatgaccccgataaggacgagtggcataaggtgttcgatctgcccgagtcactgggcggaatacgagcatgcaccttgacggtgtttccccccgaggaaactacgccctcgccttcccgggagtcccccctatctgccccctag

SEQ ID NO: 15712 - DNA, 1815 bp, synthetic construct
  misc_feature 1..1815: note = Description of Artificial Sequence: Synthetic coding sequence
  source 1..1815: mol_type = other DNA
atgggactgtcctctcatcttcagtcatctaaagccggtcccaccagaatcttcacttccaatactcactctagtgtcgttctgcagggatttgaccagctccgactcgaagggcttctgtgtgatgtcactctcatgcccggtgacactgatgatgctttccccgtgcaccgggtgatgatggcgagtgctagcgactacttcaaggccatgtttaccggcggaatgaaggaacaggatcttatgtgcataaagcttcatggtgtcagcaaggtcggtctcaggaagattatcgacttcatttacaccgccaaactcagccttaatatggacaacttgcaggacaccctcgaggctgcaagtttcttgcaaatactcccagtgctcgacttctgcaaggtgttcctcattagtggtgtcactttggataactgcgtggaggttggtcggattgctaacacctataacctaacagaagtggataagtacgtgaatagcttcgtgttgaagaattttcccgccctcttatcaactggagagtttctgaaattgcccttcgagaggctagccttcgtgttatcctctaatagcctaaaacattgcactgaattggaactttttaaagctacttgtcgatggctgaggctggaggagcctcgtatggacttcgccgctaaactcatgaaaaacatccgcttccccctaatgacaccccaagaactgatcaactacgtacagaccgtggactttatgcgcactgacaatacgtgtgtgaacctgctcctcgaggcatccaactaccagatgatgccctacatgcagccggtcatgcagtccgataggacggccatccggtcagatactactcacttagtgacactggggggtgtcctgcgccagcagctagtggtttccaaagagctccgaatgtacgacgaaaaagcacacgaatggaaatccctcgctcccatggatgcccctcggtaccagcacggcatagcagtgatcgggaactttctctatgtggtggggggccaatctaattatgacaccaaggggaagaccgcggtagacaccgtgtttcggtttgacccccggtacaacaagtggatgcaggtcgccagccttaatgagaagagaactttcttccatctatccgccttgaagggttacctgtacgctgtgggaggtcgaaatgccgcaggggagcttccgacggtggagtgctataaccctcgcaccaatgagtggacttatgttgccaaaatgtctgaaccccattacggacatgctggtactgtctacggcggcgttatgtacatctccggcggaatcactcacgacacgtttcagaaggagttaatgtgttttgatcccgacacggataaatggattcaaaaagctcctatgacaaccgtgcgtgggctccattgtatgtgtaccgttggggaaagactgtacgtcattggcggaaatcatttccgtggcaccagtgactatgatgatgtcctgagttgtgagtattattcccccattctggaccagtggacaccaattgccgccatgctcagggggcagtcagatgtcggtgttgcggtttttgagaacaagatttacgtggttggtggctattcgtggaataaccggtgcatggtggaaatcgtgcaaaaatacgatcccgataaagacgaatggcataaagtattcgacttaccggaaagcttaggaggcatacgcgcatgcactcttaccgtctttccaccagaggagacaacaccaagccctagcagggaaagccccctatctgccccttag

SEQ ID NO: 15713 - DNA, 1815 bp, synthetic construct
  misc_feature 1..1815: note = Description of Artificial Sequence: Synthetic coding sequence
  source 1..1815: mol_type = other DNA
atgggactgtccagccatcttcaatctagcaaggccggccccacgcgcattttcacatcgaatacccatagctccgtagtattgcaaggattcgatcagctgaggctggaggggctgctttgtgatgttaccttgatgcccggcgatactgatgacgctttccctgtccaccgtgtgatgatggccagcgccagcgactattttaaagccatgttcacgggcggtatgaaggaacaggatctgatgtgcatcaagctccatggggtgagcaaagtgggactgagaaagatcatcgatttcatatacaccgccaaactatctctcaacatggacaacctccaggatacactcgaggccgccagctttctccaaattctccctgttcttgatttttgcaaggtgtttttaatctctggagttactctggacaactgcgtggaggtggggcgaatcgccaatacctataacttgactgaagttgataaatatgtgaattccttcgttctgaagaattttcccgccttgctgtcgaccggcgaattcttgaaactcccatttgagaggcttgcttttgtgctgagcagcaatagcctgaagcactgtacggaactggaacttttcaaagcgacctgccgctggctcagactcgaggagcctcgaatggacttcgccgccaagcttatgaaaaacataagattccccctcatgacaccccaggaacttatcaactacgttcaaacagtggacttcatgaggacggataacacctgtgtcaacctccttttggaggcgagtaactaccaaatgatgccttatatgcaacccgtcatgcagagcgaccggacagctatcagaagtgacacaacccatttggtgaccttaggcggggtgctgaggcagcagctggtagtctctaaggagctgaggatgtatgacgagaaggcacacgaatggaagtcactggcccccatggacgcacctaggtaccagcacgggatcgccgttattggaaacttcctctatgtagtaggagggcagtcaaactacgacacaaaaggtaagaccgccgtggatacagtatttcgattcgacccgcgatataataaatggatgcaagtggcgagcctaaacgagaagcggaccttctttcaccttagcgctctaaaaggctacttgtacgctgtagggggcaggaacgctgccggggaactgcctaccgttgaatgctataacccacggactaacgagtggacttacgtggccaaaatgtccgagccccattatggccacgcaggcacagtgtatgggggcgtgatgtacatatcgggcggaatcacacatgatacctttcagaaggaactgatgtgcttcgaccccgacactgataagtggattcagaaagcacccatgacgaccgtgaggggactgcactgtatgtgtactgtgggagaacggctgtatgttatagggggaaatcacttccgcgggacgtccgactatgatgatgtacttagctgcgaatactatagtccaatcctcgaccaatggacgcctattgccgctatgctgcggggccaatctgacgtcggagtcgctgtgttcgagaataagatttacgttgttggtgggtactcctggaacaatcggtgtatggtggagatcgtgcaaaaatatgaccctgacaaagatgagtggcacaaggtgttcgatcttcctgagagcctgggggggattagagcatgcacacttaccgtcttcccccctgaagagactacccccagccccagtcgcgagtctcccctctccgctccgtag

SEQ ID NO: 15714 - DNA, 1815 bp, synthetic construct
  misc_feature 1..1815: note = Description of Artificial Sequence: Synthetic coding sequence
  source 1..1815: mol_type = other DNA
atgggactcagctcccaccttcaaagctccaaggcaggaccaactcggatctttacttccaacacacactcctctgtggtcctccaaggattcgatcaattgcggctcgaaggtctcctgtgtgacgtcacactaatgcccggtgacactgatgatgcctttcccgtgcatagagttatgatggctagcgcgagtgactatttcaaggcaatgttcacgggcgggatgaaagagcaggatctgatgtgtattaaactgcacggggtttccaaggtgggacttcgcaagatcatcgattttatttataccgcaaaactgtccctgaacatggataacttgcaggatactttggaagctgcctcattcctgcaaattcttcccgtgctggacttctgtaaagtgtttcttatatccggtgtgacactggataactgcgtggaagtgggcagaattgccaatacttacaacctgaccgaagtggacaaatatgttaactccttcgtgttgaaaaattttccggctttgctctccaccggggagtttcttaaattacccttcgaacggctagcatttgtgctctctagtaattccttgaaacactgtactgagcttgaacttttcaaagccacttgccggtggctacggttagaagagccccggatggattttgccgctaaactgatgaaaaatatccgttttccccttatgactccccaggagctgattaattacgtacaaaccgtggacttcatgaggactgataatacttgcgttaacttgctactggaagccagcaactaccagatgatgccttatatgcagcccgtcatgcagtccgatcgaaccgccatccggagtgataccacgcatctggtcaccctcggtggcgtactgcgtcagcaattagtcgtgagtaaggagctacgtatgtacgatgagaaagcacatgagtggaagagcctcgcccccatggatgctccaagatatcagcacggcatcgcagtgattgggaactttctgtacgtcgtgggtggccagtctaattacgataccaaggggaagaccgccgtggacaccgttttcagatttgatcccagatacaacaagtggatgcaggttgcttccctcaacgaaaaaagaacctttttccacctctctgcgttaaaaggttatctttacgcggtgggcgggagaaacgccgcaggggagctgcccaccgtggagtgctacaatcctcggacaaacgagtggacttacgttgccaaaatgtctgagccacattacggccacgctggaaccgtctacggaggcgtgatgtacatctccggcggcattactcatgacaccttccagaaggaactgatgtgtttcgacccagacacagataagtggatccaaaaggcccccatgacaaccgtcagagggttgcattgtatgtgcacagtgggagagcgtctctacgtcattggaggcaatcactttcgtgggactagcgactatgacgacgtcctttcttgtgagtactattcacctatactggaccagtggacacctatcgcagccatgctgcgcggacagtcagatgttggagtcgccgtctttgagaataagatttatgttgtgggaggctactcgtggaacaaccgctgcatggtcgaaatcgtgcagaagtacgatcctgataaggacgaatggcacaaagtcttcgatctccctgagagtctgggcggaattagggcctgcacgctgacagttttcccacccgaggagacaacccctagtccgtctagggagtctccgctcagtgccccttag

SEQ ID NO: 15715 - DNA, 1815 bp, synthetic construct
  misc_feature 1..1815: note = Description of Artificial Sequence: Synthetic coding sequence
  source 1..1815: mol_type = other DNA
atggggctgtcatcacatctgcagagctccaaagccggccccacccgcatctttacgagcaacacacatagttccgttgtgctccaaggatttgaccagctgcgactcgagggtttgttatgtgatgtgacactgatgcccggtgacactgacgacgccttcccagtacatagggtcatgatggcatccgcctccgattattttaaggcaatgttcaccgggggcatgaaggagcaggatctgatgtgtataaaactccacggcgtgagcaaggtgggactcagaaagattattgattttatttacaccgcaaagctgtcactcaacatggataacctgcaggataccttggaggccgcttctttcctacagatactgcccgtgcttgacttttgcaaggtctttctcatctctggggtgaccctggacaactgtgtggaggttggtcgcatagctaacacatataaccttactgaggtggataaatacgtcaacagtttcgttctcaagaacttccccgccttactctccacaggcgaattcctcaaactgccgtttgagagactcgccttcgtattgtcatcaaattccctcaaacattgcacggagctggagctgtttaaggctacctgtaggtggctgagacttgaagagcctcgcatggacttcgcagcaaaactcatgaaaaatattcgcttccccctgatgacgccccaggagctgatcaactatgtgcagacagtcgactttatgaggacagacaacacttgcgtcaatcttctgcttgaggcatccaactaccagatgatgccttatatgcagcccgtgatgcagagcgatagaacagccattcgctctgataccacacacctggtgacattgggtggtgtcttgaggcaacagctcgttgtgtcaaaagaattaaggatgtacgacgaaaaagctcatgagtggaagagtttggctccaatggacgcccccaggtaccagcacggaatcgccgtgatcgggaatttcctatacgtggttggaggccagagcaattatgacaccaaaggaaaaacagccgtagatacagtgttcaggtttgacccacgctataacaagtggatgcaggtggcatccctgaatgagaagcgcactttttttcacctgagtgcactgaaaggatacttgtacgccgtaggaggccgcaatgcggccggcgagctcccaactgtggaatgttataacccgcgaacaaacgagtggacctacgtggcaaagatgagcgagccgcattacggtcatgccggaaccgtctatggcggagtgatgtacatcagcggaggaataacgcatgacacctttcaaaaagaactcatgtgcttcgatccagatacagacaagtggatccagaaggcgccaatgactacggtgcgcgggctgcattgcatgtgtaccgtaggagagaggctctacgtaataggcggaaatcactttagaggtacctccgactatgatgatgtgctgtcctgtgagtactacagtccaatcctggatcagtggacccccatcgccgcaatgctgcgtgggcaatctgacgtgggggtggccgtctttgagaataaaatctatgttgtgggcggctactcttggaataaccgctgcatggtggagatagtgcagaaatacgacccagacaaggacgaatggcataaagtattcgacttgcctgagtctctgggcggcatccgcgcatgtacactgaccgtcttccctccagaggaaactaccccatctcctagtagagagtcccccctctcagcaccttag

SEQ ID NO: 15716 - DNA, 117 bp, synthetic construct
  misc_feature 1..117: note = Description of Artificial Sequence: Synthetic coding sequence
  source 1..117: mol_type = other DNA
atgggactctcaagtcatctccaatctagcaaggctggccccactaggatcttcaccagcaacacccacagcagtgtggtgttgcaggggttcgatcagttaaggcttgaagggtag

SEQ ID NO: 15717 - DNA, 1815 bp, synthetic construct
  misc_feature 1..1815: note = Description of Artificial Sequence: Synthetic coding sequence
  source 1..1815: mol_type = other DNA
atgggcctgtcatcccatcttcagagctctaaagccggacccacccggatcttcacatctaatacacacagctcagtagtgttacagggctttgatcagctgcggctggaaggactcttgtgcgatgtgacactgatgccaggagacactgatgatgctttccccgttcaccgtgtcatgatggcttcagcatccgactacttcaaggccatgttcaccgggggcatgaaggaacaggacctgatgtgcattaaactgcacggggttagcaaagttggacttcgtaagattatcgacttcatctacactgccaagttatccctcaacatggataatctgcaggatacacttgaggcggcctctttccttcagatcttacctgtgctggacttttgtaaagtatttttgatcagcggcgttacactcgataactgcgtagaagtgggaagaatcgcgaatacctacaaccttactgaggtggataaatacgtaaactcctttgtgctgaaaaatttccccgcacttctgtccaccggagagtttctaaagttaccatttgaaaggctggctttcgtgctgtctagcaattcactcaagcattgcactgagctcgagctgtttaaagctacatgcagatggttgagactggaagaaccaagaatggacttcgctgccaaactgatgaaaaacattaggttcccgctgatgacgccacaggaactcatcaactacgtgcagacagtggatttcatgcggacagataacacctgcgttaatctgctgcttgaggccagcaattatcaaatgatgccctatatgcaacctgtgatgcaatctgacaggacagccattaggagcgacaccacgcatctcgtcaccctcggaggggtgctgagacagcagctggtcgttagcaaagagcttcgtatgtacgacgagaaggcccacgagtggaaaagcctggcgccaatggacgcgccacgatatcagcatgggattgccgttatcggaaacttcctgtatgtggtcggtggccaatcaaactacgacactaaaggcaaaacagccgtggatacggtgttccggtttgaccctcgctacaacaagtggatgcaagtcgccagtctgaacgagaagagaacattttttcacctttctgcactgaaagggtacctctacgccgtggggggccgcaatgctgccggcgaactacccacagtcgaatgttataatcccaggactaacgagtggacctatgtggcaaaaatgtccgaaccacactacggtcacgcggggaccgtctatggcggggtgatgtatatctccggaggaatcacgcacgatacgttccagaaggaactgatgtgtttcgatcccgacacagataaatggattcagaaagcaccaatgaccacggtgcgaggactgcactgtatgtgtactgtcggagagaggttgtatgttatcggcgggaaccactttcgcgggacttcagactacgacgacgtgctgagctgcgagtactatagcccaatccttgaccagtggactcccattgccgcgatgctacgagggcagagtgacgttggagtcgcagtgttcgagaataaaatctatgtggtcgggggctattcttggaacaatcggtgtatggtagaaatcgtgcagaagtacgacccagacaaagacgagtggcacaaggtcttcgatctaccggaatctctgggaggcatcagagcttgcaccttaacggtgtttccacccgaggagacaacaccctcaccgagcagggaaagtcccctttctgccccctag

SEQ ID NO: 15718 - DNA, 1977 bp, synthetic construct
  misc_feature 1..1977: note = Description of Artificial Sequence: Synthetic coding sequence
  source 1..1977: mol_type = other DNA
atgatgagagtgcaaacacttagagagaagtgggcgtattggcgcaggcggcagctgtccttgaaacaggccgacttcaaggacatctttaaaaagagcacctcaggttctctggttgaggaggaggaccaacatatgaaactgtctctggggggcagcgagatggggttgtcatctcacctccagagctctaaggccggcccaacccgcatctttacttcgaacacccatagcagcgtagtgctacagggcttcgatcagctgagactggaaggcctcctgtgcgacgtgaccttaatgcctggcgatacagatgatgcttttcccgtccatcgggtgatgatggcttctgcctcagattattttaaagctatgttcaccggggggatgaaggagcaggatctgatgtgcatcaagctccatggtgtcagcaaggtggggctgcgtaagatcatagactttatctatacagcgaaactgagcttgaacatggacaacctacaagacactctcgaggcggcatcctttctgcagatcctacctgtgctcgatttttgcaaggtcttcttgatcagcggtgtgacgcttgacaattgcgtcgaggtaggacgcattgccaatacttataatctgaccgaagttgataagtatgttaactcttttgtcctgaagaatttcccggcactactctctactggagaattcctgaagctaccatttgagagactggcctttgtgctctcttcgaactccctaaagcattgtaccgagttggagctcttcaaagctacgtgtcgctggctgcgattggaggagccgaggatggattttgcagccaagctaatgaagaacattcggtttccgctcatgacgccacaagaactgattaattatgttcaaactgtggatttcatgaggactgataacacatgcgtcaacttactgctggaggcctcaaactaccagatgatgccatatatgcagccagtgatgcagtcggatcgcacagctatccgaagtgacacaacacatctggttacccttggcggagtgctcagacagcagctggttgtctctaaagagttacgaatgtatgacgagaaggcccacgagtggaaatcactggcacctatggatgcaccccggtaccaacacggaatcgccgttatcggcaatttcttgtacgttgtcggaggtcagagcaattacgatacgaaaggaaagaccgctgtggacactgtgttccgctttgaccctagatacaacaaatggatgcaagtggcctcccttaatgagaaaagaactttctttcacctcagtgccttgaaaggctatctttacgccgtgggaggaagaaacgccgctggggagctacctactgtggaatgttataatccacgaacaaacgaatggacctacgtggccaagatgagcgagcctcattacggccacgcggggacagtgtacggtggagtgatgtatatctctggaggtatcacgcacgacacgtttcaaaaagaattaatgtgttttgacccggatacagacaagtggattcagaaggcccccatgacgaccgtacggggtctgcactgcatgtgtactgtgggagagcgcctgtacgtgattggtggaaaccactttagagggacttccgattacgatgacgtgttgtcctgcgagtactactcaccaattttggatcagtggactcctatagcagccatgctgcgcgggcagtctgacgtcggggtggccgtgtttgagaataagatctacgtcgtcggagggtactcctggaataacaggtgtatggtggagatcgtccaaaaatacgacccggacaaagacgaatggcacaaggtgttcgatctcccggagagcttgggagggattagagcttgtaccctgacagttttcccccccgaagagactactccctctcccagccgggagtcacccttgtccgcaccttag

SEQ ID NO: 15719 - DNA, 1920 bp, synthetic construct
  misc_feature 1..1920: note = Description of Artificial Sequence: Synthetic coding sequence
  source 1..1920: mol_type = other DNA
atggaccacctgcaccggggtgagttggtagctgctattctgagaaatcgatccctcgtcgaagaagaagaccagcacatgaagctctctctaggagggagtgagatgggactgtctagtcacctgcagtcttccaaagcaggccccacacggatattcacttctaatacccacagttccgtcgtgttgcaaggcttcgatcagctccggctcgaaggactcctctgcgatgtcacactcatgccaggtgataccgacgatgccttccccgtacatagggtgatgatggctagcgcctcagactacttcaaagccatgttcaccggcggaatgaaagaacaggatcttatgtgcattaaactccacggggtgagcaaagtcgggctgcgcaaaatcatcgattttatatacaccgcgaagctgagccttaacatggacaaccttcaagacacactggaggcggcaagttttctccagatccttcctgtgttagatttttgcaaagttttcctgatctctggagttaccttagacaactgcgtggaggtgggccggatagcaaacacttacaatcttactgaagttgataagtacgtcaactcattcgtgttaaaaaattttcccgccctactgtcaacaggggagttcctgaagctgccttttgaacggcttgcatttgtgttgagctccaacagcctgaagcactgtaccgagctggagctctttaaagccacctgtagatggctccgcttggaagaaccccggatggattttgctgccaagctgatgaaaaatattcggtttccactgatgactcctcaagagctgatcaactacgtccaaacagtggacttcatgcgcacagataatacctgtgtaaaccttttactggaagccagcaactaccagatgatgccctacatgcagccggtgatgcagtcagacaggaccgccattcgaagcgacactacacatttggttacactggggggcgttcttcggcagcagctggtggtttccaaagagcttagaatgtatgacgaaaaggcccacgaatggaagagtctggccccaatggacgccccgagatatcaacacggcatcgccgtgataggcaactttctctatgtcgtcgggggtcagagcaattacgatactaaaggcaagacagccgttgacactgtattcaggttcgacccacgatacaacaagtggatgcaggtcgcttccttgaacgagaaacgaactttttttcacttaagcgctttaaagggctatctgtacgctgtcggcggcagaaacgcagcgggcgagcttcccactgtagagtgctacaacccccggacgaacgaatggacctacgtggctaaaatgagcgagcctcactacggacatgccggtaccgtgtacgggggggtcatgtacataagtgggggaattacccatgatacctttcagaaggaactgatgtgctttgaccccgacactgacaaatggattcagaaggctccaatgacaactgtgcggggattacactgtatgtgtactgtcggcgagaggctttacgttattgggggcaatcacttcagaggaactagcgattacgatgacgttctgtcttgcgagtattattcaccaattctagatcagtggactccaatcgctgccatgctgcgcgggcagtccgacgtcggcgttgccgtctttgagaataaaatctacgtggttggcggctacagttggaacaacagatgtatggtggagatcgtgcagaaatatgatcccgataaagacgagtggcataaagtttttgatctgcccgagtctttgggtgggatccgtgcttgtacccttacagttttccctcccgaagagactacaccctctccctcaagggagtctcctctcagtgctccttag

SEQ ID NO: 15720 - DNA, 1920 bp, synthetic construct
  misc_feature 1..1920: note = Description of Artificial Sequence: Synthetic coding sequence
  source 1..1920: mol_type = other DNA
atggaccacttacatagaggcgagctcgtggctgccattctccgcaaccggtccctcgttgaagaagaagaccaacacatgaaactctctctggggggcagcgagatgggcctctcctcccacttgcagagctctaaggccgggcctactcggatctttacctccaacacccactccagtgtggtccttcagggatttgaccagctgcgtctcgaaggactgttgtgtgatgtgacacttatgcccggcgacacagacgatgcattccccgttcacagagtcatgatggcctctgcgagcgactatttcaaagcaatgttcacggggggtatgaaagaacaggatctcatgtgcatcaagttacacggcgtctcaaaggtggggttacggaaaatcatagacttcatttacacagccaagttgtctcttaatatggataatctccaggacaccctagaggccgctagttttctgcagatattgccggtgctcgatttttgcaaagtcttcttaatctctggcgtgaccctcgacaattgtgtagaggtgggacgcatagcaaatacctacaatctgactgaagtggacaagtatgttaactcattcgtgctgaaaaatttccccgctctcctgagcactggtgagttcttgaaactgccatttgagcgcctggcattcgtcttaagtagcaatagtttgaagcactgtacagagctggaattgtttaaggccacctgtcgttggttgcggctagaggagccacggatggacttcgcagccaagctgatgaagaacattagattcccactcatgaccccgcaagagctgatcaactatgttcagactgtggacttcatgcgaactgacaatacgtgtgtgaatcttctcctggaagcctccaattatcaaatgatgccttacatgcagccagtaatgcaaagcgatagaaccgccatcagaagtgacacaactcatctggtgactctgggaggggtgttgaggcagcagctggtggtctcaaaagagctgaggatgtacgacgagaaggcccacgagtggaagagtttagcccctatggatgcaccgaggtaccagcacgggattgctgttatcgggaatttcctgtacgtggtgggaggtcagagcaactacgacaccaagggcaagaccgccgtggacactgtttttaggttcgacccgcggtacaataagtggatgcaggtcgcaagcttaaatgagaagaggaccttcttccatttgtctgcactgaaggggtacctgtacgctgttgggggacgaaacgcagcaggtgaactgcctacagttgagtgctacaacccacgtaccaacgaatggacatacgtcgccaaaatgtccgagccccactacggccatgcaggcaccgtctacggaggtgtcatgtatatcagcggcggcattacccacgacacattccagaaggaattgatgtgcttcgatcccgacacggacaaatggattcaaaaggcccccatgactaccgtgcgaggcctacattgtatgtgtaccgttggcgagaggctgtacgttattggcggcaatcacttccgcgggaccagcgactatgacgatgtgttgtcttgcgagtactattcaccaatcttggatcagtggacacccattgctgctatgctccggggtcaatccgacgttggagtcgccgtttttgagaataagatctatgtggtaggcggctactcctggaacaaccgttgtatggtcgagatcgtgcagaagtacgatcccgataaggatgagtggcataaggtctttgatctccccgagtccctgggtggcatcagggcgtgcaccttaacggtgtttcctcccgaagagactacccctagcccatcccgcgagagtcctctatccgctccgtag

SEQ ID NO: 15721 - DNA, 1842 bp, synthetic construct
  misc_feature 1..1842: note = Description of Artificial Sequence: Synthetic coding sequence
  source 1..1842: mol_type = other DNA
atgaagctaagcctaggcggctctgagatgggcctcagctcacaccttcagagtagtaaagccggcccgacgaggatttttactagtaacacccatagctccgtcgtgctgcaagggtttgatcaactacggctggaggggctcctctgtgacgtgacccttatgccaggggataccgacgatgcattccctgtgcatagagtgatgatggcatccgcttccgattattttaaggcgatgttcaccggtgggatgaaagagcaggatctcatgtgcatcaagctacacggagtgagtaaggtggggttgcggaagattatcgatttcatttatactgcaaagctgtccttgaacatggataatctccaggatactttggaggccgctagcttcttacagatcctgccagtgctggatttttgcaaggtctttttaatctcgggagttaccttggacaattgcgtcgaagtgggcaggattgctaatacatacaacctcaccgaggtggacaaatacgtaaatagcttcgttctcaaaaatttccctgccttgctcagcacaggcgagtttctgaagctaccattcgagagattggcgtttgtgcttagctccaacagccttaagcactgtactgaactcgagctgttcaaggccacttgcagatggctgcgcttggaggagcctagaatggatttcgcagcaaagctcatgaaaaacatcagatttcctttgatgaccccacaggagctgattaactatgtgcagactgtggactttatgcgcacagataatacgtgcgttaatttgcttcttgaggcatctaattaccagatgatgccgtatatgcaacccgtgatgcagagcgaccgtacagcaattaggagtgacaccacccatctggttaccctgggtggtgtgctgcgtcagcagttggttgtgtccaaggagctgcggatgtatgacgaaaaggcccatgaatggaaatcattggcacccatggatgctcccagatatcagcacggcatcgctgtaattggcaacttcctctatgtggttggaggtcagtcaaactatgatacaaagggtaaaaccgctgtggacaccgtttttcgttttgaccccagatataataaatggatgcaagtcgctagtctgaatgagaaacggactttcttccacctgtcagcactcaagggctatttgtacgccgtagggggccgcaacgcagcaggtgaactcccaacggtggagtgctacaatcctcgcacaaatgagtggacttacgtagccaaaatgtccgagccgcattacggccacgccggtacagtctacggcggagtgatgtacatcagtgggggtattacacacgatacgtttcagaaggagttaatgtgtttcgaccctgacaccgacaaatggatccaaaaggccccaatgaccaccgtacgcggtctgcattgtatgtgcactgtgggcgaaagactgtatgtcatcgggggcaaccatttccgagggacatccgactacgacgatgtgctgtcttgtgagtattacagccctattctcgatcagtggacccccatcgcagcaatgctcagagggcaatcagatgtgggggtggctgtgtttgagaacaaaatctacgtggtcggcggttatagctggaataacagatgcatggtggagattgttcaaaagtacgatcccgacaaagacgagtggcataaggtttttgatctgcctgagtctttgggcggaatccgtgcttgtaccttgactgtttttccaccagaggaaacaaccccctcaccgtcaagagagtcccctctgtctgctccatag

SEQ ID NO: 15722 - DNA, 1419 bp, synthetic construct
  misc_feature 1..1419: note = Description of Artificial Sequence: Synthetic coding sequence
  source 1..1419: mol_type = other DNA
atgactacctgctcgcgacagtttacctcctcctccagtatgaaaggttcctgtggcataggaggtggaatcgggggcggttctagccgcatcagcagtgtgctggcgggcggatcgtgtagagccccatccacatatggcggaggcctcagcgtctccagtagcaggttctctagcggcggcgcgtgcggcctgggtggcggatacgggggtgggttttcctcttcaagcagttcattcggcagtggattcggcggaggctacgggggagggctgggggccggcttgggcggcggcttcggaggcggcttcgccggaggagacgggctgttggtgggctcagaaaaggtgactatgcagaatcttaacgatcgactcgcctcatacctcgataaggttcgcgctctggaagaagccaacgccgacctggaggttaagatcagggactggtatcagagacagcgcccggctgaaatcaaggattacagcccatatttcaaaaccattgaagacctacggaacaagatcctcacagctactgtggacaacgctaatgtacttctgcaaattgataacgctagacttgccgcagacgacttcagaacaaaatatgagaccgagctcaatcttcgtatgtcagtggaggcagacattaatggactgagacgcgtgctggatgaattgacactggctcgggccgatctggagatgcagatcgagtcattgaaagaagaattagcctatctaaaaaagaatcatgaggaagagatgaacgcattgcgcggtcaagtgggcggcgatgtgaatgtcgagatggatgcggcgcctggtgtggatctgagcaggatcctaaatgagatgagggatcagtacgagaagatggcggaaaaaaaccggaaggatgcagaggagtggttcttcacaaagactgaagagctcaatcgcgaggttgctactaacagtgagctggttcaaagcggtaaaagcgagatatctgagctgcgccgcactatgcagaatttggaaattgaactgcagtcacagctgtctatgaaggccagcctggagaattctctagaggaaacgaaaggtaggtactgcatgcagctcgctcaaatccaggagatgatcggatccgtggaagagcagcttgctcaactgcggtgcgaaatggaacagcagaaccaagagtacaagatcctgctggacgtcaagactaggttagaacaggagattgccacctacagaaggttgctcgaaggagaggatgcccatctgtcctcatcccagttctcttcagggtcccagagcagtcgcgatgtgacttcctcttctcggcagatcagaactaaagttatggacgtgcacgatggtaaagttgtctctacccatgagcaggtgctgagaactaagaactag

SEQ ID NO: 15723 - DNA, 1293 bp, synthetic construct
  misc_feature 1..1293: note = Description of Artificial Sequence: Synthetic coding sequence
  source 1..1293: mol_type = other DNA
atgtcttttaccacgcgctctaccttttcgactaactatagatcacttggatccgtccaggctcctagctatggcgcccgcccagtgtcttctgccgccagcgtctacgccggggccgggggtagtggatcccgcatttccgtttcccgttccacatcttttcgcggcggtatgggatcaggcggcctggcaactgggattgccggaggattggcgggcatgggaggaattcaaaatgaaaaggaaaccatgcagtccttaaacgatcgattggcctcttatctagatcgagtccgaagcctggagaccgagaataggagactagaatctaagatcagagagcatctggaaaaaaaaggccctcaggtgcgagactggtcacactacttcaagatcattgaggacctccgcgcccaaatcttcgcaaatactgtcgataacgcgcggattgtcttgcagatcgataacgctagactggctgccgacgacttccgcgtcaagtacgaaacggagctggctatgcggcagtccgtggaaaacgacattcatggcttgagaaaggtgattgatgatacaaatatcacccgactgcagctggaaacagaaatcgaagcactgaaagaggaactgctgtttatgaaaaagaaccatgaagaggaggtaaagggactgcaggcacagatcgccagtagcggcttgactgtggaggtggatgcgccaaagtctcaagatctggctaagattatggccgacattagagcacaatacgatgagctggccagaaagaatagggaagagttagacaaatattggagccagcagattgaagagtctacaactgtggtgaccacgcagagcgcagaagtcggagctgccgagaccacactaaccgaattaagacgaacagtgcagagcctggagatagatctcgatagcatgcgcaacctcaaggcttcactcgaaaatagtctcagagaggtggaggcgcgatacgcacttcagatggagcagcttaatggaatcctcctgcaccttgagagcgagctcgcccagacacgggccgaggggcagcggcaggcccaagagtacgaagcactgttaaatattaaagtgaaactggaagcagagatcgccacttaccgacgcttgctggaggacggggaggattttaacctgggcgacgcccttgattcttccaacagtatgcaaacaattcagaaaaccaccactcgcaggatcgtggacggtaaggttgtgtcagaaaccaacgacacaaaggtgctgagacattag

SEQ ID NO: 15724 - DNA, 1293 bp, synthetic construct
  misc_feature 1..1293: note = Description of Artificial Sequence: Synthetic coding sequence
  source 1..1293: mol_type = other DNA
atgtccttcactacgcgatctaccttcagtaccaattaccgctctcttggctccgttcaggcgcctagctatggcgctagacctgtgtccagcgccgcctcagtgtacgctggcgccggcggtagcgggtctagaatatctgtgagcagatcaacctcatttaggggcggcatggggagcggtggccttgccactggaattgcagggggattagcaggaatgggggggatacagaatgagaaagaaactatgcaatccctcaacgatagactggcttcatacctagaccgagtaagatcgctagagacagagaatcggaggttggaatcgaagatccgagagcacctggagaagaaggggccccaagtgcgcgactggtcccactatttcaagatcatcgaagatctgcgcgcccaaatcttcgctaataccgttgacaacgcaagaatcgtattacaaatcgataatgctcgcttggccgctgatgacttccgtgttaaatacgagactgaattggcgatgagacagtctgtggaaaacgatatccacgggctgcgaaaggtcatagacgacaccaacatcacacggttgcagctcgagacagaaatcgaggccctgaaggaggaactgctcttcatgaagaagaaccatgaagaagaggtgaagggcctccaggctcagattgcttcttctgggctgaccgtagaagttgatgccccaaagagccaggatctcgctaaaattatggccgatatccgagctcagtatgatgagctcgctcgcaagaatcgagaagagctggataagtactggtctcagcaaatcgaggagtcaacaactgtggtgactacacagagcgcagaggtgggcgcggccgaaactaccctcactgaactgaggagaacagttcagtctctggaaatcgacctggattccatgaggaaccttaaggcgtccttggaaaattctctgagagaagtagaggcacgttatgctttgcaaatggagcaattgaacggcatcctgctccacctggagtcagaactagcacagacccgcgctgaggggcaacgccaggcacaagaatacgaagccctgttaaacatcaaggtgaaactggaggctgagattgcaacttaccgaaggcttttagaagacggagaggattttaatttgggagacgcgctggactcctctaattccatgcaaacaattcaaaagaccaccacaaggagaatcgtagatggaaaagtcgtgagtgagaccaacgatacaaaggtgctgcgtcactag

SEQ ID NO: 15725 - DNA, 1203 bp, synthetic construct
  misc_feature 1..1203: note = Description of Artificial Sequence: Synthetic coding sequence
  source 1..1203: mol_type = other DNA
atgaccagctattcttaccggcagtcctcagctaccagttctttcggcggcttagggggcggatctgtccggtttggaccaggggtggccttccgggccccttccattcacggaggtagtggggggaggggcgtctctgtgagtagcgcccgatttgtttctagttcctcctccggggcgtatggcggcggatatgggggcgtcctgaccgcctctgacggcttacttgccggaaacgagaagctgaccatgcagaacttaaatgaccggttggctagctatttagacaaggtgcgcgccctcgaagccgcaaatggagagctggaggtgaaaattcgcgattggtaccaaaaacagggacctgggcccagtcgggactacagtcactactatacgactatccaggatctgcgggataaaattcttggtgccaccattgagaactcccgcattgttctgcagatcgataacgcccggctggcagccgatgacttcagaacaaaatttgagacagagcaggccttgcggatgtcagtcgaggccgatataaatggtctgcgccgtgtgcttgacgaattgacattagccagaaccgacctggaaatgcagattgagggtttgaaggaggaactggcctatctgaaaaagaatcacgaggaggaaatctcaacgctgcgggggcaggtcggtggtcaggtaagtgttgaggtagattctgcacccggcaccgacctcgcaaagattctgtctgacatgcgctcccagtacgaagtaatggcagaacagaatcgcaaggatgccgaggcatggtttacttctcgcacagaggaacttaaccgagaggtcgctggtcacactgagcaactccagatgtctcgctccgaggtgactgatcttcgtagaactctgcagggcctggagattgagctgcagagccagttgtcaatgaaggctgctctggaggacaccttggcagagacggaagcacggttcggagcccaactggcccatatccaggccctgattagtgggatagaagcccagctcggcgacgtgcgagcagactccgagagacagaaccaggagtaccaaagactgatggatatcaagtcacggctcgagcaggagattgcgacttatcggagtctcctggaaggccaggaagaccactacaataatctgtctgcctccaaagttttgtag

SEQ ID NO: 15726 - DNA, 591 bp, synthetic construct
  misc_feature 1..591: note = Description of Artificial Sequence: Synthetic coding sequence
  source 1..591: mol_type = other DNA
atgacatcctactcttacagacaatcctccgccacctcttccttcggcggattggggggcgggtcagtgagattcgggcccggagtcgcattcagggcccctagtatccacgggggcagcggcggtcgcggcgtgtcagtaagctcagctcgcttcgtgtccagttcctcttctggtgcgtacgggggtggctatggaggggtcctgactgcttctgacggtttgctggctgggaacgaaaagctgacaatgcagaatcttaacgaccggctcgcatcctacctggacaaagtaagggctttggaggctgctaatggtgaactggagattttaggggccaccatcgaaaacagccgcattgtgttgcagatcgataatgcccgcctagctgccgacgacttccgcacaaaattcgagacagagcaagcactccgcatgtctgtggaagccgacataaacggcttgagaagggtcctggacgagctgaccttggcccggactgatctggagatgcagatcgagggacttaaagaagagctagcttacctcaagaaaaatcacgaagaagaaatctctaccctgcgcgggtag

SEQ ID NO: 15727 - DNA, 1773 bp, synthetic construct
  misc_feature 1..1773: note = Description of Artificial Sequence: Synthetic coding sequence
  source 1..1773: mol_type = other DNA
atgtctaggcagtcatccgtcagcttccgctccggcggctctcgatcatttagcacagcgagcgcaattacccccagtgtgagcaggacctcctttacgagcgtgtctcgaagcggcggaggcggtggtggcggtttcggcagggtgtctttggcaggagcctgtggggttggggggtatggcagtaggagtctttacaacttgggaggaagcaaaagaatttcgattagcacatcaggcgggtcttttcgtaatcgttttggggctggagctggcggcgggtacggcttcggtggcggggcaggctccgggtttggctttggaggcggcgccggcgggggtttcggattgggcggcggagccgggtttggcggtggcttcggtggtcccggattcccagtgtgcccacccggcggaattcaagaggtgacggtgaatcagtcgttgcttacaccgctcaatctgcagatcgacccttctatccagagagttcggacagaggagcgggaacagatcaagactctaaataacaaatttgcctcattcatcgacaaagttcggttcttggaacagcagaacaaggtcctggataccaaatggaccctcttgcaggagcaaggaacaaagaccgtgcggcaaaaccttgagcctctgttcgagcaatacatcaacaatcttcggagacagctcgactccattgttggcgaaagaggcagactggatagcgagcttagaaacatgcaggacctcgtggaggatttcaaaaataagtacgaggacgaaattaataagcggacaactgcggaaaatgagtttgtcatgctcaagaaagatgtcgatgcggcatatatgaacaaagtggagctcgaggctaaggtggacgcgttgatggacgaaatcaactttatgaagatgttttttgacgccgagctttcacaaatgcagactcatgtttccgacaccagtgttgttctgagcatggataacaatcgcaacctcgacctggatagtatcattgccgaggtgaaggctcagtacgaggagatcgcaaatcgctcgcggaccgaggctgaaagctggtatcaaacaaagtacgaagagttgcagcaaacagcaggacgccacggtgacgatctgcgaaacaccaaacacgaaataagtgagatgaatcgtatgatccagagactgcgcgcagagattgataacgtgaaaaagcagtgcgctaacctccagaatgcaatcgctgacgccgaacagcgcggtgagctcgcacttaaggatgctcgcaataagcttgctgagctggaagaagcccttcagaaggccaaacaagacatggcgcggttgcttcgcgaataccaggaactcatgaatactaagctagccttagacgtcgagatcgcaacataccggaagcttctggagggagaggagtgcaggctcagtggggaaggggtaggccctgtaaacatcagcgtcgtgacaagttctgtcagttctggatacggctccggctcaggctacggagggggactcggaggcggacttggcggcggcttgggcggcggcttagctggaggttcctccggcagctactacagcagcagttccggaggggtcggactcggtggcggtttatccgtcggagggtccggtttctctgcaagttccggcaggggccttggagtggggttcggcagcggcggcggcagctcaagttctgtgaaattcgtctctacaacctcttcgtctcggaagtcttttaagtcttag

SEQ ID NO: 15728 - DNA, 1668 bp, synthetic construct
  misc_feature 1..1668: note = Description of Artificial Sequence: Synthetic coding sequence
  source 1..1668: mol_type = other DNA
atgtctcggcagagcagcgtgagcttcaggagcggaggatcaagatcttttagcacagcaagcgccatcaccccgtctgttagtcggaccagctttacaagtgtgtcccgctctgggggcggtgggggggggggcttcgggcgggtatcacttgcgggggcatgtggagtggggggttatgggtttggcggaggggccggaagcggcttcggattcggcggaggagcaggaggtggcttcggtctgggcggcggtgccggcttcgggggcggatttggcggacccggttttccagtttgtccccccggagggatacaggaggttaccgtcaatcagtctctgttgaccccgctgaacctccagatagacccatcgatccagcgcgtgcgaacagaggagagagaacagattaagacactgaacaacaagttcgctagctttattgacaaagttcgatttctggagcagcagaacaaagtcctggatactaaatggactctcctacaggagcagggaactaagaccgttaggcagaaccttgaaccactgttcgagcaatacattaataatctgcgtaggcagctagatagcatcgttggcgaacgaggaaggcttgactctgagctaaggaacatgcaggacctggtggaagacttcaagaacaagtacgaagatgaaatcaataagcggaccacagccgagaatgaattcgtgatgctgaagaaggatgtggacgcagcctacatgaataaagtggaactagaggctaaagtggacgcactgatggacgagataaattttatgaaaatgttcttcgacgctgagttaagtcagatgcagacgcacgtctccgacacctccgttgtgctaagtatggataacaacagaaatctcgacttggattcaataatcgcagaagtgaaagcacagtacgaagagatcgctaaccgaagccggacggaagcggaatcctggtatcagaccaagtatgaggaattacaacagactgccggtagacacggggatgatctccggaatacaaagcacgaaattagcgagatgaatagaatgatccagcgactgcgcgcggaaatcgacaacgtcaaaaaacagtgtgccaacctgcagaatgcaattgctgacgcggagcagagaggggagcttgccctcaaggacgctcgcaataagttggccgagctcgaagaggcgttgcagaaggccaaacaggacatggcaagactgctgcgtgaatatcaggaactcatgaatacaaaactggctttggatgtggagatcgccacatatcggaagctgctggaaggtgaggaatgccggctgagcggagagggagttggacccgttaatatctccgtcgtcaccagcagcgtctcgagtgggtatggatccgggtcagggtatggcggcggactcggcggtggcctgggtggcggacttgggggaggtcttgccgggggatcaagtggaagctattactccagctcttccggcggagtagggttgggtggtggcctgtccgtgggaggctctggcttctctgcatctagcggtaggggattgggtgtagggtttggtagtggtggtggctcgtccagcagcgtaaagttcgtaagtaccacttccagttcgagaaaatctttcaagagttag

SEQ ID NO: 15729 - DNA, 399 bp, synthetic construct
  misc_feature 1..399: note = Description of Artificial Sequence: Synthetic coding sequence
  source 1..399: mol_type = other DNA
atgtccaggcaaagctcagtgagtttccggagcggcgggagtcgtagcttttccactgcttcagctataacacctagcgttagcaggacctcatttacatctgtttcacggtcgggcggcggggggggcgggggctttggcagggtgagcctggctggggcctgtggcgtaggaggctatggctctcgaagcctgtataacctgggcggaagcaaacggatctccatttctacttcaggaggctctttcaggaatagatttggcgccggtgccggcggcgggtacggtttcggaggtggcgctggaagcgggttcggattcgggggcggcgctgggggaggattcggattgggcggcggagctggatttggtggtggctttgggggccccgggttttag

SEQ ID NO: 15730 - DNA, 1410 bp, synthetic construct
  misc_feature 1..1410: note = Description of Artificial Sequence: Synthetic coding sequence
  source 1..1410: mol_type = other DNA
atgagcattcacttctcatcccccgttttcacaagtcgctcggccgcatttagtggtcggggcgcccaggtccgactcagcagtgcaaggccaggcggtctggggagctcgagtctgtacgggttgggggcttcccgccctagagtggccgtgagaagtgcttatggaggacctgtgggagcagggattcgggaagtgacaattaaccagtcactgttagctcctcttcgactggacgccgatccttctctacagagagtgagacaggaagagtctgagcagattaaaactctcaataataaattcgcctcgtttatcgacaaggtcaggttcctggagcaacagaataagctgctcgagacaaagtggacactgctgcaggaacagaaatcagcaaagtcaagccggctgccagacatctttgaggctcaaatagccgggctgcgtgggcagttggaggctttgcaagtagacggggggagactcgaagcggagctccggtccatgcaggatgttgttgaagattttaaaaacaaatacgaggacgaaatcaaccatcggaccgctgccgaaaacgaatttgtggtgctgaagaaagatgtggatgcggcctacatgtccaaggtagagttggaggctaaagtcgatgccctgaacgatgagatcaacttcttgcgcacccttaatgagaccgagctcaccgagcttcaaagtcaaatttcagataccagtgtggtgctgagtatggataatagcaggtccctggatctggacgggataatcgcagaggtgaaagcacagtatgaggaaatggctaaatgctcccgagccgaagctgaggcctggtatcagaccaaattcgaaacactgcaggctcaggccggcaaacacggcgatgatttgagaaatacgcggaacgagatctcagagatgaatagagcaattcaacgactgcaggctgagatagataatataaagaatcagagggctaaactggaagcggccattgcagaagccgaggaaagaggtgaactggccctaaaagacgcaagggctaaacaggaggagttagaggcggcccttcagagaggtaaacaggatatggcaagacagctgcgagaataccaggaactcatgagcgtaaaactggctttggacattgagatcgcaacatatcgcaagttactggaaggggaggaatctaggcttgccggtgacggggtcggggcagtgaacatctccgtgatgaactcaacagggggctcgtcaagcggcggcggaatcggcctgaccttgggcggtacgatgggctctaatgctctcagtttttctagctcagcagggcctggtttgcttaaggcttactccattaggaccgcttccgcttcaaggaggtctgctagagactag

SEQ ID NO: 15731 - DNA, 1338 bp, synthetic construct
  misc_feature 1..1338: note = Description of Artificial Sequence: Synthetic coding sequence
  source 1..1338: mol_type = other DNA
atgtcaatacatttcagtagtcccgtgttcacaagcagatcagctgcattctcaggacgcggggcccaggttcgcttgagctccgcgcgacctggcggattgggatcgagcagcctgtacggtttaggggcatctcgccctcgcgtggccccactgcggctcgacgcagacccatccttgcagcgggtgagacaagaagagtcagaacagattaaaacgctgaataacaaattcgccagcttcatagacaaagtcagattcttggaacaacaaaacaaactcctggagactaagtggactctactccaagagcaaaagtccgccaagagttcccggctgccagacatcttcgaggcccagatcgccggcctccggggccagttagaggccttgcaggttgacggaggccggcttgaggcagagttaaggagcatgcaggatgtggtggaagactttaaaaatagatatgaagacgagatcaatcaccgcactgctgcggagaacgaattcgtggtgctgaagaaggacgtcgatgctgcctatatgtccaaagttgagctggaggccaaagtagacgcactcaacgatgagatcaattttttaagaactctgaatgagacagagcttaccgagctacagtctcaaattagcgacacaagcgtggtactctcgatggataacagccgcagcctggacctggacggtataatcgctgaggtgaaagctcagtatgaagagatggctaaatgctcacgagctgaggcagaggcctggtatcagacgaaattcgaaaccctacaagcccaagccggcaagcatggagacgatcttcggaacaccagaaatgagatctctgagatgaaccgagctattcagaggctacaagctgagatagataacataaagaaccagagggctaagctagaagccgccatagccgaggccgaggaaagaggtgagctggctctaaaagatgctagagccaaacaagaagagctggaggccgctcttcagcggggcaagcaggatatggcgcggcaactaagagagtaccaggaactaatgtcagtgaaactagctttggacatcgagattgccacctaccgaaaacttctggagggcgaagagagccggcttgccggcgatggagtgggagctgtcaacatctctgtcatgaatagcacaggcggtagcagctcaggaggcggcattggactgaccctgggtggaaccatgggtagcaacgccctgtccttcagcagcagcgccggccctgggctgctgaaagcatatagcatacggaccgcctccgcttccaggcgttctgcacgggactag

SEQ ID NO: 15732 - DNA, 1212 bp, synthetic construct
  misc_feature 1..1212: note = Description of Artificial Sequence: Synthetic coding sequence
  source 1..1212: mol_type = other DNA
atgtccattcacttctcatccccagtgtttaccagtagatccgcagctttttctggtagaggcgctcaggttagacttagttccgcccggccagggggactgggctcaagctcactgtacgggctcggagcctcccgtcctcgggtagccgtacgctcagcttatggcggtccggtcggcgctggaataagagaagtaaccattaaccaatcactcctggcaccactgcgtctggatgcagatccgtccttgcagcgggtacggcaggaagaatccgaacagataaagacattaaacaacaagttcgcttccttcatcgacaaagtgagattcctagaacaacagaacaagctcctcgagactaagtggacactcctgcaggaacagaagtccgcaaagagttctagactccccgacatttttgaggctcagattgcagggctacgtgggcagctagaagccctccaggtcgatggaggaaggctggaagcagaactgcgttccatgcaggatgttgttgaggattttaaaaataagtacgaggacgaaataaaccaccgcacagcggctgagaatgagttcgtggtgctaaaaaaagatgtcgatgcagcgtatatgagcaaagtagagctagaggctaaagtggatgcactcaatgacgagatcaattttctgaggacacttaatgaaactgaaattcacgttctgcaatcccatatatctgatacttctgtggtggtgaagttggacaattcacaggacttgaatatggattgtatcatcgcagaaatcaaggcacaatatgacgatattgtcacatgttcctgggccaaagccgagtcatggtatcacggatgcttggagatgaaagcaacagtcatatggcacggcgagacggtaggatgtaccaaggaggagataaaagagctgactcacatgatccagaggcttatggcgaaggttgaaaacgcgaagtgtcagaactctaaactggaggtggaagtcacccaaagtgaacagcagggagaggttgcgctgtccgataatagatgcaaactggtggaactggaagggacaatgcagaaagctaggcagtaccaggaggtcatgaacagcaagctcggcctgaatgtgaaagctgcttccagctgccacctgcttgacggcgaggagcagaggttgtgcgacggaatcagcgccgtcaacatctag

SEQ ID NO: 15733 - DNA, 1452 bp, synthetic construct
  misc_feature 1..1452: note = Description of Artificial Sequence: Synthetic coding sequence
  source 1..1452: mol_type = other DNA
atgtctatccgggtcacccaaaaatcttataaggtgtccactagtgggcctcgcgccttttcaagtaggtcgtacacctctggacccggttctaggatatcttcatcaagtttcagtcgcgtgggtagctctaacttccggggtggactgggcggaggctacgggggagcttctggcatgggcgggatcaccgcagtgaccgtgaatcagtccttgctcagcccactggttttagaagtggacccgaatattcaggccgtccggacacaggagaaagaacaaattaagacgctgaacaacaagttcgcctcattcatcgataaagtacggttcctggagcagcagaacaagatgctagagaccaaatggagtctgctccagcaacagaaaaccgcaagatccaacatggataatatgttcgaatcctacatcaataacttgagaagacagttggagaccctcggacaggagaaattaaaattagaggcggagctggggaatatgcaaggcttagtggaagattttaaaaataagtacgaggacgagatcaacaagcggaccgaaatggaaaatgagttcgtcttgatcaaaaaggacgtggatgaggcctatatgaacaaagtggagcttgaatcgagattggaagggttaacagatgaaatcaatttcctgcgccaactctatgaagaggagattcgggagctacagagccaaatatctgacacttccgttgttctatcaatggataactctaggagcctcgacatggattctataatcgctgaggtgaaagcccagtacgaagatattgccaatcgctcacgtgccgaggcagagagtatgtaccaaattaaatacgaggagctgcagagcctggccgggaaacacggcgacgatcttcgccggactaagactgaaatttctgaaatgaatcgaaacatatctagactccaggccgaaattgaagggctgaagggccagagggcaagcttggaggccgccatcgctgatgcagagcagcgcggggaactcgcgattaaagatgcaaacgccaaactgtccgagctagaggcagctttgcagcgggccaagcaagacatggctaggcagctgagggaataccaagaactcatgaatgtgaaacttgccctcgacattgagattgctacttatagaaagttgctcgagggcgaagagtcgaggcttgaaagcggcatgcagaatatgtccatccatactaaaactacaagcggctatgccggcggactatcatctgcttatggaggcctgacaagccctggcctgtcgtactccctgggaagctccttcgggagtggcgcggggagttctagcttttcccgaacgagttcctcacgtgccgtggtagtgaagaagatagagacgcgggatggcaaattggtgtccgagagtagcgacgtgctccctaagtag

SEQ ID NO: 15734 - DNA, 822 bp, synthetic construct
  misc_feature 1..822: note = Description of Artificial Sequence: Synthetic coding sequence
  source 1..822: mol_type = other DNA
atgtcgatccgagtcacacagaagtcctataaggtctccacctcaggcccccgcgcgttctcatctcggtcctacactagcggcccaggctcgagaatctcctcatcatctttttccagggttggtagtagcaatttcaggggaggtctcgggggaggctacggcggtgcctcaggcatgggtgggatcactgcagtaaccgtaaatcagagccttctgtcaccacttgtactcgaagttgacccaaatattcaggccgttcgcactcaggagaaggagcagattaaaactttgaacaacaagtttgccagttttatcgacaaagttcgctttctagaacagcagaataagatgctggaaaccaagtggtcactccttcagcaacagaaaaccgccaggagcaacatggacaatatgtttgaaagctatataaacaatctgagacgtcagctcgaaacgctcgggcaggagaagctaaaattggaagcagagctgggcaacatgcaggggctggtggaagattttaaaaacaagtacgaggacgaaattaataaacggacagagatggaaaacgagttcgtccttataaaaaaagacgttgacgaagcttacatgaacaaggtggagttagagagccggctcgaaggtcttactgacgaaattaactttctgagacagctgtatgaggaagaaatccgcgagctgcaatctcagatcagcgatacctcagtagtcctgtccatggataactcccgctccctggacatggacagcataatagccgaggttaaggctcagtatgaggacatcgccaaccggtag

SEQ ID NO: 15735 - DNA, 1452 bp, synthetic construct
  misc_feature 1..1452: note = Description of Artificial Sequence: Synthetic coding sequence
  source 1..1452: mol_type = other DNA
atgagtattcgcgtcactcagaaaagctataaagtctcgacttctggacctcgggcattcagttcgcgctcctacacatccggcccaggcagccgcatcagcagttcctcttttagccgggttggctcttctaatttcagggggggactcggcggtggctatggaggcgcgagcggtatgggcggcattacagccgttactgtgaatcagagtctgcttagccccctggttcttgaggtagaccctaacattcaggctgtgagaacccaggagaaggagcagattaaaacacttaataataagtttgcttccttcatcgacaaagtcagatttcttgaacagcagaacaaaatgctggagaccaaatggagcctcctgcaacaacagaagactgctagaagcaatatggataacatgttcgagtcctatatcaataatctccgcaggcaactggaaacgctcggccaggagaaactcaagctcgaggccgagctggggaatatgcaagggcttgtggaggacttcaagaacaagtatgaggacgagatcaataagcgcacagaaatggagaatgaatttgtgctgatcaaaaaggacgtggacgaagcctatatgaataaagtcgaactggagtctaggctggaaggtcttaccgatgagatcaattttctccgacagctctacgaggaggagattcgggagcttcagtcgcagatctccgatactagcgtggtccttagtatggataattcaagatccctggacatggactcaatcattgctgaggtcaaggcccagtatgaggacatagctaatagatctcgggccgaagcagagagcatgtatcaaattaagtatgaagagctgcagagtctggcaggaaagcacggggatgatctgagaagaaccaaaacagagatttctgagatgaatcgcaacataagccgactgcaggctgagatagaaggtcttaaggggcagagagcctccttggaggcagcaattgctgatgccgagcagcgtggggaacttgcaatcaaggacgcaaatgcaaaactctccgaattagaggccgctttacagcgcgccaaacaagacatggctagacagttacgcgagtaccaggagttgatgaacgtgaagctggccttagacatcgaaattgccacttacagaaaactgcttgaaggagaagaatctcgcctggaatccggcatgcagaatatgtctatacatacaaaaactacaagcggatatgccgggggcttatcaagcgcttacggcggcctgacatcacccgggctcagttactctcttggctcgtcatttggttcaggagccggcagctcctccttttccaggacctcctcctcccgcgccgtcgtcgtgaaaaagattgaaacgcgggacggcaaactcgtgagcgaaagcagtgatgtgttgccaaaatag

SEQ ID NO: 15736 - DNA, 534 bp, synthetic construct
  misc_feature 1..534: note = Description of Artificial Sequence: Synthetic coding sequence
  source 1..534: mol_type = other DNA
atgtcaatcagagtgactcagaaatcctacaaggtgagtacctccggccctcgggcttttagttctaggtcttacacctccggccccgggtctcggataagctcttcaagcttctcacgggtgggcagttcaaactttagaggagggttgggtggcggatacggaggtgccagtggtatgggcgggatcacggcagtcaccgtgaaccagtctctcctctccccactcgtactcgaggtagaccctaatattcaagctgtaagaacccaagaaaaggaacaaatcaagaccctcaataacaaatttgcatctttcatcgataaggtccggtttctcgagcaacagaataaaatgctggaaactaaatggtctctcctccaacagcagaaaactgctcggtcaaatatggataacatgtttgagagctacataaataacctcaggagacagctggagacactcggccaggaaaaactcaagctcgaagcagaactggggaatatgcagggtctcgtggaagactttaagaactag

SEQ ID NO: 15737 - DNA, 1536 bp, synthetic construct
  misc_feature 1..1536: note = Description of Artificial Sequence: Synthetic coding sequence
  source 1..1536: mol_type = other DNA
atgaacggtgtctcctggagccaagaccttcaggagggaatatctgcatggtttggacctcctgcctccacacccgcgtccactatgtctattcgtgttacacagaaaagttataaggtgagcacaagtgggccgcgagcattctcctctcgttcatatactagcggacccggtagccggatcagcagctccagctttagtcgggtggggtccagtaactttcggggcggcctgggcggcggatatgggggtgcctccggaatgggcggaattacggccgtaacagtgaatcaaagccttctcagtccgcttgtcctggaagtggatcccaacatacaggccgtgaggactcaggagaaggagcagatcaagacccttaacaataagttcgcttcttttatcgataaagttagattcctggagcagcagaacaagatgctcgagacgaagtggtctcttctgcagcagcaaaagaccgcccggagcaatatggacaacatgtttgagagttacatcaacaacctgcgccggcagctggagactcttggccaggaaaaactaaaattggaagccgagctggggaacatgcaaggattggtggaggattttaaaaataagtacgaggacgaaatcaataagaggacagaaatggaaaatgagttcgttctgataaagaaagacgtggacgaagcatacatgaataaggtggagctggagagccgccttgaagggctaacagacgaaattaacttccttaggcagctatacgaggaagagattagggagctgcagtcccagattagcgatacgtccgtggtactgagcatggataactctcggtccctggacatggatagcattatcgcagaggttaaggcgcagtacgaggacatcgctaacaggtctagggcggaagccgagagcatgtaccagattaaatatgaggaactccaatccttggctggtaagcatggcgatgacctgaggagaaccaagacagagatcagcgagatgaatcggaacatatcccggttgcaagccgagattgaaggcttgaaaggccagagagcctccctggaagctgccatcgctgatgctgagcagcgcggggagttggccatcaaggacgcaaacgccaagctctctgagttagaagcagccttgcagagagcgaagcaggacatggcacgccagctccgcgagtatcaggagctgatgaacgtgaaattggctctggacatcgaaattgctacctatagaaaactattggagggtgaggaaagcaggctcgagtctggtatgcagaacatgtccattcacactaaaacaacgtcagggtacgccgggggtctgagttcggcatatgggggccttaccagtccaggcctttcttattcactgggttcatccttcggaagcggcgcaggaagtagctctttttcccgcacctcgagtagtcgggcggtggttgtgaagaagattgaaacccgcgacgggaagttggtgagtgagagctccgacgtcttaccgaaatag

SEQ ID NO: 15738 - DNA, 1452 bp, synthetic construct
  misc_feature 1..1452: note = Description of Artificial Sequence: Synthetic coding sequence
  source 1..1452: mol_type = other DNA
atgagtatccgtgttactcaaaaatcatacaaagtgtccacttcagggcccagggctttttccagcaggtcttatactagtggtcctggaagtcggattagtagtagcagcttttcacgagtgggtagctctaactttcgcggtggactaggtggcggctatggtggggcttccggaatgggagggattaccgcggtcactgtgaatcaaagcctgttgtccccgctcgtgctggaggtggatcctaatattcaggccgttagaacccaggaaaaagaacagattaaaacactaaataacaagtttgctagcttcattgataaagttcggttcttagagcagcaaaataagatgctggagacgaagtggagtttgctgcaacaacagaagaccgcacggtctaacatggataatatgttcgaatcctacattaataacctgcggcgccagttggagacgctggggcaagagaaattgaaactggaggccgagctcggaaatatgcagggattggtggaagactttaagaacaaatacgaggacgaaattaataaaagaaccgagatggagaacgagtttgtgctgatcaaaaaggatgtggacgaggcatacatgaataaagtggagctcgagtcacgattggaagggctgacggacgaaattaattttttgaggcagctttatgaagaggaaatcagagaacttcaaagccagatatctgacacgagtgtagtcctgtccatggacaatagtcgctccctggacatggactccattatagctgaggtcaaagctcagtatgaagacatagcgaacaggagccgcgccgaggcagagagcatgtaccaaattaaatatgaggagcttcagtcactggccgggaaacacggcgatgatctgcgacgcactaaaacagaaataagtgagatgaacaggaacataagccggctgcaggctgagattgagggcttgaaagggcagcgggctagcctggaagcggcgatagccgatgctgagcaaaggggtgagctggccatcaaagatgccaacgccaaactctctgagctggaagctgctctccagcgtgcgaaacaggatatggcgcgacaacttcgcgaatatcaggagctgatgaacgtgaagctggcactcgacatcgagatcgctacatatcgaaagttgttggagggcgaggagagccgcctggaatcggggatgcagaacatgagtattcataccaagaccacgtccggctacgccggtggactgagctctgcctacgggggcctaacatctcccggtttgagctatagcctaggtagcagctttggcagtggcgcgggcagtagcagtttcagtcggacaagctccagtagagcggtggtcgtgaagaagatcgaaacaagagacggtaaactagtgtcagaatctagcgatgtgctgcctaaatag

SEQ ID NO: 15739 - DNA, 4071 bp, synthetic construct
  misc_feature 1..4071: note = Description of Artificial Sequence: Synthetic coding sequence
  source 1..4071: mol_type = other DNA
atgcaatccaaagtgctgctggcagtggccctctggctctgcgtcgagaccagagccgcctctgtgggcttgccctcggtgtctttggatctgcccaggctgtcaattcagaaagatattttaacgattaaggctaacacaacccttcagattacctgccggggccagagagatctggattggctgtggccaaacaatcagagcggctcggagcagagagtcgaagtcactgagtgtagcgacggtctgttctgcaaaacactgaccatccctaaagtcatcgggaacgatacaggcgcatataagtgcttttatcgggaaactgatctggcaagcgtcatctatgtatatgtacaagactataggtcccctttcattgcgagtgtgtccgatcagcatggagtcgtgtacataactgaaaataagaataagacagtggttattccctgtttaggcagtataagcaatctcaacgtttctctgtgcgcccgttaccctgaaaaaagatttgttccagatgggaataggatttcctgggattccaagaaggggttcaccattccaagctacatgatatcttacgccggcatggtcttttgtgaggcaaagattaatgatgaatcctaccagtccatcatgtacatcgtagtggtagtcggatacagaatctacgacgtggtgttaagcccctctcacggcatcgagctgtccgtaggtgaaaaacttgtcttgaactgcactgctaggaccgaacttaatgttggcatcgatttcaactgggaatacccatcctctaagcatcagcacaaaaagctggtgaacagagaccttaaaactcagtcggggtctgagatgaagaagtttttatctacccttacaatcgacggagtgacacgctcagatcaggggctgtatacctgtgccgctagctcaggtttgatgacgaagaaaaactccacgtttgtccgggttcacgaaaaacctttcgttgcctttgggtccgggatggagagtctggtcgaggctactgtcggcgagagggtgcgcattccggccaaatacctcggctacccgcctccagaaataaagtggtataagaacggtataccgctggagtctaaccacacaatcaaggctggccacgtactgacgattatggaagtgtcagagcgagacaccggcaattatacggtgatccttaccaaccccatatccaaggaaaaacagagccacgtggtgagcctcgtggtgtatgtccctccacagatcggggagaaaagtctgattagtccagttgacagctatcagtatgggacgacacaaaccctaacctgcacggtgtacgccatccctccccctcaccacatacactggtactggcagctggaagaggaatgtgcaaacgagccctcgcaggccgtgagcgttactaatccttacccatgtgaggagtggcggtctgttgaagactttcaggggggaaacaaaattgaagtgaacaagaatcagttcgcgctgattgaagggaagaataaaaccgtatctaccttggtcatccaagccgcaaacgtgtctgccctgtataaatgcgaagccgtgaacaaagtcgggcgaggagaaagggttatcagctttcacgtgacaagggggcctgagatcacactacagcccgacatgcaaccaacagaacaggagtcagtctcactgtggtgcactgctgaccgctcaacatttgagaacctgacctggtataagcttggcccccagcctctgccgatccacgtgggggaactgcctactcccgtgtgtaagaatttagacactctgtggaaacttaatgctactatgttttcgaacagcactaacgacattctgatcatggagttaaagaacgcctccctccaagaccagggagactacgtgtgtctggctcaagaccgaaagacaaagaagagacattgtgttgtgcggcaacttacagtgttggagcgagtggcgccgactattacaggaaatctggagaaccagactaccagtatcggtgaaagcattgaggtgtcatgtacagcctccggcaacccaccgcctcagattatgtggttcaaggacaatgagaccctggtggaagattctggaatcgttctgaaggacggcaaccgcaatctgactatacgccgggtccgaaaagaggacgaggggttatacacatgtcaggcttgtagtgtcctagggtgtgcgaaagttgaggcttttttcattatcgagggcgcccaggaaaaaacaaatctggagatcatcatactcgtgggtactgcagtgattgctatgttcttttggcttctgctggtaattatactaaggactgtaaaacgagctaatggcggtgagctgaagactgggtacctgtctatcgtgatggatcctgatgaactgcctcttgatgagcattgcgagcggttaccttacgacgcatcaaaatgggaatttccccgcgaccgcttgaaactgggcaagccgcttggcagaggcgccttcgggcaagtcattgaggctgatgcttttggtatcgacaagaccgccacatgccggacagtggccgtgaagatgcttaaggaaggcgccacccactccgagcacagagctttaatgtctgagctcaaaatcttaatccatatcggccaccacctgaacgtcgtgaacctgttaggggcgtgtactaaacctggcgggcctcttatggtgatagtggagttttgtaaattcggaaatctgtccacttatctgaggtccaagcgcaatgagtttgtgccctacaaaactaaaggagccaggttccggcaagggaaggattatgttggggccatacctgtggatctgaagcgtaggctggacagtatcacttcctcacagtcctccgcctcttccggcttcgtggaggagaagagcttgtctgacgtggaggaggaggaagctcccgaggatttatacaaagacttcttgacactcgaacacctcatctgctacagcttccaagttgccaaggggatggagttcctggcttctcggaagtgtattcatagggacctggccgcccgaaacatcctgctttctgagaaaaacgtcgtgaagatctgcgacttcggcctggcccgggacatctacaaagacccagactatgtgcggaagggggacgcccggcttccgctaaaatggatggcccccgagaccatcttcgacagggtatacactatccaaagcgacgtgtggtcgttcggggtgctcctatgggaaatcttcagtctgggcgcttcaccataccctggtgtaaaaatagacgaggaattttgccggcgcctcaaagaggggacccgcatgcgtgcaccagactataccacgcccgaaatgtatcagaccatgctcgattgttggcatggcgagccctctcagaggcctaccttcagtgagttggtggagcacctcggcaatctcctgcaggcgaatgctcagcaggacggtaaggactacatcgtgttaccgattagcgagactctgagcatggaagaagacagtggcctctccctcccaacctctcccgtctcttgtatggaggaagaggaggtttgtgaccctaaattccactacgacaacaccgctggcatcagccaatacctccagaactctaagcgcaagtctagaccggtgtccgtaaagacgtttgaggacattcctctggaagagccagaagtcaaagtaatacctgacgacaaccagactgattccggaatggtgctcgcttctgaggaactgaaaaccttagaagacagaaccaagttatccccatcctttgggggaatggtgccttctaagtcaagggagagcgtggcaagcgaggggagtaaccagacttcaggctaccagtccggctaccactccgatgataccgacactactgtgtattcatctgaagaggctgagctgctgaaattgattgaaatcggggtccagaccggttccaccgcccagatcctgcagccggacagtgggacaacactgagttctcccccagtctag

SEQ ID NO: 15740 - DNA, 6630 bp, synthetic construct
  misc_feature 1..6630: note = Description of Artificial Sequence: Synthetic coding sequence
  source 1..6630: mol_type = other DNA
atgtggaatgatatcgaactgctgaccaacgacgacaccggctctgggtacctgtcagtgggtagcagaaaagagcacggcactgcgctttatcaggtcgacttgcttgtaaaaatctcgagcgagaaggctagcctgaatccgaagatacaggcatgttccctgtccgatgggtttataatcgttgctgatcagagcgtaattctgctggactctatatgccgatctcttcagctgcatctggtgttcgatacagaagttgatgttgtgggtctgtgccaagagggcaaatttttactcgtgggggagaggtcaggaaaccttcacctgatacacgtcacatctaagcagacccttctgaccaatgcttttgttcaaaaagccaatgatgaaaacagacgaacctaccagaatctggtcattgagaaagacgggtccaatgagggcacctattacatgctgcttctgacttactcaggcttcttttgcattactaacctccagctgctcaagatccagcaggcgatcgagaatgtcgacttttctaccgcaaaaaagttgcagggacagattaagtcatccttcattagtaccgagaattaccatacactgggctgtctgtctttggtggctggcgatttggcatcggaagtgcctgtcatcatcgggggcactggcaactgcgcattcagcaaatgggagcctgattcctccaaaaagggtatgactgtcaaaaacctcatagacgctgaaatcataaagggggccaagaagttccaactgatcgacaaccttctgttcgtgctggacacagacaatgtgttaagtttgtgggatatatatacgctcactcccgtatggaactggccatccttgcacgttgaagaattcctgttaaccaccgaagccgactctccaagcagtgttacctggcagggtatcactaatttaaaattgatcgccttgaccgccagtgcaaataagaagatgaagaaccttatggtgtattcccttcccaccatggagattctatactctctggaggtgtcttccgtatctagcctggtgcagacggggatttccacagacaccatttaccttctagagggcgtgtgcaaaaacgatcccaaactgtcagaagatagcgttagcgtgctggtgcttcgttgtttgaccgaagcgctgcctgagaatcgactttcacggcttctgcataagcatcggtttgcagaggccgagagttttgccatccaattcgggctggatgtcgagctggtgtataaggtcaagtcaaatcatattctggagaagctcgccctgtcttcggtggacgcttccgagcagaccgagtggcagcagcttgtagacgatgccaaagaaaacttgcacaaaatccaggacgacgaattcgtggttaactattgccttaaagcccagtggatcacatatgagacgactcaggaaatgctaaactacgctaaaactcgcttactgaagaaggaagataaaaccgccctgatctactctgatgggctgaaggaagtgctccgtgcacacgcaaagctgacaactttttacggtgcatttggcccagagaaattttcaggtagctcttggatagaatttcttaacaacgaagacgaccttaaagacatcttcttgcagctcaaggaggggaacttggtttgcgctcaatacctctggctcaggcatcgcgccaacttcgagagtagatttgacgtcaaaatgctcgaaagcctcttgaactcaatgagcgcctctgtatccctgcagaaactatgtccctggtttaaaaacgacgtgattccctttgtgcgacgcacagtgccagagggccagattatcctggccaagtggctcgagcaggccgctcgcaatcttgaactgacagacaaagcaaactggcccgagaacggactacagctggccgaaatcttttttactgctgagaagacagatgagctcgggctggcctcatcctggcattggatcagcttaaaagattatcaaaatacagaggaggtctgccaactgaggaccttagtgaacaatctccgtgaactgataaccctgcaccgtaagtacaactgcaaactcgcccttagtgattttgaaaaagaaaatactactaccatagtcttcagaatgttcgacaaggtcctagcaccagaactgatccctagtattttggaaaagttcattcgcgtgtatatgcgggaacacgacctccaggaggaggagctgctcctgctgtatattgaggatttgctgaacaggtgttcttctaagagcacatctctcttcgagaccgcctgggaagctaaagctatggctgttattgcatgtttgtccgacacggatctcattttcgacgccgttctgaaaatcatgtacgccgcagttgtgccctggtcagcagctgtagaacagctggttaaacagcaccttgagatggatcacccgaaagtcaagctgctgcaggaaagttacaaattaatggagatgaagaagctccttcgtggctacggaataagggaagttaatcttctgaacaaagaaataatgagggtggtgcggtacatcctcaaacaggacgttccttccagcctggaggacgcgctgaaggttgctcaagcctttatgctgtccgatgatgagatctactccctgaggataatcgacttgattgacagggaacagggagaggactgcctgttgctgttaaagtcacttccaccagcagaggcagagaagacggccgagcgcgttataatttgggcccgcttggccctgcaggaagagcccgaccatagtaaggaagggaaggcatggcgcatgagcgtcgcaaaaacctctgtggatatcctgaagatactatgcgacattcagaaggataatcttcagaaaaaagacgagtgcgaggaaatgctgaaactgtttaaagaggtcgccagcctgcaggaaaactttgaggtgttcctgtctttcgaagactacagcaactctagtcttgtggcagatctgcgagaacagcatattaaagctcatgaggtggctcaggccaagcataagccaggcagcacgcccgaaccaattgcagccgaggtgagaagtccctcgatggagagtaaattacacagacaggctttggccctgcagatgtccaagcaggaactggaggctgaattgacattgcgtgcgcttaaagatggaaatatcaagaccgccttgaagaaatgctcggacctgttcaagtaccactgcaatgctgacaccggcaagctcctcttcttgacatgtcaaaagctgtgtcaaatgctggcagataatgttcctgttacagtgcccgtgggactgaacttgccgtctatgatccatgatctcgctagtcaggcggccacgatttgctctcccgacttcctgcttgacgctctcgagctatgtaagcatacactgatggctgtggagctctctcggcagtgccagatggatgactgcggcattctaatgaaagccagttttggaacccataaagatccctacgaagagtggagctattccgacttcttcagcgaagacgggatagttctcgaatcccagatggttctgcctgtcatctatgagctgattagctctctagtccccctcgcagagagcaaacgctaccccctcgagagcacaagcttgccatactgctccctgaacgaaggcgatggtttagtgttgcccgtaattaactccatctccgccttactgcagaacctgcaagagagctctcagtgggaacttgctctgcgatttgtggttggttcatttggtacctgcctgcagcatagtgtgagtaactttatgaacgccacactgagtgaaaagctgttcggtgagacaactctggtaaagtcacgccacgtcgtaatggagctaaaggaaaaagcagtgatcttcattagagaaaatgctactaccttattgcacaaggtcttcaattgccgcttggtggacctcgacctggcactcggatattgtaccctgttgcctcagaaggatgttttcgaaaatctttggaagctgatcgataaagcttggcagaactatgacaagatcctggctatatccctggtgggctcagagctcgcgtctctgtatcaagaaatcgaaatgggtctgaaatttagggagttaagtaccgatgcccagtggggcatacgactaggaaaactgggcatttctttccagccggtcttccgtcagcattttttaacaaaaaaggacctgattaaggctctggtggaaaatatagacatggacacctctctcatcctggagtactgttcgactttccagctggattgcgacgccgtgctgcaactgttcatcgagacgctgctgcacaacacaaatgctggacagggacagggcgacgcatctatggattcagcaaaacggcggcatcccaagctgctggcaaaggcattggagatggtccccctgcttacctccacaaaggacctcgtgattagtctctccggcatcctgcataagctggacccttacgactacgagatgattgaagtggtgctaaaggtgattgaacgggccgacgaaaagatcacgaatattaatattaatcaggctttgtcaattctgaaacatcttaaatcctatcgccgcatctcaccgcctgttgacctcgagtatcagtacatgctggaacacgtgataaccctcccatctgcagcccagacacgactcccgtttcatctgatcttctttggcactgcccagaacttctggaagattctgtccactgagctgagcgaagaatccttccccaccctgttgcttatctccaagcttatgaagttctcactggacactttgtacgtgtccacagcaaagcatgtgttcgagaagaagttgaagcctaagctgctaaaactcacccaggccaaatctagcactttgatcaataaagagattacaaaaatcacccagacaatcgagtcatgtctcttgtcgatagtgaatccagagtgggctgtggctatcgccattagtctggcacaggacatcccagaaggtagcttcaagatctcagcactgaaattttgcctgtatttggcggagaggtggctccagaatatcccttcccaggatgagaaacgcgagaaagcagaggcgctacttaaaaaactccacatccagtaccgccggagtggtactgaagcagttctaatcgcacacaagttgaacactgaagaataccttcgagtcattggcaaacctgcacacctcattgtctcactgtacgaacatccaagtatcaaccagaggattcagaactctagtgggactgactacccagatatccatgcagccgccaaggaaattgctgaggtcaacgagatcaacttggagaaagtctgggacatgctgctggagaaatggctgtgtcctagcaccaagccaggggagaagccttcagagctctttgagttgcaggaggatgaggctctgcggagggtgcagtatctattactgtccagaccgatcgattactctagccggatgctgtttgtgtttgctacgtccactaccacaacactgggcatgcaccagctgacattcgcacaccgaacccgggctttgcaatgtctgttctacctcgccgataaagaaaccatcgagagcctctttaagaaacccatcgaagaagtgaagagttacctgcgatgtattacatttctcgcttcttttgaaacattgaatatccccatcacctatgaattgttctgtagcagtcctaaggagggtatgattaagggactatggaaaaatcatagtcacgagtctatggctgttaggctggtgactgaactgtgcttagagtataagatttacgacctccagctttggaatgggctgctgcagaagttgctcggctttaatatgatcccctacctgaggaaggtgcttaaggctataagttctattcacagtctttggcaagtgccatattttagcaaggcgtggcagagggtcatacagattcccttgctgtccgcttcctgtccactcagtcccgatcagctgagcgactgcagcgagtccctgatcgccgtgcttgaatgccctgtcagcggcgatttagatctgataggggtggcacgacagtacattcagttggagctgccagcgtttgcgctggcatgtctcatgttaatgcctcatagcgaaaagaggcaccagcagatcaaaaactttcttgggagctgcgacccacaggtcatcctgaaacaactcgaagagcacatgaatacaggacagttagccggttttagccaccagatccggtccctgattctgaacaatataatcaacaaaaaagaatttggaatactggccaaaacgaagtattttcagatgctcaaaatgcacgccatgaataccaacaatattacagaattggtcaattatctggccaacgatcttagcctagacgaggcaagtgtgctcatcacagaatactccaagcactgtggtaagccagtgccccccgacactgcaccttgtgagattttaaagatgtttctatctggtctgtcctag

SEQ ID NO: 15741 - DNA, 1332 bp, synthetic construct
  misc_feature 1..1332: note = Description of Artificial Sequence: Synthetic coding sequence
  source 1..1332: mol_type = other DNA
atgcttgaacatgtaattacgctaccttctgccgcccagacgcgcctgccattccacctgatattttttggtactgcccaaaacttttggaagatcctgtcaaccgaacttagcgaggagagctttcctacacttttgctgatttccaagctcatgaagttttccctcgacactctatacgtgtctacagccaaacacgttttcgagaaaaagctcaaaccaaaattgctgaagctgacccaggcaaagtcttcaaccctgataaataaggagatcactaagattacgcagacaatcgagagctgtcttctctccattgtaaaccctgaatgggccgttgccatcgctatcagtctcgcccaagacatcccagaagggtcctttaagatctccgctctgaaattctgtctgtatcttgctgaaaggtggctgcagaatatcccgagccaagacgaaaaaagggagaaggcggaggccttactgaaaaagctccatattcagtaccggcgatcaggtactgaagctgtcctcatcgcccataaacttaacaccgaggagtatcttcgggtcatcggcaaaccagcccatctgatcgtgtcattatatgaacatccctctattaatcaacggattcagaattcctccgggaccgattatccggacatccatgccgctgctaaggaaattgccgaagtcaacgagataaacctggaaaaagtgtgggatatgctgctggagaaatggctgtgcccatctacaaaacccggggagaaaccatcggaactgttcgagctgcaggaggacgaggctctgagacgcgtccagtacctcctcctcagtagaccgatcgactattcatcccgcatgttatttgtgttcgccacttcaacgactacaacgttgggcatgcaccagctaacgtttgcacatcgaaccagggcgctgcaatgtttgttttacttggcggacaaggaaaccattgagtcactgtttaaaaagcccatcgaagaagtgaagtcctatttacggtgcattacctttctggcctcgttcgagactttgaatattcccatcacctacgaactgttctgctcaagtccgaaggagggaatgataaaaggtttgtggaaaaaccatagccacgagagtatggctgtcagactggtgaccgagctctgtttggagtataagatctatgacctgcaactgtggaacggtctgctgcagaagctgctcggattcaatatgattccttatctgcgaaaggtactaaaagctatctcctctatccacagcctgtggcagcgttggaggagttgctacgtggcttag

SEQ ID NO: 15742 - DNA, 417 bp, synthetic construct
  misc_feature 1..417: note = Description of Artificial Sequence: Synthetic coding sequence
  source 1..417: mol_type = other DNA
atgaattcgctggtgtcctggcagctcctcctctttctgtgtgctacccatttcggagaaccgttggaaaaagtggcaagtgtggggaattcaaggcctactgggcagcaacttgaatccctggggctgctggcccccggagagcagagccttccttgtaccgagcgaaagccagccgctacagcacggctaagccgtcgcggtacatcattatctccacccccagagagttccggttctccccagcagcctggcctctcggccccacattcacgccaaattcccgctccccaaggggctgtcttggtgcaaagggaaaaagatctccctaactataactggaacagctttggtctgagatttggaaagcgcgaagcagcccctggaaatcatggtagaagtgctgggagaggatag

SEQ ID NO: 15743 - DNA, 771 bp, synthetic construct
  misc_feature 1..771: note = Description of Artificial Sequence: Synthetic coding sequence
  source 1..771: mol_type = other DNA
atggcacaccgccccccgtctcctgccctcgccagcgtcttgttggcgctgctcctgtccggagccgctcgggcagcagagattgtagggggtcatgaggcccagcctcactcccgcccttacatggctagtctgcaaatgagaggaaatcctggaagccatttctgcgggggcactctgattcacccaagcttcgtgctgaccgccgctcattgtctgagagacatcccacagcgtcttgtgaatgtggtcctgggcgcacataatgttcggacccaggaaccaacccaacagcatttctccgtcgctcaggtcttcttaaacaattacgatgctgagaacaagctgaacgatgtgctcctcatccagcttagctcccctgctaacctttcagccagcgtggctacagtgcaactcccacagcaggaccagccggtgccgcacggaacgcaatgtcttgctatgggctggggtagggtgggtgctcatgatccgccagctcaggtccttcaggagctcaatgtgaccgtcgtgaccttcttctgtcggccacataatatctgcactttcgttccgagacggaaggctggcatctgtttcggggactctggtggccccctaatctgcgatggcatcatacaaggtattgatagctttgtaatatggggctgcgccactcgcctttttcctgacttctttacacgcgttgccctgtatgtcgactggatccggtctacattaaggagggtggaagccaaggggcgtccctag

SEQ ID NO: 15744 - DNA, 2937 bp, synthetic construct
  misc_feature 1..2937: note = Description of Artificial Sequence: Synthetic coding sequence
  source 1..2937: mol_type = other DNA
atggcacataccaccaaggtgaatggctccgccagtggcaaggcaggcgacatactgtccggggatcaggacaaagagcagaaggatccttattttgttgaaaccccatacggataccagctcgacttagactttctaaaatatgttgacgacatacaaaaaggaaatacgattaaacgtctgaatatccaaaaaaggagaaaaccaagtgtaccatgtcctgaaccaaggacaacatctggacaacaaggcatctggacatcgactgaatccctgtccagctctaattctgatgacaacaaacagtgcccaaacttcttgatcgctcgctctcaggtaacctccacccccatttcaaagcctcctccaccgctggagacatcactgccttttctcactatcccagagaaccgccagctaccacccccatcgccacagctccctaagcacaacctccatgtcacaaagacactaatggaaacacgccgaagattagaacaggaaagggctaccatgcagatgaccccgggcgaattccgtcggcctcgcttggcctcatttggcgggatgggcaccacaagtagcctgccgtcctttgtcggatccggaaatcacaatccagcaaaacaccaactccagaatggataccagggaaatggtgattacggaagctacgccccggccgcgccaacaacgagcagtatgggcagctccattaggcatagtcccctcagcagtgggatctcgactccggttacaaatgtatctcccatgcacctgcagcacattagggagcagatggccatcgcccttaaaagactgaaggagctagaagaacaggtgcggaccattcccgtcctgcaggtgaagatatcagtactgcaggaggagaaacggcagctcgtaagtcagctcaagaaccagagagccgcatcccagattaacgtgtgtggagttcgaaaaaggtcatattccgccgggaacgcctcgcagctggaacagttgagccgtgcacgacggtcgggcggcgagctctacatcgattacgaggaagaggaaatggagaccgtcgaacagtcgacccagaggattaaagagttcaggcagcttacagctgacatgcaagccttagagcagaaaatccaggatagctcttgcgaggcatcctcggagctccgggagaatggagaatgtcgaagcgtggcagtgggcgcagaggagaacatgaacgacatcgtggtctaccatcgtggcagtagatcatgtaaggacgcggcagtcgggacactggtggaaatgaggaattgtggggttagtgttactgaggccatgcttggagttatgacagaggcggacaaggagattgagctgcaacagcagaccattgagagtctgaaggagaagatctaccgactggaggtacagctccgcgaaaccacgcatgatagggagatgaccaagctgaagcaagaactgcaagcagcagggtcaaggaagaaagtggataaggccacaatggctcaacccctcgtcttttccaaggtggtggaggccgtagttcaaactcgagaccagatggttggatcccacatggacctggtggatacgtgcgttgggaccagcgttgaaacgaattcagtaggaatctcttgtcaaccagaatgtaagaacaaggtcgttggccccgaattaccaatgaattggtggatagttaaagaacgcgtagaaatgcacgatcgatgtgcaggtagaagtgtggaaatgtgtgacaagagcgtgagtgttgaagtgtctgtgtgtgaaaccggtagtaataccgaggaatcagtgaacgaccttaccctgttgaagaccaatctcaatcttaaggaagtgcggagtatcggctgcggagactgtagcgtagatgtgaccgtgtgttcacctaaggagtgcgcctcacgcggggttaacacagaagccgtctcccaagtggaggcagctgtgatggctgtgccccgtaccgccgatcaagacacatccactgatctggagcaggtacaccagttcacgaataccgagaccgcaaccctgattgaaagttgcacaaacacgtgtctgagtacactcgacaaacaaacaagcacacagaccgtggaaaccaggacagtggccgttggggagggtagagtgaaggacattaactcgtccactaagactaggtctatcggcgtaggtaccctactgagcgggcattcaggcttcgataggccaagcgccgtgaaaaccaaagagagtggtgtcggtcagataaacatcaacgataactacctggtgggactcaagatgcggacgatcgcctgtgggccccctcaacttaccgtgggattgacggctagtcggcgctctgtcggggtgggagacgacccagtgggtgagtccctggagaatcctcaaccacaggcccccctaggtatgatgaccgggctggatcactacatcgagcgtatccagaagctccttgctgaacagcaaactctcctggccgagaactactcagaactagctgaagctttcggagaacctcactcccagatgggctctctgaattcacagctgatctctacattgtccagcatcaattccgtcatgaagtcagcatccactgaagagcttcgcaaccccgatttccaaaagaccagcctaggcaaaataactggaaattatttgggctacacctgcaaatgcgggggcctacagagtggaagtcccttaagttctcagactagtcaaccagagcaggaggttggcacttccgagggcaagcccattagctcccttgacgccttcccaacacaagaaggaactctttcccccgtgaacctgactgacgaccagatagctgctggactctacgggaacttttcccactctcaaagtctggccagcggcttctag

SEQ ID NO: 15745 - DNA, 831 bp, synthetic construct
  misc_feature 1..831: note = Description of Artificial Sequence: Synthetic coding sequence
  source 1..831: mol_type = other DNA
atgctcagcgcatgtaacttgctaaaaaacaccatcaacgaccctaaagccctgacctccaaggatatgagattttgtctgaataccctgcagcacgagtggtttcgcgtctcttctcagaaatcagcaatccctgctatggtgggggactacattgcagccttcgaggccattagccctgacgtgctgcgatacgtaatcaacttggcggatggtaacggaaataccgccctgcactactcagtgtcccatagcaacttcgagattgtgaaattgcttctggacgcagatgtttgtaacgttgaccatcagaataaggctggttatacccctatcatgttagccgctcttgccgcagtggaggctgagaaggacatgcggatcgtggaggagttgttcgggtgcggcgacgttaatgccaaggccagccaggcaggacaaacagctttaatgcttgctgtgtcccacggacggattgatatggtcaaggggctgttagcttgtggcgccgacgttaacattcaggatgatgaaggaagcacagcactgatgtgcgcaagcgagcacgggcatgtggagattgttaaactgctgctcgcacagcctggctgtaatgggcacctagaagataacgacgggtccacagcactctcaattgctcttgaggccggccacaaggacatcgcagtgctcctttacgcccacgttaacttcgccaaggcccagagcccggtatccgttgtgcacctcgctttcgtcaaccgactgaaaagtactagactggtcgacccactgcccccaggcatcgatgggcgccagatcttgtgttag

SEQ ID NO: 15746 - DNA, 993 bp, synthetic construct
  misc_feature 1..993: note = Description of Artificial Sequence: Synthetic coding sequence
  source 1..993: mol_type = other DNA
atggccgagggtcatcacgccgtaaatattgaaggcctaaagtcagctagggtagaagacgaaatgcaggttcaggaatgtgagcccgagaaagtggagattcgcgagagatatgagcttagcgagaaaatgctttccgcctgtaacttgttaaaaaatacgatcaatgaccctaaggcactgacctccaaagatatgggccaggtgcagtggttaacacccatgattccgaccctccgggaggccgacgccgggggaagtcatgaaaggttttgtcttaacactttgcagcacgaatggtttcgagtgagttcccaaaagagcgcaattccagctatggttggtgattacattgccgccttcgaagcaatatctcccgatgtactccgttacgtcatcaatctggcagatgggaatggcaacactgccctgcactatagtgtgtcccactcaaacttcgagatcgtgaaactgttgctggatgctgatgtctgcaatgttgaccaccaaaataaagctgggtacacacccattatgctcgcagctctagccgcagtggaagcagagaaagacatgagaatcgtagaggaacttttcggctgcggtgatgtgaacgctaaagcttcgcaggctggacagactgccctcatgctggccgtttcacacggaaggattgacatggtcaagggcctcctggcctgcggcgccgacgtcaatatccaggacgacgagggttccactgctctgatgtgcgctagtgagcacggccatgtggaaatcgtgaagctgctcttggctcagcctggctgtaatggacacctagaggataacgacgggtccaccgctctatccattgcactggaagctggccacaaagatattgcggttctgctctatgcccacgtcaactttgctaaagctcagtcccctggcactccccggttaggacgtaagacctctccaggcccgactcatcgggggagctttgattag

SEQ ID NO: 15747 - DNA, 3585 bp, synthetic construct
  misc_feature 1..3585: note = Description of Artificial Sequence: Synthetic coding sequence
  source 1..3585: mol_type = other DNA
atggagactcgtaggcggctggagcaagaacgggctacaatgcagatgacgcccggcgagttcagaaggcccaggctggctagttttggggggatgggcacgactagctcgctccccagcttcgtggggagcgggaaccacaatcctgccaagcaccagctgcagaatggttaccagggcaacggtgattacggtagctacgcaccagccgcacccacaactagttccatggggagtagcatccgtcatagcccattgtctagcggcatctccacaccggtcacaaacgtgtcgcccatgcacctccagcatattagggagcagatggcgattgcacttaaacgcctcaaagagcttgaagagcaggtgagaactataccagttctccaggtgaagatctccgtgttgcaggaagagaagcgacagttggtgagtcagctgaaaaatcagcgagccgcctcacagattaacgtctgtggcgtgaggaagcggtcgtactcagctgggaacgcaagtcagctggagcaactatcaagggctagaaggagcgggggggagctgtatatagactacgaagaggaggagatggagaccgtcgagcagagtacacaaaggatcaaggaattcaggcaactgacagcagacatgcaagctctcgagcaaaaaatccaggattcttcttgcgaggctagttccgagctgagggaaaacggcgagtgcaggtctgtggctgtgggcgccgaggagaatatgaatgacatcgttgtttatcacaggggctcaaggtcttgtaaggatgcagccgtggggaccctggtggagatgaggaactgcggcgtgtctgtgaccgaggcaatgcttggcgtgatgactgaggctgacaaagagatcgagcttcagcagcagactatagagtctcttaaggagaagatctatcggctggaggtacagctcagggagactacacacgatcgggaaatgacgaagctgaagcaggagcttcaggcggccggtagtaggaaaaaggtcgacaaggcgacaatggcacaaccactcgtgtttagtaaggtcgtggaggctgtagtccaaacccgggatcagatggtgggatcgcacatggacctcgttgatacctgcgtggggacctctgtagaaaccaactctgtcggaatctcatgtcagcccgagtgcaagaacaaagtcgtaggccccgaactacctatgaattggtggattgtcaaagaacgcgtggaaatgcatgacaggtgtgcgggcagaagcgtggaaatgtgtgacaaaagtgtttctgtcgaagtgtctgtctgtgaaacaggctctaacacggaagagtcagtcaacgacttaaccctcctgaagacaaatttgaatttgaaggaggtcaggtctatcggttgtggcgactgtagcgttgatgtgactgtttgcagtccaaaggaatgcgcatcgcggggcgtcaacactgaggctgtgagccaggttgaggccgccgtgatggcagttcctcggactgctgaccaggatacatccacggatctggagcaggtacaccaattcaccaacaccgaaaccgccacacttatagaatcttgtacaaatacctgcctcagcactcttgataaacagacttcaactcaaacagtagagactcgaacagttgcggttggggagggaagggtaaaggacatcaactcttcaactaaaactagatccatcggagtcggcacacttctttctggtcactcgggcttcgataggccaagcgccgtgaagaccaaggaaagtggcgtcggacaaattaatataaatgataattacttagtgggattgaagatgcggaccattgcctgtgggcctccacagctgacagttggcttaacagcctcacggcgtagtgttggtgtcggagatgatcctgttggtgaatctctagagaatccccagccacaggctccattaggtatgatgactggcctggaccactacatcgagagaatccagaagctcctcgccgaacaacagaccctgctagccgagaattatagtgaactggccgaagcgttcggagagcctcatagccagatgggctcactgaacagccaactaatatcaacactctcttctattaactcagtaatgaagagcgccagcaccgaagaactgaggaacccggattttcagaagactagcctgggtaagatcacggggaattacctcgggtacacctgtaagtgcggagggctccagtccggttctcctctgtcctcacaaaccagtcagccggaacaggaggtcggaaccagcgaagggaaacccatttcctccctcgacgcctttcccacacaggagggaactctgtcccctgttaacttgacggacgaccagatcgcagcggggctctacgcctgtacaaacaatgaaagtactctcaaatctattatgaaaaaaaaagacgggaataaagactcgaatggcgcaaaaaaaaacttgcagttcgttggaatcaatggcggatacgagaccaccagtagcgacgattcgagttccgacgagagctcatcaagcgagagcgatgatgagtgcgacgttattgagtacccattagaagaagaggaagaagaagaagacgaggataccagagggatggccgagggccatcatgccgtaaacattgaaggtctgaaaagcgctcgggtcgaggacgagatgcaggtgcaagagtgtgagcctgagaaagttgagatcagagagcgctacgagttgtcggaaaagatgttgagcgcgtgcaaccttctcaagaataccattaacgatccaaaggccctgacaagtaaagatatgcgattctgtctgaatacattacaacacgagtggtttcgggttagttcacagaagtctgctattccagccatggttggcgactacattgcagcttttgaagccatttcacctgacgttctgcgttacgtgattaatctggctgacgggaatgggaatacagccttgcactattccgtcagtcactctaacttcgaaattgtgaaactcttgcttgatgccgatgtgtgtaatgtggaccatcagaacaaggccggctatactcccattatgcttgccgctctggccgcggtggaggccgagaaagacatgagaatcgtcgaagaactttttggttgcggagatgtgaatgccaaggcatcacaagctggacagacagcacttatgctggctgtgtctcacggacgcattgacatggtgaaaggtctgctagcatgcggagccgatgtgaacattcaagatgatgaagggtcaacagctcttatgtgtgccagcgaacacgggcatgtggagatcgtcaaactgcttctggcccagccagggtgtaacggacatttggaggacaatgacgggagcacagccctgagcatagctcttgaggctgggcacaaagacatagcggtgctcctttacgcacatgtcaattttgccaaggcacaaagccccgggacccctagactaggaaggaagacaagcccaggtcctacacacagaggaagcttcgactag

SEQ ID NO: 15748 - DNA, 4059 bp, synthetic construct
  misc_feature 1..4059: note = Description of Artificial Sequence: Synthetic coding sequence
  source 1..4059: mol_type = other DNA
atggcgcacaccacaaaagtaaacgggtcagcttctggcaaggccggggatatactgtcgggcgaccaggacaaagagcagaaagacccgtatttcgtggagaccccatacgggtaccagctggacctggactttctcaagtacgtggacgatattcaaaagggcaacacaatcaagaggcttaacatccagaagagaagaaagccttccgtaccatgccccgagcctcgcacaacaagcggacagcaggggatatggacatctaccgaaagcctgtccagttctaatagtgacgataataagcagtgtcctaacttcctgatcgctaggagccaggtcacctctacccctatcagtaagccacctcctccccttgagacctcgttacccttcttgactatccctgagaataggcaactcccgccgccttccccacaacttccgaagcataatttgcacgttactaagaccctaatggagacgcgccgcagacttgagcaggaacgagccacaatgcagatgacgcccggggagtttcggaggccccgactggcctcattcggggggatggggaccaccagcagcctgccctccttcgtaggttctggcaatcacaatcccgccaagcatcagttgcaaaatggctaccagggcaacggagattacggcagctatgcacctgccgcccctaccaccagcagtatgggatcatcaattcgccattcaccactttccagcgggatctcaactcctgtcacaaatgtgtcaccaatgcaccttcagcatatacgggagcaaatggccatcgccctgaagaggttgaaggaattggaagagcaggtgcggacaatcccagtgcttcaggtgaagatcagtgttctgcaggaagaaaaaaggcagctggtgagccaactgaaaaatcagcgagcagctagccagatcaacgtttgtggagtgaggaaaaggtcttattctgccggtaacgcctctcagctggagcagctgagccgcgcaaggagatctggaggagagctgtatatcgactatgaggaagaggaaatggagacagtggaacagtctacgcagcggattaaggaattcaggcagctgacggccgacatgcaggctctcgagcagaagatacaggactcgtcttgcgaagctagcagcgagttgcgcgagaacggcgaatgcagatcagtggccgtgggggccgaggaaaatatgaacgatatagtcgtgtaccatagagggagcaggagctgcaaggacgctgctgtagggacccttgtcgagatgaggaattgcggcgtgagcgtgacagaagctatgctgggcgtgatgaccgaagccgacaaagagattgaactccagcagcagacaatcgaaagccttaaagagaaaatttacagactggaagtgcaactgagggaaacaacccatgatcgtgaaatgactaaactaaagcaggagctgcaggcggctggttctcgcaaaaaggtcgacaaggctacgatggctcagcccctcgtgttctctaaagtggtggaagccgtggttcagacgcgggaccagatggttggatcacatatggacctggtagacacatgtgtggggacaagtgtggaaaccaacagcgtaggcatcagttgccagcctgaatgtaagaacaaggtggtgggtccggagttgcccatgaactggtggatcgtgaaggaaagggtggaaatgcacgatcgatgcgctggacgaagcgtggagatgtgtgataagtctgtctcagtagaagtctctgtttgtgaaacaggaagcaataccgaagaatctgtcaatgacttaactctccttaagacgaatcttaatcttaaagaggtacggtccataggatgcggcgattgctccgttgacgtgacagtttgctctccaaaagaatgcgctagcaggggggttaatacagaggccgtgtctcaggtagaggcagccgtcatggccgtgcctcgaaccgcagaccaggatactagcaccgatctggaacaggtacaccagtttacaaatacagaaacagccactctgattgagtcttgcacaaacacatgcctatccacactggataagcagacgtcaactcagactgtggagaccaggaccgtggcagtaggggaagggcgcgtgaaagatataaattcctccacaaagacccgctctatcggcgttgggacacttctctccggtcacagcggcttcgacaggccaagcgctgtcaagaccaaagaatcaggggtggggcagatcaacataaacgataactacttagtgggcctgaagatgcggacaatcgcttgtggcccaccccaacttacggtcggcttgactgcttctagaagatccgtcggggtgggggatgacccagtgggtgagtctctcgagaatcctcagccacaggcacctctcggcatgatgacagggttagaccattacatcgaacgaatacagaaacttttagcggaacagcagaccctactggccgagaattattcagagctcgccgaggcctttggggaaccccactctcagatggggtcccttaactctcaactcattagcactttatcaagtattaatagtgtgatgaaaagcgcaagtaccgaagaacttcgcaatcctgattttcaaaagacatctcttggcaaaatcaccggtaactatctgggctacacatgcaagtgcggaggtcttcaatctgggtcacccctatcctctcagacttctcagccggagcaggaggtggggacctctgaagggaagccaatctcaagcctggatgccttccccacccaggaaggcactttatcacctgtgaatctgacagatgatcagatagcggctggtctgtatgcttgtaccaataatgagagcaccctaaagagcataatgaaaaagaaagacggaaacaaggattctaacggcgccaagaaaaacctgcaatttgtgggaattaatggaggctatgagacgacctcctctgatgattcttcctctgacgaatcaagttcctctgaatccgatgatgaatgcgatgtgatcgagtaccctttggaggaagaggaagaggaggaagatgaagatactcgcggaatggctgagggacaccatgcggtcaacattgagggcttgaagtctgcccgggtggaggatgaaatgcaagtccaagaatgtgagcccgaaaaagtggagatcagagagagatacgaactgagcgaaaaaatgctttcagcgtgtaacttgctgaagaacacaatcaatgatcctaaggcgctgacatccaaggacatgcgattttgccttaacacactccagcacgagtggtttagagtgagctcccagaagagcgctatccctgcgatggtgggagactatattgccgccttcgaagcgatctcacccgacgtcctgaggtatgtgatcaacctcgctgacggaaacggaaacacagccctgcactacagcgtgtctcactccaattttgagattgtgaaactgctgctggacgccgacgtgtgtaacgtggaccatcagaacaaggctggctatacacctatcatgctagccgcgctggccgccgtcgaagccgagaaggacatgcggattgtggaggaactatttggctgtggcgatgtcaatgccaaggcctctcaggccggacagactgccctgatgctggctgtttcccatgggagaatcgatatggtgaaggggctactagcctgcggcgcagacgtgaacatacaggacgacgagggctccacagcgctaatgtgtgccagcgaacatggacatgttgaaatcgttaaactattgctcgctcaaccgggctgcaatgggcatctcgaggacaatgacggtagtaccgctttgagcatagccctggaggccggccacaaggacatagctgtgctgctgtatgcacatgtcaatttcgctaaagcccaatcccccggcacacccaggctggggcgcaaaactagcccaggacccacacacagaggcagttttgattag

SEQ ID NO: 15749 - DNA, 4059 bp, synthetic construct
  misc_feature 1..4059: note = Description of Artificial Sequence: Synthetic coding sequence
  source 1..4059: mol_type = other DNA
atggcacacacaaccaaggttaacggaagtgcgtccggtaaagctggggatatactgtccggtgatcaggacaaggagcaaaaggacccctatttcgttgagactccttacggttaccaactagacttggacttcctgaagtacgtggatgacattcagaaaggcaatacaatcaaacggctgaacatccagaagcgccggaaaccgtctgtgccgtgccctgaaccccggaccactagcggtcagcagggcatatggacatccaccgagtcgctgtcttcatcaaactctgacgataacaagcagtgtcctaattttctgatagccagaagccaggttacatccacccctatttcaaagcctccccctcctctggagacctcactgccattcctgacgatcccagaaaaccgccaactacccccaccaagcccccagctgcctaagcacaacctgcacgtcacaaagaccctcatggaaactcgcagacgcttagagcaggaacgcgcaaccatgcagatgaccccgggggagttcaggcggcctcgcttggcttccttcggcggaatgggaactacgtcctccctgcctagcttcgtgggatcaggtaatcacaaccctgcgaagcaccagttacagaacggctatcagggcaacggagactacggatcatacgcacccgcagctccaacaactagttcaatgggatcatccattaggcactctcccctgagtagcggaataagtacacctgtcactaatgtgtccccaatgcatctgcaacacattcgcgaacagatggcgattgcactgaagaggctgaaggagctggaggaacaggtacgcactatcccagtccttcaggtcaaaatcagtgttctgcaggaggaaaaacggcaactggtatcacagctgaagaaccagcgggcggcatcccagattaacgtgtgcggcgtcagaaagaggtcgtactctgcaggcaatgcctcacaactcgagcagctgtcccgagctcggaggagcggtggcgagctgtatatcgattacgaggaggaggagatggaaacagtggaacaatccacccagaggataaaggaatttaggcagctgactgccgatatgcaggccctcgagcaaaagatccaggatagtagctgtgaggcaagtagcgagttgcgcgagaacggtgagtgccgctcggtggcagttggagctgaggaaaacatgaatgatattgtggtgtatcaccgcgggtccaggtcctgtaaggatgctgctgttggtaccctcgtggaaatgaggaactgcggcgtcagcgtgaccgaagctatgctgggcgtgatgactgaagccgataaagagatcgaactgcagcagcagaccattgaaagcctgaaggagaaaatatacagacttgaggtccagctcagagagacaacacatgacagggaaatgacaaaactaaaacaggaactgcaggccgctggatcccgcaagaaagtagacaaggctacaatggcccagcccctcgtttttagtaaggtggtggaggctgtcgtccaaactagagaccagatggtcggctcccacatggatctcgtggacacatgtgtgggcacctcagttgaaacaaacagtgtaggcattagttgccagccagagtgtaaaaataaggtggtgggccctgagttacctatgaactggtggatcgtcaaggaaagggttgagatgcacgatcgatgcgctgggcggagcgtggaaatgtgcgataagtctgtttctgtcgaggtttcagtatgcgagaccggctccaatactgaggagtctgtgaatgatctgactctgctcaaaactaacttgaaccttaaggaggttcgtagcatcggttgcggagactgctcagtagacgttaccgtctgttcacctaaagagtgtgcttccagaggtgtgaacactgaggctgtgtcgcaggtggaggctgctgtcatggccgtgcccaggaccgcagaccaggatactagtaccgatctggaacaggtgcaccagtttacgaacacggaaaccgccacacttattgaaagttgtactaacacttgtctttctaccctggacaagcagacttccacccagacagtcgagacccgaacagtggccgtaggcgaagggcgcgtgaaagatatcaattcatctactaaaacgcgatcaattggcgtcggaacactgctctcaggtcatagtggctttgaccgacccagcgctgtaaagaccaaggagagcggggtcgggcagattaacattaacgacaattacctagtgggactgaaaatgagaaccatcgcctgtggccctccccagctcacagtcggcttgaccgcctcacgcagatcagtgggagtgggtgacgaccctgttggcgaatctctggaaaatccgcaaccacaggctcctctgggcatgatgacgggtctggaccattacatcgaacgcatccagaaattactagcagagcagcagaccttgctggccgagaactactccgagttggctgaggctttcggcgagcctcactcccagatgggatctctcaactcccagctgatatctacactcagttctataaattctgtgatgaagtcggctagcacagaggagctccgcaaccccgattttcagaagacctctctggggaaaatcacaggaaattatcttggatatacatgtaaatgcggcggcttgcagtctggcagcccactgtcatcgcagacatcacagccagaacaggaagtcgggacctcagagggaaagcctatcagttctctggacgcattcccaacccaagagggtacattgagccctgtcaacctcactgacgatcaaattgccgccggactgtacgcgtgcacgaacaacgagtccaccctcaagagtatcatgaagaaaaaagacgggaacaaagattctaacggtgctaaaaaaaacctccagtttgtggggatcaacggtgggtacgaaactaccagctctgacgacagctcgtctgatgagtcctcttcaagtgagagcgatgatgagtgtgacgtgatcgagtacccgctcgaggaggaggaagaagaggaagatgaagacacacgtggcatggccgaaggacatcatgccgtgaatatcgagggtctgaagagcgccagggtggaagacgagatgcaagtacaggagtgcgagcctgagaaagtggagatcagagagcggtatgagctaagtgagaaaatgttgtccgcatgtaatttgttaaaaaacactattaatgatcccaaagcactcactagcaaggatatgagattctgcttaaatacactgcagcatgaatggtttagagtgtctagccagaagagcgctatcccggctatggtgggggattacattgcggcgtttgaggcaattagccctgatgtgctcagatacgtgattaacttggcggacggaaatggtaacactgctttacattactctgtaagccacagcaattttgaaatcgtgaagctgctgctggacgccgatgtgtgtaacgtggaccaccagaacaaggcagggtatacacctattatgctggcagcactcgccgctgttgaggcggaaaaagacatgagaattgtggaagagctattcggctgcggcgacgtcaacgccaaagccagccaagctggtcagaccgccctaatgctggcagtaagccatggacgaattgacatggtcaagggcttgcttgcgtgcggggccgacgttaatattcaggatgacgaggggtccacggcactgatgtgtgcatcagaacacggtcacgtggaaatcgtaaagcttttactggcgcaacctggatgcaatggacatctggaagacaacgacgggtctaccgcactctcaattgcactcgaggccggacataaagatattgccgtcttgctgtatgctcatgtgaatttcgcaaaggcacagtcccccggaacaccacggctggggagaaaaaccagtcccggacctacccaccgcggctccttcgactag

SEQ ID NO: 15750 - DNA, 1197 bp, synthetic construct
  misc_feature 1..1197: note = Description of Artificial Sequence: Synthetic coding sequence
  source 1..1197: mol_type = other DNA
atgaaaaaaaaagatggcaataaggactctaatggtgccaaaaagaacttacagtttgtcgggataaacgggggatacgagaccacgagcagtgacgactcctctagcgacgaatctagcagctccgaaagcgacgatgagtgcgatgttatagagtaccccctcgaggaggaggaggaggaagaagatgaggatactcggggtatggctgaaggtcaccacgccgtgaatattgagggcctgaagtcggcaagggtggaggacgaaatgcaggtccaagagtgtgagcctgagaaggtggagataagggaacggtatgagttgtcggaaaaaatgctctctgcgtgcaacttactcaaaaacactatcaacgatccaaaagctctgaccagcaaggatatgggccaggttcagtggctgaccccaatgatccctactttgcgggaagctgacgcagggggctcccacgagaggttttgcctgaatacattgcaacacgaatggtttcgggtcagcagccagaagagcgccattcccgccatggttggggactacatcgccgcttttgaagccatctctcctgacgtgctgaggtatgtgatcaatctagcagacggcaacggcaacactgccctgcactacagtgtctcccactcaaattttgaaatcgtaaagctcctcctggatgccgatgtctgtaatgtggaccaccagaataaggccggctataccccgattatgctggccgcactggccgcagtggaagcagagaaagacatgcggatcgtggaggaattgtttggttgtggcgacgtgaacgccaaggcttcgcaagctggccagaccgcccttatgctcgctgtcagccacggcaggatcgacatggtgaaagggctactcgcatgcggcgctgatgtcaatattcaggacgatgaagggagcactgctttaatgtgcgcctccgagcacggccacgtcgagatcgtcaagttactcctcgcccagcctggctgtaatgggcatctggaggataacgacgggtcaactgctttatcaattgccctggaggctggccacaaggatatagccgttctgttatacgcgcacgtcaactttgccaaggcccagtcgcccggcacaccacgtctcggacgtaagactagcccaggcccaacccaccggggttccttcgattag

SEQ ID NO: 15751 - DNA, 2211 bp, synthetic construct
  misc_feature 1..2211: note = Description of Artificial Sequence: Synthetic coding sequence
  source 1..2211: mol_type = other DNA
atggggaaccctgagaatatcgaggatgcttatgttgccgtgattcgcccaaaaaacacagcctcacttaactcacgagagtaccgggctaaatcctatgagattctcctccatgaggtgcctattgagggccagaaaaaaaagcgcaagaaagtcctgctcgagactaaactgcagggaaattccgaaatcacccagggcattctagattatgtggtggagactacgaaacctatctcaccagccaatcagggaattcgaggcaagagagtggtgctcatgaagaagtttccactggacggtgagaagatgggccgagaggcaagcctgtttatcgtccccagtgtcgtaaaggacaatactaagtacacttatactccgggatgccctatcttttattgtctgcaggacattatgcgggtgtgtagtgaatcctcaacccatttcgctactctgacggcaaggatgctgattgcgctggataagtggctcgatgaaagacacgcccagtcccatttcattccagcacttttcagaccatcacctctggaaaggataaaaacaaatgtgatcaatcctgcatatgcgacagaatcaggccaaaccgagaacagcctccatatggggtactcagcactggagatcaagagcaaaatgctggcactcgagaaggccgacacctgtatttacaatcctctgttcggcagcgatctccaatatactaacagagtggacaaggttgtcatcaatccctacttcggtctgggagcaccagactattccaaaatccagattcccaagcaggaaaagtggcaacgcagcatgagcagcgtaaccgaggacaaagagcgacagtgggtggacgatttcccgctgcacaggagcgcctgtgaaggagattctgaactgcttagtaggctgttatcagagagattttccgtcaaccagctcgactctgatcactgggccccaatccattacgcatgttggtacggcaaggtggaagccacccgcattctactcgagaaggggaagtgcaaccctaacctgctgaatggtcaactttctagtccactgcatttcgctgccggtggtggacatgcggaaatcgtacagatcctgttaaatcaccctgagacggacaggcacattacagaccagcaggggcgcagccctctgaatatctgcgaggagaacaagcagaacaattgggaagaggccgccaagctgttaaaagaggcgataaataagccgtacgagaaggtgaggatatataggatggacggaagctatagatccgtggagctcaagcatggcaataatacaactgttcagcagatcatggaggggatgagactaagtcaggagacgcagcagtatttcactatttggatatgcagcgagaacctgtcactgcaactaaaaccctaccacaaaccactgcaacacgtgcgcgactggccagaaattctggcggaactcacaaacctggatccacagagggagaccccccagttattcctgcggcgggatgtccgtctgcccctggaggtagagaaacagattgaggatccattggccatcttaattcttttcgatgaggcgcggtacaacctgctcaaggggttttacacggctcctgatgcaaaactcatcactttagcctccttgctgctccaaattgtctatgggaactacgaaagcaaaaaacataaacagggatttctgaacgaggaaaatctgaaatccattgtccccgttacaaagctgaagtctaaagccccccactggactaacagaatacttcacgagtataaaaatctgtcaacatcagagggtgtctcgaaagaaatgcaccacttacaacgcatgttcctacagaattgctgggagatccccacatacggagccgcttttttcaccggccaaattttcactaaggccagcccttctaaccataaggttatccctgtttatgtgggtgtaaacatcaaggggctgcacctcctgaacatggagaccaaggcccttttgatctcgctgaaatacggatgtttcatgtggcagctcggtgatacagatacatgcttccagattcactccatggagaacaagatgtcctttattgtccataccaaacaggccggtcttgtggttaagctgcttatgaagctgaatgggcaactgatgcccacagagcgtaattcatag

SEQ ID NO: 15752 - DNA, 2067 bp, synthetic construct
  misc_feature 1..2067: note = Description of Artificial Sequence: Synthetic coding sequence
  source 1..2067: mol_type = other DNA
atggggaatcccgagaatatagaggatgcctacgtcgctgtaatcagacccaaaaacaccgcatctttgaatagtcgagagtaccgggccaaaagctatgagatcttgctgcatgaagtaccaatcgaagggcagaaaaaaaagcgtaagaaagtgctgctggaaaccaaattacaggggaactcagaaatcactcaaggaattctggattatgtcgtggagaccacgaagccgatctctccagcaaatcaggggattaggggaaagcgggtggtgctcatgaaaaagtttccgctggatggtgagaaaatgggaagggaagcgtcactgttcatcgttcccagcgtggtgaaagataatacaaaatatacttatactccgggatgcccaatcttttactgtttgcaagacataatgagagtgtgttccgagagttccacacatttcgcaactttaacagccaggatgctgattgctctggacaaatggctggacgagaggcacgcccagagccacttcattccagccctgttcaggccgtcccccctggaacggatcaaaaccaatgtgattaatccagcttatgcaacagaaagtggccaaacagaaaatagcctgcatatggggtactccgctctagagatcaagagtaaaatgttggccctagaaaaagccgacacatgtatttataaccccttgtttggaagcgatttacagtatacaaatcgcgtggataaggtagtgattaacccctattttggtctgggagccccagattattctaagatacaaatacccaagcaggaaaagtggcagagaagcatgtcgagtgttacagaagacaagtatggcaaagtagaagccactagaatactgctagaaaagggcaagtgtaatcctaacttacttaatggtcaacttagcagtcctctccacttcgctgctggagggggtcacgccgaaatcgtgcagatccttctcaaccatccggaaacggatcgacatatcacagatcaacagggacgatccccgttgaatatatgtgaagaaaacaagcagaataactgggaggaagcagccaagctcctgaaggaggccattaacaagccctacgaaaaggtcaggatatacagaatggatgggagctataggtcggtcgagctgaagcacggaaacaatactaccgttcaacagatcatggaggggatgcgtctttcacaggagacacaacagtacttcactatttggatttgcagtgaaaatctcagtctgcagttgaagccctaccataagcctctgcagcatgttcgcgattggcccgaaattctggcagagctgaccaacttggacccacagcgcgaaacaccacagctgtttctgaggcgtgatgttagactgccgctcgaagtcgagaaacaaatcgaggacccgctcgcaatacttatcctgttcgatgaggcccggtataacctgctgaaaggcttttacacagcacccgatgctaagttaatcactctggcctcactgctcctgcagatcgtgtatggcaattacgaatctaagaagcacaaacaggggttcctgaacgaggagaatcttaaatcaatcgtccctgtcacgaagctcaaatctaaggccccccactggacaaaccgtattcttcatgagtataagaacctgagtacctctgaaggtgtatccaaggagatgcatcacctgcagcgcatgtttctgcagaattgttgggagatccctacctatggagcagcattctttaccggtcagatttttaccaaagccagcccatccaaccacaaggtcattcccgtttatgtaggagtgaatatcaaagggcttcatctgttgaacatggagaccaaagcgcttcttatttctctgaaatatggctgctttatgtggcagctcggagacactgacacatgctttcagatccacagcatggagaataagatgtccttcatcgtgcacacaaagcaggccggcctggtggtcaaactcttgatgaaactgaatggacagttgatgcccacagaaaggaacagttag

SEQ ID NO: 15753 - DNA, 2211 bp, synthetic construct
  misc_feature 1..2211: note = Description of Artificial Sequence: Synthetic coding sequence
  source 1..2211: mol_type = other DNA
atgggcaatccggagaacatcgaagatgcgtacgtagctgtgattcggcccaagaacacagcctcactaaattcgcgggaatacagagccaagtcctacgagattctgttacacgaggtgcctatagagggacaaaagaaaaagaggaagaaggtgctgttagagaccaaacttcagggaaacagcgagatcacacaagggatattggactatgtggtggaaacaaccaagccaatctcccctgccaaccagggtatccgaggcaaaagggtggttttaatgaagaaattcccgctggatggagaaaaaatgggccgtgaggccagcttattcatagtccccagcgtggtgaaggacaatactaagtatacctacaccccagggtgcccgattttctactgtctgcaggatattatgcgggtgtgttccgaaagctctacccactttgcaaccttgactgccagaatgctgattgcccttgacaagtggttggatgagaggcacgctcaatctcattttatcccggcactcttccggccatcacccttggagcgaatcaaaaccaacgtaattaatcctgcttacgccaccgagtctggccagaccgagaattcattgcatatggggtatagtgctctagagattaagtccaaaatgctggccctagaaaaagccgatacatgtatatacaacccactgttcggctcagatttgcagtacaccaaccgcgtcgacaaggtggttatcaatccttattttgggttgggggcccccgactacagcaagatacagattcccaagcaggaaaagtggcagcggagtatgtcttcggtaacagaagataaggagaggcagtgggtagacgacttccctctgcacaggagtgcttgtgagggggattccgaactgctgtcccgcctcctatctgagcggttcagtgtgaaccagctggattccgaccactgggcccctatccactacgcctgttggtacggaaaggttgaggcaactcggatcttgctcgaaaaaggtaaatgtaacccgaaccttctaaacgggcaactttcttctcccctacactttgctgccggcggtggccatgccgagatagtccaaatcctgctgaaccatccagagactgatagacatattaccgaccaacagggaagaagtcctctcaacatttgcgaagagaacaagcagaataactgggaagaagctgccaagttgctgaaggaggcgattaacaagccctacgagaaggtaagaatctatcgcatggatggaagctatagatcagtagagcttaagcacggcaataatactacggtgcagcagatcatggagggcatgcgtttgtctcaggagacgcagcagtacttcaccatctggatttgcagtgagaatctgtccctgcagctgaagccttaccataagcccctgcagcatgtcagggactggccagagatactggcagagctcacgaacctagatccacagcgtgaaacaccccagctgttcctccggagggatgtgaggctcccactggaagttgagaaacagatcgaagatcctctcgccattcttatacttttcgatgaagcacgttataatctgctgaagggcttctatacagcccctgatgccaaattaattacacttgccagtttgttacttcagatcgtgtacgggaactacgagtctaagaagcataagcaaggcttcttgaacgaagaaaacttaaagtctattgtccccgtaaccaagctgaaatcaaaagctccacactggactaacagaatcttgcacgaatataaaaacttgagcacgtccgaaggagtatcaaaggaaatgcaccatcttcagcggatgtttctacagaactgttgggagattcccacttacggggccgcctttttcacaggccagatttttacaaaagcaagtcccagcaaccataaggttatccctgtttacgtgggcgtcaatattaaaggtttgcatctgctcaatatggaaactaaagcgctgctcatctccctgaaatacggctgtttcatgtggcaactgggagacactgacacatgttttcagatccacagcatggaaaacaaaatgagttttattgtgcatacaaagcaggctgggctggtggtcaagctcctgatgaagctgaatggccagctgatgcccaccgagaggaactcctag

SEQ ID NO: 15754 - DNA, 2211 bp, synthetic construct
  misc_feature 1..2211: note = Description of Artificial Sequence: Synthetic coding sequence
  source 1..2211: mol_type = other DNA
atgggcaaccccgagaacattgaggacgcatacgtagcagtgatccgcccgaaaaatacagcatccttgaatagccgagagtatagggcaaaaagctacgaaatcctgttacacgaggtgcccatcgaaggccaaaagaagaagcggaagaaagtgcttctggagaccaaactccaaggaaactcagagatcacacaggggatcctggactacgtggtggagacaaccaagcccatttcccccgcaaaccagggcatccgcggcaagagagtcgtgttgatgaagaaatttccactcgacggcgagaaaatgggccgggaagcatcattgttcatcgtgccaagcgtggtcaaggataataccaagtacacatacacaccagggtgccctattttttactgtctccaggacatcatgcgggtatgctctgagagttcgacacatttcgccacacttaccgcccgcatgctgattgcccttgataagtggttggatgagaggcatgctcagagccactttattcctgccctgtttcggcctagcccactagagaggattaagactaatgtaataaaccctgcttacgcaactgagtcgggacagacagagaattcactccacatgggatactccgccctcgaaatcaagagcaaaatgctcgcattagagaaggctgacacctgcatatataatccactattcgggagcgatcttcagtacaccaatagagtcgataaggtggtgataaacccttattttggcttgggagcacctgactattccaaaatccaaattccaaaacaggagaagtggcagcgcagtatgtcttcagtgaccgaggacaaggaacgacaatgggtggatgactttcctctgcacaggagcgcctgcgagggcgacagcgagctgctttcgaggttgttgtcggaaagattcagtgtgaaccagctcgacagcgaccactgggcacctattcactatgcttgttggtatgggaaggtcgaagccacccgcatcctcttggagaaggggaaatgcaacccaaacctcctgaacggtcagctgtccagtccgctgcatttcgcagccgggggcggccacgcagaaatcgttcaaatcctcctgaatcaccccgagacggacagacacattacggatcaacagggcaggtcccctctgaacatttgtgaagagaacaagcaaaataactgggaagaagccgctaaattgttgaaagaggcaatcaacaagccttacgaaaaagtgcgaatctatcggatggacggcagctaccgatctgttgagcttaaacatggaaacaacacaactgtccagcagatcatggaggggatgcgactgagccaagagacccaacagtactttacaatttggatttgtagtgagaatctctcacttcagcttaagccctatcacaaacctctacagcacgttcgcgactggcccgagatcctggccgagttgactaatctggacccccaacgggagactcctcagctcttcttgcgcagagatgtgcgtctgccactggaggtggaaaagcagattgaggaccccctcgcgatactgattctgttcgacgaggccagatacaatctactgaaaggtttctatactgccccagatgcaaaactgattacactggcgtcactgcttttacaaatcgtgtacggaaactacgagtcaaagaagcataaacaaggattcctaaacgaggagaaccttaaatcaattgtgcctgtgacgaaactcaaatctaaagctccccactggactaaccggattctccacgaatataagaatctgagcacctccgaaggagtcagcaaggagatgcaccatttacagcgcatgtttctgcagaattgctgggaaatccccacctatggcgccgcctttttcacagggcagattttcactaaagcatcccctagcaaccacaaggtaattcccgtttatgttggcgtcaatattaagggattgcatcttctgaatatggagactaaagccctgttgattagtctgaaatacggctgctttatgtggcagctgggtgacaccgacacctgctttcagatccactccatggaaaataagatgtccttcatagtgcacactaaacaggcaggactcgtggtcaagcttttaatgaaacttaacggacaactcatgcccactgaaaggaactcgtag

SEQ ID NO: 15755 - DNA, 2211 bp, synthetic construct
  misc_feature 1..2211: note = Description of Artificial Sequence: Synthetic coding sequence
  source 1..2211: mol_type = other DNA
atgggcaatcccgaaaatattgaggatgcctacgtggctgttatcagacctaagaatacagcatcactgaactctagggagtacagggcgaagagctatgagattctgcttcatgaagtgccgattgagggacaaaagaaaaagcgcaaaaaggtgctgcttgaaaccaagctgcagggtaactcagagattacccaggggattttagactacgttgtggagaccactaaacctattagcccagcaaatcagggaattaggggaaaacgcgtagtgctcatgaaaaagttccctttagacggcgagaagatgggccgtgaagcttccttgtttattgtcccttcagtcgtgaaggataacacaaaatacacctatacgcccggctgccccattttttactgcctccaggatatcatgcgcgtgtgcagtgaatcgtcgacccacttcgccacactgacagcccgcatgctgatcgcactggacaagtggctggatgagcggcacgcccagagtcacttcattcctgctctatttcggccaagtcccctggaacggatcaagaccaacgtgattaacccagcatatgccacggagagcggtcagacagaaaactccctgcatatgggctattcggcactggagattaagagcaagatgttggccttagaaaaggcagacacatgcatatacaatcctttgttcggatctgaccttcaatacaccaaccgagtggataaagtggtcattaacccatacttcggactcggggcccccgactattccaagatccagatcccaaagcaggagaaatggcagcgatcaatgagcagcgtaacggaagacaaggagcggcagtgggtggatgacttcccactccatcgctcagcctgtgaaggagacagtgagctcttgtccaggcttttaagcgagcgcttttctgtgaaccagttggactcagatcattgggcgcccatccactatgcatgctggtacggtaaggtcgaggccacgagaatcttgctggagaaaggaaaatgcaaccccaatctgttgaacggccagctctcaagccccctgcatttcgccgctggtggtggccatgccgagattgtacagattctgctgaatcaccccgagactgatcgacatattacggatcagcagggcaggagtcccctcaatatctgcgaagagaacaaacagaacaactgggaagaagccgccaagctcctgaaagaagctattaataaaccgtatgaaaaggtgcgcatctaccgtatggatgggagctacaggtccgtcgaactgaaacacgggaataacaccaccgtccagcagatcatggaaggcatgcggctctctcaggaaacacagcagtatttcacgatctggatctgctccgagaatctgtccttacagcttaaaccttatcataaacccctgcagcacgtccgagattggccagaaatcctggctgagttaacaaatttggatcctcagagagaaacccctcaactcttcctcaggcgcgatgtgcgtctacctctggaggtcgaaaagcagatcgaagacccgctagcgattctgatactgttcgacgaggcaaggtacaatctgcttaagggcttttatacagcccctgatgctaaattaatcacattggcctccctgctcttgcaaatcgtttacgggaactatgagtccaagaagcataagcaggggttcctcaatgaggagaacctgaagagcatcgtccccgtcaccaagctgaaatccaaggccccccattggacaaaccgcatactgcacgaatacaagaatttgagtactagtgaaggcgtgagtaaggagatgcatcacctacagcggatgtttctccaaaactgttgggaaatcccgacttacggagcggccttttttacggggcagattttcaccaaggccagcccttccaaccacaaggtgattccggtgtatgtgggtgtgaacattaagggtttgcacctgctgaatatggagaccaaagccctcctgatctccctgaaatacgggtgtttcatgtggcagctgggggacaccgacacctgttttcaaatccacagtatggaaaataaaatgagctttatcgtgcataccaagcaggccggccttgtcgtgaaactccttatgaagcttaatggccagcttatgcccacagagagaaattcatag

SEQ ID NO: 15756 - DNA, 210 bp, synthetic construct
  misc_feature 1..210: note = Description of Artificial Sequence: Synthetic coding sequence
  source 1..210: mol_type = other DNA
atgggaaaccctgagaacatagaagacgcctacgtggcagtcattcggccaaagaacacagccagcctcaactctagagagtaccgggcgaaaagctatgagatactgctgcatgaagtgccaatcgaagggcagaaaaagaagaggaaaaaggtactcctggaaactaagttacagggaaactccgaaatcacgcagggaatcctgtag

SEQ ID NO: 15757 - DNA, 1698 bp, synthetic construct
  misc_feature 1..1698: note = Description of Artificial Sequence: Synthetic coding sequence
  source 1..1698: mol_type = other DNA
atgggcaatcctgagaatatagaagacgcctatgtagcggtcatccgcccaaagaacaccgctagccttaacagccgggagtaccgggctaagtcctatgaaattctgcttcatgaggtgccaattgagggccagaaaaagaaaaggaagaaagtcctgctggagacaaaactgcagggtaactcagagattacccagggcatcctggattacgtcgtcgaaaccaccaagcccatctctccggcaaaccaaggaatcagaggtaagagagtggtgttgatgaagaagtttcccctggatggggagaaaatggggagggaggcaagtctgttcatcgttccatccgtggtgaaagataacaccaaatatacctacaccccaggctgccccatattttattgtttgcaggacattatgagggtgtgctcggaatccagcactcatttcgccaccttaacggccagaatgctgattgctctggataagtggttagatgaacgacacgctcagagccactttatcccagcactctttcgaccctctccccttgagcgcatcaagaccaatgttatcaatcctgcctacgctaccgagtcaggccagactgagaattctctgcatatgggctattcagcgctggaaattaagagtaagatgctggcactggagaaagctgatacatgcatatataaccctttattcggcagcgacctgcagtatactaatcgtgtggataaagtcgtcattaatccatatttcggattaggcgccccggactattccaagatacagatcccgaagcaagaaaagtggcagcgatccatgtctagcgtgacggaagataaggagcgtcagtgggttgacgactttcctctacacagatcagcgtgcgagggagattcagagcttctctctagactcctcagcgagaggttttctgttaatcagctcgattctgatcactgggcacctattcattatgcctgctggtacggaaaagtggaagccacccggatactcctagagaagggaaaatgcaatcctaacctgctcaacggccaattatctagcccactacatttcgctgccggaggaggccatgccgagatcgtgcagattttacttaatcatccagagaccgataggcacatcacggaccagcagggacgctcccctttaaacatatgcgaggagaataagcaaaacaattgggaagaggcagccaagctgctcaaggaggccattaacaaaccatatgaaaaggttaggatttataggatggacggctcatatcgctctgtggagttgaaacatggcaataatacgaccgttcagcagatcatggaggggatgagactctctcaggaaactcagcaatactttaccatatggatatgcagtgaaaacctatccctacaactgaaaccttatcacaaacctctgcagcacgttcgcgactggccagaaatattggccgaactgacaaacctcgacccccagcgcgaaacaccacagctgttcttgcgaagggatgtgagactgcccttagaggttgaaaaacaaatagaggacccattagcgattctgattctgtttgacgaggcacgctacaacctactcaaaggcttctacacagcccctgacgcaaaactgataaccctggcgagcctgctccttcagtcactgtggaagttatag

SEQ ID NO: 15758 - DNA, 78 bp, synthetic construct
  misc_feature 1..78: note = Description of Artificial Sequence: Synthetic coding sequence
  source 1..78: mol_type = other DNA
atgggtaacccggaaaatatagaagacgcatatgttgcagtgatcagacctaagaataccgccagcctaaatagctag

SEQ ID NO: 15759 - DNA, 39 bp, synthetic construct
  misc_feature 1..39: note = Description of Artificial Sequence: Synthetic coding sequence
  source 1..39: mol_type = other DNA
atgggaaacccagagaacatagaggatgcttacgtctag

SEQ ID NO: 15760 - DNA, 117 bp, synthetic construct
  misc_feature 1..117: note = Description of Artificial Sequence: Synthetic coding sequence
  source 1..117: mol_type = other DNA
atggggaacccagaaaatatagaggatgcttatgtggcagtaatacggcctaagaatacggcgtccttaaactctcgagaatatcgagccaaatcctacgaaatccttctgcactag

SEQ ID NO: 15761 - DNA, 297 bp, synthetic construct
  misc_feature 1..297: note = Description of Artificial Sequence: Synthetic coding sequence
  source 1..297: mol_type = other DNA
atgggaaacccagaaaatatcgaagacgcttacgtggccgttattcggcccaaaaatacggcatccttgaattcccgggagtatcgagccaaaagctacgaaatccttctgcacgaggtgcccattgaaggacagaaaaagaagcggaagaaagttcttctggagacaaagttgcagggcaactccgagatcacccaggggatcctcgactacgtggtggagactaccaagccaatttctcccgcaaatcagggtatccgggggaagcgcgttgtgctcatgaagaaatttccttag

SEQ ID NO: 15762 - DNA, 555 bp, synthetic construct
  misc_feature 1..555: note = Description of Artificial Sequence: Synthetic coding sequence
  source 1..555: mol_type = other DNA
atgggaaatcccgagaatatcgaggatgcatacgtcgccgtaatcaggcctaaaaacaccgccagcctaaattcgagagagtacagagccaagagctacgaaatcctcttgcacgaggtgcccatcgagggacagaagaagaaaaggaaaaaagtgctgctcgagacgaaactgcaaggaaattccgagattactcagggcattctggattatgtcgttgagaccactaaacccatatcacctgctaaccagggcatacgggggaaaagggtcgtgcttatgaagaaattccctcttgatggtgaaaagatgggacgggaggcctcattgtttatagtccccagtgttgtcaaggacaacactaaatacacttatacacccggatgcccaattttctactgccttcaagacatcatgcgcgtgtgctccgagagtagtacacacttcgctacgcttacggcccggatgctcatcgctctagataaatggttggatgagcgccacgcccagtcccactttattcccgccctgtttcggcccagccctctcgagtag

SEQ ID NO: 15763 - DNA, 339 bp, synthetic construct
  misc_feature 1..339: note = Description of Artificial Sequence: Synthetic coding sequence
  source 1..339: mol_type = other DNA
atgggaaatcctgaaaacatagaagacgcctatgtggcagtcatacggcctaagaacactgcttcactgaacagcagggagtaccgagctaagtcatacgagatcctgttacatgaggtcccgatcgaaggccaaaaaaagaagcgcaagaaggtgctcctggaaaccaaacttcaggggaattcagaaattactcagggtatcctggattacgtcgtcgagactaccaagcctatcagccccgccaaccagggtatccggggaaagagggtggttctgatgaagaagtttcctcttgacggggagaaaatggggcgcgaagcctctctgtttatatag

SEQ ID NO: 15764 - DNA, 105 bp, synthetic construct
  misc_feature 1..105: note = Description of Artificial Sequence: Synthetic coding sequence
  source 1..105: mol_type = other DNA
atggggaaccctgagaacattgaagacgcatatgtcgctgtgatacgtccaaaaaataccgctagcctgaatagcagggaatacagagccaaatcatacgaatag

SEQ ID NO: 15765 - DNA, 177 bp, synthetic construct
  misc_feature 1..177: note = Description of Artificial Sequence: Synthetic coding sequence
  source 1..177: mol_type = other DNA
atgggtaaccccgagaacattgaagacgcctacgttgccgtcatacgaccaaagaacactgcatcactcaatagcagggaatacagagctaaatcttacgagattttgctccacgaagtccccattgagggacagaaaaagaagcggaagaaggtgttgctcgagacaaaactgtag

SEQ ID NO: 15766 - DNA, 489 bp, synthetic construct
  misc_feature 1..489: note = Description of Artificial Sequence: Synthetic coding sequence
  source 1..489: mol_type = other DNA
atgggcaaccccgaaaatattgaggatgcgtatgtagccgtcatccgtccaaaaaacaccgcatcactaaacagccgtgagtaccgagccaagtcctacgaaatccttctgcacgaggtgcccatcgaggggcagaagaaaaagcgcaagaaagtgctacttgagaccaaactgcagggaaactccgaaattactcaggggatactggattacgtggtggagacgactaaacctattagccctgcaaaccagggtatcagggggaaacgggtagtcctgatgaagaagttccccctggacggagagaagatgggtagagaggcttcactgtttatcgtaccgagcgttgtcaaagacaacacaaaatatacctacactcctggttgcccgatcttctactgtctgcaggatattatgcgagtctgtagcgagtcaagcacccatttcgcaacgcttactgcacgtatgcttattgcccttgacaaatag

SEQ ID NO: 15767 - DNA, 732 bp, synthetic construct
  misc_feature 1..732: note = Description of Artificial Sequence: Synthetic coding sequence
  source 1..732: mol_type = other DNA
atgggaaatcctgagaatattgaggatgcatacgtcgccgtaatcagaccaaagaatacggccagtctcaactctcgagaatatcgcgccaagagttacgagatactgctgcacgaggtccccatagagggtcagaagaaaaaaaggaaaaaagttctgcttgagactaaattgcaaggcaatagcgagatcacccaagggatcctcgattatgtggttgaaaccacaaaacccatctcccctgccaaccagggaatccgaggcaagagagtcgtcctgatgaagaagttccccctggatggcgagaaaatgggccgagaagcctctcttttcattgttccgagtgttgtgaaggacaataccaagtacacctacactcctgggtgccctatcttttattgtcttcaggatattatgcgcgtgtgtagcgagtcgtctactcattttgcgacacttacagccagaatgttgatagcgcttgataaatggctcgatgaaagacatgcgcagtcacactttatcccggcgcttttccgtccctccccgttggagagaattaaaacaaacgtgattaatcccgcttacgctactgagagcggacagactgagaattctcttcatatgggctatagtgctctggaaatcaagtcaaaaatgctggccctcgagaaggccgacacctgtatctataaccccctcttcggatctgatttgcaatacacaaatcgctag

SEQ ID NO: 15768 - DNA, 198 bp, synthetic construct
  misc_feature 1..198: note = Description of Artificial Sequence: Synthetic coding sequence
  source 1..198: mol_type = other DNA
atgggaaaccccgaaaatattgaggacgcatatgtggcggttatccgacccaaaaatacagctagcttaaacagccgggaatacagagccaaatcatatgagatactcctgcacgaggtgccaattgaggggcagaagaaaaagcgcaaaaaggtcttgctggagacgaagttgcaggggaactcagaaatcacctag

SEQ ID NO: 15769 - DNA, 1089 bp, synthetic construct
  misc_feature 1..1089: note = Description of Artificial Sequence: Synthetic coding sequence
  source 1..1089: mol_type = other DNA
atggccacagccgaaacagcgctgcctagtatctcaaccctgactgctctgggccctttccctgatactcaagacgattttcttaaatggtggagatcggaggaggcacaggacatgggtccagggcctcccgatccaaccgaaccccctctgcacgtgaagtccgaagatcaacccggcgaagaggaagacgatgaacgtggggccgatgccacgtgggaccttgatctgcttttaaccaacttttccggccccgaaccgggtggagcaccacaaacttgcgccctcgcccctagtgaggccagcggagctcagtatccaccccctcccgaaacactgggagcctacgcaggaggaccaggcctggttgctggcctgctgggcagtgaagatcatagtggctgggtacgtccagccctccgtgccagagcgccagacgcttttgtaggacctgccttagccccagcacctgcccccgaacccaaagccctggcccttcaaccagtttatccgggcccaggtgcaggctccagcgggggttacttcccccgcactggtctgagtgtgcctgctgcctccggagccccctacggcctgctttccgggtatcccgccatgtatccggctccgcaataccagggacacttccagctcttccgcggcctgcagggcccggcgcccgggcctgctacatctccctcttttctctcctgcctggggcccgggaccgtgggaactggtttgggtgggacggctgaagatcccggtgtgattgccgagacagcccctagtaagcggggaagacgatcatgggcccgaaaacggcaggctgcccacacctgcgcccatccgggatgcggaaagtcatatacaaagtctagccatctgaaggcgcatctgagaacacatacgggagaaaagccctacgcctgtacctgggaggggtgtggctggaggttcgcccgttccgatgagcttacgaggcattaccggaagcatactggccagaggcccttccgctgccaactgtgccctcgcgctttctcccggtccgaccacttagcacttcacatgaagcgccacctttag

SEQ ID NO: 15770 - DNA, 999 bp, synthetic construct
  misc_feature 1..999: note = Description of Artificial Sequence: Synthetic coding sequence
  source 1..999: mol_type = other DNA
atggccactcttaaagatcaactgatttataacctgttgaaggaggaacagacacctcagaacaagatcaccgtggtcggcgtgggggccgttggtatggcctgcgccattagcattctgatgaaggatctcgcagacgagcttgcactcgttgacgtgattgaagacaaattgaagggcgagatgatggacctgcagcatgggtccctatttctcagaactcctaaaatcgtgtcaggtaaagactacaatgtaaccgcaaatagcaagttagtaatcattaccgcaggtgcccggcagcaggagggtgaaagtagactgaatctggtgcaacgaaatgtcaacatatttaaattcataatccctaacgtggttaagtattccccaaattgcaagcttctgatcgtatccaatcctgtcgatatcttaacttatgtagcatggaaaatatccggctttcctaaaaatcgcgtgattggttctggctgcaatctcgatagcgccagattccgttacctgatgggtgagcgccttggcgtgcatccacttagctgccatgggtgggtgctaggtgaacacggtgatagttcagtgccagtttggtcaggaatgaacgtggccggcgtttcactgaagactctgcatcccgacttggggacagacaaggacaaggaacaatggaaagaggtccacaagcaggtggtggaatctgcatatgaggtgatcaaactcaagggttatacctcctgggccattgggctgtctgtcgcggacctggccgaatccatcatgaaaaacctgaggagagtccatccggtcagtacgatgattaagggcctctacgggatcaaagacgatgtctttctatctgtaccttgtatacttggacaaaacgggatctccgacctggtgaaagtgactcttacgagcgaagaagaggcacgtcttaagaagagcgctgacactttgtggggaatacaaaaagagttacagttctag

SEQ ID NO: 15771 - DNA, 825 bp, synthetic construct
  misc_feature 1..825: note = Description of Artificial Sequence: Synthetic coding sequence
  source 1..825: mol_type = other DNA
atggcaactctgaaggatcagttgatttacaacctcctaaaagaggagcagacaccacaaaataagattaccgttgtgggagtcggagccgtaggaatggcctgcgctatttcaattctcatgaaagaccttgccgatgagctcgccctagtggacgtaatcgaggataagctcaagggtgaaatgatggatctgcagcatggttcactgtttctccgaacacccaaaatcgttagcggcaaggactataacgtcaccgccaactccaagctggtgatcatcaccgccggagcgcgtcagcaggaaggtgaaagccggctcaatttggttcagcgtaacgtcaacattttcaaatttattattccaaatgtggtaaagtattcaccaaattgcaagttgctaattgtcagcaaccccgtggatatcctgacctatgttgcctggaaaataagcggtttccctaagaacagagtgattggatcaggatgcaacttagactctgccaggttccggtatctgatgggggaaagactgggtgttcaccctttaagttgccatggctgggtgctcggagagcacggtgacagctccgtgcccgtgtggtctgggatgaacgtagccggggttagcctgaaaacactccatcctgacctgggaacagacaaagataaggaacaatggaaggaatgtagatacaccctgggcgaccccaaaggggccgctatattaaagtccagcgacgttataagttttcactgcctgggctataatagaatcctgggtggggggtgtgcgtgctgcccattttacttgatctgcgactag

SEQ ID NO: 15772 - DNA, 999 bp, synthetic construct
  misc_feature 1..999: note = Description of Artificial Sequence: Synthetic coding sequence
  source 1..999: mol_type = other DNA
atggcaaccttgaaggatcagctgatctataacctgcttaaagaagaacaaacaccacagaacaaaatcactgtggtgggagtcggtgctgtcggaatggcatgcgcaataagtattctgatgaaggacttagcggacgaactggccctggtggatgtaatcgaggacaagcttaaaggtgagatgatggacttgcagcacgggtcactgttcctgcgcacccctaaaatcgtaagcggtaaggactacaacgtcaccgctaattccaaactggtaatcatcactgccggagcacgccagcaggagggggagtcaagacttaacctggtccagagaaacgtgaatatcttcaagtttataattccgaacgttgtgaaatacagccccaactgcaaacttctcatcgtgagtaaccctgtggatattcttacttatgtggcctggaagatctctgggtttcccaaaaaccgagtaatcggaagcgggtgcaatttggacagtgcccgctttaggtatttaatgggcgaacgccttggagtgcatcccctctcgtgtcatgggtgggtgcttggggaacatggagatagctctgtgccagtctggagtggaatgaacgtcgccggagtaagtctgaaaaccctgcacccagatctggggacagacaaggataaagagcaatggaaggaggttcataagcaagtcgtggaaagtgcatatgaagtgataaagttgaagggctataccagttgggccataggtctgtcggtcgcagatttggccgagtcaattatgaagaacttacggagagttcatcctgtttccacaatgatcaaaggcctttacggcattaaggatgatgtttttttgtccgtgccctgcatcctcgggcaaaacggcatttccgatctggtcaaagtcacacttacaagcgaagaggaggcgcgacttaagaaaagtgccgatacactctggggcattcagaaggaactgcaattttag

SEQ ID NO: 15773 - DNA, 825 bp, synthetic construct
  misc_feature 1..825: note = Description of Artificial Sequence: Synthetic coding sequence
  source 1..825: mol_type = other DNA
atggcaacactcaaagatcagctgatttacaatctgctcaaggaggagcagaccccccaaaacaaaatcactgttgtgggggttggggctgttgggatggcctgcgctatctccattttgatgaaggacctcgcagatgaactggctctggttgatgtcatagaggataagcttaagggggaaatgatggacctgcaacacggatcattgttcttgaggacgcctaaaatcgtgagtggcaaggttgatatccttacctatgttgcctggaaaatttcaggctttcctaagaaccgcgttatcggatcgggctgtaatctggactctgcgaggtttcgctatctgatgggcgaaagactcggagttcaccctctctcttgtcacggttgggtgctaggcgagcatggcgatagttccgttccggtatggtccggcatgaatgtggccggggtgtcactgaagaccctccaccccgatctaggtacggacaaggacaaggaacaatggaaagaagtgcacaagcaagttgtcgagtcagcctacgaggtgataaagctgaagggctacacatcctgggcaattgggctctcggtcgcagatctcgctgagtctatcatgaagaacctgaggagggtgcatcctgtttcaaccatgattaaggggctgtacgggatcaaagacgacgtgttcctaagcgtcccctgtatactgggccagaacggaatttctgatctggtcaaggtgaccctcacgtccgaggaagaagcccgacttaaaaaaagtgctgacaccctgtgggggattcaaaaggagctgcagttttag

SEQ ID NO: 15774 - DNA, 918 bp, synthetic construct
  misc_feature 1..918: note = Description of Artificial Sequence: Synthetic coding sequence
  source 1..918: mol_type = other DNA
atggccaccctcaaggatcagttgatctacaacctgctaaaagaagagcagaccccccagaataagattaccgtagtcggagtgggcgccgtgggaatggcttgtgccatctcgattctaatgaaggatctggccgatgaactagctatcgtgagcggcaaggactataatgtcaccgccaacagtaaactagtgatcatcacggccggcgccaggcaacaggagggcgagtcgcggctcaatctcgtacagaggaacgtgaacatttttaaatttatcattccaaatgtggttaaatactccccgaattgcaagctattgatcgtgtccaatcccgtggacattctcacatacgttgcttggaagatctccgggtttcctaagaaccgggtgattggttctggatgcaacctggattctgcaagattcagatacctgatgggggaaaggttgggtgtgcatcctctttcttgccacggctgggtcttgggtgaacatggagattcctccgtgccggtttggtcaggaatgaatgtagctggcgtctcgctcaagacccttcatcccgatctcggtacagataaggataaagaacaatggaaagaagtacataagcaggtcgtcgagagcgcgtatgaagtaataaaactgaagggctacacaagctgggccatcgggctctcggtggcagacttggccgaaagcattatgaaaaatttgaggcgagtacacccggtgtctaccatgatcaaaggactttatggaatcaaggacgacgtattcctcagtgtgccgtgcatcttgggccagaacggcatcagcgacttggtcaaagtaaccctaacatctgaggaggaagcgcggctgaagaagtccgccgacactctgtggggaatccagaaagaactgcagttctag

SEQ ID NO: 15775 - DNA, 435 bp, synthetic construct
  misc_feature 1..435: note = Description of Artificial Sequence: Synthetic coding sequence
  source 1..435: mol_type = other DNA
atggccaccctcaaagaccagctgatctacaatttacttaaggaagagcaaaccccgcagaacaagattacggtcgtaggggttggcgcagtcggcatggcatgtgccatatccatccttatgaaggatctcgccgatgaactagccctcgtggatgtgatagaggataagttaaaaggggagatgatggatctgcaacatggcagcctgttcctacggaccccgaaaatagttagcggaaaagattacaatgtcaccgcgaactccaaattggtgattattaccgctggggcccggcagcaagaaggagagtcccgtttaaatctggttcagcggaacgtgaatatcttcaagtttatcatccccaatgtggttaagtactcacccaactgcaagctgcttatcgtgtctaacccaggcgaagccttcgattag

SEQ ID NO: 15776 - DNA, 345 bp, synthetic construct
  misc_feature 1..345: note = Description of Artificial Sequence: Synthetic coding sequence
  source 1..345: mol_type = other DNA
atggcgacattgaaggatcagctcatatacaacttgttaaaggaagaacagactccccagaacaaaattacagtcgtaggggtcggcgccgtgggcatggcttgcgccattagtatcctcatgaaagaccttgctgacgagctggcccttgtggatgtcatcgaggataagttaaaaggagagatgatggacttacaacacggctctctgttcctcaggacccccaagattgtgtctgggaaggactataatgtgactgctaactcaaaacttgttatcattaccgcgggggctcgccagcaggagggagaatcaaggctaaatttggtccagagaaatgtatag

SEQ ID NO: 15777 - DNA, 219 bp, synthetic construct
  misc_feature 1..219: note = Description of Artificial Sequence: Synthetic coding sequence
  source 1..219: mol_type = other DNA
atggccacgcttaaagatcagctcatctacaacctgctgaaggaggagcaaaccccccagaacaagattaccgtggtaggggtgggggctgtaggtatggcctgtgctattagcatcctgatgaaagacctagctgacgaactggccctggtagatgttatcgaagacaagctgaagggagaaatgatggacctgcagcacggctccctgtttctgtag

SEQ ID NO: 15778 - DNA, 1086 bp, synthetic construct
  misc_feature 1..1086: note = Description of Artificial Sequence: Synthetic coding sequence
  source 1..1086: mol_type = other DNA
atgggggagcctagcggaggatatacgtatacccagacgagtatctttctatttcatgctaaaatcccctttggttctaaatctaacatggccaccttgaaagatcagctgatttataatttactgaaggaagaacaaacacctcagaataaaatcacagttgttggggtcggcgcagtcgggatggcatgcgctatcagcattctgatgaaagatctggcggacgaactggcactagtcgacgtgatcgaggataagctgaagggcgagatgatggacctccagcacggcagtctgtttcttcgtaccccaaagattgtgtctgggaaggactataatgttaccgccaattctaaattggtcattatcacggcgggcgcgagacaacaagagggagaaagcaggcttaacctggtgcagcggaatgtgaacatctttaaattcattattcccaatgtcgttaagtatagtcctaattgcaagctgttgatcgtgagtaatcctgtggacatcttgacctacgttgcctggaagattagcggcttccctaaaaaccgagtgattgggtcgggatgtaacctagactcagcaaggtttaggtacttaatgggcgagagactgggggtgcatccactgagctgccacggctgggtcctgggggaacatggcgactcaagtgtgcccgtatggtccggcatgaacgtggcaggagtatccttaaaaacacttcacccggatctggggactgataaggataaagaacagtggaaggaagttcacaagcaggtagtcgagagcgcttacgaggtgatcaagctgaaagggtacacaagttgggcaatcggactaagcgtggccgatttggccgaatcaattatgaagaacctgcggcgcgtgcaccctgtcagcactatgataaaaggtctgtacggtataaaagatgatgttttcctgtccgttccatgcatactggggcaaaacggcatttcggatctggtaaaggtgaccctcacttctgaagaggaggcacggctcaagaaatcggccgacaccctctggggaattcagaaggagcttcagttctag

SEQ ID NO: 15779 - DNA, 999 bp, synthetic construct
  misc_feature 1..999: note = Description of Artificial Sequence: Synthetic coding sequence
  source 1..999: mol_type = other DNA
atggccaccctgaaggatcagctaatttacaacctcctgaaagaagaacagaccccccagaataagatcaccgtggttggcgtgggcgcggttggcatggcttgtgctataagcattttgatgaaggacctcgccgacgaactcgccctcgtagacgtcatagaagacaagcttaagggcgaaatgatggatcttcaacacggaagcttgtttttacgaacacccaaaatcgtatcagggaaggactataacgtaacggctaactctaagcttgttatcatcaccgcaggggcacgtcaacaagagggcgaatcgcgactgaatcttgttcaacgcaacgtcaatatattcaagtttatcattcccaacgtggtcaaatattctcccaactgtaagctcttgatcgttagcaatcctgtggatatcctaacgtacgttgcatggaaaatctccggctttcctaagaacagagtcataggatctggttgcaaccttgattccgccagattcaggtacctgatgggagaaaggctgggagtccatccactgtcttgccacggctgggtgctcggggaacatggggacagttcggtcccagtctggagcggtatgaatgttgccggagtttcacttaagacgctccacccggatctgggcacggacaaagataaggagcagtggaaggaggttcataagcaagttgtggaatcagcctatgaggtaatcaaattaaaagggtatacatcttgggctatcggtctgtcggttgctgatctcgccgagtcaattatgaagaatctaaggcgcgttcaccccgtgagcaccatgataaaaggactttacgggattaaagatgatgtgttcctcagtgtaccttgcattctcgggcagaacggcataagcgatttagtcaaggtcacgctgactagtgaagaggaggctcggctgaagaagtcggccgacactctgtggggcatccaaaaggagctgcaattctag

SEQ ID NO: 15780 - DNA, 474 bp, synthetic construct
  misc_feature 1..474: note = Description of Artificial Sequence: Synthetic coding sequence
  source 1..474: mol_type = other DNA
atggctaccctgaaagaccagttgatttacaatctgcttaaggaagagcagactccccagaacaagataactgtggtcggagtaggggcggtcggaatggcctgtgccatctccatcctcatgaaggacctcgcagacgaactagctctggtcgacgtaattgaggataagctgaagggggagatgatggacctccaacacggttctctgttcctgcgcacccctaagatcgtgtcaggcaaggactataatgtcaccgccaattccaaacttgtgattattacagcaggcgcaaggcaacaggagggagaaagcagactcaacctggtccagcgcaatgtgaatatcttcaagttcatcattccaaatgttgttaagtattcgcctaactgtaagctgctaatcgttagcaaccccgtcgacattctcacatacgtggcctggaagatcagtggtttccctaagaaccgctag

SEQ ID NO: 15781 - DNA, 804 bp, synthetic construct
  misc_feature 1..804: note = Description of Artificial Sequence: Synthetic coding sequence
  source 1..804: mol_type = other DNA
atgggatctgcttgcatcaaggtgaccaagtactttctgttcctgttcaacctgatatttttcatccttggcgcggttatcctgggtttcggcgtgtggatccttgccgacaaaagctcctttatcagcgtacttcaaacctcctctagttcactgcgcatgggtgcgtacgtgtttatcggcgtgggggcagtgacaatgttgatggggttcctgggctgcataggcgctgtgaatgaggtgagatgcctgctgggattgtatttcgcttttctgcttcttatcctgattgcccaagttaccgccggtgccctcttttacttcaacatgggaaagcttaaacaagaaatgggcgggattgtgaccgaactcatccgggattataatagttctagagaagatagcctgcaggacgcatgggactatgtccaggcccaggtcaagtgttgtggctgggtgtccttctataactggacagataatgctgagctgatgaatagacccgaagtgacctatccctgtagctgcgaagtcaaaggagaagaagacaactctcttagcgtccgcaaaggattttgcgaggccccgggaaaccgcacacaatcaggaaaccatccggaggactggcccgtttatcaggaaggctgtatggaaaaagtgcaggcgtggctgcaagaaaacctcgggataatcttgggggtaggagtgggggtggcaatcatagagctactgggcatggtgctgagcatatgtctgtgcaggcatgtgcattcagaagattactcaaaggtccctaaatattag

SEQ ID NO: 15782 - DNA, 3393 bp, synthetic construct
  misc_feature 1..3393: note = Description of Artificial Sequence: Synthetic coding sequence
  source 1..3393: mol_type = other DNA
atgaaaagatctgagaaacctgaaggctatagacagatgagaccaaagacatttcctgcgtccaactatacagtatcttctagacagatgttgcaagagattagggagtctctccggaatctgtccaagcccagtgacgctgcgaaagctgagcataatatgtctaaaatgagcactgaggatccacgccaggttagaaatcctcctaagtttgggacccatcataaagccttacaggagatccgcaacagcttgctccctttcgccaatgagaccaactcctctagatccacctcagaagtgaacccccaaatgctccaggatcttcaggcggcaggttttgatgaggacatggtaatccaagcactccaaaagaccaataaccggagtattgaggccgcaattgaattcataagcaaaatgagttaccaggacccgcgtcgggaacagatggcggctgccgcagccagaccgataaacgcgagtatgaaacccgggaatgtgcagcagtccgtgaacaggaaacagagttggaaaggcagcaaagagtcactggtcccacagcgccatggaccccctcttggcgaatccgttgcatatcacagtgagtcgcccaattcacagaccgatgttggtaggcccttgtcgggttctggtatttcagcattcgtgcaggctcacccaagtaatggtcagagagtgaatcctccgcctccgcctcaggtcaggagtgtgaccccgccacctccacctagaggtcagacccctcctcctaggggaaccacccctcctcctccctcgtgggagcccaactcacagacaaagaggtacagtggaaatatggagtatgtcatcagccggatcagccctgttccaccaggcgcctggcaagagggctatccaccacctcctctgaacaccagcccgatgaatccgcctaaccaggggcagcggggcatatcttccgtacccgtggggcggcagccaatcatcatgcagagctcgtctaagttcaatttccccagtggcaggcccggcatgcaaaatggcactggccagacagatttcatgattcatcagaacgtcgtgccagctgggaccgtcaacaggcagccccctccgccataccctctcacagctgcgaatggccagtcaccgagtgctctgcagactggaggcagcgctgctcctagctcctatacaaacggtagcatccctcaatcaatgatggtacccaaccggaatagccacaacatggaactatataatatcagcgtcccaggactccaaaccaattggccacagagttcttctgcacccgcccaatcctctccctccagcggccacgagattcctacctggcagccgaacatccctgttcgttcaaattcattcaataacccattgggtaacagggcctcacacagtgctaatagtcagcctagcgccaccaccgtgacagccatcacccctgcccctatccagcagccagtaaaatcaatgcgcgttctgaagccggaactgcagaccgccctagcgccaacacatccttcctggatccctcagccaattcaaactgtgcagccaagcccatttcctgagggcactgctagcaatgttaccgttatgcctcctgtggctgaagcccccaattaccagggcccacctcccccctaccctaagcatctgctccatcaaaatcctagcgtacctccgtacgaaagcatatccaagcctagcaaggaagaccagccttctctgcccaaggaggacgaatcagaaaaaagttacgaaaatgtcgatagcggggacaaagagaagaagcagattacaacatctccaataacagtccgcaaaaataagaaagacgaagagcggagagagagcaggatccagagttacagccctcaggctttcaaattttttatggaacagcacgtggagaatgtcctaaaaagccaccagcagagactgcacagaaagaagcagctggaaaatgagatgatgcgggtgggactgtcacaggacgcacaagatcagatgcgcaaaatgctgtgccaaaaagagagcaattatattaggctgaagagagctaagatggacaaaagtatgtttgtgaaaatcaagactctcggcattggtgcctttggcgaggtctgtctcgcccgaaaggtcgatactaaagctctttatgccacaaaaactctgagaaaaaaagacgtgcttcttaggaaccaggtcgcccacgtcaaagctgagagggacattctggcggaggctgacaacgagtgggttgtcaggctttattacagctttcaggacaaagataacttatattttgtgatggactacattcccgggggcgacatgatgtccctgctaatccggatggggatcttccctgagagtcttgccaggttctatatcgccgaactcacatgtgctgtggaatcggtccataaaatgggttttatccacagagatatcaaaccagacaatatattgatcgacagagacggtcacatcaaactcaccgactttggtctctgtaccgggtttcggtggactcacgactccaagtattatcagagcggtgaccatcctcgccaggattccatggacttcagtaacgagtggggtgatccctcctcatgccggtgtggcgacagattgaagcccctggaacgacgggccgccaggcagcaccagagatgcctggcccactccttggtgggcacacctaactatattgcacccgaggtgctcctgcgtaccgggtatacacagctatgcgactggtggtcagttggggtcattctgtttgaaatgctcgtgggacagcctccattcttggcacagacccctttggaaacacagatgaaagtcataaactggcagaccagcctacacattcccccacaggccaagctgtccccagaagcctcagacctgattattaagctatgtcgtgggcctgaggataggctaggaaaaaacggcgccgatgagatcaaagcgcatccttttttcaaaacgattgatttcagcagcgatctgcgacagcaatcagcctcctatattcccaagatcacgcaccctacggacaccagcaattttgatcctgttgatcctgacaaactgtggtctgatgacaacgaggaggaaaacgtgaacgacacacttaacggttggtataaaaacggcaagcacccagaacatgccttttatgaatttacctttcggcgcttcttcgatgacaacggttatccatacaattatcctaaacctatagaatacgagtatattaactcacagggatctgagcaacaatctgacgaggatgatcagaacacagggtcggaaataaagaaccgcgatctcgtttatgtttag

SEQ ID NO: 15783 - DNA, 2073 bp, synthetic construct
  misc_feature 1..2073: note = Description of Artificial Sequence: Synthetic coding sequence
  source 1..2073: mol_type = other DNA
atgaaacgatcagagaagccagagggttacaggcagatgaggcctaaaactttcccagccagtaactataccgtgtccagcaggcagatgctgcaagagatccgtgaatctcttaggaacctctccaaacctagcgatgccgccaaagccgagcacaacatgtctaagatgtcgacagaagatccccgtcaggtgcgcaatccaccgaagttcgggacacaccacaaagctctccaagagattcggaacagcctgcttccattcgcaaatgagaccaattcaagcagaagcacctcggaggttaatcctcagatgctccaggacctccaggcggccggttttgatgaagatatggtcattcaggccctccaaaagacgaacaatagaagtatcgaggctgccattgagttcataagcaagatgtcgtaccaggaccctcgtcgcgaacagatggctgctgcagcagcccgtccgattaacgctagcatgaaacctggtaacgtgcagcagtctgtcaatcgcaaacagagctggaaagggagtaaagagtcccttgttccccagagacatggccctcctctcggcgagtccgtggcgtatcactctgaatccccaaatagtcaaactgacgtcggcaggcccttgtccggctccgggatcagcgcctttgtgcaggcccatccttcaaacggccagagggtgaaccccccccctcccccacaagtgcggtccgtcacacctccgccaccgccgcgcgggcaaactcctcccccaagaggcaccacaccaccgcccccatcatgggaacctaattcccagaccaagcggtactccggcaatatggaatatgttattagtagaatctctcccgtgcccccaggggcttggcaggaagggtaccccccccctccactcaatacctcccctatgaatcctcccaaccaggggcagcgtgggattagttctgtcccggtggggcggcagcccattatcatgcagagttcatcaaaatttaatttcccttctggccggcccgggatgcagaatgggactggccagacagatttcatgattcaccagaacgtggtgccagccggcaccgtgaaccgacagccaccacctccttaccccctgacagccgccaatgggcagtcccccagtgctttgcagaccggcggaagcgccgccccatcctcctataccaacggttcaatcccacaaagtatgatggtgcccaatcggaactcccacaacatggaactgtacaatatcagcgtgccaggactgcagacaaattggcctcagtcctctagcgcccctgcacagagctcaccctcaagcggccacgaaatccccacgtggcagccgaatattccagtcaggtctaactcctttaataaccctctgggcaatcgcgcctcccatagcgcgaactctcagccatcagctactacagtcactgcaatcacccctgctcccatccaacagcctgtgaaatctatgcgggtcctcaagccggagctccagacagccctggctccgactcacccatcatggattccccagcccatccagacagtgcaaccatccccctttcccgagggcactgctagcaacgtgactgtgatgccaccagtagccgaggcacccaactatcagggcccccctccgccataccccaagcatttgctgcatcagaacccctctgtgcccccatatgaatccatcagtaaaccctccaaagaagaccagccaagtctgccgaaagaggacgagtcagaaaagtcatacgagaacgtcgactccggcgacaaagaaaaaaaacaaattacaacctctcccattactgttaggaagaacaaaaaggatgaagagaggcgcgagtccagaatccagtcatatagtccacaggcgttcaagttctttatggaacaacatgtggaaaacgtcctcaaatcccatcagcagcggctccaccgaaaaaagcagctggaaaacgagatgatgcgcgttaaaccttttaaaatgagcattttcatcctgaaccatctcttcgcctggtgcctcttctag

SEQ ID NO: 15784 - DNA, 3393 bp, synthetic construct
  misc_feature 1..3393: note = Description of Artificial Sequence: Synthetic coding sequence
  source 1..3393: mol_type = other DNA
atgaagcgatccgagaaaccagagggctatcgccagatgagacctaagaccttccccgccagtaattacacagtgagtagcagacagatgctgcaagagattcgggagtcacttcggaacctgagtaagccttcagatgcagcgaaagccgagcacaatatgtctaagatgtctaccgaagatccacggcaggtgcgcaacccgcccaaattcgggacgcaccacaaggccctccaggagatccgcaatagcctcctaccatttgcaaatgagaccaacagcagccgtagcactagtgaggtgaacccacagatgctgcaagacttacaagccgcaggctttgatgaagacatggttatccaagcgctccagaagacaaataaccggtcaattgaggccgctattgagtttatatccaagatgtcctatcaagacccaaggagggagcagatggccgctgccgccgcacgcccaattaacgccagtatgaaaccggggaacgtgcagcagtcggttaataggaagcaatcatggaagggatctaaggagtctctggtgcctcagcgacacggcccccctctcggcgagagcgtcgcgtaccactcagaatcccctaactcgcaaacagacgtgggtcgaccattaagcggcagtggaataagtgcattcgtgcaggcacatccttctaacgggcagcgggtcaatccccccccaccaccccaagtcagaagcgtaacaccaccaccccccccaagaggacagacaccgccccccagaggcacaacaccaccacccccctcctgggagcctaacagtcagactaaaaggtattccgggaatatggaatacgtgatcagcagaatttctccagtgcctcctggagcatggcaggaaggctatccgcctcccccactgaatacctctcctatgaatccccccaatcaggggcagcggggaatctcctctgtgccagtgggacgtcagccaatcattatgcagagctcaagcaagttcaattttccttctggacgcccagggatgcagaatggcaccggccaaacagacttcatgatccatcaaaacgtggtcccagccggtacagtgaacagacaacctcccccgccgtaccccctgaccgctgctaacggacagagcccgagcgccttgcagactggcggcagcgcagccccctctagctacactaacggcagcattccacaatcaatgatggtgcccaacaggaatagccataacatggagctgtacaacattagtgtccctggactccagaccaactggccacagagtagctctgcaccagcccaatcatctcctagttcaggccatgaaataccaacctggcagcctaacatcccggttcgctcaaattcctttaataatccccttggaaatcgagcgagtcatagtgcgaacagccagccgtccgccactaccgtgaccgctattacgccagccccaatccagcagcccgtgaagagcatgcgcgtccttaagcccgagctgcagaccgctctggcacccacgcacccttcctggatcccccaacctattcaaactgttcagccaagcccctttcctgaagggaccgctagcaacgtgacagtcatgcctcctgtggcggaagcacccaattatcagggcccaccccccccgtatcctaagcacctccttcatcagaatcctagcgtgcctccttatgagtcaatcagtaaacccagcaaggaagaccaacccagcctccccaaggaagacgaatctgaaaaatcatacgagaacgtggactccggcgataaggagaagaagcaaattactacttctcctatcacagtcagaaaaaacaagaaagacgaagagcgcagggaaagccggatccagagctattcccctcaggcgtttaaattctttatggagcaacatgtggaaaatgtgcttaagagccatcagcagcgactccaccgcaaaaaacagctcgagaacgaaatgatgcgggttggcctgagtcaggacgcacaggaccagatgcgcaaaatgctatgtcagaaggaatctaattatattaggctaaaaagagctaagatggataaatcaatgttcgtcaaaatcaaaacactgggtattggggcttttggtgaggtgtgcctggcacgtaaagtggatacgaaggccttgtacgctacaaaaactctcagaaagaaggatgttcttctgaggaaccaggtcgcccatgtgaaagccgaacgtgacattttggccgaggccgataatgagtgggtggttagattgtactactcttttcaggataaggataatctgtattttgtaatggactacattcctggaggagatatgatgtccttgctgatcaggatgggtatattcccagaatcccttgctaggttttacattgctgaactgacatgtgctgtagagtctgttcacaagatgggattcattcaccgggatattaagcccgacaacattctgattgatagagatggccatatcaagttgaccgatttcggattgtgcacaggttttcggtggactcatgattcgaaatattaccaatctggggatcatcctagacaggactctatggatttcagtaacgagtggggggatccatcatcgtgcaggtgtggcgataggctcaaacctctggagcgtagggctgcccgccagcaccagcgctgtctggcccactcactggtcgggacccccaattatatcgcccccgaggtgctgcttcgcaccgggtatactcagttgtgtgattggtggtccgtaggtgtcatcctcttcgagatgttggtgggacagcctcccttcttagcgcagactccactcgagacccagatgaaggttattaattggcagacaagtttacacatcccgcctcaggccaaattgtcccctgaggccagcgatctaatcataaaactttgccgaggaccagaggatcggttgggcaaaaatggcgccgatgagattaaagcacacccatttttcaagacaattgacttcagttccgatcttagacagcagtcagcatcatatattccaaagattactcacccaactgatacatctaactttgatcccgtggacccggataagctgtggtcggatgataacgaggaggaaaatgtgaacgataccttaaacgggtggtataaaaacggcaaacatcccgagcacgccttctacgagttcaccttcaggaggttttttgacgacaatggctatccctataactacccaaaacctatcgaatatgagtacatcaacagccagggctcagaacagcagagtgacgaggatgaccagaacactggatcggaaatcaaaaacagagacttggtctatgtctag

SEQ ID NO: 15785 - DNA, 3267 bp, synthetic construct
  misc_feature 1..3267: note = Description of Artificial Sequence: Synthetic coding sequence
  source 1..3267: mol_type = other DNA
atgcgtccaaaaacctttccggcaaccacctacagcggcaactctcggcaacgcctgcaggagataagggaaggcttaaagcagccctccaagtcaagcgtccagggactcccggctgggccaaattccgacacgtcactagacgcaaaggtattgggttcgaaggacgctacgagacagcaacagcagatgcgtgcaacacccaagttcggaccctatcagaaggcgcttcgcgagatccgatacagtctcctccctttcgcaaacgagtctggcacatcggctgccgccgaagtgaacaggcaaatgctccaggagctggtcaacgctggctgtgaccaagagatggctggaagagcccttaaacagaccggctcccgatctatcgaggccgctctcgagtatatctccaagatggggtatttggacccccgaaacgaacaaatagttcgtgtcatcaaacagacttctccaggaaaggggctgatgcctacgcctgtcactcggcgcccatcttttgagggcacaggcgatagcttcgcaagctaccaccagctgagtggcaccccatatgagggaccatcgttcggcgccgacgggcctaccgctctggaggagatgccaaggccttatgtggactacctcttccctggagtcggacctcacggacccggccatcaacatcagcatccccctaaaggctatggagcttccgtagaggccgctggggcccacttccccctgcagggtgctcactacggccgccctcacctgctggtcccaggagaaccactgggatatggcgttcagagaagcccctcatttcaatccaagacacctcctgagacaggcgggtacgcgagcctccctactaaagggcaggggggcccccctggggctgggctggccttccccccaccagcagcaggattatatgtcccccatccacaccacaagcaagccggtcccgcagcccatcagctgcatgttttgggatcacgaagccaggtgtttgcctcagactccccccctcagtcacttctcacaccatccaggaactctctgaacgtcgatctgtacgaattaggatccacctcagttcagcagtggccagccgcaacactggcccggagggatagcttgcagaagcctgggttggaagcccctcctagggctcacgtcgcctttcgaccagattgtccagtaccatcaaggacaaatagtttcaattcacaccaacctcgccctggccctcccgggaaggcagaacctagccttcctgcccccaatacagtcaccgccgtcactgctgcccatatcctacatcctgtaaaaagtgtccgggtgcttaggccagagcctcagactgcagtaggccctagccatcccgcatgggtgccggcacccgcgccagcaccagctccagcccctgctccggcagccgagggcctcgacgccaaggaggaacacgctctggccctagggggggccggggcgtttccacttgacgtagaatacggagggccagatagacgttgcccccctccaccctatcccaagcatcttctcctgcggagcaaaagtgagcagtacgacttggacagcctttgcgctgggatggaacagtctttgcgagctggtcccaatgagcccgagggaggagacaaatcccggaaaagcgctaagggggataaagggggtaaggataaaaagcagatccagacttcaccagtgcctgtgcgcaaaaactcacgcgacgaagaaaaacgagaaagccggataaagtcctactccccttatgcttttaaattttttatggagcaacatgttgaaaacgtgattaagacataccagcagaaggttaaccggcggctgcaactggaacaagagatggctaaagccggcctgtgtgaggctgagcaggagcagatgcgaaaaatactgtaccagaaggaaagtaactacaatcgactgaagagagccaagatggacaagagcatgttcgtaaagattaaaactttgggtatcggtgcctttggggaggtgtgcctggcatgtaaggtagatacacatgccctgtacgcgatgaagactctgagaaagaaagacgtgctgaatcggaatcaagtggcccacgtcaaagcagagcgcgatatcctggcggaagctgacaacgaatgggtcgtgaagctctactattctttccaggataaagatagtttatacttcgttatggactacattcccgggggggatatgatgagtctattgattcggatggaggtgtttcccgaacatttagccagattctacatcgctgagttaacactggccatcgagtccgtgcataaaatggggtttattcaccgggatattaagccggataatattctgatcgatctggatgggcacattaaactgactgactttggcctgtgcaccggattccgttggacccataattctaaatattatcaaaagggatcccacgttagacaggacagtatggaaccatcagatctttgggatgatgtgagcaattgtcgttgtggtgatagactgaaaacactggaacagcgagctcggaaacagcaccagcgctgcctcgcccattccttggtgggcacaccaaattacatcgccccagaagttctactccgaaaaggttacacacagttgtgcgattggtggagtgttggcgttattctgtttgagatgctggtcggtcagccaccttttctggctccaactcctaccgaaacccagctgaaggtgattaattgggaaaataccctacatataccggcccaggtcaaactgagtcccgaggcccgcgacctcatcactaagctttgctgctccgcagaccaccgcttgggaaggaacggcgcagacgatctgaaagcccacccttttttctccgccatcgatttttcaagcgatattaggaaacaacctgcaccatacgtgccaactatttctcatcctatggacacttccaatttcgaccctgtcgatgaagagtctccctggaatgacgccagtgaaggttctaccaaggcatgggatactctaactagccccaataacaaacaccctgaacacgctttctacgagtttacattcaggcgattctttgacgataatgggtacccatttagatgcccgaaaccctctggagcagaggccagccaggccgagtccagcgacctggaatctagtgatcttgtagaccagacggaaggttgccagcccgtgtatgtgtag

SEQ ID NO: 15786 - DNA, 3267 bp, synthetic construct
  misc_feature 1..3267: note = Description of Artificial Sequence: Synthetic coding sequence
  source 1..3267: mol_type = other DNA
atgcggccaaagaccttcccagctactacatattccggcaacagtaggcagagactgcaggaaattagggaggggcttaaacagccctccaagagctccgtgcagggcctgccagcaggtcccaattccgacacttcactcgacgcaaaggtactcggttccaaggatgctacccggcagcagcagcagatgcgggctacacctaaatttggcccttaccagaaggcacttcgtgagatccgctattccctgctgcccttcgctaacgaatctgggacctccgccgcggccgaggtgaacaggcagatgctgcaggaactggtcaatgctggctgcgatcaggaaatggccggccgagcacttaaacagaccggttctaggtccatcgaagccgcactggagtatattagtaaaatgggttacttggatcccagaaatgaacagattgtcagagtcatcaagcagacttcccctgggaagggattgatgcccacaccagttactcgcagaccctcttttgagggaaccggagattcttttgcctcctatcaccaactgtccgggacaccttatgaagggcccagtttcggcgccgatggacctacagccctcgaggagatgccccgcccttacgtggactatttgtttccaggagtcggaccccacggccccggtcatcagcaccagcacccacctaaaggatacggcgcttccgtggaggcagccggtgctcatttcccgcttcagggggcacattatggccgccctcacctccttgtgccaggggaaccacttggctacggcgttcagcggtctcctagcttccaaagtaagacccccccagaaaccggcggctacgcttctcttcccacaaagggacaaggggggccaccaggcgctggcttggcattcccgccaccggccgcaggcctgtatgtgccccaccctcatcacaaacaagccggccctgccgcacatcaactgcatgtcctgggatctagaagccaggtgtttgcaagcgactcaccgccacagtcccttctgacaccatcaagaaatagcctaaatgtcgatttgtacgagctcggcagcacgagcgttcaacagtggccagcagccacccttgcgagacgcgactcgttgcagaagccaggtctggaagctccccctcgggcccacgtcgcctttagacctgattgtccggtgccgtctagaactaattccttcaatagccatcagcccaggcctgggccacctggcaaggccgaaccatcgttgcctgccccgaacacggtaaccgccgtgaccgcagcacacatcctgcatccggttaagtcagtgcgcgtgcttagaccagagccacagacagcggtggggccctcccatcccgcctgggttccagctccagcaccagcaccagcacctgctcccgccccagctgcagagggcctggatgcaaaggaggagcacgcgctggctctcgggggtgctggcgccttcccattggatgtggaatatggcggacctgatcgacggtgtccacctccgccgtaccctaaacatctcctgctcagatctaagtccgagcagtatgatctggacagtctttgtgctggtatggaacaatctttgcgggccgggcctaatgagccggaaggtggggacaagtcccggaaaagcgctaaaggggataagggcggcaaagataagaagcagatccagacaagtcctgtcccggttcgaaaaaactcccgggacgaggaaaaacgagaatctcggataaagtcatatagcccatatgcctttaaattctttatggagcagcatgtggaaaatgtgattaaaacttaccaacaaaaagtcaacaggcgactgcagctggaacaggagatggccaaagcgggtttatgcgaggcagagcaggagcagatgagaaaaattttatatcaaaaggagagcaattacaaccgactaaagcgggcgaaaatggacaaatctatgttcgtgaagattaaaacactgggcatcggagccttcggagaagtttgcctggcctgtaaggtagacactcacgccctatacgccatgaaaaccctgaggaaaaaagatgtgttgaacaggaatcaggttgcacacgtaaaggccgaacgggacatcctagccgaggcggacaacgagtgggtggtgaaattatattattcattccaagacaaagactcattatattttgtcatggattacattcctggtggcgacatgatgtcactgctgatcagaatggaggtttttccagagcacctcgcccgattctatatcgctgagctcactctcgcgattgagagtgtgcacaaaatgggttttattcaccgagatataaaaccagacaacatactcatcgacttggatggacacattaaacttacagacttcgggctctgcactggattccgctggactcacaacagcaaatattaccagaaaggcagccatgtgcgtcaggactctatggaaccatcagacctgtgggatgatgtgtccaactgccggtgtggggaccgtctgaagaccctggaacagcgagcaagaaagcagcaccagcgatgtttggcacattcactcgtagggactccaaattacatcgcaccagaggtgctcctgaggaagggatacactcaactctgcgattggtggagcgttggcgtcatccttttcgagatgctggtgggccagcccccgttccttgcccctacacctactgagacacagctgaaagtcatcaattgggagaacacgctgcatatcccagcccaggtaaagctgagcccagaggctcgagatcttatcacaaaactatgttgttctgcggatcacagactgggaaggaacggagcagacgatctgaaagctcacccgtttttttccgcgatagacttttcttctgacatccgcaaacagccagccccttacgtcccaactatttcccatcccatggacacctctaacttcgaccccgttgacgaggagagtccctggaatgatgcctcggagggttctaccaaggcctgggatacacttacttctcccaataacaagcatccagaacacgccttctatgagttcacatttcgccggttcttcgacgacaacgggtacccgtttaggtgtcccaagcctagtggcgctgaggcatcccaggcggagtcctccgatctggagtcctctgacctagtcgatcagaccgaaggttgtcagcccgtgtacgtttag

SEQ ID NO: 15787 - DNA, 972 bp, synthetic construct
  misc_feature 1..972: note = Description of Artificial Sequence: Synthetic coding sequence
  source 1..972: mol_type = other DNA
atggcttatgtgcctgcacccggataccagccaacttataacccgaccctcccatactaccaacccatccctggcggccttaatgtcggaatgtccgtctacattcagggggtggcctccgaacacatgaagaggttttttgtgaactttgtggttgggcaagatcctggaagcgacgtagcttttcacttcaacccacgctttgatgggtgggacaaggtagtgttcaacaccctccagggggggaagtgggggtcagaagagcggaagagatccatgccattcaagaaaggtgcagcctttgagctggtctttatcgttctcgccgagcattacaaggtagtagtgaacggcaatcctttctacgaatatgggcaccggctacccttgcaaatggtgacacatctgcaagtagacggtgatcttcagctgcagtccatcaatttcataggtggccaacccctccggccacagggcccaccaatgatgccgccttaccccggacctggacattgccatcaacagctgaattccctaccaacgatggagggcccccccacatttaacccccctgtcccgtatttcggtcgcttgcaagggggactcactgcaagaaggactattattatcaaagggtacgtccccccaactggcaaatccttcgccattaacttcaaggtgggatcatccggcgacatagctctccacatcaatccacggatggggaacggcacagtggtcaggaattctctcctaaatggctcatggggatctgaagagaaaaaaattactcacaatcctttcggccccgggcagttcttcgatctaagtatccggtgcggtctggacaggtttaaggtatatgccaatggccaacatctcttcgactttgcacaccgcctttccgcctttcaacgggtggacactctggagatccagggcgacgtgacactgtcatacgtacagatttag

SEQ ID NO: 15788 - DNA, 1530 bp, synthetic construct
  misc_feature 1..1530: note = Description of Artificial Sequence: Synthetic coding sequence
  source 1..1530: mol_type = other DNA
atgaacaacgaagaagacctcctgcaggaagacagtaccagagatgaaggcaacgagaccgaggctaattccatgaacactctccgccgaacccgtaaaaaagtgaccaagccttacgtctgttccacagaagtgggtgaaaccgatatgtcaaactctaatgattgcatgcgcgactcaagtcagattctcacaccaccccagctgtccagccgcatgaagcacattcggcaggctatggcgaaaaacaggctgcagtttgtgaggtttgaggccacggacctccacggggtctctagaagtaagacaatcccggctcattttttccaggagaaggtgtcccatggtgtttgtatgcctcgtggttacctcgaagtaatccccaatcctaaggataatgagatgaacaacattcgggcgacctgttttaatagcgatatcgttctgatgccagaattgagtacattccgggtcttgccttgggcggaccgaaccgccagggtcatctgtgacacctttacagtgacgggtgagcctctgttgacctctccaagatacattgcgaagcggcagttgtcccacctgcaggcgtctggcttctcattactgtccgctttcatctatgacttttgtatctttggggtgcccgagatccttaatagcaaaattataagcttccccgcccttacatttctaaataatcacgatcaaccatttatgcaggagttggtcgatgggctatatcataccggggctaacgtagaaagcttctctagttcgactcgacctggccagatggagatttctttcctccctgagttcgggatatcaagtgcagacaatgcgtttacgctgcgcactggagtcaaggaggtggcacggaaatacaattacatcgcctcattttttatcgagacgggattttgcgatagcggcatcctcagtcacagcctttgggatgtggacagaaagaagaacatgttttgcagtacaagcggcaccgagcagttgactattacgggaaaaaagtggttggccgggctcctgaagcactccgcagctttgagctgcctcatggcaccatctgttagttgccgaaagagatactctaaggaccgcaaagatctgaaaaaaagcgttccaaccacctgggggtacaatgacaattcatgtatcttcaacatcaagtgccatggcgaaaagggtactaggattgagaataaacttgggtctgccacagccaatccttacctcgtgctcgctgctaccgtggcagccggactcgatggtctacattcttccaatgaggtcctcgccgggcccgatgaatcaaccgacttctatcaggtagaaccaagcgagattccgctgaaattggaggacgctctcgtcgccctggaagaagaccaatgccttcggcaggcgctgggcgaaacctttattaggtatttcgttgctatgaaaaagtacgaactcgaaaacgaggagattgccgctgagaggaataaattcctcgagtactttatctag

SEQ ID NO: 15789 - DNA, 627 bp, synthetic construct
  misc_feature 1..627: note = Description of Artificial Sequence: Synthetic coding sequence
  source 1..627: mol_type = other DNA
atgaacaacgaggaagatctactacaggaagattcaacccgggatgaaggtaacgagactgaggccaacagcatgaacaccttacgccggacccgaaagaaagtgacaaagccctacgtgtgttcaacggaagtgggggagactgatatgagtaactccaatgactgtatgcgggactcttcccagatcctgaccccaccccaactctcatcccgtatgaagcatatcagacaagccatggctaagaatcgcctgcagtttgtaaggttcgaagctaccgatctgcacggagtgtccagaagtaaaacgataccggcgcatttcttccaggagaaggtctcccatggggtgtgtatgccacgcggctacctggaggtgatccctaaccccaaggacaacgagatgaacaatattcgggcaacatgtttcaatagcgacattgtcctgatgccagaactttccacttttcgtgtgctcccatgggcagaccggaccgcccgggtaatctgcgacactttcaccgtgactgtcagtggcatgagtatcggtcggaagacatgctccgctgctttattggagctctcttccagtcggtcattaggaaagaatggatggcaggacagctag

SEQ ID NO: 15790 - DNA, 504 bp, synthetic construct
  misc_feature 1..504: note = Description of Artificial Sequence: Synthetic coding sequence
  source 1..504: mol_type = other DNA
atgcattggggaacactctgcggcttcctatggctgtggccatatctgttctacgtgcaggcagttcccattcagaaagtacaggacgataccaagacactgatcaagactatcgtgacccgaattaacgacattagccacactcaatccgttagctccaagcagaaggtgaccggcctggacttcattcccggactgcatccgatcttaactctgtccaaaatggaccagactcttgccgtgtaccagcagatcttgacaagtatgcctagcaggaacgtgatccagatatcaaatgacctcgagaatttgcgggacctgcttcatgtgcttgctttttcgaagtcttgccatctcccttgggcttccggattggaaactctggatagcctgggaggtgtgttggaggcctccggatatagtaccgaagtggtggccctgtcccgactccagggcagcctccaggacatgctttggcagctggacctgagccccgggtgttag

SEQ ID NO: 15791 - DNA, 1791 bp, synthetic construct
  misc_feature 1..1791: note = Description of Artificial Sequence: Synthetic coding sequence
  source 1..1791: mol_type = other DNA
atgggatcagtgagctcattgatttccgggcattcattccactccaaacattgtagagctagtcaatacaagctcagaaaaagctcccacctgaagaaacttaatcggtattcagatggcctgctgaggtttggcttctcgcaagattcaggtcacgggaaatcctcctccaaaatgggaaagtccgaagactttttctatatcaaggtgagccaaaaggcgaggggatcacaccatccagactataccgccctttcctcaggagacctgggaggccaggcgggggtggacttcgatccctctaccccccccaagctcatgccgttttcaaaccaattagaaatgggatctgagaagggtgcagttcgccctactgcattcaaacccgtgctgccccgatccggcgccatcctgcacagctcacccgagagtgcatcccaccagttgcatccagccccacctgataagcccaaagaacaggagctgaaacctgggctctgctctggggctttatccgacagtggccgcaactctatgagtagtctgcctacccatagcaccagttcctcgtaccagctagacccactcgttaccccagtgggccctacttcccgattcggcgggtctgcccacaacattactcaaggcattgtcttgcaagattccaacatgatgtcattgaaggcactgtcgttcagtgatggtggctctaagcttggccactctaacaaagccgataagggacctagttgcgtccgtagcccgatctccacagacgaatgtagtattcaggagctggagcagaaactgcttgagcgagaaggagctctgcagaagctgcagcggtcgttcgaggagaaagaactggcgtcctccctcgcctacgaggagagacctcggcgttgtagagatgaactcgagggccccgaacctaagggtggtaacaagttgaagcaagcctcgcagaagagtcagcgagcccagcaggttctccacctgcaggtccttcagcttcagcaggagaaacgtcagctgcgccaggagttggagtccttaatgaaggagcaggatctgctggagactaagcttagatcatacgaacgagagaaaactagtttcggccccgccttggaggagactcagtgggaggtttgccagaagagtggggagatcagtctgctgaaacagcagctcaaagagagccagacagaagtaaatgcaaaagcatccgagatcctggggctcaaagcacaactcaaagacactcgcggcaagctagaaggcctagagcttcggacacaggacctcgaaggtgcactccgcacgaaaggtctcgagttggaagtttgtgagaacgagctgcagcgtaaaaaaaatgaggcggaactgctccgcgagaaggttaacctgctcgagcaggagctgcaggagttgcgcgcccaggcagctctggctcgcgatatgggcccgcctacattcccagaggacgtccctgccttacagcgagaattggagagactgcgcgcagagctgagggaggagagacagggccacgaccagatgtcaagcggctttcagcatgagcgcctggtctggaaggaagaaaaggagaaggtgattcaatatcaaaaacagctacagcaatcatacgtcgccatgtatcaacggaatcagcgcctggaaaaggcactgcagcaattggcaaggggggactctgccggagagcccctggaggtagatctggagggggcagacataccctacgaggacatcatcgcaacagaaatatag

SEQ ID NO: 15792 - DNA, 231 bp, synthetic construct
  misc_feature 1..231: note = Description of Artificial Sequence: Synthetic coding sequence
  source 1..231: mol_type = other DNA
atgggaagtgtgagctctctgatcagtggccactcattccattccaaacattgtagagccagtcaatacaagctgagaaagtcttctcacctgaagaagcttaaccgctacagtgacggcctgctgcgtttcggattctcccaagacagtgggcacggtaaagctatgacacgctgtcctagagcctctagtatgtctggttcatgtggacgccgacgacggaggaggtag

SEQ ID NO: 15793 - DNA, 1722 bp, synthetic construct
  misc_feature 1..1722: note = Description of Artificial Sequence: Synthetic coding sequence
  source 1..1722: mol_type = other DNA
atggggtcagtgtccagcctgattagcggtcatagctttcattccaagcactgtcgggcttctcagtataagcttcggaagtcaagtcaccttaagaagttgaacaggtactccgatggtctgttgcggttcggtttcagtcaggattctggccacgggaagtccagctctaagatgggcaagagcgaagatttcttctacatcaaggtatcccagaaagctaggggttcgcatcatccagattacaccgccctttcatcaggagacctgggaggtcaagccggggtcgattttgatccaagcacccctcctaaactgatgccatttagcaaccagctggagatgggctccgagaaaggggccgtccggccaactgcctttaaaccagttttgcctcgctccggggctatcctgcattcatctcctgaaagcgcttctcaccagctgcatccggccccaccggataagccaaaggaacaggagctgaagccaggactctgttctggcgctctgtcggacagtggacgcaattctatgagtagcctgccaacacactccacctctagttcataccagctcgaccccttggtaacacctgttggtcctacctcccggtttggcggatccgcacataatattacccagggaatcgtgctgcaggatagtaacatgatgagtttgaaggcactatctttcagcgacggtggctctaaactcggccactcaaacaaggccgataaaggcccatcttgtgttagatcacctatttccaccgacgagtgctctatccaggagctcgagcagaagctgctggagagagagggggctctacagaagcttcagaggtcgtttgaggagaaggagctggctagctcactggcatatgaggagcggcctcgccggtgcagggacgagctggagggccccgagccaaagggcggcaacaagttgaagcaggcaagccagaagtcccaaagggctcagcaggtgctgcatctgcaggtgctgcagttgcagcaggaaaagcgacagcttcggcaggaactcgagtccctgatgaaagagcaagacctccttgagacaaaattaaggagctatgaaagagaaaagacgtctttcggacccgccctagaagagactcagtgggaggtgtgtcagaagagcggcgagatctccctcctgaaacagcagctcaaggaaagccagactgaggttaatgcaaaggcttccgaaattttagggctcaaagcacagctgaaagatacaaggggtaagctggagggcctagaacttagaactcaggacctggagggagccctacgaactaaaggtctggaacttgaggtatgcgagaatgaattgcagagaaagaaaaacgaggccgaactattgcgagaaaaagtgaacctcctcgaacaagagctgcaggaacttagagcccaggctgcgctcgctagagacatgggccctccaacctttccagaggacgtcccagccttgcagagagaattggagagactggtctggaaagaggagaaagagaaggtaattcaataccagaagcagctgcagcagtcttatgtggcaatgtatcagcggaatcaaaggctggaaaaggccctccagcaattagccaggggcgatagcgcaggggagcccttggaagtggatctggaaggcgcagacatcccctatgaggacattatcgccaccgagatatag

SEQ ID NO: 15794 - DNA, 1791 bp, synthetic construct
  misc_feature 1..1791: note = Description of Artificial Sequence: Synthetic coding sequence
  source 1..1791: mol_type = other DNA
atgggttctgtttcctctttgatttcggggcattcatttcactcaaaacactgccgcgcctcacagtacaagctgcggaaatcatctcaccttaaaaagctcaatcggtacagtgatgggctgctccggtttggcttttcgcaagatagcggtcacgggaaaagctctagcaaaatgggcaagtccgaagattttttttatatcaaggttagccagaaggcgcgggggagtcatcaccctgattataccgctcttagcagcggtgacctcggtgggcaagccggcgtggattttgatccctcgactccccccaaactcatgcctttttccaaccagttggagatgggaagcgagaaaggagccgtccgaccgacagcatttaagcctgtgctgccccggtcaggtgccatccttcactcttctcctgagagcgcgtcgcatcagctgcatcctgctcctcctgataaaccaaaagagcaggaactgaagcccggtctatgttcaggagccctgtctgattctgggaggaattccatgtcttccttgccaacccattcaacctcgtccagttatcaacttgatcccctagttaccccagtcgggcctaccagtcgctttgggggaagcgctcataatattacacagggcatcgtgctgcaagatagcaacatgatgtccctgaaggctctctcgtttagcgacgggggtagtaagttgggtcacagcaataaagccgataagggtccctcctgtgtgaggagccccatctctactgatgaatgttcgatccaagaactggagcagaagcttttggaaagggaaggcgccctgcagaagctacaacggtcctttgaagaaaaggaactggcgagctctctggcttacgaagagcggcctcgccgttgtagagatgaactagaaggtcctgagcccaagggcggaaacaagctaaagcaagcaagccagaaatctcagcgcgctcagcaggtgctacatcttcaggtgctgcagttgcagcaggaaaagaggcaactacggcaggaactggagtcactgatgaaggagcaggatctcctggagactaagctgaggtcgtatgagcgcgagaagacctccttcgggcccgccctcgaggagactcagtgggaggtgtgtcagaaatctggcgaaatctcactgctgaagcagcagctgaaggagagccagacagaagttaatgccaaagctagtgagattcttggactgaaggcccagttgaaggataccaggggtaaactggaaggactggagctgagaactcaggatcttgagggcgctctccggacgaaaggcttagagttagaggtgtgtgagaacgaactgcagagaaagaaaaacgaagcagagctgctccgcgaaaaggtcaaccttttagagcaggagctgcaggagctgcgcgctcaggcggcacttgccagggatatgggccccccaaccttccctgaagacgtgcctgccttacaacgggaacttgaaagactacgcgctgagctgagagaagaacggcagggtcatgatcagatgtcaagcgggttccagcacgaacgactggtgtggaaggaggaaaaggaaaaagtgattcaatatcagaaacagcttcagcagtcctatgtagccatgtatcagcggaaccagcgcctggagaaggcgctccagcagctggctaggggcgattcagctggagaaccactggaggtggacttggaaggggccgacataccttacgaagacataatcgccaccgaaatctag

SEQ ID NO: 15795 - DNA, 1614 bp, synthetic construct
  misc_feature 1..1614: note = Description of Artificial Sequence: Synthetic coding sequence
  source 1..1614: mol_type = other DNA
atgggaagcgtcagcagcctcatatccggccactcgttccatagcaagcactgtagagcttcccagtataagctgaggaaaagctcccatcttaagaaacttaaccgctattctgacggattgcttcggtttggattcagccaagactccggacacggaaagagttcctcaaaaatgggaaaaagtgaggattttttttacatcaaagtgtctcagaaagcccgagggagccaccatcccgactacacagctctgtcctcgggagacttgggagggcaggcgggagtggactttgatcctagtacaccccctaaactgatgccgttctccaaccaactggaaatgggctcagagaaaggcgcggtgagacccacggcattcaagcctgtgctacccagatcaggagccatcctgcattcctcccctgaatcagcgtctcatcagctgcaccccgctcctcccgataaacccaaggagcaggagctgaagcccggcctctgcagtggggctctttccgacagcggacgtaactccatgtcttccctacccactcacagcacctcctcttcctatcagctcgatcctctcgtgaccccggtcggcccaacttctcgtttcggcggatctgctcacaacatcacgcagggaattgttctgcaggatagcaatatgatgtcacttaaggctctctctttcagtgacgggggctccaaattgggtcacagtaacaaggccgataaagggccctcctgtgtccgatctccaatcagcacagacgaatgcagtattcaggagcttgagcagaaactgctggagcgggagggggcactgcagaaactccagcgatccttcgaagagaaggagcttgctagcagtcttgcttatgaagagcgcccccggcgatgtcgagatgaactggaaggacctgagcccaagggcggaaacaagttgaagcaggcctcccagaaaagccagagagcgcagcaggtgcttcacctgcaggtacttcagcttcagcaggagaagagacaactgcggcaggagttggaaagcctcatgaaggagcaggacctcctggagacaaagctgcgctcctatgaacgggaaaagaccagcttcgggcccgctctcgaggagacccagtgggaggtgtgccaaaagagtggcgaaatcagcctgctcaagcagcaattgaaggagtcccagaccgaagttaatgccaaggcctccgagatattggggctgaaggcacagttgaaggacacccgcggcaagcttgagggacttgaacttaggactcaggacctggaaggcgctctgcgaaccaagggcctggagctggaggtgtgcgaaaatgaactgcaacgaaagaaaaatgaggcggaactgctccgcgagaagcatgaacggctggtgtggaaagaggaaaaagaaaaagtcatccagtatcaaaagcagctacagcagagctatgtggcaatgtaccagcgcaatcagcggttggagaaggccctgcagcaactggcccgtggagattccgccggggagccacttgaggtggatttggaaggcgccgacattccgtatgaagacatcatcgcaactgagatctag

SEQ ID NO: 15796 - DNA, 1005 bp, synthetic construct
  misc_feature 1..1005: note = Description of Artificial Sequence: Synthetic coding sequence
  source 1..1005: mol_type = other DNA
atgacggagaattcggacaaagttcccatcgccctggttggaccagatgacgtagagttctgctccccacccgcttacgcaacactgacagttaaaccttcctcccccgcccgactgctgaaggtgggtgcagtcgtgctcattagcggcgcggttttgctcttgttcggtgccatcggagccttttacttctggaagggctcagattcccacatctacaatgtgcattacacaatgagcatcaacggcaaactccaggacggatcgatggagattgacgccggcaacaacctggagactttcaagatgggatctggcgccgaagaggccatcgcggtgaacgattttcagaatggtataacagggatacggtttgcgggtggagaaaagtgctacataaaggcccaggtaaaagccagaattcccgaggtgggtgcggtgacaaagcaatccatcagctctaagctggaggggaaaattatgccagttaaatacgaggagaatagcctcatatgggtggcggtggaccagcctgttaaagacaacagctttctatccagcaaagtgctggaactttgtggcgacctgccaattttttggttaaaacctacataccctaaagagattcagcgggagcggcgtgaagtggtgaggaagatcgttcctacgaccacaaaacgtccacattctggtccccggtccaatcccggcgcgggtagactgaataacgagactagaccttcagtgcaggaagatagccaggcattcaaccccgacaacccgtaccatcagcaggagggagaatcgatgaccttcgatcccagactggatcacgaaggaatctgttgtatcgaatgcaggagatcctatacgcactgccagaagatctgtgagcctctgggtggctactacccatggccctacaactatcaggggtgccgtagcgcttgtcgggttattatgccctgcagctggtgggttgctaggatcttgggcatggtgtag

SEQ ID NO: 15797 - DNA, 390 bp, synthetic construct
  misc_feature 1..390: note = Description of Artificial Sequence: Synthetic coding sequence
  source 1..390: mol_type = other DNA
atgagcatcaacggaaagctgcaagatggtagcatggagatcgacgccggcaacaacttggaaacttttaagatgggctccggcgccgaggaggccatcgctgtgaacgattttcaaaacggcattactgggattagattcgcgggcggagagaaatgctatatcaaagcacaggtgaaagccaggattccagaggtgggggcagtaaccaaacaatcaatcagctcgaagttggagggcaagattatgccagtgaaatacgaagaaaacagcctcatatgggtggccgtggaccagcccgtgaaggataattctttcttaagttccaaagtccttgaactttgtggggatctaccgattttctggctcaagcccacgtatccgaagtag

SEQ ID NO: 15798 - DNA, 1002 bp, synthetic construct
  misc_feature 1..1002: note = Description of Artificial Sequence: Synthetic coding sequence
  source 1..1002: mol_type = other DNA
atgaccgagaacagtgataaagtcccaatcgcactagtggggcctgacgacgtggaattctgttcacctcccgcctatgccacacttacagtcaagccaagctctccggccaggttgctgaaagtcggggctgttgtgctgatttcaggcgctgtccttctgctcttcggcgcaatcggcgccttctacttctggaaggggtccgactcacatatttataacgtgcattacacaatgagtattaatggtaaactgcaggatgggtctatggaaattgatgccgggaataatctggaaaccttcaagatgggaagtggggccgaagaagccatcgctgtaaatgattttcagaacggaatcacaggcattaggtttgctggtggcgagaaatgttatatcaaggcccaggtcaaggcacggattcctgaagttggtgctgtaactaagcaatctatcagttccaagctagagggaaaaatcatgcccgtgaagtacgaagagaatagtttaatctgggtagccgttgaccaaccggtgaaagacaattcgttcctcagttctaaagtactggaactgtgcggggacctgcccattttttggctgaaacccacctatcctaaggaaattcagcgagaacgcagggaggtggttaggaaaattgtacccacgacgacaaaaaggccacattctgggccccggtcaaatcctggtgccggccgactcaataacgaaacgcgccccagtgtacaggaagacagtcaggcctttaaccccgataacccctatcatcaagagggagagtctatgacgttcgacccgagacttgaccatgagggaatttgctgcatagagtgtcgtcgatcttacactcactgccagaaaatttgtgaacccttaggcgggtattacccttggccctacaactaccagggatgcagatcggcgtgccgggtgataatgccctgttcatggtgggttgctagaatcctgggaatggtttag

SEQ ID NO: 15799 - DNA, 408 bp, synthetic construct
  misc_feature 1..408: note = Description of Artificial Sequence: Synthetic coding sequence
  source 1..408: mol_type = other DNA
atgaacgaagttataatctacaacgtcttactgctgagaaccataagttgtatctcggagacctacggacattacctgattcattgtccaagtaagataagccccgaactgctaaagaaggaaagtataacaaatagctatgcccattttcagatctacaatgtgcactacacgatgagcattaacggaaaacttcaggatggcagcatggagatcgacgcaggtaacaatctcgagactttcaaaatgggatctggcgcggaagaagctatcgccgtcaatgacttccagaacgtgagcatctttcatgcctttcgggaatttaaccaagcatccctgagggactttagtaactccagaagatcgagtgtttcacacacccatcccaatggcaattgttctctgtag

SEQ ID NO: 15800 - DNA, 2760 bp, synthetic construct
  misc_feature 1..2760: note = Description of Artificial Sequence: Synthetic coding sequence
  source 1..2760: mol_type = other DNA
atgcagagaagtatcatgtcattcttccatcccaagaaagagggcaaggccaaaaaacccgagaaggaagctagcaatagctctagggaaactgagcctcctccgaaggctgcgctgaaggaatggaatggtgtggtctctgaatccgacagccccgtgaaaagaccaggaaggaaggccgcgagggtcctggggtcagagggagaagaggaagatgaggcactgtctccagccaaggggcaaaaacctgctctggattgttcgcaggtctcccctccacggccagctacgagcccagaaaataacgcttcgctctcagatacaagcccgatggacagctctccatcaggaatccctaagaggagaacggcacgaaagcagctgcccaaacgaaccatccaggaggtgctggaggagcagtcagaggatgaggaccgcgaagctaagaggaaaaaggaggaagaagaagaagagactccaaaagagtccttaactgaggctgaagtggctactgaaaaagaaggagaagatggagaccagccgaccacaccccctaagcccctgaaaacctccaaagcagagacgccaaccgagtccgtaagtgaaccagaagtggccaccaagcaggagctgcaggaggaggaagagcagaccaagccgccacgacgcgccccgaaaacattatctagcttctttacccctcgtaagcccgccgtgaagaaagaagttaaagaagaggaaccgggagctccagggaaagaaggggctgcggaaggccccctggacccctctggctataacccggcaaaaaacaactaccacccggtggaggatgcttgctggaaacccgggcagaaggtcccttatctggctgtggccaggacatttgaaaagatcgaagaggtcagcgcccgtctccgtatggttgaaacccttagtaacctcctgaggtccgtggtggcactgagccccccagatctgctcccagtcctgtacctgtcactgaatcaccttgggccaccccagcaggggttggaacttggcgttggcgacggggtgctactgaaggccgtcgcccaggccacaggacgacagctggagtccgtgagggctgaggcggccgagaagggcgatgtaggattagtggcagagaactccaggagcactcagagactgatgttgcctccgcctcctctgactgcttctggcgttttttctaaatttcgtgacattgcacgcctgacaggaagcgcttcgacagccaagaagattgatattatcaagggtctcttcgtggcatgccgccattccgaggccaggtttatagccaggtccctgtcaggcaggttgcgcttaggtctggctgagcagtcggtgttagcagctctgtcacaggctgtctccctcacaccacccggccaggagtttccaccagccatggtggacgccggaaaaggaaagacggcagaggccaggaagacctggctggaggagcaaggtatgattctgaaacagacattttgcgaggtccccgatctggaccggatcataccggtgcttctggagcacgggctcgaacgattgcccgagcattgcaaactgagtccgggcatcccgctgaaacccatgctggctcaccccacgcgggggatcagcgaggtgcttaagagattcgaggaggccgcattcacttgtgaatacaaatacgacggccaacgcgcccagatccatgctcttgaagggggcgaagtaaagatcttcagccgtaatcaggaggataacactggtaaataccccgacatcatcagccggattcctaagatcaaactacctagcgttacaagcttcatcctcgatactgaggccgtcgcctgggatagagagaaaaagcaaattcaaccgttccaggtcctcacaacgcgtaagcggaaggaggttgacgcttcggagattcaggtgcaggtctgtctctatgccttcgacctcatttacctgaatggtgagagtctcgtccgcgagccactatccaggcgccgtcagctcctgagagagaattttgtggagacggagggtgagttcgtctttgccacttcactcgacacaaaagatatagagcagatagctgaatttttagaacagagtgtcaaagactcatgtgaggggctaatggtgaaaactcttgacgtggacgccacttacgaaatcgctaaacgcagtcataactggttgaaacttaagaaggactatctagatggcgttggcgataccctggacttagtggtaattggggcctacctgggtcgtggtaagagggctggcagatacgggggctttctcctggccagttatgatgaggactccgaggaacttcaggctatttgtaaactgggcactggcttttccgatgaggaattagaggagcaccatcagtccttgaaggctctggtcttaccttcaccaaggccatacgtacggatcgacggagctgtgatcccagaccactggttagaccccagtgcggtttgggaggtcaaatgcgccgatctcagcctcagtccgatctatcccgctgcaagaggtcttgtggactctgataaaggaatctctctgcggttcccacgcttcatcagagtgcgggaggacaagcagcctgagcaggcaacaaccagcgcccaggtcgcatgcctgtacagaaagcagagtcaaatccagaaccagcagggtgaagacagcggctcggaccccgaggacacatattag

SEQ ID NO: 15801 - DNA, 2667 bp, synthetic construct
  misc_feature 1..2667: note = Description of Artificial Sequence: Synthetic coding sequence
  source 1..2667: mol_type = other DNA
atgcagcggagcatcatggctgctttaaaagagtggaacggggtggtcagcgaaagcgactcaccggtcaaacgaccgggcagaaaggctgctcgggtcctcgggagtgagggggaagaagaagatgaggctttgagccccgccaaggggcagaagcccgctttagactgtagtcaggtgagccctcccagaccagccaccagtccggaaaacaacgccagcctgtctgacacatcccccatggatagttccccgagcggtattccaaagcgaagaacagccagaaagcaattacccaaacgcacgatccaggaagttctcgaggaacagtccgaagatgaagatcgggaagctaagaggaagaaggaggaggaggaggagactcctaaggaatctctaactgaagcagaggtggctactgaaaaggagggtgaagacggggatcagcccaccactccgccaaagccactgaaaacaagcaaagctgagactcccacagaaagcgtgtccgaacctgaggtagccaccaaacaggagctgcaggaggaggaagaacagactaagccaccaaggagagctccaaaaaccctgtcttcgttcttcactcccaggaagcctgccgtaaagaaggaagtgaaggaagaagaacctggcgcgcctggtaaagagggagctgccgaggggcctctggatccaagtggatacaatccggctaagaacaattatcatcccgtggaagacgcttgttggaagcccgggcagaaggtcccatatctggcagttgcaagaacatttgagaaaatcgaagaggtaagcgcacgcctcaggatggtggagaccctatctaatctgctgagatctgttgtagcgctctcacctcctgacctgctgccagtcttgtacctatccctgaatcatctgggccccccccagcagggactggaacttggagtaggcgatggtgtgctcctcaaagccgtcgctcaagctaccggtcgccagctggaaagtgtgagggcggaggctgctgagaaaggggacgtaggactagtggctgaaaacagtagatctacacagagattgatgttgcctccccctcctcttacggccagcggcgtattcagcaagtttagagacatcgctcgcctgaccggctctgcatccactgctaaaaagatagacattatcaaaggtctctttgtggcttgtcgccactccgaggcccggtttatcgccaggagtctcagcgggcgtctgagactgggcctggcagaacagtctgtattagcggctctgagccaggctgtgtctctcactccccctgggcaggagttccccccagccatggtagatgcaggaaagggtaagacggctgaagctcgaaagacttggctggaggagcaaggaatgattctgaagcagaccttttgcgaagtgcccgacctggatcgcatcataccggtactgctggagcacgggctggagcggttgcccgagcattgcaaactgagtcccggtattcccctcaagccaatgctggctcatccgacacgtggaatctccgaggtgctgaaacgattcgaagaagccgcattcacatgcgaatacaaatacgacggccagagggcccagatacacgccctggaaggcggggaggtgaaaatattttcaaggaatcaggaggacaacaccggcaagtatcccgacattatatctcgcatcccgaagatcaaactgccaagcgtgacaagctttatcctcgatacagaggctgtcgcttgggatagagaaaagaaacagatccaaccctttcaggtactgacaacaaggaaacgaaaggaagtcgatgcctccgagattcaggtgcaggtctgcctctatgcctttgacctgatttacctgaacggtgaatccctggtcagggagccactgtctcgaaggcgccagctgctcagagaaaatttcgtggagaccgaaggtgaatttgtgttcgccactagcctggacactaaggatatcgaacagatcgctgagttcctcgaacaaagcgtgaaggatagctgtgaggggctgatggtaaaaaccctggacgtagatgcgacttacgaaatcgcaaaacgctcacataactggctgaagctaaagaaggattacctggatggagtgggagataccctggacctggtcgtgatcggagcctatcttggaagaggaaaaagagccgggcggtacggtgggtttttgcttgctagctatgatgaggacagcgaggagctccaggctatctgcaaattggggacgggcttctcagatgaagagctggaggagcaccaccaaagccttaaggcactggttttgccatcaccacgcccctatgtccgcattgacggagcggtgatcccagaccactggctggacccttcagccgtctgggaggttaaatgcgccgacctgtccctgagcccaatctacccagcagcccggggtcttgtggacagcgacaaaggcatttcattacggtttccgagatttattcgtgtgcgggaggataagcagcccgagcaggctaccactagtgcccaggtagcgtgtctttaccgaaagcagagtcaaatacagaaccagcagggtgaggattccggctccgatcccgaggatacatactag

SEQ ID NO: 15802 - DNA, 2556 bp, synthetic construct
  misc_feature 1..2556: note = Description of Artificial Sequence: Synthetic coding sequence
  source 1..2556: mol_type = other DNA
atgcagaggtcgatcatgagttttttccatccaaagaaagaaggcaaggcaaaaaagcctgaaaaagaagcaagcaacagcagtcgcgagacagaacctccaccaaaagctgctcttaaagagtggaacggcgtggtgagtgaatcagactcacctgtgaaacgccctggtcggaaagcagctcgggtcctcggcagcgaaggggaggaggaggacgaggccctatcacccgccaaaggacaaaagccagcactggactgttctcaagtaagccctcctagaccagccacttccccggagaacaacgcatccttgtccgatacctcaccgatggattccagtccgagcggaatacctaaaagaaggaccgaagcagagacgcctacagaaagtgtaagcgagccagaagtggccaccaaacaggagttgcaagaggaggaagagcagacaaaaccacctaggcgtgcccctaagacgctgtcctccttctttaccccgcgcaagcctgccgtgaagaaagaggttaaagaagaagagcccggagctccagggaaagagggtgccgctgaaggccccttggacccctcaggctacaatcctgcaaagaataactatcatcccgtcgaggatgcttgctggaaacccggccagaaggtgccctatttggcagtggcaagaacttttgaaaagatcgaggaagtgagtgccagactgagaatggttgaaacgctgtccaatctgctccggtccgtggtggccctctccccccctgaccttctccctgtgctatatttgagcttgaaccatttgggcccgccacagcaggggctggaactgggagtgggtgatggggtgttgctgaaggcagtcgcccaggccacaggacgccagttggagagtgtgcgagcagaggcggctgaaaagggtgatgtggggctcgttgccgagaattcccggtccactcagagactgatgctcccccctccacctctcactgcgtccggagtgttttctaaattccgggatattgccagacttaccggatccgcctctaccgccaagaagatcgacattattaagggcctgttcgttgcttgccgccacagtgaggctcgattcatcgcgcgctccctgtccgggcggctgaggttagggctggctgagcagtctgtactcgccgccctgtctcaggccgtctccctgacgcccccggggcaagaattcccaccagccatggtggatgctgggaagggaaagacagccgaggctcgcaaaacctggctggaggagcaaggcatgatcctcaaacaaactttttgcgaagtcccagacttggaccgaattattcccgtgctcctggaacacgggttggaacgtctgcccgagcactgtaaactctcccccggcatccccctcaaacctatgctagcccatcctacaaggggtatatctgaggtcttgaaacgcttcgaggaggctgcttttacatgcgagtacaaatacgacgggcagcgagcccagatacacgctttagaagggggagaggtaaaaatattctccagaaatcaggaagataacaccggcaaataccccgacattattagccggatccctaagatcaaactgccatctgtgacctctttcatcttggataccgaggctgtggcatgggatcgggagaaaaaacagatccagccttttcaggtgctcaccaccaggaaacgaaaggaggtagacgcttccgagattcaggtccaggtgtgcctttacgctttcgacttaatctacctgaacggagagagcttggtgcgcgaacctttatccagaagaagacagcttttgagggagaatttcgtcgaaacggaaggagagttcgtttttgcaacctcgctggatacaaaggatattgaacagatcgcggagttcctggagcagtctgtcaaggattcttgcgaagggctgatggttaaaactctggatgtggatgcgacgtatgagatcgcaaagagatcacacaactggctgaagctgaagaaagactacctggacggggtaggcgacaccctggatttagttgttatcggtgcctatctgggcagggggaagagggccgggaggtatggaggattcttactggcctcttacgacgaagactctgaagaactccaggccatctgcaagctgggaacaggcttctccgatgaggagttagaggaacatcatcagtctctcaaagctctggtgctcccaagcccccgaccctacgtaaggatcgatggggctgtgattccggatcactggctagacccttccgcagtctgggaagtgaagtgtgccgatctgtccctatctcctatttatcccgctgcacgcggcctagtagattccgacaagggcatatccttgaggttccctcgttttattcgcgtgagggaggacaagcagcctgagcaggcaaccacctccgcccaagtggcttgtctctacagaaagcagtctcagatccaaaatcagcagggcgaggatagcgggtccgacccggaggacacatactag

SEQ ID NO: 15803 - DNA, 1248 bp, synthetic construct
  misc_feature 1..1248: note = Description of Artificial Sequence: Synthetic coding sequence
  source 1..1248: mol_type = other DNA
atgcagcgatcaattatgtccttttttcatcccaagaaagaaggcaaggctaaaaaacccgaaaaggaagcctccaacagctccagggaaactgagccacccccaaaagccgccctaaaagagtggaacggggttgtcagcgaaagtgactccccagtgaagagacccgggcgcaaagccgcccgggtactgggctcggagggagaggaggaggatgaggctctcagtcccgccaagggacaaaaacctgccctggactgttctcaggtctcccctcctaggccagcgacctcccccgagaacaatgctagtcttagtgatacatcccccatggattctagccccagcggtatccccaagcgccgaacggaggaagaaacacccaaggaatcattaaccgaagcagaggtcgccaccgagaaagagggagaggacggcgaccagccaacgacacctcctaagcctctcaaaaccagcaaggccgaaaccccaacagaatccgtgagcgaacctgaggttgctaccaaacaggagctccaggaagaagaggagcagacaaaacctccgcgacgggcccctaagacactcagctcattcttcacaccacgcaagcccgctgttaaaaaagaggtcaaagaggaggagccaggagctcccggcaaggagggggccgccgagggcccactcgacccatcggggtacaacccagctaagaataactatcatccggtggaggatgcctgttggaaacctggtcagaaggtgccctatctcgctgttgctcggacattcgaaaagatagaggaagttagtgccagactgcgaatggtagagacattaagtaatcttctgagaagcgtcgtggccttatcaccaccagatctcctccccgtgctatatctcagcctgaatcaccttgggcccccccagcaaggtcttgagctgggtgtgggagatggggttttgcttaaggccgttgcgcaggccaccgggcgagagagaagggagacacggagtcacaactgtcaccctagacacccccaccctagaagccctctgaaggtgggcagctggtctcccagtgggcttcgtcaacccagaaaggccacctggggatggtggcccagaacagctgcagcaccacgtggctcatgctgtcatcatctgagatctctcccaccaggcagttctgcttcaagcgctacctccccgggttcgcttgccgtactccctcagccccgcagatag

SEQ ID NO: 15804 - DNA, 2499 bp, synthetic construct
  misc_feature 1..2499: note = Description of Artificial Sequence: Synthetic coding sequence
  source 1..2499: mol_type = other DNA
gtgtgttgtcctgggtctggggccagggaccagagaaaggctagattgacagatgaagagaaatgttggacagggagagagaactccgacgccaacatgcagcgcagcatcatgtctttcttccatcctaaaaaggaggggaaggctaagaagcccgagaaggaggcttcaaacagctcccgggagactgagccaccacccaaggcagccttaaaggaatggaacggcgtggtgtccgaaagcgatagtccagtgaaaagacctggaaggaaggccgcaagagttctcggtagcgagggagaagaagaggacgaggcactctccccagcaaagggccagaagccagctttggactgtagccaggtaagcccgccacgacccgcaacgtcccccgaaaacaatgcatctctgtccgatacctcacctatggatagcagccctagcggtatccctaagcgccggacggcaagaaagcagcttccaaagagaaccatccaggaggtgctggaagaacagtccgaagatgaagaccgggaggcgaaacggaaaaaggaggaggaggaggagactcccaaagaatccctcactgaggcggaggtcgccaccgaaaaagaaggagaggatggggatcagcctacaacccctccgaaacctctaaagacaagcaaggcagagaccccgacggaatccgtgagcgagccagaagtggcaacaaaacaggagctgcaggaagaggaagagcagacaaagcctcccaggcgcgccccgaaaacgttgtcgagtttttttactccacgcaagcctgcggtcaagaaagaagttaaagaagaagaacctggggcccccggtaaagaaggcgctgccgaaggacccctcgatccaagcggctataacccagctaagaacaactaccaccccgtagaagacgcttgctggaagccagggcagaaagtaccttacctggcagtggcccggacattcgagaagatcgaagaggtttcagcaaggctaaggatggtcgagactctgtcaaacctgctgcggagtgtcgtggccttgtcccccccggacctgctcccagttctctacctgtccctgaatcatctgggacccccccagcagggcctggaacttggcgtgggagatggagtgctcctcaaggccgtggcccaggccaccggcagacagctcgaatctgtgagagccgaagccgccgaaaagggcgacgtgggactcgtggctgaaaactcaaggtcgacacaacggttgatgttgcccccaccacccctgaccgccagcggggtattcagtaagtttagagacattgcgaggctaaccggtagtgccagcacggccaaaaagatcgatataatcaaaggcctttttgtggcatgccgccattctgaagcccggtttattgcaaggtctttgtcaggcaggctgcggctgggcttggctgaacagtccgtgctggccgccttaagtcaggcagtttctctgactcctcctggccaggagtttccccccgcaatggtggatgccggaaagggaaaaactgcggaggctcggaagacctggttggaggaacagggtatgattttgaagcagaccttttgtgaggtccctgatctggatcggatcatacccgtgttactggagcatggactggaaaggttgcctgagcattgcaaattgagcccaggcattcccttaaagccaatgctggctcatcctaccaggggcatcagtgaagtcctgaaacgttttgaggaagctgcctttacctgtgagtacaagtacgatggccagcgcgcacagatccacgccctcgaggggggagaagttaaaattttcagtcggaaccaagaggataatacaggaaaatatcccgacataataagcaggatcccaaagatcaagctgccatccgttacctcattcatcctcgacactgaggccgtggcatgggatcgggagaaaaagcagattcagccatttcaggtgctcaccacacgtaagaggaaagaggtcgatgcttccgaaattcaggtgcaggtgtgtctctatgcattcgatttgatctatttgaatggagaatccctcgtgagggagcctctgtctaggcgccggcagctgctccgcgaaaactttgtggagaccgaaggagagttcgttttcgccacgtctctcgacacaaaggatattgaacagattgccgagttcctggaacagtctgtcaaagactcctgtgaaggtctgatggtgaagactcttgacgtggacgctacttatgaaatcgcaaaacgaagccataattggctgaaactgaagaaagattacctcgacggcgtcggggataccctggatctagtggtcatcggagcgtatctcggtaggggtaagcgcgccggcagatacggtggtttcttattagcgtcgtatgatgaggactcagaagagctgcaggctatttgtaaggttctcggcaactggggatag

SEQ ID NO: 15805 - DNA, 2850 bp, synthetic construct
  misc_feature 1..2850: note = Description of Artificial Sequence: Synthetic coding sequence
  source 1..2850: mol_type = other DNA
atgagcttggcctttaagattttttttccgcaaacactccgagccttaagcagaaaggagctttgcctgtttagaaagcatcattggcgtgatgttcgacagttttcacagtggtctgagaccgatctactgcacgggcacccgctatttctaagaaggaaacccgtactctcattccagggatcccatttgagatcacgagccacttatctggtcttcctgccgggactgcatgtaggcctctgttcggggccatgtgagatggccgagcaacgattttgcgtagattatgccaaacgagggactgcaggatgcaagaaatgcaaggagaagattgtgaaaggtgtttgcaggataggtaaggtggtgcccaaccccttttccgagagtggtggcgacatgaaggagtggtaccacataaagtgtatgtttgaaaagctggaacgggctagagctacaactaagaaaatcgaggacctgaccgaactcgagggatgggaggagctggaggataatgaaaaggaacaaatcacgcaacacatcgctgatctctcctccaaggcggctgggacaccaaaaaagaaggcggtagttcaggcgaagctgacaacaactggtcaggtgacttcacccgtgaaaggagcctcgttcgttacatctacaaatccccgaaagttctcagggttttcggcgaaacctaacaacagtggcgaggccccttcatcacccactccgaagaggagcctatcgagctcaaaatgtgatccccgccacaaagactgcctgcttcgtgagtttaggaaattatgtgcaatggtggcagacaacccaagctacaacaccaagacccaaattattcaggattttctccgtaagggaagcgccggagatgggttccatggagacgtttatctgaccgtgaagcttctgctcccaggagttatcaagaccgtctacaatttgaacgataaacagatcgtgaagcttttctccaggatctttaattgcaatccagatgacatggcaagagatcttgaacagggcgatgtgagcgagaccatccgcgttttctttgaacagtcaaagtcgttcccacctgctgcaaagtcactgctgactatacaggaagttgacgagtttctcttacggctgtcaaagctgacaaaggaagacgaacagcagcaggcccttcaagatatcgcctctagatgcacagcaaatgatctgaagtgtataatcagactcatcaagcacgatctcaaaatgaactcaggggctaaacacgtgctggatgccctggaccccaacgcctacgaagcctttaaagcatcacgaaatctgcaggacgtggtggaacgcgtgctgcataacgcacaggaagtggaaaaggaacctggacagagacgggccctctccgtccaagccagcctaatgacaccagttcagcctatgctagctgaagcttgcaagagcgtggaatacgccatgaaaaagtgccccaatgggatgttttccgagatcaagtatgacggggaacgagtgcaggttcacaagaatggcgatcattttagctattttagtagatccctgaagcccgtgctccctcataaagtcgcccattttaaggactatattccgcaggcctttcccgggggtcatagtatgattctcgactctgaggtgcttttgattgacaataaaaccggtaaaccgctcccttttggaactctgggggtgcacaagaaggccgctttccaggatgccaacgtgtgtttatttgtgtttgactgtatctattttaacgatgtctctctgatggacaggcctctgtgtgaacgacggaaatttctgcatgataacatggttgagattcctaataggatcatgttctcagagatgaagagagtaactaaggcactggacctcgccgatatgattactcgggtgatccaggaagggctggaaggcctggttttgaaggacgtgaaaggaacctatgagccaggaaagcgccactggcttaaagtgaaaaaagactatttgaacgagggcgctatggctgatacggctgacctggtagtcctcggggcattttatggccagggttctaaaggtggaatgatgagtatcttcctgatgggttgctacgaccctggcagccaaaagtggtgtacagtgaccaagtgtgcaggcggacacgacgacgccaccctggcacgcctacaaaacgagctcgatatggtgaagattagtaaagacccgtccaagatacccagttggctgaaggttaacaagatatactaccccgactttatcgtccctgaccccaagaaggccgcagtgtgggagattacaggggccgaattctcgaaaagcgaggcacacacagccgatggaatttctattcggtttccaagatgtacccgaatacgggacgataaggactggaagagtgcaaccaacttgcctcagctgaaagagctatatcagttatccaaggagaaggcagatttcactgtggtggctggcgacgagggcagttccaccactggcgggtcgtcagaagaaaacaagggtccctcaggaagcgccgtgtctaggaaagctccaagcaagccctccgcttctaccaagaaggctgaggggaagctgtcgaatagtaattccaaagacggcaacatgcagactgccaaacccagtgcaatgaaggtgggagaaaaactggcgaccaaatcatctcctgttaaggtaggcgagaaacgtaaggccgctgatgagaccctgtgccagacaaagcgccggcccgcttcggagcagcgggggcgcaccgttcctgccgggagacggtag

SEQ ID NO: 15806 - DNA, 3030 bp, synthetic construct
  misc_feature 1..3030: note = Description of Artificial Sequence: Synthetic coding sequence
  source 1..3030: mol_type = other DNA
atgtctctcgcctttaaaatcttcttccctcagaccttaagagccctaagtaggaaagagctgtgcctgtttcgcaagcatcattggagggatgttcggcagtttagccagtggtccgaaactgatctgctccatggacatcccctgttcctcagaaggaagccagtgttgagctttcaagggtcgcacttaaggagccgggcaacctatctggtcttcctgccaggtctccacgtaggcttgtgttcaggcccttgtgagatggcagagcagcgcttttgtgtggattacgcaaaaagaggaaccgccggttgcaaaaaatgcaaagagaagatagtcaagggggtctgccgcatcggtaaggtcgtgcccaacccatttagcgaatctggcggtgacatgaaagaatggtaccacattaagtgcatgttcgaaaaactagagagagcaagagccacaaccaagaagattgaggaccttactgaactggaagggtgggaggaactagaagacaacgagaaggagcagatcacacagcacattgccgatctgtcttctaaggcagccggcacccctaaaaaaaaggctgtggtgcaggccaaactgactacaaccgggcaggtgaccagccccgtaaagggtgccagctttgtgacctccacaaatccccggaaattctccggtttctctgccaagcccaataatagcggtgaagccccctcctctcctacacctaaaaggtcactgagctcctccaaatgtgatccgaggcataaagattgcctgcttagggagtttaggaagttatgcgccatggtagcagataatccttcctataatactaagacacagattatccaggatttccttagaaaagggagcgcaggagacggcttccacggagacgtgtatctcacagtgaaactgctgctgcctggagtgattaagaccgtgtataacctgaatgacaagcagattgtgaagcttttttcgagaatatttaactgtaatccagatgacatggcccgcgatcttgaacaaggcgacgttagcgaaaccattcgcgtcttctttgaacagagtaagagtttcccccctgccgccaagtcacttctcaccatacaagaggttgacgagttcctactgcggctgtctaaactgactaaagaggatgaacagcaacaggccttgcaagatatcgcgtcacgatgcacggcaaacgacctgaagtgcattatccgtcttattaagcacgacttgaagatgaatagtggcgccaaacacgtgctagacgccctggatcccaatgcttacgaagcatttaaggccagccggaatctgcaggacgtggtggagcgagtgttacacaatgctcaggaagttgagaaggagccaggtcaacgccgagctctgagcgtacaagcctctctcatgacaccggtccagcccatgctggctgaagcctgcaaatctgtcgaatatgctatgaaaaagtgccctaacggcatgttttccgaaatcaagtatgatggagagcgcgtccaagtgcacaaaaacggcgaccactttagttacttttccagatctctgaagcccgtattgccacataaagtagcgcacttcaaggactatattcctcaggcattccccggaggtcacagcatgattctggatagcgaggtactgctcatcgataataaaacaggcaaaccactgccttttgggaccctgggtgtccataaaaaggctgccttccaagacgccaatgtgtgtctgttcgtattcgattgcatctactttaatgacgtgagtttaatggacaggccactctgcgaaaggcgtaagtttctgcacgacaatatggttgaaatcccaaacagaataatgttctccgagatgaaaagagtgacgaaggcactcgacttagccgatatgattacccgggtgatccaggagggcttggagggactcgtgttaaaggacgtcaagggaacttacgagccaggcaaacggcactggctcaaagtgaaaaaggactatctaaatgaaggcgccatggccgacaccgccgatctcgtggtactcggtgctttctacgggcagggtagcaagggaggaatgatgtccatcttcctgatgggctgttacgaccccggctcccagaaatggtgtaccgtgacgaaatgcgctggtggccatgacgacgccaccctcgccagattgcagaatgagctggacatggtcaagataagcaaggatccgtcaaagattccctcgtggctgaaggttaataagatatactatccagacttcattgttcctgatccaaaaaaagctgctgtctgggaaattacaggggctgagttttccaagtccgaagcacacacagcggatggaatttcaatacggtttcctagatgtacacgtattcgggatgataaggattggaagagcgctactaatctcccccaactgaaagaactctatcagctttctaaggaaaaggccgatttcacagtggtggccggcgatgaggggagttctactactggcggatcctcagaagagaacaaagggccttctgggtctgcagtgtcccgaaaagcaccttcaaaaccaagcgcttctacaaagaaggctgaggggaaactgtcaaattccaattctaaagatggaaacatgcaaacagcaaagccaagcgctatgaaggtgggagaaaagctggccactaagtcctcccccgtgaaggtgggcgagaagaggaaagccgctgatgagacgctctgtcagacgaaagtgttattggatatcttcaccggcgttcgcttgtaccttccaccttccactccagattttagtaggttacgacggtatttcgtcgccttcgacggcgatcttgtgcaggaatttgacatgacctccgcaacccatgtcctggggagtcgcgacaagaacccagccgcgcaacaggtttcacctgagtggatttgggcgtgcatcagaaagcgcagactggtcgctccctgctag

SEQ ID NO: 15807 - DNA, 2736 bp, synthetic construct
  misc_feature 1..2736: note = Description of Artificial Sequence: Synthetic coding sequence
  source 1..2736: mol_type = other DNA
atggccgcgtcccaaacttcccagactgtggcttcccacgtcccatttgccgacctttgcagtaccctcgagcgcatccagaagtctaagggaagagccgaaaaaattagacactttcgagaatttttagactcatggaggaagttccacgacgccctgcacaaaaatcataaagatgtaacagacagcttctatcccgctatgcgcctgatccttccccagctggaaagagaacgcatggcttacggcatcaaggaaacaatgctcgccaaactatacatcgagctgctaaatttgcccagagacggcaaggatgccctgaagttgctcaattatcgcaccccgactgggacgcatggcgacgcaggagactttgcaatgatcgcctattttgtgctaaaacctagatgtctgcagaaaggctctcttacgattcagcaggtgaatgatctgctggattccatcgccagcaataacagcgctaaaagaaaggacttgataaagaagagcttactccaacttattacccagagctccgcacttgaacagaaatggcttatccggatgattatcaaggacttaaagctgggggtgagtcagcaaacaatattcagtgttttccataacgacgcagctgagctgcataacgtgaccactgatttggaaaaggtttgcaggcaacttcacgacccttccgtgggcttatcagacatctcaatcacactttttagtgctttcaaacccatgctggccgcaatcgctgacatcgaacacatcgagaaggacatgaaacaccagtccttctacattgaaacaaagctcgacggcgagaggatgcagatgcacaaagacggagatgtctacaagtactttagcagaaacggatataattacactgatcagttcggcgcttccccaacagaaggttcactaactcccttcatccacaatgcttttaaagcagatatacaaatctgcatactggatggggagatgatggcctacaacccgaacacacagacatttatgcagaagggcacaaagttcgatatcaagcggatggtcgaggattccgaccttcagacatgctactgtgtgtttgacgttttaatggtaaacaataaaaaactgggacacgaaacccttcgtaaaagatatgaaatcctgtcttccatatttactcctatccctggcaggatagaaatcgtacagaagacccaagcacacaccaagaacgaggtcatcgacgctctcaatgaggccattgataagagagaggagggcattatggtgaaacagcccttaagcatctacaaaccagacaaacgaggtgagggatggcttaaaatcaagcccgaatatgtgagcggccttatggatgaacttgacattcttattgttggcggttactggggaaagggaagtagaggtgggatgatgagccactttttgtgcgctgttgcagagaaacccccgcccggcgagaagccctctgtcttccacactctgagtcgggttggctctggatgtactatgaaggagctgtatgatcttggacttaaactagcaaagtattggaaaccctttcatcgcaaggcccctcctagttcaattctgtgcgggactgaaaaacctgaagtgtacatagagccctgtaatagcgttatcgtgcaaattaaggccgccgagatagtcccttccgacatgtataaaacggggtgtaccctcagattcccgcgcatcgaaaagattagagacgacaaagagtggcacgagtgcatgaccttggacgatttggagcagcttcgcgggaaagccagtggaaaactggcttccaaacatctctacataggtggcgatgatgagccacaggagaaaaagcgcaaagctgcacccaaaatgaagaaagtaattggcatcattgagcacctcaaagcacccaatctcactaatgtgaataaaatctccaacatcttcgaagacgtggaattttgtgtgatgtccgggactgatagccagccaaagcctgacctggagaatcgcatcgccgaattcggcggttacatcgttcaaaacccaggacctgatacttactgcgttatcgcaggcagtgaaaatattcgagtaaaaaatataatcctgtcaaataaacacgatgtggttaaaccagcttggctgctggagtgcttcaaaactaagagctttgttccatggcaaccccgatttatgattcacatgtgtccatctaccaaagaacatttcgctcgagagtatgattgctacggcgactcttactttattgacactgacctgaaccagctaaaggaagtttttagcgggattaaaaacagcaatgagcagacgcctgaggaaatggcctccctgattgcagatcttgagtacaggtacagctgggattgttcccccctgagcatgttccgccgacataccgtgtacctggatagctatgccgtgatcaatgacctttctactaagaatgagggcactagactcgctatcaaggccctagaactgcgtttccatggagcaaaggtggtttcgtgtcttgcagaaggagtcagccatgttatcattggtgaggatcatagtcgcgtggcagacttcaaggcgttccgccggactttcaagaggaagttcaagatactcaaggagtcctgggtaactgactccatcgacaaatgcgaattacaggaggaaaatcaatatctgatttag

SEQ ID NO: 15808 - DNA, 2736 bp, synthetic construct
  misc_feature 1..2736: note = Description of Artificial Sequence: Synthetic coding sequence
  source 1..2736: mol_type = other DNA
atggcagcctcccaaacctcccagactgtcgcctcccacgtcccattcgctgatctttgcagcaccctggagagaatacagaaaagcaaaggaagagctgagaagattagacacttccgggagttcttggactcctggcggaagtttcacgatgctctgcacaaaaatcataaagacgttacagattctttttaccctgccatgcgcttgatacttccacagctggagcgagagcgaatggcatatgggattaaggagaccatgctggctaaactgtacattgagttgctgaacctgccaagagatggcaaggacgcactgaagttattgaactacagaacccccacaggcactcatggtgacgccggagatttcgcaatgatcgcatacttcgttcttaagcccaggtgcttgcaaaaggggtctctgactattcagcaggtaaatgacctgctggactcaatcgccagcaataattccgcaaagcgcaaagacctgatcaaaaaatccctgcttcagctgataactcaaagttcagccctcgaacaaaaatggctgatacggatgattataaaggatttaaaattgggggtgtctcagcagacgattttcagtgtcttccacaatgatgctgcggagcttcacaatgttactactgacctggaaaaggtgtgtaggcagctgcacgacccttccgtcggattgagcgatatatcaatcaccctgttctcggccttcaaacctatgcttgctgccatcgcagacattgaacacatcgagaaggatatgaaacaccagagcttttacattgaaactaagctcgatggcgaacgtatgcagatgcacaaagatggggatgtatataaatacttctcacgaaacggctacaactacacggaccagtttggggcctctcctacagaggggtctcttactccgttcattcacaacgcttttaaggccgacatccagatatgtattctggacggggagatgatggcttataatccaaatacccagacattcatgcaaaagggaacaaaattcgatattaagcgcatggtcgaggatagcgacctgcagacgtgttactgcgtattcgatgtgctcatggtcaacaacaaaaagcttggccatgaaactctgaggaaacgatacgagattttgtcttctatcttcacacccattcccggacgtatcgagatcgtccaaaaaactcaagcccacaccaagaatgaagtgattgacgccctgaatgaggcgattgacaaacgcgaggagggcattatggtaaaacagccactgtccatatacaagccagataagagaggggagggatggttgaagatcaaacccgagtacgtgtcaggactgatggacgagctcgacattctcattgtgggtggatattggggcaagggatccagaggcggaatgatgagtcatttcctttgtgcggtggccgagaaaccacctcctggcgagaaaccgtccgtgtttcatacactctccagggtgggatcaggctgtacaatgaaggagctatacgacctagggctgaagctggcgaaatattggaaaccttttcaccgcaaggcccctccaagtagcatcctgtgcggcactgaaaaaccggaggtttatatcgaaccctgcaattccgtaattgttcagattaaagccgctgagatcgtgcctagcgatatgtataaaacgggatgtacactcagattccccaggattgaaaaaattcgggacgacaaagaatggcacgagtgtatgaccttggacgacctcgagcaactgcgtggtaaggcaagtgggaagctagcctctaaacacctgtacatcggaggggatgacgaaccgcaggagaagaagcggaaagctgcaccaaaaatgaagaaagttataggaataattgaacaccttaaggcgcccaacctaactaacgtaaacaaaatttcgaatattttcgaggacgtggagttttgcgtgatgtcaggaacagattcacaacctaagcccgacctggagaacaggattgctgaattcgggggctacattgttcaaaacccaggccctgatacctactgtgtgattgctggctccgagaacattcgggttaagaacataattctctctaataagcacgacgttgtaaaacctgcctggctgctcgaatgcttcaagaccaagtcttttgtgccatggcagccacgtttcatgatccatatgtgcccaagtaccaaggagcactttgcaagagagtatgactgctacggcgacagttattttatcgacacagacttgaatcaactcaaagaagtgttttcggggatcaagaattcaaacgagcagacacccgaggaaatggcttccttaatcgccgacttggagtatagatacagctgggactgttcacccctgtccatgttccggaggcacaccgtatacctggattcctacgctgtcattaacgacctcagtacaaaaaacgaggggacacggcttgcgatcaaggcgctcgagcttcggttccacggcgctaaagtggtaagctgccttgccgagggcgtctcccacgttatcatcggggaggaccattcccgggtggccgattttaaggcattccggcgcactttcaaacgcaaatttaagatattgaaggagtcctgggtgaccgacagcatcgacaaatgtgagcttcaggaggagaaccagtacctgatttag

SEQ ID NO: 15809 - DNA, 2736 bp, synthetic construct
  misc_feature 1..2736: note = Description of Artificial Sequence: Synthetic coding sequence
  source 1..2736: mol_type = other DNA
atggcggcctcacagaccagtcagactgtcgcttcccacgtgccgtttgctgacctctgcagcactctggaacgcatccagaagagcaaaggtcgggccgagaagatacgccatttcagggaattcctggactcttggcgtaagtttcatgatgctctacataaaaatcataaggatgttactgactctttttaccccgccatgcgcctgattctgccccagctagagagggaaagaatggcctatggtatcaaggagaccatgctggccaagctgtacatagaactgctgaatctcccgcgcgatggcaaggatgctctgaaactccttaattatagaacacctactggaactcacggggatgccggagacttcgcaatgattgcctacttcgtgcttaaacctcggtgtctccagaagggctctctaacgattcagcaggtgaatgatttactggactccattgcctccaacaatagcgccaaaaggaaggacctgataaagaaatccctgctccagctcatcacgcagtcgagcgccctggaacagaaatggctcatccgaatgataatcaaggacctcaagctgggcgtcagccagcagaccattttctccgtgttccacaatgatgccgctgagctgcacaatgttacaaccgatcttgagaaggtctgtcggcagctccacgatcccagtgtgggactgtcagacattagcatcactcttttcagcgcctttaagccaatgctggccgctattgctgatatcgagcacatcgagaaggacatgaagcaccaaagtttttacatagaaacgaagctggacggggaacgtatgcagatgcacaaggatggtgacgtgtataaatatttctctaggaatgggtataactacaccgatcagttcggcgcatcacccacggaaggcagtctgacccccttcatacataatgctttcaaggctgatatacaaatctgcattcttgatggtgagatgatggcatacaacccaaacacccagacattcatgcagaaagggaccaagttcgatatcaaacgtatggtcgaggactctgatctgcagacctgctattgtgtatttgacgtgcttatggtgaacaacaagaagctgggacatgaaacgttacggaaaaggtatgagattttgtctagtatctttacacctatcccaggtagaatcgagatcgttcagaaaacccaggcgcacactaagaatgaggttatcgatgctttgaatgaggctatcgataagcgggaggaaggaattatggtgaagcaacccctgagcatctataaacccgacaagaggggagaagggtggctaaaaattaaacccgagtacgtgtctggactgatggatgagctggatattctgattgtgggcgggtattggggtaagggctctagaggtggaatgatgtcccactttctttgtgctgtggctgaaaaacccccgccgggagaaaagccgtctgtgttccatacgctgtcacgcgtgggaagcggctgcaccatgaaagaactgtacgatctgggtctcaagctggccaaatattggaagccttttcacagaaaggcaccaccatcaagcatcctgtgtgggacggagaagccagaagtgtacattgaaccttgtaacagcgttatagtacagataaaagctgcagagattgtcccaagcgatatgtataagaccgggtgtacacttaggtttccacgtatcgaaaaaattagagacgataaggagtggcacgagtgcatgacgctggacgacttagagcaacttaggggcaaggctagtggtaagctggctagcaagcacctgtacatcgggggagatgatgagccacaagagaagaaaagaaaagctgcccccaagatgaaaaaggtaatcggtattattgagcacctgaaagctccaaaccttacgaacgtgaataagattagtaatattttcgaggacgtcgaattctgtgtaatgtctggtaccgattcccagcccaagccagatctggaaaacagaatcgccgagttcggggggtacatcgtgcagaaccccggtccagacacttattgcgtcatagcaggtagcgaaaacatccgagtgaaaaatattatacttagcaataaacatgacgttgtgaaacctgcctggctacttgaatgttttaagactaagtctttcgtcccctggcaacctaggtttatgattcatatgtgtccgagtacaaaagaacacttcgccagggaatacgactgttatggcgatagttactttatcgacaccgacctgaaccagctgaaagaggtattcagtggaatcaaaaactccaacgagcaaacacccgaggagatggcctccctgatcgcagatctggaataccgctatagctgggactgcagccctttgagcatgttccggaggcatacagtgtatctagattcctatgcggtgatcaatgacttatcgactaagaacgagggcactcgactcgccatcaaggccctggagctccgatttcacggggcgaaggtggtgagttgcctcgctgagggcgtgtctcacgttattataggcgaagaccactcccgtgttgcggattttaaagcttttcggcggacattcaaaagaaaattcaaaatcctgaaggagagctgggtaactgactcaatagacaagtgtgagctccaggaggagaatcaatacctaatatag

SEQ ID NO: 15810 - DNA, 1944 bp, synthetic construct
  misc_feature 1..1944: note = Description of Artificial Sequence: Synthetic coding sequence
  source 1..1944: mol_type = other DNA
atgagactgacattactatgctgcacttggcgcgaagagcgtatgggcgaagagggatccgagctccccgtatgcgcttcctgcggtcagcggatttatgatggccagtacctgcaggcattaaatgcagattggcacgcagattgtttccgctgctgtgactgcagcgcatctctttctcatcaatattatgagaaggatggtcagctgttctgtaaaaaggactattgggcacgatacggcgagtcctgccacgggtgctccgaacagataacaaagggccttgtcatggtcgcaggagaactgaaatatcatcccgagtgcttcatctgtcttacatgcggaaccttcatcggggacggagatacatatacgctcgttgagcattccaagttgtactgtggtcactgctactaccagacagtggtgaccccagtcattgagcagattctgcctgatagtcctggatcacacttgccgcataccgtgaccctggtgtcaatccccgcgtcttctcatgggaagcgcggcctatccgtgtccatcgatcccccccatggccctccaggctgcggaaccgagcatagccatacagtgcgagtccagggggtagacccaggctgtatgtctccggacgttaaaaacagcatacacgtcggtgaccgcattctcgagatcaacgggacccctatccgaaacgtgccacttgatgaaatagacttgcttattcaagagacgtctcgactgttgcagctcacactcgagcacgacccccatgacaccctcggccacggactgggtcctgaaaccagtcctctcagctcacccgcctacacaccctctggtgaggccggcagctccgctcgccagaagcctgtgctccggagctgctcaattgacagatcccccggtgcgggttctctgggatcaccagcctctcagcgcaaagacctgggaaggagcgagtctctgcgcgtggtttgcaggccccaccgaattttccggccaagcgatttgattcatggagaggttctggggaagggttgtttcgggcaggcaattaaggtgacacaccgggagacaggagaggtcatggtcatgaaagagctgatcagattcgatgaagagacacagcggactttcctcaaggaagtgaaagtgatgaggtgccttgagcaccccaatgtgctgaagtttatcggggtcctgtacaaagataagcggcttaactttatcactgagtacattaaggggggaacccttagggggatcataaaatccatggactctcagtatccctggagccagagggtgagttttgcgaaagatatcgcctctggaatggcctacctgcattcaatgaatatcattcatagagatctgaacagccacaattgtctcgtgcgcgaaaacaaaaacgtggtggtcgctgatttcggacttgctcggctaatggttgacgagaagacacagcccgagggcctccgatcactcaaaaagcctgaccgaaaaaagcggtatactgtggttggtaatccgtactggatggcacccgaaatgatcaatggccggtcttacgatgagaaagtggacgttttcagtttcggaatagttctttgcgagatcattgggcgcgtgaatgccgatccagattatctgcctcgtactatggacttcggcctgaacgttagggggtttctggatcgctactgtccacctaactgccccccatccttctttcctatcactgtgcgctgctgcgatcttgacccagaaaagagacccagcttcgtgaaattggagcactggctggagactctgaggatgcaccttgccgggcatctgccactgggtccccagctggagcaactcgaccggggtttttgggaaacctataggaggggcgaaagtggattaccggcgcaccctgaagtacccgactag

SEQ ID NO: 15811 - DNA, 1944 bp, synthetic construct
  misc_feature 1..1944: note = Description of Artificial Sequence: Synthetic coding sequence
  source 1..1944: mol_type = other DNA
atgcggctcaccttactgtgttgtacctggcgggaggaaagaatgggggaggaggggagtgaactaccggtgtgcgccagttgtggtcagaggatatatgatggtcagtacctccaggccctgaatgccgactggcacgccgactgctttaggtgctgcgattgctctgcctccttgtcacaccagtactatgaaaaggacgggcagctgttctgcaaaaaggattactgggcccggtacggggagagctgccacggatgctccgaacagatcaccaaagggctcgtcatggtcgcgggtgaactgaaataccaccccgaatgcttcatttgcctgacttgcgggacattcattggagacggtgacacatacactcttgtcgagcattctaagctgtactgtgggcactgctattaccagactgtggtgacccctgttatagagcaaatcttgccggattcccccggatcgcacctgccccatacggtcactttggtctcaatcccagcatcgtcccacggtaagcgggggctaagtgtcagcattgatcccccccacggacctccaggatgcgggaccgaacacagccatacagtgagggttcaaggcgtcgatccaggctgcatgtccccagatgtcaagaactctattcatgtgggggatcggatactcgagatcaacggtacacctatcaggaatgttcccctggacgagatcgacctcctgattcaagagacatctagacttctgcaactgacactggagcacgacccacacgatactttagggcacggcctgggccccgaaacaagtcctctgtctagccccgcttatacccccagtggtgaggcagggtcatcggccaggcagaagcccgtgctccggtcatgctcaatcgataggagccctggggccggctccttaggtagccccgcctcgcaaagaaaggacctgggccggtctgagagtctgagagtcgtgtgtcggccacaccggatcttccgcccctcagacttgatccacggagaggtattgggcaaggggtgttttggtcaggctatcaaagtgacgcatcgcgagacaggggaggtgatggttatgaaggaattaattcggttcgatgaggagacccagcggaccttcctgaaggaggtcaaagtgatgaggtgcctggagcatcctaatgtactcaaatttataggggtgctgtacaaagacaaaagactaaacttcatcaccgagtacataaaaggaggaaccctgcgggggattattaagagtatggacagtcaatacccatggagccagagggtatcctttgcaaaagacatcgcctcaggcatggcataccttcactcaatgaatataatccatcgcgatctcaattctcacaattgccttgttagagagaacaaaaacgtcgtggtggccgatttcggcctcgcacgtctcatggtagacgaaaagacacagcccgagggcttgcgcagcctgaaaaagccagatcgcaaaaaaagatacaccgtagttggcaatccttattggatggccccagaaatgattaacgggcgaagttatgatgagaaagtagacgttttcagcttcggcatcgtcttatgtgaaattattggacgtgttaatgccgaccccgactatctgccgcgcacaatggacttcggcttgaacgtgaggggatttctcgacagatactgcccccctaactgtcccccaagcttttttcccattacggtccgctgctgtgatcttgatccggagaaaaggccaagcttcgtgaaactggaacattggctcgaaacattgcggatgcacttggcgggacacctccctctcgggccacagctcgaacaactggacaggggcttttgggaaacttatcggcgcggcgagagcggtctcccagcccacccagaggttcccgactag

SEQ ID NO: 15812 - DNA, 1842 bp, synthetic construct
  misc_feature 1..1842: note = Description of Artificial Sequence: Synthetic coding sequence
  source 1..1842: mol_type = other DNA
atgctcctggcatcggctcctcggcgaagaaggtttctacaacgagctaagtgctgcgattgctctgcctctttgagccatcagtactatgagaaggatgggcagctgttctgcaagaaggactattgggccaggtatggcgagtcctgtcatggttgtagtgaacagataaccaaagggctagtgatggtggcaggggagctaaagtaccacccagagtgttttatctgtctcacatgtggcactttcattggggacggggatacttacacactggtggagcattcaaagctgtattgtggccattgctattaccagacagtcgttacccctgttatcgagcaaattctgccggacagccctggcagccacctcccccacaccgttaccctggtgagcatcccagcatctagtcatggtaaacggggtctgtccgtttcaattgatcctccccacggccctccaggatgcggtacggaacacagtcatactgtaagggtgcaaggcgtcgatcctggatgtatgtccccagacgtcaaaaacagtatccacgtgggagaccgtattctggagataaacggaactcccatccgtaatgtcccccttgatgaaatcgatctgctcatacaagaaacctctcgcctgcttcagctgacgcttgagcatgatcctcatgacactctcgggcatggattggggccggagaccagcccccttagctcgccagcctataccccctctggcgaggctggcagttctgcaaggcagaagcccgtgctgcgaagctgctcaatcgaccgcagtcctggggcgggcagcctaggaagccccgctagccagagaaaggaccttgggcggagcgagtctctgcgtgtagtgtgtcgccctcatagaatctttcgaccttcagacttgattcacggggaggtcctgggaaagggttgctttggacaggccattaaagtgacacatcgggagaccggagaggtaatggtgatgaaagaactgatccgtttcgacgaggagacacagaggacattcctgaaagaggtcaaagtcatgcggtgtctggagcatcctaatgtactaaagtttattggcgtcctgtataaggataagaggctgaattttatcactgaatacattaagggagggacactgcggggcattattaagagtatggacagccagtacccttggtcccagcgcgttagttttgccaaggacatcgcaagcggaatggcctatctgcactcaatgaacatcatccatcgggatctgaatagccacaattgcctggtccgcgagaataaaaacgtcgtggtagcagactttgggcttgctcgtctcatggtcgatgaaaagacacagccagagggactgcgcagtctgaaaaaaccagataggaagaaacgttataccgtggtgggcaatccatactggatggcccccgaaatgatcaacggccggtcatacgatgagaaagtagacgtgtttagttttggcatcgtgctgtgtgagatcatcggacgggtgaacgcagacccagattacctcccaagaaccatggacttcggcttgaatgtgagaggattcctggatcgctactgcccccctaactgcccccccagcttcttcccgattactgtcaggtgctgtgatttagatcctgagaaacggcccagttttgtgaagctagagcactggctggagaccctgagaatgcacttggcaggtcacctgccactaggaccccagctggaacaattggataggggattttgggaaacctaccgccggggggaatccggcctgccggcccatcccgaagtgcctgattag

SEQ ID NO: 15813 - DNA, 471 bp, synthetic construct
  misc_feature 1..471: note = Description of Artificial Sequence: Synthetic coding sequence
  source 1..471: mol_type = other DNA
atgatggtattagacaaggaggacggtgtgcctatgctgtcagtgcaacccaaaggcaagcaaaagggttgtgcagggtgcaaccgaaaaattaaggatcggtacctgctgaaggccctggataagtattggcatgaagactgcttgaagtgcgcctgctgcgactgccggctgggagaagtcggatcaacactgtataccaaggctaatctgatattgtgcagaagagattacctgagactgttcggcacgactggcaattgtgccgcttgcagcaaactcattcccgcatttgaaatggtgatgagggcccgcgataatgtataccatttagactgttttgcatgccagttgtgtaaccaaagattttgtgtgggcgacaaattttttctcaagaacaatatgattttgtgccagatggactacgaagagggacaactgaacggaacattcgagagccaagtccaatag

SEQ ID NO: 15814 - DNA, 468 bp, synthetic construct
  misc_feature 1..468: note = Description of Artificial Sequence: Synthetic coding sequence
  source 1..468: mol_type = other DNA
atggtgctggaccaggaagacggagtccctatgttgtcagtccagcccaagggcaaacaaaagggctgtgcaggttgtaataggaagatcaaggaccggtatcttctgaaggccttagacaagtattggcacgaagattgcctgaaatgcgcttgttgcgattgccgcctgggggaggtagggtctactctgtacacaaaggctaatctgattctgtgccgtcgagattatctcaggctgtttggaaccactgggaactgcgccgcgtgttctaagttgattcccgcgtttgagatggtaatgagggccagagataatgtttaccatctggattgctttgcgtgccagctgtgtaaccagagattttgcgtgggagataaattcttcctgaagaacaatatgattttgtgccagatggactacgaagaaggtcagctgaacgggacttttgagtcccaggtgcagtag

SEQ ID NO: 15815 - DNA, 684 bp, synthetic construct
  misc_feature 1..684: note = Description of Artificial Sequence: Synthetic coding sequence
  source 1..684: mol_type = other DNA
atggagggatccgccgtcaccgtgcttgagcggggtggggcgtcatcccctgccgaaagacgctccaaacggcggcgcaggtctgggggggatggtgggggaggcggaggggctcgagcccctgagggcgtgagagcgccagcagccggacagccaagagccaccaagggtgcccccccgcctccaggcactcccccaccgtcaccaatgtcctcagccattgagcgcaaatccttagacccttccgaggagcctgtcgatgaagtgctgcagataccgccttctctgctcacatgtggaggctgtcaacaaaatattggggatcggtattttttgaaagccattgatcagtactggcacgaagattgcctctcttgcgatctgtgtggctgcaggctgggtgaagttggaaggcgcctttactataaacttggacgcaagttgtgccgccgcgactacctgcgactgtttgggcaggatgggctgtgtgctagttgcgataagcggattcgagcctatgagatgacgatgcgcgtgaaagacaaggtgtatcacctggaatgctttaaatgcgctgcatgccagaaacatttttgtgtgggcgacagatacttattaattaactctgacatcgtttgcgaacaggatatctacgaatggaccaagataaacgggatgatttag

SEQ ID NO: 15816 - DNA, 477 bp, synthetic construct
  misc_feature 1..477: note = Description of Artificial Sequence: Synthetic coding sequence
  source 1..477: mol_type = other DNA
atgtcgagtgccattgagcgcaagagtctcgacccgagtgaggaaccggtggatgaggtgctgcagatcccaccttctctgttaacatgtggcggctgccagcagaatattggggataggtacttccttaaagcgatcgatcagtattggcacgaggattgcctgtcttgtgacttgtgcggatgtcgtctgggggaagtcggacggagactgtattacaaattaggtcggaaactatgcagaagggattatctaagactcttcgggcaggatgggctgtgcgcctcttgcgataaaaggatcagggcgtatgagatgactatgcgggtgaaggataaggtttaccatctggaatgtttcaaatgcgctgcgtgtcagaaacacttctgcgtcggtgaccgctatctgctcatcaatagcgacatcgtttgcgaacaggatatatacgagtggacaaagattaatggcatgatttag

SEQ ID NO: 15817 - DNA, 1677 bp, synthetic construct
  misc_feature 1..1677: note = Description of Artificial Sequence: Synthetic coding sequence
  source 1..1677: mol_type = other DNA
atgcatcgcgggggacagcccctaaaaaagcgacgcgggtcttttaaaatggccgagctggatcaacttcccgatgaatcatccagtgcaaaggccctggtttccctgaaggaagggagcctgtcgaacacctggaacgaaaaatactcgagtttgcagaagacccccgtctggaaagggcgcaataccagctcggctgttgaaatgcccttccgcaattctaagagatctcgactattcagcgatgaggatgaccggcaaattaacacccggagtcccaaacggaatcaacgagttgcaatggtacctcaaaaattcactgccactatgtccactccggataagaaagctagccaaaagattggtttccgcttacggaacctcctgaagctcccgaaagctcacaagtggtgcatttacgagtggttttactctaacattgacaaaccccttttcgaaggtgacaatgatttttgcgtgtgtctgaaggaaagttttcccaatctgaaaacccgcaaactcacacgcgtggagtggggcaagatacggagactaatgggcaaacccaggaggtgcagcagcgcgtttttcgaggaggagcgctcagctcttaagcagaagaggcagaagataagactcctccagcagcgaaaggtcgctgacgtatcccaattcaaagacctacccgatgagattccccttccactcgttattggtacgaaagttaccgccaggctgcgtggggtccatgacgggctgttcaccggccagatcgatgctgtggacaccctcaatgcgacatatcgggtgacgtttgatcgcacaggactgggcactcacactattccagactatgaggtgcttagtaatgaaccacatgaaaccatgcctatcgctgccttcgggcagaagcagcgtcccagcaggttctttatgacccctcccagactgcactatactcctcccctgcagagccctatcatagacaatgaccctcttctgggacaatccccttggaggagtaagatttccggcagcgacaccgagactttggggggcttccctgtcgaatttcttatacaggttaccagactgtccaagatacttatgataaagaaagagcatatcaaaaaactccgggaaatgaatacagaagccgagaagttaaaatcatacagcatgcccatttctatagaatttcagcggcgctatgcaacgatcgttctggagctcgaacagctgaacaaagatctcaacaaagtcctccataaagtccagcagtattgttacgagttggccccagaccagggacttcagcccgcagaccagcctactgatatgcgacgcaggtgcgaggaggaggcacaagagattgtacgccacgcaaatagctccactggtcagccctgcgtggagaatgagaacttgacagatctcatctcccgcctgaccgctattctgctgcagatcaagtgcctggcagagggtggtgacctgaactcatttgagtttaagagcctgacggatagcctcaacgacattaaaagcacaattgacgcctctaacatatcgtgctttcaaaataatgttgagattcacgttgcccacatacaaagcgggttatcgcagatgggaaacttacacgcgtttgcagccaataataccaacagagactag

SEQ ID NO: 15818 - DNA, 1524 bp, synthetic construct
  misc_feature 1..1524: note = Description of Artificial Sequence: Synthetic coding sequence
  source 1..1524: mol_type = other DNA
atggccgagctagaccagctgccagacgaaagctcatccgctaaagccctcgtgtctctaaaggagggttctctgagtaacacctggaatgagaagtattcgtcacttcaaaagacacccgtgtggaagggtagaaatacgagttccgcagtggagatgaagttcaccgccacaatgtcaacgcccgacaagaaagcttcacagaagattgggttccgactgcggaatcttctgaagttgcccaaagcacataaatggtgtatctatgagtggttctactcaaacatcgacaaacccttgtttgaaggcgacaatgatttctgcgtgtgtctaaaggaatcgttccccaacttgaaaacacgcaagctgacccgtgtggagtggggcaagatacggcgacttatgggaaaaccacgaagatgtagtagtgcgttctttgaggaagagcggagcgccttgaagcagaaaaggcaaaagatacggctactgcagcagcgcaaggttgctgacgtgagtcagtttaaggatttgcctgatgaaattcctctacccctggttatcggcacgaaggtgaccgcaagacttcgcggcgtccatgatggtctgttcaccgggcagattgacgccgtggatactttaaatgccacctatagagtgactttcgataggacaggcctggggacacataccatcccagattacgaggttctcagcaatgaaccccatgagaccatgcctattgccgccttcgggcagaagcagaggccatctcggttctttatgacaccgccccgtttacattacacaccacctttacaatcgcctatcatcgacaatgaccccctgcttggccagtctccatggcgcagcaaaatttcagggtccgacactgaaaccctcgggggctttcccgtggaatttctcatccaggttacccgactgtcaaaaatcctgatgataaagaaagagcacataaaaaagttgagagagatgaacacagaagccgaaaaactgaaaagttactcgatgccgatttccattgaattccagaggcgttatgccacaatcgtcctggaacttgaacagctgaacaaggatctcaataaagttctccacaaggtgcagcagtactgttacgagctggcccccgatcaagggctgcaaccagcagatcaaccgaccgatatgcgcaggagatgtgaggaagaggcccaagaaatcgtgaggcatgctaattcgagcaccggacagccctgcgtggagaacgagaacctcactgatctcatatctcggctgacagcaattttgctccagattaagtgtctcgccgagggaggggatctgaacagtttcgagttcaagagcctgacagattccctgaacgatatcaaatctaccatcgatgccagcaacatctcctgcttccaaaataatgtggagatccatgtcgcccacatccagtcaggtttgagccagatgggtaacttgcacgccttcgccgccaataacactaatagggattag

SEQ ID NO: 15819 - DNA, 1572 bp, synthetic construct
  misc_feature 1..1572: note = Description of Artificial Sequence: Synthetic coding sequence
  source 1..1572: mol_type = other DNA
atgcggcctcgcacagaagggttttttccccctgctggtgcaagcttgcctttctcgacccgtaacaagcagcccgccgtgcccgcagctgcagcccgagctgccgagcatgctcctggggccggccccggaagagattcaggggccgggaccgcgccacctgcactaaggcgtcgggccagcccatgtggcctccttccacctttcctgccacctggaagtgctgggggcggagggggcggcgccagacggggacctccttctgcagcaccgcctccccgcgcaggtgccgggggcgcagggccggcctccgcctctcgaggcgggtcctctgcggctcggagacgcggtcagcgggccccacactctaatctcccccgtaaggattctcttagacccacaatgcaccgaggagggcagccccttaagaagcggcgcggatcgtttaagatggccgaactggatcagctgccagacgaatctagtagcgctaaagctctggtgagtctgaaggagggatccctcagtaatacttggaacgaaaagtattcttctcttcagaaaactcccgtctggaaagggcgtaatacgagcagtgccgtggaaatgccatttcggaattcgaaaagatctagactcttttccgatgaggacgataggcagattaatactcgcagtccgaagcggaaccagcgggtcgctatggtcccacagaagttcaccgccactatgagcacacctgataaaaaggccagccagaaaatcggctttcggctgagaaacttgttgaaattgcctaaggctcacaagtggtgcatttacgagtggttttatagtaatatcgacaagccactcttcgagggggacaacgacttctgtgtttgcctgaaagagtcattccccaatctgaagacccgaaaactgacgcgtgtcgagtggggcaaaatccgaagactcatgggcaagcctaggagatgcagtagcgctttcttcgaagaggagcgctccgccctgaaacaaaaacgccagaagatccgattgttacaacaacgcaaagtggctgacgtcagtcaattcaaggatctgcctgatgagatcccgctgcctctcgttataggaaccaaggtgacagcaagattaagaggagtacatgatgggctgtttactggccaaatcgacgcagttgacacactcaatgctacctaccgcgtgacattcgatcgaacaggcctcgggacacacactatccctgactacgaagtcctctccaatgagccacatgagaccatgccaatcgcagcgttcggccagaagcaaagaccatcacggttctttatgacccctccccggctccactacaccccaccattgcaaagccccatcattgacaacgacccactgttggggcaaagcccatggcgctccaaaatcagtgggtccgacaccgagaccttgggtggattccccgtggagtttctgatccaagtgacacgactgtccaagatcttaatgattaaaggcacttatcaggaaataaaaggtaatgagcatcgcagccgcaagataggctag

SEQ ID NO: 15820 - DNA, 1842 bp, synthetic construct
  misc_feature 1..1842: note = Description of Artificial Sequence: Synthetic coding sequence
  source 1..1842: mol_type = other DNA
gaaactgctgagcaaaactctagtttggctgtagggctgaatgatcagctgcatgatctgtccagatcgaggtcacctgcggcccggtcctctgcgtccaacatcagggagcggcgagctaggatcgccaggggcaggtgggatagggtgcccgatgttgcgacacgaaggggacttctaaggccggcagtcagcggtaaagtacggggacgcagacggccttccaatgtaggtttcggtaattgttcatctgctaaagcgctcgtgagtcttaaggagggatccctgtctaatacttggaatgaaaaatatagcagccttcagaagaccccagtctggaaagggaggaatacctctagtgcagtggagatgccattccgcaactccaaaaggagtagattatttagcgacgaagatgatcgtcagatcaacactaggtctcctaagcgcaaccagcgcgtggccatggtccctcagaaattcactgctactatgagtaccccagataaaaaggccagtcagaagatcgggttccggctgagaaatctgctcaaactgcctaaggcccataaatggtgtatttatgagtggttctacagcaacatcgataagccgctcttcgaaggcgataatgatttttgtgtctgcctgaaagagtccttccccaatcttaagactcgcaaactgaccagggtagaatgggggaagattcgaagattgatggggaaaccacgacggtgcagcagtgcgttcttcgaggaagagcggtctgctttgaaacaaaagaggcagaaaattcgcttgctgcagcaacggaaggtcgccgatgtttctcaattcaaagatctgccagatgagatcccactcccattagtaataggaaccaaggtgaccgcgagacttcggggagtgcacgatggactgttcacgggtcagatcgacgccgtcgacactttgaacgccacatacagggtgacattcgatcgcaccggactcgggacacatactataccggattacgaggtgttatcaaacgaaccccatgagactatgccgatcgctgcctttggacaaaagcagagacccagccgcttttttatgacgcctcccaggttgcattacaccccccctctgcagtcccccattatcgataacgaccccctgctgggccagagcccgtggcgctcaaagataagcgggagtgataccgaaaccctcggaggattcccggttgagttcttgattcaagttacccgcttgtcgaaaattctcatgataaagaaggagcatatcaaaaagttgcgcgagatgaatactgaggcggaaaaactgaagtcatatagcatgccaattagcatcgaatttcagcgtagatacgctaccatcgtgcttgagttggagcaactgaataaagatctgaataaggtgctgcacaaggtgcagcagtactgctacgaacttgcgcccgaccagggtttgcaaccggccgaccagcctactgacatgcgtcgaagatgcgaggaagaagcgcaggaaattgtgaggcacgccaattcttcaactggccagccatgtgtcgagaatgagaatctgacggacctcatttctcggctcacagcgattctactgcagatcaagtgtcttgccgagggcggagatctcaattcctttgaatttaagagtctcaccgattcactgaacgacatcaaaagtacaatcgatgcttccaatatatcctgttttcagaataatgtggaaatacacgtagcccacatacagagcggcttgtctcagatgggcaacctgcacgcatttgctgctaataacacaaaccgcgactag

SEQ ID NO: 15821 - DNA, 13800 bp, synthetic construct
  misc_feature 1..13800: note = Description of Artificial Sequence: Synthetic coding sequence
  source 1..13800: mol_type = other DNA
atgtctgagttcttgctcgcacttctcaccctgtctggtttgctgccaatagccagggtgttgactgtcggcgccgatcgtgatcagcagctttgtgaccccggggagtttctgtgccatgatcatgtcacttgtgttagccaaagctggctgtgcgacggggatcctgactgtcccgacgatagtgacgaatctttagatacatgcccagaggaagtcgaaattaagtgtcctttgaatcacattgcctgcctgggcactaacaaatgtgtgcatctttcccagctttgcaatggcgtgctggactgtcccgacggctatgatgagggcgtgcactgccaggaactgctctccaactgtcagcagctgaattgtcaatacaaatgcactatggtgcgcaactccacccggtgctactgcgaggacggcttcgagatcactgaggatggccggtcctgtaaggatcaggacgagtgtgccgtgtatggcacgtgttctcaaacttgtcggaacacccacgggtcatacacatgttcatgtgtggaggggtacctcatgcagcccgataaccggtcctgcaaggccaagattgagcccaccgaccgaccgcctatcttactgatcgctaactttgagaccattgaagtgttctatctcaatggatcgaagatggctacgctaagctctgttaatgggaacgaaatccatacactagatttcatctacaacgaggatatgatctgctggatagaatcacgggaatcctcaaatcagctgaagtgcattcagatcacaaaagccggtgggttgacggacgaatggaccataaacatattgcagagtttccacaatgtgcagcagatggctatcgattggttaacacgcaatctgtactttgtggaccacgtgggcgatcgtatatttgtgtgtaattcaaacggtagcgtgtgcgtcaccttaattgacctggagctgcacaacccaaaagcaattgctgtggatccaattgctggaaagctgttctttacagattatggtaatgtggcaaaagtcgagagatgtgatatggacgggatgaacaggacaaggataatcgactctaaaacggagcaacctgcagcattggctttggatctcgtgaacaaactagtgtactgggtcgatctctatctggactacgtcggtgtggtggattaccagggtaagaatcggcatacagttattcagggaaggcaggtgaggcacttgtacgggattactgtgtttgaggactatctgtatgctactaacagcgataactataacattgtcaggatcaaccggtttaatggaacagatatacactctctgataaaaattgaaaatgcttggggtataagaatttatcagaaacgcactcagcctaccgtccggagccacgcctgtgaagtagacccatatggcatgccaggtggctgttctcacatatgcctcctatcctcctcgtacaaaacacgcacttgtcggtgccgcaccggattcaatctgggcagcgacggaaggagctgcaagaggcccaaaaatgaactcttcctcttttatgggaaaggtcgccctgggatcgtgcgagggatggacctgaacacaaagattgccgacgaatatatgattcctatcgagaatctggtgaaccccagagctttagatttccacgccgaaacgaactatatttactttgccgatactacctcttttttaattgggagacagaaaattgatggcaccgaaagggaaaccattctcaaagacgacctcgacaatgtagaaggtatcgcagtcgattggatcggaaacaacctgtactggaccaacgacggccaccgcaagacaattaatgttgccaggcttgaaaaagcatcccagtctcgcaagactctgctggaaggcgaaatgagccatcctcggggcatcgtggtcgaccccgtaaatggctggatgtactggacagactgggaagaggatgagatcgatgattctgtgggcaggattgaaaaagcctggatggatgggttcaataggcagatttttgtcacttctaagatgttgtggcctaacggcctgaccctggattttcataccaatacactgtactggtgtgatgcttactacgaccatatcgagaaggtgttcctcaacgggactcataggaagatcgtgtatagcggtcgggagctgaatcacccattcggtttaagccaccacgggaactatgtcttttggaccgattatatgaatggaagtattttccagctcgacctgatcacatctgaggtgactttgctccgccacgaacggcctccattgttcgggctgcagatttacgatcccagaaagcaacaaggggacaatatgtgccgcgtgaataacggaggatgctcaacattgtgcctggcaatccctggaggccgggtttgcgcgtgtgctgataaccagctccttgacgagaacggcaccacgtgtacctttaaccccggggaggctctgccacacatatgtaaggccggggagttcagatgtaagaaccgtcactgtattcaggcacgttggaagtgcgacggagatgacgattgtctcgatggcagcgacgaggattccgtcaattgcttcaatcattcatgtcccgacgaccagtttaagtgtcagaataatagatgcatcccaaagaggtggctgtgcgatggagcaaatgactgtggcagcaacgaggacgagagtaaccagacctgcacagcaaggacctgtcaggtcgatcagttcagctgtggcaacggcagatgtatcccccgtgcctggttgtgcgatcgtgaagacgattgtggcgatcagacagacgagatggccagctgcgagtttccaacttgcgaacccctgactcaattcgtctgcaagtcagggcggtgtattagctctaagtggcattgtgactccgacgatgactgcggagacgggtcagacgaagtaggctgtgtacatagctgttttgataaccagttccggtgttcatcaggccggtgtatcccaggacattgggcctgcgacggggacaatgactgtggcgacttctcagatgaggctcagattaattgtacaaaggaagaaattcattctcccgctggttgtaacggaaacgaattccagtgccaccctgatggcaactgtgtacctgatctttggaggtgtgacggcgagaaggattgtgaggacggctctgatgagaaggggtgtaatggcacaatacgcttatgcgatcataaaaccaagttctcctgttggtcaaccgggcgctgcatcaacaaagcttgggtgtgtgacggggacattgactgcgaagaccagagcgatgaagacgattgtgatagttttctgtgtggaccccccaagcacccctgcgctaacgacaccagtgtatgcttacagcctgagaaactatgtaatggtaaaaaggactgcccggacgggtcggatgagggatatctttgtgatgaatgctccttgaacaacggcgggtgtagtaaccactgctctgttgtgcccggacgcggcattgtctgctcctgtcccgagggactccagcttaataaagataacaagacttgtgagatcgtagactactgctctaaccatttaaaatgtagccaggtgtgcgagcaacacaagcacactgtgaaatgctcctgttacgaaggatggaagctcgacgtagacggagaaagctgcacctctgtcgatccttttgaagcgttcataatctttagcatccgccatgagatcagacgaattgatctgcacaagcgtgactacagcttgcttgtcccgggactacggaacacaattgcactcgactttcatttcaaccagtctctgctttactggacagatgtggtagaagacaggatttacaggggtaagctcagtgaatctgggggagtctccgcaatcgaagttgtcgtggagcacggactcgctacccccgaggggctcactgtggattggatcgcgggcaacatctattggatagacagtaacctcgaccaaatcgaagttgccaaactcgatgggagcctccgcacaacactcattgccggagcaatggaacacccaagagccattgccctagaccctcggtatgggatcctgttctggacagattgggacgccaactttccaagaatagaaagcgcctcgatgtctggggctggtagaaaaaccatctataaagacatgaagaccggcgcctggccaaacggcctaaccgtggaccattttgagaaacgcattgtgtggactgatgccagatcggacgctatttacagcgcactgtacgacggcacgaatatgatcgagattatccgggggcacgagtacctgagccacccattcgcagtgtctctgtacgggtccgaggtatactggaccgactggaggaccaatacattatccaaggccaataaatggactggccaaaatgtgagcgtgatccagaaaacatctgctcaaccgttcgacctccaaatctaccaccccagccgacaacctcaggctcccaatccctgcgccgcaaatgatggcaagggcccgtgctcccatatgtgcctgatcaaccataatcggagcgctgcttgcgcctgtccgcacctaatgaaactctcttctgataaaaagacctgctatgaaatgaagaagttcctgctgtatgccaggcgcagtgagatccgaggtgtggacatagataacccatacttcaacttcattaccgcgttcactgtgcccgatatcgacgacgtcaccgtcatcgattttgatgcttcagaagagcgtctgtattggactgacatcaagactcaaacaattaagagagctttcattaacgggacgggcctggagacagtcatctcacgcgatattcagagcatccggggcctagctgtcgattgggtgtcacgcaacctgtattggatttcttccgagttcgacgagacccagatcaacgttgctagactcgatggcagcttgaaaacttcaattatacacggcatcgacaaaccacaatgcctggctgcacaccccgtgcggggcaagctgtactggacggatggaaatacgatcaatatggctaacatggatggaagcaatagcaagatactgtttcagaatcagaaggagcctgtgggcctgtctattgactacgtggaaaataagttatactggattagttccggcaacggaacaataaatcggtgtaacctcgatggcggaaatttggaggtcattgagtctatgaaggaggagctgaccaaggcaaccgccttgactatcatggacaagaagctgtggtgggcagatcagaacctcgcacagcttggcacatgcagcaagcgggatggaagaaacccgactatcctgcggaacaagactagcggcgttgttcatatgaaagtgtacgacaaggaagcacaacagggctccaacagttgccagcttaacaatggcggttgctcacaactgtgtttgccaacaagtgaaaccacgcggacatgtatgtgcacggtgggctactacttgcagaaaaaccggatgtcttgccaggggatcgaatcttttctgatgtattctgttcatgagggcatccggggaatacccctggagccctctgataaaatggatgccctcatgcccattagtgggacctccttcgcggttggaattgatttccacgccgaaaacgatactatatattggactgatatggggtttaacaaaatctcccgcgccaaacgagaccagacatggaaggaggatatcatcactaatgggcttggaagggtggaaggcattgctgttgactggatagcaggaaatatttattggacagatcacggttttaatctgatagaagtcgcccgccttaacgggtccttccgctatgttataatctcacagggcctggaccagcccaggtcaattgctgtgcatcctgagaaggggctactgttttggaccgagtgggggcagatgccctgtatcggtaaggctagactcgatggcagtgaaaaagtagtgctcgtctctatgggtatagcatggcctaatggaatcagcatcgactatgaggaaaacaagctgtactggtgcgatgctaggacagataaaatagaaagaatcgatctggagaccggggggaatagagagatggtgcttagtggctccaacgtagacatgttttccgtcgctgtcttcggcgcatacatctattggagtgacagagctcacgccaatgggagcgtcaggagaggtcacaaaaacgatgcaaccgaaactatcactatgaggaccggactgggcgtcaacctgaaggaggttaagatcttcaatcgcgtccgagagaaaggcactaatgtatgtgccagggacaacggcggttgtaagcagctgtgtctctatcgtgggaactcacggcgcacctgcgcatgcgctcatggctaccttgctgaggatggcgtcacatgtctcaggcacgagggctacctcctgtatagtggtagaaccatcctgaagagcattcacctatccgacgagaccaatttgaacagtcccattcggccctatgagaacccccgttactttaaaaatgtgatcgccttggccttcgactataatcaacgacgcaaggggaccaatcgaatcttttacagcgacgcccattttggcaacatacagctgataaaggataactgggaggaccgccaagtcatcgttgagaatgtcggatccgtcgagggactcgcttaccaccgagcctgggacaccctgtattggacaagtagtacaacttcaagcatcactagacatactgttgatcagacacgtcctggcgcatttgacagggaagccgtgattaccatgtccgaggacgaccatccacacgtcttggcattggatgaatgtcaaaacctgatgttctggaccaactggaatgagcagcatcctagtattatgaggagcactcttacaggcaagaatgcccaggtggtagtaagcacagatattcttacacctaacggcttgactattgattacagggccgaaaaattatacttttccgatgggagtttaggaaagatcgagcgctgcgagtatgacggctcacagcgacacgtgatcgtcaagagcgggccagggacgttccttagcctggcagtgtatgataattatatcttttggagtgactggggacgaagagccattttgcggtcaaacaaatacaccggaggggatacaaagatcttgcggagcgacataccacatcagcccatgggtatcattgccgtggccaacgacacaaattcttgtgagctgagtccatgcgcattgctgaatggaggctgccatgacctctgcctcctaaccccgaacggtcgagttaattgctcttgtcgcggggaccggattttgctcgaggataaccgttgcgtgaccaaaaactctagctgtaatgcctattcagagtttgaatgcggcaacggtgagtgcattgattaccaattaacatgtgatggcattccacactgcaaagataagtccgatgaaaagttgctgtactgtgagaaccggagctgcaggaggggcttcaagccttgctacaatagaaggtgtatcccgcacggaaaattatgcgatggtgaaaacgactgcggtgacaactcagatgagctggactgcaaggtaagcacatgtgctaccgtagagttcagatgtgcagacggtacatgcataccccggagcgcacgctgcaatcagaatattgattgtgccgatgccagcgacgagaagaactgtaataataccgattgtacacacttctacaaactcggggttaagacaacaggatttatccgatgcaattctacttctctgtgtgtgctgcctacatggatttgtgatgggtccaacgactgcggcgattatagcgatgaactgaagtgccctgtgcagaacaaacacaagtgtgaagagaattacttcagctgtccctcagggaggtgtatcttaaacacctggatatgcgatggtcaaaaagactgcgaggatggtcgcgatgaatttcactgtgacagcagttgtagctggaaccagtttgcatgctccgcccagaagtgcattagtaagcattggatctgcgacggcgaagacgattgcggggatggcctggatgagagcgacagcatctgtggcgcgattacctgcgccgccgacatgtttagctgccagggatccagggcctgcgtaccgcggcattggttgtgtgatggggaacgggactgccctgacgggagcgatgaactctctaccgcgggctgcgctccaaacaacacatgcgacgagaatgcgttcatgtgtcacaacaaggtttgtatccccaagcaatttgtttgcgatcatgacgacgattgtggcgatggcagtgatgaatcgccccagtgcgggtataggcagtgtggaactgaggaattttcctgtgcagatgggcgttgtcttctcaacacccagtggcagtgcgatggggattttgactgtccagatcatagtgacgaagctcctctgaaccccaaatgtaagagcgccgagcagagctgtaactcatcttttttcatgtgtaagaatggtagatgcattccatctggaggtctgtgcgataacaaggacgactgcggtgacgggagtgacgaaaggaactgccatatcaacgaatgcctcagcaagaaggtgagcggatgcagccaggactgtcaagatttgccagtctcctacaagtgcaagtgttggcccgggtttcagctcaaggacgacggaaaaacatgcgtcgacatcgacgagtgtagtagtggtttcccctgttcccagcagtgcatcaacacctatggaacatataaatgcctgtgcactgacggttacgagatacagcccgacaatcccaatggttgcaaatctttatctgacgaggagccatttctgattctggccgaccaccacgaaatacgtaagatctctacagacggtagtaattacactttactgaagcagggcttgaacaacgtgatcgccatcgactttgactacagagaggaattcatctactggattgactcatctagaccaaacggttctaggattaaccggatgtgcctgaacgggtccgatatcaaagtggtccataatacggcagtgcccaacgctctggcggtcgattggattggaaaaaacctttactggagtgacaccgagaaacgcattatcgaagtctcgaagcttaacggcctatatcccacaatcctggtgtcaaagcgcctgaaatttccgagggatctcagcctggaccctcaagctggatacctttattggatagattgctgcgaatacccccacatcggccgagtggggatggacggcacaaatcagtcagttgtcatcgaaacaaaaatctctcggcctatggcacttacaattgactacgtgaaccgtaggctgtactgggcagacgagaatcacatagagttctcaaatatggatggctcacacagacataaagtgcctaaccaggacattcccggtgtcatagctttaaccctgttcgaagactatatctactggactgatggaaaaactaaatcactgtcccgagcacacaagacttccggagctgacagattatctctaatctactcttggcatgctataacagacatacaggtgtatcatagttatcggcagccggacgtgtccaagcacttgtgcatgattaacaacggtggttgcagtcatctgtgcctactagcgcccggaaaaacacatacctgtgcctgtcccactaacttttatttagctgccgataatcgcacatgtctcagcaattgcacagcttcacagttccgatgtaagacagacaaatgcatccccttttggtggaagtgcgataccgttgacgattgtggcgatggttcagacgagccggacgattgcccagagtttcgatgtcaaccagggaggtttcaatgtggaacaggactctgtgctttgccggcatttatctgtgatggggagaatgattgcggagacaacagcgatgaacttaactgtgatacccatgtctgcctctcagggcaatttaagtgcactaagaatcagaagtgtatacctgtgaacctccgctgcaatggccaggatgactgtggcgacgaagaagacgagagggactgcccagaaaatagttgctcccccgattatttccagtgcaaaaccaccaagcattgcatcagtaaactatgggtgtgcgatgaggatccggactgcgccgatgccagcgacgaggcgaattgcgataagaagacatgcggccctcacgagtttcagtgcaagaacaataattgcatcccagaccactggagatgtgactcccagaatgactgcagcgataatagcgatgaagaaaattgcaaacctcaaacttgcactctgaaggattttctgtgcgccaatggggattgtgtttcctctcgcttctggtgcgatggagattttgattgtgccgacggctcagacgagaggaactgtgagacttcttgcagcaaggatcagttcagatgtagtaatggtcagtgtataccagcaaagtggaagtgcgacgggcacgaggattgcaagtacggagaggacgagaagtcttgcgagcccgcatcgcccacctgctcgtcacgcgaatatatatgtgctagcgatggctgcatcagtgcttcactcaaatgtaacggtgagtatgattgtgccgatggctcggatgagatggattgcgttacagaatgtaaagaggatcagttcaggtgcaaaaacaaggcgcattgcataccaatcagatggttgtgcgacggtatccacgattgtgtggatggctccgacgaggaaaattgcgaaagaggtggtaacatatgtcgagctgacgagttcctttgtaacaactcattgtgtaaactgcacttttgggtctgtgacggtgaagatgactgcggagataacagtgacgaggcacccgacatgtgtgtgaagttcctttgcccttccacacggccacatcggtgtcgaaacaatcggatctgcctccaatccgagcagatgtgcaatggcattgatgagtgtggagacaatagcgacgaagaccactgtggcggcaaactgacctataaggcaagaccctgtaagaaggacgagttcgcttgctcaaacaaaaaatgcatccctatggatctacagtgtgacaggctcgacgactgcggagatgggagtgacgagcaagggtgccgcatcgcccccactgagtatacttgtgaggacaatgtaaatccatgtggggatgacgcatattgcaaccagataaagacttctgtgttctgcaggtgcaagcccggttttcaacgaaacatgaagaacagacagtgtgaagatttgaacgaatgtctggtgtttggaacttgcagtcaccagtgcatcaacgtggaaggctcttataagtgtgtgtgtgaccagaactttcaggagcgcaataacacctgtatcgctgagggatccgaggaccaggtgctttatatcgcaaatgacaccgatatattaggcttcatatatcctttcaattattctggcgaccaccaacagattagtcatatcgagcacaacagcagaatcacaggcatggatgtgtactaccagagagacatgattatatggtccacacaatttaatcccggcgggatcttctacaagcggatccacggtcgtgagaagcgacaggccaactccggactgatctgtcccgagttcaagcgccctcgggatatcgctgtggattgggtcgccgggaacatatattggacggatcactctcggatgcactggttctcatattatactacacactggacctctctgcggtacagcattaatgtaggacaactcaacggaccgaattgtacgcggttactcactaatatggccggcgaaccttacgccatcgccgttaatcccaaaaggggaatgatgtactggaccgtggtgggtgaccacagtcatatcgaagaagctgccatggacggtacacttcggcgcatcctggtccagaagaatctccaacgacctactggattggctgttgattacttttctgagaggatctattgggctgattttgaactttcaatcattggaagtgtactgtacgacgggtcaaatagcgtcgtctccgtcagcagcaaacagggactacttcacccccaccggattgatatttttgaagactatatctacggcgctgggcctaaaaatggggtttttcgcgtgcagaaatttggacacggctccgtcgagtatttggccctgaatatagataagacaaagggagtcctgatctctcatcgctacaagcaactggacttgcccaatccttgcttagatctagcctgcgagtttctgtgtctcttgaaccccagtggcgcaacctgcgtgtgccccgaaggaaagtacctgatcaacggcacttgtaatgacgactcattactcgatgacagttgcaagcttacctgtgaaaacggggggaggtgcatcctcaacgaaaagggagacctgaggtgtcattgttggcctagttactcgggagaacgctgtgaggtgaaccactgctccaattactgccagaacggcggcacctgtgtaccatctgtgctgggtcggccaacatgtagctgtgcccttggctttacgggtccaaattgcggtaagaccgtgtgcgaagatttctgtcaaaatggcggtacgtgcatagtgactgctggcaaccagccatactgccactgccagcccgaatacacaggcgatcgatgtcagtactacgtgtgccatcactattgcgttaactcagaatcgtgcacaatcggagacgatggctccgtcgagtgtgtgtgtcccacaaggtatgaaggcccgaaatgtgaagtcgataagtgcgtgcggtgccacggcggtcattgtataattaacaaggacagcgaagatatattctgtaattgtaccaatggtaaaattgccagttcctgccagttgtgcgacgggtactgttacaatgggggaacatgtcagctggaccccgaaacgaacgtacccgtatgtctatgttctactaactggagcgggacgcagtgtgaacgccccgcccctaaatccagtaaaagcgaccacatcagcacacgctcgattgctattattgtgcctctagtgctcctcgtgactctgatcaccacactggttattggactcgtcttatgtaagcggaaacgccgaaccaagacaatcaggaggcagccaatcattaacggtggcataaacgtagagattggtaatcctagctacaacatgtatgaggtcgatcatgaccacaacgatggcggcctgttggacccagggtttatgatcgatcctaccaaagctcgatacatcggtggggggcccagcgcattcaagctgcctcatacggccccaccgatttacttgaactccgacctgaagggtcctttaacagctggccccactaactattcgaaccctgtatacgccaaactttatatggatgggcagaattgtcgcaattcattaggttccgtggatgagagaaaggaactcctgcccaaaaaaatagaaattggcatccgagagaccgtagcctag

SEQ ID NO: 15822 - DNA, 2349 bp, synthetic construct
  misc_feature 1..2349: note = Description of Artificial Sequence: Synthetic coding sequence
  source 1..2349: mol_type = other DNA
atgagcgaattcctgctggcattactaacgctgtcagggttgctacccatcgccagggtcttgactgtaggagcagatagagaccaacagctatgcgaccctggagaattcctctgtcatgaccatgtgacctgtgtgagccaatcgtggctctgcgacggagacccagattgccctgatgattcagatgagagtctggatacatctaggacctgccaggtcgatcagttctcctgcggcaatggaagatgtatcccgagagcatggctgtgcgaccgggaagatgactgtggagaccagactgatgaaatggccagttgtgaatttcccacctgcgagccactgacgcaattcgtgtgcaaaagcggtcgctgtattagctcgaaatggcattgcgattcggatgacgattgtggcgacgggtcggacgaggtgggatgcgtgcattcttgcttcgacaaccagtttcgatgcagcagtggaagatgcatccccggccactgggcttgtgacggagacaacgactgcggagactttagcgacgaggctcagattaactgtacaaaggaagagatccatagccctgccggctgcaacgggaacgagtttcagtgccaccctgatggaaactgtgtgccagatctgtggagatgtgacggcgaaaaagactgcgaggacggatccgacgaaaagggctgtaacggtactattagactgtgcgaccacaagacgaagttctcatgttggagcactgggcgctgcatcaacaaggcctgggtgtgtgatggggatattgattgcgaggaccagagtgatgaagacgattgtgatagcttcctctgtggcccccccaagcatccctgtgccaacgacacaagcgtgtgtctgcaaccggaaaaactctgcaatggaaagaaggactgccctgacggtagcgacgaaggttacctttgcgatgagtgctcgctgaacaacggagggtgttctaatcactgctcagtcgtccctgggcgaggaatagtgtgtagctgccctgagggactgcagctcaacaaggacaacaaaacctgtgaaatagtagactattgcagcaaccatcttaagtgtagccaagtgtgcgaacagcacaagcatactgtcaaatgtagctgctatgagggctggaaactggatgtagatggagaatcctgcacatccgtggacccattcgaggccttcattatcttttccataagacacgaaatcagacgaatcgacctgcacaaacgggactactctcttctggtgcccggactgaggaacactatcgcattggatttccattttaaccagagcttgctgtattggaccgacgtggtggaggatagaatctacagagggaagctgtcagaatccggcggagtgtctgcaatcgaagtcgtggtggaacatggtctggctactcccgaggggcttacagtcgactggatagctggaaacatttactggattgattctaatctggatcagattgaagttgctaagctggacgggtcacttaggacaacattgatcgcgggcgcaatggaacatcctagagcaattgcccttgaccccaggtatggtatattgttttggactgattgggacgctaacttccccagaatcgaatctgcatctatgagcggtgctggtagaaagaccatttacaaggatatgaagacaggggcctggcctaatggcctgactgtagaccattttgagaaacgaatcgtgtggacagacgctcgcagcgatgctatttatagcgccctctacgatgggacaaacatgattgaaatcattcgcggccatgagtaccttagccacccatttgcagtgagcttgtacggatcagaagtgtactggactgactggaggacaaacacactgtcgaaagccaataagtggactggccagaatgtctccgtaatccaaaaaacctctgcacagccgttcgacctgcagatctaccacccttctcgccagccgcaggccccaaatccgtgcgccgccaatgacgggaaggggccctgcagtcacatgtgcctgattaatcataatcggagcgccgcatgcgcatgccctcacctgatgaagctgagctccgataaaaagacctgttacgaaatgaaaaaattcttgctgtatgctcggcggagtgagatccgtggggttgatattgacaatccttactttaatttcatcactgcctttactgttccagacatcgacgacgttacagtcatcgacttcgacgcctccgaagaacgtctttattggactgacataaaaacccaaaccattaagcgagccttcattaatgggtag

SEQ ID NO: 15823 - DNA, 13614 bp, synthetic construct
  misc_feature 1..13614: note = Description of Artificial Sequence: Synthetic coding sequence
  source 1..13614: mol_type = other DNA
ttccttcattccggtcctgaagaggttgagatcaagtgtcccttaaatcacatcgcatgtctcgggacgaataaatgcgttcatctgtcccagctttgcaacggagtcctcgattgtcctgatggttatgacgaaggtgtacattgtcagggagagagcatttgccagcagctgaactgtactatgtacaaatataagtgtaccatggtgcggaactcaacaagatgctactgtgaagacggctttgaaatcacagaggacggccggagctgcaaggaccaagatgagtgcgctgtctacggcacttgttcacagacttgtcgcaacacgcacggttcatatacatgcagctgcgtggagggctatctaatgcagcctgacaacaggtcttgcaaggcaaaaattgagcccaccgaccggcccccgatcctccttatcgccaatttcgagacaatcgaagtcttttatttaaatggatccaagatggccactttgagttctgtgaatggaaacgagatacacaccttagatttcatatataatgaggacatgatctgctggattgagagcagggagtcatcgaaccagttgaaatgcatccagatcacaaaagctggagggctcacagacgagtggacgatcaacattttacaatcttttcacaacgtgcagcagatggccatagattggttgaccaggaacctgtacttcgttgaccacgtgggagatcggattttcgtgtgcaatagcaatggcagcgtgtgcgtaacccttatagatctggaattgcacaacccaaaagctattgccgttgatcctattgccggcaaactttttttcactgactatgggaatgttgcaaaggtcgaaaggtgcgatatggatggaatgaatcgtacaagaatcatcgactctaaaacagaacagcctgctgcccttgccctggatcttgtgaataaactcgtatactgggtggatctgtacctggactacgtcggggtagtcgattatcagggaaagaaccgacataccgtgatccaagggcggcaggtgaggcatctgtatggaattactgtgttcgaggactacctctatgccactaattcagacaattacaacattgttaggattaatcgctttaatggtaccgacatccacagcctcattaagattgagaacgcttggggcattaggatttaccagaaaaggactcagcctacagtacgcagccacgcttgtgaagttgacccgtacggtatgccaggaggttgttcgcacatatgcctcctgtcctcttcatacaagacccgaacatgtaggtgccgtacaggtttcaacctcggatcagacggacgatcttgcaagcgccctaagaacgagttgttcttattctatggcaagggccgccccggaatagtcagaggtatggacctgaatacaaagattgccgatgagtacatgattccaattgagaatcttgttaatcctcgcgccctagatttccacgccgagaccaactatatctatttcgctgacactaccagcttcttgatagggaggcaaaagattgatggcacagaacgggagaccattcttaaagatgacttggacaacgttgaaggcattgcagtggattggattgggaacaacttatactggacaaacgacggccataggaaaacaattaatgttgcgagactggaaaaggcaagccagagtcgcaagaccctcctggagggcgaaatgtcccacccccggggaatcgtcgtggatcccgtgaatggatggatgtattggacggattgggaggaagatgaaattgacgactctgtgggaagaattgagaaggcgtggatggacggatttaaccgtcagattttcgtcacttctaaaatgctgtggccgaacgggttaaccctagactttcatacaaatactctgtactggtgtgatgcctattatgatcacatagagaaggtcttcttgaatggcactcaccggaaaatcgtttatagtggccgcgagctaaatcatccttttggcctgagccatcatggcaattatgtattctggacagactacatgaacggcagtatttttcagctggatctgataactagtgaggtcacgctactgaggcacgaaagacctcccttgtttggcctccaaatttatgacccccgtaaacagcagggtgacaatatgtgcagggtgaacaacgggggttgtagcacgctgtgtctggcaatcccaggaggaagggtctgcgcatgtgcggataaccagctcctggatgaaaacgggaccacatgtacttttaaccccggggaggcactacctcacatatgcaaggctggcgagttcaggtgcaaaaatcggcactgcattcaagctcgatggaagtgcgatggcgacgacgattgtctggacggctccgatgaagacagcgttaactgcttcaaccattcctgcccagacgaccaattcaaatgccagaataatcgctgcattccaaagaggtggctgtgtgatggcgccaatgattgtgggtccaacgaagatgagagtaaccaaacatgcacggcacgaacttgtcaagtggaccagttcagctgcggcaatggaagatgcataccacgggcatggctttgtgacagggaggacgactgcggcgaccaaaccgacgaaatggcttcttgcgaattcccaacatgcgagcctctgacgcagtttgtgtgtaagagtgggagatgcatcagttcaaagtggcactgcgactcggacgatgactgcggggacggctctgatgaggtgggctgcgtgcattcttgcttcgataaccagtttcgctgtagctctggacgttgcatccccgggcactgggcgtgcgacggcgataatgactgtggcgatttttcggacgaagctcagatcaattgtaccaaggaagaaattcacagcccagctggctgtaacgggaacgaattccagtgtcacccggacggaaactgtgtccctgacctttggaggtgtgacggtgagaaagactgcgaagatggctctgatgaaaagggatgcaacggcacgattcggctgtgcgaccacaagacaaaattttcatgttggtccaccggaaggtgcatcaataaggcttgggtgtgcgacggcgatattgattgtgaagaccaaagcgatgaggacgattgcgatagcttcttgtgtggaccgcctaagcatccgtgcgcgaacgacacttccgtgtgcctgcagcctgagaagttatgcaatggaaagaaggactgccccgatggctctgacgaggggtacttgtgtgatgaatgctcactaaataacggcggctgcagcaatcactgtagtgtcgtccctggcagagggatcgtatgctcttgccctgaggggttgcagctgaacaaggataacaaaacttgtgagatagtggattattgctcaaaccatcttaaatgttcacaggtgtgtgaacaacacaagcataccgttaaatgtagctgctacgagggatggaagctggacgttgacggagagtcctgcacttccgttgacccttttgaagcgttcataatcttctcaatccggcatgagatccgacgcatcgacctgcacaaaagggactactccctcctggtccctgggctgagaaataccatagcgctcgacttccatttcaatcagtcgctgctgtactggacagacgtggtagaggaccgtatttatcgggggaagttgtccgagagtggcggcgtcagcgcaatagaggttgttgtggagcatgggctggcaactcccgaaggccttacagtagactggatcgccggcaatatatattggattgattccaatctcgatcagatcgaagtagcaaaattagatggatccctgcgcaccactctgattgcaggcgccatggaacatcccagggccattgctctcgatcccagatatggtattttattttggaccgattgggacgccaactttccacgcattgagtcagcctcaatgtccggcgcaggcaggaaaactatttataaagacatgaagacaggcgcatggccaaacgggctcacggttgaccattttgaaaaacggatagtgtggaccgacgctaggagcgatgccatctattcggccctgtatgacggtacaaacatgatcgagattattaggggccatgaatatttgtcccacccctttgcagtatctctgtacggcagcgaagtgtactggacggattggcggaccaacactctatccaaagctaacaaatggacaggtcagaacgtgtcggtgatccaaaagactagtgcccaaccgttcgaccttcagatatatcatccaagcagacaacctcaggcacccaacccctgtgcggctaatgatggtaaaggtccatgttctcacatgtgcctgatcaaccacaatagatctgctgcctgtgcctgcccccacctcatgaagctgagcagtgataagaagacttgctatgaaatgaagaaattcctgctgtacgctcgccggagtgagatccggggggtcgacattgacaacccctatttcaatttcatcacagcattcactgtacccgacatcgacgacgtgaccgttattgattttgacgcttcagaggagcgcctttattggacagatatcaaaactcagactatcaaaagggcgtttatcaatggcacaggactggaaaccgtgatcagcagagatatccagagcataagaggattagccgtggattgggtttccaggaatctttactggatttcatccgagttcgacgagacccagatcaacgtagctaggctggacggcagcctcaaaacctccatcatacacggaatcgataaacctcagtgtctggcagcacacccggtaagaggcaaactgtattggaccgatggaaacaccattaacatggccaatatggatggctctaactcaaagattctctttcagaaccagaaggagcccgtggggctgtccattgactatgtcgagaataagctgtactggattagctcaggcaatggcacgattaaccgctgtaatctcgatggtggtaacttggaagtgattgaatcaatgaaggaagagctgacaaaagctacagcgttgacaatcatggacaagaagctctggtgggcggaccagaacttggcacaattgggaacctgtagtaaacgagacgggagaaatccaaccatcctgcgcaataaaacttcgggggtcgtgcatatgaaggtctacgacaaagaggcgcagcagggctccaattcctgtcagctcaacaacggaggttgtagtcagctatgcttgccaacttcagaaacaacccgcacctgtatgtgcactgtgggctactacttgcagaagaatcggatgagctgccaaggcatcgagtcattccttatgtatagcgtgcacgaaggtataagaggcatacctctagaaccttctgacaagatggatgcactgatgcctataagcgggacctcgtttgccgtcggcattgattttcatgccgagaacgatacaatctactggacagatatggggttcaacaaaatcagcagggccaaaagagaccagacatggaaagaggacattatcactaacggactgggccgggttgagggaatagcagtggattggatcgccgggaatatttactggacagatcatggatttaatctcattgaagtcgccaggttgaacgggtcattcaggtacgtcatcatctcccagggcctcgatcagcctagaagcattgcagtacacccggaaaagggcttgttgttctggactgaatggggccaaatgccatgcataggaaaggccagattagacgggtcagagaaggtcgtgttggtttccatgggaatcgcatggccaaatggaatctcaattgactacgaggagaacaagctgtactggtgcgatgcccgaacagacaaaatcgagcgcattgatcttgagaccggtggcaaccgagagatggtcctaagtggatctaacgtcgatatgttttcagtggctgtgttcggggcctacatttattggtcggatcgcgctcatgccaacggctctgttcggaggggacacaagaacgatgctacagagactatcacgatgaggactggactcggagtgaacctgaaagaggtaaagatctttaacagggtacgcgaaaaaggcacaaacgtttgcgctcgcgataacggaggatgtaaacagctctgtttgtatcgaggaaactctcgccgtacatgtgcttgtgcccacggatatctggccgaagacggcgtcacttgtctgaggcacgaagggtatctcctgtacagcggtagaactattctaaagtctatacatttgtcagacgagaccaatcttaacagtcctatacggccatatgagaatcccaggtacttcaagaacgtcattgcgctggcatttgattacaaccaacgacggaaagggaccaacaggattttttattcagatgcacactttgggaacattcagctgattaaagacaactgggaagaccgtcaggtgatagtcgaaaacgtgggatccgtggagggtctggcttatcacagagcttgggacactctgtactggaccagctccacaactagttctattacacggcataccgtggatcagactcgccccggggcattcgaccgcgaagccgtcataacaatgtccgaagacgatcatccccacgtgctagccttggacgagtgccagaacctaatgttctggaccaattggaatgagcagcacccttcaatcatgcgctctacccttaccggaaagaacgcacaggtggtcgtctctactgacatcctaactcctaacgggctcacaatagactacagggcagagaagctgtacttctcggacgggtctctcgggaagattgaacgctgtgaatatgacggctcccagcgccacgtgattgtgaaaagcggtccgggaacatttttgtccctggccgtgtacgataactacattttttggagcgattgggggcggcgtgctatacttaggagtaacaagtacaccgggggagacactaagatcctgaggagcgatatccctcatcagccaatgggcattattgctgtggctaatgatactaattcctgcgaactttccccttgcgctctcctaaacggtggatgtcatgacctgtgcctactcacccctaacggcagggtcaattgctcttgccgcggggatcgtatcctcctggaagataatagatgcgtaacgaagaactcctcttgtaacgcgtactctgaatttgagtgcggaaacggcgaatgcatagactatcaactcacctgcgatggaatccctcactgtaaggataagtcggatgagaagttgctatactgcgagaatcggagctgtaggagaggattcaagccgtgctataatcgacgatgcattcctcacgggaagctttgcgatggggaaaacgactgtggagataattcggacgagcttgactgcaaagtgtccacctgtgcaacggtcgaatttcgctgcgctgatgggacctgtataccgcgatcagcacgatgcaaccagaatattgactgcgccgacgcctctgacgaaaagaactgtaacaacactgattgcactcatttctacaagttaggggtcaagaccacgggtttcattcggtgcaactctacgagcttatgcgtactcccaacatggatctgtgacggctctaacgactgcggagactattcagatgagctgaagtgtcccgtacagaataaacacaaatgtgaggaaaactatttttcctgccccagcggccggtgtattcttaacacttggatatgtgatggtcagaaagattgtgaagatggtagagacgaattccattgcgattcgagctgcagctggaatcaattcgcgtgttctgcccagaaatgtataagcaaacattggatttgcgatggcgaggacgattgtggcgacggcttagatgagagtgatagcatttgcggcgccatcacttgcgccgccgacatgtttagctgccaaggatcacgagcatgcgtgccccggcattggctttgtgacggggaaagggattgtccggacggcagcgacgaattgtcgacagccggctgtgcaccaaacaacacgtgcgacgagaacgcctttatgtgccacaacaaggtctgtatccccaagcagttcgtgtgcgaccatgacgacgattgcggagatggcagcgacgaatctcctcagtgcggctacaggcagtgcggaaccgaggagttttcatgtgccgatggcagatgtctgctaaacacccagtggcaatgcgacggggacttcgattgcccagatcattccgatgaggccccccttaacccgaagtgtaagtcagccgagcagtcctgcaattcatcatttttcatgtgtaagaatgggcgatgcatcccgtctggcggtctgtgcgacaataaggatgactgcggagacggatcagatgagaggaattgccatattaatgagtgtctttcaaaaaaagtctccggttgctcccaggactgccaggacctgcctgtctcttataaatgcaaatgttggcccgggttccaactcaaagatgacggtaagacatgcgtcgatatcgatgagtgtagtagcggttttccgtgtagccagcaatgtatcaacacctatgggacttataagtgtctttgtaccgacggctatgagattcagcctgacaatccaaatggatgtaaatctctgagcgatgaagagcccttccttattctcgctgatcatcacgagattcggaagatttcaacggacggcagtaactacacgctactgaagcaggggctgaacaacgtaatagcaattgatttcgactaccgtgaggagttcatatactggatcgatagctctcgtcccaatgggagcagaattaaccgtatgtgccttaacggttcagacataaaggtggtgcataatacggctgtgccaaatgcgctcgcagttgattggatcggtaagaacctatactggagcgatacagagaagcgaattattgaagtttccaagctcaatgggctctatccgacaatactggtctccaagaggttaaagttccctagagacttgagcctggacccacaggccggctacctgtattggatcgactgttgtgaatatccccacatcggcagagtcggaatggatggcacaaaccagtccgtggtgattgaaacaaagatctcgcggcccatggctcttacaatcgattatgtgaatcggagactctactgggccgacgagaatcacattgagtttagtaatatggacggatctcaccgccataaggttcctaaccaggacatcccaggggtcattgctctcaccctctttgaggactatatttattggacagatggtaagaccaagagcctgtcacgggcacacaagacctctggcgcagatcgcttgtcactgatctatagttggcacgccatcactgacatccaagtatatcacagctaccgtcagcctgatgtgtccaagcacctgtgcatgattaacaacggagggtgtagccatctctgtttgctggccccgggaaagactcacacgtgtgcctgtccaacaaatttctacctggcagcagacaaccggacttgcctgagcaactgcaccgcttctcagtttaggtgcaaaactgataaatgcatcccattctggtggaagtgcgatacagtcgatgattgtggcgacggaagcgacgaacctgacgattgtcccgagttcaggtgtcaacctgggcggtttcagtgtgggactggtttgtgcgctttgcccgccttcatctgtgacggagagaacgattgtggagataactctgacgaactgaattgtgacacacatgtttgcctcagcggacagtttaaatgtactaagaaccagaagtgtatccctgtcaaccttcggtgcaatggccaggatgattgcggcgatgaggaggatgagagagattgccccgagaattcctgttcccctgattattttcagtgtaagacaaccaagcactgcatctcaaagttgtgggtgtgcgacgaagaccctgattgtgcagatgccagcgatgaggccaattgcgacaaaaaaacctgcggcccccacgagttccagtgtaagaataataactgcataccagaccactggcgttgtgatagccagaacgattgctccgacaattccgatgaggagaattgcaagccacagacctgtactctaaaggatttcctgtgcgccaatggcgactgtgtctcttcacgcttctggtgcgatggcgatttcgactgtgcagatggttccgacgaacgaaattgtgagacctcgtgctcaaaagatcaattccgctgcagcaacggtcagtgcattcctgccaagtggaagtgtgatgggcacgaagactgcaaatatggggaggacgaaaaatcctgtgaacctgccagcccaacatgttccagccgagagtatatctgcgccagtgatgggtgtattagcgcttctttgaagtgtaacggggaatatgattgcgctgacgggagtgacgagatggactgcgtgaccgaatgtaaggaagatcagtttagatgtaaaaacaaggcccactgtattcctatccgttggttgtgtgacggaatacatgattgcgttgatggctcagacgaagagaactgtgaacgtggcggcaacatttgtagagccgatgagttcctttgtaacaattctctctgtaagttgcacttctgggtctgtgatggcgaggacgattgcggggataattcagacgaagcgcccgatatgtgtgttaaattcttatgtcccagtaccaggccacaccgatgtcgtaacaaccggatctgtctccagagtgagcaaatgtgcaatgggatcgatgagtgtggcgataattcagacgaagatcactgcggagggaaactcacctacaaggcacgaccctgtaagaaggacgagttcgcttgctctaacaagaaatgcatcccgatggacctgcagtgtgatagactggacgactgtggggatggttccgacgaacaaggctgtcgtattgcccctactgagtatacttgtgaagataatgtgaatccttgtggagacgatgcgtactgtaaccagataaagactagcgtcttctgcagatgcaaacctggcttccagcgaaacatgaaaaaccggcaatgtgaggaccttaacgagtgcctggtgttcggcacatgctcccaccagtgcatcaatgtcgagggttcttacaagtgtgtgtgcgatcagaacttccaggagaggaataacacctgcatcgcagagggctccgaagatcaagtgctgtacatcgctaacgatacagacatcctgggattcatctatcccttcaattatagcggcgaccaccagcagatcagccacatcgagcacaattctcgaataaccggaatggacgtctactatcagagagacatgattatttggtcaacgcagttcaaccctggcggcattttttacaagagaatccatggccgggaaaaaagacaggctaattctggattgatctgccctgagtttaagcggccgcgggatatcgcagttgattgggttgccggcaatatctactggacggatcactcacgcatgcactggttttcatactatacaacccactggacctccctcagatattccatcaacgtgggccaactgaacggaccgaattgtacccgcctgctgacgaatatggctggcgaaccatacgctatagccgtgaaccccaagagaggaatgatgtattggaccgtggtgggagatcacagccatattgaggaagccgctatggatggaacccttaggcgcattctagtccagaaaaatctccagagacccaccgggctggccgtggactacttctccgagagaatctactgggcggatttcgagctatcaataatcggatctgtgctgtatgatggatccaacagcgtggtttccgtgtcatccaagcaggggctgcttcatcctcacagaatcgatatcttcgaggattacatctatggggccggccccaaaaacggagtctttcgcgtacaaaaattcggtcacgggagtgtggagtatctggccctgaatatagataagacaaagggagtactgatcagccacaggtataaacagctcgacctgccaaatccttgccttgatctcgcgtgcgaatttttgtgcctacttaatcctagcggggccacgtgcgtctgcccagagggcaaatatctgatcaacggcacctgtaatgatgactccctactggacgactcttgcaagcttacatgcgagaatggcggaagatgcatcctcaacgagaaaggcgatctccgatgccattgctggcccagctactctggggaaaggtgtgaagtcaaccattgcagcaattattgccagaacggcggcacttgcgtgcctagcgtgctggggcgtcctacgtgtagctgtgccctaggttttaccggacctaattgcggaaagacagtgtgcgaggatttctgtcaaaatggaggtacctgcatcgtgacggccggcaaccagccctactgtcattgtcagcccgagtacactggagatcgttgccagtattacgtgtgccaccactactgcgtgaattctgagtcttgcacaataggtgatgacggatccgtcgaatgcgtctgccccacccggtacgaaggccctaagtgtgaggttgataagtgcgtcagatgccacggcggtcactgcataattaacaaggactctgaagatatattttgcaattgtaccaatggtaagatcgcgtctagttgccagctgtgcgacggctactgttataacggaggcacgtgccaacttgaccccgagaccaacgtgcctgtgtgcctgtgttccaccaattggtcgggtacacagtgtgagcgccctgcgccaaaatctagcaaatctgatcatattagcacacgaagcatcgcaattatcgtgcccctggtgctgctggtcaccttgattaccacactggtcattggtctcgtgctttgcaagcgcaaacgcaggacaaagaccatcaggcggcagccaattatcaacgggggcattaacgtcgaaattggtaatccttcctacaatatgtatgaggtcgaccacgatcataacgacggtggactcctggacccagggtttatgattgatcctactaaagccaggtacattggcggtgggccctccgcattcaaactgccacatactgctcctcccatctaccttaatagtgacctcaaagggccactgaccgcagggccaacgaattacagcaacccagtgtatgcgaaactgtatatggacgggcagaactgtagaaactcactgggtagcgtcgacgaaaggaaagagcttctccccaagaaaatagaaatcggtatccgtgagacagtggcatag

SEQ ID NO: 15824 - DNA, 843 bp, synthetic construct
  misc_feature 1..843: note = Description of Artificial Sequence: Synthetic coding sequence
  source 1..843: mol_type = other DNA
atgtgccccccccaggcccaggcggaggtgggcccaactatgaccgagaaggctgaaatggtttgcgccccaagtcctgctcccgctcctcctccaaagcctgctagcccaggcccaccacaggtagaggaggtcggtcacagaggcggttcctctccccctaggttacctccaggggttcccgtgattagcctgggccacagccgcccccctggcgtggcgatgcccaccactgaactgggtaccttacggccaccattgctgcaactgagcacccttggtacagcaccaccgaccctcgccctccactatcaccctcacccattcctcaactcagtgtacatcgggcctgcagggcccttttcgatcttcccctcgagccggcttaagagacgaccctctcattgtgagctggacctggctgagggccaccagccacagaaggtggcacggagagtgtttactaattccagagaaagatggcgccagcagaatgttaacggtgccttcgccgagctgagaaagttgctccctacccaccccccagatcggaagctgtcaaagaacgaggtgctacgccttgcaatgaaatatatcggttttctggtcaggctgttaagagaccaggcggctgccctggccgccggtcctactccacccggaccaaggaagcgtcccgtccatcgggtgcctgacgacggcgcccgacgcggatccggcagaagagctgaggcggccgcgcgctcccaacccgcaccacctgcagacccggacggaagcccgggcggcgctgctcggcccattaagatggaacagaccgcactgtctcccgaagtgcgatag

SEQ ID NO: 15825 - DNA, 1620 bp, synthetic construct
  misc_feature 1..1620: note = Description of Artificial Sequence: Synthetic coding sequence
  source 1..1620: mol_type = other DNA
atgggttgtgggtgctctagccacccggaggatgattggatggagaatatcgatgtctgtgaaaactgccattatcctatcgtgccactcgacggaaaaggcactttgttaattagaaacgggtccgaagtaagagacccattggtgacatatgagggatctaatccaccagcctctccccttcaagataatctcgttatagctctgcactcatacgaaccctctcacgatggcgatctcggttttgagaagggcgaacagttgcggatactggaacaatcaggagaatggtggaaagcgcaatccctgactaccgggcaagagggattcataccctttaattttgtggctaaagctaatagtctggaaccggagccatggttttttaaaaatctgagccggaaagatgcagaaagacagctgcttgcgcctggcaacacacatggatcatttttgatcagagaaagtgaatccaccgctgggtcattctccttgtcggtgagagattttgatcagaaccagggagaggtggtgaagcattacaaaataaggaacttggacaatggtgggttttacatcagccctcgcataacattccctggtttgcatgagttggtgcgtcattacaccaacgcctctgacggcctgtgtactagactgtcccgcccttgtcagacacagaagccgcaaaagccatggtgggaggacgaatgggaagtgcctagggagacccttaagcttgtggaacgccttggagccggtcagtttggggaggtatggatggggtattacaacggtcacaccaaagtggccgttaaaagtctgaagcaggggtcaatgtccccagatgccttcctggccgaagccaaccttatgaagcagcttcaacaccagcgtctggttaggctgtacgcggtagtgacccaggaacccatttacatcatcacagaatacatggagaatgacaccttactggactcccagttggaggaaaaggggttgggcgcgagcccgtggggcaacttgggccagcaactgctgctgcttccaactggtagcctggtggatttcctgaagaccccttctggcataaagctcactatcaacaaacttcttgacatggctgctcaaatcgccgaaggcatggctttcattgaggagagaaattacatacacagggatctccgcgccgccaatattctggtatctgacacattatcctgtaagattgctgacttcgggcttgcccggctaatcgaagataacgaatacacagcacgggaaggggcaaagtttccgattaaatggactgcccctgaggctatcaactatggcacgtttacaataaagtctgatgtctggtcattcgggattttacttacggagatcgtgacccacggtagaatcccatatccaggtatgacaaacccggaggtgattcagaacttggaaagaggttataggatggtaaggcccgataactgcccagaagagctttatcagctaatgcggctgtgttggaaagaacgacctgaagatcggcccacattcgattatcttcgcagcgtgctcgaggacttttttacggcaacggaagggcagtatcagccgcagccgtag

SEQ ID NO: 15826 - DNA, 1530 bp, synthetic construct
  misc_feature 1..1530: note = Description of Artificial Sequence: Synthetic coding sequence
  source 1..1530: mol_type = other DNA
atggggtgcggttgttcctcacaccctgaagacgactggatggaaaacatcgacgtgtgcgaaaattgccactatcccattgtgccgttggacggcaagggtactctcctcatccgaaatggcagcgaggtccgagacccgctcgttacctatgagggctccaatccaccagccagcccacttcaggataatctggttattgcccttcattcgtatgaaccgtcacatgacggggatctgggcttcgagaaaggcgaacaattgaggattctggagcaatctggagaatggtggaaagctcagagccttaccaccggccaggaagggtttatcccctttaattttgtagctaaagcaaattccctggaaccggagccttggttttttaaaaacctaagcagaaaagatgctgaacgccagttattagcccctgggaacacccacggaagcttcttaattagagaaagtgagagtaccgcaggcagtttttcactctccgttcgggattttgatcagaatcagggcgaagtggtcaaacactacaagattcggaatttagataatggcggcttctacatcagcccacgaattactttccctggcttgcacgagctagtgagacactacactaatgccagcgacggtttgtgcactaggctgtcgagaccctgtcaaactcagaaacctcagaagccctggtgggaggacgaatgggaggtgcctagagagactctcaaattggtagagcgcctgggggctggccaattcggtgaggtgtggatgggttattacaacggtcataccaaagtagccgtgaagagcttgaaacaaggttcaatgagtccagatgcctttctcgctgaggccaatctaatgaaacaactgcagcaccagagactggtgagactttacgccgtggtaacccaagagcctatctatatcattaccgaatacatggagaatggctcactggtcgactttctgaagacgccttctggaatcaaactgaccataaacaagctcctcgatatggccgcacaaattgcagaagggatggcattcatcgaagagaggaattacatacaccgggaccttcgcgcagctaacatcttagtgagcgataccctctcttgcaagatagcagacttcggcctggctaggctgattgaggacaatgagtatacagcccgtgagggagccaagtttccaatcaagtggaccgctcctgaagcaatcaattacgggacctttacaattaagtctgacgtgtggagttttggcatccttctcaccgaaatcgtcacacacggacgtataccctacccaggaatgaccaatccagaggtaatacagaatctcgagcggggttacagaatggtcaggcccgacaattgtccagaagagctgtaccagctgatgcggctttgttggaaggaacggccagaagacagacctacattcgattacttgcgttctgtgctggaggacttctttacagccactgaggggcagtatcagccacagccgtag

SEQ ID NO: 15827 - DNA, 1551 bp, synthetic construct
  misc_feature 1..1551: note = Description of Artificial Sequence: Synthetic coding sequence
  source 1..1551: mol_type = other DNA
atgggctgtggttgttcctcccatccagaagatgattggatggagaatattgatgtgtgtgagaattgccactaccccattgtgcccctcgatggtaagggtaccctccttattagaaatggctctgaggtgagagaccctctcgtcacctacgagggctccaatccccccgcctcaccactgcagggggaccccaggcagcaagggctgaaagataaagcctgcggcagcctcgcggtcggctttcatctttcccccacctatttcctcccagggttggcctttctggtcccgcaccctgtgacccccggcttccttcccattcccgccagattcagccttatgcccttggtcttcaccgacaatctggtaatcgccctgcattcctacgaaccctcccacgatggcgacctcggtttcgagaagggagagcagcttcggatcctggaacaaagcggggagtggtggaaggcccagagtctgactacaggacaggagggctttataccatttaacttcgtcgcaaaagctaattccctagagccggaaccatggttctttaagaacctgtctcgcaaggatgccgagcgtcagctgctggcacccggtaatacacacgggagtttcttgattcgagagtcagaatccactgctggctctttctccctgtcagtaagggactttgaccagaatcagggtgaagtggtcaaacattacaagattcggaacttggacaatggcggattctacatttctccgcggattacgtttccaggtcttcacgaactggttcggcattacacacgctattacaatgggcacaccaaggtcgcggtcaaatcgttgaaacaagggtccatgtcccccgacgcctttctcgcagaggcgaatctgatgaaacagttacagcaccaaaggctggttcgtttatacgcagtggttacccaggaaccaatctatatcattacagagtatatggagaacggtagtctagtggacttcctcaaaactcccagcgggatcaaactgacaattaacaaacttttggacatggccgcccagattgccgagggcatggcgttcatcgaagagcgcaactacattcacagagatctgcgtgcagctaatatccttgtgagtgacactctgtcgtgtaaaatcgctgacttcggccttgcccgactgatagaagataacgagtacactgccagggagggcgcaaagttccctatcaagtggacagcgcctgaggccattaactatggcaccttcactatcaagtcagacgtgtggagctttggaattttgcttacagagattgtcactcatggaaggataccttacccaggaatgaccaacccggaggtaatccagaatttggagcggggatataggatggtccgtccagacaattgcccagaggagctttatcagttaatgagactgtgttggaaggagagaccggaggaccgccccacatttgactatctaaggtcagtacttgaagacttttttaccgctacagagggccagtaccagccacaaccttag

SEQ ID NO: 15828 - DNA, 750 bp, synthetic construct
  misc_feature 1..750: note = Description of Artificial Sequence: Synthetic coding sequence
  source 1..750: mol_type = other DNA
atgggttactacaacggccatacgaaggtggccgtaaaatcactgaagcaaggctcaatgagtccagacgccttcctggccgaggctaatctgatgaagcagcttcagcatcaacggctcgtaagactttacgctgttgtgacacaagaaccgatctacattatcaccgaatacatggaaaacgggtccctggtggactttctgaaaacacccagcggcattaaactgacaatcaacaagctgctggatatggctgcccagatagccgaggggatggcgtttattgaggaacgaaactacatccatagagacttgagggccgccaatatccttgtgtccgacacactgagctgtaagatcgccgactttgggctggcgagactgatcgaagacaacgaatacacagcgcgtgagggagccaaatttccaataaagtggaccgcacctgaggctattaattatgggacctttacaatcaaatccgatgtctggtctttcggaatcttactaaccgagatcgttacccatggtagaattccttaccccggcatgacaaaccccgaagtaatacaaaacctggaaagaggatacaggatggtgaggcctgacaattgtccggaggaactgtatcagttaatgcgcctgtgttggaaagaacgccctgaggaccgccccacctttgactacctccggtccgttcttgaagatttcttcaccgctaccgagggacagtaccagccacaaccctag

SEQ ID NO: 15829 - DNA, 1611 bp, synthetic construct
  misc_feature 1..1611: note = Description of Artificial Sequence: Synthetic coding sequence
  source 1..1611: mol_type = other DNA
atggggatcccaggctcccataatttaagatacttttggaactttccaggccagggaccaattatctccgatgtggggggcgccgatctgggcggtgcgccctccgcccctagcagcattccctccgggaccatggggtgcgggtgtagctctcatccagaggatgactggatggaaaacatcgacgtctgcgagaattgtcattaccctattgtgcctctggatgggaaagggactctcttgattcgcaatgggagcgaggtgagggacccgctggtcacatacgagggttcaaatcccccagccagccctctgcaggataacttggttattgccttacactcttatgagccgtctcatgatggagatctaggatttgagaagggggaacagctacggatccttgagcagtctggtgaatggtggaaagcacaaagcttgacgactgggcaggaaggcttcatccccttcaactttgttgcaaaggcaaacagtctggaacctgaaccttggttctttaagaatttgagcagaaaggatgccgagaggcagctgctcgctcccggcaatacgcacggctctttcctgatacgggagtctgagtccactgccgggtcattctctcttagcgtgcgcgacttcgaccaaaaccaaggcgaggtggttaaacattacaagatacgaaatctggacaatggaggcttctatattagtccgagaattacctttcccggtctgcacgagcttgtcagacactataccaatgctagtgacggcctctgcacgcggctaagcaggccctgccagactcaaaagccccagaagccttggtgggaagatgagtgggaagtgcctcgagagaccctaaagcttgtggaacggctgggggcaggtcaattcggtgaggtttggatgggttactacaatggacacaccaaggtggcggttaaatcgctcaagcagggcagtatgtctccagacgctttcttggcagaagccaacctgatgaagcaattgcagcaccaaagactggtaagactgtacgctgtcgtgactcaggagcctatctacataataactgaatatatggaaaatggtagtctggtggattttctcaaaacaccctcaggcatcaaattaactataaacaagctgctggacatggctgctcagatagcagagggaatggcctttattgaggaacgcaattacatacatcgggatctccgagctgctaatatactggtctctgatactctcagctgcaagattgcagatttcggactagcaaggttgattgaggataatgaatacacagcgcgggaaggcgctaagttccctataaagtggacagcacctgaggcgattaattatggcacctttacacacgggcgaataccatacccaggcatgaccaatcccgaggtcatccagaacctggagagaggctaccgcatggttcggccagacaattgtcccgaggagctctatcagctcatgcggctgtgttggaaagagcgcccagaagaccgacctacctttgactatctccggtctgtactggaggattttttcaccgcaaccgagggccagtatcagccccagccttag

SEQ ID NO: 15830 - DNA, 1200 bp, synthetic construct
  misc_feature 1..1200: note = Description of Artificial Sequence: Synthetic coding sequence
  source 1..1200: mol_type = other DNA
atgcctcagctgtctggaggcgggggaggagggggcggcgaccccgaattgtgtgcaacggatgaaatgatcccgttcaaagacgaaggggatccacagaaggagaaaatcttcgcagaaatctcacacccagaagaagaaggcgacttagcagacatcaaaagctccctggtaaacgaatcagaaataatcccagccagtaacggacacgaggtggccaggcaagcccagacatctcaggagccataccacgataaagccagggaacatcctgacgatggcaaacatcccgacgggggtctgtacaacaaaggaccttcctacagctcctactctggctacatcatgatgccgaatatgaataatgacccttacatgtccaatggctctctgtccccccccatcccaaggacaagcaacaaagtgcccgttgttcagccttcacatgccgtgcatcctcttacacctctcataacatacagtgatgagcatttcagtccgggcagtcatccatcccacataccttcagacgtgaacagcaaacagggaatgtcgcgccacccacctgctcctgacatccccacattctatcctctgtctcctggcggtgtgggacaaatcactcctcccttgggttggcaaggccaaccggtttatcccatcacggggggatttaggcagccataccctagctccctgtccgtggataccagtatgagtaggtttagtcaccacatgattccaggtcctcccgggcctcataccacgggtattccccatccagccattgttaccccgcaggtgaagcaggaacatccccataccgatagcgacctgatgcatgtaaagcctcagcacgaacagcggaaggaacaggaaccgaaaaggccccatattaaaaaaccactgaacgcctttatgttatatatgaaagagatgagggccaacgttgtggctgagtgcacccttaaggaaagtgccgccatcaaccagatcctggggcgccggtggcacgcattgagtcgcgaggagcaggccaagtattacgagcttgctaggaaggaaagacaactgcacatgcagttataccctgggtggtcagctagggacaactacgggaagaaaaagaagcggaagagagaaaagttgcaagagagcgcttctggaacaggcccacggatgacagctgcatacatttag

SEQ ID NO: 15831 - DNA, 1161 bp, synthetic construct
  misc_feature 1..1161: note = Description of Artificial Sequence: Synthetic coding sequence
  source 1..1161: mol_type = other DNA
atgccccagctgtctggcggaggggggggcggagggggggaccctgaactgtgcgctaccgatgaaatgatcccctttaaggacgaaggggacccgcagaaagaaaagatctttgcagagatcagccacccggaggaggaaggggacctagcggacataaaatcctcccttgttaatgaaagtgagatcatccctgcctcaaatgggcacgaggtggcgagacaggctcagaccagtcaggagccataccacgacaaagctagagagcaccctgatgatggaaagcacccagacggcggcctgtataacaaaggaccctcttactctagttacagcggctatattatgatgcccaatatgaataacgacccctatatgagcaatgggagcctgagcccacccatcccgaggaccagcaacaaagtccctgtggtgcaaccgagccatgccgtgcaccccctcacccccctgattacttacagcgatgagcacttcagtcctggaagtcacccatctcatataccgagcgatgttaattctaaacaaggcatgtcaaggcatccccccgctcccgacatcccgacgttctaccccctgtctcccggtggcgtcgggcagatcacaccacctctggggtggttcagtcatcatatgattccaggcccgccagggcctcacaccaccggcattcctcatccagccattgtcacccctcaggtcaaacaagagcacccccacactgatagtgacctgatgcacgtgaagcctcagcatgaacagcggaaggagcaagagcccaagaggcctcatatcaagaaacctctgaatgcatttatgctttatatgaaagagatgagagctaatgtcgttgcagaatgcaccttaaaggagtccgccgctatcaaccagatactgggtcgcagatggcacgctctttcccgggaagagcaagccaaatattacgagctggcacgaaaagagcgacagctgcatatgcagctgtaccccgggtggagtgccagggacaattatggaaagaaaaaaaagagaaagagagaaaagttgcaggaaagcgcctctgggggcaaacggtcatctttccccacttgcaaagctaaagctgctacgcctggcccacttctggagatggaggcttgctag

SEQ ID NO: 15832 - DNA, 1116 bp, synthetic construct
  misc_feature 1..1116: note = Description of Artificial Sequence: Synthetic coding sequence
  source 1..1116: mol_type = other DNA
atgccacagctaagtggtgggggtggtggcggagggggtgaccccgaactgtgcgccaccgatgaaatgatcccgtttaaggatgagggggatccacagaaggagaagattttcgccgagatttcccatccggaggaggaaggcgatctcgctgatataaaatcctctcttgtgaacgagtctgaaatcattccggcctccaatggacacgaagtggcacgtcaggcccagacctcccaagaaccttatcacgacaaagcccgggagcacccggacgacggcaagcatccagacggcggactttataataagggcccttcctactcatcatacagtgggtatataatgatgccgaatatgaacaatgacccatacatgtctaatggctcccttagcccccccatacctaggacatccaacaaagtcccggtcgtgcaaccgtctcacgctgtgcacccattgacgcccctgattacttactctgacgaacatttttctcccggtagtcaccccagccacatcccatctgacgtaaacagtaaacagggcatgagcaggcatccccccgccccagacatccccacgttctaccccttgtcaccgggcggtgtgggacaaatcaccccccctctggggtggttcagtcaccatatgattccaggcccgccaggcccccacacaactgggatccctcaccctgcaatcgtgactccacaggttaaacaagaacacccccacacggattccgatctcatgcatgttaaaccccagcatgagcagcggaaggagcaggaacccaagcgtccccatattaagaaacctcttaatgcctttatgctgtacatgaaagagatgagggctaacgttgtcgctgagtgtacattaaaggagtccgccgctattaatcagatactcggtagacgatggcacgctctctccagggaagagcaggcaaagtattatgaactggcgagaaaggaacggcagctccacatgcaactgtacccagggtggtctgcacgcgacaactatggcaaaaagaaaaagaggaagcgtgaaaaactgcaagagagtgcctctgggacaggcccaagaatgaccgcagcatatatatag

SEQ ID NO: 15833 - DNA, 912 bp, synthetic construct
  misc_feature 1..912: note = Description of Artificial Sequence: Synthetic coding sequence
  source 1..912: mol_type = other DNA
atggcagaggtggcccgacaggctcagacatctcaggaaccgtaccacgataaggcacgagaacacccagatgacgggaaacaccccgacgggggcctgtacaacaagggaccctcatacagttcctacagcggctatatcatgatgcccaacatgaataatgacccatatatgagcaacggctccttgtctcccccaatacctcgcaccagtaataaagtaccggtagtgcagcctagccacgctgtacatcctctgaccccactgataacttattcggacgagcatttcagccctggatctcatccctcacacattccaagcgatgtcaatagcaagcagggcatgagtcgacacccgcctgcacccgacataccaactttttaccctctgagccccggtggggtcggacagattaccccccccctgggttggttctcccatcacatgattccgggaccaccggggccacacaccactggaatcccccatcctgctatcgtgactccccaggtaaagcaggaacaccctcacaccgattcggatctgatgcacgtgaaaccccaacatgagcagaggaaagaacaggaaccaaaacgcccccatatcaagaaacccctcaacgctttcatgctgtacatgaaggagatgcgggcaaacgttgtggcagaatgcaccctaaaagagagcgcagccatcaaccagattttgggccggcgctggcacgctctcagcagggaagagcaggccaaatattacgagttagcccggaaggagcgccagctgcatatgcagttatacccaggatggagcgccagagacaattatggtaaaaaaaagaaaaggaaaagggaaaaactgcaggaaagcgcctctggcacaggtcccagaatgaccgctgcctacatatag

SEQ ID NO: 15834 - DNA, 1500 bp, synthetic construct
  misc_feature 1..1500: note = Description of Artificial Sequence: Synthetic coding sequence
  source 1..1500: mol_type = other DNA
atgaatgacgaccccagcatggaggagaacggggtggagcgagtttgtcctgagagtttgctacagtccagagaatactcctcgttgcctctacctagacacacctctagtacagatggaacgattacttcatccgatcccgggttagagatccttaatatggcgagttgcgatctggaccgaaatagtctctgcaagaaggaagaggataccaggtccgccagccccactatcgaagcacagggcacttcaccagctcacgataacattgcattccaggactctacaagcaaggacaaaacaatacttaacttagaggctaaggaagaacccgagaccatcgaggagcacaaaaaggagcacgcttctggggacagtgtggtttcccccctgccggttaccactgtaaagtcagtgaacctgcgccagagtgaaaatacctccgccaacgaaaaggaggtggaagccgaattccttagactgagtcttgggtttaaatgcgattggtttacgctggagaagcgtgtgaagctggaggagagaagcagagacttagccgaggagaatctgaaaaaagagatcactaactgcctgaaattgctggaaagtctgacccccttgtgcgaggatgacaaccaagcacaggagatcatcaagaaactcgagaagagcatcaaattcctaagtcagtgcgccgccagggtggccagcagggcggagatgttaggagctattaatcaggagtctagagtcagcaaagcagttgaggtgatgatccagcatgtggaaaatctcaaaagaatgtacgccaaggaacacgccgagctagaggagctcaaacaggtgctgcttcagaatgagcggagctttaatcccctggaggacgatgacgattgtcagatcaaaaagcggtctgctagcctcaactccaaaccttcgagcttgcgtcgggtgacaattgctagcctccctcgtaacattggtaatgcagggatggttgcgggtatggaaaataacgacaggttctcaaggcggtctagcagctggcgaattctaggcagcaagcagagcgagcatagaccctctctcccccggttcatttcaacatacagttgggctgatgccgaagaggagaaatgtgaactgaaaacaaaagacgactcagagcctagtggtgaggagaccgtcgaaagaacccgaaaaccttccttgagcgaaaagaaaaacaacccctccaagtgggatgtgagttctgtgtatgacacgatcgcttcttgggctacgaatctgaaaagttctattagaaaggcaaataaagctctttggttatctattgcctttatcgtgctatttgccgcactgatgtcttttctgaccgggcagctcttccaaaagtcggtcgatgcagctccaacccaacaagaggatagctggaccagtctcgaacatatcctgtggccgtttacaaggctgaggcataacgggccaccacccgtttag

SEQ ID NO: 15835 - DNA, 1500 bp, synthetic construct
  misc_feature 1..1500: note = Description of Artificial Sequence: Synthetic coding sequence
  source 1..1500: mol_type = other DNA
atgaacgatgaccccagcatggaagagaatggcgtggagagggtgtgccctgaatctttactccagagccgggagtactcaagcctgccccttcctcgccatacttccagtaccgacggcaccattacttccagcgatcctggcctcgagatcctcaacatggcgagctgcgatttggaccgcaattctctctgcaagaaggaggaagatactcgctccgcatccccaactatcgaggcacagggtaccagcccagctcacgacaatattgcattccaggacagcacttcaaaggataaaacaattctgaatctggaggctaaggaagagcccgagactattgaagagcacaagaaggagcacgctagcggagactccgtcgtcagtccactacctgtcactaccgtgaagagcgtcaatcttcgacagagcgaaaataccagtgcaaacgagaaagaggtggaggccgaattcctccgactgtccttagggttcaagtgtgactggttcaccctggagaagcgggtcaaactcgaagaaagatctagagatttggcagaggagaatctgaagaaagagattacaaattgtcttaagctattggagagcctcaccccactatgtgaagatgacaaccaagctcaggagattatcaaaaagctggaaaagtccataaaattcctgtcccagtgtgccgcaagggtggcttcccgggccgagatgctgggagctattaatcaggaaagccgtgttagcaaggccgtggaggtgatgatccagcatgtggaaaacctcaaacgcatgtacgccaaagagcacgcagaactggaagaattgaagcaggttttacttcaaaatgagagaagttttaatcccttggaggacgatgatgactgccagataaagaagcgcagcgcctctctgaactctaaacctagttccctgcgaagagttaccatcgccagtttacccagaaatataggcaatgcaggaatggttgctggaatggagaacaatgatcggttctcccggagatcatcttcatggagaatcttgggaagcaaacaaagtgaacataggccatctcttccacgattcatatcgacctattcttgggccgatgctgaagaggagaaatgcgagctgaaaactaaggatgatagtgagccgagcggagaggagaccgtcgagcgtacgcgaaaaccaagtctcagcgagaaaaagaataatccttcaaaatgggacgtgtcttctgtatacgacactattgcttcctgggccacgaacctaaagagcagtatacgaaaagccaacaaggccctatggctgagtattgcattcatcgtgctgttcgccgcactcatgtcatttctgacggggcaattgttccagaaatctgtggacgccgctccaactcagcaagaagattcgtggactagtctcgaacacatactctggccatttactaggttgcgccataatggaccaccccccgtatag

SEQ ID NO: 15836 - DNA, 1500 bp, synthetic construct
  misc_feature 1..1500: note = Description of Artificial Sequence: Synthetic coding sequence
  source 1..1500: mol_type = other DNA
atgaacgatgatcctagtatggaagagaacggggtggagcgggtgtgtccagagagtctgctacagagcagggagtacagcagcctgccattgcctagacacacatcaagcactgacgggaccataacaagttcggacccaggccttgaaattttgaatatggcctcgtgcgatttggacagaaatagcctgtgcaaaaaggaggaggatactcggagcgcctcgcccacaatcgaagctcagggaaccagcccggcccacgataatatcgcattccaggactccacttcgaaggacaaaacaatccttaacctggaggcgaaagaagagcctgaaacaatcgaggagcacaaaaaagagcatgcgtcaggagacagtgtggtcagtccactaccagtgacgactgtcaaatccgtcaacctgcgccagagcgagaacacaagtgccaacgaaaaggaagtggaggctgagtttctgaggctgtccctgggattcaaatgcgactggttcaccctagagaagcgggttaagctggaggagcgatcacgagacctggcggaagaaaaccttaagaaggagatcactaattgtctaaaattattggaatcactgacccccctgtgtgaggacgacaatcaggctcaggagataataaagaaactcgaaaagtcaatcaagttcttgagccaatgcgccgcacgtgtggccagtagggcagaaatgttgggcgccattaatcaggagtcacgcgtatcaaaagcagtcgaagtcatgatccagcacgtcgagaaccttaagcgcatgtatgcaaaggaacacgctgagctcgaagagttgaagcaggtgctgctccagaacgaacgcagcttcaatccgctggaggatgacgatgactgtcagatcaaaaaacgctccgctagcttaaattcaaagccttcctccttaagacgtgtgaccatcgcctccctcccgcggaacatcggaaacgcaggaatggtggcagggatggaaaataatgataggttctcacgcagatctagctcttggcgcatcctgggaagcaaacaaagtgagcaccggccttcactgccccgcttcatcagtacttattcatgggcagacgcggaggaagaaaaatgcgagctgaagacaaaagatgatagtgagcccagcggggaggaaaccgttgaaagaacccgtaagcccagtttgagtgagaagaagaataatccctctaagtgggacgtaagctcagtttacgacacaatcgcaagctgggcgacgaacctgaagtcaagcattcgtaaagctaataaagccctctggttgagcatcgcctttatagtgctgtttgccgcactaatgtccttcttaaccgggcaattgttccaaaagtctgtggacgcagctcccacccagcaggaggactcatggacaagcctcgagcatatcctgtggccttttacccggctgaggcataacggacctcccccagtgtag

SEQ ID NO: 15837 - DNA, 234 bp, synthetic construct
  misc_feature 1..234: note = Description of Artificial Sequence: Synthetic coding sequence
  source 1..234: mol_type = other DNA
atgaacgatgacccctccatggaggagaatggcgtggagagagtgtgccctgaatctctcctgcagtccagggaatactcttcactgccactgcccaggcataccagctccacagacggcacaatcacctcttctgatccgggactcgagatcctcaacatggccagttgtgatctggataggaatagcctatgtaagaaagaagaggacactagatccgcctcacccacatag

SEQ ID NO: 15838 - DNA, 27 bp, synthetic construct
  misc_feature 1..27: note = Description of Artificial Sequence: Synthetic coding sequence
  source 1..27: mol_type = other DNA
atgaacgatgaccctagtatggagtag

SEQ ID NO: 15839 - DNA, 618 bp, synthetic construct
  misc_feature 1..618: note = Description of Artificial Sequence: Synthetic coding sequence
  source 1..618: mol_type = other DNA
atgacccccccagaacgcctgttcctgccaagggttcggggaactaccttgcacttgctgctgttgggcctgcttctagtactgctgcccggagcccagggtctgccaggggtgggtctaaccccctcggcagcacagactgcaagacaacatccaaagatgcaccttgcacacagcaccctgaaacctgctgcacacctcataggagacccctctaagcagaactccctgctatggagggcaaacacagatcgcgcctttcttcaggacggattttcactgtcaaataattctcttctggtgccaaccagcggcatatacttcgtgtacagccaggtggtgtttagcggcaaggcatacagtcctaaagctactagttctcctttatatctcgcccatgaggtccagctgttttccagccagtatccttttcacgttccattgctgagcagtcagaagatggtgtaccccggactccaggagccttggctccactcgatgtatcacggggctgcattccagttgactcagggcgatcagctgtctacacatacagacggaattccacacttagttctgagtccatcgacagtattttttggggcttttgcgctctag

SEQ ID NO: 15840 - DNA, 618 bp, synthetic construct
  misc_feature 1..618: note = Description of Artificial Sequence: Synthetic coding sequence
  source 1..618: mol_type = other DNA
atgaccccacccgagcggctattcctgcccagagtgcgcgggaccacattgcacctcctgctgctgggcttactgctcgttcttctgcccggcgcccaggggctgcccggagtgggcctgaccccctctgccgcacagaccgcacggcagcaccccaagatgcacctggctcatagtacgcttaaacctgcggcacatctcattggcgatcctagtaagcagaattccttgctttggagagccaatacagaccgagccttcctgcaggatggcttttcattgtcaaataattccctcctggtgcctacctccggcatttatttcgtgtatagccaggttgtgttttccggaaaagcctattctcccaaagccacgtctagcccgctctatttagcccatgaggtgcaattgttctcctctcaatatccctttcatgtgcctcttctgtcatctcagaagatggtctacccaggtttgcaggagccatggctgcattcaatgtatcacggcgccgctttccagttaactcaaggagaccagctgagtacacatactgatggcataccccatctggttctgtcaccatccacagtgttctttggcgctttcgcgctatag

SEQ ID NO: 15841 - DNA, 417 bp, synthetic construct
  misc_feature 1..417: note = Description of Artificial Sequence: Synthetic coding sequence
  source 1..417: mol_type = other DNA
atgactcctccagaaaggctgtttctccccagagtgcgaggcactacactgcacctgttactcctcggcctgctactggtcctactgccaggtgcccagggattgccaggagttggacttactccctctgccgctcagaccgctcgccaacatcccaagatgcacctggcccattccaccctgaaacctgctgctcatctgattggggatccctctaagcagaactcgctgctatggcgggcgaacactgatcgcgcctttctgcaggacggcttctctctttccaacaattccctgcttgtacctacctctgggatctattttgtgtattcgcaagggtccagtccacctctattgtggccttttcagcagctgaaatctagtttgattaagtccccagaactgagcaagaagtag

SEQ ID NO: 15842 - DNA, 2010 bp, synthetic construct
  misc_feature 1..2010: note = Description of Artificial Sequence: Synthetic coding sequence
  source 1..2010: mol_type = other DNA
atggagggtaacaagttagaggaacaggattctagcccaccgcagagtaccccaggccttatgaaagggaataaaagagaggaacagggactgggcccagaaccagccgctcctcagcaaccgactgcagaggaagaggccttaattgagttccatagatcgtatagggagttattcgaatttttttgtaacaacactactattcacggggccatacgcttagtttgtagccaacacaacagaatgaagaccgcgttttgggctgttctgtggctttgcaccttcggaatgatgtattggcaatttggtctgctgtttggagaatacttttcttatccagtgtccctaaatattaatctgaactccgacaagctggtttttcccgccgtcactatttgcaccctgaatccataccggtaccctgaaattaaagaagagctagaagagctggacaggatcactgagcaaacactttttgatctgtacaagtatagctccttcactacattagtggctggttctaggtcccggcgagatcttcggggcacgttgcctcacccactccagagattaagagtgcccccccccccccacggtgcgcgaagagctaggagcgttgctagcagtctccgtgacaacaatccgcaggttgactggaaagattggaaaatcggatttcagttgtgcaaccagaacaagtccgactgtttctaccagacttattctagtggcgttgacgcagtgagagaatggtaccgcttccattacataaatatactctctcggttacctgaaaccctgccttctctcgaggaagacactcttgggaattttatcttcgcctgccggttcaaccaggtctcctgcaaccaggctaattactcacactttcatcatcctatgtacggcaactgttacaccttcaacgacaagaataattcaaacttatggatgagctcaatgcctggaatcaacaatggcctttctctgatgctcagagctgagcaaaacgacttcatccccttactttctacggtcacaggggctagggtgatggtgcacggtcaagatgagcccgcatttatggacgatgggggtttcaacctacgtccgggcgtggagacgagtattagtatgaggaaggagaccctggatcggctgggtggagactacggagactgtaccaagaacgggagtgatgtgccagtggagaatctgtacccttctaaatatacccagcaggtctgtatccacagctgttttcaggagtctatgattaaagagtgcggttgtgcttacatcttctatccgaggccacagaacgtcgagtactgtgactaccgcaagcactcgtcgtggggctattgctattacaaactgcaggtcgatttcagttccgaccatttgggatgttttactaaatgcaggaaaccttgctctgttacaagttatcagctctctgctggatactcaagatggccctcagtcacttctcaggagtgggtgttccagatgttgtcccgacagaacaactatacagtgaacaataagaggaatggagtggccaaggtgaatattttcttcaaggaactcaactacaaaacaaactctgagtctccttccgtaacaatggtgactctgctaagtaatttgggctcccagtggagcctttggttcggcagctccgtgttaagcgtagtggaaatggcggagctggtcttcgatttactggttataatgttccttatgctcttgagaaggtttagatctcggtactggtctccagggagaggggggcgcggcgcgcaggaggtcgcttccaccctggccagtagcccccctagccatttttgtcctcatccaatgtcgctatcactgtcacaaccaggaccagccccctctcctgccctcaccgctcccccccccgcttacgcgaccctggggcctaggccctccccaggcggatccgctggcgcctcatcaagtacttgcccccttggggggccatag

SEQ ID NO: 15843 - DNA, 987 bp, synthetic construct
  misc_feature 1..987: note = Description of Artificial Sequence: Synthetic coding sequence
  source 1..987: mol_type = other DNA
atgggccttgaggagatagcaccttgtacttccaaacgcaaaacgcagtgtagatgtcagcctgggatgttctgcgccgcgtgggcgctggagtgtacccattgcgagcttctatccgattgtcctcctgggacagaagccgaattgaaggacgaggtgggcaagggaaataatcattgcgtcccctgcaaggccggccacttccaaaacacatcctcccctagtgctcgttgccaacctcataccagatgtgagaatcaggggcttgtcgaggcagcccctggaacagcacaatcggacaccacctgcaaaaatccgctcgagccccttccacccgagatgtcagggactatgctgatgctcgcagtgcttctgcctctagcgttcttcctcctgctggcaacggtgttttcatgtatctggaaatcacacccctctttatgcaggaagcttggaagtctgctgaaaagaaggccccaaggggaggggcctaacccagtggccgggagctgggagccccccaaagcccacccttatttccctgacctagtgcagccactgctgcccatctccggcgacgtgagtcctgtcagcaccggtcttccggccgcaccggtcctggaagctggggtgccccagcaacaaagccctctcgacttaacgcgagaacctcagcttgaacccggggaacaatctcaagtggcccatgggaccaatgggatccacgtcacaggcgggtcgatgacaattaccggcaacatatacatatacaacggaccagtgctgggtgggccgcctggtcccggagacctccccgccacaccggaaccaccgtaccctataccggaagagggcgacccagggccaccagggctctccacgccccatcaggaagacggcaaggcctggcacctggccgaaactgaacactgtggggcgactcccagcaatcgcggacctcgcaatcaattcattacacatgactag

SEQ ID NO: 15844 - DNA, 1725 bp, synthetic construct
  misc_feature 1..1725: note = Description of Artificial Sequence: Synthetic coding sequence
  source 1..1725: mol_type = other DNA
atggcgctggcaagaggcagtcggcaactgggagccctggtttggggtgcttgtctgtgtgtgttagtgcacggccaacaagcacaacccggccaaggctccgatcccgcgcgatggcgacagctgatccagtgggaaaacaacggacaggtgtatagtttactgaattctggatccgagtatgtgcccgctggcccccagcggtcagaatctagttcccgcgtactgttggccggggctccacaagctcaacagaggcgatcacatgggagtccccgcaggagacaggcaccatccctacccctgcccggtcgggtcggcagcgatacagtaaggggacaagccagacaccccttcggatttgggcaagtacctgacaattggcgcgaagttgccgtcggagacagcaccggcatggcccgcgcccgtacaagtgtgtcacaacagagacacggcggctctgcttcatccgtgtctgcgtcggccttcgcaagtacctaccggcagcagccatcatacccccagcagtttccatatccccaggcacctttcgttagccagtatgagaattatgacccagcttcccggacatacgaccagggcttcgtttactatcggcccgccggcggaggggttggagcaggggccgccgccgtagcctctgctggagttatatacccctaccagcctagagcccggtacgaagagtacggaggtggcgaggagctccccgaataccccccccaggggttttatcctgcgcctgaaagaccgtatgtaccgccgcccccacctccgcctgacgggttggataggagatactcccattctctctatagcgagggaacccccgggtttgagcaggcatatcctgatccagggccagaagccgcccaggctcacggaggtgatccgagattgggatggtacccaccatacgccaacccaccacctgaggcttacgggccgccaagagccctggagccaccttacctgcctgttcgcagcagcgacacccctccacctgggggagaacggaacggggctcagcaaggccgccttagtgttgggagtgtttacaggccaaaccaaaacgggaggggtctccctgatctggttcctgatccaaattatgtgcaggcctctacgtatgtgcagagagctcacctatactctctccgatgcgcggctgaggagaagtgcctagccagcaccgcctatgctccggaagcaactgactacgacgtgcgggtactgctgagatttcctcagagagtgaagaatcagggtacagccgattttctgccaaacagaccacgtcacacatgggagtggcatagctgtcaccagcattatcacagtatggacgagttcagccattacgacctccttgatgccgctactggaaaaaaggtcgccgaaggccacaaagcaagcttttgtcttgaagacagtacatgtgacttcggcaacctaaaacggtatgcttgcacctctcatacacagggccttagtcccggatgctacgacacctataacgccgacattgattgccagtggatagatatcaccgacgtccagcccggaaattacatcctgaaggtccatgtgaatcctaagtatatcgtcctcgaatcagattttacaaacaacgtcgtgcgttgtaacatccattacactgggcggtatgtcagcgccaccaactgtaagattgtgcaatcctag

SEQ ID NO: 15845 - DNA, 1311 bp, synthetic construct
  misc_feature 1..1311: note = Description of Artificial Sequence: Synthetic coding sequence
  source 1..1311: mol_type = other DNA
atggctagggctcgaacatcagtctcccagcagcggcacggcggaagcgcttcatccgtctctgcctcagcattcgcttccacctataggcagcagccatcttaccctcagcagttcccatacccacaagccccctttgtgagccagtatgaaaattacgaccctgcaagccgcacatatgaccagggttttgtgtattatcgccccgccgggggaggggtgggcgcaggagcagctgcagttgcctctgccggagtgatctacccatatcaaccacgcgcccgttacgaggaatatgggggaggcgaagaattacccgagtatcccccgcagggcttctaccccgctcccgaacggccctacgtacccccaccacctcccccacctgatggcctcgataggcggtacagccattccctgtacagtgaagggacacccgggttcgaacaggcctatccagaccccgggcctgaggccgcacaggcccacggcggtgacccgcgcttaggctggtatcctccatacgcaaacccacctcccgaggcttacgggccccctagagcgcttgagcctccctacctcccggtgcggagctccgataccccaccccccgggggggaacgtaacggggcgcagcagggcaggctctctgtgggcagtgtttaccgcccaaaccagaatgggcgcgggctccccgacctggtcccggatccgaactatgtgcaagcctccacctacgtgcagagagcgcacctgtactcactgagatgtgccgcggaggagaagtgcctcgcatccaccgcttatgctcctgaggctactgactatgatgtgcgggtgctcctccgcttcccgcagagggtgaagaatcaaggcactgctgattttctgccaaatcgaccacgacatacctgggagtggcactcatgtcaccagcactatcatagtatggacgagttctctcactatgacctgctggacgctgctactgggaaaaaagtggcagagggccacaaggcctcattttgccttgaagattccacctgcgacttcgggaatctgaaacgctacgcatgtacatcccatacccagggcctttcgcctggttgctatgacacatataacgcggacattgattgtcagtggatcgatatcaccgatgtccagcccggaaactacattctgaaggtgcatgtgaaccccaaatacattgttctggagtcggattttacaaacaacgtggtgcggtgcaatatccactataccggacggtacgtgagtgcaacaaattgcaagattgtgcagtcatag

SEQ ID NO: 15846 - DNA, 636 bp, synthetic construct
  misc_feature 1..636: note = Description of Artificial Sequence: Synthetic coding sequence
  source 1..636: mol_type = other DNA
atgaccacattaacacggcaggacctgaactttgggcaagtagtggccgacgtcctgtgtgaattcctggaagtggcagtgcacctgattctgtacgttcgcgaagtttacccggttggaatcttccaaaagcggaagaagtataatgttcctgtccagatgtcttgccatcccgaactcaatcagtatatacaagacactctccactgcgtcaagcctctcctggagaaaaacgacgtagagaaggtggttgtggtgattcttgacaaggagcatagacctgtagagaaattcgtgtttgagatcacccagcctcccctgttatctattagctccgacagcctgctgtcccatgtggagcaactcttgagggccttcatccttaaaatctctgtttgtgatgctgtgctagatcacaacccacccggttgtacattcacagttctggtccacaccagagaagccgccacccggaacatggagaaaatccaggttattaaagactttccttggatcttggccgatgagcaggatgtgcacatgcatgacccgcggctgatacccctcaagactatgaccagtgatatcttgaagatgcagctgtacgtcgaggaacgggctcataagggctcttag

SEQ ID NO: 15847 - DNA, 318 bp, synthetic construct
  misc_feature 1..318: note = Description of Artificial Sequence: Synthetic coding sequence
  source 1..318: mol_type = other DNA
atgactacgctgaccaggcaggacctgaattttgggcaggtcgttgccgacgtactgtgtgaatttctggaggttgctgtgcatcttattctttacgtcagggaggtctatccagtgggaattttccagaagcgcaagaagtataacgtcccagtccagatgagctgtcatcctgagcttaaccagtacatccaggacacgctgcactgcgtgaagcctttgttagagaaggttcgcgtccattgggctccgcaacctagtcaccccatgctaaccccggtccctgtatgcagccagagcaactccgggatgggatag

SEQ ID NO: 15848 - DNA, 531 bp, synthetic construct
  misc_feature 1..531: note = Description of Artificial Sequence: Synthetic coding sequence
  source 1..531: mol_type = other DNA
atgacaacccttacaaggcaggaccttaatttcggacaggttgtggctgatgtcctgtgcgagtttctagaagtagccgtgcaccttattctgtacgtccgcgaggtataccctgtggggatatttcagaagcggaaaaagtacaatgtgcctgttcagaacgatgtcgaaaaggtcgtagtcgtcatactagacaaggaacacagacctgtcgagaaattcgtattcgaaatcacacagcctccactgctttcaatcagctcagatagccttcttagccatgtagagcagctgcttagagctttcatactgaaaatttccgtgtgtgatgcagtcctggatcacaacccccctggtgtgagcaccccacaccccctcttcccctggcacttccatgggtatctgggcttagtgtgcgttccacgcagcatgttcggctgttcagaaactcacctgtttctgacactccgggtgcatctcctgtgggaagcatccctgatcgatagcacatggctcccttctccctactag

SEQ ID NO: 15849 - DNA, 636 bp, synthetic construct
  misc_feature 1..636: note = Description of Artificial Sequence: Synthetic coding sequence
  source 1..636: mol_type = other DNA
atgactactctaactcggcaggatcttaatttcggccaggtggtcgccgacgtcttgtgtgaattccttgaagtagcagtacacctgatactgtatgtgcgtgaggtctaccctgtcgggattttccagaaacgcaagaagtataatgtgcccgtacaaatgtcatgccaccctgagctgaatcagtatatacaggacacactccattgtgtgaaaccccttctggagaaaaacgatgtggagaaagtggtggttgtgattctagataaggagcaccgccccgtggagaaatttgtgttcgaaattacccagccgcctctgctgtccataagcagcgactccctcctatcacacgtggaacagctacttagagctttcattctcaagattagtgtttgcgacgcagtactagatcacaatcctcccggctgcacctttacagtcttagtccatacccgggaggctgccacaagaaatatggagaagatccaggtcattaaggatttcccatggatactggccgacgagcaggatgtgcacatgcatgatcctaggttgattcccctcaagacgatgaccagcgacatcctgaagatgcagctgtacgtcgaagaacgggcgcacaagggctcttag

SEQ ID NO: 15850 - DNA, 675 bp, synthetic construct
  misc_feature 1..675: note = Description of Artificial Sequence: Synthetic coding sequence
  source 1..675: mol_type = other DNA
atgacgacactcacacgccaggatctgaattttgggcaggtggtcgcggatgttttatgcgaatttctggaagtggccgtgcacctaatcctgtacgtcagagaagtgtaccccgtggggattttccagaagcgcaagaagtacaatgtgcccgtacaaatgagctgtcacccagaactgaatcaatatatccaagatactctgcactgcgtgaagcctctcctggagaaaaatgatgtagaaaaagtggtcgtggtaatcctggataaggagcacagaccggttgagaagttcgtcttcgagattacccagccgccgctgttgtccatacgatgggcagcccctgcacctcgtccgcttgcggggataagctcagacagcctcctaagccacgttgagcaactgctgagagcattcatcctgaaaatcagtgtctgtgatgccgtcctggaccataatccaccaggatgcaccttcacagtactggttcacacgcgcgaggccgccacacggaatatggagaaaattcaggtgattaaagatttcccgtggatcctcgccgatgagcaggacgttcatatgcacgatcctcggttgatacccctcaagacaatgacctctgacatcctaaaaatgcagttgtacgtggaggagagggcccataaagggtcctag

SEQ ID NO: 15851 - DNA, 675 bp, synthetic construct
  misc_feature 1..675: note = Description of Artificial Sequence: Synthetic coding sequence
  source 1..675: mol_type = other DNA
atgaccaccctcaccaggcaggaccttaactttgggcaggtggttgcagacgtgctatgcgagttcctggaagtggctgtccacctgatcctctacgtgagggaggtgtaccccgttggcatctttcagaaacgcaagaagtacaacgtgccggtgcagatgtcatgtcaccctgagctgaatcagtatatccaggacaccttacactgtgtgaagcccctactggaaaagaatgacgtcgaaaaggtggtggtcgtgatactagacaaagaacatcgcccggttgagaaatttgtctttgagataactcagcctccactgctcagcatcaggtgggcagcccctgccccaaggcccctcgctggcatatcctcagattcgctgctctcacacgtcgagcagctgcttagggcctttattctgaaaatctccgtgtgcgatgcagtactggatcacaatccaccgggctgcacatttaccgtcctggtccacactcgggaggccgccactagaaacatggaaaagatccaggtcataaaggacttcccctggatactggcagacgagcaggacgtgcacatgcatgacccacggctaattccactgaaaacaatgacaagcgacattcttaagatgcagctgtacgtggaggagcgggcacacaagggaagttag

SEQ ID NO: 15852 - DNA, 636 bp, synthetic construct
  misc_feature 1..636: note = Description of Artificial Sequence: Synthetic coding sequence
  source 1..636: mol_type = other DNA
atgacaacgctgacccgtcaggacctgaacttcgggcaggttgtcgctgacgtgttgtgtgagtttctggaggtggcagtccacttgattctgtatgtaagagaagtgtatccagtcgggattttccaaaagcgaaagaagtacaacgtcccagtacaaatgagctgccaccccgaactaaatcagtacattcaggacacactccattgcgtgaagcctctgctggagaagaacgatgtagaaaaagttgtcgtagtcattctcgacaaagagcaccggccagtggagaaatttgtgtttgaaatcactcagccccctcttttaagcatctcttccgattctctgctctcccacgtggaacaactactgcgggcctttatccttaagatttctgtgtgcgacgcggtactcgatcacaatccaccgggttgcacctttactgtactcgtgcataccagagaagctgctacccgcaacatggagaagatccaggtaatcaaagattttccttggatccttgctgacgaacaagatgtccacatgcatgaccctcgattaatcccgcttaaaaccatgacttccgacatcctgaagatgcaactgtatgtcgaggaacgcgcccacaagggtagttag

SEQ ID NO: 15853 - DNA, 597 bp, synthetic construct
  misc_feature 1..597: note = Description of Artificial Sequence: Synthetic coding sequence
  source 1..597: mol_type = other DNA
atgaccaccctgacaagacaagatttaaatttcggtcaagggcgcgaagccggtcctgccggcccaggggccggggctagcggaccagccggcttcttagagcgcgcaaccgggctgtgtccccccgccgtggtggccgacgtactctgtgaatttctggaggtagccgtgcacttgatcctatacgttcgagaagtgtatcccgtgggtatttttcagaaacggaaaaagtataatgtgcccgtccaaatgtcttgtcatccagaactgaaccaatatatccaagatacactgcactgcgtcaagcccctccttgagaagaacgacgtcgagaaggtggtggttgtgattctggacaaagaacaccgtcctgttgagaagttcgtctttgaaatcacccagccacccctgttgtcaattagctctgactcactgctgtctcacgtggagcagcttctgcgagcctttattctcaagatctccgtttgtgatgccgtcctggaccacaatcctcccggctgcacgttcaccgtgcttgttcacacaagagaggccgctacgcgcaacatggagaaaatccaggtaatcaaagtttag

SEQ ID NO: 15854 - DNA, 504 bp, synthetic construct
  misc_feature 1..504: note = Description of Artificial Sequence: Synthetic coding sequence
  source 1..504: mol_type = other DNA
atgacaacattaacccgtcaagatctgaacttcggccaggtggtggctgatgtgttatgcgaatttctggaggtcgctgtccacctgattttatatgtcagagaggtatatcccgtggggatattccagaagagaaagaagtacaacgtgccagtgcaaatgtcctgccatcctgaacttaaccagtatattcaggatactctgcactgcgtgaagccgctgttagagaagaacgatgtggagaaagtcgtggttgtgattttggataaggaacatcgacccgtcgaaaagttcgtgttcgagatcacacagccacccctactcagcatttcaagtgattccctgttatcacatgtggaacagctgcttcgtgcattcatcctgaaaatttcagtgtgcgatgctgttctggatcataacccacctggttgcacttttactgtgctggtacatactagggaggccgccacaaggaacatggagaagatacaggtaatcaaatag

SEQ ID NO: 15855 - DNA, 3159 bp, synthetic construct
  misc_feature 1..3159: note = Description of Artificial Sequence: Synthetic coding sequence
  source 1..3159: mol_type = other DNA
atggcaggaatggactctggcaatctaaagaccgcccggctgtggcgggatgccgctcttcgggctcgcaagctgcggagcaatctccgccaactgacgttgacagcagccggagcttgtcccggggccggagccgatgcgctggaatccccagcttctccacagcttgtacttccagccaatttaggagacatcgaggccctgaacctgggaaacaatgggctggaggaggtgcccgaaggcctggggtccgctctagggagcttaagggtcctggtgctcagacgcaatcgcttcgcgaggctcccccccgccgtagcagagctcgggcaccacctgacagagctagatgtgtctcacaacaggctgaccgccctgggtgccgaggtagtctctgctctgagagagttgcgtaaactcaatctcagccataatcaactgccagccctccctgcccagctaggggctctcgcccatcttgaggagctggatgtcagctttaaccggttggcacacttgccagatagcctctcttgcctctctcgtctcagaactctagacgtggaccataaccagctgactgctttcccccgccagttgttacagctcgtggcactggaagagctggacgtatcttctaatagactgcgggggcttccagaagatatctctgcgctgcgtgcacttaaaatcctatggctgagcggagccgagctgggcacactgccagctgggttctgcgagctcgccagccttgagtcactgatgctggacaataatgggcttcaggcactgccagctcagttctcttgcctgcagcggttgaaaatgttgaatctcagttctaacctgttcgaggaatttcctgctgcactactcccactggccggcctggaagaactgtacctaagtagaaaccagctgacttccgtcccctctctgattagtggcctcggcaggctgctgaccctgtggctagacaacaacaggattagatatcttcccgattccattgtggaactgacgggtctggaagagctggtcctccagggcaatcagatcgctgtcctccccgaccatttcgggcagctaagccgggtagggctgtggaagatcaaagacaatcctctgattcagcccccctatgaggtttgtatgaagggcatcccatacatcgctgcctaccagaaagagttggcgcacagccagcctgcagtgcaacctagactgaaattgctcctcatgggacataaggcagctgggaaaactctactgagacattgtctgaccgaggagagagtagaaggatgccctggaggaggggataaagagaaatgttatcccccttcaccaccccccgtttcaaagggaattgaggtgacctcgtggacagcagacgcaagcagaggtctgcgcttcattgtgtacgatctggccggtgacgagagctatgaagtaattcagcctttcttcctctccccaggagcattgtatgtgttagtcgtgaatttggcgacgtacgagccaaggcatttcccaacgacagtcggctccttcttacaccgagtgggggcccgcgtccctcatgctgtggtgtgcattgtaggcacccatgctgatttatgcggggagcgggaactagaagagaagtgcctcgacatccacaggcagatagctttgcaggaaaaacacgacgcagaaggcctctcacggctagccaaggtagttgatgaagccctggcccgcgactttgagctgcgctccgcttcgccccatgcagcctattacggagtgtccgataagaatcttcgcagacgaaaggcccattttcaatacctgctcaatcataggctacagatcctgtcaccagtcctgcccgtgagctgccgcgatcctcgacacttgcgacggcttagggacaaactgttaagcgtggcagagcatagagagattttcccaaatctccatcgcgtattgccacgatcctggcaggtgctggaagagttacattttcagcccccccaggcacagagattatggctgagctggtgggacagcgcaaggcttggcctgcaagctggactgaccgaggatcgactgcagagtgcccttagttatttgcatgaaagtggaaaactgctctacttcgaagattctccagccctgaaagagcacgtattccataatctcacccgcttgatcgatatcttaaatgtttttttccaacgtgatccgagccttctcctgcataagttgctcttgggcacaagcggggaaggcaaggccgagggcgaaagctccccaccaatggctcgctccaccccatcgcaagagctactgcgagcgacgcagctgcatcaatacgtcgagggcttcctgttgcacggactcctaccggcgcacgtaattcgactgctgctgaaacctcacgtgcaggctcaacaggatctgcagcttttgctcgaactcctggagaaaatgggactgtgctactgcctcaataaacccaaggggaagccgctaaatggctctacagcctggtacaagttcccctgctatgtacaaaatgaggtgccgcatgcagaggcatggattaacggcacgaacctggccggccagagctttgtcgccgaacaactccaaatcgagtactcattcccattcacctttcctctgggattgtttgccagatattccgtgcagatcaactcccatgtcgtccaccggagtgacgggaaatttcagatattcgcttatagggggaaggtgcctgtggtagtgagctaccggccagctagaggcgtacttcagcccgacacactctccatcgcaagccacgcaagtctacccaacatctggactgcttggcaggccatcaccccattagtagaggagcttaatgtgcttcttcaagaatggccagggctgcattacaccgtgcacatcttatgcagcaaatgtctgaagagaggttcccccaacccgcacgccttccccggcgagctgctgtcacagccccgccccgagggcgtggccgagattatctgtccaaaaaatgggtcagagcgagtgaatgtcgcacttgtgtatccaccaacccccactgtgatctctccctgttccaagaaaaacgtgggtgaaaagcaccggaaccagtag

SEQ ID NO: 15856 - DNA, 549 bp, synthetic construct
  misc_feature 1..549: note = Description of Artificial Sequence: Synthetic coding sequence
  source 1..549: mol_type = other DNA
atgggtaaagggcgcttcgacgaaaaggagaatgttagcaactgtattcaattgaaaacttcagtgatcaagggaatcaaaaaccaactgatcgaacagtttcccggtattgagccttggctgaaccaaattatgccgaaaaaagatcctgttaaaatcgtgcgctgtcacgaacacatcgaaattttaaccgtgaacggcgagcttctgtttttccggcaacgggagggaccattttaccctacacttcgtctacttcacaaatatcctttcattctgccacaccagcaagtagataagggagctatcaagttcgtgttatcgggagccaatatcatgtgtcctggtttaaccagtccaggcgccaagctgtacccagcagctgtggacactattgtggcaatcatggcggaaggaaagcaacatgcattgtgcgtgggggttatgaaaatgagtgcggaggacatcgagaaggttaataagggcattgggatcgagaatattcactacctaaatgacgggttatggcatatgaaaacatacaaatag

SEQ ID NO: 15857 - DNA, 546 bp, synthetic construct
  misc_feature 1..546: note = Description of Artificial Sequence: Synthetic coding sequence
  source 1..546: mol_type = other DNA
atgttcaaaaaatttgatgaaaaggaaaatgtgtctaattgtatacaactgaaaaccagtgtgataaagggcatcaagaaccagttaatcgagcagtttcccggaattgagccctggcttaaccagattatgcctaaaaaggatcccgtgaaaatagtccgctgccatgaacatattgagattttgactgtgaatggagagcttctcttcttcaggcagagagaggggcccttctacccaaccctgcgactcttgcacaagtacccgttcattttgccacatcagcaggttgacaaaggcgccatcaaattcgtgctgtcaggggcgaatattatgtgcccggggctcacatcgcctggggctaagctctatcctgctgccgtggacacgatcgtcgccattatggccgaaggcaaacagcatgccttgtgcgtcggtgtgatgaagatgtcagctgaggacattgaaaaggttaataaagggatcgggatcgagaatatccactatctcaacgatggactgtggcacatgaaaacatataagtag

SEQ ID NO: 15858 - DNA, 2226 bp, synthetic construct
  misc_feature 1..2226: note = Description of Artificial Sequence: Synthetic coding sequence
  source 1..2226: mol_type = other DNA
atggcactctttaccccttggaaattatcaagtcagaaattaggctttttcctcgtgacattcggatttatctgggggatgatgttactgcatttcactattcaacagaggacacagccagagtccagctccatgttgagagagcagattctagacttgtctaagcggtacataaaggccctcgccgaggagaaccgaaacgtggtcgacggcccttatgcaggcgtcatgacagcctacgacctcaaaaaaacactggcggttctcttggataatatcctccagagaattgggaagttagagtcaaaagtagataatctggtggtcaatggtacaggtacaaactccaccaactccaccacagcagtaccttcactggtggcacttgagaaaattaacgtggcagacattatcaacggtgcacaggagaagtgtgtccttcctccgatggatggttatccccactgcgaggggaagatcaagtggatgaaggatatgtggcgcagcgacccctgctacgccgactatggggtagacggctccacttgctctttctttatttacctgtcagaggtcgagaattggtgtcctcatctcccttggagagccaagaacccctatgaagaagctgatcataattcgctcgccgaaattaggactgatttcaacattctgtacagtatgatgaagaagcatgaggaattcaggtggatgagactgagaataagacgaatggccgacgcttggattcaggcaatcaaatcactggccgagaaacagaacttggaaaaacggaaaaggaaaaaggtgctggtgcatctcgggctgctgaccaaggaatcaggatttaagatcgccgagaccgcattctctggaggaccactaggggagcttgtgcaatggtccgaccttatcacatccctctacttgcttggccacgacatcagaattagcgccagtctggccgagttgaaggagatcatgaagaaggttgtgggaaacagaagtggctgcccaacggtcggcgaccggattgtagaactgatctacatcgatattgtgggcttagcccagtttaaaaagacattaggaccttcctgggtccattatcagtgtatgctgcgagttctggatagcttcggcaccgaaccagaattcaatcatgccaactacgcccaaagcaaaggacacaagacaccatggggcaagtggaatctgaaccctcagcagttttacactatgttccctcatacacctgataacagctttctggggttcgtcgttgagcagcatttgaactcatccgacatccaccacattaatgagatcaaacgtcaaaaccagtctttggtgtatgggaaggtggatagcttttggaagaataagaagatctacctggatataatccacacctacatggaagtgcacgctacggtgtacgggagcagcacaaaaaacatcccatcttacgtgaagaatcatggcatcctaagtggcagggatcttcagtttcttctgcgcgagacaaagctgttcgttggtcttggatttccctatgaaggaccagctccccttgaggccattgccaacggatgtgcttttctgaatccaaaatttaatcccccgaaaagcagtaagaatacagactttttcatcgggaagcccactctgcgggaactgacaagccagcatccatatgcagaggtgtttatagggcgcccgcacgtgtggaccgtggatctgaacaaccaggaagaagtggaagatgcagtgaaggcaattttgaatcaaaagatcgaaccctacatgccttatgaattcacatgtgagggcatgttgcagcggattaacgcgtttatagagaaacaggatttctgtcatggacaagtgatgtggccacccctcagcgctctgcaggttaaactggcggagcccggccagagctgcaagcaagtctgccaggagtctcagcttatctgtgagccatctttcttccagcacttgaataaagacaaggatatgttgaagtacaaagtaacatgtcagtccagcgagcttgctaaggacatcctggtgccatcattcgaccctaaaaataaacactgtgttttccagggagatctgctactgttttcctgcgcgggagcccatcctcgccatcagcgtgtctgcccctgccgagattttattaaaggccaggtcgcactgtgtaaagattgcttgtag

SEQ ID NO: 15859 - DNA, 2226 bp, synthetic construct
  misc_feature 1..2226: note = Description of Artificial Sequence: Synthetic coding sequence
  source 1..2226: mol_type = other DNA
atggctctgttcacaccatggaagttatcgagtcagaaactgggattcttcctagtcactttcggcttcatatggggtatgatgctgctccattttaccattcaacagcgtacacagcctgaaagctcttctatgctgagggaacaaattcttgatctgagtaagcggtacattaaggcgctcgccgaagagaaccgcaacgttgtcgacggaccctacgcgggcgtgatgactgcctacgacctgaaaaaaacccttgcggttctactcgacaacatcctgcaaagaatcgggaagctcgagagtaaagtggataatttggtggtgaacggaaccgggaccaatagtaccaattccacaaccgccgttccatctttggttgctctggagaagataaatgttgctgatataattaacggcgcccaagagaaatgcgtcctccccccaatggatgggtacccacactgtgaaggaaaaattaaatggatgaaggacatgtggcggtcggatccgtgttacgctgattacggcgtggatgggagcacctgcagcttctttatctacctctcagaggtggagaactggtgcccacacctgccttggagagcgaaaaatccttatgaggaggctgatcataacagtctggctgagataaggaccgattttaacatcctgtatagcatgatgaagaagcacgaagagttcaggtggatgagattaaggataaggaggatggcagatgcttggattcaggctatcaagtccttggccgaaaagcagaatttagagaagaggaaaaggaagaaagttcttgtccacctggggctactgacaaaagaatcaggatttaaaatagccgaaactgctttctcagggggcccattgggcgagctggttcagtggtccgatctgatcacatccctctatttgctggggcatgatatccgtatcagcgccagcctcgcagaactcaaagagattatgaagaaggtggttggaaacaggagtggctgccccaccgtcggggacaggatcgtggagctgatttatattgacatcgtcggtctcgcgcagtttaagaaaacattaggaccatcctgggtgcactaccagtgcatgctcagagttctagacagctttggtactgagccggagttcaatcatgccaattatgctcaaagtaagggccacaagaccccctgggggaagtggaacttaaatcctcaacagttctataccatgttcccacatacccctgacaattccttcctaggcttcgtggtggagcagcacttaaatagtagtgatatccaccacataaatgagattaaacggcagaatcaatctctcgtgtacggtaaggtggactcgttctggaagaacaagaaaatctatctggacataattcacacgtacatggaagtgcatgctacagtttacggcagctcgaccaaaaatatccccagctacgtgaagaatcatgggatcctgtcaggccgcgatctccagttccttctgcgggaaacaaagcttttcgtgggcttaggctttccttatgaaggccccgctccacttgaagctatcgccaatggctgtgctttcttgaaccctaaattcaacccaccaaaaagctccaaaaataccgacttttttataggtaagccaaccctgcgcgaactgactagccagcacccttacgctgaggttttcataggacgccctcacgtgtggaccgttgacctcaataatcaggaggaagtagaagacgctgtgaaagcgattttgaatcagaagatcgagccatatatgccgtacgagtttacttgcgaagggatgttgcagcgaataaacgcatttattgagaaacaggatttctgtcacggccaggttatgtggcctccactgtccgcccttcaagtcaagcttgcagagcccggccaaagttgcaaacaggtgtgccaggaatctcagctgatctgcgaaccctcattcttccagcacctgaacaaagataaagacatgctaaaatacaaagtaacctgtcagtcctcagaactcgctaaagatattcttgttccatcctttgacccaaaaaataagcattgcgtgttccaaggcgatctgttgctgttcagctgtgctggcgctcatccacggcaccagcgggtgtgcccatgccgagacttcatcaaaggccaggtcgccctgtgcaaggattgtctgtag

SEQ ID NO: 15860 - DNA, 1410 bp, synthetic construct
  misc_feature 1..1410: note = Description of Artificial Sequence: Synthetic coding sequence
  source 1..1410: mol_type = other DNA
atgcatagctttccgcccctcctcctccttctgttttggggggtggttagtcatagcttccccgccactttagaaactcaagaacaagatgttgacctagttcaaaagtacctcgagaagtactacaatctcaagaacgatggcagacaagtggagaaacgtagaaatagtggccccgtggtagaaaagctcaaacagatgcaggaattctttggacttaaggtgaccggcaaaccagacgccgagaccctcaaagttatgaagcagcctaggtgcggcgtgccagacgtcgcacagtttgtcctgactgaaggcaatcctaggtgggagcaaacacatctaacctaccgcattgagaattacacccccgatctgcccagggcagatgttgatcacgctatcgagaaggcattccaactctggagtaatgtcaccccgttgaccttcacgaaggttagcgaggggcaggcggatattatgatctcttttgtacgcggggatcaccgagacaacagtcccttcgatggaccaggaggcaacctagctcacgcatttcagccgggaccaggcatcggcggagacgcccactttgatgaggatgaacgttggaccaataattttcgggaatataacctgcaccgcgtggccgcacatgagctgggccactccctgggcctctcgcacagtactgatatcggtgcgctgatgtacccaagctatacgttctctggtgacgtccagctggctcaagatgacatcgacggcatccaggccatctatggacgctcccagaaccccgtgcaacccattgggccacagactcccaaggcttgtgactcgaagcttaccttcgatgccattactacaatcagaggagaggtcatgttctttaaggacaggttctatatgcgcaccaaccccttttatccagaagtcgagttgaatttcatcagcgttttctggcctcagctcccaaatgggttagaggccgcctatgaatttgctgacagggatgaggtgcgcttttttaagggtaataagtactgggcagtgcaaggtcagaatgtgctgcatggctaccctaaggatatctattccagcttcggcttccctaggaccgtcaaacatatcgatgccgctctgagcgaggaaaatactggcaaaacatatttctttgtcgcgaataagtactggcggtacgacgaatataagcgtagcatggaccctggctatcccaaaatgattgcgcacgacttccccggaattggtcacaaagttgacgccgtgttcatgaaggatgggttcttctatttcttccacggcacacgccagtacaaatttgacccaaagaccaagcgtatactgactctgcaaaaagccaattcatggttcaattgtcggaagaattag

SEQ ID NO: 15861 - DNA, 1431 bp, synthetic construct
  misc_feature 1..1431: note = Description of Artificial Sequence: Synthetic coding sequence
  source 1..1431: mol_type = other DNA
atgatgcacctggcattcctcgttctcctctgtctcccagtctgcagcgcttatcccttatctggtgctgcaaaagaggaggactctaacaaggacctcgcgcagcagtatctcgagaagtactataacctggaaaaagatgttaagcagtttcggcgcaaagacagcaaccttatcgtcaagaagatacagggaatgcagaagttcttaggattagaagtgaccggtaagctggacaccgacactctggaagtaatgcggaagccgagatgcggggtgcccgacgtgggacatttcagctcctttccaggtatgcccaaatggaggaagacgcatcttacataccgtatcgtcaactacacacccgatcttccccgcgatgccgttgactccgccattgagaaggcactgaaggtatgggaagaggtgacgcctctgacatttagtcgactctacgagggagaggcagatatcatgattagttttgccgtgaaagaacatggggatttttattcatttgacggtcctgggcactctctcgcccatgcctatccccccggacctggcctctatggcgatatccacttcgatgacgacgagaagtggacagaggacgcatccggaacgaatctgttcctggtcgcagcccatgagctgggacacagcctgggcctattccattctgcgaacactgaggcactgatgtaccctctgtataacagcttcacagaactggcccagttccgattgtcccaggacgacgtgaacggcatccagtcattatacgggcccccccccgcttctaccgaggagccattggtccctacgaaatctgtacccagcggatcagagatgccagcgaagtgcgaccccgcccttagcttcgatgccatcagtactcttagaggagagtatctattctttaaggatcgatacttctggcggaggtctcactggaaccctgaacctgaatttcacttaatctcagcgttctggccctcactgcctagttatctggacgcagcctatgaggttaattcccgagacacagtttttatatttaagggaaatgagttctgggccattagaggcaacgaggtacaggccggctacccgcgcggcattcacactctgggatttcctccgactatcaggaagatcgatgccgcagtgagcgataaggagaagaaaaagacttacttctttgccgccgataagtattggcgcttcgacgaaaatagccagagtatggagcaggggttccccaggctcatcgctgacgattttcccggagtagaacctaaggtagacgcagttctacaggcctttggcttcttttatttcttctcaggatcttcgcagttcgagttcgatcctaatgccaggatggtaactcatatcctgaaatccaactcatggctgcattgctag

SEQ ID NO: 15862 - DNA, 930 bp, synthetic construct
  misc_feature 1..930: note = Description of Artificial Sequence: Synthetic coding sequence
  source 1..930: mol_type = other DNA
atgccgcgtcactgttcggcagctggctgctgcacaagagatacgcgcgagacacgcaatcgcggaatcagttttcaccgtctcccgaagaaggacaatccacggagaggtttatggctggctaactgtcaacgcctcgaccctagtgggcagggactgtgggaccccgctagcgagtatatctacttctgtagtaagcacttcgaggaggactgttttgagctcgtgggcattagcggctatcaccgcctgaaggaaggagctgtgcccaccattttcgagtctttctctaaactgagacggacgaccaagaccaagggtcatagttatcccccaggccccgcggaggtgtcaaggctccggcggtgtcgcaagcgctgctccgagggcaggggacccactacacccttcagtccccctcctcctgccgacgtcacgtgctttcctgtggaggaggcctctgcccctgcaactctcccagcaagcccggctggacgactggagccaggcttgagtagtccgttctcggacctcttaggacccctgggggcccaggcagacgaggctggttgtagcgcccagccatccccagagagacagccaagccctttggagccccgccccgtgagtcctagtgcatatatgctgagactgccgccacccgctggcgcttatatccagaatgagcattcttaccaggtgggcagcgctctgctgtggaaacgccgggccgaggcagcacttgatgccctggataaagcccaacggcagctgcaggcctgcaagagaagagaacaacgactccgattgcgtctcaccaagctccagcaagaacgggctagggagaaaagagcacaggcggatgcaagacagacactaaaggagcatgtacaggacttcgcaatgcagctgagtagtagtatggcttag

SEQ ID NO: 15863 - DNA, 1416 bp, synthetic construct
  misc_feature 1..1416: note = Description of Artificial Sequence: Synthetic coding sequence
  source 1..1416: mol_type = other DNA
atgcatcccggcgtgttggccgcctttttgtttctgtcttggacacactgcagggccctaccactgcccagcggcggggatgaagacgatctcagcgaagaggatctacagtttgccgagagataccttcggagctactatcacccaactaatcttgcaggcatcctgaaggagaacgcagcctcaagcatgacagaaagactacgcgaaatgcagagtttttttggcttggaggttaccggcaagcttgatgacaacaccctggatgtgatgaagaaacccaggtgcggagtgcccgatgtcggtgaatataacgtcttccctaggaccttaaaatggagtaagatgaatctgacctaccgcatcgtcaactataccccggacatgacccattccgaggtagagaaggcattcaaaaaagcttttaaagtatggtctgacgtaactccactcaatttcacaagactgcatgatggcattgccgacatcatgataagctttggaatcaaggagcatggtgacttttaccccttcgatggtccctcaggtctcttggcacatgcgtttcccccggggccaaactatggtggagatgcacatttcgatgacgatgagacgtggaccagcagcagtaaaggttacaaccttttccttgtggccgcccatgaattcggacattctttgggcctggatcactctaaagaccctggagcccttatgtttcctatctacacctacaccgggaaatcgcacttcatgctacctgacgacgacgtgcaggggattcagagcctctatggtcctggggatgaggaccccaatcccaaacacccaaaaacacccgacaagtgtgaccctagtctgtcgctagacgccataacctccctgcgcggcgagaccatgattttcaaagataggtttttctggcggctacaccctcagcaggtagacgcagaactgtttttaaccaagtccttctggcccgagttgcctaaccgtatagacgctgcctacgaacacccctcacatgatctcattttcatctttcgagggcgcaagttttgggccctcaacggttatgacatactcgagggatatccgaaaaagatttcagaactcggccttccaaaggaggtcaagaaaatatccgccgccgtgcactttgaagatacaggtaagactctgctattctcgggcaaccaagtttggaggtacgatgatacgaaccacattatggacaaggattaccccaggctgatcgaggaagacttccctggtatcggcgataaagtggacgccgtctacgagaagaacgggtacatctattttttcaacggacctatccagtttgaatattctatctggtccaatcgcatcgtgcgtgtgatgcctgctaattcgattctttggtgttag

SEQ ID NO: 15864 - DNA, 1470 bp, synthetic construct
  misc_feature 1..1470: note = Description of Artificial Sequence: Synthetic coding sequence
  source 1..1470: mol_type = other DNA
atgcaccctggtgtgttggctgcattcctgtttctgtcctggacacattgccgggctttgcccctgccatctggtggcgacgaagacgacctaagcgaagaggacctccaattcgcagagcgctacctacgatcatactaccatcccactaatctggcggggattttgaaggaaaacgctgcaagtagtatgacggaacgcctgcgtgaaatgcagtccttttttggtcttgaagtcaccggaaagcttgacgacaacacactggatgtcatgaagaaaccaagatgcggagtcccagatgtgggggagtataatgtgttccctaggacactgaaatggtcaaagatgaacctgacataccgaatcgttaactatacgccggacatgacccattccgaggtcgagaaagccttcaagaaggccttcaaagtctggagcgacgttactccacttaactttactaggttgcacgacggcatcgccgacatcatgatctctttcggcatcaaggagcacggcgacttttatccctttgacggccctagtggccttctggcgcacgcttttcctcctggtcccaactacggcggagacgcacattttgacgacgatgaaacatggacatcctcgagtaaagggtacaacctgtttctggtggcagcacacgaattcggccacagcttgggacttgaccattctaaggatcctggtgccctgatgttcccaatctacacctataccgggaaatcccactttatgctgcctgatgatgatgtacagggcatccagagcctatacggcccaggtgatgaagacccaaatccgaagcaccccaagacccccgacaagtgcgacccttcactgtcgctggatgctatcacatctctgcggggtgagaccatgatattcaaagatcggttcttctggaggctgcatccccagcaagtagacgcagagttgttccttaccaaatccttctggcccgagttgccaaatcgcatcgacgccgcctatgagcatccgtcacacgacctgatttttatatttagggggcgcaagttttgggccttgaacgggtacgacatcctggaaggctaccctaaaaagatctcagagctgggcctgcccaaagaggttaagaagatctccgccgccgttcacttcgaagacacagggaagacactcctcttttctggcaaccaagtatggcggtacgatgataccaatcacattatggataaagactatcctcgtctgatcgaggaagattttccaggaataggcgacaaggtggatgcggtctacgagaagaacgagtctcattctgtcacccaagccggggtacactgtcggaatctgtccagtctccaaccacccccacccgggttcaaacggttttcttgcctgagcctttggtcctcatgggattacagactatatttgtttttccaacggacacatacggtctag

SEQ ID NO: 15865 - DNA, 1152 bp, synthetic construct
  misc_feature 1..1152: note = Description of Artificial Sequence: Synthetic coding sequence
  source 1..1152: mol_type = other DNA
atgcatccgggcgttctcgccgcctttttgtttctttcctggacccactgtagggcactgccactgccatctgggggtgacgaggatgacctgtcagaagaggatttgcaatttgcggaacgatatctgaggagttactatcaccctacaaacctcgccgggatactgaaggaaaatgcagcatctagtatgaccgagcggttgagagagatgcagtctttctttgggctggaggtgacaggaaagcttgacgacaacactctcgatgtgatgaagaaaccaagatgcggggtgccagacgtgggggagtacaacgtgtttccaagaacgctcaagtggagtaaaatgaatctgacatacaggatagtgaactacaccccagatatgactcacagtgaggtagagaaggcctttaagaaagctttcaaggtgtggtcggacgttacccccctcaacttcacaaggctacacgatggcatcgccgatatcatgatctcatttggcataaaagaacacggcgacttttatccgttcgacggcccgtccggtttgttggcccacgcgttcccccctggacctaattacggcggcgatgcccatttcgatgacgatgaaacctggacgagctcctcgaaaggatataatctgtttcttgtagccgcccatgagttcggccactcattgggcctggaccactccaaggatcccggcgccctgatgttccccatttacacctataccggaaagtcccattttatgctccccgacgacgacgtccagggaattcagtctctgtatggacctggggatgaagaccctaacccaaaacacccaaagacccctgacaagtgtgatccaagtttatctcttgatgcgatcacatctctgcggggggaaacaatgatttttaaggacaggttcttctggcggttgcatcctcagcaagtagatgcagagctgtttttaacaaagtctttctggccggagcttcctaaccgtatcgacgcagcctacgagcatccttctcatgacttgattttcatttttcggggccggaaattttgggccttaaacggctatgatattttagaaggctatcccaagaaaattagtgagcttgggctacccaaggaggtgaacaagcttcagtag

SEQ ID NO: 15866 - DNA, 1749 bp, synthetic construct
  misc_feature 1..1749: note = Description of Artificial Sequence: Synthetic coding sequence
  source 1..1749: mol_type = other DNA
atgtcgcccgccccaagaccaccccgctgtttacttctgcctctgcttactttgggaaccgccctggcctctcttggatcggcgcagtcaagttccttctctcccgaagcttggctgcaacagtatggatacttaccacccggagaccttagaacacacactcaacggagtccacaaagcctgagcgcagccattgccgcaatgcagaagttctatggcctgcaggtgacgggcaaggctgatgctgataccatgaaagctatgaggcgccctaggtgtggcgttcccgataagtttggagcagagattaaggcgaatgtgcgccggaagcgatatgcgatccaaggcttaaagtggcagcacaatgaaattacgttctgtattcagaattatactcctaaggttggggagtatgccacttatgaggccatccgtaaagcctttcgggtctgggagtcggccacccccctgaggttccgagaggtcccgtacgcctacatcagggaaggtcacgagaaacaagccgatattatgatattctttgctgagggcttccacggagattcgacaccctttgacggggagggagggttcttagcgcatgcttactttcccggccccaacatcggcggggatacccacttcgattctgccgaaccttggaccgtgagaaacgaggatctcaatgggaacgacatctttcttgtggcggttcatgagttggggcacgctctgggactggagcactcctctgatccgagcgccatcatggcaccgttttaccaatggatggatactgaaaattttgtgttgcctgatgatgacagacggggtattcagcagttgtacggtggagaatctggttttcccaccaagatgcccccccaaccccgtactacctcgcgccccagcgtccctgacaaaccaaaaaatccgacctacggaccaaacatttgcgatggcaattttgataccgtagctatgttgcggggcgagatgttcgtcttcaaagagagatggttctggagagtcagaaacaaccaagtgatggatggctacccgatgcccatcggccagttctggcgggggctcccggcgtccattaacacagcgtatgagaggaaagatggtaaattcgtgttttttaaaggcgacaaacattgggtgttcgacgaagcaagtctggagcccggctaccctaagcacatcaaggaactggggcgaggcctcccgacagataagatagatgccgccctgttttggatgcctaatgggaagacgtacttcttccgcggcaataaatactacaggtttaatgaggaactgcgggcagtggattcagagtatcccaaaaatatcaaggtctgggaaggcatccccgaatctccacgcggctcattcatgggctcagacgaggtcttcacttatttttacaaggggaacaagtactggaagttcaacaaccaaaagttgaaggtcgagccgggatatcctaaatctgccctccgggattggatggggtgccccagcggtggccggccagatgaggggaccgaggaggaaaccgaggttataattatagaggtggacgaagaaggaggtggggctgtgtcagcagccgccgtggtgcttcccgttctccttctgctgctggtgctcgccgttggacttgctgtgtttttcttccgcaggcacggaacgcctagacgcctcttgtactgccagcgaagtctgctcgataaagtgtag

SEQ ID NO: 15867 - DNA, 2052 bp, synthetic construct
  misc_feature 1..2052: note = Description of Artificial Sequence: Synthetic coding sequence
  source 1..2052: mol_type = other DNA
atggcgtcggggcctgggtcgcaggagagagaagggctcttaattgtgaagttagaggaagactgtgcatggagccaagagctaccgcctcctgacccaggccccagtcccgaggcttctcacctgaggttccgccgtttccgcttccaggaagcagcgggaccaagagaagctctgagccggctccaagagctatgccacgggtggcttagacccgaaatgcgaacaaaagaacagattttggaattgctggtccttgagcaattcctgacgattctaccccaagaaatccaatccagggttcaggagttgcacccagagagcggagaagaggcggtgacattggtcgaggatatgcaacgagagcttggtagactgcgccagcaagtgaccaatcatggcaggggaactgaagtccttctggaggaaccactcccactggagaccgcccgggagtccccctcatttaagctggagccaatggaaacagagaggtcccctggtccaagactgcaggagctcctcggcccctctccccagcgcgatccgcaagccgttaaggagcgagcactttccgcgccctggttgagcctgtttcccccagagggcaacatggaggataaggagatgacaggaccacagcttccagaaagtctcgaagatgtcgctatgtatatctcacaggaagaatggggtcatcaagatccgtccaaacgggctctcagtagagatacagtgcaggaatcttacgagaatgtggacagcctcgaatcccacattcccagccaggaagttccaggcacacaggtgggtcaaggcggtaaactttgggatccttccgtgcaatcctgtaaagaaggcctgagcccacgtggcccagcccccggtgaggaaaagttcgaaaacctggagggggtcccatccgtgtgctccgagaacattcatccgcaggttttgctgccggatcaggcccgtggcgaagtgccttggagtcctgagctggggcgacctcatgatagatctcagggagattgggcgccaccacctgagggaggcatggagcaggctctggcaggcgccagctccgggcgagagctcgggaggccgaaggagcttcagcccaaaaagttgcatctttgtccactctgtggcaagaacttctcgaacaactccaatctgattcgacatcagaggatccatgctgcggagcgtctctgtatgggcgtggactgtacggaaattttcggtgggaaccctcgcttcctctctttgcatcgggcacacctgggagaagaggctcacaagtgtctcgaatgtggtaagtgcttttcccagaacacacacctcacgcggcaccaacgcacacacaccggcgagaaaccctaccagtgtaatatctgcggcaaatgtttctcgtgcaattcaaatctccatcgacatcaacggacccacactggagaaaagccctataagtgccccgagtgtggcgagatctttgcccattcctcaaacctactcagacatcagagaattcacaccggggaaagaccttataaatgcccggagtgtggcaagtccttctccaggtcaagccatcttgtgatacacgaacgaacgcacgaaagggaaagactctacccgttctcagagtgtggagaggctgtgagcgatagcactccgttcctcacgaaccacggagctcataaagccgagaagaagttgttcgagtgccttacatgcggaaaaagcttcagacaggggatgcaccttacacggcaccaacgtacacatacgggggagaagccttataaatgcaccctgtgtggcgagaatttctcacacagatctaatctgattcggcaccaaagaattcatactggtgagaagccatacacatgtcacgagtgtggggatagttttagccactcgtcaaaccgaattaggcatctgcgaacgcacaccggagagcgtccgtacaagtgctccgaatgcggcgaatcgttctcaagaagcagcagactcatgagtcaccaaagaacacacactggctag

SEQ ID NO: 15868 - DNA, 1755 bp, synthetic construct
  misc_feature 1..1755: note = Description of Artificial Sequence: Synthetic coding sequence
  source 1..1755: mol_type = other DNA
atgcagaaatttttcggcctgccacagaccggcgaccttgatcagaatactatagagaccatgaggaagccgcggtgcgggaatcccgacgtcgctaactataatttctttcctcggaagccaaaatgggacaaaaatcagataacatatcggatcatcgggtatactccagacttggacccagaaaccgtggacgatgctttcgctcgtgcctttcaagtctggagcgacgtgaccccactgagattctccaggatccacgacggggaggctgatatcatgattaactttggacgctgggaacatggcgatgggtacccctttgacgggaaggatgggctcctcgcgcatgcattcgcccccggcactggggtcggcggagacagccacttcgatgatgacgaactctggaccctcggtgaggggcaggtggtacgcgtcaagtacggaaatgccgacggcgagtactgcaagttcccatttctgtttaacggtaaagagtataattcctgcacggacaccgggagatccgacggctttctatggtgctccaccacctacaattttgaaaaagatggaaagtacggcttctgccctcatgaagctctctttacaatgggtggaaatgctgaggggcagccatgtaagtttccatttcgattccagggcacatcatatgacagctgtacaactgagggaaggactgacggctataggtggtgtggaaccacggaagactatgatagagataagaaatacggattttgcccagaaaccgccatgagcaccgtgggtggaaacagcgagggggcaccgtgcgtgttccccttcacctttctgggaaacaaatatgaatcttgcaccagtgcagggaggtcagatggcaagatgtggtgtgctaccacggcaaactacgacgatgatagaaagtggggattctgccctgatcagggttactctttattcttggttgcggcacacgaattcggccatgccatggggctggaacactcccaggacccaggtgctctgatggcaccaatctacacgtacactaaaaacttccggctgtcccaggatgatattaagggaatccaggaactgtatggggcttctcctgatatcgacttgggcacagggcccactcctacactgggtccagtgactcccgagatttgtaagcaggacatcgtctttgatggaattgcgcagataagaggggagattttcttctttaaggacagattcatctggaggacagtgactccacgagataagcccatgggcccactccttgtggctaccttttggcccgagttgccagaaaaaattgacgctgtgtacgaggcaccacaggaagagaaagcagtgttttttgctgggaacgagtattggatttattctgcgtctactcttgagaggggttaccccaagcccctgacaagtctgggcctacccccagacgttcagcgggtagatgccgcctttaactggagcaagaataagaaaacatacattttcgccggtgataagttttggagatataacgaggtaaagaagaaaatggatccaggcttcccaaagctgatcgccgatgcatggaacgcaattcccgataatctggatgctgtggtggacttgcaagggggaggacacagctatttttttaagggcgcatattacctgaagttagagaaccagagcctgaaatctgtcaaattcggaagcattaagtccgattggctcgggtgctag

SEQ ID NO: 15869 - DNA, 1434 bp, synthetic construct
  misc_feature 1..1434: note = Description of Artificial Sequence: Synthetic coding sequence
  source 1..1434: mol_type = other DNA
atgaagagccttcctatcttactcttgctatgtgtagcggtttgcagtgcctacccactggacggcgctgcccggggggaagacacctctatgaaccttgtgcaaaagtacctcgagaattactacgatttaaaaaaggatgtgaagcagttcgtgaggcgtaaagatagcggaccggtggtcaagaagatccgtgaaatgcagaaattcctcgggctggaagtaactggaaagctcgattcggacactctcgaagtgatgaggaagccacgctgcggggtgcccgatgttgggcactttagaacctttccgggtatcccaaaatggaggaagacacatctcacctatcggattgttaattacacacctgacctgcccaaagatgccgtggactccgcagttgaaaaggccctgaaggtgtgggaggaggttactcctttaaccttctcgcggctgtacgagggtgaggctgatattatgatcagtttcgctgtgagggagcacggagatttttatcctttcgacggccccggtaacgttctggcgcacgcatacgccccaggtcctgggatcaatggagacgcccacttcgatgatgacgaacagtggaccaaagacactacagggaccaatctgttcctggtcgcagctcacgaaatagggcactcactgggcttgtttcacagcgctaatacagaggcactgatgtacccgctttaccattcactgacagatctgacgagatttagactcagtcaggatgacataaacgggatacagtctctttatggtcccccacccgacagccctgagaccccgctcgtaccaacagagcccgtaccaccagagcctggaacacccgcaaactgcgatcctgcgctgtctttcgatgctgtgtctactctacgcggcgagatactaatttttaaagatagacacttctggcggaagtctttgaggaaattagaaccagagctccacctcatttctagcttttggccttcacttccctcgggcgtagacgctgcctatgaggtcacatcaaaagatctcgtgttcattttcaagggaaaccagttttgggccatcagaggaaatgaggtaagggctggttaccctcgcgggattcacacactcggttttcccccgaccgtaagaaagatagatgcagctatcagtgacaaggaaaaaaataaaacctacttctttgtggaggataagtactggaggttcgatgaaaagcggaatagtatggaacctgggttcccaaagcagattgccgaggattttccaggcattgactctaagattgacgcagtcttcgaagagtttggattcttttacttttttactgggtcttcccaactggagttcgaccctaacgcaaagaaggtcacacacactttaaagagcaactcttggttgaactgttag

SEQ ID NO: 15870 - DNA, 804 bp, synthetic construct
  misc_feature 1..804: note = Description of Artificial Sequence: Synthetic coding sequence
  source 1..804: mol_type = other DNA
atgcgcctcactgttctttgtgcagtatgcctgctcccgggctccctggcattacccctccctcaggaggccggtggcatgagtgagcttcaatgggagcaagcccaggactaccttaaaagattttatctatatgactcagagaccaagaatgctaattctcttgaagctaaacttaaggagatgcagaaatttttcgggctgccgattaccggcatgctgaactcccgggtgatcgagatcatgcaaaagccacgatgtggagtgccggacgttgccgagtactccttattccccaatagcccaaagtggacatctaaggtggtgacttatcgcattgtctcatacacacgcgatctccctcacatcaccgtggataggttggtctctaaagcactgaacatgtgggggaaggagattccattacatttccgcaaggtggtgtgggggaccgctgatatcatgatcggcttcgcacgaggagcgcatggagattcttatccctttgacgggccagggaacacactggctcatgccttcgcacccggaacaggcctggggggcgacgctcactttgacgaagatgagcgatggacggacggcagcagcctcgggataaattttctgtacgcagccactcatgagttgggtcatagcctgggcatgggccacagctcggaccccaatgccgtgatgtaccccacttacggcaacggagacccccagaacttcaagctgtcccaggatgatataaagggaatccagaagctttacggcaaaaggtccaactctcgtaagaagtag

SEQ ID NO: 15871 - DNA, 2124 bp, synthetic construct
  misc_feature 1..2124: note = Description of Artificial Sequence: Synthetic coding sequence
  source 1..2124: mol_type = other DNA
atgagtctgtggcagccccttgtgttagtgctgctcgttctcggctgttgcttcgccgcccctaggcagcgccagtctaccctcgtgctgttcccaggggacctacggactaacctgaccgaccgacagctcgccgaggagtacctgtatcgctatgggtatacaagagtggcagaaatgagaggcgagagcaagagcctgggtccggccctgcttctcctccaaaagcagctgtccttgccggagaccggcgagttggactccgccacgttaaaagccatgaggacccccaggtgcggcgtgccggacctggggcggttccagaccttcgaaggagaccttaagtggcatcaccacaacattacttactggattcagaactatagtgaagaccttccacgagccgtgattgacgatgcgttcgctagagctttcgcactatggtccgccgtgactccactgacattcacacgcgtgtacagcagggatgcggacattgtgattcaattcggcgttgctgagcatggggacggctacccctttgacggcaaagacgggctcctcgcccacgcttttccaccaggaccaggcatccagggagatgcccattttgacgatgatgagctctggtcactgggaaagggcgtcgtcgtgccaacccgattcggcaacgccgatggcgcagcgtgtcactttccatttattttcgagggacggtcttactccgcatgtacgactgacgggaggagcgatggcctcccttggtgcagcacaacagccaattacgacactgacgacaggttcggcttttgcccctcagaacggctatatacacaggatgggaacgctgatggcaagccgtgtcagtttcccttcatctttcagggccagagttacagcgcctgtacgacagacggtaggagtgacggatataggtggtgcgctaccactgctaattatgacagggacaaactcttcggattttgtcctacgcgcgccgattcaactgtcatgggtggaaatagcgcgggggagctttgtgttttcccttttacatttctgggcaaggaatattctacctgcacaagcgagggtaggggggatggccgcttatggtgcgcgacaacttctaactttgacagcgacaagaagtggggattttgccccgatcaaggttactctctctttttggtcgcggctcatgagtttggccatgccctcgggctcgatcactcgtccgtccctgaggccctcatgtaccctatgtataggttcactgaggggccccctctgcacaaggatgacgttaatggcatcagacacctgtacggaccccgccctgagcccgagccgcggcctcctacaaccaccacacctcaacctacagcccctcctactgtctgcccgacagggcccccaaccgtgcacccatcagaaaggccaaccgctggaccaaccggccccccctccgccggacccacaggaccccccacagcgggacctagtaccgccactaccgttcctttgtcacccgttgacgacgcctgtaatgtaaacattttcgacgctatcgccgaaatcggcaatcagctgtatcttttcaaagatggtaagtactggcggttctctgaaggaagaggttcgaggccacaaggacccttcctgattgctgataaatggccagctttgccgcggaagttggacagtgtgtttgaagagcggctgagcaagaagttgttttttttcagcggccgccaggtctgggtttacactggcgccagtgtgctgggtccgcgccgtttagacaagctcggcctgggcgcggatgtggcccaggtcacaggagcgctccgatcaggcagaggcaagatgctcctcttttcagggaggagattgtggcgcttcgatgtgaaagcccagatggtggatccgagatccgcaagtgaggtggaccgaatgttccccggagttcccctcgacacccacgacgtgtttcaatatcgggagaaagcatacttttgtcaagaccggttctattggcgggtatcctcacgttcagagctgaaccaggttgatcaggttggttacgtaacatacgacatactgcaatgtcccgaggattag

SEQ ID NO: 15872 - DNA, 834 bp, synthetic construct
  misc_feature 1..834: note = Description of Artificial Sequence: Synthetic coding sequence
  source 1..834: mol_type = other DNA
atgggaggcaattccgcaggggagctctgtgtcttccccttcacattcctcggtaaagagtactctaattttgactccgataaaaagtggggtttctgccccgatcagggctactccctgttcctggtggccgcacatgaattcggtcatgccctaggtcttgaccattcaagcgtgccagaggccctgatgtacccaatgtatcggtttactgagggtcctcctctgcacaaagacgacgttaatgggatccgtcatctttatggcccacgtcccgagcctgaaccccgcccacccacaacaactacaccccagcctacggcccccccaacggtttgcccaaccggcccgcccacagtacatccacccttcctcatagccgacaaatggcccgcactgccacgcaaattagactcagtgtttgaagagaggttatccaagaaactgtttttcttctctgggcgccaagtgtgggtctatacaggcgcttcagttctcggacccagaagactcgacaagctaggactgggtgctgacgtagcccaagtgacaggtgccctgcggtcagggaggggaaaaatgctgctcttttctggaagaagactttggcggttcgatgtgaaggcccagatggttgaccccaggtccgcatctgaagtggatcgcatgtttccgggtgtgcctttggacacacacgatgtctttcagtatcgagaaaaagcttacttttgtcaggatagattttattggcgcgtgagcagtcggagtgagttgaaccaagtggatcaggtgggctacgtcacttacgacatcctgcagtgtcccgaggattag

SEQ ID NO: 15873 - DNA, 324 bp, synthetic construct
  misc_feature 1..324: note = Description of Artificial Sequence: Synthetic coding sequence
  source 1..324: mol_type = other DNA
atggctggggaggatgtgggagctccgcccgaccacctctgggtgcaccaggaggggatctatagagatgaataccagagaacatgggttgctgtggtggaagaggaaacaagcttcctccgggctcgagtgcaacagattcaggtgcctctgggggacgccgctcgcccgtctcacctgcttacgtcccagttgccactaatgtggcagctgtaccccgaagagcgctacatggacaataattctagactttggcaaatccagcatcatttaatggttaggggagtccaggagctgcttctgaagctgttaccagatgattag

SEQ ID NO: 15874 - DNA, 324 bp, synthetic construct
  misc_feature 1..324: note = Description of Artificial Sequence: Synthetic coding sequence
  source 1..324: mol_type = other DNA
atggccggcgaggacgtgggagcgcctccggaccacttgtgggtgcaccaggaaggcatttacagagacgagtaccagaggacatgggtcgcggtggtcgaggaggagacttcattcctacgcgccagggtgcagcagatacaggtgcctctgggcgacgctgccagacccagccatttgctgaccagccagttgccacttatgtggcagctatacccggaagaaagatacatggataacaattctaggctgtggcagatccagcatcaccttatggtgaggggggtgcaagagctgttgctcaagctgctgccggacgattag

SEQ ID NO: 15875 - DNA, 1329 bp, synthetic construct
  misc_feature 1..1329: note = Description of Artificial Sequence: Synthetic coding sequence
  source 1..1329: mol_type = other DNA
atggtccgatctcgacagatgtgtaacaccaacatgagcgttcccacagacggagcggtgaccactagccagatcccagcatcagagcaagagaccctggtacgccccaagccgctcttgctcaaactccttaagagcgtcggcgcccaaaaggacacctacactatgaaggaggtgctcttttacttagggcagtacatcatgacaaagcgactctatgacgaaaagcagcaacatatcgtatactgttctaatgatctgcttggcgatttattcggcgtgccctccttctccgtcaaggaacatcgaaagatttatacaatgatttaccgcaaccttgttgtggtgaaccagcaggaggagaacagcgacgaattgtctggagaacgccaaaggaagcgccataagagcgatagtatttctctgtccttcgacgaaagtcttgccctatgtgttattcgcgagatttgctgtgaaagatcgtccagcagcgagtcaactggtacccccagcaaccccgacctggacgccggagtctctgaacactcgggtgattggcttgaccaggactcagtgagcgatcagttctctgttgagttcgaggtggagtccctggattccgaggactatagtctgtccgaagagggccaggaactgtccgatgaagatgacgaggtctatcaagtaaccgtttatcaggcgggcgaaagcgatactgacagctttgaggaggatcccgaaatcagtctggctgactattggaagtgtacatcatgcaacgaaatgaaccctcctctcccttctcactgcaacaggtgttgggctctcagagaaaactggctacccgaagataagggcaaagataaaggggagatctctgagaaagcaaaactcgaaaacagtacccaagctgaggagggattcgatgtccctgactgcaagaaaacaattgtcaacgacagtcgagaaagctgcgtggaagaaaacgatgacaaaatcacacaggcctcacaaagccaggagtccgaggattatagccagccgtctaccagttcctctataatctacagtagccaagaggacgtgaaggaattcgagagggaggagactcaggacaaagaggaatccgtcgagagctccttgcctctcaacgcaatcgaaccatgtgtcatttgtcaggggcggcctaaaaatgggtgcatcgtccacggtaaaacaggacatcttatggcatgcttcacatgtgctaaaaagctgaagaagcgcaacaagccatgccccgtctgccggcagccaatccagatgattgtcttgacttactttccttag

SEQ ID NO: 15876 - DNA, 1311 bp, synthetic construct
  misc_feature 1..1311: note = Description of Artificial Sequence: Synthetic coding sequence
  source 1..1311: mol_type = other DNA
atgtgtaatacaaacatgtccgtaccgacagacggcgcagttaccacctctcaaatccctgcgagtgagcaagaaacactggttagacccaagccccttctactgaagctcctaaagtccgttggagctcagaaggacacgtataccatgaaggaagtgctcttttacctcggccagtacattatgacaaagagactgtacgatgaaaagcagcagcacatcgtttactgttccaacgatctactgggcgaccttttcggtgtgcccagctttagcgtgaaagagcaccgtaagatctatactatgatatatcgtaatttagtggtcgtgaaccaacaggaagagaactccgatgagttatcgggagaacggcaaagaaaacggcacaagagtgacagcattagcctgagcttcgacgaatccctcgccctatgtgtgatccgcgagatctgttgcgaaaggtccagttcctccgagtccacgggcacacccagtaaccctgacctcgatgctggagtttcagagcacagcggcgactggctcgaccaggactccgtgtccgatcagttcagcgtggaattcgaggttgaatctctagatagtgaagattacagtctgtctgaagaaggtcaggaactttccgacgaggatgacgaggtttaccaggtgaccgtgtatcaagccggcgagagtgacactgattctttcgaggaggaccctgagatatctctcgcggactattggaaatgcacttcctgtaacgaaatgaacccccccctgccttcccactgtaataggtgctgggcactgagagaaaactggctgccagaggacaagggcaaggacaagggggaaatcagtgagaaggccaaactggaaaacagcacccaggccgaagaaggatttgatgtgccagattgtaagaaaacgatcgtgaacgattcaagggaaagttgtgtggaggaaaatgacgacaaaatcacacaggcttctcagagccaggagagcgaagattatagccagccatccaccagctcttctattatctacagctcgcaggaggatgtgaaggaattcgaacgcgaagagacacaggataaggaggagtcggtggaaagcagcctgccactgaacgctatcgagccatgcgtcatctgtcaaggaagaccgaagaatggatgcatagtgcacggaaagacaggccacctcatggcatgttttacatgcgctaagaagctgaagaaacgaaataaaccatgcccagtttgccgacagcctattcaaatgattgttctcacctactttccctag

SEQ ID NO: 15877 - DNA, 966 bp, synthetic construct
  misc_feature 1..966: note = Description of Artificial Sequence: Synthetic coding sequence
  source 1..966: mol_type = other DNA
atgtgtaacactaatatgtcagtgcccactgacggtgctgtcactacctcccagatcccagcatcagaacaggagacattggtacggcccaagcccctgctgcttaagttgttgaaaagcgttggtgcacagaaggacacttacaccatgaaggaggatctcgatgctggtgtgagcgaacatagcggagattggctggatcaggattcagtctcagaccagttttcggtggaatttgaagtagagagtctggacagcgaagattatagcctctccgaggaaggtcaggagctgtcagatgaggacgacgaagtttaccaggtaaccgtctaccaagctggtgagagcgatacagatagtttcgaagaagaccctgagatctcactggccgattactggaagtgtacatcttgcaacgagatgaatcctcctttaccgtcgcattgcaatagatgctgggctctgcgggaaaattggctgccggaagataagggtaaagacaagggagaaatttctgagaaagcgaaacttgagaatagcactcaggccgaagagggattcgatgttcctgactgtaaaaaaaccattgttaacgactcacgggagagttgtgtggaagaaaatgacgacaaaattacacaggccagtcagagccaggagagtgaagactacagtcaaccttcgacctcttccagcattatttactcatcccaggaggacgtcaaggaattcgaacgagaggaaactcaggacaaagaggagtccgttgagtcgagcctgccactgaacgcaattgagccttgcgtaatatgccaggggcgacccaagaatggatgcattgtccatggcaagacagggcacctcatggcctgctttacttgtgccaaaaagctgaagaaaagaaacaaaccctgtcccgtgtgtaggcagcctatccagatgattgtcctcacgtattttccctag

SEQ ID NO: 15878 - DNA, 1359 bp, synthetic construct
  misc_feature 1..1359: note = Description of Artificial Sequence: Synthetic coding sequence
  source 1..1359: mol_type = other DNA
atggttcgaagtagacagatgtgcaataccaatatgtctgtcccgactgatggggcagtaactacgtcccagatacccgctagtgagcaggagactctggttcggccgaaacccctgttgttgaagctgttgaaatcagtcggagcccaaaaggacacatatacaatgaaggaaaaaatctataccatgatttataggaatttggtggttgttaatcagcaagaatcttccgactccggtacttccgtgagtgagaaccggtgccacctcgaggggggctccgatcagaaggatttggtccaagagctacaagaggaaaaaccctcctcctcccacctcgtttcgcgaccttctacctcgagccgaagaagagctatctcggagactgaggagaactcagatgaactgtccggtgagagacagcggaagaggcacaaatcggattcaatttctctcagtttcgacgagtcactagctctgtgcgtcattcgggaaatatgttgtgaaagatcttcttctagtgagtctaccggcacgccttccaacccagaccttgatgctggagtgtccgaacacagtggggactggctggaccaggattcagtaagcgaccagtttagtgtggagtttgaagtcgaatcactggattctgaagattattctttaagcgaagaaggtcaggagctctctgatgaagacgatgaagtgtatcaggtcactgtgtaccaggctggtgaaagtgatacagacagctttgaagaggaccccgagatcagtctggccgactattggaaatgtacaagctgcaacgagatgaatccccctttaccttcgcactgtaatcggtgctgggcactgcgcgaaaattggctcccagaggataaagggaaggacaaaggagagatctcagagaaggctaagcttgagaacagcacacaagctgaagagggctttgatgtgcctgactgcaagaagaccatagtgaacgattcgcgcgagtcatgcgtcgaagagaacgacgacaaaatcacccaggcgtcacaaagccaggaatctgaggattacagccagcccagcacatctagtagcattatctattcctcccaggaagatgtgaaagagtttgagagggaagaaacccaggacaaggaagagagtgtcgagtctagcctccctctgaatgccatcgagccatgcgtgatctgtcagggcaggcctaaaaatggatgtattgtgcatggtaaaactggccaccttatggcctgtttcacctgtgctaagaagctgaagaaaagaaataagccttgccctgtgtgtcgccagccaattcagatgatagtgttaacatactttccttag

SEQ ID NO: 15879 - DNA, 771 bp, synthetic construct
  misc_feature 1..771: note = Description of Artificial Sequence: Synthetic coding sequence
  source 1..771: mol_type = other DNA
atgtgtaataccaacatgtcagtgccaacagacggggcggtgaccaccagtcaaatccccgcttcagagcaagagactctcgtgaggccaaaacccctcctactgaagctgctaaagagcgtcggtgcccagaaagatacatacactatgaaagaggtgctgttctatctgggccagtacattatgaccaaacgactttacgacgagaaacagcagcatatcgtatactgttcaaacgatctgttgggagatctctttggagttccgagcttctctgtgaaggaacaccgcaaaatctatactatgatttaccgaaatctcgtagtggtaaatcagcaggagagttccgatagtggcacctccgtttcggagaataggtgtcatctcgaaggtggaagcgatcagaaggacctggtgcaagagctccaggaggaaaagccctcctccagccatcttgtgtctcgcccttccaccagtagcaggaggcgggctatatccgagaccgaagagaactctgatgagctcagtggcgagcgacaaagaaagcgacataagagcgatagcatttctctttccttcgacgagagtctcgcgctctgtgtgattcgggaaatatgctgcgagcgatcttcgagttctgaaagcaccggaactccctcgaaccccgatttgttgcttggggtgtaccaagtaactgtgtaccaagccggagagtcagacacggacagtttcgaggaggatcccgaaattagcttggcacattacctctag

SEQ ID NO: 15880 - DNA, 798 bp, synthetic construct
  misc_feature 1..798: note = Description of Artificial Sequence: Synthetic coding sequence
  source 1..798: mol_type = other DNA
atgtcggttccaacagacggtgctgtgaccacttcacagattcccgcctctgagcaagaaaccctcgacctagatgcaggtgttagcgagcattcaggcgattggctggatcaggatagtgtgtcggatcagttctccgtggaatttgaagttgagtccttggatagcgaagattacagtttgtccgaagaggggcaagagttaagcgatgaagatgacgaagactactggaaatgcacaagctgcaacgagatgaacccccccctgccttctcattgtaatcgatgctgggcactaagagaaaactggcttccagaggataaaggcaaggataaaggggaaattagcgaaaaagctaaattggaaaattcgacgcaagcggaggaagggtttgatgttccagactgcaagaagacgatcgtgaacgattcaagagagagttgcgttgaggagaatgacgacaagatcacccaagcctctcagagccaggagagtgaagactactcccagccttctactagcagtagtatcatatactcttctcaggaggatgtaaaggagtttgagcgcgaggaaactcaagataaagaagagtctgttgaatcctcactgccactgaatgctatcgaaccatgtgtgatttgccaggggcggccaaagaacggatgcatagtgcatggcaagactggtcacttgatggcctgctttacgtgtgccaaaaaattgaagaaacgaaacaaaccctgtccggtttgtcggcagccgattcagatgatcgtcctgacatattttccctag

SEQ ID NO: 15881 - DNA, 1401 bp, synthetic construct
  misc_feature 1..1401: note = Description of Artificial Sequence: Synthetic coding sequence
  source 1..1401: mol_type = other DNA
atgtgcaatacaaatatgtccgtaccgacggacggagcagtcaccacaagccagattcctgcatctgagcaggaaaccctggtgttgttttatctgggccaatacattatgacaaagcgactgtatgatgagaagcaacagcatattgtttattgttctaatgaccttctaggggatctatttggagtgccctcattctccgtcaaagagcacagaaaaatctataccatgatttataggaatttggttgtcgttaaccagcaggaaagctcagacagtgggacctcagtgagcgaaaaccgttgtcacctcgaaggcggttctgaccagaaggatctggtgcaggagctgcaggaggaaaagccaagctcaagccatctagtctcacgtccttcaacttctagcaggcgtagggcgattagtgagactgaggaaaatagcgatgagctatcaggagagcgccagagaaaaagacacaaatccgattcaatatcactgtcttttgatgagtctctggcactgtgtgtcatccgggaaatatgctgcgagcggtcatcctcgagtgagagcacagggaccccttccaacccagatctcgatgccggcgtgagcgaacactccggcgattggctggaccaggatagcgtgagcgaccagttcagtgttgaattcgaggtagagtccctcgatagcgaggattactccctgtcagaagagggacaggagctgagtgacgaggacgacgaagtgtatcaagttactgtctatcaggcaggcgagtccgataccgactcctttgaggaggacccggagatttccttggccgactactggaagtgtactagctgcaatgagatgaacccgcctctgcctagccattgtaacagatgttgggctcttagagaaaactggctgcctgaggataagggaaaggacaagggagaaatttccgagaaagcaaagcttgaaaactctactcaggccgaggaaggattcgacgttcccgattgtaaaaagacaatagtgaacgactcacgagaaagttgcgtggaggagaacgacgataaaatcacacaggccagccagagtcaggagagcgaagattattctcagccttctactagttcttctatcatctactcctcacaggaagacgtgaaagagttcgaaagagaggagacgcaagataaggaagagagcgtagaaagctcactgcccctgaatgctatcgagccttgtgtcatttgtcagggaagacctaagaacggatgcatcgtgcacgggaagacagggcatctgatggcttgctttacatgcgccaagaaactgaagaaacgtaataagccttgcccagtctgccgccagccaattcaaatgattgtccttacatacttcccctag

SEQ ID NO: 15882 - DNA, 966 bp, synthetic construct
  misc_feature 1..966: note = Description of Artificial Sequence: Synthetic coding sequence
  source 1..966: mol_type = other DNA
atgtgcaatacaaatatgtccgtgcccaccgacggcgccgttaccacgtcacagatccctgcctccgaacaggaaaccctggttcgaccaaagccattactcttgaaactgcttaaatccgttggtgcacagaaagacacctacaccatgaaggaagacctggatgctggtgttagtgaacactctggggattggttagatcaggattccgtctccgaccagtttagcgtcgagtttgaagtcgagagcttggactccgaggactactctctgtcagaagagggacaggaactctcagacgaagatgatgaggtttaccaggtcactgtgtatcaggccggtgaatcagataccgatagcttcgaggaggacccagagatcagtttggccgattattggaaatgtactagctgcaatgagatgaacccacctttaccctcacactgcaatcggtgttgggcgctgcgggagaattggcttcccgaagataaaggtaaggacaaaggcgagatcagcgagaaggcaaagctggagaactctacccaggctgaggaggggttcgacgtccccgactgcaagaagaccattgtaaacgactccagagagtcctgcgtcgaagagaatgatgacaagataacacaagcttctcagtctcaggaatccgaagactactcccagccttcaacgtcctcttccatcatctactcatctcaggaggacgtaaaagagttcgagcgtgaggagacacaggacaaggaggagagcgtggagtccagcctgccccttaacgccatcgaaccatgtgtgatctgccaaggccgaccaaagaatggctgcatcgtgcatgggaaaacgggtcacctgatggcctgctttacttgtgctaagaagctgaagaaaaggaacaagccctgtcccgtttgcaggcagcctatccagatgatagtgcttacctactttccatag

SEQ ID NO: 15883 - DNA, 480 bp, synthetic construct
  misc_feature 1..480: note = Description of Artificial Sequence: Synthetic coding sequence
  source 1..480: mol_type = other DNA
atgtgcaacactaatatgtccgtgcctacagacggagctgtaactacctcccaaatcccagcctcagaacaggagacgttggtcaggcctaaacccctgctcctgaagttgctaaagtccgtgggtgctcagaaggacacctatacgatgaaagaagatcttgacgccggcgtgtccgagcacagcggcgactggctggatcaagattcagtgtccgatcagttcagtgtagaatttgaagtcgagagcttagattcagaggattactccctttccgaagagggccaggagctgagcgacgaagatgacgaagtttatcaggtcactgtgtaccaggcaggggagtctgacacagatagcttcgaggaggatccagaaatttctctggcagattattggaaatgcctgaaaaaacgcaacaagccatgcccagtctgcagacagcccatacaaatgatcgtgctcacttacttcccctag

SEQ ID NO: 15884 - DNA, 891 bp, synthetic construct
  misc_feature 1..891: note = Description of Artificial Sequence: Synthetic coding sequence
  source 1..891: mol_type = other DNA
atgtgcaataccaatatgagtgtgcctactgacggagctgtgacaaccagccagatcccagccagcgagcaggaaacattagacttagatgcaggagtgagcgagcacagcggtgactggctggaccaggactccgtgagtgaccagttctctgttgaatttgaggtggagtccctggatagcgaagattatagtctaagtgaggagggacaggagctgtctgatgaagacgacgaggtgtaccaggtgaccgtttatcaggcgggcgagagtgatacggattctttcgaggaagaccctgaaataagtctggcggactattggaaatgcacctcatgtaacgaaatgaatccgcccctgccaagtcactgcaatcgatgttgggccttgcgtgagaactggcttccagaggataaaggtaaggacaaaggcgagatctctgagaaagctaagctggaaaactcaacgcaggccgaggaaggatttgatgtgcctgactgcaaaaagactatcgtcaacgattcaagggaaagctgcgtagaggagaacgacgataagataacccaggcctcccaaagtcaagaatcagaggattacagccaacccagcacaagttcgtcaatcatttactcatcccaggaggatgtgaaggagttcgagcgagaagagacccaagataaagaggagagtgtggaaagctctctgccactgaatgcaattgaaccctgcgttatttgccagggaaggccaaaaaatgggtgcatcgtccacggcaagactggccacctgatggcctgtttcacttgcgcgaagaagttgaaaaaaaggaacaagccatgcccagtgtgtaggcagcccatccagatgatcgtactgacttatttcccttag

SEQ ID NO: 15885 - DNA, 732 bp, synthetic construct
  misc_feature 1..732: note = Description of Artificial Sequence: Synthetic coding sequence
  source 1..732: mol_type = other DNA
atgtgcaacaccaatatgagtgttccaacagacggcgccgtaacgacaagccagattccggctagtgagcaggaaacattggttcgacccaagccccttttgctgaagctgcttaaaagcgtcggggctcagaaagatacatataccatgaaagaagactactggaaatgtacctcctgtaatgagatgaatcctcccttgccaagccactgcaaccgatgttgggctcttcgcgagaactggctcccagaggacaagggtaaagataagggcgagatcagcgagaaggccaagctcgagaactcaactcaggctgaagaggggtttgacgttcctgactgcaagaagacgattgtgaacgattccagggaatcatgcgtagaggagaatgatgacaagattacccaggcttctcagagccaggagtctgaagattactctcaaccgagtacgagtagctcaataatttactcatcacaggaggacgttaaggagtttgagagggaggagactcaggataaagaggagagcgtggagtccagccttcccttgaacgccatagagccttgcgtcatctgtcagggcagaccaaaaaatggttgtattgtacatggcaaaacggggcatctcatggcttgcttcacctgcgcaaagaagcttaagaaacgcaataaaccctgcccagtgtgtcgccagcctattcagatgatagtgctgacctacttcccttag

SEQ ID NO: 15886 - DNA, 657 bp, synthetic construct
  misc_feature 1..657: note = Description of Artificial Sequence: Synthetic coding sequence
  source 1..657: mol_type = other DNA
atgtgtaacactaacatgtcagttccaaccgatggcgccgtgactactagccaaattccagcttcagagcaggaaacactcgactactggaagtgcacgagctgtaatgagatgaatcccccactgccttctcactgcaaccgctgctgggctctgagagagaactggctccctgaggacaagggtaaggacaagggtgaaatctctgagaaggccaagctggagaacagtacacaggcagaagaaggctttgacgttccagactgtaagaaaactatagtcaacgactctcgggagtcctgtgttgaagagaatgacgataagataacacaggcaagccagtcgcaggagagtgaggactactcacagccaagtactagctcaagcattatctatagcagtcaggaggatgtcaaggaattcgaaagggaggaaacacaggataaggaggaaagcgtggaaagttcactccccttgaatgctatagaaccttgtgtgatctgtcagggcaggcccaaaaatggatgcattgtgcacgggaaaaccgggcacttgatggcctgttttacttgcgccaaaaagctgaagaaacgcaataaaccctgcccagtgtgccggcagcctatccagatgattgtgctaacgtatttcccctag

SEQ ID NO: 15887 - DNA, 657 bp, synthetic construct
  misc_feature 1..657: note = Description of Artificial Sequence: Synthetic coding sequence
  source 1..657: mol_type = other DNA
atgtgtaacactaacatgagtgtccctacagatggcgcggttaccacatctcagatacccgcctccgaacaagaaacacttgactactggaaatgcacatcatgtaacgaaatgaacccacctttaccaagtcactgcaaccgatgctgggccctgagagagaactggcttcccgaggataaaggcaaggataagggcgaaatctccgaaaaagctaagctggagaattctactcaagccgaagagggcttcgacgtgccagattgcaagaagaccatcgtgaatgacagtcgagagtcatgtgttgaggaaaacgacgacaagattacacaagcgtctcagtcacaggagtctgaagattatagtcagccctccacctcgagttccataatttactcaagccaggaggatgtgaaggagttcgagcgcgaggagactcaggacaaggaggaaagcgtggagtctagcctgccactgaatgcaatcgagccttgcgtcatatgtcagggaagacctaagaacgggtgcattgtgcacggaaaaaccggacacttgatggcctgctttacctgcgccaagaaactgaagaaaaggaataagccttgtccagtgtgcaggcagccgattcagatgatagtgctcacatatttcccctag

SEQ ID NO: 15888 - DNA, 771 bp, synthetic construct
  misc_feature 1..771: note = Description of Artificial Sequence: Synthetic coding sequence
  source 1..771: mol_type = other DNA
atgtgcaatactaacatgtcagtgcccaccgacggggccgtaaccacctctcagataccagctagtgaacaggagacgctggtgcgcccaaaaccactgttactgaaactgttaaaatctgtcggtgctcagaaggacacttacaccatgaaggaagtgttattctatctgggtcagtacataatgacaaagagactctacgacgagaagcagcaacatatcgtctattgcagcaacgacctgttaggagacctgttcggcgtgcccagtttttctgtgaaggagcatcgaaaaatctacactatgatctaccgcaatcttgtcgtggtgaatcaacaggagtcttccgactctgggacatcagttagcgagaaccgttgccacctcgagggcggttctgaccaaaaagacctcgtgcaggagctgcaggaggagaagccgagctcttctcatttagtgtcacgcccctctacatcatcaagaagacgtgccatcagtgaaaccgaagaaaattcggatgagctatccggggaacgccagaggaaaagacataaatccgatagcatctcactctcctttgacgagtctctggctctatgcgtaattcgtgaaatctgctgtgagagaagctccagttccgagagcacaggaacaccatctaaccctgatctggacgctggcgtgtatcaagtgacggtttaccaagccggcgaatctgacacagacagcttcgaagaggaccctgagattagtttagccgattattggtag

SEQ ID NO: 15889 - DNA, 813 bp, synthetic construct
  misc_feature 1..813: note = Description of Artificial Sequence: Synthetic coding sequence
  source 1..813: mol_type = other DNA
atgtgcaacacaaatatgtctgtgccaaccgacggggccgttacaacttcccagatccccgcgagcgaacaggaaactctagacctcgatgcaggggtctccgagcacagcggggactggctagaccaggactccgtgtccgatcagttcagcgttgagtttgaggtggagtctcttgattccgaagactactccctgtctgaagagggacaagagctgagcgacgaagacgacgaggactactggaagtgtacctcttgtaacgaaatgaacccaccactgccttctcattgcaataggtgttgggcactgagggagaactggctgccggaagacaaggggaaagacaagggcgagataagcgagaaagccaaactggagaactccacccaagctgaggagggcttcgacgtcccagattgcaaaaagacaatcgttaatgacagccgagagtcttgtgttgaggaaaatgacgacaagattacacaagcctcacagagccaggaatcggaagattactcgcagccgagcacgtccagtagcatcatatacagctctcaggaggacgtgaaagaattcgagcgcgaagagacgcaggacaaagaagagtcggtcgaatccagcctacccctgaatgcgattgagccctgtgtcatatgccaaggacggccaaagaacgggtgtattgtgcacggtaaaacgggccatctgatggcctgctttacatgcgctaagaagctcaaaaaacgaaataaaccttgccctgtatgccgtcagccgatacagatgatcgtgctgacctacttcccttag

SEQ ID NO: 15890 - DNA, 1494 bp, synthetic construct
  misc_feature 1..1494: note = Description of Artificial Sequence: Synthetic coding sequence
  source 1..1494: mol_type = other DNA
atggtgaggtcccggcagatgtgcaacacaaatatgtctgtccctacagacggagccgttaccacatctcaaatccccgccagtgagcaagagacgctggtccgtccaaagccactgttgctcaagctcctgaagagtgtgggagctcaaaaggatacctataccatgaaagaggttttattttacctcggacaatacattatgaccaaacgtctgtatgacgagaagcagcagcacatagtctattgcagcaacgatttattgggcgacctgttcggagtgccctctttttcagttaaggagcaccgaaaaatatacacaatgatttacagaaacctggtggttgttaaccagcaggagagttctgactccggaacaagcgtgtccgagaaccgctgtcacctggaggggggaagcgatcagaaggaccttgtccaagagctccaggaagaaaaacccagcagttcccatctggtgagtaggccgtcgacatcctctcgaagacgagccatctcagaaacagaagagaatagtgatgaactgtccggcgagcgccagaggaagcgccacaaatcagacagtatttcactcagttttgatgaatccctggcactgtgcgttattagagagatctgctgtgaacggagttcatcgtccgagtccacagggaccccaagcaaccctgacctggacgcgggcgtgtccgagcacagcggggattggttggatcaagattccgtgagcgaccagttctccgtagaatttgaggtcgagtcccttgactccgaggattattcgctgtctgaggagggccaggaactgtctgatgaggacgacgaagtttatcaggtcaccgtgtaccaggcaggggaaagtgataccgacagctttgaggaggaccccgagataagcctggccgattattggaagtgcacaagctgcaacgagatgaatccaccgctaccatcacactgcaacaggtgctgggctcttcgcgagaactggttacccgaagacaagggcaaagacaagggcgagatttcagagaaggctaagctggagaactccacccaggcagaggaaggatttgatgtgccagactgcaagaagacaatcgtaaacgactctagggagtcatgcgttgaggaaaatgacgacaagataacccaagcctcacagtctcaggagtcagaggattacagccagccatcaactagtagctcaatcatatatagcagccaggaagacgtcaaagagttcgagcgggaagaaacccaagataaagaggagtctgttgaaagttctctccctctcaacgcgattgaaccctgcgtgatttgccaggggagaccaaaaaatggatgtattgtccacggtaagaccgggcatctaatggcctgctttacctgtgctaagaaactcaagaaacggaataagccatgccccgtatgtcggcagcctatacagatgattgtgctgacatatttcccttag

SEQ ID NO: 15891 - DNA, 393 bp, synthetic construct
  misc_feature 1..393: note = Description of Artificial Sequence: Synthetic coding sequence
  source 1..393: mol_type = other DNA
atgtgcaatactaacatgtccgtacccacggatggcgccgtaacaacaagccagataccagccagcgaacaggagaccctggtgcgacccaagcctttactcctgaaattattgaaatcggttggagcccagaaggacacatataccatgaaggagttcgagagggaggaaacacaagacaaggaggagtccgtggagtcatctcttccccttaacgcaattgagccatgtgtgatttgccaggggagacctaagaacggctgcatagtgcacggtaagactggacacctgatggcctgctttacctgtgctaaaaagttaaagaagcgcaataagccatgccctgtttgccgccagccaatacagatgatagttcttacttactttccatag

SEQ ID NO: 15892 - DNA, 774 bp, synthetic construct
  misc_feature 1..774: note = Description of Artificial Sequence: Synthetic coding sequence
  source 1..774: mol_type = other DNA
atgtgcaacacgaatatgagtgtgcccactgacggcgccgtgactacatcacagatcccggcatcagaacaggaaaccctggttaggccgaaacccttgcttcttaaactgctcaaatcagttggcgcacagaaagacacttatactatgaaggaggtgctattctatttgggccagtacattatgaccaaacgactctatgacgaaaagcagcaacatattgtctattgtagcaacgatcttttgggggacctgttcggagtgccctcattttccgtaaaggagcaccgcaaaatatataccatgatttacagaaatctggtcgtcgtgaaccagcaggaatcttctgactcggggacctccgtgagcgagaatagatgccacctcgagggggggagcgaccagaaggatcttgtgcaggaactgcaggaggaaaagccgagctcttctcacctcgtctcaaggccatcaacaagctcacgccgccgagcaatcagcgagacagaagagaattccgatgaactgagcggcgagcgtcagagaaaacgtcacaaaagcgattccatttcattgagctttgacgaatcactggcattgtgtgttataagggagatctgttgcgagcgctcctccagcagcgagtcaacaggcacccctagcaacccagacctggatgccggtgtcagcgagcactccggagattggctggaccaggatagtgtttctgaccagttctcagttgagttcgaggtcgagagtctcgattccgaatag

SEQ ID NO: 15893 - DNA, 891 bp, synthetic construct
  misc_feature 1..891: note = Description of Artificial Sequence: Synthetic coding sequence
  source 1..891: mol_type = other DNA
atgtgcaacacgaacatgtcagtgcccacagatggggctgtgactaccagccaaatccccgcttctgagcaggaaactctggatttggacgccggggtgtcagagcattccggtgattggcttgatcaggattccgtgtccgaccagttttcagtagaattcgaggtggagtcgctggacagcgaggattacagtctgtcagaggagggacaggagctgtccgatgaagacgacgaggtgtaccaggtgacagtttatcaggccggcgagagcgatacagattcattcgaggaggatcccgaaattagtctcgccgattactggaagtgtacgagctgcaacgaaatgaaccctcccctgccatcccactgcaatcggtgctgggctttgagggaaaattggctgccggaggataaaggcaaggataagggggaaataagcgaaaaggcaaaactggaaaattctactcaggccgaagagggatttgatgtgcctgattgcaaaaagacaattgttaacgactctcgtgagtcctgcgtggaagaaaacgacgataaaatcacacaagcaagccagtctcaggagtcagaagattactcacagcccagcacatctagcagcataatttatagctcacaggaggacgtgaaagaatttgagcgggaggagacacaggataaagaggaatcagttgagtcaagtctcccgctgaacgccattgagccatgcgtcatatgccagggtcgcccaaaaaacgggtgtatcgtacacggcaaaactggccaccttatggcctgtttcacctgtgcaaaaaaattgaagaaacggaataagccctgtcctgtgtgccggcaacctatacaaatgatagtgctgacttattttccatag

SEQ ID NO: 15894 - DNA, 1341 bp, synthetic construct
  misc_feature 1..1341: note = Description of Artificial Sequence: Synthetic coding sequence
  source 1..1341: mol_type = other DNA
atgtgtaacactaacatgtccgtccctaccgatggggcagtaacaactagtcagatcccagcctccgagcaggagacactcgtgagacctaaaccactcttactcaaactgcttaagagtgtgggtgcccagaaggatacctacaccatgaaggagaaaatctacactatgatctacagaaatctggtcgtggtaaaccagcaagagagctcagacagtggcactagtgtgagtgagaatcgatgccacctggagggtggcagtgaccagaaagacctggtgcaagagcttcaagaggaaaaacctagcagctcacatctagtctccaggccatcaacctcatcgcgccggagagctatttccgagaccgaagagaactccgatgagctgtcgggggagcgccaacgcaaaagacacaagtctgacagcatatcactgagcttcgacgagagcctcgccttgtgcgtgatcagggaaatttgttgcgaacgcagttcgtcatccgagtcaaccggaactccttctaaccccgatctggatgctggagtctcagagcatagtggtgattggctcgatcaggactcggtcagtgaccagttctccgtcgagtttgaagttgagtccctggattcagaggactacagcctgagcgaagagggccaggagctctcagacgaggacgacgaggtgtatcaggtgactgtctatcaggccggagagtcggatactgattcattcgaggaagatcccgagattagcctagccgattactggaagtgtacctcctgcaacgagatgaacccccctctgccatctcactgcaatagatgctgggcactcagggaaaattggctgcccgaggataaggggaaagacaagggcgagatctctgagaaagcaaagcttgagaatagtactcaggctgaagagggctttgacgtgcccgactgcaagaagacgatcgtgaacgacagcagggaatcttgcgtcgaggaaaatgatgacaaaattacgcaagcttcacagagtcaagagtctgaggattattcccagccgtctactagtagttcaatcatctactcaagccaggaggacgtgaaggagtttgagcgagaggagacgcaggacaaagaagaatccgtcgagagttcactccccctgaatgctatcgagccttgcgtcatatgccagggccggcccaagaacggttgcattgtgcacggtaaaacaggacacctcatggcatgcttcacatgcgccaaaaaactcaagaaaagaaacaagccttgtccggtctgtaggcagcctatccagatgatagtcctgacttatttcccctag

SEQ ID NO: 15895 - DNA, 642 bp, synthetic construct
  misc_feature 1..642: note = Description of Artificial Sequence: Synthetic coding sequence
  source 1..642: mol_type = other DNA
atgcctaatttcgtggtagattggagagtttatacagattcactctttctgacggtcgacttcggcctctgcgcagaagagagttccacatctaggaagcgcacgacagaggatgacatcccaaccctcccaacgtcagaacacaaatgtatacactccagagaagatgaggatctcattgagaatctggcacaggacgaaacctctcgtctagatctcggatttgaggagtgggatgtggcaggtctgccatggtggttcctaggcaacctgcgctccaattacacacctcgcagcaacggcagcacggaccttcagaccaaccaagacgttgggacagcaatcgtctcagatacaaccgacgatttatggttccttaatgaatctgtcagcgagcagctgggagtcgggataaaagtagaggctgcagacacagagcagacgagtgaagaagttgggaaggtgtccgacaaaaaagtgatcgaggtaggcaaaaatgacgacttggaggatagtaagagcttgtccgatgatacagacgtggaggtcacctctgaggacgagtggcaatgtacggaatgtaagaaatttaatagcccatccaaacgctattgctttaggtgctgggccctgcgaaaatag

SEQ ID NO: 15896 - DNA, 396 bp, synthetic construct
  misc_feature 1..396: note = Description of Artificial Sequence: Synthetic coding sequence
  source 1..396: mol_type = other DNA
atgacctccttctcaacatccgcgcagtgcagcacttccgacagcgcgtgtcgtatctcccccggccagataaaccaggtgcggcctaaactgccactgctcaaaatcttgcacgctgcaggagctcaaggcgaaatgttcactgttaaggaggtcatgcactatttgggtcagtacattatggttaaacaactttacgaccagcaagaacagcacatggtctactgtggcggtgatctgctcggagagctgctaggcagacaatcatttagtgttaaagatccttcacccctctacgacatgctgcgcaagaatcttgtgaccctggctaccgcgacgaccgaaatgggccacttattctgtcgcataagccacgccttggaattggccgactag

SEQ ID NO: 15897 - DNA, 1473 bp, synthetic construct
  misc_feature 1..1473: note = Description of Artificial Sequence: Synthetic coding sequence
  source 1..1473: mol_type = other DNA
atgacgtcatttagcacctccgctcagtgtagtacctcagactcagcttgccggatttcacccggccaaattaatcaagtgcgacccaagctgcccttgctgaagattttgcacgccgccggcgcccagggagagatgtttacagtcaaggaagttatgcactatttgggtcagtatatcatggtaaaacaactttacgatcagcaagaacagcacatggtgtattgcggtggggacctgctgggtgaattactgggtaggcagagtttcagcgtgaaggacccgtcccccctctatgatatgctccggaagaacctggtgacgctggcgaccgccacgacggatgctgcgcagactctggccctggctcaggatcattccatggacatccccagccaggaccagctgaaacagagcgcggaggaatcatcaacatccagaaagcggaccacagaagacgacattccaaccctccctacgtctgaacacaagtgcatccatagtcgcgaggacgaagacctaatcgaaaacctggcgcaggacgaaacgtcccggctggacctcgggttcgaggagtgggacgttgctgggctaccctggtggttcctgggtaacctacgcagcaattatactccacgttctaatggatccacagacctccaaacaaatcaagacgtgggcactgctattgtgtcggataccacagatgatctgtggtttctaaatgaatctgtatcagagcagctgggagtgggaatcaaggtggaagccgcggacacagagcagacgagcgaagaggtgggtaaagtaagcgataagaaagttatcgaagtgggcaagaacgacgacttggaagactcaaagagcttgtccgatgataccgacgtggaggttacgagcgaggatgaatggcagtgtaccgagtgcaagaaatttaacagcccttctaaacgctattgcttccggtgttgggctctccgcaaggactggtatagcgattgcagcaagctgacccactcactgagcacctccgacattaccgcaatacccgagaaagagaatgaaggcaatgacgtgcctgattgcaggaggacaatttccgctccagtggtcagacccaaagacgcttatataaaaaaggagaactctaagctatttgatccttgcaactctgtggagttcctagacttggcccattcttctgagtcccaggaaactatttcctccatgggtgagcagttggataacttgtcggagcagagaaccgataccgaaaatatggaggattgtcaaaatctactgaagccctgtagcctctgcgaaaagcgcccacgcgatggaaatattattcatggcaggacgggacacctggtgacttgttttcattgcgcgaggaggctgaagaaggctggcgcctcatgtcccatttgcaagaaggagattcagttagtaattaaggtgtttatagcttag

SEQ ID NO: 15898 - DNA, 495 bp, synthetic construct
  misc_feature 1..495: note = Description of Artificial Sequence: Synthetic coding sequence
  source 1..495: mol_type = other DNA
atgacatccttctctacttcagcacagtgctcaacgtcagacagcgcctgtaggatatctcccggacaaatcaatcaggagaatgaggggaatgacgtgcccgattgtaggaggacaatttcagctccagtggtgcgacccaaagatgcatacattaaaaaagagaactctaaactgttcgacccgtgcaacagcgtggaattcctggatctggcccacagctcagaatcccaagaaaccatcagttcgatgggagagcaactagacaacctgtccgagcaaaggactgacactgagaatatggaggactgtcaaaaccttttgaaaccatgttccctgtgtgagaagcgcccccgagatgggaacatcatacacggaaggacaggccacctcgtgacatgctttcattgcgcccggagacttaagaaggcgggtgcgagctgtccgatctgcaagaaagaaatacaactcgttattaaagtctttattgcctag

SEQ ID NO: 15899 - DNA, 423 bp, synthetic construct
  misc_feature 1..423: note = Description of Artificial Sequence: Synthetic coding sequence
  source 1..423: mol_type = other DNA
atgacctcattttctactagtgcccagtgttccacttcagattctgcttgtagaatcagccctggacaaatcaaccaggtgcgtcctaaattgcccctcctgaagatcctccacgcagctggggctcagggcgaaatgtttaccgttaaggaggtaatgcactacttaggccagtatataatggtaaagcagctttatgatcagcaggaacagcacatggtatactgcggcggagacttactaggggagctattggggcgccagtcattcagcgtgaaagacccttccccgctatacgatatgcttcggaagaacctggtcaccctggccactgcaactactgccaagtgccgaggaaaatttcattttcagaagaaaaattatcgcagaaggtaccctcatacggcttatttacgtgcatag

SEQ ID NO: 15900 - DNA, 516 bp, synthetic construct
  misc_feature 1..516: note = Description of Artificial Sequence: Synthetic coding sequence
  source 1..516: mol_type = other DNA
gacttaattgagaatctcgctcaggacgagacgtccaggctggacttaggatttgaagaatgggacgtggccggcctgccctggtggtttcttggtaacctgagatctaattacactccgcgctctaacggctcaacagatctgcaaaccaaccaggtgattgaggtcggaaaaaacgatgaccttgaggactccaaaagcctatccgatgacacggacgtggaggtgacaagcgaggacgaatggcagtgcacagagtgcaagaaatttaacagcccgagcaagaggtattgctttagatgctgggcgcttagaaaagattggtattccgactgtagcaaacttacacacagcttgagcacatccgatataactgccataccagagaaagaaaacgagggaaacgacgtcccggactgtcggaggacgatctctgcccctgtggtacgacctaaagatgcttatatcaaaaaggaaaattctaagctattcgatccatgtaattcagttgagtag

SEQ ID NO: 15901 - DNA, 1323 bp, synthetic construct
  misc_feature 1..1323: note = Description of Artificial Sequence: Synthetic coding sequence
  source 1..1323: mol_type = other DNA
atgacaagcttctccacttccgcgcagtgttctacctctgattcagcttgcagaatctcacccggccagataaatcaggtgcgacctaaactacccctgctaaagatcctccacgcggccggcgctcagggagaaatgttcacagtcaaagaagttatgcattatctcggccaatacatcatggtgaagcaactctacgaccagcaggagcaacacatggtctactgcgggggcgatctgctcggtgaactcctcggccgccagtccttctcagtgaaagacccttctcccctgtatgacatgctccgtaaaaacttagttactcttgctaccgcaaccactgacgctgctcagactttggccctggcccaagatcactccatggacatccctagtcaagaccaactgaaacaatcagccgaggaatccagtacttctagaaaaagaactactgaagacgatattcccaccctgcctacctcagagcacaagtgcatccactctcgagaggatgaggatctgatcgagaatctggctcaggatgagacatcgaggctggatttgggctttgaagagtgggatgttgcgggacttccgtggtggttcttgggaaacctgcgaagcaactacactccacgaagcaatggctccacagatcttcagacaaaccaggtgatcgaggttggaaagaacgacgatctggaagacagtaagtccctgtccgacgacactgacgttgaggtcacttccgaagatgagtggcagtgcacagagtgtaagaaatttaactcccctagcaagcgctattgtttcagatgttgggcccttcgtaaggattggtatagcgactgttccaaactgactcacagtctgtcgaccagcgacatcaccgcaatccccgaaaaagaaaatgaaggaaacgacgttccagactgcaggaggactattagtgcaccggtggtaagaccaaaagacgcatacatcaagaaggaaaactctaaactttttgacccatgcaatagcgttgagtttctagacctcgcccattcaagcgagagtcaggagactattagctccatgggagagcaactcgacaatctgtcagagcagcgaactgacactgaaaatatggaggattgccagaacctgctgaaaccctgctccctgtgtgaaaagcgtccaagagatggaaatataattcatgggcgcactggccacctcgtgacgtgctttcactgtgcgaggagactgaagaaagcgggggcctcctgtcctatttgcaagaaggaaatccagctggtgatcaaagtattcatcgcctag

SEQ ID NO: 15902 - DNA, 384 bp, synthetic construct
  misc_feature 1..384: note = Description of Artificial Sequence: Synthetic coding sequence
  source 1..384: mol_type = other DNA
atgacctcattctccaccagcgcacagtgtagtacgtctgatagtgcttgcagaatttcccccggtcagattaaccaggtccgaccaaagcttccactgcttaagatccttcatgcagcgggagcccagggtgagatgtttaccgtgaaagaagtcatgcactatctggggcagtacattatggtgaaacagttatacgatcagcaggaacagcatatggtttactgcgggggcgacctcctgggagagttgctcggtcggcaaagtttctcggtgaaggatccgagccccctgtatgacatgctgcggaaaaatttggttacgctcgcgacagcgaccacagggtgtcagagacgagtcaatggaccgcagagggcatggtag

SEQ ID NO: 15903 - DNA, 462 bp, synthetic construct
  misc_feature 1..462: note = Description of Artificial Sequence: Synthetic coding sequence
  source 1..462: mol_type = other DNA
atgaccagctttagtacctcagcccaatgttccaccagcgattcagcgtgtcgcatttcccccggccaaatcaatcaagtgcgacctaagctgcctttgctcaagatcctccatgcagcaggggcacagggcgagatgttcacggtgaaggaggtcatgcattacctggggcaatatattatggttaaacagctttacgaccagcaggaacaacatatggtttactgtggaggagacctccttggtgaactgcttggccgacagtcgttctctgtgaaagatccttcccctctgtacgatatgctcaggaagaatcttgtcactttggctacggcaactacaggctcccagtacggctattcgaagtcaagacctacagaggcaaaatgcagaggaaaattccactttcagaaaaaaaattataggcgccggtacccccacaccgcttacctgcgggcatag

SEQ ID NO: 15904 - DNA, 7650 bp, synthetic construct
  misc_feature 1..7650: note = Description of Artificial Sequence: Synthetic coding sequence
  source 1..7650: mol_type = other DNA
atgctggggacggggccggctgccgctacaaccgctgctaccacctcttccaacgtgagtgtgcttcagcagtttgcttcggggttgaagagccgaaatgaggaaacccgagcaaaagcagctaaggaactgcaacactatgtcacgatggagcttagggagatgagtcaggaggagagcaccaggttttatgaccagcttaaccatcacatattcgagctagttagttcctcggacgcaaatgaacggaagggaggtattcttgctattgcatcgcttataggagtggaggggggaaacgctaccagaatcgggcggttcgcgaactatttacggaacctgcttccatctaacgatccggtggtcatggaaatggcttctaaagccattggacggctggcaatggcgggagacacatttactgcggaatatgtggagttcgaggtcaaacgcgcactggagtggctgggggccgatcgaaacgaagggcggcggcacgctgccgtcctcgttctgagagagttagcaatctctgtccccacgtttttctttcagcaggtgcagccattctttgacaatatcttcgtcgcagtctgggaccccaagcaggccatccgagagggcgcggtggccgcgctccgggcctgcctaatcttaacgactcaacgggagcccaaagagatgcagaagccccaatggtacagacatacctttgaggaagcagagaagggctttgacgaaaccctggccaaggaaaaaggaatgaatcgcgatgacaggatccacggcgccttgcttatcctcaacgaattggtacgcatctcctcaatggagggtgagaggctccgcgaggaaatggaagaaatcacacagcagcagctggttcacgacaagtactgtaaagacctgatggggtttggcaccaaaccccggcacatcacaccatttacttcatttcaggcggtgcagccccaacagagtaacgccctcgtcggcttactgggttattctagtcaccaaggtcttatgggcttcggcacaagcccctctccagcaaagagcactctcgtagaatcaagatgttgcagagaccttatggaggagaaatttgaccaggtgtgccaatgggtattgaagtgcagaaattccaagaactcacttatccaaatgaccatccttaatctgctcccccgcctggcagcctttcgtccctcagcgtttacggacactcagtatctgcaagatacaatgaatcatgtgctgtcatgcgtaaaaaaggagaaagaaaggaccgctgcgttccaggccctcggactcctatctgtcgcagtgagatccgagtttaaggtgtatctgcccagagtcctggatattatacgagcggcactgcctccaaaggacttcgcacataaaaggcagaaggcaatgcaggtggacgctaccgtcttcacctgtataagcatgttagctcgggctatgggccccggcatccagcaggacattaaggaactcctggagccgatgcttgcagtaggtctgagccctgccttgacagcagttctctacgacctctcccggcaaatcccacaactcaagaaggacatacaagatggactcctgaagatgctaagtctggtcctgatgcataaaccgttgcgccatcctgggatgcctaagggcctggcccatcagctggcaagtcctgggctcaccacactgcctgaagcctctgacgtggggagcattacgctcgctctccgcacactggggtccttcgagtttgaagggcactcactgacccagttcgtgcgtcactgtgcagaccactttctaaatagcgagcacaaagaaattcgcatggaagccgctaggacctgctccagacttctcactccttctattcacttaatttcaggccatgctcatgtggtcagccagactgcagtgcaagtggtggctgacgtgctctccaagttattggttgtcgggattactgatcctgatcctgatattcggtactgtgtccttgcctccctggatgaacgcttcgatgcccacttggctcaggccgagaacttgcaagccctgttcgttgccctgaacgaccaggtgtttgagatccgtgaactggctatttgcaccgtcggacgactgtcaagcatgaatcctgcctttgtcatgccctttctgcgtaaaatgttgattcagatacttaccgaactggaacacagcggaatagggcggatcaaagaacaaagcgccagaatgttaggtcatctcgtgtccaacgctcctcgattgatccgaccctatatggagcctattctgaaagccctgatattaaagctgaaggacccagaccctgacccaaacccaggcgtgataaataacgttcttgcgacaattggagagctggcgcaggtcagcggtcttgagatgcgcaaatgggttgatgagctgttcattatcattatggacatgctccaggactccagtctgctggccaagcgccaggtggccctgtggacattagggcagctggtggctagcactggctacgttgtcgagccttatcggaaatatccaacactgctggaggtgttgctgaattttctgaagactgaacaaaatcaaggaaccaggagggaggctatccgagtgctgggactgctgggcgctctggatccttacaagcacaaagtgaacatagggatgatagatcagtcacgggatgccagtgccgtgtctctatcagagtcaaagtctagccaagactcctctgattattcaaccagtgaaatgctggttaacatgggcaatctgcccctggatgaattttaccccgccgttagcatggtggccctcatgcgcattttccgtgaccagagcctgtcccaccatcacaccatggtcgtccaggccatcacttttatctttaagagcctcggcctcaagtgcgttcaatttttgccccaggtaatgcctacatttctgaacgtgattagggtctgtgacggcgctatccgggagttcctattccagcagctgggcatgctggtctcatttgttaagtctcatattcgaccatatatggatgaaatagtgacccttatgcgtgagttttgggttatgaacacgtcaattcaaagcacaattatcttgctgatagagcagatagtagtggcactggggggggaatttaaactgtaccttcctcagctaattccccatatgttaagggtgttcatgcacgataacagtccaggcagaatcgtctcaatcaagctccttgccgccattcagctgttcggagccaacctggacgattacctgcatctcctactccctcctatcgtgaaactctttgacgcgcccgaggcgcccctgccgagtcggaaggctgcgctggaaacagtggatcggctgacagaaagtttggactttacagactatgcatctcgcattatccacccgatcgtgcgcacactcgaccagtctcccgagcttcgtagtactgctatggacactctcagtagccttgtgttccagctgggtaagaagtaccagatttttattcccatggtcaataaggtactggtccgccaccgcatcaaccatcagagatacgatgtgctgatctgccgcatcgtgaagggttacacacttgccgatgaagaagaagacccactaatataccagcacaggatgttaagatctggacaaggagatgccctcgcatccggacccgttgaaacaggtccaatgaagaaactccacgtgtcgaccatcaatctgcaaaaagcctggggcgcagccagacgcgtgtcgaaagacgactggctggagtggcttaggaggctgtctctggaattactaaaggattcgtccagtcctagcctgaggtcttgttgggccctggcacaggcttataaccccatggccagagacctgttcaacgccgcattcgtgtcttgttggtccgaactcaacgaagatcagcaagacgaattaataagatccattgaacttgcactgacctcacaggacattgcagaagttacccagacactgctaaatctggccgaatttatggaacacagtgataagggacccttgcccttgcgtgacgacaacggtatcgtgctgttgggagagcgagccgccaagtgccgagcctatgctaaagcactgcactacaaggaactggaatttcagaaaggcccaacccccgcaattctggaaagcttgatttccattaacaataaactgcagcagcctgaagcggctgccggcgtgctcgagtatgctatgaaacattttggcgaacttgaaatacaagctacatggtatgagaagcttcatgaatgggaagatgccctggtggcctacgataaaaaaatggatactaataaggacgacccggaactgatgctggggagaatgaggtgtctcgaagcattaggcgagtggggccaactgcaccaacaatgctgcgagaagtggaccttggttaatgacgagactcaggctaagatggcccggatggccgcagctgccgcatgggggcttggacagtgggatagtatggaagagtatacttgcatgattcctagggacacccacgatggagctttctatagagccgtgctcgcgttgcaccaggatttgttctcactagctcaacagtgtatagacaaagctcgggatctgctcgacgctgagttgaccgccatggccggtgagtcttattcacgtgcgtacggcgctatggtctcatgccacatgctctcagagctcgaagaagtcatacagtacaagctggttccagagcgccgggagatcattcgtcagatttggtgggagaggttgcaaggttgtcagcgaatcgtggaagactggcaaaagatcttaatggtaagatcacttgtggttagcccccatgaagacatgcgcacctggttgaagtatgcctccctgtgtggaaagtcgggtagattggccttagcacacaaaaccctggtgcttcttcttggcgtggatccatcccgccagctggatcaccctcttcccacagtgcatccgcaggttacatatgcgtacatgaaaaacatgtggaagtccgcccgaaagatcgacgcctttcagcacatgcaacactttgtccagacaatgcagcagcaggcccagcacgccatcgccaccgaagatcagcagcataaacaggagctccataagctgatggcacgttgtttccttaagctgggggaatggcaattaaacctgcagggcattaacgaatccaccatccctaaggtcctccagtactattcggccgctaccgaacacgacaggtcctggtataaagcatggcatgcctgggccgttatgaattttgaggccgtcttacactacaagcaccagaatcaagcccgtgacgagaagaaaaaattgcggcacgcgagtggagctaatatcactaacgctaccacggccgcaactaccgcagctacagccactaccactgcctccaccgaaggctccaactcggaatctgaagctgagtccactgagaacagccccacgccatcaccactccagaaaaaggtgacagaagatcttagtaagacactcttgatgtataccgtgccagccgtgcagggtttttttaggtctatctccctcagcaggggaaataatctgcaggacacactgcgcgtccttactctgtggtttgactatgggcactggcccgacgtgaatgaggctcttgtggagggagtgaaggcgatacagatagatacttggctacaggtaattccccagctgatagcgcgaatcgacacccctaggccgcttgtcgggcgtctgattcaccagctcctgaccgacattgggagataccacccgcaggcccttatttaccctctgacggtggcatccaaatccactacaaccgcacggcacaatgcagcgaacaagattctgaagaacatgtgtgagcatagcaatacattggtccagcaggccatgatggtctccgaggaactaattcgcgtggcaattctttggcacgaaatgtggcatgaaggcctggaagaagcctccaggttgtactttggcgagcgaaacgtgaagggcatgtttgaggtattggaaccattgcacgccatgatggagcgaggtccccagacccttaaagagacatcgtttaaccaggcttacgggagggatctgatggaagcccaggaatggtgtcgtaaatatatgaaatctgggaacgtcaaagacctcacacaagcatgggacctctactaccatgttttccggcgcatcagtaaacagctcccccagttgacgagccttgagctgcagtatgtgagccccaagttgctcatgtgtcgcgacctggagctggccgtcccaggaacctacgatcctaaccagccaatcatacgcattcagagtattgcgcctagtttacaggtgatcacaagcaaacaaaggcccagaaaactcaccctcatgggcagcaatggccacgagtttgtgtttttattaaagggccatgaggacctccgacaggatgagagagtcatgcagctgtttggcttggtgaacaccctgttagccaatgaccccaccagtttaaggaaaaatttgagtatccagcgctacgccgtaattccgctttcgacaaattccggcctgattggatgggtaccccactgtgatacactacacgctctcattagagattacagagagaagaaaaaaattctccttaacatcgagcacagaatcatgctgagaatggcgcccgactacgaccatctgaccctgatgcaaaaggtggaggttttcgagcacgcagttaataatacagccggagatgatttggctaagctcctgtggctgaaatcacctagctcggaggtctggttcgacaggcgaaccaattacactcgatcccttgccgtcatgtccatggttgggtatatcttagggctgggcgaccgtcatccttccaatttgatgttggaccgattgtctgggaagatactgcacattgacttcggcgactgcttcgaggtggctatgacccgtgagaagttccccgagaaaattccatttagactgacgagaatgcttacaaacgccatggaagtgacaggattggatggcaactaccggatcacctgtcacactgtcatggaggttttgagggagcataaggactccgtcatggccgtgctcgaggcattcgtctatgacccactcctgaattggcggcttatggacaccaacaccaagggcaacaagcgctccagaacaaggacggattcctattccgcaggtcaaagtgttgaaattttggatggggtcgagctgggtgagcctgcccataaaaagaccggtactacagtgccagagagcatccactcgtttattggcgacggactggttaaaccagaagcgctgaacaaaaaggccatacagattattaatcgcgtgcgggacaaactgacaggccgcgacttctctcacgatgataccctggacgttcctacacaggtggagttgctcatcaaacaggctacatcacacgaaaacctgtgccagtgttatattggatggtgccccttctggtag

SEQ ID NO: 15905 - DNA, 2265 bp, synthetic construct
  misc_feature 1..2265: note = Description of Artificial Sequence: Synthetic coding sequence
  source 1..2265: mol_type = other DNA
atgaattttgaggctgtcctgcactataagcaccagaaccaggccagggacgagaagaagaagttaagacacgcttccggtgccaatatcaccaatgctactacggcagcgactactgcggccaccgccaccacaaccgctagtactgagggatctaactcagaatcagaggcagagtccaccgagaactccccaactccatcccctttgcagaaaaaggttactgaagacctgtctaaaactttgttgatgtataccgttccggcagttcaggggtttttccggtcaatctcactttcccggggcaataaccttcaggacaccctccgcgtgttgaccctgtggtttgactacgggcattggcccgacgtcaatgaagccctcgtagagggggtcaaggccatccagatcgatacatggctgcaggtgataccccagttgatcgccagaattgacactcctcgcccactggtcggaaggctgatccatcagcttctcactgatattggaagataccatccccaagccctcatctatccattgactgtggccagtaagagcacaacaactgccaggcacaacgccgcaaacaagatcctcaaaaacatgtgcgaacactccaatacactggtgcagcaggccatgatggtctccgaggagctgattagagtggccatcctatggcacgaaatgtggcatgaaggcctcgaagaggccagcagactgtactttggagagaggaacgtgaaaggtatgtttgaagtgctagagccactgcatgcaatgatggagcgggggccacagaccctgaaggaaacttccttcaatcaggcatatggtcgagacctgatggaggcccaggaatggtgcaggaagtacatgaagagtggtaacgtcaaggacctcacccaagcttgggatctctattaccacgtgttcagacgtatcagtaagcagctgccacaactcacctcgcttgagctgcagtacgtgtctccgaagttgctgatgtgccgtgatctggaattagctgtgccaggcacttacgatccaaaccagcccattataagaatccagtctatagccccttccctgcaggttatcacctctaagcagaggccccgcaagctgacattgatgggcagtaatggccacgagttcgtctttctgctcaagggccacgaggatctccgccaggacgaacgtgtcatgcagctctttggactcgtgaacactctcctagccaacgaccccacctctctacggaagaatctctccattcagagatatgccgtaatacctctttcaacaaacagtggtctaatcgggtgggtcccacactgcgacacacttcatgcgttaatccgggactacagggaaaaaaagaagattctgctgaatatcgaacacaggattatgttgagaatggctcccgattacgatcacctaacactgatgcaaaaggtcgaagtgttcgaacacgccgtgaataacacggcaggtgacgacctcgctaagcttctctggctgaaaagcccctccagtgaggtttggttcgacaggaggaccaactatactcggagtttagccgtcatgtccatggtgggctacatcctgggattgggggaccgccatcctagtaatctgatgctggatcggttgtccggaaaaatcctgcacattgattttggagattgctttgaggtggcgatgacccgggaaaaattccccgagaaaatcccattccgtctcacacggatgctgaccaacgcgatggaggtcactgggctggatggtaactatcggatcacatgccacaccgtgatggaggtgttaagggaacacaaagattcagtgatggccgttctggaggccttcgtctatgatccacttctcaactggcgactcatggatactaacacaaaggggaataagcgtagtaggacgcgcactgactcatatagcgccggtcagagtgtggagatcctcgatggggtcgagctgggagagccggcccacaaaaaaactggtacgacggttcctgagtcgattcactctttcattggtgacggcctggtgaagcctgaggcactgaacaaaaaagctatccaaatcataaacagagtgagggataaactgaccggaagagacttttcacatgatgatacactggacgtccctactcaggtagagctactcatcaagcaggcgacatctcatgagaacctgtgccaatgttacattgggtggtgccctttttggtag

SEQ ID NO: 15906 - DNA, 486 bp, synthetic construct
  misc_feature 1..486: note = Description of Artificial Sequence: Synthetic coding sequence
  source 1..486: mol_type = other DNA
atgcttgaccgactctctggaaaaattctccatatcgacttcggggactgcttcgaggttgccatgactcgagagaagttcccagagaaaatcccattccgcttaacccggatgctgactaatgcgatggaggtaactgggctggatgggaactaccgcattacctgccatactgtaatggaagtgctgcgagaacacaaagacagcgtcatggccgtgctggaagccttcgtctacgacccactgctcaattggagactgatggacacaaataccaagggaaacaaacgtagccgaactcgcactgactcatacagtgccggacagagcgttgaaatcctggatggtgtggagttgggtgaaccagctcacaagaagaccggaaccactgttcctgagtctatccattcctttattggcgacggtctcgtgaagcctgaagccctcaataaaaaggccatacagatcatcaatagagttaggtag

SEQ ID NO: 15907 - DNA, 5187 bp, synthetic construct
  misc_feature 1..5187: note = Description of Artificial Sequence: Synthetic coding sequence
  source 1..5187: mol_type = other DNA
atgctgggaaccggacccgccgccgccaccaccgcagctactacaagcagtaacgtgagcgtcctgcagcaatttgcatcaggcctcaaatccagaaacgaagagactcgcgccaaggccgccaaggagctgcagcactatgtgacaatggaactccgcgaaatgtctcaggaagaatccacgcgtttctacgaccagttgaaccaccatatcttcgagctggtgtccagtagcgacgccaacgaacggaaaggtgggattctggctattgcgagcttaattggcgtggagggagggaacgccacccgaatcggacggttcgctaactacctgcggaatctgttgccttccaatgaccctgtggtcatggagatggcctccaaggcgataggaaggcttgcaatggcaggcgacacatttacagctgagtacgtggagtttgaggtgaagcgcgctctcgaatggctgggtgcagatagaaatgagggtcggcggcatgcagctgtgctggtgctccgtgagctggctatttcggtaccgacctttttctttcagcaggttcagccgtttttcgacaacatctttgttgctgtgtgggaccccaaacaggcaatccgggagggtgcagtcgcagccttgagagcctgcctgatactcacaacccaaagagaacctaaggagatgcagaagccacaatggtaccgtcataccttcgaggaagcagagaaggggttcgatgaaactctggccaaagaaaagggtatgaacagagacgaccggattcatggagcattgttgattctcaatgagctggtgcgtatctcgtctatggagggcgagagattgcgcgaagagatggaggaaattactcagcagcaattggtccacgataagtattgcaaagatctgatggggttcgggacgaagcctcgccacataacgccgttcacatcatttcaagctgttcagccgcagcagagcaacgcactcgtgggcctgctcggttactcaagtcaccaggggcttatgggattcggtaccagtccaagccctgcgaaaagcacactagtggagtctcggtgttgccgggatctcatggaagagaaattcgatcaagtttgccaatgggtgctcaagtgtaggaactccaaaaactcccttatacagatgactatcctgaacctgctcccacggctggccgcatttagaccaagcgcgttcaccgatacccaatatcttcaagataccatgaaccacgtcctgagctgcgtgaagaaagagaaggagcgaactgcagcattccaggcgctcggactgctgtcagttgcagtccggtccgaatttaaggtctatctgcctagagttctggacattattagagcagctctgcctcccaaagacttcgcccataagagacagaaagccatgcaggtcgacgccactgtgtttacttgcattagtatgttagcccgcgcaatgggacccggcattcagcaagacatcaaggagttgctggagcccatgctggccgtgggtcttagccctgcactgactgctgtcctgtatgacctgtcccgccagatcccacagttgaaaaaagacatacaggacggactcctgaaaatgctttcccttgtcctaatgcacaagccattaaggcaccccggaatgccgaagggcctggctcaccaactggcatcacccggattaaccactctccctgaagctagtgacgtagggtctataacacttgctctgcgaacacttggcagttttgaatttgagggacatagcctcacccagttcgtgaggcactgtgccgaccactttctgaacagcgagcataaagagattagaatggaggctgctcgcacctgttctaggctcctgactccaagcatacaccttatttccggccacgcccatgtagtgtcccagaccgccgtccaggtggtcgcagatgtgttaagtaagttgctggtggtaggtattactgatcctgacccggacataagatactgcgtgttggcgagcctagatgagcgctttgatgcccaccttgcgcaggcagaaaacctacaggccctgtttgtcgccctgaatgaccaagtgttcgagattagagagcttgcaatttgcaccgtcgggaggctctcttccatgaaccctgctttcgtgatgcctttcctgagaaaaatgctgatccagattctcaccgaactggagcactccgggatcggaagaatcaaggagcaaagcgcaaggatgctaggacatctcgtgtctaacgccccacgcctgattcggccgtatatggagcctattctgaaggccctgattttaaagcttaaagaccctgaccctgacccaaatcctggagtcataaataatgtcctggctacaatcggagagctggctcaagtatcaggtctcgagatgcggaaatgggtcgacgagctctttatcatcataatggacatgctacaggatagctctttgctggccaagcgccaggtagctctctggactctgggccaacttgtggcatctactggatatgtagttgagccctacagaaagtacccgacattgcttgaggtgctcctcaattttcttaagaccgagcagaatcagggtactcgccgcgaggcaatccgcgtgctgggccttctgggggcccttgacccctacaaacataaggtgaatatcggtatgatcgatcagagccgggatgcgtccgccgtttccctgtctgagtcgaagagcagccaggactcgtccgattattccacatctgagatgctggttaatatggggaatcttcccctggacgagttctatcctgctgtgtctatggtggctctgatgaggatttttcgcgaccaatctttgtctcatcatcatacaatggtcgtccaggccattaccttcatctttaaatccctggggctgaaatgcgtgcagtttctgccccaggtaatgcctacatttctgaatgtgattagagtgtgcgacggcgctattagggaattcctctttcaacagctgggcatgctggtgtcgttcgtaaaaagccacatacggccatacatggatgaaatcgttactctcatgagagagttctgggtgatgaacacatccatccagagcaccatcatattgttgatcgagcagatagtggtcgcactgggcggggagttcaagttatacctgcctcagctcatcccgcacatgcttcgcgtattcatgcatgataacagtccgggaaggattgtaagcattaaattgctggctgccattcagctgtttggtgcaaacctggacgattacctccaccttcttctaccgcccattgtgaagctgtttgatgcacccgaggctcctctgccatcccggaaggcggccctggagaccgttgatcgcctgaccgaatccctcgactttacagactacgctagtaggattattcacccaattgttcgaactctggaccaatctcctgagttgcgttccaccgcaatggacacgctatcctctttggtattccagttgggaaagaagtaccagatatttatccccatggtgaataaagtgctggtcaggcacaggatcaatcatcagcgatacgatgtgctgatatgccggattgtcaaaggttatacattggctgatgaggaggaggatccacttatttatcagcatcgaatgctgaggtccggccagggagacgccctggcctccggacctgtcgagactgggcctatgaaaaaactccatgtgtctacaatcaatttgcagaaggcatggggtgccgctcgacgggtttcaaaggacgattggttggagtggcttcgtagactaagcctggagctgctcaaagactcctcttccccttcactgcggtcttgttgggccttggcacaggcttacaatccgatggcacgcgacctgtttaatgcggcgtttgtgagctgctggtctgagctgaatgaagatcagcaagacgaacttatccggagtatagagttagccctgactagccaggatatagcagaggtgacccagactctcttaaatcttgccgaattcatggaacacagtgacaaggggcctctcccgctgagagacgataacggtattgtcctcttgggagagcgcgccgctaaatgtcgagcgtacgcgaaagcactgcactataaggagctcgaatttcaaaaaggacccacccccgctatcctggagtctttgatttccattaataacaagctgcagcaacccgaggcggctgccggcgtactggagtatgccatgaaacacttcggagagctcgaaattcaggctacatggtatgagaagctgcatgaatgggaggatgcactagtggcgtacgacaagaaaatggatactaataaagatgaccctgaactgatgctgggcaggatgcgttgtctggaagccctcggggagtggggacagctgcatcagcagtgctgcgagaaatggacactggtcaacgatgagacacaggccaaaatggctcggatggctgccgcggcggcgtggggacttggtcagtgggactccatggaagagtacacatgcatgatccctagagatacccacgatggcgctttctatcgagctgtgctggccctgcaccaagacctgttctctctggcacagcagtgcatcgataaggcgcgcgatcttttggatgccgaattgactgccatggctggggagtcatactctagagcctacggtgccatggtgagttgtcatatgctttccgagctagaggaagtgatacagtacaagctggtgcccgagcgtagagaaattataaggcagatctggtgggaacgactgcagggctgccagcgcattgtcgaggactggcagaaaattctgatggtccggtccctggtcgtgtccccacatgaagacatgcgaacttggctgaaatatgcatcattatgcgggaagtccggacggcttgccatcgcaccactgaatatgggtacagctaattcagctcagccccgctccttgcgctcgtggcgaacttggatcagaatcctggactgtaaagacaccgaggacgccgatctcacccctgccacctacccaaagacgtctctggtctgtgggcagcaacagaaatgtctgcaggaccggccgaaatag

SEQ ID NO: 15908 - DNA, 6270 bp, synthetic construct
  misc_feature 1..6270: note = Description of Artificial Sequence: Synthetic coding sequence
  source 1..6270: mol_type = other DNA
atggaagacactcaagccattgactgggacgtagaagaagaagaagagactgagcagtcatccgagtccctgaggtgcaacgtggagccggtagggcgcctacacatcttcagcggggctcacggacctgagaaagacttccccctgcacctcgggaagaatgtagtgggccgtatgccagattgctccgtcgcccttccatttcccagcatatcaaaacagcacgccgaaatcgagatcctagcatgggataaagcccctatcttgcgagattgcggtagcttgaacgggacccagatattgcgacccccaaaagtgttaagccctggcgtgagccataggttgcgtgatcaggagctgatcctgtttgccgacctgctttgccagtaccacagactggacgtatccctgccatttgtgtctcgtggaccactgaccgtcgaagagacgccgagagtccagggggaaacccagcctcagcgtctgctcttggcagaggattctgaggaggaggttgactttttatccgaacgaaggatggtgaaaaagagcaggactacttcaagctcagtgatcgtacctgagtctgatgaagagggccatagcccagtactcggcgggttgggcccaccctttgccttcaatctgaatagcgataccgatgtcgaggaggggcaacagccggcaacagaggaagcttcctcagcagccagacgcggagctactgtcgaagcgaaacagtctgaggcggaggtggtgacagagatccagctggagaaggaccaaccccttgtgaaggagaaggataacgacactaaagtcaaaagaggggccggaaatggagtggttccagcaggagtcatcctggagcgctcccaaccacccggcgaggattcagatactgatgtggacgacgacagcaggcctcctgggcggcctgctgaggtccacctcgagagggcacagccattcggtttcattgatagcgataccgatgcagaggaagagagaattcctgcaactcccgtggttatccctatgaagaaacgcaagatctttcatggcgtgggaactcgtggtccaggtgcccccgggctcgcacacttacaagaatcccaggcagggtccgatacggacgttgaggaggggaaagcgcctcaagccgttcctcttgagaaaagccaggcttcaatggtcattaactctgataccgacgacgaagaagaagtttcagccgccctgacactggcgcatctgaaagagtctcagcctgcaatttggaacagggacgcagaagaagatatgccacagagggtcgtcctactgcagagatcccagactacaactgaaagggatagtgatacagatgtggaggaggaagagctgccagtggaaaaccgggaagcagtgctgaaggaccatactaagattcgtgctttggtgagagcacactcagagaaggatcaaccgccattcggcgatagcgatgactcggttgaggccgacaaaagcagccccgggatacacctagaacgaagtcaagcgagtaccacggtggacatcaacactcaggtcgaaaaagaagtccccccaggcagtgccattatccacattaagaaacaccaggtcagcgtagaggggaccaaccaaacagatgttaaagccgttggaggccccgctaaattgcttgtggttagtctcgaggaagcttggcccctgcacggggattgtgaaacagatgcagaggagggaacatccctgaccgccagcgtcgttgcagacgtccggaaaagtcagctgcctgctgagggcgacgcaggtgccgaatgggcagcagctgtattgaagcaagaacgagcccatgaagtgggcgcacagggtggaccacctgtggcccaggtggagcaggacctgcccatttccagagaaaatctaaccgacctcgtggtggatacagacacgctaggagagagtacgcaaccccaacgcgaaggggcacaggtacccaccggacgcgaaagggagcaacacgtggggggaacaaaagacagcgaggataactatggtgacagcgaagacctggacctccaagccacacagtgctttcttgaaaaccaaggactcgaggccgtccaaagtatggaagacgaacccacacaggcatttatgcttacccccccccaggagctgggtccatcccattgtagtttccagactactgggacacttgatgagccatgggaagtgctcgccacccagccgttctgcctcagggagtctgaggattcggaaacacagcccttcgacactcatctcgaagcctatggtccatgcctctctcctcctcgagctatcccaggcgatcagcatcctgagagccccgttcatacagaacctatggggatacaaggtaggggcaggcagaccgtcgataaagtgatgggtatccccaaggagaccgccgagcgcgtggggccagagcgaggcccactagaacgtgagacagaaaagttgcttcccgaacgccagacagacgtgaccggtgaagaggagttgacaaagggcaagcaggatcgggaacaaaagcagctcctagcaagggatacccagcgacaggaatctgataaaaatggtgagagcgcttcccccgaacgcgatagagagagcctcaaagtggaaatagaaacatccgaggagatccaggaaaaacaggtgcaaaaacagacactcccatcgaaagccttcgagcgcgaagttgagcgacctgtggccaatagggagtgtgaccctgccgagctggaggagaaggtcccaaaggtcatcctggagagagacactcagagaggcgagccggagggcggatcacaagaccagaagggccaggcatcttctcccactcctgagcccggtgtcggcgcgggagatctgccaggtcccactagcgccccagttccctccggttctcagagcgggggccgcgggagcccagtttctccccgacggcaccagaagggactgctcaactgcaaaatgccacctgccgagaaggcctcccgaatcagggccgccgagaaggtgtcacgcggggatcaggagtcaccagacgcctgcctacccccaaccgtcccagaggcacccgcccctccgcaaaagccattgaacagtcaatcgcagaagcatcttgctccacctcctctgctcagtccgcttctgccatccattaagccaacggtcaggaagactaggcaggatgggtcccaagaagcccctgaagcccccctctcttctgaacttgaacccttccatcctaagccgaagatcagaacacgcaagagtagcagaatgactccatttcctgctacatctgctgcccccgagcctcacccaagtacgtctacagcacagccggtgacacctaaaccaacttctcaggccacgcgttcaagaaccaataggtcatctgttaaaacgccagaaccagttgtaccaaccgcgcctgagttgcagcctagcaccagtaccgatcagccagtaacgtccgagccaacaagtcaggtcacgcggggcaggaaatcaagatcttcggtgaaaacccctgagacagtcgtgcccaccgccctggagctgcaaccatccaccagtactgatcgtcccgtgactagtgaaccaacctcccaggcgactagaggaagaaagaaccgatcttcggtaaagactcccgaacccgttgtgcccactgcacctgagctgcagcccagtacatctaccgaccaacccgttacctcagaaccgacctatcaagccacaagaggtcggaagaacagatcctcagtcaagacaccggagcctgtggtccccacggcgcccgaacttcggccctctacctcaaccgaccgaccagtcacccccaagcctacatctcgtaccacacgaagtagaacaaacatgtcatctgtgaaaactcccgagacagtcgtgcccactgcaccagagctgcagatcagcactagcacagatcagccagtgacccccaagccgacaagtcggacaacccggtcgcgtacaaatatgtcctccgtgaaaaaccccgagtccacggtgccaatcgcccccgagctgcctccttcgacttccactgagcagcccgtcaccccagagcccacatctcgcgctacccggggcaggaaaaaccgctcctctggaaaaaccccagagaccctggtccccactgctcctaaactggagccttccacctctacggaccaacctgtgaccccagagcccacttcgcaagcaacaaggggcagaacaaaccgctcctctgtcaagacgccagagacggtagttcctactgcacctgaattacaaccaagcacaagcactgaccaacccgtgacgccagagcccacctcacaagccactcgagggaggactgatagatcatctgtgaagacgcctgagaccgtcgtcccaactgctcccgagctgcaggcctcagcctccaccgaccagccggtaacttctgaaccgactagtcggactactcggggaaggaaaaaccgcagcagcgttaagacgccggagacagtggtgccagcagcccctgaattgcagccttctacttccaccgaccagccagtgaccccggaaccaacctccagggccacgcgcgggcggactaacagaagcagtgtcaaaacccccgagtccattgtgcctatcgctccggaactgcagccatccacatcacggaaccagcttgtgaccccagagccgacttcccgagcaacgaggtgccgaactaatcggagtagtgtgaagacccctgagccagtcgtgcccaccgctcctgaacctcaccccactacctctaccgatcagccagtaacaccgaagctgacctctagggccaccaggaggaaaacaaacagaagttccgttaaaactccgaaacctgttgaaccagccgccagtgatctggagccgttcacccctactgatcagagcgtaacgccagaggcaatcgcacagggcgggcaaagcaaaacactgaggtcatccacggtaagggctatgccagtgcccaccaccccagaatttcagtccccagtgactaccgatcaaccgatctctcccgagcccatcactcagccaagttgcattaagcgacagcgagccgctggtaacccgggttccctggccgctcctatagatcataagccctgctccgctcccctggaaccaaagtcacaggcaagccgaaaccagcgctggggggcagtccgggctgcagagagcctaactgcaatcccagaaccggccagcccgcagctgctagagacccccatccatgcctcgcaaattcagaaagttgagcctgccggtaggtcccggttcacaccggagctgcagccgaaggcttcgcagtctagaaaacgctctctagctaccatggatagtcccccacaccagaaacagccacaacggggtgaggtgagccagaaaacagtgattatcaaggaggaagaggaagatacagcagagaagccaggaaaagaagaagatgtggttactcccaagcccgggaaaaggaagcgggatcaagccgaggaggagcctaaccgcattccctcccgatctctgcgacgtacgaagctaaatcaggagagcacagcgccaaaagtcttgtttacaggggtggtggatgccagaggagagagggctgtcctcgctcttggcggatcactggccggcagcgccgccgaggcctctcacctggtaacagatcgaatacgcagaaccgtgaagtttctgtgcgccctcgggcgcggaattccaatcttatcccttgattggctgcaccagtctcggaaggctggattcttcttgccgcctgacgaatatgtggtcaccgaccccgagcaagagaagaacttcggctttagcctccaggatgcactgtccagggctagggagagacgattgctggaaggttacgaaatttacgtcacccccggagtgcagccaccaccccctcagatgggagaaattatcagctgttgcggcggtacgtacctaccaagcatgcccagaagctacaaaccgcagcgcgtcgtgatcacctgtccacaggactttccccactgcagtattcccctcagggtgggattgcccctcctctccccagagtttctgctgactggcgtcctcaaacaagaggccaaaccggaggctttcgtcttgtcccctctcgaaatgtcaagcacctag

SEQ ID NO: 15909 - DNA, 489 bp, synthetic construct
  misc_feature 1..489: note = Description of Artificial Sequence: Synthetic coding sequence
  source 1..489: mol_type = other DNA
atggaagacactcaggctatcgattgggatgtggaggaagaggaagagactgaacagtcatctgaatccctgagatgtaatgtggagcccgtggggcgccttcacatcttttcgggtgctcatggccccgagaaggacttcccattacaccttggcaaaaacgttgtgggcagaatgccagattgttccgtcgcgctgccattcccttcaattagtaagcagcacgccgagatcgaaattttggcttgggataaagcccctatcctgcgtgactgtgggtctctcaatggaactcagatactccggcctccgaaagtcctcagccccggggtgtcccatagactgagagatcaggagctgattctgtttgctgatctgctgtgtcaataccatcgactcgacgtttcactccctttcgtttcacggggaccgctgaccgtggaagaaacccctcgcgtccaaggggagacacaaccacagaggctttag

SEQ ID NO: 15910 - DNA, 384 bp, synthetic construct
  misc_feature 1..384: note = Description of Artificial Sequence: Synthetic coding sequence
  source 1..384: mol_type = other DNA
atggaggacacccaggcaattgactgggacgtggaggaggaggaggaaactgaacagtcaagtgagtccctgaggtgcaatgtcgagcccgttggccgtctccatatcttctctggcgctcatgggcccgagaaagacttccctttgcatttaggaaagaacgtcgtgggccgcatgcccgactgctcagtggccctgcccttccctagtatttcaaaacagcacgccgaaatcgagattctcgcgtgggacaaggccccgatactaagggattgcggcagtttgaatggaacgcagatactcagaccacccaaggtgctttccccaggggtgagccaccgcctgcgggaccaggagctaatcttgttcgccgaccttctgtag

SEQ ID NO: 15911 - DNA, 921 bp, synthetic construct
  misc_feature 1..921: note = Description of Artificial Sequence: Synthetic coding sequence
  source 1..921: mol_type = other DNA
taacatgttggaggtaccaaagacagtgaggacaactacggtgactctgaagacctggacctgcaggctacacagtgctttctggagaatcagggactggaagcagttcaatctatggaggatgagcctacacaggccttcatgttgacgccaccccaggagctgggcccatctcactgttccttccagaccactggtttgctgaattgtaaaatgccccctgccgagaaagcgtcccgcatccgcgcagctgaaaaagtcagccgtggagaccaggagtctccagatgcatgcttaccccctacagtgcctgaggcccccgctccgccccagaaaccacttaactcccaatctcagaaacatcttgctcctcccccgttattgtcaccgctgctgccttcgataaagcctaccgtgcgaaaaacccggcaggatgggagtcaggaggctccagaagcacctttatcctccgagctggagcctttccatccgaaaccaaaaattcggactcggaaaagctcccgtatgacccccttcccagccacgagcgccgccccagagccgcatccgagcacttccacggctcaacccgtgaccccaaagccaacaagccaagcgacccgctcgcgcaccaatcgcagctcagttaaaacccccgagccggtcgttccgactgctcccgaattacagcccagcaccagcacagaccagcccgttacctctgagccaacaagccaggttacacgtggcaggaagagcaggagcagcgttaagacacccgaaaccgtggttccaaccgccctcgagctccaaccctccaccagcacagaccgacctgtgacatcggagccgacttctcaggctacccggggcagaaagaatcggtcctctgtgaagacaccggaacctgttgtgccctag

SEQ ID NO: 15912 - DNA, 342 bp, synthetic construct
  misc_feature 1..342: note = Description of Artificial Sequence: Synthetic coding sequence
  source 1..342: mol_type = other DNA
atggaggatactcaagcgatagattgggatgttgaggaagaagaggagacagaacaatcatccgagtcactgcggtgcaatgtggagcctgtaggacggctgcacattttctccggtgcccatggacctgagaaagactttcccctgcacctcgggaaaaacgtggtgggcaggatgccagactgttcagtggctctgccatttccatccataagtaagcagcacgcagagatcgagattttggcctgggacaaagcaccaattctgagggattgcggctctttaaacggtacgcaaatactccgacctcctaaggttctgtctcctggcgtcagccattag

SEQ ID NO: 15913 - DNA, 5409 bp, synthetic construct
  misc_feature 1..5409: note = Description of Artificial Sequence: Synthetic coding sequence
  source 1..5409: mol_type = other DNA
atggaggacactcaagccatcgattgggacgtggaggaagaggaggagacagagcagtcgtccgaatccttgcgctgcaatgtcgaaccagtaggacggttgcatatcttctccggcgcacatggccctgaaaaagattttcctctccatctgggcaagaacgtggttggccggatgccagattgtagcgttgctctgccctttcctagtatctcaaagcagcacgctgagatcgaaatcctggcctgggataaagcgcctatactgagagactgtggatcccttaacggtacgcaaattctgcgtccacccaaggtactaagtccaggcgtctctcatagacttagagaccaggaactaatcttgttcgcagacctgctctgtcagtatcacaggctggatgtttcattacctttcgtgagccgcgggccgctcacagttgaagagacaccacgggttcagggtgagacccaaccacaacgactcctgcttgcggaagactcggaagaagaggttgatttcctgtctgagagaagaatggtgaaaaagtctcggactacttcaagctccgtgatagttcctgaatccgatgaagaggggcattcccccgtactgggcggtttagggcctcctttcgccttcaacctcaactctgataccgacgtggaagaaggccagcagccggcaacagaagaggccagcagcgctgccagaagaggggccacagtggaggccaagcaaagcgaggccgaggtggttaccgagatccaattggaaaaggaccaaccattggtgaaagagaaagataacgacacgaaagtgaagagaggtgccggaaatggcgtcgtgcccgccggcgtgattctggaacgttcccaacctccaggcgaggatagtgacaccgacgttgatgatgactcaagacctccgggaagacccgccgaagtgcatctggaaagggcccaaccgtttggtttcattgattcagacacagatgccgaggaggaacggatccctgctactcccgttgtgattccaatgaaaaaacgtaaaatctttcacggggtggggacccgcggacccggcgctcccggcctcgcccacctccaggaaagtcaggctggctctgacactgacgtggaggaaggaaaggcccctcaggctgtgccgttagaaaagtcccaggcctcaatggtgattaacagcgacaccgacgacgaagaggaagttagcgccgctctcacgctcgcccacctgaaggaaagtcagccagctatctggaatcgggacgccgaggaggatatgccacagcgagtggtgctacttcagagatctcagactactaccgagcgcgactccgataccgatgttgaggaggaagaactgcctgtagaaaatcgtgaagccgttttgaaggatcatacgaagattcgtgcgctcgtgagggcccacagcgagaaggaccagcctccttttggcgactccgacgacagcgtggaagctgacaagtccagtcccggaattcacctggagagatctcaggcatctaccaccgtcgatatcaacacacaagtcgagaaggaagttcctccaggatcagctattatacatatcaagaaacaccaagtgtcagtggagggcacaaaccaaacagacgtaaaagctgtgggtggtccagctaagctgttggtagttagccttgaagaggcgtggccactccatggcgactgcgagactgacgcagaagaaggcactagcctgaccgcatctgttgtcgcggacgtgcggaagagccagctgccagctgagggagacgcaggggccgagtgggccgccgccgttctgaagcaggagagggcccacgaagttggggcccagggaggacccccagtggctcaggtggaacaagatttgcccatatctagggaaaatcttactgacctggtagtcgacaccgacacgctcggagagtcaactcagcctcaacgcgagggtgcacaggtgcctactggtcgtgaacgagagcagcacgtcggggggacgaaggattcagaggataattacggggactcagaagatctcgacctccaggcgacccagtgtttcctggaaaatcagggactggaggccgtgcagtcaatggaggacgagcccactcaagcctttatgctgacacccccacaggaactgggtccctcccactgtagctttcagaccaccggcactctcgatgagccatgggaggtgctggctactcaacctttctgtttgcgcgagtcagaggacagtgaaacccagccattcgacactcacctcgaggcttatggtccttgcttaagcccgccacgcgccatacctggggaccaacacccggaaagcccagtccatactgaacccatggggattcaaggtcgcggcaggcaaactgtggataaggtcatggggatacccaaagagacggccgaacgggtcggacccgaacgggggccattggagcgggaaacagagaagctgctgccagaacggcaaacagatgttaccggggaggaggagctgactaaaggcaagcaggaccgggagcagaagcaattgctggcaagggacacacagcggcaagaatcagacaagaacggcgaatccgccagcccagagagagaccgagaatctctcaaggtcgaaattgagacgagcgaggagatccaagagaaacaggtccaaaaacagacactacccagtaaagcctttgagcgtgaggtagagcggcctgtggccaaccgtgagtgtgacccggctgagctggaagagaaggtcccaaaggtcattctggaaagagacacccagagaggggaacccgagggggggtcacaggatcagaagggccaagcctcctcccccacccctgaaccaggcgtgggggcgggcgatttaccaggcccaacctcggcgcctgtaccttcggggagtcagtcaggcggacgcgggtctcctgttagtccccggcggcaccagaagggccttctgaattgcaagatgcccccagccgaaaaagcctcccgaatccgcgcggcggagaaggtgagccggggcgatcaagagtctcccgatgcgtgtctgcccccgacagtgccggaggcaccagctccaccacaaaagcctctgaacagtcagtcacagaagcacctcgccccgccccccctactgagtcccctgctgccaagcatcaagccaacagtgaggaagacacgtcaggacggctctcaggaggcgcctgaggcccccctgagttcagagttagaaccctttcatcccaagcctaaaatccgtaccagaaaatcttctcggatgaccccttttcccgccacctcagccgcgcctaaactggagccatccacttcaactgaccaacccgtgacgccagaacccacaagtcaggcaacacgcggcaggacaaacaggtcatcagtgaaaacaccagagacggtcgttccaaccgcccctgagctccaaccttcgacttctaccgatcagcccgtgaccccagagcccacttctcaggcaactcgagggcgcaccgatcgctcatctgtgaaaacacccgagacagtggttcccacggcaccggagctgcaggctagcgcatcgaccgaccagccagttaccagcgagcccacttccaggactaccagggggagaaaaaatcgctctagcgtgaaaacacccgaaaccgtggttcctgcagctccagagctccagccgtccacaagtacagatcagcctgtgacccccgaacctacctctcgggctacacgaggaaggacaaatagatcctccgtcaaaactcctgaatctatcgtccctattgcccccgagttacagccaagtacctctaggaaccagctcgtaacacccgagccaacctcacgcgctacgaggtgcagaacaaatcggtctagcgtgaagacccccgagccagtcgtacctacggcaccagaaccacaccccacaacaagcaccgaccagcccgttactcctaagctcacatctcgtgccacgcgtagaaaaacaaaccggtcctccgttaaaacccctaagccagtggaacctgctgcaagtgacctcgagccatttactccaacggatcagtctgtcacgcccgaggctatcgcccaaggcggtcagagcaagacgctgcgttcttcaacggtgagagctatgccagttcccactactccggagttccagagtccggtgactacggaccagcccattagccccgaacccatcacccagccatcttgcatcaagcgccagagggcagcagggaatcccggcagccttgcagcacccattgaccacaagccgtgttccgccccattagaaccgaagtcacaggccagtcgaaatcagcgttggggcgccgtccgggccgccgaatcgcttactgcaattcccgagcctgccagtccccagcttctggaaacccccattcacgcgagccagatacaaaaagtggagccagccggaagatcacgcttcactccggaacttcaaccaaaagccagccagtctcgtaaacggagtctcgcaactatggacagcccgcctcaccaaaagcaacctcagaggggagaagtatcccagaagaccgtcataatcaaggaggaggaggaagacacagctgagaagccaggtaaagaagaagatgtggtaacgccgaaacccggaaagcggaagagagaccaggctgaggaagagcccaacaggatcccaagccgcagcttgagaagaactaaactgaaccaagagtccaccgcacccaaggtgttatttacaggcgttgtggacgcgcggggggaaagagccgttctcgcgttgggagggtcattggctggcagcgccgctgaggcatctcacctggttactgatcggatccggcgtacggtgaaattcctttgcgccctggggagaggcatccccatcctgtccctagactggttgcaccagtcccggaaggctggcttctttttgccgccagacgaatacgtggtcactgaccctgagcaagagaaaaactttggatttagtttgcaggacgctctctcccgcgccagggagagacgactcctggagggatatgagatttacgttaccccaggagtgcagcctcctccccctcaaatgggggaaatcatctcctgctgtgggggcacgtacctcccaagcatgcctcgcagctacaaacctcagagagtcgtgatcacttgccctcaggacttcccccattgcagcatccctctcagagtgggcctgccactcctgtcccctgaattcctgctgacaggagtgttgaagcaggaagccaaaccagaggctttcgtactaagcccgcttgagatgagttccacttag

SEQ ID NO: 15914 - DNA, 666 bp, synthetic construct
  misc_feature 1..666: note = Description of Artificial Sequence: Synthetic coding sequence
  source 1..666: mol_type = other DNA
atggaggatacgcaggccatagattgggatgttgaggaggaggaagagaccgagcagagctcggagtctttacgatgcaatgtggagccagtaggcaggctgcatattttctctggcgcacacggtccggaaaaagacttccctctgcatctgggaaaaaatgttgtggggcgaatgccagattgtagcgtagccctgccttttccttctataagcaagcaacacgcggagattgagattttggcttgggacaaagctccgatcctgcgagactgtgggagcctgaacgggactcagatattgagctcatccttgccccccccccaaacttctttgttacctctgagtctcaggcttcgactgctgggggaagagcagatcgaccctctcagtcggctgcttaagcagctgagcccacagcctctctcctaccggctcccccccccccaaacctccctgtctccactctcaccccacctgggccccctgggcgaggagaaaattggcccactgagcagaccactgaaacagctctgcccgcaacccttgagctcctccctgccacctccccagaccaaccttagcccactgagcccacacctggggcctctcggcgccgggcagattggaccactcagccgtcccttgaaccaattatccctgtag

SEQ ID NO: 15915 - DNA, 738 bp, synthetic construct
  misc_feature 1..738: note = Description of Artificial Sequence: Synthetic coding sequence
  source 1..738: mol_type = other DNA
atggaggacacacaggctatcgattgggacgtggaagaggaggaggaaacagaacagagttctgagtccctgagatgcaatgtggaacccgtgggacgtcttcatattttttccggcgctcacggacctgagaaggactttcccctccacctgggcaagaatgtggttggtcggatgccagactgctctgtggccctgccctttccctcgataagtaagcagcacgcagagatagagattctcgcttgggacaaagcacctatcttgcgcgactgcgggtccttgaatggcactcagatactgagaccccctaaggtcctctctcccggggtaagccaccggttgcgggatcaggagttaatcctttttgctgacctgctttgtcagtatcaccggttggacgttagccttcccttcgtaagtagggggcctcttacagtggaagagacgcctagggtccagggagagacccagccccaaagactgctgctggccgaagactcagaggaagaggtagatttcctaagcgaacgccgtatggtgaagaaaagcaggaccacatctagtagtgtgattgtgccggaaagcgatgaggagggtcactctcctgttctgggcgggttgggaccaccttttgcctttaatctgaacagcgacacagacgtggaagagggccagcagcctgcgaccgaggaggcaagcagtgcggctcggagaggggctacagttgaggcttag

SEQ ID NO: 15916 - DNA, 735 bp, synthetic construct
  misc_feature 1..735: note = Description of Artificial Sequence: Synthetic coding sequence
  source 1..735: mol_type = other DNA
atggaggacacccaagctatcgactgggatgtcgaggaggaagaagagaccgaacagtcctcggaaagcctccgttgcaacgtagaaccagtaggcaggctgcacattttctccggggcccacggtcctgagaaggatttccctctacacctgggaaaaaacgtggtcggtcggatgccagactgcagtgtggcattgcctttcccatctatttcaaagcagcacgccgagatagaaatcctggcatgggacaaggccccaatcttaagggattgtggatcccttaatgggacacagattctccgtccccccaaggttttatctcccggggtgtcacaccggcttagagaccaagagctgatcctgtttgccgacctcctctgccagtaccaccgcttggacgtcagtctgcctttcgtcagtaggggcccccttacagtggaggagacgcctcgggtccagggggagacgcagcctcagcgactgctgttggcagaggacagcgaagaagaagtagacttcctgagcgaacgacggatggttaaaaagtccagaacaacatcgtcttcggtcatcgtgcccgaatcagacgaagagggccactcacctgtcctcggtgggctgggccccccgtttgcttttaatctcaactccgatacagatgtagaggaaggtcagcagcctcatcgcggcggcctgctgtcttgtcaaaaacgctgccactgtagaggttag

SEQ ID NO: 15917 - DNA, 5478 bp, synthetic construct
  misc_feature 1..5478: note = Description of Artificial Sequence: Synthetic coding sequence
  source 1..5478: mol_type = other DNA
atggaggacactcaggcaatcgactgggatgtcgaggaggaggaggaaaccgaacagagttcagagagtctccgctgcaatgtggagccagtaggacgcctgcatatatttagcggagcccacggccctgagaaagacttccccctgcatctcgggaaaaatgtcgtcggtagaatgccagactgctcagtggcattgccctttccatctatatccaagcagcatgcggagatcgaaattttagcctgggacaaagcacccatactgagagactgtgggagtctgaatggcactcagatccttaggccacctaaggttttgagcccgggagtaagccatagactgagagaccaggagctgatcttgttcgctgacctattatgccaataccaccggcttgacgtttcactgccttttgttagccgagggcctctgactgtggaggaaactcccagagtccagggcgaaacccagccgcagagactactgctggctgaagatagtgaagaagaggtggatttcctgagcgagcgccgcatggtgaaaaagtcccggaccacctctagttcggtgattgtcccagaatctgatgaggagggacattcgccggtactcggtgggttaggacctccatttgcttttaacctcaacagtgacactgacgtggaggaaggacaacagcccgccacggaagaagcaagctcagccgcgcgccggggggcgactgtagaagcaaagcaaagtgaggccgaggttgtaacagagatacagttagagaaagaccagccactggtgaaggagaaggacaatgacacgaaggtgaagcggggggccgggaatggggttgtacccgccggggttattctagagaggtcacagcctccgggagaagattctgacaccgatgtggatgacgactcaagaccccctggacggcccgccgaagtccatctagaacgcgcacagcctttcggttttatagattccgataccgacgccgaagaggagcggatcccagccacaccagtggtcattccaatgaagaagcgaaaaatctttcatggtgtggggacccgcggacctggagctcctggcctcgcccatctccaggaaagccaggcaggctcagacaccgatgtggaggaagggaaagcgccacaggccgtgccgctagaaaaaagccaggcatctatggtgatcaattccgacactgacgatgaggaggaggtatctgcagcacttacccttgcacaccttaaggagtcgcagccagccatttggaaccgggatgccgaagaagatatgccccaacgtgttgtgctattgcagaggtctcagaccacaacagagagagactcagatacagacgtcgaggaagaagagttgcccgtggaaaaccgcgaggccgttctgaaggaccacacaaaaatccgggcgctggtgcgcgctcacagtgagaaagatcaaccccctttcggggatagcgacgattccgtggaagctgataaatctagccctggtatccacctggaacgcagccaggcatccacaactgttgacatcaacactcaggtggaaaaagaggtgcctcccgggtctgccatcatccacatcaagaagcaccaggtgagcgtagagggtaccaaccagacagatgtaaaggccgtggggggacctgcaaaactactcgtcgtgagtctggaggaggcttggcccctgcacggcgactgcgagacggacgccgaagagggcacatcgctgacagcatcagtggtggcagacgtgagaaagagccagctgcctgccgagggcgatgcaggggcagagtgggccgctgctgtcttaaagcaggagagagctcacgaggttggcgctcagggtggacccccagtcgcacaggtggagcaggatttgcccattagcagggagaatttgaccgaccttgtggtcgacactgatacgctcggagaaagcacccagccccagcgcgagggagcgcaggtcccaacagggagggagagagagcagcatgttggcgggactaaagattctgaagacaactacggcgacagtgaggatctggacttacaggccacccagtgctttctggagaaccaggggctggaggcagttcaaagtatggaggacgagcctactcaggcgttcatgctgaccccaccgcaggaattaggtccgagccattgctcctttcagactactgggctcctgaactgcaaaatgcctccggccgagaaagcatcccggatacgcgctgcagaaaaggtgagtaggggggatcaagaatcacccgacgcatgcctgccccctaccgtccctgaagcaccagctcctcctcagaaacctctaaattctcagtcacaaaaacacttagccccccctccactcttgtcccctttgcttcctagcattaaacccacagtgcgaaagaccaggcaggacggcagccaagaagcccccgaggctcctctgtcaagcgaattggagcccttccacccaaaaccaaagatacggaccagaaagagcagcagaatgaccccatttccggcaacctcagccgccccagaacctcacccctccacatccacagcacaacctgtaactcccaaacctactagtcaggcaactcgttcgaggacaaatcggtcatctgttaaaaccccagagccagtggttcccactgcccctgagctccagcctagcacgtccacggatcagcctgtaacatccgagccgaccagtcaggtcacccgcggaagaaagagccgctcctcagtcaaaactcctgagacagtcgtgccaaccgctttggagctgcaaccaagcacctccactgatcggccagtgacctctgaaccaacaagccaagcaacacggggaaggaagaataggagctctgtgaagacgccagaacctgtggtgccaaccgcgcccgagctacagccttccacctctactgaccaacctgtgaccagcgagcctacatatcaggccactagagggagaaagaacaggtccagcgttaagacgccagaaccagtggtgcccaccgcgcccgagctgcgccccagcacatctaccgatcgacccgtgactcctaagcctaccagtagaaccacaagatcccgcaccaacatgtctagtgttaagacccctgagacagttgtgccaactgccccagagcttcagatctcgacctctacagatcaaccagtaacaccaaagccaacatctcggaccaccagatctcgcaccaatatgtctagcgtgaagaaccccgagtccaccgtcccaatcgcgccagagctgcctcccagcacctccacagaacagccggtgactccagagcctacctccagggcaacccgtggtcggaagaatcgctctagtgggaaaacccctgagactctggttcctactgcccctaagctggaaccaagcaccagtacagatcagccagtgacgccggagcccacaagccaggctacccgggggcgaaccaaccggagctcggtcaaaacacctgaaacggtggtacccactgcgcctgagctgcagccttccacatctacagaccaaccggtgacaccagagcctacttctcaggcaacccgggggaggactgaccgcagcagcgtcaaaacgccggaaacagtggtccccactgccccagaactgcaggccagcgcatccactgatcagcctgttacaagtgagcctacatcacgcaccaccagaggacggaagaaccgcagctctgtgaaaaccccagaaactgtggttcctgcagctcccgagctacagccctccactagcacagaccagccagtgacaccggagcccacctccagggcaaccagagggcggaccaatcgctcttctgtgaaaaccccagaaagcatcgtccccatcgccccggaacttcagcctagcacttctcggaatcaactggtcacgccagagcctacatcccgggctacccggtgcaggacaaatagaagctcagtgaaaactccagagccagttgtccccaccgctccagagccccatccgacaacatctacagaccagcccgtgacacccaagttgacctcccgtgctacacgccgcaagacaaatcggagctccgtcaaaacgcccaaacctgtggagcccgccgcctccgatttggagcccttcaccccaacggaccaatctgtgactccagaggcgattgctcagggaggtcagagcaagactctcagatcctccactgtgagagctatgccagtccctaccacaccagagttccagtctcccgtgactactgatcagcctataagcccggaacccatcacccagccctcatgcatcaaaagacaacgcgccgccggtaatcccggcagtcttgctgcccctattgatcacaaaccatgttccgctcctctggagcctaagagtcaagcttcccgaaaccaaaggtggggggccgtcagagctgccgagtctctgaccgccattcctgagccagcgtcacctcaactgctcgaaacccccattcacgctagccaaatacagaaggttgaacccgccgggagaagtagatttaccccagagttgcagccaaaggcctctcagtcacggaaacgcagccttgcaaccatggacagccctccccaccagaaacagccacagcggggcgaggtctcccagaagactgtgattattaaagaagaagaagaggacactgctgaaaagcccggcaaggaagaggatgttgtgactccaaagccaggaaaaagaaagagagaccaggccgaagaggaaccaaaccgtattccttcacgaagcttaaggcggactaagttgaatcaggaatcaactgctcccaaggtgcttttcactggcgttgtcgacgctagaggggaacgtgctgtccttgctctggggggatccctagccgggagcgcggccgaggccagccacctcgtgaccgaccggatcaggcgtaccgtcaagtttttatgcgcgctaggtcgaggcattcctattctcagcctggattggttgcaccagagcaggaaagccggattcttcctcccgccagatgagtacgtggtgacggaccctgaacaggagaagaatttcggcttttcactgcaagatgcactgagtcgggcccgggagagacgcctacttgagggttacgagatctacgttactcctggagtgcaacctccacctccacaaatgggagagatcatttcctgctgcggcgggacatacttaccttcaatgccacggtcctacaaacctcagagggtggttatcacctgtccgcaggatttccctcactgttccatcccacttcgcgtcggtctgcccctgctttctccggagttcctgcttacgggcgtgttaaagcaggaggccaaacctgaagccttcgtactgagcccactagaaatgagcagtacctag

SEQ ID NO: 15918 - DNA, 4968 bp, synthetic construct
  misc_feature 1..4968: note = Description of Artificial Sequence: Synthetic coding sequence
  source 1..4968: mol_type = other DNA
atgtaccaccgccttgacgtcagtctgcctttcgtctccagaggccccctaacggtcgaagagacaccacgggtgcagggagaaactcaaccccaaaggcttcttttggctgaagatagtgaggaggaggtcgatttcctgtctgagaggcgaatggtgaagaagtctcgcaccacgtcctcatcagtcatagtgcctgaaagtgatgaggagggacatagccctgtgttgggggggctcggtccaccttttgctttcaacttgaattccgatactgacgtggaggaaggtcagcaaccagctaccgaggaggcttcatccgccgcacgacggggggccacagttgaagcaaaacagtccgaggccgaggttgtcaccgagatccagctggaaaaggatcagcctctcgtgaaggagaaagataatgacaccaaagtcaagcgtggggctggaaatggagtcgtccccgccggagtgattcttgagcgatctcaacctccaggtgaagattctgatacagatgtggacgatgattcccggcccccaggtcgaccagccgaagtccatctggaaagggcacagcccttcggcttcattgatagcgacaccgatgcagaagaagaacggattccagccacccctgtggtcatcccaatgaaaaagcgcaaaatctttcacggggtgggaacccggggccccggcgcacccggtctggcccatctccaggagtcgcaggctggctctgatactgatgtggaggagggcaaagctcctcaggctgttcctctggagaaatcccaggccagtatggttataaatagcgatactgacgatgaggaggaagtcagtgcagcactgactttggcccatctgaaagaatctcagcctgctatttggaatcgggacgcggaggaggacatgcctcagcgcgtggtgcttttgcagcgctcacagacaaccaccgagcgtgatagtgacactgatgtggaggaagaagagctgccagtcgagaaccgcgaggcagtgctgaaggatcacaccaaaattcgggcgcttgtccgagcccattccgagaaagaccaaccacctttcggggattccgatgattccgtggaggccgataagtccagtcccggcattcatttagaaagaagtcaggcaagcaccaccgttgacatcaatacacaggttgaaaaggaagtgcctcccgggagcgccattattcacattaaaaaacaccaggtatctgtggaagggacaaatcaaactgatgtgaaagccgtgggtggcccagctaaactgctcgtagtgagcctagaagaagcttggccactccacggggattgcgaaacggacgcagaggaagggacatctctcacagcatctgtcgtggctgatgtgagaaagtcacagcttcccgcggagggagacgctggtgccgagtgggccgccgctgttctcaaacaggagcgggctcacgaggtgggcgcccagggaggccctccagtcgcccaggtggagcaggatctccctattagccgtgagaatctcaccgacctcgtggtcgataccgatacactaggcgaaagcacacagccacaacgggagggggctcaggtgccaacaggacgtgagagagagcagcacgtaggggggaccaaagacagcgaggacaactacggcgattccgaggacctggacttgcaggctacccagtgttttcttgagaatcaaggtttggaagtacagagtatggaagatgagcctacacaggctttcatgctgacaccaccccaagaattgggcccctcccattgttccttccagactacaggcctgctgaactgcaagatgcccccagcagagaaggcaagcaggatccgagcagctgaaaaggtctcccgtggtgaccaggagtctccagacgcctgcctccctcccacggtgccagaggcccccgcgccaccgcagaaaccacttaacagccagtcacagaagcacctggcaccacctcctctgctttctccactccttccatccatcaagcctaccgtgcgtaagacccgccaggacggatcacaggaagcacccgaggctccgctcagttccgagctggaaccctttcatccgaaaccaaagattcgaacccggaaatcttctcgaatgactccgttcccggcaacgtcagctgcgccggagcctcatccttcaaccagcaccgcacaacctgtgacccccaaaccaactagccaagcaaccaggtcaaggaccaatcggagctctgtgaagactcccgagcccgtcgtcccaacggcccccgaattgcagccctctacctcaacagaccagcctgtgacgtctgaacctacctctcaggtgacccgcggcaggaaatccagatcaagtgtgaagactcccgaaactgtcgttcccaccgccctagagctgcagccgagcacctcaacagacagaccggtgaccagtgagccgacatcgcaggctactagaggccggaaaaacagaagcagtgttaaaaccccggaacctgtcgttcctacagctccggagcttcagccaagtacttctaccgatcaaccggtcacctccgagccaacctaccaggccacccgcggcagaaagaacaggtcttccgttaaaactcctgagcccgtggttcccaccgctccagaactgagaccttcaacttccactgataggccagtcacccctaaaccaacaagtagaaccaccagaagccgaactaatatgagctccgttaagaacccggagtccactgttcccatcgctcccgaactgcctcctagcacttccacggagcagcctgtgactcccgaacccaccagcagggccacacgtggtcgcaaaaacagatcaagtgggaaaaccccagagactcttgttcctaccgccccgaagttggagccgagcactagcacggaccagccagttacacctgagcctacaagccaggctacacgggggcggaccaaccgtagctccgtcaagaccccagagactgtcgtccccaccgcacccgagctccagcccagcaccagcaccgaccaacccgtcactcctgaacctacctcacaagctactagggggcgcaccgatcgttcttcggtgaagacacccgagacggtagtgcccaccgcccccgagctccaggcatccgcctctactgatcagcctgttacttctgagccgacatcacggaccaccaggggcaggaaaaatcgctcttcagtgaaaactcctgagaccgtcgttcctgctgctccggaactccagccttccacttccactgaccagccagtgacccccgagcctacaagcagggcgacccgtggccggactaatcgtagttctgtgaagacccctgagtcaatcgtgcctattgctcccgaactgcagccttccacttccagaaaccaactggtgactccagagcccacatcccgtgctacgcggtgtagaacaaaccgctccagtgtgaagactcctgagccagttgtcccaacagctcccgagccccaccctactacctccactgatcagccagtgactcctaagctaaccagccgggcaactagacgaaagaccaatcggtcttctgtcaaaactcccaagccagtggagccagccgcatcagaccttgagcccttcactccgactgaccagtctgtgacacctgaggcgatagctcagggaggtcagtctaagaccttgcggtcaagtaccgttcgcgctatgccagtccctacgacgcccgagtttcaaagccctgtcaccacggaccaaccaatttcccccgaacccattactcagccaagctgcatcaagcgccagagagctgctggtaaccctggatcccttgccgcccccatcgaccataaaccttgctctgcacccctggagccaaagtcacaggcgtcccgaaaccagaggtggggggccgtgcgtgccgccgaatccctgacggccataccggagccggcgtctccccagttgctggagacacccatccacgcttcacagattcagaaggtagagccagcaggcagaagtcgtttcactccagagttacagccaaaggccagtcagtctcgaaaaagaagcctggccacaatggactctccgcctcaccagaagcagccccagcgcggcgaagtgtcacagaaaaccgtcatcataaaagaagaagaagaggacaccgccgaaaaacctgggaaggaggaggacgtggtaaccccaaaacctggcaagagaaaaagagaccaggccgaagaggagccaaaccgcatccccagccggagcttgcgaaggaccaagctcaaccaagaatccaccgctcctaaggttctgtttacaggcgttgttgatgctcggggtgagagggcagtgcttgcactaggagggagtctggcaggatccgccgcggaggcttcccacctcgtgacggacaggatccgacgcactgtgaagttcctttgcgctcttggccgtggcattccgatattgtccctcgattggttgcatcagagtcggaaagccgggttttttctcccgcctgacgagtacgtggtcactgacccagagcaggagaaaaattttggattttcattgcaggacgccctgtccagagctagagaacgacggttgttagaaggttatgagatatacgtgactcctggggtacagccccctcccccccagatgggtgaaatcatcagttgctgtggcggtacctacctgccatcaatgccacgctcttacaaacctcagagggttgtgatcacctgcccgcaggactttccccactgcagcattcccttacgggttggactccctctccttagcccagagttcttactgacgggcgtcctcaaacaggaggccaaacctgaggccttcgttttgagcccattggaaatgtcatcaacatag

SEQ ID NO: 15919 - DNA, 1941 bp, synthetic construct
  misc_feature 1..1941: note = Description of Artificial Sequence: Synthetic coding sequence
  source 1..1941: mol_type = other DNA
atgggtctgcctaggctcgtgtgcgctttcttgcttgccgcgtgctgctgctgcccccgcgttgctggggtccctggcgaggcggaacagccagcaccggagcttgtggaggtggaggtgggcagcacagccctgcttaagtgcggactgtctcaatctcagggcaacttatcccacgtcgactggttttccgtgcataaggaaaagcgaacgctcatctttagggtgcgtcagggtcaaggtcagtccgagcccggtgagtatgaacagcgcctcagtctgcaggacaggggcgccacccttgcgttgacacaagtgacacctcaagatgagcggatctttctatgccagggcaagaggccaagatcacaagaatatagaatccagctccgagtctacaaagctcccgaagaacccaatattcaggtgaaccccttgggaatccccgtgaactccaaagagcctgaggaggtggctacttgtgtgggcaggaacggatatcccataccacaagtcatctggtacaagaatggaagacccctgaaggaagaaaagaacagagtgcatatccaaagcagccagacggtcgaatcaagtggtctatataccctgcagagcattctcaaagcacagcttgtcaaggaggataaggacgcccagttttattgcgagctaaattaccgactgcctagcggcaatcatatgaaggaaagcagagaggttacggttccagtcttctatcctacagagaaggtttggctggaggtggaaccagttggaatgctgaaagaaggagaccgcgtcgaaattcggtgcctggctgacggaaatcctccgccacatttctccatttcaaaacagaaccctagcacccgggaggccgaggaggaaacaacaaacgacaatggcgttctggtgctggaaccagcccgcaaggagcactctgggcgatatgaatgtcagggtctcgatctggacactatgatctccctgctcagcgagccccaggaactgctggtcaactacgtttctgatgtcagggtgtctcctgctgctcccgaaaggcaggaaggatcaagtctgactctgacgtgtgaggcggagtcatcccaggacctggagttccagtggctgcgtgaagagacaggtcaggttcttgagaggggcccggtcctgcagttgcatgacctgaaaagagaggccggaggcggttacagatgcgtggcctcagtcccttccatacctgggctgaatcggacacaactggtgaatgtagccatctttggaccaccctggatggccttcaaggagcgcaaggtctgggttaaggaaaacatggtgctgaacctttcttgcgaggccagcggacatccaaggccgacgatctcatggaacgttaatggcaccgcctctgaacaggatcaagacccgcagagggtcttatcaactctgaacgttttggtgacacctgaactgctggagactggcgtcgaatgtaccgcctcaaatgacctgggcaagaacacaagtatcttgttcctcgaactggtcaatctcaccacactgacacccgatagcaacactacaaccggattatctacctccacagcgtcaccacacacccgtgcgaattccacttcaacagagcggaagctgcctgaaccggagagccgaggcgttgtcattgtggccgttattgtttgtatcttggtcctcgccgtcctgggggcggttctgtatttcctgtacaagaaaggcaaactgccatgtagacgcagtggaaagcaagaaatcactctgcccccatctagaaaatccgagctcgtcgttgaggtcaagtcggacaagctgcctgaggagatgggcctgctgcagggtagttcgggggataaaagagctcccggtgatcagggcgagaagtacatcgacttgcggcactag

SEQ ID NO: 15920 - DNA, 1584 bp, synthetic construct
  misc_feature 1..1584: note = Description of Artificial Sequence: Synthetic coding sequence
  source 1..1584: mol_type = other DNA
atggtgtacatcgtgcgccagtttctgctttacaatgtaagcgggagtgtgtatctggatcaactgatcgtgcttctgaccgcaaagttttctatcctgagaattgcaggaagccgagtgcatcacagccctttttcaggtcacctggatgggtgttcctttctgtccttgcagcatagtctgcacacctccctcgacatgtctagacatgagaacgtctttctgggactgacattaagctctaaatctgctggcctaaagggattccaacttgctttcgtccctggcttgctacagggcaccggtggctatcttgatgggccacttcccaccccagtcgacaatcccagggtgggattggaagttggcttacgcctgagcctgcccccgttgcccccttgtcctggtgtgcacattcagagtagtcaaacagttgagtctagcggactatacacgttacagagcattctgaaggctcagctcgtgaaggaggacaaagatgcccaattttactgcgaattaaattacaggctcccgtctggcaatcacatgaaggaaagccgcgaagtgactgttcccgttttctaccctaccgaaaaggtgtggctggaagttgagcccgtaggcatgctgaaggagggtgatagagtagagataagatgcttggccgatggaaacccacctccccatttcagcatctctaagcagaatccttctacccgcgaagcagaggaggaaaccaccaatgacaacggagtcctggttcttgagcccgcccgtaaggagcactcaggcagatacgagtgccaaggtctggaccttgacacaatgatcagccttctttctgaaccccaggagctgctcgtgaattatgtttctgacgtgagagtgagtcccgcggctccggaaagacaggagggttcctctctgaccctgacctgtgaggcagaatcttcacaggatctggaattccagtggcttcgggaagaaaccggccaggtgctagagcgcgggccggtgctccagctgcatgatctgaagcgcgaggccggcggtggctatagatgtgtggcctccgttccttctattcctggtcttaatcgtacccagctggtgaatgtggctatattcggacccccctggatggcattcaaagagcgtaaggtgtgggtgaaagagaatatggtgctgaacctgagctgtgaggcttccggtcacccgcgcccaacaatatcctggaatgtgaacgggacagcgtcagagcaggaccaagacccgcaaagggtgctctccactttaaacgtgctggtgacaccagagctccttgaaactggggtggagtgcaccgcttcgaatgaccttggtaagaatacaagcattctattcctggaactcgtaaacttaactacgctgacgcccgactcaaatactactacaggattgtctacatcaaccgcctctccacatactcgcgccaacagcacaagcacaggcaagcccggactggctagggagcagggctgcgccagggccagttttctgccttgcccctctcccgagtcgcccgttcagaagggtgaatag

SEQ ID NO: 15921 - DNA, 141 bp, synthetic construct
  misc_feature 1..141: note = Description of Artificial Sequence: Synthetic coding sequence
  source 1..141: mol_type = other DNA
ggagtggtcatcgtggccgtcatcgtttgcattctggtgctcgcagtgctgggcgctgtactgtatttcctctataagaagggcaaactcccttgtaggagatctggaaagcaggaaatggagcgtaatacctccatctag

SEQ ID NO: 15922 - DNA, 2253 bp, synthetic construct
  misc_feature 1..2253: note = Description of Artificial Sequence: Synthetic coding sequence
  source 1..2253: mol_type = other DNA
atgggcaaatccgaatcacagatggacattacggacattaatactccaaaacccaagaagaagcagcgctggactcctctggaaatatctctcagcgtgctcgtgctgcttctcacaataatcgccgtgactatgatcgctctctacgcaacatatgatgacgggatttgcaaatcgtccgattgcattaagtccgcagcacgcctgattcaaaacatggacgcaacaacggagccatgcaccgacttcttcaagtatgcctgtggaggttggcttaaacgaaatgtgataccggaaacaagctctcgctacggaaatttcgatatcttgcgcgacgaacttgaggtggtgttgaaggacgtcctccaagaacctaaaacagaggatattgtggctgttcagaaggctaaagccctctatcgtagctgcataaatgagtccgccatcgactcccggggcggtgagccacttctgaaacttttacctgacatctatgggtggccggttgccacagagaactgggagcaaaagtacggcgcatcctggacagcagaaaaagccatcgcgcagttgaattctaaatacggaaaaaaagtgctgatcaacttatttgtcggaactgacgataagaattctgttaatcatgtcattcacatagaccagccacggctgggtctgccatctagagactactatgaatgcacaggcatttataaggaggcctgtactgcctatgtggatttcatgatctccgttgccagactgattcgtcaggaggaacgtttgccgatcgacgaaaaccaactggccctcgagatgaacaaggtaatggaactcgagaaagaaatagcaaacgcaacagctaagcccgaggatagaaatgacccaatgctcctatataacaaaatgacactggcccagatccagaataacttctcactcgagatcaatggcaaacccttttcatggcttaacttcacaaacgaaatcatgtccaccgtgaatatctctatcactaatgaggaggacgtagtcgtctacgcacccgagtatttgacgaagctgaaaccaattttgacgaaatactcagccagagatctgcaaaatttgatgagttggcggtttattatggatctggtgagcagtctctcccgcacatataaagagtcgcggaatgcattcaggaaggctttatatgggacaacctcggaaaccgctacttggaggcggtgcgcaaactacgtgaacggtaacatggagaatgccgtggggaggctttatgtcgaggccgcattcgctggtgagagcaaacacgtggtggaggatctcattgcccaaattagggaggtgtttatccaaacgttggatgacctgacctggatggacgccgaaactaaaaaacgggcagaggaaaaggccctcgccattaaagagagaatcggatacccggacgacatcgtgtccaatgacaacaagctgaacaacgagtatctcgagctgaactataaagaggacgaatattttgaaaatattatccagaatctcaagttcagtcagtccaagcagttgaaaaaactgcgcgagaaagtcgataaagatgaatggatttccggcgctgcagtcgtgaatgctttttacagttccggccggaatcagatagtatttccggccggtattcttcagcctccattcttctcagctcagcaatccaacagccttaattacgggggcatcgggatggttataggtcatgagatcacccacggcttcgacgacaatggtagaaacttcaacaaagatggggaccttgtggactggtggacccagcagtctgcctccaacttcaaggagcagtcccagtgcatggtataccagtacggaaacttttcatgggacctcgcaggtggacaacatcttaacggaatcaacactctcggcgaaaacatcgccgacaatggggggctgggacaagcctacagggcataccagaactacatcaaaaaaaatggcgaggagaagttgctgccagggctagacctgaatcataagcagctgtttttcttaaattttgctcaagtttggtgcggcacataccgccctgaatatgcggtgaactcaatcaagaccgatgtgcattcaccaggtaattttaggattatcgggaccttgcagaattccgctgaattttcagaggctttccactgcagaaagaactcatatatgaacccagaaaagaagtgtagggtttggtag

SEQ ID NO: 15923 - DNA, 2253 bp, synthetic construct
  misc_feature 1..2253: note = Description of Artificial Sequence: Synthetic coding sequence
  source 1..2253: mol_type = other DNA
atggggaaaagcgagtcccagatggacatcaccgatattaatactccgaaaccaaagaaaaagcagcgatggacacccttagaaatctctttgagtgtgctggtgctcttgctgaccataatcgccgtgacaatgatcgctctctacgctacttatgacgatgggatctgcaagagttccgactgtattaaaagcgccgcacgcctcatccagaacatggacgccaccacagagccctgtacagatttctttaaatacgcttgcggggggtggcttaaaaggaacgttatccccgagacgagtagtcgatacggtaattttgacatccttcgggacgagctggaggtagtgctcaaggacgtgctacaggagcccaaaactgaggatattgtcgcggtccagaaagccaaggccctgtacaggtcatgcatcaacgaatcagctatagattctagaggcggtgagcctcttctaaaacttctgccggacatctatggatggcctgtggccaccgaaaactgggaacaaaagtatggcgccagctggacagcagagaaggctatcgcccagttgaacagtaagtatggcaaaaaggttctgattaatctgtttgtcggaacagacgataaaaatagcgtgaaccacgttattcacatcgatcagccgcgcctgggcctcccgagtcgtgactattacgagtgtacaggtatctacaaagaggcctgtaccgcttatgtggacttcatgatatcagtggccaggctcattcggcaggaagagaggcttcctatcgatgagaatcagcttgccctggaaatgaacaaggtcatggaacttgaaaaggaaatagccaacgcgactgccaaaccggaggatagaaatgaccctatgctgctatacaacaaaatgaccttggcccagatacaaaacaacttctcattggaaattaacgggaagccgtttagctggctgaatttcacgaacgagatcatgtcaacagtgaatatttcaataaccaacgaggaggatgtagttgtgtacgctccagagtaccttaccaagctgaagccgattctgacaaagtactctgcacgggacctccagaatttaatgtcttggcggtttatcatggatttagtttcttccctgtcacgaacctataaggagtccaggaatgcatttcggaaggccctatacgggactacgtcggagaccgccacgtggcgacgctgcgctaactacgttaatgggaatatggaaaatgctgtaggtcgactttatgttgaagctgccttcgctggcgaatcaaagcatgtagtggaagacttaattgcccagatccgcgaagtgttcatacaaacgcttgacgatctaacatggatggatgctgaaaccaagaaaagggcggaggaaaaggcactggccataaaggagcgcatcgggtatcctgacgacattgtctctaatgacaacaaactcaacaacgaatacctggaactgaactataaggaggacgaatattttgagaacattatacagaatctgaagttctcgcagtcaaaacagctgaaaaagctgagagagaaagtggacaaagacgaatggatcagtggcgctgcagtggtgaatgccttctattctagcggccgaaatcagattgtcttcccggctgggatcctgcagccacccttctttagcgcacagcagtccaattcacttaattatggaggaatcggcatggttattggacatgagataacccatggattcgacgacaatgggcgtaactttaacaaggacggtgacctggtcgactggtggactcagcagagtgcgtccaattttaaggagcagtcccaatgcatggtgtatcagtacggaaactttagctgggacttagctggcggacagcacctcaacggaattaacactcttggtgaaaacatagcagataacggtggattgggacaagcatatcgagcctatcagaactacatcaaaaagaacggtgaggagaaactcctgccggggctggatcttaatcataagcagctgttctttctgaactttgcccaggtgtggtgtggaacctacaggcccgagtacgccgtgaacagcatcaaaaccgacgtgcactctccaggaaactttaggattataggcacattacagaacagtgcagagttctctgaggcctttcactgccggaaaaacagctacatgaatcccgaaaaaaagtgtagagtttggtag

SEQ ID NO: 15924 - DNA, 2253 bp, synthetic construct
  misc_feature 1..2253: note = Description of Artificial Sequence: Synthetic coding sequence
  source 1..2253: mol_type = other DNA
atgggaaagagtgagtctcagatggatataaccgatatcaacacccctaaaccaaaaaaaaaacagcgatggacaccactggagatttcattaagtgtgttggtgctcctgctgactatcattgctgttacaatgatagcactgtacgctacttatgacgatggcatctgcaaaagtagcgattgtattaagagcgctgcgaggttgatacagaatatggatgcaactacggagccctgcactgatttctttaagtacgcgtgtgggggatggctgaagcggaacgttatcccagaaactagctcaagatatggcaactttgacattttacgagatgagctcgaagtcgtgctgaaggatgtgctgcaggaacccaagactgaggatatagtggccgtccagaaagccaaagccctgtatcgctcctgcatcaatgaatcagccattgactcccgcgggggggagccactgttgaagctactgccggacatttacggctggccagtggcgacagaaaattgggaacagaagtacggggcatcttggacagcggaaaaagccatcgcccagttgaactctaaatacgggaaaaaagtgctgatcaacttgttcgtcggcaccgacgataagaattccgtcaaccacgttatacacatcgatcaaccgaggcttggcctgcccagcagagattattatgagtgcaccggtatatataaagaagcatgtactgcctacgtggattttatgattagcgtagcccgcttgatcagacaagaagagcgcttacccatcgatgagaaccagctggccctggagatgaacaaggtcatggagctcgaaaaagagatagccaacgccacggccaagcctgaggaccggaatgatcccatgctgctttataataagatgaccttggctcaaattcaaaacaatttctccctggaaatcaatggcaaacccttctcatggcttaactttactaacgagatcatgagcactgtcaatataagcataactaacgaggaagatgtagtggtctacgcccccgagtacctgactaagctgaaaccaattttaacaaagtacagtgctagagacttacagaatctgatgagctggcgcttcattatggacctagtttcttctctttcaaggacttacaaagagagcagaaacgcattcaggaaggctctctatgggacaacatctgagactgcaacctggagacgctgcgccaattatgtgaacgggaatatggaaaacgccgtggggagattgtatgttgaggcggcttttgcgggcgagagcaaacatgttgtggaggacctgatcgcccaaattcgagaggtctttattcagacgttagacgacttgacttggatggacgcagaaactaagaaacgagctgaggagaaggcactggccatcaaagaacgcataggataccccgatgacatcgtgtccaacgataataagctaaataatgaatatcttgagctgaattataaagaggacgagtacttcgagaacataatccagaacctcaagtttagtcagtccaaacagctgaaaaaactgcgagagaaagtagataaagacgagtggattagcggagccgccgtggtcaacgcgttctattccagtggaaggaatcagattgtcttcccagctggcattcttcaaccaccattcttctcggcccagcagtccaatagtctcaattacggcggaatcggaatggtgattggccatgaaataactcacggtttcgacgataacggcaggaatttcaataaagacggcgatctggttgattggtggacccaacagtctgcaagcaactttaaagaacagtcgcagtgtatggtgtatcaatatggaaattttagttgggacctggcaggcggtcaacacctgaacggaatcaatactctgggcgagaacatcgccgacaacggcggcctggggcaagcttaccgtgcttatcagaactacattaagaagaacggtgaagagaagctgttgccggggttggaccttaatcataagcagctgttctttctgaactttgcccaggtgtggtgcggaacttatcgcccagagtacgcagtgaattctattaaaacagatgtgcactctcccggaaacttcagaataattggtaccctacagaatagcgctgaattttctgaagcgttccattgtaggaagaacagttacatgaaccccgaaaagaagtgtcgagtgtggtag

SEQ ID NO: 15925 - DNA, 486 bp, synthetic construct
  misc_feature 1..486: note = Description of Artificial Sequence: Synthetic coding sequence
  source 1..486: mol_type = other DNA
atggggaaaagcgagtctcagatggacattactgatataaatacaccgaaacctaagaagaagcagcgctggactcctttggagatctccctctctgtgctggtcctacttctaactataatcgccgttaccatgattgctctctacgctacctacgatgatgggatctgcaaatcatcagactgcatcaagtctgccgcgcgcctcattcaaaatatggacgcaaccaccgagccctgtacagatttttttaagtacgcatgtggagggtggctgaaaagaaatgttattcctgaaacaagcagccgttatggaaacttcgatatcctgagggatgagcttgaggtcgtcctgaaggatgttctgcaagaacccaagacagaggacatcgttgccgtccagaaagccaaagccctgtaccgatcttgcattaatgaatctgctatagacagcagggggggagaacctttactgaaactgctgtag

SEQ ID NO: 15926 - DNA, 282 bp, synthetic construct
  misc_feature 1..282: note = Description of Artificial Sequence: Synthetic coding sequence
  source 1..282: mol_type = other DNA
atggggaaatctgagagccagatggatataactgatattaatacccccaagcctaagaaaaaacagcgctggactcctctggagatcagtctctccgtacttgtccttttgctgaccatcatagctgtgaccatgatcgctctatacgccacttacgacgatgggatctgtaagtcctcagactgtatcaaatccgcagctaggctcatccaaaatatggatgccaccacagagccttgtacagacttttttaagtatgcatgtggaggctggctaaaatag

SEQ ID NO: 15927 - DNA, 702 bp, synthetic construct
  misc_feature 1..702: note = Description of Artificial Sequence: Synthetic coding sequence
  source 1..702: mol_type = other DNA
atgggcaagtcagaatcccagatggacattaccgacatcaacacaccaaagcctaagaaaaagcagaggtggactcctctggagatttccctgagcgtgcttgtgctgctgcttactatcatcgctgtgaccatgatcgctctttacgccacctacgatgatggcatttgtaaatcctccgactgcattaagagcgccgctagactgatacaaaatatggacgcaaccaccgagccgtgcacagacttttttaagtacgcttgtgggggttggttgaagaggaatgtaatccctgaaaccagctcacgttatggtaatttcgatatcctaagggacgagctcgaggttgtattgaaagatgtcctgcaagagccgaagaccgaggatattgtagctgttcagaaggctaaagcactctataggtcttgcatcaatgaatcggccatcgactcgcgcgggggggagcctctgctcaaattactccccgacatttacggttggcctgtcgcaacagagaactgggagcaaaagtatggagcaagctggaccgccgaaaaggccatcgcacagctcaactccaaatatgggaagaaggtattgattaacttattcgtaggcactgacgacaagaacagcgtgaaccatgtgatacacattgatcaacctagattggggttgccttccagggactactacgagtag

SEQ ID NO: 15928 - DNA, 360 bp, synthetic construct
  misc_feature 1..360: note = Description of Artificial Sequence: Synthetic coding sequence
  source 1..360: mol_type = other DNA
atggggaagagcgagtcccaaatggacattaccgatataaacaccccaaagccaaagaagaagcagcgctggaccccgctggaaatttcattgtccgttctcgtgctgctcctaaccattatcgccgttacaatgattgccctttatgctacatacgacgacggcatctgtaagagctctgactgcattaaaagtgccgccaggctgattcagaacatggacgccaccactgagccgtgcacagatttttttaagtatgcttgcggcggatggctgaaacgcaatgtgattcccgaaacatcgtctcggtacggcaactttgacattctgcgggacgagctggaggttgtactcaaatag

SEQ ID NO: 15929 - DNA, 2253 bp, synthetic construct
  misc_feature 1..2253: note = Description of Artificial Sequence: Synthetic coding sequence
  source 1..2253: mol_type = other DNA
atgggaaagtctgaatcacagatggatatcacggacataaatacacccaagcccaaaaaaaagcaacgctggaccccactcgaaatctctttatccgtgctcgtcctgctgctcaccatcattgctgtcacaatgattgccctgtacgctacttatgatgacggcatctgcaagagctctgattgtatcaaatccgccgccaggttgatccagaatatggacgccactaccgagccatgcaccgatttctttaagtacgcttgtggcggctggctaaagcgaaatgtgatcccagagaccagttctagatatggcaattttgacatcctccgggatgaacttgaggtggttcttaaagacgttctgcaggaacccaaaacggaggacatcgtcgccgtgcagaaagctaaagctctctaccgttcatgcattaatgagtctgctattgacagccgcggcggggagcccctcctaaagcttttgccagacatctacggttggcctgttgcgactgaaaattgggagcaaaagtatggagcaagttggacagcggagaaagcaattgctcagctcaactcaaagtacggtaagaaggtcctcatcaacctcttcgtcggcaccgacgacaaaaatagcgtcaaccatgtgattcacatcgaccagccccgcttgggcctgccctccagagattactacgagtgtacggggatctataaggaggcttgtaccgcctacgtggactttatgatcagcgtagctcgcctgatcagacaggaagagaggctccccattgacgagaaccaattggcactggaaatgaacaaggtgatggaactcgagaaagagattgctaatgccaccgcaaagccagaggaccggaacgaccctatgctgctgtacaataaaatgaccctcgctcagattcaaaataatttctccctcgagatcaatggcaagccattctcctggttgaattttaccaatgagatcatgtccacagtgaacattagtatcactaacgaagaggacgtggtcgtgtatgcgccagagtatctgacaaaacttaaacctatcctaaccaagtactcggcacgggacctgcagaatcttatgtcttggaggttcattatggatcttgttagctccctgtctcgcacatacaaggaaagccgcaatgcgttcagaaaggccctgtacggaactacctccgagacagccacttggcgtagatgcgcaaactacgtaaatggtaatatggagaatgccgtgggacgattgtacgttgaagccgccttcgccggagaaagcaaacacgtggtggaagatttgattgcccagatacgcgaggtgtttatccaaactctggatgacctgacctggatggacgccgagacgaagaagcgagccgaggagaaggccctggccattaaggagcggatcggatatccggatgatatcgtaagtaacgacaacaaactgaacaacgagtacctagaattaaattataaggaggacgaatacttcgaaaatatcattcagaatctcaagttctctcagagcaagcagctgaaaaagttgcgggaaaaggttgacaaggatgagtggatatcgggcgcagccgtcgtgaacgcattctattccagcggcaggaaccaaatcgtgtttcccgcagggattctccagccccccttcttctctgcccagcagtccaattccctaaactacgggggaattgggatggtgattggccacgagattacccacggcttcgatgataacggcagaaattttaataaagatggcgacctagtcgactggtggactcagcagtcagcctctaactttaaggagcagtcccaatgcatggtgtaccagtacgggaacttcagctgggacttagccggaggccagcatctgaatggcatcaacaccctgggagagaacatagccgacaacggtggcctgggccaggcctatagagcctatcagaactacatcaagaagaacggtgaagagaagctactaccgggactggacctcaatcataagcaattgtttttcctgaacttcgctcaggtctggtgcgggacttaccgtcctgagtatgccgtgaattcaattaaaaccgacgtgcactcacccggaaatttccgcatcatcgggactctgcaaaattccgctgagttttccgaagctttccattgccgcaaaaattcatacatgaatccagagaagaagtgtagggtgtggtag

SEQ ID NO: 15930 - DNA, 2253 bp, synthetic construct
  misc_feature 1..2253: note = Description of Artificial Sequence: Synthetic coding sequence
  source 1..2253: mol_type = other DNA
atgggaaagtccgaaagccagatggacattacggacatcaatacacccaagcctaagaaaaagcagaggtggaccccgcttgagattagcttaagcgtgctcgtgctgttgttaaccatcatcgccgtgaccatgatcgcgctgtacgcaacatacgacgacgggatttgcaaatctagcgattgtattaaatccgcagccagactcattcagaacatggacgctacaactgagccatgcacggactttttcaaatacgcttgtggggggtggctgaaacgaaatgtcatacctgagacttccagccgatatggaaactttgatatcctccgagacgagctcgaagtggtgctaaaagacgttctgcaggaacctaagactgaagacattgtggccgtccaaaaggcaaaggccctgtacaggtcttgtatcaacgaatcggcaattgattcaaggggtggcgagcctctcttaaagctgttgcccgacatctacggctggcctgttgctacagaaaattgggagcagaagtacggagcttcttggacagccgagaaggcaatcgctcagctcaacagcaaatatgggaaaaaagtgctgattaatctgtttgtgggaaccgacgacaaaaatagtgttaaccatgtgattcacattgatcagccaaggctggggctgcctagtcgggactattacgagtgcacaggcatctataaagaagcatgcacagcgtatgtggacttcatgatcagcgtagcaagacttatacgccaggaggagaggctgccaatcgatgagaaccaactggccctagagatgaataaggtgatggagctcgagaaggagatagccaacgcgactgcaaagcccgaagaccggaatgaccctatgctattatacaacaaaatgacgctggcccagatccagaataacttcagccttgagatcaatggtaagcccttctcctggctgaacttcaccaacgagattatgtctacggtgaacatcagtatcactaatgaagaggatgttgttgtctacgctccagaatacctgaccaagctaaagccaatactcacgaaatattctgctcgcgacctgcagaacctcatgtcttggcgattcataatggacctggttagctcgttgtcccggacctacaaagagtcccggaatgcttttaggaaagcactgtatggaaccaccagcgaaacagctacctggaggaggtgcgccaattacgttaatgggaacatggaaaacgcggtcggtcggctgtacgtcgaggccgcattcgcaggtgaaagcaaacacgtcgttgaggacctgatcgctcaaattcgcgaggtcttcatccagaccctggacgatctgacctggatggacgccgagaccaaaaagcgggcagaggagaaggccctcgctattaaagaacggatcggatatcccgatgatattgtgagcaatgacaacaagctcaacaatgaataccttgagcttaactataaggaagacgagtattttgagaatataatccagaacttgaaattcagtcagagtaagcagttaaagaaattacgcgaaaaggttgataaggacgagtggatctctggggctgcggtggtcaacgccttttatagcagcggcaggaatcagattgtgttccccgcagggatcctccagcctcccttcttctccgcccaacaaagcaatagtctaaattacggggggattgggatggtcatcggacatgagatcacacatgggtttgatgacaacggcagaaactttaacaaggatggggatcttgtggattggtggacacagcagtccgcgtccaactttaaggagcaaagccaatgtatggtataccagtacgggaacttttcctgggatctggccggcggacaacacttgaacggaataaacacccttggcgagaacatcgccgacaatggcggtcttggtcaagcataccgggcatatcagaattacatcaagaagaacggggaggagaaactccttccaggtctggacctgaaccacaagcagctgttctttctcaacttcgcacaggtgtggtgcggcacttaccggccagagtacgccgtgaatagtataaagactgatgtgcactccccgggcaactttagaattattggcactctgcagaatagcgctgagttctctgaggcctttcactgcaggaaaaattcctatatgaacccggaaaaaaagtgtcgcgtctggtag

SEQ ID NO: 15931 - DNA, 48 bp, synthetic construct
  misc_feature 1..48: note = Description of Artificial Sequence: Synthetic coding sequence
  source 1..48: mol_type = other DNA
atggggaagagcgaaagccaaatggatattactgacataaatacatag

SEQ ID NO: 15932 - DNA, 894 bp, synthetic construct
  misc_feature 1..894: note = Description of Artificial Sequence: Synthetic coding sequence
  source 1..894: mol_type = other DNA
atgactacgccgaggaattcagtcaatggcactttccccgcggaacccatgaaagggcctattgcgatgcagagcggtcccaaaccattgttccgccggatgtcgagcctagtcggcccaacacagagctttttcatgcgcgagagcaaaactctcggcgcagtgcagatcatgaacggactgttccatatagctctggggggcctgttgatgatccccgcggggatttacgcccctatctgtgtgacggtctggtaccctctatggggtggcataatgtacatcatatcaggcagcctcctggccgcaactgaaaaaaattcccgcaagtgtttggtcaagggcaagatgatcatgaattccctgtctctgtttgccgcaatatctggaatgatcctgtccatcatggacattctcaacattaagatttcccatttcttgaagatggagtcccttaacttcattcgcgctcatactccctacatcaatatctacaactgcgagccggcaaatccttccgaaaagaattcacccagcacccagtactgctattctatacagtctttgtttctcggaattctgtctgtgatgttaatctttgcctttttccaagaactggtgatcgccggtatagttgagaacgagtggaagagaacatgctcacgaccgaagtcgaacatcgtgcttctatcggcagaggagaagaaagagcaaacaattgagatcaaagaggaagtggtcggactcaccgaaaccagttctcagcccaagaatgaggaggatattgagataatcccaatacaagaggaagaggaagaagaaactgaaacaaattttccggaacctcctcaggaccaagaatcaagcccaatcgaaaatgatagtagtccttag

SEQ ID NO: 15933 - DNA, 894 bp, synthetic construct
  misc_feature 1..894: note = Description of Artificial Sequence: Synthetic coding sequence
  source 1..894: mol_type = other DNA
atgacaactccacgcaactcggttaatggaacttttcccgccgaacccatgaaaggccccatcgccatgcagtcagggcctaagcccctgtttcgccgtatgtcatctctggtgggtccaactcaatctttcttcatgagggaatcaaaaacgctgggcgccgttcagatcatgaacggcctgttccacattgctctgggtggactccttatgattccggctggcatctatgccccaatatgcgttaccgtttggtatcctctgtggggtggcatcatgtacatcatctcaggaagcctgctggccgccaccgaaaaaaactccaggaagtgtctggtcaagggtaagatgatcatgaattcgctgtctctgttcgccgctatttctgggatgatcttatctatcatggatattctgaatatcaaaataagccacttcctgaagatggagtcccttaacttcattcgtgcacatacaccgtatatcaatatctataattgcgagccagctaacccaagcgagaagaattccccttcgacacaatattgttatagcattcagtcattgtttctgggaatcctttctgttatgctcattttcgccttcttccaagagctggtgattgccggcatcgttgagaacgagtggaagaggacatgtagccggcctaagtctaacatcgtgctcctgtccgctgaagaaaaaaaagagcagaccatagagatcaaggaggaagtggtggggttaacagaaaccagctctcagcccaagaacgaagaggacatcgaaattattccaattcaggaagaagaggaggaagagactgaaacaaacttcccggagccacctcaggatcaggagtcttccccgattgagaatgattcttccccatag

SEQ ID NO: 15934 - DNA, 24 bp, synthetic construct
  misc_feature 1..24: note = Description of Artificial Sequence: Synthetic coding sequence
  source 1..24: mol_type = other DNA
atgacaacccctcgcaattcttag

SEQ ID NO: 15935 - DNA, 855 bp, synthetic construct
  misc_feature 1..855: note = Description of Artificial Sequence: Synthetic coding sequence
  source 1..855: mol_type = other DNA
atgacaacacccagaaactccgttaatgggacattcccagcagagcctatgaaggggcccattgccatgcagagcgggcccaaaccattgtttcggagaatgtccagcctcgtgggcccaacacagagttttttcatgcgtgagtctaagacactcggagccgttcagattatgaacggacttttccatattgccctaggaggtctcctgatgattcccgcgggcatctatgcccctatatgcgtcaccgtatggtaccctctatggggaggcatcatgtatataatctccggtagcctgttagctgcgaccgaaaagaatagcagaaagtgcctggtgaaggggaaaatgatcatgaattctctgtccctgttcgcggctataagtggaatgatcttaagtataatggacatcctgaatataaaaattagccatttcctgaagatggagagtctgaactttattagagcccacacaccctacattaacatctacaactgtgaaccggccaatccatctgagaaaaactcccctagtacgcaatattgttactccatacagtccctgttcctcgagctggtgatcgccggcatagtggagaatgagtggaaaaggacctgctcgcgccccaagtccaacatcgtgttactatccgctgaggaaaagaaagagcaaacaatcgagattaaagaggaagtggtgggcttgacagagactagctcacaacctaaaaatgaagaggacatagagataataccaattcaagaagaggaggaggaagaaaccgagacaaactttcccgagccgccacaggatcaagagagttctcccatcgagaatgacagctccccatag

SEQ ID NO: 15936 - DNA, 21 bp, synthetic construct
  misc_feature 1..21: note = Description of Artificial Sequence: Synthetic coding sequence
  source 1..21: mol_type = other DNA
atgacaacgccccgtaactag

SEQ ID NO: 15937 - DNA, 894 bp, synthetic construct
  misc_feature 1..894: note = Description of Artificial Sequence: Synthetic coding sequence
  source 1..894: mol_type = other DNA
atgaccactccccggaactccgtcaacgggacttttcccgccgaaccaatgaaaggacccatcgcaatgcagtctgggcccaaacctctgtttagacgaatgagctccctcgtggggccaacccagagcttctttatgagagaatccaagactttgggggccgtgcaaattatgaacggactttttcatatcgcacttggaggtctccttatgattcccgccggtatctacgctcccatttgtgttacggtttggtacccactttggggcgggatcatgtatatcatcagcgggtccttattagccgcgactgagaaaaactcccgcaagtgcttggtgaagggcaaaatgattatgaattctctctccctcttcgcggctatctcaggcatgattctgagcatcatggacatcctcaatattaagatctcccattttctcaaaatggagtcactaaacttcattcgagctcataccccttatattaacatctacaattgtgaacccgccaacccctccgagaagaactctcctagtacgcagtactgctactctatccagagcttattccttggaattctcagtgtaatgcttatcttcgcctttttccaagagctggtaatcgccggtattgtggagaatgagtggaagcgtacttgctcccggccaaaatctaatatcgtcttactctcagccgaggagaaaaaggagcagacgatcgaaattaaggaggaagtggttgggttaactgagacctctagccaaccaaaaaacgaggaagatatcgaaattatcccaatacaggaagaggaggaggaggaaactgagacaaattttccagaacctcctcaggatcaggaatcttccccaattgagaacgattcttccccttag

SEQ ID NO: 15938 - DNA, 930 bp, synthetic construct
  misc_feature 1..930: note = Description of Artificial Sequence: Synthetic coding sequence
  source 1..930: mol_type = other DNA
atggatgatcaagggtgtccgcgttgcaaaaccacaaagtaccgaaacccatcgctcaagcttatggttaacgtgtgcgggcatacactctgcgagtcctgcgtagatctgctcttcgtgagaggggccggcaattgtcctgaatgtgggactcctcttcgcaagagcaactttcgcgtacaactcttcgaagatccaaccgttgacaaagaagtcgagattcgaaagaaggtgttaaaaatctataacaagcgcgaggaagatttcccctctttacgggaatacaacgactttctggaggaggtggaggagattgtttttaacctgactaataacgtggacctagataacaccaagaaaaaaatggagatctaccagaaagaaaataaagacgtaattcagaagaacaaactcaagctgaccagggagcaggaggagctggaggaggcactggaagtggagcggcaggaaaatgagcagaggaggttgttcattcaaaaggaggagcaactgcagcagattctcaaacgaaaaaataaacaagcgttcctcgatgagctagagtcctccgacttgcctgtggcccttctcttggcccagcataaggaccggagtactcaactggagatgcagcttgagaaaccaaagccagttaaaccagtcaccttcagcactgggatcaagatggggcaacacataagtctagcacctatccacaaactcgaggaggccctgtacgagtatcagccacttcagatcgagacatacggcccacacgtgcccgaacttgagatgttggggcggcttggatatttgaatcacgtccgtgctgcatccccgcaggatcttgccggcggctacacttcttcactagcctgtcatcgggccctacaggatgctttttccgggctgttctggcagcccagctag

SEQ ID NO: 15939 - DNA, 804 bp, synthetic construct
  misc_feature 1..804: note = Description of Artificial Sequence: Synthetic coding sequence
  source 1..804: mol_type = other DNA
atggatgatcaggggtgcccccggtgcaaaacaaccaaataccggaaccctagcctgaaattgatggtgaacgtctgcggtcacaccctatgcgagtcttgtgtagacctgttgtttgtaagaggtgccggcaattgccccgaatgcggaacccccttgcgcaagagcaattttagagttcagttgttcgaggacccaacagtggacaaagaggtggagatccgcaaaaaagtactgaagatttataacaaacgcgaagaagacttcccgtccttgcgggaatacaatgatttcctagaagaagttgaggagattgtgtttaatctgacgaacaacgttgacttggataataccaagaagaaaatggagatctatcagaaagagaacaaagatgttatccagaagaacaaattgaagttgacgagggaacaggaagaactcgaggaggctctggaggtcgagcgtcaagaaaatgaacagaggcgactctttattcagaaagaggaacagctgcagcaaatcctgaagcgtaagaataaacaagctttcctcgatgaactcggtcagcatatcagcctggctccaatccacaaattagaggaagcgctgtacgaatatcaaccactacagatcgagacatatggaccacatgttccagaactggagatgctgggccgcttgggctacttaaaccatgtgcgggccgcatctccccaggacctcgctggcggatacactagctctctcgcgtgtcacagagcattgcaagatgccttctcaggcctgttctggcagccttcctag

SEQ ID NO: 15940 - DNA, 510 bp, synthetic construct
  misc_feature 1..510: note = Description of Artificial Sequence: Synthetic coding sequence
  source 1..510: mol_type = other DNA
acaagagagcaggaggaactggaagaggccttggaggtcgaaagacaggagaacgagcagaggcgtctctttatccagaaggaggaacagctccaacaaattctcaaaagaaagaataaacaagcctttttggatgagctggagtcaagtgatctccccgtcgccctgctcctagctcagcacaaggacagaagcacacagttggagatgcagctggagaagccaaagcccgtgaaacccgtgacattctctaccggcatcaaaatgggtcagcatatcagtttagctccaattcataagctggaggaagctctgtacgaatatcagcctcttcagatcgagacatacggcccacacgttcccgaactagagatgttgggacggctggggtacctgaatcacgtgcgggctgccagcccgcaggacctggccggtggctataccagttccctggcgtgccatagggccctacaggatgccttcagtggtctgttttggcagccttcctag

SEQ ID NO: 15941 - DNA, 3963 bp, synthetic construct
  misc_feature 1..3963: note = Description of Artificial Sequence: Synthetic coding sequence
  source 1..3963: mol_type = other DNA
atgttcggccttgatcaatttgagcctcaggtcaattctaggaatgccggacaaggtgagagaaactttaacgagacaggcctgtctatgaatactcatttcaaggctccggccttccacaccgggggtcctcccggacccgttgatcccgccatgtcagcattaggagaaccaccaatactaggaatgaatatggaaccctacggattccacgctcgcgggcattctgaattacatgccggtgggttgcaggctcagcctgtccacggctttttcggggggcaacagccccaccacggccaccccggtagccatcacccgcaccaacatcatccgcattttggcggcaattttggagggcccgaccccggtgcatcatgccttcatgggggccgtctcctcggctacgggggagccgctggcggactcggaagccagcccccttttgcagaggggtacgaacacatggccgagagccagggacccgagagttttgggccccaacgccccgggaatctgccagattttcattcgagcggtgcaagtagtcacgccgtacctgccccttgtttgcctctggaccaaagccccaatcgagctgcctccttccacggtctgccaagctccagtgggtcggattcccactcactcgagccaagaagagtgactaaccagggcgctgtggattcattggagtacaattatccaggcgaagcaccaagcggccatttcgacatgttttcaccaagcgacagtgaaggccagcttcctcactacgccgccggccgacaggttcctggcggagcttttcccggtgcctctgctatgccacgggcggctggaatggttggattgtctaagatgcatgctcagccccctcagcagcagccccagcagcagcagcagccacagcagcagcagcagcagcacggtgtgttcttcgaaaggtttagcggagccagaaagatgccagtggggctcgaaccgagcgttggatcccggcacccgctaatgcagccacctcagcaggcaccaccacccccccagcagcagccgcctcaacagccccctcagcagcagcctcccccgcctcccgggttattggtgcggcaaaactcttgtcctcctgccctgcctcgtccacagcagggtgaagctgggaccccaagcggagggctccaggacggtggtccaatgcttcctagtcaacatgcccaattcgaatatcctatccatcgcttggaaaacaggagcatgcacccgtattctgaaccggtgtttagcatgcagcacccacctccccagcaggctcccaatcagcggctccagcacttcgatgcccctccgtacatgaatgtggccaagcgacccagattcgatttccctggctcagctggtgtggaccggtgtgcatcctggaatggcagtatgcataatggggccctagacaatcacctgtctccttctgcatacccaggcctgcccggggaattcaccccccccgtcccggactccttcccaagcgggcctcctctgcagcacccggccccggatcaccaatcacttcagcagcagcagcaacaacagcagcagcagcagcaacagcagcagcaacagcaacaacagcagcagcagcaacaacagcaacaaaggcaaaatgccgcccttatgatcaagcagatggccagccgcaatcagcagcagagattacgacaacctaatctggcccagctggggcaccccggtgacgtcgggcagggtggcctggtacacggcggtcctgttggaggcctcgcgcaaccaaatttcgaaagagaggggggaagcactggtgcggggcgcctaggaacatttgaacagcaggctcctcacctagcccaggagagtgcatggtttagtgggccacacccccctccgggggacttgctcccaaggcgaatgggaggttccggtctccccgcagattgtgggccacatgatccctcactggctcctcccccgccaccggggggttccggagtactcttccgaggcccactgcaagaacctatgaggatgcccggggagggtcacgtgcccgcgcttccaagtcctgggttgcagttcggggggtctctaggcggactggggcaactgcagagtcccggcgctggagtaggcctgccaagcgcggcatcagaaaggcgccccccaccaccggactttgccacttcggccctcggcggtcaacctggatttcccttcggagccgccggcagacaatccacacctcattctgggccaggagtgaatagccccccatctgctgggggcggcggtgggagtagtggaggaggtggggggggcggagcctaccccccccagccggatttccagccctcccagcgcaccagcgcctcgaaattgggggccctctccctgggaagttttaacaaaccctctagcaaggataacctattcggacaatcctgtctcgccgcactttcaaccgcatgtcagaatatgattgccagtctgggggcacctaatctcaacgtcactttcaataagaaaaacccaccggaaggtaagagaaaactgtctcaaaatgagaccgatggcgccgcggtagctgggaatcccgggagcgactacttcccgggagggacagctcctggggcccccggaccagggggcccatcagggaccagcagctccgggtcgaaagccagcggtccccctaatcctccggcccagggggacgggacttccctctcgccaaactatactttggagtccactagcgggaatgatggcaaacctgtctctggtggcggcgggcgaggacggggccgaagaaagcgggacagcggtcatgtgtcacctgggaccttctttgacaaatactccgcggccccagatagtggcggcgctcccggtgtcagccccggtcagcagcaggcaagcggagcagcagtcggtggctcttctgcaggggaaacaaggggtgcgcccacgccacacgaaaaggcacttactagcccatcttggggcaagggcgcggagctgctgctgggcgatcagcccgatctcattggcagcctcgacgggggcgccaagagcgattcaagctcacctaatgtcggtgaattcgcgagtgacgaggtgagcactagttacgctaatgaggatgaggtaagctcatccagcgataatccacaggccttggtcaaggcctcccgaagcccattagtcaccggcagtcccaagctacctccccgtggagtgggagccggagaacatggacccaaggccccccccccagcattgggactgggcatcatgagcaacagcacatcaacgcccgattcatacggaggcggtggaggtcctgggcaccctggaacacccggtcttgagcaggtcaggaccccgacaagttctagcggtgctccccccccagacgagatccatccactggaaattctgcaggcacaaattcaactgcagcggcaacagttctccattagcgaggaccaacctctcggcttgaaaggcgggaaaaaaggcgaatgtgccgtaggtgcttctggtgcacagaatggggattctgaacttggatcatgctgtagcgaggctgtgaagagcgctatgagtacaattgatctggattcactcatggctgaacatagcgcagcttggtacatgcctgctgacaaggccctggtggatagtgcagacgacgacaagacgttggctccatgggagaaagctaaaccacaaaaccccaactctaaggaggctcacgacctgcctgccaataaagcttcggcgtcccaacccggcagccatctccagtgtctgagtgtgcactgcacggacgatgtcggcgacgcgaaagcacgcgcttctgtgcctacatggcggagtcttcactccgatatctctaatcgcttcggcactttcgtggccgctttgacttag

SEQ ID NO: 15942 - DNA, 4227 bp, synthetic construct
  misc_feature 1..4227: note = Description of Artificial Sequence: Synthetic coding sequence
  source 1..4227: mol_type = other DNA
atgaaggcaccagcagtccttgcacccggaattctggttctactctttaccttagtgcagcgttcaaatggagaatgtaaagaggcgcttgccaaaagcgaaatgaatgtgaatatgaagtaccagctacctaatttcacggccgagacccccattcagaatgtgattcttcatgaacaccatatctttctaggagccactaattacatttacgttctgaatgaagaggacctccagaaagtcgctgagtacaagaccggccctgttctcgagcatccagactgctttccttgccaggattgtagtagcaaggctaacctgtccgggggtgtttggaaagacaacattaacatggctctcgtggtggacacgtattacgacgaccagctgattagctgcggcagcgtgaacaggggaacatgtcagcgacacgtgtttccacataatcacaccgccgacattcagtccgaggtacactgcatcttttctccgcagatcgaagagccctcccagtgtcctgactgcgtggtctcagcgttgggagcgaaggtgttgagctcagttaaagataggtttattaatttcttcgttgggaatactattaactcctcctactttccagaccaccccctgcattctataagcgtcaggcggctgaaggaaacaaaagatggcttcatgtttctgacggatcagtcgtacattgacgtgctgcccgaatttcgtgatagttaccctatcaaatacgttcacgcgtttgaatcgaacaacttcatctatttcctcaccgtccagagggaaacgttggatgcccaaacctttcatacacgcattatcaggttctgttccattaattcagggctgcactcgtacatggagatgccgctggagtgcattcttactgaaaagcgcaaaaaacgaagtactaaaaaggaagtcttcaatattcttcaggccgcctatgtaagcaagcccggcgcccagctggcccgtcagattggggcttcgcttaacgacgacatcctttttggagtgtttgcacagtcaaaacccgattcagcagaaccgatggaccgctctgctatgtgcgcattcccgattaaatatgtgaatgacttttttaataaaattgtgaacaagaacaatgtgagatgtctgcagcatttctacggccctaatcacgagcactgtttcaacagaaccctgctgcgcaattccagtggctgtgaggcccgcagagatgagtatcggaccgagttcactacagctttgcaaagggtagatcttttcatgggccagttttcagaagtgcttctgacctcgatcagtactttcattaaaggagatctcaccattgctaacttaggaacaagcgaggggaggtttatgcaagtcgtagtgagccggagcggaccctcaacaccccatgttaactttctgctggatagccatccagtgtcacccgaggtgatcgtagagcatactctgaatcagaacgggtacaccctggttataaccggcaagaaaattaccaaaataccattaaatggtctgggctgtagacatttccaaagctgctcccagtgtctttctgctccccccttcgtgcagtgcgggtggtgccatgacaagtgtgtcagatccgaagaatgtctgtcaggaacttggacgcagcagatctgtcttcccgccatttacaaggtgtttcccaactctgcgcccttggagggtggcactcgactaactatctgcgggtgggattttggtttccggagaaacaataaattcgacctgaaaaaaacaagagtgcttcttggcaatgaaagttgtactctcacactatccgagtcgacaatgaacacactgaaatgcacggtcgggccagccatgaataaacatttcaatatgagtataattatatcaaatgggcatggcactacacaatattccacattttcatatgtggacccagtgatcacaagcatctcccctaaatatgggccaatggccggcggtaccctgctaactctgacaggaaactacctgaatagtgggaatagtaggcacatttctatcggcgggaagacttgtactctgaaaagcgtcagcaactctattctagagtgctacacgcccgcgcagactatcagcacagagtttgccgtgaagctcaagatagatctggcaaacagagaaacgagtatcttttcctatagagaagacccgattgtatacgaaatacacccaaccaaatcttttatttctacttggtggaaagagcctctcaacattgtttcttttttgttttgctttgcctcaggggggtctaccattaccggcgtggggaagaatctcaactccgtgtcagtgccaagaatggtgatcaatgttcatgaagctgggcgtaacttcaccgtcgcctgccagcatagaagcaacagtgagatcatatgctgcaccactcccagtctgcagcaactgaatttgcagctccctctgaagacaaaagctttttttatgctagatgggatactgtcgaaatactttgatctaatctacgtgcacaatcctgtttttaagcctttcgagaagccagtgatgattagtatggggaatgagaatgttttagagatcaaaggaaacgacatcgatcccgaagccgttaaaggcgaagttctcaaagtgggcaacaagtcttgtgagaatattcaccttcacagtgaagctgtgctgtgcacggttccaaacgacttattgaagttgaactcggagttgaacattgaatggaaacaagctatatcctctaccgtgttaggaaaggtcattgtgcagcccgaccaaaacttcacaggattgatcgctggcgttgtgagtattagtacagcgctacttctactcctaggcttctttctgtggctgaagaagcgcaaacagatcaaggatctggggtccgagctcgtgcggtatgacgcaagggtccatacacctcatttagatagattggtgtccgccagatccgtttccccaacgactgaaatggtttccaatgaaagcgtggattacagagctacattccccgaagaccagttcccaaattcaagccagaatggatcctgccgccaggtgcagtacccgctaacggacatgtccccaatcctgactagcggcgacagcgacatctccagccccttgctccagaacacagtgcacatcgacctttctgcacttaaccctgagttagtccaggcagttcagcatgtggtcataggtccaagcagtttgatcgtccatttcaacgaggttattgggaggggacactttggatgcgtgtaccacggtacactgctggataacgatggcaagaagatccattgtgccgttaagagcttgaaccggatcaccgatattggtgaagtctcccagttcctgaccgagggaatcatcatgaaggacttctctcacccaaacgttctctcactcctcggaatctgtcttcgcagcgaggggtcgcccctcgtggtgctcccatatatgaaacatggcgacctcagaaatttcatccgaaacgagacacataaccctaccgtaaaagacctgattggcttcggcctgcaggttgccaaaggaatgaagtatcttgcttctaagaagttcgtacatcgtgatctagccgcccgcaattgcatgctggacgagaagttcactgtgaaagtagctgacttcgggttggcccgagacatgtatgataaggagtattatagcgtgcacaataagacaggggccaagttgcctgtgaaatggatggccctggaatccctccagacacaaaagttcactaccaaatcagatgtatggagttttggagttctgctgtgggagctcatgacgagaggagcaccaccatacccggacgtgaacacattcgatatcacagtgtatctacttcagggacgcagactcttacagccagagtactgccctgatcccctctacgaggtgatgctgaagtgttggcatcctaaggcggaaatgaggccaagcttctccgaactcgttagccggattagcgctatcttttctacctttattggcgaacactatgtgcatgtgaatgctacgtacgttaacgtgaagtgcgtggccccatacccatcattgctgtcctcagaggacaacgccgatgatgaggtggatacaagacctgcaagcttttgggaaacctcttag

SEQ ID NO: 15943 - DNA, 4173 bp, synthetic construct
  misc_feature 1..4173: note = Description of Artificial Sequence: Synthetic coding sequence
  source 1..4173: mol_type = other DNA
atgaaggcccccgccgttctcgcccctggtatcttggtcctcctattcacgctggtccagcgaagcaacggagagtgcaaggaggcactcgcaaaatctgagatgaacgtgaacatgaagtaccagctgcctaatttcaccgccgaaactcctatccaaaacgtgattctgcatgagcaccatatttttctgggtgcaacaaactacatttacgtgctgaacgaggaagacctccagaaagtggctgagtataagaccggccctgtgctcgaacaccctgactgtttcccatgtcaggactgtagcagcaaggcgaacctctcggggggcgtgtggaaagacaatattaacatggcgttagtggtcgacacatattatgacgatcaactgattagctgcggctccgtcaaccgaggaacatgtcagcgccacgtgttccctcacaatcacacagctgacatccagagcgaggtgcactgcatcttctctccgcagatcgaggaaccttctcagtgccctgattgcgttgtttccgccctgggagccaaggtgctatcttcagtcaaagaccgcttcatcaatttctttgtaggaaataccattaattcttcttatttccccgaccaccctctccatagtatttctgtcagaagattgaaggagacaaaggacggattcatgttcttaacagaccagtcctatatcgatgtgttgcccgaattcagagattcataccccatcaagtatgtgcacgcgtttgagagtaacaacttcatttacttcctgacagtgcagcgcgaaaccctcgacgcccagacgtttcatacacggatcattaggttttgtagcatcaacagcggcttacacagctacatggaaatgccactagagtgtatcttgacagaaaaaagaaagaaacgctctacgaagaaagaagtatttaatatcttgcaggccgcctacgtgtccaagcctggggcccaacttgcgaggcagatcggcgcctcactgaacgatgatatcctctttggtgtgttcgcccagtctaaacccgattctgccgaaccaatggacagaagtgcaatgtgcgcttttccaattaaatacgtaaatgacttctttaataaaattgtcaataagaataatgtacgatgtctgcagcacttctatggaccaaatcacgagcactgctttaaccggacactgttgcgaaattcttccggctgcgaggcaaggagagacgagtatagaaccgagttcacaacggccctccagagagtggatttgttcatgggacagttttccgaggtgctcctaacatcgatatcaactttcatcaaaggggacctgaccatcgcaaacctgggaacatccgagggcagattcatgcaagtcgtagtctcacggagtggaccatcgacccctcacgtgaactttctgcttgacagccacccggtgtcaccggaggtgatagtcgaacacacactgaatcagaacggttacacactggtgattacgggcaagaaaattaccaaaattccactgaatggcctgggatgccggcactttcagtcgtgttctcagtgcttgtcagcacccccctttgttcagtgcgggtggtgccacgataaatgtgtcaggtcagaggagtgtctttcaggcacatggacccagcaaatctgtttgcccgctatttacaaagtctttccaaacagcgctccccttgaaggaggcacccggcttaccatctgtgggtgggatttcggctttcggcggaataacaagttcgacctgaagaagacccgggtgctgctgggaaacgaaagttgcacgctcaccctttcagagtcaacaatgaatacactgaagtgcactgtaggccctgctatgaacaagcactttaacatgtctattatcatttccaacggacacggaactacccagtactccaccttcagctacgttgatccggtaattactagcatatcaccgaagtacgggcccatggctggtggcacactgctcactttaactgggaattacttgaatagtgggaatagccggcatataagcataggcgggaagacatgtacactgaagtccgtgtcaaatagtattttggaatgctacactccggcacagacaatttctacagagttcgcagtaaaactcaagattgaccttgccaaccgagaaacttcaattttctcgtaccgggaagatcccattgtctatgagatccacccgacaaaaagcttcatcagtggcgggagtaccataacaggagtggggaagaacctgaactccgtgtccgtaccgcggatggtcatcaacgtccatgaagctggccgaaactttacagtcgcatgtcagcacaggtccaacagtgagatcatatgctgtacaacacccagcctgcagcaattaaacctgcagctgcccctcaaaacaaaggctttttttatgctagatggcatcctatcaaagtatttcgaccttatctatgtccacaacccagtgtttaagcctttcgagaagcccgtaatgataagcatggggaacgaaaatgtgctagaaattaagggtaacgatatcgaccccgaagccgtgaagggagaagtgctcaaagtggggaataagtcttgcgagaatatccaccttcactccgaagccgtactctgtacagtaccgaatgatctgctgaagctgaactccgagctcaatatagagtggaagcaggccataagttcaactgtgctgggaaaagtaatcgtacaaccagaccagaatttcaccgggctgattgccggggtagtctcaatttctacagcccttcttcttctactgggattcttcctgtggctaaagaagcgcaagcagatcaaggacttgggaagtgaactggtgaggtacgacgctcgggtgcacactcctcaccttgaccgcttagtgtcagcgcgctccgtttcgcccacaaccgaaatggtatcaaatgagagtgttgattaccgggctactttccccgaggaccagttccccaactcctctcagaatggcagctgtcgtcaagtacagtatccgctcacagatatgagtcccatcctgacatctggagacagcgacatatcatcacccctgctgcagaataccgtgcacattgatctgtcagctctaaatccagagttggtgcaggccgtgcagcacgtcgtgatcggccctagctcgctcatcgtacactttaacgaggtaatcggacgtggtcactttggctgtgtctatcatgggaccttgctcgataacgatggaaagaaaatccattgtgctgtgaagagtctgaaccgcatcactgacatcggagaggttagccagttcctcacggaggggataatcatgaaggacttctcccaccctaatgtgctgtccttgctgggcatttgtctccggtctgagggcagcccactggtagtcctgccttacatgaagcacggcgacctaaggaactttattagaaatgagacccacaatcccaccgtgaaagacctcatcggttttgggctgcaggtagcaaaagggatgaagtatttggcctctaagaagtttgtgcatcgcgacttagcggcccgaaactgtatgcttgacgagaaatttactgtgaaagttgctgacttcggccttgcccgcgatatgtacgacaaagaatactacagcgtacacaacaaaaccggtgctaagctgcctgtcaagtggatggcactcgagtctttacagacccagaaatttacaacaaagagcgatgtttggtctttcggcgtgttactctgggaactgatgacacggggagccccaccgtacccagacgtgaacaccttcgatatcactgtttacctcctgcagggcaggaggctgctgcagccagagtattgccccgatcccctctacgaagtgatgcttaagtgctggcatccaaaagctgagatgcgaccctcctttagtgaattggtgagcaggatttcggctattttttccacctttatcggagaacactacgtccacgtaaacgcgacatatgttaacgtcaagtgcgtcgccccctatccgtccctattgtcgagcgaagacaacgccgacgacgaggtcgatacgcgacccgcaagtttctgggaaacttcctag

SEQ ID NO: 15944 - DNA, 2295 bp, synthetic construct
  misc_feature 1..2295: note = Description of Artificial Sequence: Synthetic coding sequence
  source 1..2295: mol_type = other DNA
atgaaagctcccgctgttctggctcctgggatactggtgttgttatttacacttgtgcagcgctccaacggcgagtgcaaggaggcattggccaagagcgagatgaatgtgaatatgaaataccagctccctaattttacggccgaaacccccattcagaatgtgattctgcacgagcatcatatcttcttgggagctactaattacatatatgttctgaacgaggaggatctgcagaaggtggccgaatacaaaaccgggccggtcctggaacacccggattgcttcccgtgccaggactgcagtagtaaagccaacctgtcagggggggtctggaaggataacattaacatggccttggtggtcgacacctactatgatgaccagctcattagttgcggtagtgttaaccggggcacctgccaaagacacgtcttcccccataatcacaccgccgatatccagtcggaggtgcactgcatttttagcccccagatcgaggaaccaagccagtgccccgattgtgtcgtttccgccttgggcgcaaaggttctttcctcagtcaaggacagattcatcaatttcttcgtcggtaacaccatcaacagttcatacttcccagatcaccctttacatagcatcagcgtgcgcagactgaaggagaccaaggacggttttatgtttttgaccgaccagagctacattgacgtgttgccagaattccgcgattcttaccctataaaatacgtccacgcctttgagtccaacaactttatctatttcttgacagtccagagagagacgttggacgctcagacgtttcatactaggattattaggttttgcagtataaacagtgggctccatagctatatggagatgcctctggagtgcattctgactgagaagagaaagaagcggtcgactaaaaaagaggtgttcaacatcctgcaggccgcctatgtgtctaaaccaggggcgcagctagccagacagattggggcatccctgaacgacgatatactcttcggcgtcttcgctcagtctaaacccgactccgccgaacccatggaccgctccgcgatgtgcgccttccccataaaatacgttaacgatttcttcaataagatcgtcaataaaaataacgtgagatgcctgcagcatttttatgggcctaaccacgagcactgtttcaaccgcactctactgcgcaactcttcaggctgtgaggcaaggcgcgacgagtaccgcaccgagttcaccacagcgctccaaagggtcgacctattcatgggacagttttcagaggtgctgctgacaagtatctctaccttcatcaagggcgacttgaccattgcgaacctgggcaccagtgagggccgcttcatgcaggttgtagtgtccaggtcagggccctcgaccccccacgtgaatttcctcttagattcacaccctgtgagccccgaggttatcgtggagcacaccctcaaccagaacggctacaccctcgtgattacaggcaagaaaataacaaagatcccgctaaacgggctcggctgcaggcattttcagtcatgctcgcagtgcctgtccgcacctccctttgttcagtgtggctggtgccatgataaatgcgtgaggagtgaggagtgtcttagtggaacctggacacagcaaatatgcttgccagcgatctacaaagtttttcccaacagcgccccactagagggcggcactcgactcacaatttgcggctgggattttggctttcgaagaaacaacaagttcgatcttaaaaagactcgtgtgctcttgggtaatgagagctgcactctgacactgtcagaaagtacaatgaacaccctgaagtgcaccgtaggccccgctatgaacaaacacttcaatatgtcaatcatcataagcaacggtcatggaactacccagtattcaactttcagctacgtagatcccgtgatcacttcaatttccccgaaatatggaccgatggctggcggcaccctgctgaccctgactgggaactacttgaattcaggaaatagcagacatatctctatcggcggcaagacatgcactctcaagagtgtgagcaattccatcctcgagtgctacactcccgcgcaaaccatttctactgagtttgcagtcaaactgaagattgatctggctaacagagagacctcaatcttctcatatagagaagatcctatcgtctacgagatccaccctacaaagagcttcattcgccacgtgaatatcgctttgatccagagatag

SEQ ID NO: 15945 - DNA, 783 bp, synthetic construct
  misc_feature 1..783: note = Description of Artificial Sequence: Synthetic coding sequence
  source 1..783: mol_type = other DNA
atgaaagacttttcccaccccaacgtattatccctgctgggcatctgcctccggtctgaggggtctccgctcgtggtgttgccttatatgaagcacggtgacctgagaaacttcatccggaacgaaacacataatcccacagtcaaggatctgatcggttttggtctgcaggtggccaaaggcatgaagtatctggctagcaaaaagtttgtccaccgtgacctggcagcgaggaactgcatgctagacgagaagtttaccgtcaaagtggctgactttggattggcaagagacatgtacgacaaggaatactacagtgttcataataagacaggcgccaaattgccagttaaatggatggccctggaatctttacagacccagaaattcactaccaagagcgatgtgtggagctttggcgtgctcctgtgggaactgatgacgcggggagcacctccataccctgacgttaatacttttgacatcactgtgtacttacttcagggaagaagactgttgcaaccagagtattgtcctgaccctctctatgaagtcatgttaaagtgttggcaccctaaggcagaaatgcggccttccttttcagagttggtgagtagaatttcggccatattttctacctttataggggaacattacgtccacgtgaatgccacatacgtgaacgtgaagtgtgtggcgccatatccctcactgttatcatccgaggataatgctgacgacgaagtagatacgcgccctgcctctttttgggagacaagctag

SEQ ID NO: 15946 - DNA, 1749 bp, synthetic construct
  misc_feature 1..1749: note = Description of Artificial Sequence: Synthetic coding sequence
  source 1..1749: mol_type = other DNA
atggccgcaagatcgtggcaggacgagttggcgcagcaggcagaagaagggtccgccagactcagagagatgctctctgtcggactggggtttctgcgcaccgagctgggtctcgaccttgggctggagccgaaacgctatcctggatgggtaatcctggtgggaaccggtgctctcgggctgctgctgcttttcctgctgggctatggctgggcggccgcatgcgctggagccaggaagaagcggcggtcccctccaagaaaaagagaggaggcggctgccgtccccgccgccgcaccagacgacctggccctcctcaaaaacctgagatctgaggagcagaagaagaaaaacaggaaaaagctttcagaaaagcccaagccaaatggacgcacagttgaagtggctgaaggtgaggccgtccgaaccccccagtcagttacagccaagcaacctcccgaaattgacaaaaagaacgaaaagtctaagaagaataagaagaaaagtaagagcgatgccaaggccgtgcaaaacagcagtaggcacgatggaaaggaagtggacgagggggcatgggagactaaaatctcacatcgagagaaacggcaacagaggaagagagataaggtcctcacggacagcggatcactcgactctacaatccccgggatcgagaatactatcaccgttacaaccgagcaattaacaactgcgtcttttcccgtcggctcaaagaaaaataagggcgattcacatctgaacgtacaggtgtccaacttcaaatccggaaagggagacagtaccttgcaggtgtcaagtggcctaaacgagaacttgacagtgaacgggggaggatggaatgagaagtcggtcaagctgtcgtcccaaatctcagcaggggaggaaaagtggaattctgtgtctcccgcgtccgccgggaagcggaaaactgagcccagcgcctggagccaggacacgggcgacgcaaacactaacgggaaagactggggccggtcttggtccgatagaagtatatttagcggtatcgggtcgacggccgaacctgtctctcagtctaccacttctgactaccagtgggatgttagcagaaaccagccttatatcgacgatgagtggtctggtctcaacggcctgtcaagcgccgacccaaattcagattggaatgcgcctgccgaggaatgggggaactgggtggacgaagaaagagctagcctccttaaaagtcaggagccgattcccgacgatcagaaagtgtccgacgatgataaagaaaaaggcgaaggtgcacttcctaccggaaaaagtaaaaaaaagaaaaaaaagaagaagaagcagggcgaagataatagcacagctcaggacacagaagagcttgaaaaagaaatcagggaggacctgcccgtaaacacctccaagacgcgccctaagcaagaaaaagcgttctctctgaagaccatcagcacttccgatccagccgaggtgcttgtgaaaaacagccagcccatcaagaccctgccaccagccacgtctaccgagccatctgtgattctcagcaagtctgatagcgacaagtccagttcccaagtgccaccaatcctgcaggagacagacaaatcaaaatctaacacaaaacagaattcagtgccgccgtcacagaccaaaagtgaaacctcatgggaatctccaaaacagattaagaagaagaagaaggctcggagggaaacttag

SEQ ID NO: 15947 - DNA, 2148 bp, synthetic construct
  misc_feature 1..2148: note = Description of Artificial Sequence: Synthetic coding sequence
  source 1..2148: mol_type = other DNA
atggcggccaacatgtaccgagtgggtgattatgtttactttgagaacagcagttctaatccttacctgatcagacggatagaggaactgaataagaccgccaacgggaatgtggaggcaaaagtcgtctgcttctatcgccgacgcgatatatcctccacactcatcgctttggcagataaacacgccactctcagcgtgtgctataaggcgggtcctggtgctgataatggggaggaaggggagatcgaagaggagatggaaaatcctgagatggtggatctgcctgaaaaactcaagcaccagttgcggcacagagaactttttctaagccgtcagctggagagtctcccagcaactcacatccgtggtaaatgtagcgtgactctcctgaacgagacagaatccctcaagtcatatctcgaaagagaagatttttttttttattcactcgtttatgacccccagcaaaagaccctcctcgctgataaaggagagataagagtggggaaccgatatcaggccgatatcacagacttgctcaaagaaggggaagaagatggacgcgatcaatcaagactggaaacccaggtgtgggaagcccacaatcctctaacagataagcagatagatcagttcctggtggtcgctaggagtgtcgggacctttgccagggcactcgactgcagtagctctgttcggcaaccctcgctccacatgagtgccgcagccgcttctcgtgacatcactctcttccacgcaatggacaccctacacaagaacatttatgacattagtaaggctattagcgccctggtcccacaggggggacccgtcctatgtcgggacgagatggaggagtggtctgctagtgaagccaacctgtttgaagaggcactcgaaaaatatggcaaagacttcaccgacattcagcaagattttttaccctggaagagtctgacctcaattatcgaatattactacatgtggaaaaccactgacaggtatgtgcaacagaagaggctcaaggctgcagaggcagaaagcaaacttaagcaggtgtacatccccaattacaataagccaaaccccaatcagatctcagtcaacaatgttaaggctggagtggtgaatgggacaggagcacctggccagtccccaggagccggcagagcttgcgaaagttgttacaccacacagagctatcaatggtatagttggggccctcccaacatgcagtgtaggctttgcgcatcttgttggacttactggaagaagtatggggggctgaagatgcccacaagattggacggcgagcggcctggtccaaaccggagtaatatgtctccacacgggttacctgcccggtcaagcggcagcccgaaattcgcaatgaaaactcggcaggctttctatttacacaccaccaaattgactcgcatcgctcgcagattgtgccgggagatcctgaggccttggcacgcggctcgccatccgtatcttcctattaattctgcagcaattaaagctgagtgtactgcaagactgcctgaagcctcacagagccctctcgtgcttaagcaagcagttcgaaagccccttgaggccgtgcttaggtatttggagacacatccaaggccaccaaagcccgatcccgtgaaatcagtcagcagcgtactgagctcccttactcctgcgaaggtcgcccctgtgatcaacaacgggtcacccactatcctggggaagagaagctatgaacagcacaatggagtggacggcaatatgaagaagcgcttgttaatgccctccaggggactggctaatcatgggcaggccaggcacatgggtccttctagaaacttactcctcaatgggaaaagctacccaaccaaggttcgcttgattaggggtggctcccttcctccagtgaagagacggcggatgaactggatcgacgcacccgacgatgttttctacatggccacagaggagaccagaaaaatccgaaaactgcttagctcttcggagactaaaagagcagcacgccgaccttacaaacccatcgcacttagacagtcccaggcattacctcccaggccacccccgcccgctccagtgaatgatgaaccgatcgtgattgaggactag

SEQ ID NO: 15948 - DNA, 1887 bp, synthetic construct
  misc_feature 1..1887: note = Description of Artificial Sequence: Synthetic coding sequence
  source 1..1887: mol_type = other DNA
atggtggacctgcccgagaaactcaaacaccaactgcggcatcgggagctgttcctaagccggcagcttgaaagtctcccagcgacacatattagaggaaaatgttcagtgactctcctcaacgaaactgaatcacttaaaagctatctggagcgcgaagacttctttttctacagcctggtctacgacccccagcagaaaaccttgctcgccgataagggtgagattcgggtgggaaatagatatcaggccgatatcacggatctactgaaggagggagaggaggatgggagagatcaatctcgcctggaaacccaggtttgggaagctcacaatccattgaccgacaaacagattgatcagtttttagtcgttgcacgatccgtggggacattcgccagggctttggactgttcttcctctgtccggcaaccaagtctccacatgtccgcggcagcagcatcaagggatataacactgtttcacgcgatggacactctgcataagaatatttacgatatctccaaagccatcagcgccctggttccgcaaggagggcctgtgctgtgcagagacgaaatggaggagtggagtgcctccgaagcgaatctattcgaagaagcactggagaaatatggcaaagatttcaccgatatccagcaggatttcctcccctggaaatccctgaccagcatcatcgaatactactacatgtggaagaccacagatcgctacgtgcagcaaaaaagattaaaagctgcagaagctgaaagtaaacttaaacaggtgtatattccaaattataataaacccaacccgaatcagatttctgtgaataacgtgaaggcaggcgtcgtaaacggaacgggcgcgccaggccagtcacctggcgctgggcgcgcctgcgaaagctgttatactactcagtcctaccagtggtattcctgggggccccctaatatgcagtgcagactgtgcgcttcctgttggacttactggaaaaagtacggaggtctcaagatgccaaccagactcgacggcgaacgcccgggccctaaccgaagcaatatgtcacctcacgggttacccgccaggtcctctggtagccctaaatttgctatgaagactagacaggccttttatcttcacacgacgaagttgacgcgcattgcaaggcgcttgtgcagagagatcctgaggccctggcatgcagcgcgccatccctatctgcccatcaacagtgcagctatcaaagcggagtgtacggcaagattaccagaggcaagccagtccccactcgtgctgaaacaggcagttagaaagccattagaagctgtcttacgctacctggagactcacccccgtcccccaaagcctgatccagtaaaatccgtcagtagcgtattatccagcctcaccccggccaaggtcgcgccagtgattaacaacggctccccaaccattctcggtaaaaggagttatgaacagcacaatggcgtggacggcaacatgaagaaaaggctgcttatgccatctcggggaacttcatcgggcttagcaaaccacggccaagctagacatatgggaccttccagaaacctcctcctgaacggaaaatcttatcccaccaaggtgagattgattcgtggcggctctctgccaccagttaaacgaagaagaatgaactggatcgatgctccggacgacgtgttctacatggctaccgaggagacgaggaaaattaggaagttgctgtcctcttccgagactaagagggctgcaagaaggccttacaagcctattgcattgcgccaatcccaggctcttccgccacgtccacctccgcctgcacctgtgaacgatgagccaatagtgattgaagactag

SEQ ID NO: 15949 - DNA, 768 bp, synthetic construct
  misc_feature 1..768: note = Description of Artificial Sequence: Synthetic coding sequence
  source 1..768: mol_type = other DNA
atgaagacacgccaagcgttttatttgcacactaccaagctgacgcgaatagcgcggcgcctctgcagggagattctgcgcccctggcacgctgctcgccatccttacctgcctattaacagcgctgctatcaaagccgagtgcaccgcacgtcttcctgaggcttcacaaagtcccctggtactcaaacaggctgtacgtaaacctctggaagcggtcctgaggtacctggagacacacccaaggccgcctaaaccagatccagttaagtctgtgtcttccgtgttgagctcacttacaccggccaaggttgcacccgtgattaataatggctctcccaccattctgggaaagaggtcctacgaacagcataacggggtggatggtaatatgaaaaagaggttgctcatgccgtcacgcggaacctacctgggattggctaaccatgggcaggctcgccacatggggcctagccgtaacctcctgctgaacggcaaatcatatccaacaaaggtccgcttgatccgcggcggatcactcccgccagtaaaaaggagacgaatgaactggatagacgcgccagatgacgtgttctatatggccacagaagaaacccgaaagatcaggaagcttctcagttcaagtgagaccaaacgggcggcccggcggccctacaagcctattgcccttcgccagagccaggccttgccaccccggcccccccccccagccccggtcaacgatgaacccatcgtgatagaggattag

SEQ ID NO: 15950 - DNA, 1293 bp, synthetic construct
  misc_feature 1..1293: note = Description of Artificial Sequence: Synthetic coding sequence
  source 1..1293: mol_type = other DNA
atggccgctaacatgtaccgggtgggggattatgtgtacttcgaaaactcgagtagcaatccttacttaatcagaaggattgaggaactgaataaaaccgctaacggcaacgttgaggcaaaagtcgtgtgcttttatcgcaggagggacatttccagcacattaattgctttagctgataaacacgccactctgagcgtctgttacaaggctgggccaggcgctgacaatggagaggagggagagattgaggaggagatggagaatccagaaatggtggatctccctgaaaaactgaagcaccagctgaggcaccgagagctgtttctttcgcgacaacttgaaagtctaccagcgactcacatacgcggcaagtgctctgtaaccttactgaatgaaacagagagcctcaagagctacctcgaacgggaagatttcttcttctactccttagtctatgacccacagcagaagacactcctcgccgataagggtgagatcagggtcggtaacagatatcaggccgatatcacagacttgttgaaagagggagaagaggatggccgcgatcagtcacgcctcgagacacaggtgtgggaggcccataacccattgaccgataagcagatagaccaatttttagttgtggctcggtctgtggggaccttcgctagagctctggactgttctagcagcgttagacaacccagcctacacatgtcagctgcagctgccagtcgcgacatcaccctctttcacgccatggacactcttcacaagaacatatacgatattagcaaggctatctccgccctcgttccgcaaggagggcctgttttatgccgtgacgagatggaggagtggagcgccagtgaggccaacctttttgaggaagctctcgagaagtatggcaaggactttactgacatccaacaagactttctcccttggaaatctctcacgagcattatcgagtactattatatgtggaagacaacagatcggtatgtccagcaaaaacggctcaaggccgcggaagcagaaagcaagcttaagcaggtgtatatcccgaactacaacaagcctaatcctaatcaaattagtgtgaacaatgtgaaagctggtgttgttaacgggactggcgcgccgggccagtcccctggcgcggggagagcctgcgagtcttgttatatgtcaagcctccgcatcctcttagacattctagaggagatttggtggctggagaatgccaacccagtgcgctggcgcgaggctcgaacgaaaccccagtag

SEQ ID NO: 15951 - DNA, 1422 bp, synthetic construct
  misc_feature 1..1422: note = Description of Artificial Sequence: Synthetic coding sequence
  source 1..1422: mol_type = other DNA
atgttaagaccagtgatagaggaagagatcagtatgcttggtgagataacacacctgcagacaatcagtgaggacttgaaatctctgacaatggacccccataaattgccatcaagttcagagcaggtgatcctcgatctgaagggctccgactactcatggtcgtatcaaacgccgccgtcatccccatctaccaccatgagccgtaaatctagtgtgtgtagcagcctgaacagtgtgaatagttccgacagcagatccagtggatcccattcccacagccccagcagtcattatagatatagaagtagcaaccttgcccagcaggcacctgtccggctttcttccgtttcatcacacgattcgggcttcatctcccaggatgctttccagtccaaatcaccctcacccatgcctcccgaggcgccaaaccaacggcggaaggagaagcgcgagcccgaccctaatggaggcggccccacaacagcctccggtcctccagcagcagccgaggaagcccagagaccccgcagtatgacagttagtgctgccacgaggcctggtgaggagatggaagcctgtgaagagttggcacttgccctgtctcgggggctacagctggacacacaaaggtcaagcagggactccctacagtgcagtagcggctacagcacccaaactacgacaccttgttgcagcgaagatacgatacccagccaggtctccgattacgattacttttctgtatcaggagaccaggaggcggatcagcaagaatttgacaagagctctacgattccaaggaatagcgatatttcccaatcgtaccggcgaatgtttcaggccaaacgccctgcatctacggccggactccccacaaccctggggcccgcgatggttaccccaggcgttgcgacaataagaagaacaccgtctaccaaaccgagcgttcgtcggggcaccatcggagccggtcccattccgatcaaaaccccagtgatcccggtgaagacacctacagtccccgatctgccaggagtgctgcccgctccccccgatgggcctgaggagcggggagagcatagcccagaaagcccctcagtgggggagggacctcagggggtgacttccatgccatccagcatgtggagtgggcaggcaagtgtcaaccctccactcccaggtcctaaacccagcattccggaggagcatcgacaagccattcccgagagtgaggcagaggatcaagaaagagagccaccctctgcaaccgtgtcccccggacagatcccagaaagcgatccagcagatctgtcccctagggacaccccccagggggaagacatgctgaatgctatcagacgcggggtaaagctcaaaaaaacgaccactaacgatagatcagcaccgcgcttcagctag

SEQ ID NO: 15952 - DNA, 2193 bp, synthetic construct
  misc_feature 1..2193: note = Description of Artificial Sequence: Synthetic coding sequence
  source 1..2193: mol_type = other DNA
atggaagccgttattgagaaggagtgcagcgctttaggcgggctattccagacaataattagcgacatgaaaggttcctaccctgtttgggaagattttatcaataaggccggcaaactccaatcccagctccggaccacggtggtggctgccgccgcctttctggatgcctttcagaaggtggccgatatggcaaccaatacacgaggcggcaccagagagatcggttcagccctcaccaggatgtgtatgcgccaccgttctatcgaggcaaagctgagacaattctccagcgcacttatcgactgcctgatcaaccccctgcaggagcagatggaggagtggaaaaaagttgctaatcaactggataaggaccatgctaaagagtataaaaaggcccgccaggaaatcaagaaaaagagcagcgacaccctgaagctccaaaagaaagccaaaaaggggagaggggatatccagcctcagctcgatagtgctctgcaggatgtcaacgataaatacttactgctagaggaaacagaaaaacaggccgttcgcaaagccctcatagaggagagagggcgcttctgtacatttatcagcatgttgcgtcctgttatagaagaggagatatccatgttgggcgaaattacccacctacagactatcagcgaagatctgaagtcattaaccatggatccccataaactgccctcatcctcagaacaggtgattttggatttgaaagggtccgattatagttggtcttaccagacaccccccagctctccaagtaccacaatgagcagaaaatctagtgtatgcagctcccttaacagtgtcaacagcagcgatagcagatcttcagggtcgcacagccactctcccagcagccactaccggtacagaagtagcaacctggctcagcaagcaccggtgagactgtcctctgtgtcttcccacgatagtggtttcatttctcaggatgccttccagtcaaagagcccatcgccgatgccgccagaggcgcctaatcaaaacagttcaagttccgccagctccgaagcaagcgagacatgccagagcgtgtctgaatgtagttcgcctacttctgtttcaagcggctccaccatgggcgcttgggtcagcaccgaaaaggactgggcaaagcctgggccctacgaccagcctctggtcaatacacttcagcgccgaaaagagaaaagagagcccgaccctaacggggggggacccacaacggcttccggcccaccggccgccgcagaggaggcacagcggcctagaagcatgaccgtttccgctgccacacgaccaggcgaggagatggaagcgtgcgaggaactggcactcgcattgtcccgaggtttacagctcgacacccagcgatcaagccgggattcattacagtgtagctccgggtactcaacacagaccaccacaccgtgttgttctgaggacacaatcccctctcaagtatccgactacgattacttctcagtgagtggcgatcaggaggctgatcagcaggaattcgacaaatcatccacaattccaaggaactcagacatttctcagagctatcggagaatgtttcaggccaagcgtcccgcctccacagcaggcttgcccacgacgctcggaccagccatggttacacctggcgtggctacgatacgccggacaccatcaacaaagccatccgtacggaggggtactataggcgccgggcccatacctatcaagacccccgttattccagtgaaaacaccaactgttccggatttgcccggggtgttgcccgctccccctgacggacccgaggagaggggggagcacagcccagagagcccgtctgtgggcgagggccctcagggagttacgagcatgccatcctctatgtggagcggtcaggcatccgtgaacccccctctgccaggccccaaaccaagtatacctgaggagcaccggcaggcaatccctgaatctgaggcagaggatcaggaaagggaaccgccgtccgctacggtgagcccgggacaaataccggaaagcgaccctgcagatctgagccccagagacactccccagggagaggacatgcttaacgccataagaagaggggtgaaattgaaaaagacaacaacgaatgataggtcagcacctcgcttcagttag

SEQ ID NO: 15953 - DNA, 1590 bp, synthetic construct
  misc_feature 1..1590: note = Description of Artificial Sequence: Synthetic coding sequence
  source 1..1590: mol_type = other DNA
atgagcagaaaaagctcagtgtgttcatctctgaattctgttaattcatccgactctcggagcagcggatctcatagccacagccctagctcccattaccgatacagaagcagtaacctggcacagcaggcaccagtcagactcagctcggtgagttcacacgactccggcttcatctcgcaggatgcatttcaatcaaagagcccatctccgatgccaccagaggcacctaatcaaaacagtagttcctccgccagcagtgaagcgtccgaaacttgccagtccgtgtcagagtgcagtagccctacctctgtgtcaagtggcagtacaatgggtgcgtgggtatctactgagaagctgagtaatggcttcagccactactctctatcctccgagtctcacgtggggccaacaggagcagggctgtttcctcattgtctgcccgccagtcgcctgctcccccgcgtgacctccgtgcatctcccggactatgcccactattacaccatcggtccaggcatgtttccttcaagccagataccaagttggaaagactgggcaaaaccagggccctatgaccagcctctggtgaatacattgcagcgaagaaaagaaaaaagagagcctgatccaaatgggggaggacctaccacggcaagtgggcctcccgccgccgcggaagaagctcagcgccctcggtccatgaccgtttctgctgcgactcgtcctggagaggaaatggaggcatgcgaggagctcgcattggctttaagccgcgggctacagctcgatactcagcgcagtagcagagactcccttcagtgctcatccgggtattcaacacaaaccacaacaccatgttgtagtgaagatacgatcccctcacaggtaagcgattacgactacttcagtgtgtctggcgatcaagaagccgaccagcaggaattcgacaaatccagcaccatcccaagaaacagcgatatcagccaaagttaccggaggatgttccaggcgaagagacccgcctccacagctggattgccaactacccttggacctgctatggttaccccaggcgtggctaccattaggcgcaccccctctaccaagccgagcgtgaggcgagggactatcggtgctggtcccattccaatcaaaactcccgtgatacctgtgaagaccccgacagtgcccgatctgcccggcgttctaccagcacccccggatggtcctgaggagaggggcgagcattctcccgagagtccttcggtgggcgagggtccccagggggtgactagtatgcctagctctatgtggtcgggccaggcatctgtaaacccccccctcccagggcccaaaccaagcatcccggaagagcaccgccaggcaattcccgaatcagaggcggaagatcaggagagagaacctccatccgctactgtgagtccgggccagatacctgaatcggatccagcagacctgtcccctagagatactccacaaggggaggatatgctgaacgccatcagaagaggtgtgaaactgaagaagactacaaccaacgaccggtccgcaccacgattcagctag

SEQ ID NO: 15954 - DNA, 2268 bp, synthetic construct
  misc_feature 1..2268: note = Description of Artificial Sequence: Synthetic coding sequence
  source 1..2268: mol_type = other DNA
atggaagcagtcattgagaaggagtgctcagccctggggggtttgtttcagactattatttccgatatgaaaggctcctatccagtgtgggaagactttatcaataaagcaggtaagctccagtcccagctccgcacgaccgtagttgctgctgcagcgttcctggacgcgttccagaaagtcgccgacatggctaccaacacaagaggcggtactcgcgagatcggatctgcccttacacgaatgtgtatgaggcaccgaagcatagaggccaagctgcggcagttctcatctgctcttatcgactgcctgatcaatcctctgcaggaacaaatggaggaatggaaaaaggtcgctaatcagttggataaagaccacgccaaagaatataagaaggcacggcaggagattaaaaaaaagtcttcagacacactgaagctacagaagaaggcaaaaaaagggaggggagacatccagccgcagctggattccgctctgcaggacgtgaatgataaatacttgctcctcgaagagacagagaagcaggccgtgcgcaaggctctcattgaggagagaggaaggttctgcacatttataagcatgttgagaccggttatcgaagaggaaatcagcatgctgggcgaaattactcatcttcagacaatctccgaagatctgaagtcattgactatggatccccataaactgccatcatctagtgagcaggtcatcctcgatctgaaaggctctgattactcatggtcttaccagacaccaccctcatcacccagcacaactatgagccgtaagtcatctgtgtgcagcagtctcaatagtgttaacagtagcgattccaggtcctccgggagtcactcacattctccttctagccattatcgctaccgcagttccaatctggcccagcaggcccccgtcagattgtcctccgtctcctcccacgactcagggttcatctcccaagacgcattccagtctaaaagcccaagtccaatgcctcctgaagctccaaaccagcttagtaatggattcagccactacagcctctcgtcggagagccacgttggacccacaggcgccggactgtttccgcattgccttcccgccagcaggttattaccccgggtaactagtgtgcatctgccggattacgctcactattatacgatcggtccaggcatgtttccgtcctcccagattccttcttggaaagattgggcgaagcctggaccttacgaccagcctctggtcaatacgttgcagcggcgtaaagagaagcgagagcctgaccctaatggtgggggtccgaccaccgcctccggcccccctgccgccgctgaagaagctcaacgcccccgtagtatgaccgtgagcgcagcgactaggcccggggaggaaatggaggcttgtgaagagctagctttagctctgagtaggggactccagttggatacccagaggtcttctcgggacagtctccagtgcagttcagggtatagcacacagaccactactccttgctgttccgaagacaccatcccctcacaggtctccgactatgattattttagcgtgtctggtgatcaggaggctgaccagcaagaattcgataagagctctacaatcccccgaaatagcgatattagccagagttatagacggatgttccaggcaaagcggcccgcatcaacagcaggactcccgaccacactgggcccagctatggtgacccccggagtggctacaatcaggcgcaccccatccaccaaaccttcagtacgtagggggaccatcggcgcgggccccatcccgataaagacgcccgtaattcccgttaaaacaccgaccgtcccagatctgccaggcgttcttcctgccccaccggacggccctgaagaacgaggagagcactcacccgagtctccatctgtgggcgaaggaccccagggggtaactagcatgccatcatctatgtggagcgggcaggcgtccgtaaatccacctcttccaggtccgaagccatctatcccagaagaacaccgacaggctattcccgagtcagaggccgaagatcaggaacgtgaacctccatctgccaccgtatccccaggtcagattcccgagagcgatccagccgatctgtccccccgggatactccccagggcgaagacatgctgaacgcaatcaggcgtggtgtcaaattaaaaaaaaccactactaacgataggagtgcgcctcgtttttcttag

SEQ ID NO: 15955 - DNA, 1437 bp, synthetic construct
  misc_feature 1..1437: note = Description of Artificial Sequence: Synthetic coding sequence
  source 1..1437: mol_type = other DNA
atggcaggggtagaggaggtggcagcgagtggcagccaccttaatggtgacctggacccagatgatcgagaggagggagccgcctccaccgccgaggaagccgcaaaaaagaagcgccgcaagaagaaaaagagtaaaggcccctctgccgctggagaacaggaacccgacaaagaatcaggagcttccgtggatgaggtcgcaagacagctggagcgatcagcgctggaggataaggaacgagacgaagacgatgaagacggagatggagatggcgatggtgccactggtaagaaaaagaagaagaaaaaaaaaaagcgcggtccaaaagtgcagactgacccccccagcgtcccaatttgcgacctttaccccaatggggtgttccccaagggacaagagtgcgagtatccacctactcaggacggccgcacagcagcctggcgcacgaccagcgaggagaagaaggccctggaccaggcctcagaggagatctggaatgatttccgtgaagcagctgaagcacacagacaggtgcgaaagtatgtcatgtcctggataaagccagggatgaccatgatcgagatctgcgagaaactggaagactgcagccgtaaactcatcaaggagaacgggctgaacgccggcctggcttttcccacaggatgctcccttaataattgtgccgcacactacacccccaacgcaggagatacgacggtgctgcagtatgatgacatttgcaaaatcgactttgggacccacatcagcggaaggatcatcgactgcgcgtttaccgttaccttcaacccgaaatatgataccttgttgaaagccgtaaaagatgccacaaatactggcatcaagtgcgccggcattgacgtgcggctttgtgacgtgggagaagcaatccaagaagtgatggaatcatatgaagtcgaaatcgacggcaaaacctatcaagtgaagcccatcaggaacttgaacggccatagcatcgggcagtaccggatccacgccgggaagacagtgcccatagtgaaagggggcgaagctacccgtatggaagagggcgaggtgtacgccattgagacctttggctctaccggcaagggcgtcgtgcatgacgacatggagtgctcccattatatgaagaactttgatgtaggccatgtgccaatcaggttgccgaggaccaagcacctgcttaatgtcatcaatgagaatttcggcaccttggccttctgcagacggtggctggatagactgggcgagtccaaatatcttatggctttgaaaaatctgtgcgatctgggcatcgtggatccatacccccccctgtgcgatatcaagggctcctacactgcacagttcgagcatactattctcctccgcccaacctgcaaagaggtagtcagccgaggcgacgattattag

SEQ ID NO: 15956 - DNA, 1743 bp, synthetic construct
  misc_feature 1..1743: note = Description of Artificial Sequence: Synthetic coding sequence
  source 1..1743: mol_type = other DNA
atgggaactacgggcctcgaatccttgagtcttggtgatcggggtgccgcccctaccgtcacctccagcgagcggctggtgcctgacccaccgaatgatctgaggaaggaggacgtggctatggaactggaaagagttggggaggatgaggagcagatgatgataaaacgaagcagcgaatgcaacccactgctgcaggagcctattgctagcgctcagtttggagcgactgcaggtaccgagtgcagaaaatctgtgccatgtggttgggagagggtcgtgaaacagagactttttggaaagacagccgggcgcttcgatgtctactttatcagcccgcaaggactgaagttcagatcaaagtcttcccttgccaactatctgcacaagaatggagaaaccagcctgaaaccggaggactttgacttcactgtgctctccaagcgaggcatcaaaagtaggtacaaggattgttccatggctgcactcacttcccacttgcagaaccaaagtaacaacagcaactggaacctgcgcacgcgatctaaatgcaagaaagatgtgttcatgccaccaagctcttcctcagagctgcaagaatcccgcgggttatcaaattttacttctacccacctcctgctcaaagaggacgagggagtggatgatgtcaatttccgcaaggtgaggaagccaaaggggaaggtcaccattctgaaaggaattccgattaaaaagaccaagaaagggtgccgaaagagttgctctgggttcgtccagagcgactctaagcgcgaatccgtttgtaacaaggcggatgctgaatcagagccagttgcacagaagtcccaattagaccggacagtctgtatctccgatgcgggcgcctgtggggaaacactgagtgtgactagcgaagagaattctctggtgaaaaagaaagaacgatctctttcatccggtagcaatttctgcagtgagcaaaaaacatccggaattatcaacaagttctgtagcgcaaaggactccgagcacaatgaaaagtacgaagatacattcttagagagcgaggagatcggtaccaaggtcgaagtggtagagcggaaagagcaccttcatactgatattctgaagcgtgggagcgaaatggataacaattgctcaccaacccgaaaagactttaccggagagaagatctttcaggaggacaccatcccacgtacacaaatagaaaggcgcaaaaccagtctctatttctcctccaagtataataaagaggcactttccccccccagaaggaaggcgtttaaaaagtggactccacctcgtagtcccttcaatctggtgcaggaaacgcttttccatgacccatggaagttgctaatcgcgactatatttctcaatcgcactagtggtaaaatggcaattccggtgctgtggaagtttctcgaaaagtatccgagcgccgaagtggccaggacggcagactggcgggacgtgagcgagcttctcaagcctctcggcctatacgatctgcgggcaaagacaatcgtgaagttctccgacgagtatctaacaaagcaatggaagtaccctattgagctgcatggaataggaaaatacggtaatgattcatatcggatattctgcgtgaatgagtggaaacaggtccatccagaggatcataaattaaacaaatatcatgattggttatgggagaaccacgaaaagctatcactgagctag

SEQ ID NO: 15957 - DNA, 789 bp, synthetic construct
  misc_feature 1..789: note = Description of Artificial Sequence: Synthetic coding sequence
  source 1..789: mol_type = other DNA
atgggcaccacgggtctcgagagtctatcacttggcgaccgcggggcggcccccaccgtgacaagttctgagcgactggtgcctgatccaccaaatgatctgcgaaaagaggacgtggccatggaactcgaaagggtcggagaagacgaggagcagatgatgattaaaagatccagcgagtgcaaccccctgctccaggagccaatcgcttcagcacaatttggcgccacagccgggactgagtgccaggacaccattccgcggacacagatcgaacgcagaaaaacctccctatacttctcatctaagtataacaaagaggctctctctccccctaggcggaaggcctttaagaagtggacccccccaaggtctcccttcaaccttgtccaagaaacattatttcacgacccctggaaattgctaattgcaaccatctttctgaatcgcaccagtgggaaaatggccatcccagtcctgtggaagttcttagaaaaatacccgagcgccgaagtcgccagaacagctgactggagggatgtgtctgaactcctgaaaccactcgggctgtatgacctgcgtgcaaagacgattgtaaaattttccgacgaatatctgaccaaacagtggaagtaccctatcgagctccatggaatcgggaagtatgggaacgacagctatcgcatcttttgtgtcaacgagtggaagcaggtgcaccctgaagatcataaactcaacaaataccatgattggctgtgggaaaaccacgagaagctttcactttcttag

SEQ ID NO: 15958 - DNA, 1725 bp, synthetic construct
  misc_feature 1..1725: note = Description of Artificial Sequence: Synthetic coding sequence
  source 1..1725: mol_type = other DNA
atggggactactggattagagtctctgtcattgggcgaccgcggagccgctcccaccgtgacctccagcgagaggctggtcccagaccccccaaatgacttgaggaaggaggatgtggccatggagttggaaagggtgggagaggacgaggagcagatgatgatcaagcggtcctctgagtgcaatccactgctccaagagcctattgccagtgctcaattcggagcaacagctggtaccgaatgcaggaagtcagtgccctgcgggtgggagcgagttgtgaagcagcgcctgttcggaaaaactgctggccggttcgatgtctattttattagccctcaagggttgaaattcaggagtaaaagctcactcgctaattatctgcacaagaacggagaaacttctctgaagccagaagatttcgacttcactgtcctcagtaagagggggattaaaagcagatacaaagattgttccatggctgccttaacatcgcacctgcagaaccagtctaacaacagcaactggaatctcaggacccgatccaaatgtaagaaagatgtttttatgcccccgtcttcatcctccgaactccaggaatctcggggactgagtaactttacaagcacgcaccttctgttgaaagaagacgagggcgtggacgacgtgaactttcgcaaggtacggaagccaaaaggtaaggtgacgatcctcaaggggatccccatcaaaaaaacaaaaaagggctgtaggaaaagctgctcgggctttgtccagtcggactcgaaacgggaatctgtgtgcaacaaggcagacgccgagtctgagcctgtggcccagaaatcccagctcgatcgcactgtttgtatctctgacgcgggggcctgcggcgaaactttgtcggtgactagcgaagaaaatagcctggtcaaaaagaaggaaaggagtctttcatctggatctaacttctgctctgagcaaaaaacgagtggaatcatcaacaagttctgttctgcaaaggacagcgagcataatgaaaaatatgaggatacgtttcttgaatcagaagaaatcggtaccaaggtagaagtcgtagaacgtaaagagcatctgcacacagacatcctgaaaagaggctctgaaatggacaataattgttcgcctacacgtaaggactttacagaggacacaatacctcgcacacagattgaacggcgaaaaacttctctttatttcagctcaaagtataacaaagaggctttatctccccctagaagaaaagcctttaagaaatggacaccgccacgtagtccattcaacctggtgcaggagactttgttccatgacccttggaaactgcttattgcaacgattttcctgaatcgcactagcggaaagatggctattcctgtgctgtggaagttcctggaaaaatatccctcagccgaggtcgcccgaactgccgactggagggacgtatctgaactgcttaaacctctgggcctctacgacctgcgggcaaagacaatagtaaaattttctgatgagtatttaaccaaacagtggaaataccccatcgagcttcacggcatcggcaaatatggcaatgactcgtaccgaatcttctgtgtgaacgaatggaagcaagtgcatccagaagaccacaaattaaacaagtaccacgactggctttgggagaatcacgaaaaattgagcttgagttag

SEQ ID NO: 15959 - DNA, 93 bp, synthetic construct
  misc_feature 1..93: note = Description of Artificial Sequence: Synthetic coding sequence
  source 1..93: mol_type = other DNA
atggtaaacgaggcaagggggaactcctccctgaacccttgtttagaaggcagcgcctcttctgggagcgagagtagcaaggactcctcctag

SEQ ID NO: 15960 - DNA, 2094 bp, synthetic construct
  misc_feature 1..2094: note = Description of Artificial Sequence: Synthetic coding sequence
  source 1..2094: mol_type = other DNA
atggatcaccggaaagccagggtgctgcctgccggccactactgcccctctcttggtatctgggcaagtcaggttggatcagtgcgaagctcagtgcccccttccatttcacggaatcccgcaatggtgaacgaggcccggggaaatagcagcctgaacccatgccttgagggatcagccagctctggatccgaatcttctaaggacagtagtcggtgtagcactcctggcctcgatcccgagcgccacgaacgcctccgggagaagatgaggcggcggctcgagtctggagataagtggttctcactggaattttttccccccagaaccgccgagggtgcggtcaatttaattagtagattcgaccgcatggcggcaggcggccccttgtacatcgatgtcacttggcaccccgccggtgatcctgggagtgacaaggagacctcaagtatgatgattgcctccactgccgtgaattactgtggcttggaaaccattctacatatgacctgttgccgacagcgtcttgaggagattaccggacacctgcacaaagcaaagcagctgggcctcaaaaatatcatggccttgagaggcgaccccataggagaccagtgggaggaggaagagggcggatttaactacgccgtcgacctggttaaacacatccgatccgagttcggggactactttgacatttgtgtcgccggttatccaaaaggccatccggaagccggaagtttcgaggccgatttaaagcacctgaaagaaaaagtctctgctggggccgattttattatcacgcagctgtttttcgaggccgatacctttttcaggttcgttaaggcttgcacggacatgggcataacatgtcccattgtcccaggcatatttcccattcagggctaccacagtctcagacagctggtgaaactctctaagcttgaggtgcctcaggagatcaaggacgttattgagccaatcaaagacaacgacgcggctatccgcaattacggcatcgagctcgcagtctcattatgtcaggaactgctggcttctggccttgtgcctggactccacttttatactctcaaccgggaaatggcaaccactgaggtcctgaagcggcttggcatgtggacggaagatcctagaagacctctcccttgggccctcagcgctcatcctaaacggcgggaggaagatgtgcgaccaatcttttgggcgagccgacccaaaagttacatatacaggacgcaagaatgggacgagttccctaacggccgatggggaaattcttcctcaccagcgtttggggagctcaaggattattacctcttctatctaaagagtaaatccccaaaagaagagctactcaagatgtggggggaggaacttaccagcgaagagtccgtgtttgaggtatttgtgttatatctgagtggcgaacccaaccgcaatgggcataaggtgacctgcctgccctggaacgacgaaccacttgccgccgagaccagcctcctcaaggaggagctgctcagagtcaataggcagggaattctgacaataaatagccaacctaacatcaatggtaagccgtcctccgatccgattgtcgggtgggggccctcgggcggatatgtattccagaaggcctatctcgagttctttactagccgggagaccgctgaagccctacttcaggtcttaaagaagtatgaattgagagtcaattaccatttggtcaatgtcaaaggggaaaacatcactaacgcaccagagcttcagccaaatgccgtaacgtggggaatattcccaggccgcgagatcatccagcctacagtcgtggacccagtgtcatttatgttttggaaggatgaggcatttgccctgtggatcgaacggtgggggaaactgtacgaagaagagtctccttctcggaccataatccagtacatccatgacaattactttctcgtgaacctagtcgataatgacttccctcttgacaactgcctttggcaagtcgtcgaggacacattggaactgctcaatcggccgactcagaacgctagggagaccgaggctccgtag

SEQ ID NO: 15961 - DNA, 2094 bp, synthetic construct
  misc_feature 1..2094: note = Description of Artificial Sequence: Synthetic coding sequence
  source 1..2094: mol_type = other DNA
atggatcaccggaaggctcgggtgctccccgcaggtcactactgcccttccctgggtatctgggcctcccaagtgggcagtgtgcggagtagtgttcccccatccatctcccgaaacccagcaatggtgaacgaggcaagagggaactcctccctgaacccctgcttagagggctctgcctcgagcgggagcgagtcctctaaagattcgagcagatgctcaactccaggcctcgaccccgagaggcacgaaagactgagagagaagatgcgacgaaggctggagtctggcgataagtggttcagtctggagttttttccccctaggacagcagaaggcgctgtgaatttgatctctagatttgatagaatggctgccgggggtcccctctatatagacgtaacttggcatcctgccggcgatcccgggtccgacaaggagacctcgtccatgatgatcgcctctaccgctgtcaattactgcggtctcgagaccatactgcatatgacatgctgtaggcaacggcttgaagagatcacaggccacttgcacaaggcaaagcagttgggcctcaagaacatcatggcattgcgcggtgatccgataggtgatcagtgggaggaagaggagggcgggttcaactatgccgtggacctggttaagcatatccggtcagagttcggggactattttgacatctgcgtagccggatatccaaaaggacatccagaagcgggtagctttgaggccgacttaaagcatctcaaagagaaagtttctgccggcgccgactttatcattacccaactctttttcgaagctgacaccttttttaggttcgtaaaggcgtgtactgacatgggcattacatgccctattgtacccgggatctttccaatccagggctaccactcgctgcgccagctggttaagttgtctaagctggaggttccacaggagatcaaagacgtcatagaacccatcaaggataatgacgcagccatccggaattacggcatcgagctggctgtgagtttgtgtcaagaactattagcgtccggactagtgcccggtctgcatttttacacactcaacagggaaatggcaacaactgaggtcttaaagaggcttgggatgtggactgaagatcctcggcgccccttgccttgggccctttccgcgcaccctaaaaggagagaggaggatgtgagacctatcttttgggcaagtcgacctaagagctacatctaccggacccaagagtgggatgagtttcccaacggcagatggggcaactcttcctcccccgcttttggcgagttgaaagactactacctcttttatctcaaaagcaaaagtcctaaggaagagcttctgaagatgtggggagaagagcttacaagcgaggaatctgtctttgaagttttcgtgctctacttgagcggagagcccaaccgaaatgggcataaagtaacgtgcctgccctggaacgacgaaccactggctgccgaaaccagcctgctgaaagaggagctacttagggtaaaccgacaggggatcctaacgatcaacagccagccaaacataaatggcaagccctcgtccgatcctatcgtagggtggggccccagtgggggatacgtcttccaaaaggcgtacttagaattcttcacctctcgagagacggccgaggctctgctgcaagtgctgaaaaaatacgagttgcgggtgaactatcacctcgtgaacgtgaaaggagagaatatcacaaatgccccagaactgcagcctaacgctgtgacttgggggatctttcctgggcgtgagattatccagcccactgttgtcgaccctgtgagcttcatgttttggaaggacgaggcctttgctctgtggattgaacggtggggtaaactatacgaggaggagtctccttcccggacaattatacaatatatccatgacaattacttccttgttaatctggttgacaatgacttccctttggacaattgtctgtggcaggtggtcgaagacacattggaacttctcaatcggcccacccagaacgcacgggagactgaagcaccttag

SEQ ID NO: 15962 - DNA, 1971 bp, synthetic construct
  misc_feature 1..1971: note = Description of Artificial Sequence: Synthetic coding sequence
  source 1..1971: mol_type = other DNA
atggtgaatgaggcaagaggaaacagctctttgaacccttgtttggagggctcagcgtcctccggcagtgaaagcagtaaagattcgtccaggtgttccacccccggtcttgatccggagcgacacgaaaggcttcgagaaaaaatgcggcggcgccttgagtcaggggataagtggttctccctggagttctttccacctcgaaccgccgagggggcagtgaatctgatcagcagattcgaccgcatggccgccggcggccctctgtatatcgacgtaacttggcacccggctggcgatcccgggtccgacaaggagacctcatccatgatgatcgcttcaacggcggtgaactattgcggcctagaaactatacttcacatgacttgttgtaggcagagactggaggagatcacaggtcatttgcataaagctaaacagctgggactgaaaaatatcatggccctacggggcgatccaattggagaccaatgggaggaggaagaggggggcttcaattacgcagtggatttagtaaaacatatcaggagtgagtttggtgactattttgacatttgcgtcgcagggtatccaaaagggcatcctgaggctggtagttttgaagctgacctgaagcatctgaaagagaaggtgagcgctggcgcagacttcatcatcacgcaattgtttttcgaggccgacaccttcttccggttcgtgaaggcctgcaccgacatgggaatcacatgccccatcgtcccaggcatttttcccatacaaggctaccatagccttcgacagcttgtgaagcttagcaaactggaggtcccacaagagattaaagatgtcattgagcccataaaagataacgatgcggcgattcgtaactatggtatcgagttggccgtgtccctctgtcaggagttgctggcttcagggctggtcccggggctccatttctataccctcaacagagaaatggcaaccacagaggttctgaagcgtttaggcatgtggaccgaggacccacggaggcccctgccctgggctctttcagcacatcccaagcgaagggaagaggacgtacgccccatcttctgggcatccaggccaaaatcctacatctaccggactcaagaatgggacgagttccctaacggacgatggggcaacagctcatcacccgcctttggcgagcttaaggattactacctattttacctgaaatcaaagagccctaaggaggagctgctaaagatgtggggcgaagaactcacgtctgaagagagcgtattcgaggtgtttgtcctgtacctgtcaggggaaccaaatcgcaacggccacaaagtgacttgcctaccatggaatgacgagcccctggccgccgaaaccagcctactcaaagaagagctccttcgcgttaacagacagggcatattgacgatcaattcgcagcccaatattaatggcaagcctagctcagatcccattgtggggtggggtccctccggggggtacgtgttccagaaagcttatttggaattctttacaagcagggagacggcggaggcactactgcaagtgctgaagaagtatgagctgcgtgttaactaccatctggtcaacgtcaaaggtgagaacataaccaacgcccctgagttgcagccaaacgctgtgacctgggggatctttcctgggagggagattattcagccgactgtagtagatcccgtgagtttcatgttctggaaggatgaagcctttgccctctggatcgaacgttggggcaagttatatgaagaagaaagcccttctcgtacaataattcaatacattcacgacaactattttctggttaatctggtcgataatgactttcctctggacaattgcctctggcaggtggtggaagataccctggagttactcaaccggccgacccagaacgcaagagagaccgaggccccctag

SEQ ID NO: 15963 - DNA, 1971 bp, synthetic construct
  misc_feature 1..1971: note = Description of Artificial Sequence: Synthetic coding sequence
  source 1..1971: mol_type = other DNA
atggtcaacgaggcccgcggaaattcgtcactgaacccctgtctcgaaggatccgccagctccggatccgagagcagcaaggactctagccgatgctctacaccagggctggaccctgaaaggcatgagaggttacgggaaaagatgcgacgtcggctggaaagcggggataaatggtttagtttagagttttttccccctagaacagccgaaggagctgtgaacctcataagcagattcgaccgcatggcagcgggtggccctctgtacattgatgtcacgtggcaccccgcaggcgacccaggtagcgacaaagagacctcttccatgatgatcgcaagcacagctgtcaactattgtggtctcgagaccatactacatatgacctgctgtcgacaaaggctggaagaaataacaggtcatttacacaaggctaagcagctggggctgaagaacattatggctctgcgaggggatccgataggcgaccagtgggaagaggaggagggagggtttaattacgctgtggatctggtgaagcacatccggtcagagttcggagattatttcgacatttgtgtggctggttatcctaagggccaccccgaagcaggcagcttcgaggcagatcttaaacatctgaaggagaaggtctccgccggggcagactttattattactcagttgttctttgaagccgacactttttttagattcgtcaaagcctgcacagacatggggattacatgcccgatcgtgccgggcatattccccatacagggataccactctttgcggcagctggtgaaactgagtaaactagaggtacctcaggaaataaaagacgtgatcgagccaatcaaagacaacgatgctgcaatacgcaactacggaatcgaactcgcagtgagcctgtgccaagagctgctcgccagcgggctcgttcctggactccacttctacaccttgaacagggagatggccacaactgaggtactcaagcgcctcggcatgtggactgaagatccaaggcggcccctgccttgggccctgtcagctcaccccaaacggagggaggaggatgttcgcccaatcttttgggcttctcgcccaaagtcatatatctatagaactcaagagtgggatgagttccctaatgggcgctgggggaactctagttcccctgcctttggcgaattaaaggattactacctgttttatctgaaaagtaagtctccaaaggaagaacttctcaagatgtggggagaggaactcactagtgaggagagtgtgtttgaagtgttcgtgctttacctaagcggggagccaaatagaaacggtcataaagtgacttgtttaccttggaacgacgaaccactggccgccgagacttcactgctgaaagaggagctcctccgcgtgaatcggcagggtatattgacaatcaacagtcaacctaatatcaacggtaagccatctagcgaccctatcgtgggctggggcccaagcggaggatacgtcttccagaaggcctacctggagtttttcaccagccgagaaaccgctgaggctctactgcaagtgttgaagaagtatgaattgcgagtgaattatcacctggtcaatgttaaaggcgagaacatcaccaacgcgcctgagttacaacccaatgccgtcacatggggaatctttcccgggcgggagataatccaaccaactgtggtagaccccgtttcttttatgttttggaaagacgaagcatttgccctctggattgagcgctgggggaaactatacgaagaggaaagccctagccggactattattcagtatatccacgataattacttcctggtaaatcttgtggacaatgacttcccactcgacaattgtctgtggcaggttgtggaagatacactcgagctgctgaaccggccaactcagaatgccagagagactgaggccccctag

SEQ ID NO: 15964 - DNA, 93 bp, synthetic construct
  misc_feature 1..93: note = Description of Artificial Sequence: Synthetic coding sequence
  source 1..93: mol_type = other DNA
atggtgaacgaggcaagaggaaactcctcgctgaacccgtgcctggaaggctctgcatcgtcagggtccgaatccagcaaagacagcagttag

SEQ ID NO: 15965 - DNA, 432 bp, synthetic construct
  misc_feature 1..432: note = Description of Artificial Sequence: Synthetic coding sequence
  source 1..432: mol_type = other DNA
atggtgaatgaagccagaggcaactcgtcattgaacccctgtctggaaggtagcgcatctagcggcagtgagtctagtaaggattcgtcacgctgtagcaccccaggcttggaccctgagaggcatgaaagactgagggagaagatgcggcgacgtctggagagcggagacaaatggttctccctcgaattcttcccccccagaacagcagagggagccgtcaacttgatcagccggtttgatcgcatggcagccgggggccctctatatattgacgtgacctggcaccctgccggagacccaggatcagacaaggaaactagctccatgatgattgcctctaccgctgtgaattactgcggactggagactattctccacatgacctgttgtagacagcgcctggaagagattactggccacctacattag

SEQ ID NO: 15966 - DNA, 162 bp, synthetic construct
  misc_feature 1..162: note = Description of Artificial Sequence: Synthetic coding sequence
  source 1..162: mol_type = other DNA
atgtgtcgcggttgtgggtgtttgccaccggacgccccgtgcccaacactgtgtagtcggaatcctgctatggtaaacgaggccagaggtaattctagtcttaatccctgcttggagggttccgcttcttccgggtccgaatctagcaaggatagttcttag

SEQ ID NO: 15967 - DNA, 93 bp, synthetic construct
  misc_feature 1..93: note = Description of Artificial Sequence: Synthetic coding sequence
  source 1..93: mol_type = other DNA
atggtcaacgaggcaagaggcaatagctcacttaacccctgcctggaggggagtgcaagcagcggaagtgaaagcagcaaggactctagttag

SEQ ID NO: 15968 - DNA, 2508 bp, synthetic construct
  misc_feature 1..2508: note = Description of Artificial Sequence: Synthetic coding sequence
  source 1..2508: mol_type = other DNA
atggccgcacccattctcaaagatgttgttgcctacgttgaggtctggagctctaatggaactgaaaactacagtaagacattcacaacccagctggtcgacatgggcgccaaggtttccaaaacctttaacaagcaggttacacacgtgatcttcaaagatggttaccagtccacttgggataaggcccagaagagaggcgtaaaactggtttctgtcctgtgggtagaaaagtgccgcaccgctggggcccatattgacgagtcactatttcccgccgccaacatgaatgaacacctcagctccctaataaagaaaaagcgaaagtgtatgcagcctaaggactttaactttaagactcctgaaaatgacaagcggttccagaagaaattcgagaaaatggccaaggaactgcagcgccagaaaacaaatcttgatgacgatgtgccaatcctgctcttcgaatccaacggtagcttgatctatacaccaactatcgagatcaacagcagacaccatagcgccatggagaaaagactacaggagatgaaggagaaaagggagaacttgagcccaactagttcccagatgatccaacagtcccatgacaatccaagcaattcgctctgtgaggctcccctaaatattagccgggacaccctctgctcagatgaatactttgctggaggcctgcactcaagctttgacgacctgtgcggcaacagtggatgcgggaatcaggagaggaagttggagggtagtatcaacgacattaagtctgatgtgtgcattagctcgctggttctcaaggccaataacatccactccagcccatctttcacacacttggataaaagcagccctcagaagtttctgtcaaacctttcgaaagaggagattaaccttcaacgtaacatcgccggcaaagtggtgacgcccgaccagaaacaggccgccggcatgtcccaggagacattcgaggaaaaatataggctatcccctactcttagcagtacaaaggggcatcttctcattcactctcgtccacgcagctctagtgttaaacgcaagcgtgtgagtcatggctcccactctcctccaaaggaaaagtgtaaacggaaaagaagcaccagacgatccattatgccaaggctgcagctgtgccgctcggaggataggctccagcatgtggcgggtccagctttggaagccctgtcttgtggagagtcaagctacgacgactatttttcccccgacaacctgaaggagcggtacagcgaaaacctaccacctgagtcacaactacccagctctccggcacagctgtcctgtcgaagtttgtccaaaaaagaacgcacatcaattttcgaaatgagtgacttcagttgcgtcggaaagaagacccgcaccgtcgacattacgaattttaccgctaaaaccataagctccccacgaaagacaggcaacggcgagggaagagccacatccagctgtgtcaccagcgctccagaggaagccttgaggtgctgccgtcaggctggtaaagaggatgcttgtcctgaggggaacgggttcagctacacgatagaggatccagcactcccgaaggggcacgatgatgatctgacaccgcttgaggggtctctggaagaaatgaaagaagccgtaggcctcaaatctacacagaataaaggcacgacatccaaaatctcaaacagctctgagggggaggcccagtcagagcacgagccgtgttttatcgtggattgcaatatggaaactagcaccgaggaaaaagaaaatctgcctggtggctactccgggagcgttaagaacagacctacgcgccatgacgtcctggatgatagctgtgacgggtttaaagatcttattaagcctcacgaggagctcaaaaagagcggcagaggaaaaaaaccaacaagaacactggtgatgactagcatgccctccgagaagcaaaatgttgtgattcaggtggtggacaagttgaaaggcttttccatcgccccagacgtctgcgaaacaacgacacatgttctgtcaggcaaacccctccgcacactcaacgtgttactgggcattgctagaggatgctgggtcttgagctatgattgggtgctttggtctctggaactgggacactggattagtgaggaacccttcgagctcagccatcactttcccgcggccccactttgcagaagcgagtgtcacctttccgccggcccttatagaggcaccttgttcgccgatcagccagcgatgttcgtgtcccccgcctccagtccacctgtggccaagctctgtgagcttgtgcatctttgtggcggtagagtatcgcaggttcctaggcaggccagcattgtgattggcccatacagcggtaaaaagaaagccacagtcaaatatctgtcagagaaatgggtgttagattccatcactcagcacaaagtgtgtgcccctgaaaactacctgctgagtcagtag

SEQ ID NO: 15969 - DNA, 1833 bp, synthetic construct
  misc_feature 1..1833: note = Description of Artificial Sequence: Synthetic coding sequence
  source 1..1833: mol_type = other DNA
atggctgccccgatcctgaaggacgtggtagcatacgtggaggtgtggtcatctaatggtacagagaattacagcaagacttttactacccagctcgtcgatatgggagccaaggttagcaagacgttcaacaagcaagtgacccacgtaatttttaaggacgggtatcagtccacctgggataaagctcaaaagcggggagtcaagctagtgagtgttctgtgggtagaaaaatgccgtaccgccggagcgcatatcgacgagtccctgttcccggccgccaacatgaacgagcatttgtcctcattgattaaaaagaagagaaaatgtatgcagcctaaagactttaattttaaaactcctgaaaatgataagcgttttcagaaaaagttcgagaagatggcaaaagaactacagcggcagaagaccaatctagacgatgatgtgcctattctgttgttcgagtccaacggatcactgatatacacacccacaattgagattaatagccgacatcattccgctatggaaaagcggctccaggaaatgaaagaaaagagagaaaacctctcacctacatcttcacagatgattcagcagagccatgacaacccatccaatagcttgtgcgaagctcctctgaacatctcccgtgataccctttgtagtgacgagtactttgcaggaggactacatagctcctttgacgatctgtgcggaaacagcggctgcggcaatcaagagaggaagctggagggtagtattaatgacattaagtcagatgtatgcatctctagcctcgtgctgaaagccaacaacattcattctagtccttccttcacccaccttgacaagtcctctccacagaagttcttgtccaacttgtctaaggaggagatcaacctgcaacgaaacattgcaggtaaggtggtcacacctgaccaaaagcaggctgcaggcatgagccaggagacttttgaagagaaatacaggcttagccccaccctgagttcgaccaaggggcacctgttaatccacagcagaccacgttcttccagcgttaagcgcaagagagtctctcacggatcacactctccacctaaggaaaagtgcaagcggaagcggagtacacgtagaagcattatgccaaggctccaactgtgtaggtctgaggaccggctgcaacatgtggcagggccagcactggaggcgctcagctgcggggaaagctcgtacgatgattatttctcaccagataatctcaaagaaagatattctgagaatttacctcccgagagtcaactgccgtccagccctgctcagctcagttgccgttcgttaagcaagaaggagaggacgagcattttcgagatgtcagacttttcctgtgtcggcaagaagacaaggacagtagatatcaccaactttactgctaaaactatttcctctcctcggaagaccggaaatggggagggaagggcgacatcaagctgcgttacttccgctcctgaagaagcactccggtgctgccggcaggccgggaaagaagacgcctgccctgaagggaatgggttttcctacaccattgaggatcccgcactgccgaaggggcacgacgatgatctgactcctctcgagggatctttagaagaaatgaaagaggcagttggattgaaaagtacccagaataagggaaccacctctaaaatcagcaactcctctgaaggcgaggctcagtccgaacacgaaccgtgctttattgtggactgtaacatggaaacgtcaaccgaggaaaaggagaatctcccgggcggctactcaggctctatgtag

SEQ ID NO: 15970 - DNA, 1689 bp, synthetic construct
  misc_feature 1..1689: note = Description of Artificial Sequence: Synthetic coding sequence
  source 1..1689: mol_type = other DNA
atggcagcaccaattctaaaagatgttgttgcctacgtggaagtctggtcttccaacgggacagagaactacagcaaaacttttactacccagctggtcgacatgggcgctaaagtgtctaagactttcaacaaacaagttacccatgtgatattcaaggacggataccagtccacttgggacaaggctcaaaagcgaggagtaaagcttgtctctgtcctgtgggtcgagaagtgccgcacagccggcgctcatattgatgaatctctttttcccgccgccaacatgaacgagcacctctcctcattaatcaaaaagaagaggaagtgtatgcagccaaaagactttaacttcaaaacgcctgagaacgacaagcgtttccagaagaaatttgagaaaatggcaaaagaacttcagagacagaagactaatctagccagtcagatgatccagcaaagccatgataatccctcgaactctctctgcgaggctccactgaacatcagcagagatacactctgttccgatgaatactttgccggaggcctgcatagttcttttgatgacctttgtggcaattcgggatgcgggaaccaggaacgcaagttggaggggtccatcaacgatattaagtctgacgtgtgcatttcctcactggttcttaaagccaataacatccacagtagcccctccttcactcacctcgacaagtccagcccacagaagtttctctccaacctgtccaaagaagagatcaatctccagagaaacattgctgggaaggtggtgacccctgatcagaagcaagcagccgggatgtcccaggaaacatttgaggaaaaatacagactctcccctactcttagctccaccaaggggcacctcttgatccacagcaggcccagatcaagcagtgtgaaaagaaagcgtgtgtcacatggatcacactccccccctaaggaaaagtgtaagagaaaaaggtctacccgcaggtcaatcatgcccaggttgcagctctgtaggagcgaggacagactgcagcacgtcgccggaccagctcttgaagctctgtcttgcggggagtcgtcatatgacgactactttagccccgacaaccttaaagagcgctacagcgagaacttacccccggagagccagctcccttccagccccgctcaattgagctgtcgcagcctgagcaaaaaagagaggaccagcatcttcgagatgtcggatttcagctgcgtgggaaagaaaacaagaacggtggacattacaaatttcactgccaaaacaatcagttccccgcgtaaaaccggcaacggggaaggacgggctacgtcttcctgtgtgaccagtgcccccgaggaggcactccggtgctgcagacaggcagggaaggaggacgcctgtcccgagggcaacgggttctcttatacaatcgaggatccggcactgccaaagggacatgacgatgacctaacaccattggagggtagcctggaggaaatgaaagaggcagttgggctcaaatcgacccagaataaagggacaaccagcaaaattagcaacagctccgaaggagaggctcagagcgagcacgaaccatgtttcatcgtggactgcaatatggaaacaagtaccgaggagaaggagaacctgcccggcggctactctggatctatgtag

SEQ ID NO: 15971 - DNA, 234 bp, synthetic construct
  misc_feature 1..234: note = Description of Artificial Sequence: Synthetic coding sequence
  source 1..234: mol_type = other DNA
atgaacgtattgctgggcagtgtggtgatctttgcaactttcgttacactttgtaacgcttcctgctatttcattcccaacgagggtgttccaggggatagcacacggatgtttctgcacctgtgggtgatgaccaaaaccacagcaaaggaatcgtcccgcaggaggaccgcctcaatctcatggtggcgccggcgcacgcagaagagaccggtgctctcggtgaatgggtag

SEQ ID NO: 15972 - DNA, 345 bp, synthetic construct
  misc_feature 1..345: note = Description of Artificial Sequence: Synthetic coding sequence
  source 1..345: mol_type = other DNA
atgaatgtgctcttaggaagcgttgtgatctttgcgactttcgtgaccctctgcaatgccagttgctatttcatcccaaacgaaggagtgcccggtgactccacccgcaagtgcatggatttgaaaggcaacaaacatcccattaacagcgaatggcagaccgataattgtgagacatgtacatgttacgagactgaaattagctgctgtaccctggtgagtacaccagtggggtatgataaagataactgccaaaggatctttaaaaaggaggattgcaaatatattgtggttgagaagaaggatccaaagaagacctgtagcgtctctgagtggattatatag

SEQ ID NO: 15973 - DNA, 3813 bp, synthetic construct
  misc_feature 1..3813: note = Description of Artificial Sequence: Synthetic coding sequence
  source 1..3813: mol_type = other DNA
atgacagacgacaactcagatgataagatcgaggacgaattgcagactttttttacatctgacaaggacggaaacacccatgcgtataacccaaagagtcctcctacccagaacagctccgcaagctctgtgaactggaattctgccaatcccgatgacatggtggtggactacgagactgaccccgcagtggtcaccggtgagaacatctccctgtccctacagggcgtggaagtgttcggccatgagaaatctagcagtgatttcatatctaagcaagtcctcgatatgcataaagattcaatctgtcagtgccccgctttggttggcaccgaaaagcccaaatacctgcagcactcttgccactccttggaggctgtggagggccagagcgttgagcctagcttacccttcgtctggaaaccgaacgacaacttgaattgtgctgggtattgtgacgccctcgagcttaatcaaacatttgacatgactgtggacaaggtgaactgtaccttcatcagccatcacgcaattggtaagtcccagagtttccacactgccggctccttaccaccaactgggcggagaagtggaagcacatcttccctctcctactcaacatggacctctagtcatagcgataagactcatgcccgggagaccacatatgaccgggagagtttcgaaaaccctcaggtaactccgtcggaggcccaagacatgacttacaccgcctttagtgatgtggtcatgcagagcgaagtgttcgttagtgatatcggtaatcaatgcgcatgttcatccggcaaggtcacttcagaatacactgacggttcacagcaaagattggtcggcgagaaggaaacgcaagcccttactcccgtatcagatggcatggaagtgcccaatgatagcgccctccaagaatttttctgcctctctcatgatgaatctaactccgaaccccacagtcaatccagctatcgccacaaggagatgggtcagaatctgcgggagacagtgagctactgcctgattgatgacgagtgccccctgatggtgcccgcatttgataaaagtgaggcccaggtccttaacccggagcacaaagtgaccgaaactgaggatactcaaatggtttccaaaggaaaggacctaggaacccagaatcacacctcagaattgatcctctcatctccgccaggtcagaaagttgggagctccttcggcttgacatgggatgcaaatgacatggtgatttcgactgacaaaaccatgtgcatgagtaccccagtcctggaaccgaccaaggttacattctcagtctctcctatagaggcgacagagaaatgtaagaaggtggagaaaggtaacagagggctgaagaacattcctgacagcaaagaagcaccagtaaatctatgcaagccctcacttggcaaaagcacgatcaaaacgaacactccaataggttgtaaggtgcggaaaacagaaattatttcttatcctaggcccaacttcaaaaatgtcaaggccaaggtgatgtctcgtgctgtgctacagcctaaagacgccgctttgtcaaaagtgactccacgccctcagcaaacatccgcctcatccccatcatccgtgaattccaggcagcagacagtcctgtcacgcactcctcggagtgaccttaacgcagataaaaaggccgaaatcctgatcaataagacccacaagcagcagttcaacaaactgatcaccagtcaggccgtgcacgtcacgactcacagcaagaatgcctcccaccgcgtgccaaggaccactagtgcagtaaagtcaaatcaggaagacgtggacaaggcgtcaagctccaattccgcttgcgaaaccgggagcgtcagtgcattgtttcaaaaaatcaaaggcatcctgccagtcaaaatggagagtgcagaatgtctggaaatgacttacgtgcctaatattgacagaataagccctgaaaagaagggcgagaaggagaatggaacatctatggaaaagcaggaacttaaacaggaaatcatgaatgaaacatttgagtatggcagcctgttccttggcagcgcctccaagaccacgaccactagcggaagaaacatcagtaaacctgattcttgcgggctgcggcagatcgctgcccctaaggccaaggtcggaccacccgtgagctgtctgcgtaggaatagtgataatcgaaatccttctgctgatagagctgtgtccccacagaggatccgtcgcgtgagctcgtccgggaaaccgactagccttaagacagcccaaagctcatgggtcaatcttcctaggccgctgcctaagtccaaagctagcctcaagtctcctgcccttcgtcgcaccggctccacgcctagtatagcctctacccatagtgaattaagcacttattccaataatagcgggaacgccgctgtcataaagtacgaagaaaagcctccaaaaccagccttccagaatggatcctccggcagcttctatcttaagccgctcgtaagtcgggcgcacgtacatttaatgaagacaccaccaaagggtccatcaagaaaaaatctcttcactgccttgaatgccgtggagaagagccgtcagaaaaacccaagatccctttgcatccagcctcagacagctcctgacgctcttccgcccgagaagacactcgaactgacccagtacaagacgaagtgcgaaaatcagtccgggtttatcctgcagctgaaacagctgctcgcctgcggcaatacgaagttcgaagcactgaccgtagtcattcagcacctgttatctgaaagggaggaggcactcaagcaacataaaaccctgtctcaggagctggtcaacctgcgaggagagctggtgacagctagcacaacatgtgaaaaattggagaaggcgcggaacgaactgcaaactgtgtacgaagcctttgtgcagcaacatcaggccgagaaaaccgagagagagaatcggctgaaggagttttataccagagaatacgagaaactgagagacacttatatagaggaggccgagaagtataagatgcagctacaggagcagttcgataatctcaatgcggcccatgagacatctaagctcgaaatcgaggctagtcactcagagaaattagagctgctcaaaaaagcatacgaagccagcttgtccgagataaaaaaggggcatgagatagagaagaagtcactggaagatcttctttccgaaaaacaagagtctctagagaaacaaatcaacgacctgaaaagcgaaaacgatgccttaaacgagaagttaaaatctgaggaacagaaacggcgtgctagggagaaagccaacctgaaaaatcctcagatcatgtacctcgagcaggagttagagtcccttaaggccgtccttgaaatcaaaaacgagaagctgcatcagcaagatattaagctgatgaaaatggagaagctggtcgataataatactgccctggtggataagctgaaacgtttccagcaggagaacgaggaactgaaggcacgcatggacaaacacatggccatctcccggcagttgtcgacagagcaggccgtgctgcaggagtccctggagaaagaaagtaaagtgaataaaagactgagtatggaaaatgaagagttgctgtggaagctacacaacggtgacctctgtagtcctaagagaagtccaacctccagcgctatccccctccagtcccccagaaactctggatcgttcccctctccctccatatccccaaggtag

SEQ ID NO: 15974 - DNA, 1311 bp, synthetic construct
  misc_feature 1..1311: note = Description of Artificial Sequence: Synthetic coding sequence
  source 1..1311: mol_type = other DNA
atgctcctctcacctaaattcagtctgtcaaccatacacattagacttactgcgaagggcttattgcgtaatttgcgactgccttccggctttagacgctctactgtggttttccatacggtggaaaaaagtcgacagaagaatccgcggtcactgtgtatccagcctcagactgctcccgatgcactccccccagaaaaaactctggagcttactcagtacaaaaccaagtgcgaaaatcagtctggcttcattctgcagctgaaacaactgctggcatgtggcaacactaagtttgaagccctgacggttgttatacagcatctcctttccgaacgggaggaagcattgaagcagcacaaaactctgtctcaggagctggtaaatctaaggggcgagctggttactgcctcaacgacatgtgagaagcttgagaaagctcgaaatgagcttcaaacggtgtatgaggcattcgtccaacaacaccaggctgagaaaaccgaacgggagaatcggcttaaggagttttataccagagaatatgaaaagttgagggatacatacattgaggaagctgagaagtataagatgcagcttcaggaacagttcgacaacctgaacgcagcgcacgagacgtccaaattggaaatagaggccagtcatagcgaaaagctggagttacttaagaaagcctatgaggcctcactgagcgaaattaagaaaggacacgaaatagagaagaagtccctggaggacttgctgagcgagaaacaggaaagtcttgagaagcagattaatgatctcaaaagcgaaaatgacgctttgaatgagaaactcaaaagcgaggaacaaaagcggcgagcgcgcgagaaggccaatctgaaaaatccccagattatgtatctcgagcaggagctcgaatccctgaaggctgtcttggagatcaagaacgagaagctccatcaacaggatataaaacttatgaaaatggaaaagttggtcgacaataacacagcactggtagacaaattaaaacgattccaacaggagaacgaggagctgaaagccaggatggacaaacatatggccatctctcgacagctgtcaaccgaacaggcggttctccaggaatccttagagaaggaatccaaagtaaacaagcgcctctcaatggagaacgaggaactgctctggaagttgcataatggtgacctctgtagccctaaacgttccccaacttcctctgccattcccctgcagtccccccggaactcggggagtttcccgtcgccatctatatctccacgatag

SEQ ID NO: 15975 - DNA, 1554 bp, synthetic construct
  misc_feature 1..1554: note = Description of Artificial Sequence: Synthetic coding sequence
  source 1..1554: mol_type = other DNA
atgacagtgcctggaggcttccgctcttgtaccgagacagatatctcaagtaagatcttcatcaactcaacactcaccccacctgcaggtagcgaaagacactacgacgcgacattgctgaccctgctggttgtggggtcttactctctctgcataattcctctgctggcaaccttcaccggcaagaaaaccgggaacgctgccgtcatcaaatacgaggagaaaccccctaaaccagcgtttcaaaatgggagcagtgggagcttctacctgaagccactcgtatcaagagcgcacgtgcacctcatgaagacccccccaaagggaccttcccggaagaatttatttaccgccctgaacgcggtggagaagagtcgccagaagaaccccagatccctctgtattcaaccccagacagcccctgatgcccttccccctgaaaagacactcgagctgacccaatataagaccaaatgcgaaaaccagtcaggatttattttgcagttgaaacagttactcgcatgcggcaacactaagttcgaggcactgacagtggtgatacagcatttgctcagcgaaagagaagaagcgttaaagcagcacaagaccttaagtcaggaattagtgaatctcaggggcgagcttgtcacagcatccaccacgtgtgagaagctggaaaaggcacggaatgaacttcagaccgtctacgaagcttttgttcagcagcaccaagccgaaaagaccgagcgggagaatcggctcaaagagttttatacccgcgaatatgaaaaactacgtgatacctacatcgaggaggcagagaagtacaaaatgcaactgcaggaacagtttgataacctgaacgccgctcacgaaacatctaagttggagatcgaggctagccacagcgagaagctggagctgctgaagaaggcctacgaggcatctttgtcagagattaagaagggacacgagattgaaaaaaagtctctggaggacttgttaagcgaaaagcaggagtccctcgaaaagcaaattaatgatctgaagagcgagaatgacgccctgaacgagaaattaaaaagtgaggaacagaaacggcgcgctagggaaaaggccaatctgaagaacccgcaaatcatgtatctcgagcaggaactggaaagtctgaaagctgtcctggagatcaagaacgaaaagctccatcagcaggacattaagctcatgaaaatggaaaagctagtggacaacaatacggctctggtagacaagttgaagagatttcagcaggagaacgaagaattaaaggcaagaatggacaagcatatggctattagccgccagctctcaacagaacaagccgtgctgcaggagagtcttgagaaagagtctaaagtcaataagcggctctccatggagaatgaagagctgctgtggaaactgcataatggggatctttgtagcccgaagcgttctcccactagttctgccatccctctgcagtctcctcgtaactcaggcagtttccccagcccaagcatctccccacgatag

SEQ ID NO: 15976 - DNA, 2313 bp, synthetic construct
  misc_feature 1..2313: note = Description of Artificial Sequence: Synthetic coding sequence
  source 1..2313: mol_type = other DNA
atgaccgacgacaacagcgacgacaaaattgaggacgagttgcaaacgttctttactagtgacaaggatggtaatactcatgcatacaatcccaagagtccccctacccagaacagtagcgcttccagtgtcaactggaacagtgccaacccagacgacatggtcgtcgattacgaaaccgatcctgccgtggttaccggagagaatattagcctgtcattgcagggggtggaagtttttgggcacgagaagtccagttctgattttatttccaaacaggtgctggatatgcacaaggatagcatttgtcagtgccctgcactggtaggaaccgaaaaaccaaagtaccttcagcacagttgccactcactggaagcagtagagggccaatctgtggaaccatcattaccctttgtgtggaaacctaacgacaacctgaattgtgcaggctactgtgatgccctagagttgaaccagactttcgacatgacagtcgacaaggtcaactgcacattcatttcacaccacgccatcgggaagtcacagagctttcacaccgcaggaagcctcccacctaccgggcgacggagtggctccacctcaagtctgagctactccacgtggacttccagtcacagtgacaagactcacgcccgggagactacatacgatagggaatccttcgagaacccacaggtcacaccatcggaagcacaggacatgacgtatactgccttcagtgacgtggtgatgcaatccgaggtgttcgtatccgacattggcaatcaatgtgcctgcagctctggaaaggtcacatccgagtataccgacggaagccagcagcggctcgtaggggagaaggagacacaagccttgacaccagtctccgacggtatggaagtcccgaatgactccgccctgcaagagtttttttgtctctctcacgacgagtccaattctgagcctcactcacaatcctcttataggcataaggaaatggggcagaacctgcgagaaacggtatcttactgtctcatagatgatgaatgtccactaatggttccggccttcgataagtcagaagctcaggtgctaaatcctgagcacaaggtcacagaaaccgaagacacacaaatggtctcaaagggaaaggacctggggacacaaaatcatacgagcgagttgattttgtccagcccacccggccagaaggtggggtcaagcttcgggctaacttgggatgcaaacgacatggtgattagtacagacaaaacaatgtgcatgtccacaccagtgctcgaacccacgaaggtcacctttagcgtctctccaattgaggcaactgaaaagtgcaagaaagtggagaagggaaaccgcggcctgaagaacatcccggactctaaggaggctcccgttaacctgtgtaagcccagcctcgggaaaagtactataaagaccaacaccccaattggttgtaaagtgagaaaaactgagatcattagctaccccaggcccaattttaaaaacgttaaggctaaagtgatgtcaagggccgtgttacaacccaaggacgccgcattgtcgaaggtgacaccccgcccgcagcagacttctgcatcaagtcctagttcagtgaatagcagacagcagacagtgcttagtcgcacaccccggtccgacctgaacgctgataagaaggctgagattttgatcaacaaaactcacaaacagcagttcaacaaactcatcacaagccaggccgtacacgtgaccacacactctaaaaacgctagtcaccgggttcccagaactacttctgcggtgaagagcaaccaggaggatgtggataaagccagtagctccaattccgcatgcgagaccggatctgtttccgcgctgttccagaagataaaggggatcctgcctgtgaaaatggagtctgctgagtgcctcgagatgacatacgttccgaatatcgacagaatcagccctgagaagaagggggagaaagaaaacgggaccagcatggaaaaacaggagttaaagcaggagattatgaatgagaccttcgagtacggttccctatttttgggtagcgcatccaagactacaaccacgtcaggaagaaacatttctaaacccgattcctgcggcctgcggcagatcgccgcccctaaggccaaggttggacccccggtatcatgcttgcgcaggaattccgataaccggaacccttcagcagacagggcggtcagtccccagagaatccgtagggtgagtagctctgtactgccaaaggcagcattttcttag

SEQ ID NO: 15977 - DNA, 3651 bp, synthetic construct
  misc_feature 1..3651: note = Description of Artificial Sequence: Synthetic coding sequence
  source 1..3651: mol_type = other DNA
atgacagacgacaattccgacgataaaattgaggatgagctacaaactttcttcacatctgacaaggacggcaacactcacgcctataatcctaaatctccccccacacaaaactcctcagcttcctcagttaactggaattccgccaaccctgacgacatggtcgtggactatgaaaccgaccctgcagtagtgaccggagagaacataagcttgtccctccagggcgtggaagtgttcggacatgagaagtcatctagtgattttatcagcaaacaggtgctggacatgcataaggacagcatctgccagtgtccagcactcgtcggtaccgaaaagcctaagtaccttcagcactcttgtcattcactggaggcagtggaggggcaaagtgtggaaccctccctgcctttcgtgtggaagcctaatgataacttaaattgtgccggatattgtgatgcccttgaactaaatcaaaccttcgacatgactgtcgataaagtgaactgcacctttatctctcaccacgcaatcgggaagagtcaaagctttcacaccgccgggagcttgccgccaaccggtagacgctcggggagtaccagctcactctcttacagtacgtggacgagttcacatagcgataagacacatgctcgcgagactacttacgacagggagtctttcgagaacccccaggtcactccttcggaagcccaagacatgacttacaccgctttctctgatgttgtgatgcagagtgaggtgtttgtctctgacattggcaaccaatgcgcctgtagctccgggaaggttacctcagaatacaccgatggatctcagcagcgcctcgtaggtgaaaaggaaacccaagccctgactccagtatccgacggtatggaagtcccaaacgactcggctttgcaggaatttttctgcctctcccatgatgaatccaactctgaacctcattcccaatccagctaccgccacaaagaaatgggacaaaatctgcgagagaccgtgagttattgcctcattgatgacgagtgccccctcatggtccctgcgttcgacaaatctgaggcgcaggttttgaatcccgagcacaaggtgaccgagactgaggacacccagatggtgtccaaaggaaaagatctcggaacccaaaaccacactagcgaattgatcttgtctagtccccctggccagaaagtgggttcctcttttggcttaacgtgggatgcgaatgatatggttatttcgaccgacaaaacgatgtgcatgtccaccccagtgctcgagccgaccaaggtgaccttttcagtgagtcctattgaggccacggagaaatgcaaaaaggtggaaaagggcaaccgaggactgaaaaacatcccagacagcaaagaagctcctgtaaatctctgcaaaccttccctcgggaagagtactattaagacaaatactcccataggctgtaaggtgcgcaagacagagatcatctcttatcccagaccaaatttcaaaaatgtaaaggccaaagtcatgtctcgtgccgtgttgcagccgaaagatgccgccctctctaaagtgacaccacgcccacaacagacttcagcctcttcccctagctctgtgaatagccgtcagcagaccgtgctctcaaggacacctaggagcgatctcaacgcggacaagaaggccgagattctgattaacaagactcacaagcaacagttcaacaagctcattaccagccaggcggtgcatgtgaccacgcactcaaagaacgcatcgcatcgggtccccagaactacgtctgctgtcaagtctaatcaagaggatgttgataaagcgtcctctagtaattccgcatgtgaaaccgggagcgtgtcagctctgtttcaaaagattaaagggattctcccagtgaagatggagtccgctgagtgccttgaaatgacatatgtaccaaacatcgatcggatttctcctgagaagaagggcgagaaggaaaatggcacatccatggagaagcaagaacttaaacaggagatcatgaacgaaacattcgaatacggttctctgtttcttggaagcgcctcgaaaaccacaactacaagcggccggaacatttcaaaacctgattcatgtggtctgcgtcagatcgccgccccaaaggccaaagtgggtccccccgtgagttgcctccggaggaacagcgataaccgcaacccctcagctgacagggctgtgtcaccgcagaggattaggagagtttctagcagtgcaggcaacgctgcagtcatcaaatacgaggagaagccacccaagcctgcgttccagaatggctcttccgggtctttttatctgaagccactggtgtccagggcccacgttcacctcatgaagactccacctaaggggcccagccggaaaaacctcttcaccgctctgaacgctgttgagaagagccgccagaaaaatcctcgcagtctgtgtatacagcctcagacagcccctgatgctctgcctccggagaagacacttgaattgacccagtataagactaagtgtgagaaccagagtggctttattctgcagctgaagcagctgctggcttgcggtaataccaagttcgaggccctgaccgtagtgatccagcacctgttatccgaacgggaggaggcattaaaacagcacaagacactcagccaggaattggtaaacttgcggggagaactcgtgacggcatcaaccacatgtgaaaagctggagaaagccaggaatgagctccagacagtgtacgaggcgttcgtccagcaacatcaagctgagaagacagaacgggaaaacagactgaaggaattctatactcgtgaatatgagaaactgcgtgacacctacattgaggaggccgaaaagtacaagatgcagctccaggagcaattcgacaatcttaacgctgcacacgagacctccaaactcgagattgaagctagccacagcgaaaagcttgaactgctcaaaaaggcctatgaggcatcactctctgagatcaagaagggacacgagattgagaaaaaaagccttgaagacctgctgtccgagaagcaggagtcactggaaaaacagataaacgacctaaaatctgagaacgacgcactgaacgagaagctgaaatccgaggagcaaaaaagaagagcccgcgagaaagcgaatttgaagaacccccagattatgtaccttgaacaggaattggagagtttgaaggccgttttggagataaagaatgaaaagttacaccagcaagatatcaagctgatgaaaatggagaagctagtggataacaacacagcactcgttgataagctgaagaggttccagcaggagaacgaggagttgaaagctaggatggacaagcatatggccatcagccgccagttaagcacagaacaagccgtgctgcaggagtcactagagaaggaatccaaggtcaacaagcgcctttccatggaaaacgaagaactcctttggaaattgcacaatggggatttatgtagccccaagaggtctcccacttcctcggcaatacctctgcagtccccccggaattcaggtagctttccttccccaagcatttccccccggtag

SEQ ID NO: 15978 - DNA, 1029 bp, synthetic construct
  misc_feature 1..1029: note = Description of Artificial Sequence: Synthetic coding sequence
  source 1..1029: mol_type = other DNA
atgggttgtccgtccagtaagctgtgcttgtactccccatgcgcagctactcgcagagaagaggcgctgaaacagcacaaaaccctctctcaggagctagtaaatctgcgcggagagctggtcactgctagcaccacctgtgagaaactggagaaggccaggaatgaattacagactgtctatgaagctttcgtgcagcaacaccaggctgagaagactgagagggagaatcggctcaaggaattctatacacgagagtatgagaagcttcgcgacacctatatagaagaggctgaaaaatacaagatgcagttgcaggagcagttcgacaatctcaacgccgcacatgaaaccagcaagctcgagatcgaggcgtctcattctgaaaaattagaactgttgaaaaaagcttatgaggctagtctctccgaaatcaaaaaggggcatgaaattgagaaaaagagtttggaggatctgctatctgagaagcaagagtccttggagaaacagatcaacgaccttaaaagcgagaatgatgcactaaatgaaaaactgaagtcagaggagcagaagagacgagcacgtgagaaagccaacttgaaaaaccctcaaattatgtacctcgaacaggagctcgagtctctgaaggcagtgctggagatcaaaaatgaaaagctgcaccagcaggacatcaaactgatgaagatggagaaactggttgataataacaccgccttagttgacaaactgaaacgctttcagcaagaaaacgaggaactcaaagctcgcatggacaagcatatggctatcagccgacagctgtctacagagcaggcggtccttcaggagtcactcgaaaaagaatcaaaggtgaataaacgcttgagcatggagaatgaggaactcctgtggaaactgcataacggcgacctctgcagtcctaaaaggtctccgaccagttccgctatcccattgcagtcacccagaaatagcggctcatttccatcacccagcattagcccaaggtag

SEQ ID NO: 15979 - DNA, 3651 bp, synthetic construct
  misc_feature 1..3651: note = Description of Artificial Sequence: Synthetic coding sequence
  source 1..3651: mol_type = other DNA
atgaccgacgataattcagacgataaaattgaggacgagttgcagaccttcttcaccagtgataaggacggcaatacccacgcatacaacccaaaatccccccccacacagaactcttctgcatcttcagtcaattggaatagtgccaatcccgatgacatggtcgttgactacgagacagatccagctgtagtcaccggcgaaaacatctcgttaagcttacagggcgtcgaagtgtttggccacgaaaaaagtagcagtgactttatctccaaacaggttttggatatgcataaagatagtatatgccagtgtccagctctggtgggcaccgagaagccgaagtacctccagcatagctgccactcgttggaagcggtggaggggcaaagtgtggaaccttccctgcctttcgtgtggaagcccaacgacaacctaaattgcgccggatattgcgatgcgttggagctaaatcagacatttgatatgacagtggacaaagtcaattgcactttcatatcccatcacgcaattggaaagagtcagagttttcacacagcaggcagccttccccccaccgggagacggagtggctctacctcaagccttagctacagtacatggacctctagccattcagataagacccacgcccgcgaaactacatacgatagggaatcattcgagaacccccaggttaccccatcggaggcccaggacatgacctacacagctttctcagacgtggtgatgcagtccgaggtgtttgtaagtgacatcgggaaccagtgtgcttgctcaagcgggaaagtgacttcagaatacactgatggttcacaacagcgtctggtcggcgaaaaggagacccaagccctgactccagtgtctgacgggatggaggtccctaatgattcagcgctccaggagtttttttgccttagtcacgacgagagcaattcagaaccccactcccagtcaagttacaggcacaaagagatggggcagaatcttagagagacagtgagctattgcctcatcgatgacgagtgcccactgatggtcccagcctttgacaagtccgaagcccaggtgctcaatccagagcataaggttactgaaacagaagatacccagatggtgagtaaagggaaggaccttggcactcagaatcacacgtctgagctgattctctcgtcaccccctggacagaaggtgggctcctccttcggactcacttgggacgctaatgacatggtcatttctaccgacaaaacaatgtgtatgagtacccctgttctagagccgactaaagtgacatttagcgtaagccctatagaggctaccgaaaagtgcaagaaagtggaaaagggtaaccgcggattaaaaaatattcctgattccaaagaggccccggtcaatctgtgtaaacccagtctgggaaaatctacaattaaaacaaacactccaattggttgcaaagtgcgcaagacggagatcatctcgtaccccagacctaatttcaagaacgttaaggccaaggtgatgtcacgtgccgtcctgcagccaaaggatgcggccctctctaaggtcacaccaagaccacagcaaacatcggcttctagcccatccagcgtcaacagccgccaacagacggttctgtcacggacaccgcgtagtgatttaaatgctgataagaaggccgagatactcatcaataaaacacacaagcaacagtttaacaaactgatcacatctcaggccgttcatgtaacaacacattctaagaatgcaagccatcgagttcccaggacgacaagcgcagtcaagagcaaccaggaggacgtggataaagccagctcttctaactccgcctgtgaaacggggtccgtgtctgccttgttccagaaaataaaggggatcttaccggtcaagatggaatccgccgagtgcctggagatgacttacgtgcctaacattgacaggatctcgccagaaaagaaaggagaaaaggagaacggtacgagcatggagaaacaggaattgaaacaagaaattatgaacgagacgttcgagtacggcagcctatttttagggagcgctagcaagacgaccactacgtccgggagaaacattagtaaaccagacagctgcgggcttagacagatcgctgctcctaaggccaaagtggggcctcctgtgagctgtctcaggcgaaatagcgataatagaaaccctagtgcagacagggcggtgtccccccagcgcattagacgggtgagtagctctgctggtaatgccgccgtgattaaatatgaggagaaaccgccgaagcctgcattccaaaacggatcttccggctcgttctaccttaaaccattggtctctcgcgcccacgttcatttaatgaagacccctcccaagggccccagtcggaaaaatctcttcaccgctctgaatgccgtggagaaatcaagacagaaaaatccgcgttcactttgcatccaaccccagacagctccagatgctctgccccctgaaaagactttggagcttacacagtacaaaactaaatgtgaaaatcaatcaggctttattctgcagttgaagcaactgttggcttgtggcaacacaaaattcgaggcactaactgtggtaatccagcatctcctcagcgagcgcgaggaagctctgaagcaacataaaaccctctctcaggaattggtaaatttacgcggcgagctcgttacggccagcaccacatgcgagaagctcgagaaggctcggaacgagctccagactgtgtatgaggctttcgtgcagcagcaccaagccgagaagacggagcgggaaaaccgactgaaggaattttatacacgggagtacgagaagctgcgagacacatatattgaggaagctgagaaatacaagatgcagctgcaggagcaattcgacaacctgaacgccgcgcacgagacttctaaacttgaaattgaggccagtcattcggagaaactcgaactgttgaaaaaagcttatgaagcttccctctccgaaattaagaaagggcatgagatcgagaagaagtctctggaggatttactgagcgaaaaacaagagagcctcgagaagcaaattaatgatctgaagagcgagaacgacgctttgaacgaaaaacttaagtccgaggaacaaaaacggagagccagggaaaaagcaaacctgaagaatcctcagatcatgtacctcgaacaagaacttgaatctcttaaggcagtccttgagattaagaatgagaagcttcaccaacaggacattaagctgatgaagatggaaaagttagtagacaacaataccgcactggtggataagttgaaaaggttccagcaagaaaacgaggaacttaaagcaaggatggataagcacatggccatctcccggcagctttcaactgagcaggctgttctacaggagagcctggagaaagaaagtaaagttaacaagaggctcagcatggaaaacgaagaattactctggaagctacataacggagacctgtgtagccccaaacggtccccaacatcaagtgcaattccacttcaaagccctcggaactccggctcattcccaagcccctcaatcagcccaaggtag

SEQ ID NO: 15980 - DNA, 1248 bp, synthetic construct
  misc_feature 1..1248: note = Description of Artificial Sequence: Synthetic coding sequence
  source 1..1248: mol_type = other DNA
atgaagactccacctaagggaccgagcagaaaaaatttgtttaccgccctcaacgccgtcgagaaatccaggcagaagaacccgcgttctctctgcatccagccccagaccgcaccagacgccctgcctccagagaagactctggagttgacacaatataagaccaagtgcgaaaatcagtctgggttcatactgcagcttaagcagttattggcctgcggcaataccaaattcgaggcgcttacagtcgtgatccagcatcttttatccgagcgtgaggaggccctcaaacagcacaaaaccctttcgcaggagctggtaaaccttaggggtgagcttgtgacagcatccacaacgtgtgagaagttggaaaaggcaagaaatgagctgcagacggtgtacgaagcttttgtccagcaacaccaggctgaaaaaactgaacgagagaaccgactcaaagaattctacactcgagaatatgaaaagttgcgcgacacatacatcgaggaggcagagaagtacaaaatgcaattgcaggagcagttcgacaatctaaacgccgcccacgagacctccaaactcgagatcgaagcttcacatagcgaaaaattagaattgcttaaaaaagcctacgaggctagcctaagcgagatcaagaaggggcacgagatagaaaagaagtctttggaagacttactcagtgagaaacaggagagtctcgagaagcagattaacgacctcaagtccgagaacgatgccctgaacgagaagctaaagagcgaggaacaaaaaagacgcgcacgtgagaaagcgaacctgaagaatcctcagattatgtatttggagcaggagctggagtctctgaaggctgtcctagaaatcaagaatgaaaaactccatcagcaggacatcaagctgatgaagatggagaaactggtggacaataatacggccctagtggacaaattgaagcgcttccagcaggagaacgaggagttgaaggctcgtatggacaagcacatggcgattagccggcagctttctaccgagcaggccgtgctgcaagagtcattggaaaaagagagtaaggtgaacaaaagactgtctatggagaacgaggagctgctttggaagctgcacaatggggacctctgttctcctaagcgatcccccacgagctctgcaataccactccaatcaccgagaaattccggctcattcccttcccctagcatttccccccgctag

SEQ ID NO: 15981 - DNA, 7407 bp, synthetic construct
  misc_feature 1..7407: note = Description of Artificial Sequence: Synthetic coding sequence
  source 1..7407: mol_type = other DNA
atggctacagttgtggtcgaggctacagagccagagccgtcaggatctattgcaaacccagccgccagcacttccccgagtctgtctcaccggttcttagatagtaagttttacctactggtggtggtgggagagattgtgaccgaggaacacctgcgtcgtgcgattgggaatattgaattgggcatccgcagctgggacactaacttgatcgaatgcaacctggaccaggagttaaagctgttcgtgtccagacactcggctcgctttagtccagaggtgcctggccagaagattctgcatcaccgctccgacgtcttggagacagtagtcctcattaaccctagcgatgaggccgtctccaccgaggtcaggctaatgattacagacgcggctaggcataagctgctcgtccttacaggacaatgtttcgagaacaccggcgaactaatcttgcagtccggttctttctcctttcagaattttattgaaatcttcaccgaccaggagattggggagctgcttagcacaacgcatcctgccaacaaggccagtttaactcttttctgccccgaagagggagattggaagaattccaatttagatcggcataatctacaggattttattaacattaaacttaactctgcctccatcctgccggaaatggaggggttgagcgaatttactgagtacctctccgaatctgttgaggttccgtcacctttcgacattttagagcccccaactagcggcgggttcctcaagcttagcaaaccctgctgctatatcttcccggggggccgaggggactcggccctttttgcagttaacggcttcaatatgttaatcaatggaggctctgaacgaaagtcttgtttttggaaactcatccgccaccttgaccgtgtcgacagcatcctcctgacacacattggcgatgacaatctgccgggaataaattcaatgttgcagcggaaaatcgccgagctcgaggaggagcagagccagggaagcactactaatagcgactggatgaagaacttgatttcaccagacttgggggtggtatttctgaacgtgccggaaaacctgaaaaatcctgagccaaacatcaaaatgaagcgctccatagaagaggcatgctttacacttcagtatctcaacaagctgtccatgaagcccgaacctttattcagatccgtcgggaatacaatcgatcccgtgattctctttcagaagatgggcgtcggtaagctggaaatgtacgtcctgaaccctgtcaagtcctccaaggagatgcagtacttcatgcagcagtggacgggaacgaataaggataaggcggaatttattctccccaacggtcaggaggtggacctgcctatttcttatttgacctccgtaagctctctgattgtttggcacccagccaatcctgccgagaagattattagagtcctgtttccgggcaactccacacagtataacatactggaaggtttggaaaagctcaaacatctggacttcttaaagcaacctctagccacccaaaaagatctgaccggtcaagtgcccacccccgtggtaaagcagaccaagttaaagcagcgggccgatagccgagaaagtttgaagcctgcagctaaacccctaccaagcaaatctgtgagaaaggaatctaaggaggaaacccccgaggtaacaaaggtcaatcacgtggaaaagcccccaaaagtggaatccaaagaaaaagtgatggtcaagaaagataagcctattaagaccgagactaagccctctgtgaccgaaaaggaggtgcccagtaaggaagagccttctccagtcaaagcggaagtggctgagaaacaagctaccgatgtgaagcccaaggccgccaaagaaaaaaccgtcaagaaagagactaaagtgaaaccagaagataaaaaggaggagaaagagaagcccaagaaggaggtcgccaagaaagaagataagaccccaattaagaaagaggaaaaaccaaagaaagaggaggttaagaaggaagtgaagaaagagattaagaaggaagagaaaaaggagcccaaaaaggaggtgaagaaagagaccccacccaaggaggtgaaaaaggaggtgaagaaggaagagaaaaaagaagtgaaaaaagaggagaaggaacccaaaaaggagatcaaaaagctgcccaaagacgcaaaaaagtctagcacccccctctcagaggccaagaaacccgccgcactaaaacccaaggtgcctaagaaggaggaatcagtcaagaaagatagcgttgctgcaggaaaaccaaaggaaaagggcaagatcaaagtgatcaaaaaagagggtaaagcggccgaggctgtggctgcagcggtaggtacaggggcgactacagctgcagtgatggctgccgccgggattgcagccatcggaccagcgaaagagctcgaggccgaaagaagtcttatgagctcaccagaggacctcaccaaggacttcgaggagctaaaggccgaggaggtcgatgtcaccaaggatatcaaaccacaactcgaactgatcgaagatgaggaaaaactgaaagagaccgagcccgttgaagcatacgtgatccagaaagaacgcgaggttacaaagggccctgcagagtcccccgatgagggtattaccaccactgaaggcgagggcgaatgcgaacagacacctgaagaactggagcctgttgaaaaacagggagtggacgacattgaaaagttcgaggacgagggagcaggcttcgaagaaagctcggaaaccggggactatgaagagaaggcggagacagaggaagctgaggagccagaagaggatggtgaggagcacgtatgcgttagtgcatcaaaacactctcccactgaagacgaggaatccgccaaagcagaggctgacgcctacattagagaaaaacgggaatctgtggcttcaggcgacgatagggctgaggaggatatggatgaagcaatcgaaaaaggggaggctgagcaatccgaagaggaggctgacgaggaagacaaagctgaggacgctcgcgaggaggagtatgagccagaaaagatggaggccgaggactatgtcatggccgtcgtggataaggcagccgaggcaggcggcgctgaggaacaatatggatttctgacaactcccaccaaacagttaggcgcccagtcaccaggacgagaacctgcgagctctatacacgacgaaaccctccccggagggagtgagtccgaagcgactgcctctgacgaggagaaccgagaggaccagcctgaggagttcaccgccacctccggctacactcagtccactattgagatttcaagcgaacctactccaatggatgagatgtctacaccacgcgatgtcatgtcagacgagaccaacaatgaagagacggaaagccccagtcaggagtttgttaacatcacaaagtacgaaagctctctgtacagtcaggagtattctaagcctgccgacgtgacgccgctgaacggtttcagtgaaggttccaagactgatgctaccgacggaaaagattacaacgcgtctgccagtacgatctcacctccgagcagcatggaggaagataaatttagtaggagcgccctgcgggacgcctattgtagtgaggtaaaggctagcacgaccctcgacatcaaggattctatatccgcagtttcctccgagaaggtttctcccagcaagtcaccttccctgtcccctagccctccatcacctttggagaaaaccccactcggagagcggagcgttaacttctccttgacacctaacgagatcaaggtgagtgctgaagctgaagtcgccccagttagccccgaggtaacacaggaagtcgtcgaggaacattgcgcctcaccagaggataagacactagaagtggtgtccccgtctcagtccgttacaggaagcgcagggcataccccttactatcagtctcccactgatgagaagagcagccacctgccaacggaagttatagagaagccccccgcagtgccagtctctttcgaattttcagacgccaaagatgagaatgagagggccagcgtgtctccaatggatgagcctgtccccgatagtgaatcgccaatcgagaaagtactgtctcccttgcgctccccacccttgattggaagcgagtctgcgtacgagtcctttctatcggcagatgataaagcatcaggacgcggtgcagagagcccattcgaggagaaaagcggtaaacaaggttcgccagaccaggtgagcccagtaagcgaaatgacatccacttccctttaccaggacaagcaggaaggaaagagcaccgacttcgcccccatcaaagaggatttcgggcaagagaaaaagaccgacgacgtggaggcaatgtcatcacagccagctctggccctcgatgaacgcaagctgggggacgtgtcccctacccagattgacgtatcgcagtttgggtccttcaaggaggacaccaagatgagcatcagtgaaggtacagtgtcagacaagtcagctaccccagtggatgagggcgtagccgaggatacctacagccatatggaaggggtggctagcgtgtcaacagcatctgtggcaaccagcagctttcccgagcccacgacagatgatgtatctcccagcctccatgcagaggttggatccccccactctaccgaagttgacgacagtctgagtgtgagtgtcgtccagacacctacaaccttccaggagacagaaatgtcaccttcgaaggaggagtgtcccaggcctatgagtatcagtcctcctgacttttctcccaaaaccgctaaaagcaggaccccggtgcaagaccaccggagcgagcagtcgtccatgagcattgaattcggccaggaaagtcccgagcagtccctggccatggatttctctcgacagtctcccgaccatcctacagtaggcgcaggcgtcctacacatcactgagaacggccccaccgaggtcgattacagtccctctgatatgcaggattcgtctctctcccataaaatccctcccatggaagaaccttcctatacccaggataacgatctaagtgagctgattagtgtctctcaggtggaagcaagcccttcgacatctagcgcacatacacctagccagatcgcaagtccccttcaggaggacaccctgtccgatgtggcaccccctagggacatgtccctttacgccagtttgacatcagagaaagtacagtctttagagggagagaaactgagtcccaaatctgacatatcaccactgacaccaagggagtcatctcccctttacagcccaacctttagcgatagcacctctgctgtgaaggagaaaacagcaacttgccactcatcatctagccccccgatcgacgccgcctccgctgagccctacggatttagggctagcgtgctgttcgacacaatgcagcaccacttggcactgaatcgggatctctctacccctggcctagagaaggatagtggcgggaagaccccaggcgattttagttatgcgtatcaaaaacctgaagaaaccactagatccccagatgaggaggactatgattacgagagctatgaaaaaactacgcgtacctctgacgtggggggctactactacgaaaagatcgaacggacgacaaagtctccaagcgattctggctactcgtacgagactatagggaagacgaccaagaccccagaagatggcgactatagttatgagatcatagagaagacaacaaggaccccggaggaaggaggatactcgtacgatattagcgagaaaaccacgtctccgcctgaggtttccggctattcgtacgagaagacggaaagatcacgacgtctactggacgacatcagcaatgggtacgatgactctgaagatgggggtcacacacttggagacccttcttactcttatgaaacaacggaaaaaataacttccttcccggagtcagagggttattcatacgagacaagcacaaagaccactagaacgcccgatacaagcacttactgctacgagacggctgagaaaattacacgtacaccgcaggcctctacctattcctatgagaccagtgacctgtgctataccgctgagaaaaagagtccgtccgaagcccggcaggatgttgatctctgtttagtctcttcttgtgaatataaacaccctaaaacggagcttagccctagtttcattaaccccaaccccctcgagtggttcgcctctgaagaaccgactgaggaaagcgaaaagcctcttacacagagcgggggcgcgccacctccacccggtggcaagcaacagggccgccagtgcgatgagacccctcctacgagcgtctccgagtcagctcccagtcagacagatagcgacgttcctcctgagactgaagagtgtccttcaatcaccgccgatgctaacatcgatagtgaggacgaatctgagaccattcccacagacaaaaccgtgacatacaaacatatggacccaccacctgcacccgtgcaggaccgtagcccgtcaccacggcatccagatgtatctatggtggaccccgaggcccttgcgattgaacaaaaccttggaaaggcactgaaaaaagacctgaaggagaaaaccaagactaaaaagccaggaactaaaaccaagtcctccagcccggtgaaaaagtcagatggtaagtctaagcccctggcggcaagtcccaagcctgctggtcttaaggaaagttctgataaggtctctcgggtggcgtccccgaaaaaaaaagaatccgttgagaaagcggcaaagcctaccactacaccggaggttaaagccgcacggggggaagagaaggataaggaaacgaagaatgccgcgaatgcatcagccagtaaatccgcgaagactgccacagccggaccaggaacgacaaagaccacaaaatcgtcagcagttcccccaggtctaccggtatacctggatctatgctatattccaaatcacagcaactcaaaaaatgtcgatgtggaattcttcaaaagagttaggagctcctactacgtggtctctggcaatgatcccgctgcagaagaacccagtagggctgtccttgatgccctgcttgaaggaaaagcgcaatggggcagcaatatgcaggtgacattaatcccgacccacgattccgaagttatgcgtgagtggtatcaagagacgcacgagaagcagcaggatctgaatatcatggttctcgccagcagttcaactgtggtgatgcaggatgagtctttcccagcttgcaagattgagttgtag

SEQ ID NO: 15982 - DNA, 432 bp, synthetic construct
  misc_feature 1..432: note = Description of Artificial Sequence: Synthetic coding sequence
  source 1..432: mol_type = other DNA
atgcagcatcggggtttccttcttctgacccttctggctctccttgcactaacctctgcggtggcgaaaaaaaaagacaaggttaagaaggggggtccaggttcggaatgtgctgagtgggcctggggcccctgcaccccatctagcaaggattgtggcgtgggatttagagagggcacatgcggcgcacagacccagcgcattcgctgtagggtcccttgcaactggaagaaggagttcggggcagactgtaaatacaagtttgagaactggggggcatgtgatggtggcaccgggactaaggtgagacagggaactttgaagaaggctcgctacaatgcccagtgccaggagaccattcgggtaacaaagccttgcactcccaagaccaaggcaaaggccaaagccaagaagggaaaaggcaaggactag

SEQ ID NO: 15983 - DNA, 432 bp, synthetic construct
  misc_feature 1..432: note = Description of Artificial Sequence: Synthetic coding sequence
  source 1..432: mol_type = other DNA
atgcagcatcggggcttccttctacttaccttactggccctgctggctttaactagtgctgtggctaaaaagaaggataaggtgaagaagggcggtcccggttccgagtgtgctgaatgggcatgggggccctgcactcccagctccaaagattgcggggtcgggtttcgggaaggtacatgtggagctcagactcagcgcattcgttgcagggtcccctgcaattggaagaaagagtttggtgcagattgcaagtataaatttgagaattggggtgcctgcgatggaggcacaggaacaaaagtacgtcagggcactctgaagaaggctcggtacaatgcacaatgccaggagacaatcagggtaaccaaaccgtgcaccccaaagaccaaggccaaggcaaaagcgaagaagggaaaaggaaaagactag

SEQ ID NO: 15984 - DNA, 432 bp, synthetic construct
  misc_feature 1..432: note = Description of Artificial Sequence: Synthetic coding sequence
  source 1..432: mol_type = other DNA
atgcaacacaggggttttctactgctgacactactcgccctgctcgcactgacaagcgctgtggctaaaaagaaggacaaggttaagaagggcggtcctggtagcgaatgtgctgaatgggcttgggggccatgtacccctagttcgaaggactgtggcgttggtttcagggaaggcacctgtggtgcacagacccagcggattcgctgccgtgtgccttgtaactggaaaaaagagttcggggctgactgcaagtacaagttcgagaattggggtgcatgtgacggcggtactggaacaaaggttcgccagggcaccctgaaaaaagcccggtacaacgcccagtgccaggagacaattcgggtcacaaagccatgcacaccaaaaactaaagccaaagccaaggcaaagaagggaaagggaaaggattag

SEQ ID NO: 15985 - DNA, 459 bp, synthetic construct
  misc_feature 1..459: note = Description of Artificial Sequence: Synthetic coding sequence
  source 1..459: mol_type = other DNA
atgcaacatcgcgggtttcttctcctgaccctcttagcactcctggccttaacaagtgccgtcgctaaaaaaaaagaggagggtgccctgcaatgctcagtgccaggagatcatcccagacaccaggccctacaccctcaagatcaatcaaaagggcagtcacaggagcgcgaagggaagggattagatgccaagcccgggtgccagggagctcccggcgtgacctggggcctggcccacgctctccccctacctgggcccagatgcgatcctccagtgccatctgtgtgcagcctcgctctgattaaccacgccctcccttgtccttcacactctcccgcacctccactgtcagcacaaagtggggaggggcagggaatattagggagcctgagccttccacaatcaaacgtctcccctcgagcgagattctgctcgagccctcagtttcactactag

SEQ ID NO: 15986 - DNA, 432 bp, synthetic construct
  misc_feature 1..432: note = Description of Artificial Sequence: Synthetic coding sequence
  source 1..432: mol_type = other DNA
atgcaacatagaggctttttgctgttgacactgcttgcattgctcgcactgacttcagccgttgccaagaaaaaggacaaagttaaaaaaggtggccctggttcagagtgcgctgaatgggcctggggcccctgtaccccatcgtcaaaagactgtggtgtgggctttagggagggaacatgcggggcgcagactcagcggattcgatgtcgggtcccctgtaactggaagaaagaattcggcgctgactgcaaatataaatttgagaattggggtgcctgcgatggagggacgggaaccaaggtgcgacagggaacccttaagaaagctcggtataatgcgcaatgccaggagaccattagagtcacaaagccctgtacccctaagactaaagcaaaggccaaggccaagaaagggaagggtaaagactag

SEQ ID NO: 15987 - DNA, 432 bp, synthetic construct
  misc_feature 1..432: note = Description of Artificial Sequence: Synthetic coding sequence
  source 1..432: mol_type = other DNA
atgcagcaccgtggatttctcctactgaccctccttgccctccttgcattgactagcgctgtcgcaaaaaaaaaggataaagtaaaaaaagggggaccaggttccgaatgtgctgagtgggcttggggtccctgtaccccatcaagtaaggattgtggggtaggttttagagagggtacctgtggggcccagacgcagagaatcagatgtcgtgtcccatgtaactggaagaaagaatttggtgccgactgcaagtataaatttgagaactggggcgcttgcgatggcggcaccggtaccaaggtgcgacaggggacgctgaagaaagctaggtacaatgcgcagtgccaggagactatacgggtgaccaagccttgcacaccaaagactaaagccaaagcgaaagccaagaaaggaaaaggcaaggattag

SEQ ID NO: 15988 - DNA, 432 bp, synthetic construct
  misc_feature 1..432: note = Description of Artificial Sequence: Synthetic coding sequence
  source 1..432: mol_type = other DNA
atgcagcatagaggttttctcctgctgacgcttttggcacttcttgctcttaccagtgccgtagccaaaaagaaagacaaggtaaaaaaggggggtcccgggagtgaatgcgccgaatgggcttggggaccctgcacaccttcatctaaagactgcggagtgggatttcgagagggcacttgcggcgcccagacccagaggatcaggtgccgtgtaccatgcaactggaaaaaggagtttggcgctgactgtaaatataagttcgaaaattggggcgcctgcgatggaggtaccggtacaaaggttcggcagggcaccctgaagaaggcccgctataatgcccagtgccaggagaccatccgcgtgaccaaaccatgcactccaaaaactaaagcaaaggcaaaggcaaagaagggcaaaggcaaagactag

SEQ ID NO: 15989 - DNA, 150 bp, synthetic construct
  misc_feature 1..150: note = Description of Artificial Sequence: Synthetic coding sequence
  source 1..150: mol_type = other DNA
atgcaacatcgcggattcctgctgttaacccttttggcgttgctggcactgaccagcgcagtggcaaaaaagaaggataaagttaagaagggcggcccaggaagcgagtgcgcggagtgggcgtgggggccttgtactccaagtagctag

SEQ ID NO: 15990 - DNA, 396 bp, synthetic construct
  misc_feature 1..396: note = Description of Artificial Sequence: Synthetic coding sequence
  source 1..396: mol_type = other DNA
atgcagcaccgagggtttctgttgcttacccttctcgcccttcttgcgctcacctcggctgtggccaaaaaaaaggacaaagtcaagaagggcggtccaggcagtgagtgcgccgagtgggcatgggggccttgtaccccttcatccaaggactgtggcgttggatttcgtgaagggacctgtggggcccagactcagcgaattcgctgcagggtcccttgtaattggaagaaagagtttggcgccgactgcaaatataagtttgagaactggggggcatgcgacggcggaactgggaccaaggtgcgacaggggactttgaaaaaggctcgatataatgcccagtgtcaggaaacgatccgggttactaagccatgcactcccaagaccaagtag

SEQ ID NO: 15991 - DNA, 264 bp, synthetic construct
  misc_feature 1..264: note = Description of Artificial Sequence: Synthetic coding sequence
  source 1..264: mol_type = other DNA
atgcaacataggggatttctattgcttactttgttagctttactcgcactgaccagtgcagtggctaagaagaaagcagattgcaaatacaaatttgaaaactggggggcttgcgatggcggtacagggacaaaagtgaggcagggcaccttgaaaaaggcccggtataacgcccagtgtcaggaaactatacgtgtcaccaaaccctgtacccccaagacgaaggccaaagcaaaggctaagaagggcaagggcaaagattag

SEQ ID NO: 15992 - DNA, 2715 bp, synthetic construct
  misc_feature 1..2715: note = Description of Artificial Sequence: Synthetic coding sequence
  source 1..2715: mol_type = other DNA
atggccgaatcttccgagagtttcaccatggcaagctccccggcacagcgtcgccggggcaacgacccgttgacgagttcgccaggtcggtctagccgaagaactgacgctctcacctctagtccaggcagagatttaccaccctttgaagatgagtctgaaggcttactcgggactgaggggccgctcgaagaagaggaggatggcgaggaacttatcggggacggcatggaaagggactaccgagctatacccgagctcgacgcttacgaggccgagggcttggcactggacgatgaggatgtggaggagctcactgcatctcagagagaggctgccgagagggccatgcggcagcgtgaccgggaggctggaagaggattgggtcgcatgcggcgcggcctgctctacgattcggatgaggaagacgaggagcgtccggcacgaaaacggcggcaggtggagcgggccacagaggacggagaggaggatgaggaaatgatcgagagtatagagaacctcgaggacctaaagggccattccgttagagaatgggtttccatggcggggcctcgtctggaaattcaccatcgatttaaaaatttcttacggactcacgttgacagccatggacataacgtgttcaaagagagaattagtgatatgtgtaaagaaaatagggaatccttggtggtcaattatgaagatctcgcagccagggaacacgtactcgcatattttctacccgaggctcccgccgagttactgcagatctttgacgaagctgccctcgaagtggtcctggccatgtaccctaagtacgataggattaccaaccacatacatgttagaatatctcacctacctctcgtcgaagagctgaggtctctccgccagctacacctcaaccaattgatccgcacttcaggggttgtgacttcctgcactggtgtcctgccacaactttcaatggtgaaatataactgcaataaatgtaacttcgtgcttggccctttctgccagtcccaaaatcaggaagtgaagcctggttcctgtcccgagtgccaaagcgctggacccttcgaggtcaacatggaagaaaccatctaccagaactatcaacgaatacgtattcaggaaagccctggtaaggtcgctgccgggcgtctgccgcgtagcaaggatgctattctgctggccgacctcgtggattcatgcaagccaggagatgagatcgaactaactgggatctaccataacaattatgatggcagcctaaatacagccaacggctttcctgtctttgcaactgttattttagctaatcacgtagctaaaaaggacaacaaggtcgctgttggggagttaaccgacgaggatgttaagatgatcacatcactgtccaaggaccaacagatcggagagaagatctttgcatcaattgcacccagcatctacggccacgaggacattaaacgcggactggccctcgcactgtttggaggcgagcctaagaatccaggtggtaaacacaaggtcagaggcgatatcaatgtcttgctctgtggagatcctggcacagctaaaagccaatttctaaaatacatcgaaaaagtttcatccagggcaatttttacaaccggacagggcgcatcggcagtcgggctcactgcttatgtgcagagacacccagttagtagagaatggacattggaagcgggcgctctggtgctggcggatcgaggcgtgtgcttgatagatgagttcgataagatgaatgaccaagacagaacaagcatccacgaggccatggaacaacagagtatttctatctcgaaagccggaatagtaacctcgctgcaagctcgatgtactgtaattgcagcggctaaccctatcgggggccgatatgatccatctttgacgtttagcgaaaatgtggatctgacagagcctattatttctcggtttgacatcctttgcgtagtgcgtgatactgtcgatccagtacaggacgaaatgctggcccgatttgtggtggggtctcatgtgcgccaccatccatcaaataaggaggaagaaggtttggcaaacggatcggctgcagagccagccatgccgaacacttacggggtggagccgctcccacaagaggtgctaaagaagtacataatttatgccaaggaaagggttcatcccaagttaaaccagatggatcaagataaggtcgccaagatgtacagtgacttaagaaaggagtccatggcaaccggctcgatccccattaccgttcgtcacattgagagcatgattcgcatggccgaggctcatgctcggatccatctgagagattacgtaatagaggatgacgtcaatatggccatacgggtaatgcttgagagttttatagatacgcagaaattctctgtaatgcgttctatgaggaagaccttcgcgaggtacctctcatttagacgtgataataacgaactgctactttttatcctcaagcagttggtcgcagagcaggtgacatatcaaaggaataggttcggagctcaacaggatactatagaggttccagagaaggatctcgttgataaggcccggcaaatcaacattcataatttgtctgcattttacgactcggagctattcagaatgaacaaattcagccacgacctgaagcgtaaaatgattcttcagcagttctag

SEQ ID NO: 15993 - DNA, 2427 bp, synthetic construct
  misc_feature 1..2427: note = Description of Artificial Sequence: Synthetic coding sequence
  source 1..2427: mol_type = other DNA
atggccgaatcgagcgagagctttactatggcaagctcgcctgcgcagcgccggagaggcaacgacccactgacctccagcccaggctggggcctgggcagaatgcggaggggtttactctatgattctgacgaggaggatgaggagcggccagccagaaaaagacggcaagtggaacgcgcaacagaggacggggaggaggacgaagagatgatcgagtcaatcgagaacctggaagacttaaagggccattcagtccgagagtgggtcagtatggccggcccgcgcctcgagattcaccaccgctttaaaaattttcttcgcacacatgttgactctcatggacacaacgtgtttaaagagaggatttccgacatgtgcaaagaaaaccgcgagagcttggtcgtgaactacgaagatctggctgctagggagcatgtgctggcttatttcctccctgaggcccctgctgagctactccagatttttgacgaagctgcgttggaggtcgtcctggctatgtaccccaaatatgatcggatcaccaatcatatccatgttaggatctctcatttaccactcgtcgaggagctccggtccctcagacagttgcaccttaaccagctcatacggaccagcggggtggtgacctcctgtaccggagtgttgccacagctgtcgatggtgaaatacaactgcaataagtgtaactttgtcttggggcccttctgccagagtcagaaccaagaagtcaagcctgggagttgcccagaatgccagagcgccggaccatttgaagttaacatggaagaaacgatctatcagaactaccaaagaattagaatccaggaatcccccgggaaagtggcggcaggccggttgccccgctcaaaggatgccatactgctggccgacttggtggacagctgcaaaccgggtgacgagatcgaattgaccggaatttaccacaataattacgatggtagcctcaacactgcaaatggctttcccgtgttcgccacagtcatcctggctaatcacgtcgcgaagaaagataataaagtggccgtgggcgagttaactgatgaggacgtaaagatgatcaccagcttgtctaaggaccaacagatcggcgagaaaatcttcgcctccatcgccccttcaatctatggccacgaagatatcaagcgtggcctggcactcgctttgttcggaggggagccgaaaaaccctggaggaaagcacaaagtcagaggagatattaacgtgctactctgcggagaccctggcaccgccaaaagccagttcctgaaatatattgaaaaagtgtcttcccgggcgattttcacaacaggccagggcgccagcgctgtcggactgaccgcctatgtgcagcgccatccagtgtctagggagtggacactcgaggccggggcacttgtactcgccgaccggggggtgtgcttgatcgacgagtttgataagatgaatgaccaggacaggacctccatccacgaagctatggagcagcagagtatcagcatctccaaagccgggatcgtcacctctctgcaagccagatgcacagtcattgccgccgcaaaccccatcggcggcaggtatgatccaagcttgaccttcagtgagaacgttgatttgactgagcctattatttctcgctttgacattttgtgtgttgtgcgagatactgtggaccctgtgcaagacgaaatgctggcccggttcgtcgtgggcagtcacgttaggcatcaccccagtaacaaagaagaagagggcctcgcgaatggcagcgctgccgagccagctatgcccaacacatatggtgtagagccattaccccaagaagtgctgaagaaatacattatctacgcaaaagaaagggtgcaccctaaattgaaccagatggaccaggacaaggtggccaagatgtactcagaccttaggaaggaaagcatggccacggggtctatccctatcacagtgagacacatcgagtcaatgatccgcatggctgaggcccacgccaggattcatttgagagattacgtgatcgaggacgatgtgaacatggcgattagggtcatgctggagagtttcattgatacacagaagtttagtgtcatgcgctcgatgcggaaaacgtttgctcggtacttgtcctttcggcgggacaacaacgaattattgctctttattctaaagcagctggtcgccgagcaggtgacgtaccagcgcaatcgattcggtgcacaacaggatacaatcgaagtcccagagaaggacctagtcgacaaggcccggcagataaatatccataatctttcagccttctacgactccgaactattcaggatgaataagttctctcacgatctgaaacgaaagatgatcttgcaacagttctag

SEQ ID NO: 15994 - DNA, 2865 bp, synthetic construct
  misc_feature 1..2865: note = Description of Artificial Sequence: Synthetic coding sequence
  source 1..2865: mol_type = other DNA
atggcagagagttccgaatcattcaccatggcatccagtcccgcacagcgacgtagagggaatgaccctttgacatcatctcccggaagatccagcagacggactgatgccttgacctccagccctggtcgggacttgcctcccttcgaagatgaaagcgaggggcttttggggaccgaaggaccgcttgaagaggaggaggatggcgaagagcttatcggcgacggtatggagcgcgactatagggccataccggaactcgacgcttacgaggctgaggggctcgccctggacgacgaggatgtggaggagctgacagctagccagcgggaagccggaagggggctgctgtacgattctgacgaagaggacgaggaaagacctgcccggaaaagaaggcaggttgaaagagcaaccgaagatggcgaagaggatgaagaaatgattgaatccattgagaacctggaagacctgaagggacatagcgtcagggagtgggtgagtatggctggtccgaggttagaaatccaccatcgatttaaaaacttcctcaggactcacgtagattcccacgggcataacgtgtttaaggagaggatttcagatatgtgcaaggaaaacagggagtccctcgtcgtcaactacgaagacctcgccgcaagggaacacgttctcgcgtacttcctacccgaagcgcccgctgagctgttgcagatctttgatgaagctgcattggaggtggtcctggccatgtacccaaagtatgatcgaatcactaaccacattcacgtccgcatatctcatcttccattagtggaagaactgaggtcactgaggcagctccacctgaatcagctgatacgcacctcaggagtagtaacctcttgcactggcgtattgccacagttgtcaatggtgaagtacaattgtaacaagtgcaacttcgtgctgggccccttttgccagtcccagaatcaagaggtcaaaccgggcagctgtcccgagtgtcagagcgccgggccctttgaagttaacatggaagagacaatctatcagaattaccagcggattagaatccaggaatcaccaggaaaagtggcggccggccggctaccacgcagcaaggacgctatcttactcgcggacctggtcgattcctgcaagcctggggacgaaatagagttaactgggatctaccacaataactacgatggcagcctcaacacagccaacggctttccagtttttgccaccgttatccttgccaaccatgtggcaaaaaaggacaataaggttgccgtcggtgagcttacggatgaggatgtgaaaatgatcacaagcctctctaaagatcagcagataggcgaaaaggaatcctctcgcaatgcaagtctcgccgaggctggtattggagctattcctagtcagctcttggctatcgagccatcgctccgacgatccggggtacccatcggcgaagtgggagtctcccagagacaggaggcacgttccttcagctcagcaaacactcattggtttttggaggacctgctgggccccagttgccgcgacaccatgattttcgccagtatcgcaccgtctatatacgggcatgaagacatcaagcgagggctcgcattggcccttttcggcggggagcctaagaatcccgggggaaagcacaaggttcgaggcgacatcaacgtgttgctttgtggggatccaggcaccgcaaagagccagttcctgaagtacattgagaaggtcagcagcagggccatatttaccactggtcagggcgctagcgcagtgggcctgacagcttacgtgcagcgacacccagtaagcagagagtggacgctcgaggccggggctctcgtactggccgacagaggagtatgtctcatagacgagtttgataaaatgaacgatcaggatcgaacgtcgatacatgaggccatggagcaacagtccatcagcataagcaaggccgggatcgtcacaagtctccaggctcggtgcacagtcatcgcggccgctaatcccatcggggggcggtacgatccaagtctgacattctctgagaatgttgacctcactgaacctataatttcccgtttcgacatcctttgtgtcgtgcgggatactgtcgatccagtccaggacgaaatgctcgccagatttgtggttggaagtcacgttagacaccatccttccaacaaggaggaggagggacttgctaacggaagtgcggccgagcctgccatgccgaacacttatggcgtggagcctcttccacaagaagttcttaagaagtacatcatctatgcaaaagagcgcgttcatcctaaactaaaccagatggatcaggataaggttgctaagatgtactccgacctcaggaaagaatccatggctaccggtagcataccaatcaccgtacggcacattgagtccatgataaggatggccgaggcgcatgctaggatacatctgagagactacgtgatcgaagacgatgtgaacatggcaattagggtgatgcttgagtccttcatcgacacgcagaaattctccgtaatgagaagtatgaggaaaacttttgcacggtacctgagtttcaggcgggataataacgagctgctcttgtttatcctgaagcagctggtggccgaacaggttacttaccaacgaaataggttcggagcccagcaagataccattgaagtgcctgagaaagacctggttgacaaggctcgtcaaatcaatattcataatctttctgcgttctacgacagcgaactgtttcgcatgaacaaattttctcacgacctgaaaagaaagatgatcctgcagcaattctag

SEQ ID NO: 15995 - DNA, 753 bp, synthetic construct
  misc_feature 1..753: note = Description of Artificial Sequence: Synthetic coding sequence
  source 1..753: mol_type = other DNA
atggctttaagggctggccttgtgttgggatttcacacacttatgacgctgttgagcccacaagaggccggggctactaaagctgaccatatggggtcatacggcccagccttttatcaaagctatggagcaagtggccagtttactcacgagttcgacgaagagcagctgttttccgtggacttaaagaaaagcgaggctgtgtggcgattgccagagttcggagacttcgcccgatttgacccccaggggggtctggccggtatcgcagccattaaagcccatttagacatcctggttgagcgctctaaccggagcagagcaataaatgtccctcccagagtcacggtcctcccaaaatcacgtgtcgagcttggtcagcccaacattctcatttgtattgtcgacaacatatttcctccagtcatcaacatcacatggttaaggaacggccagactgtcacggagggcgtcgcccagaccagcttttactcacagccagatcatctgtttaggaagtttcattacctgcccttcgttcctagcgccgaagacgtatacgactgtcaggtggagcattggggccttgacgcccccctgttgaggcattgggaacttcaagtccctatcccccctcctgacgctatggagacactggtttgtgccttagggctggccatcggcctggtcggcttcctggttggcacagtgcttataatcatgggcacttacgtaagcagtgtgccccgctag

SEQ ID NO: 15996 - DNA, 993 bp, synthetic construct
  misc_feature 1..993: note = Description of Artificial Sequence: Synthetic coding sequence
  source 1..993: mol_type = other DNA
atgcatcgttatcgtgcgcccggggagcaagacggtgatgccatgcccctaggctctgcggttgatatccttgcaacggacgatcccaacttcagccaagaagaccagcaggatacacagatctatgaaaaacatgacaatctactgcacggaaccaagaagaaaaaggagaagatggttagcgccgcatttatgaagaagtatatacacgtggccaagattattaagcctgtgctcactcaggaaagcgccacatatatagccgaggagtactcaagactgcgaagccaagattctatgtcttctgacactgccaggacttctcccgtgaccgcacgaaccctggagacactcattagactggcgaccgcgcatgccaaggcccgtatgagcaagactgtggacctgcaggatgcagaggaggccgtcgaacttgtacagtacgcctacttcaagaaggtcctggagaaagagaaaaaacgtaaaaaacgatccgaggacgagagtgagactgaggacgaagaggagaagagccaggaagaccaggagcaaaaacgtaagcgaaggaaaacacgacaaccagatgcgaaggacggggacagctatgacccatatgacttctcagacactgaagaggagatgcctcaagtccacaccccaaagaccgccgacagccaagagacgaaagaatcccagaaggttgaattaagcgagagccgtgacgggattagcccttgctgtcccggatggtcgtggaccccagggctcaagcagtctttctacttaagtctgcccaagggatgggattatagacacaagcccctctgtctctttgatctgattctgtttaacgactgtcgcgtttccatggttgagggaatccagggcggcccactgggatgtgttcccggaagcagctgtgccgttaaccgccacgagtctccccatcgcatacaccagcctgggcagagaagggccctcctcttctcatag

SEQ ID NO: 15997 - DNA, 2289 bp, synthetic construct
  misc_feature 1..2289: note = Description of Artificial Sequence: Synthetic coding sequence
  source 1..2289: mol_type = other DNA
atgtggtcatgcggtcggctgcgggaaatcacttggacttcatggaccacccgtctcctcaacaatgccttcgaggaactggttgcttttcagcgcgctctgaaagattttgtggccagcatcgacgctacatatgctaagcagtacgaggaattttacgtggggcttgagggatccttcggctccaaacacgtgagtcctcgcaccttaacatcctgtttccttagttgcgttgtttgtgttgagggaattgttacgaagtgcagcctggtgcgcccaaaagtggtaagatcggtacattattgcccagcaaccaagaagaccatcgagcgacggtacagtgatctcaccaccctggtcgcctttcccagttcatcagtctatcctactaaggatgaagaaaacaatcctctggaaactgagtacggcctgtccgtttacaaggaccaccaaacaataaccatacaggaaatgcccgaaaaggctcccgcagggcagctaccacgatctgtggatgtcattcttgacgacgacctcgtggacaaggctaagcccggcgatcgggtgcaggtcgtggggacatatcgctgtcttcctggaaaaaaaggcggatacactagtggcacattcaggacagtgctgattgcttgcaatgtgaagcagatgagcaaggacgcccagccatctttttccgcggaggatatagcgaagatcaaaaagttttcaaaaaccagaagcaaggacatattcgatcagctagctaaatccctggccccatctatacacggacacgattatgtcaagaaagccatactgtgcctacttctgggcggagtggaaagggatttggagaatgggtcacacattcggggggatatcaacatcctgctgattggagaccccagcgtggcaaagagccaactgttgaggtatgtgctttgcaccgcacctcgcgctatccctacaaccggacggggcagcagcggcgtcggtcttacagctgccgtcacaaccgaccaggaaacgggcgagagacgtctggaggctggggccatggtgctcgctgaccggggggtcgtgtgtatagacgaatttgacaaaatgtctgatatggacagaactgccatccatgaagtcatggaacaggggagagtgacaatcgcaaaggcgggtatacatgcccggctcaacgcacggtgttctgtgttagctgccgcaaaccccgtttacggacgctacgatcagtacaagacgcccatggaaaacatcgggttgcaggatagcctgctgagccgcttcgatcttttgtttattatgttggaccagatggatccagagcaggaccgggaaatctcagaccacgtgcttcgaatgcacagataccgagcacctggggagcaggacggagacgctatgccgctagggagtgccgtggacatcttggcgaccgatgatccaaacttttcgcaggaggatcagcaggatacccagatttatgagaaacacgacaacttactgcacggcaccaagaagaagaaagaaaaaatggttagtgccgcattcatgaagaaatacatccatgtggccaagatcattaaaccagtccttacccaagagagcgctacgtacatcgctgaagagtattcccggctgagaagccaagattccatgagctcagacaccgctagaacaagcccggtcaccgcacgcacactggagaccctcatcagattggctactgcacacgcaaaagctaggatgtccaagactgtggacttacaggatgccgaggaagccgtggagcttgtccaatacgcctacttcaagaaggttctagagaaagaaaaaaagcggaagaaacggtccgaggacgagtctgagactgaggacgaggaggagaaatcgcaggaagatcaggaacaaaagcggaaaaggcggaagacgcggcagcctgatgctaaggacggcgacagctatgacccatacgacttttccgatacggaggaggaaatgccacaggtacacacccctaagacagccgatagtcaggagactaaggaatctcaaaaagtggaactctccgagtctagactgaaggctttcaaggtcgcattgctggacgttttccgggaagcgcacgcccagtccattgggatgaatcgccttaccgaaagtatcaaccgggattctgaagaaccttttagtagtgtggagatacaagctgccctatccaaaatgcaggatgacaaccaggtgatggtctcagaaggcattattttcttaatttag

SEQ ID NO: 15998 - DNA, 987 bp, synthetic construct
  misc_feature 1..987: note = Description of Artificial Sequence: Synthetic coding sequence
  source 1..987: mol_type = other DNA
cggtaccgggcccctggcgagcaagacggggatgccatgcctttaggctccgctgttgatattctggccactgacgatccaaatttcagccaggaggatcagcaagatacacagatctatgaaaaacacgataatcttctacacggcaccaaaaaaaaaaaggagaagatggtgtctgctgcctttatgaagaagtatattcatgtggccaagattatcaagccagtgcttacgcaggaatctgcaacttacatcgccgaagagtattcacgactaagatcccaggattccatgagcagtgatacagcccgaacctcccccgttacagcacggaccttagagacgctgatcagattagccacggcacatgccaaggctcgaatgagtaagacagtggatctgcaggacgctgaggaagccgtggagctggtacagtacgcatacttcaagaaagtgcttgagaaggagaagaagcggaagaagcggagcgaggacgagagcgagacagaagatgaggaagagaagtcccaggaagaccaggagcagaaacggaaacggaggaagaccagacagcccgacgctaaggatggtgactcgtacgacccatacgatttctccgataccgaagaggagatgccccaggtgcacacccctaagacggccgattctcaggagaccaaagaaagccagaaggtggaactgtcagaaagccgtgatggcattagcccctgctgcccaggctggtcctggactcccgggttaaagcagtccttttatttatctctcccgaaaggctgggactaccgccataaacctctgtgtctgttcgacttgatacttttcaacgattgcagagtttccatggtggaaggcattcagggaggacctttgggatgcgtacctggatccagttgtgctgttaataggcatgaaagccctcatcgtatacaccagcctggtcagcggcgcgctcttctcttctcatag

SEQ ID NO: 15999 - DNA, 2562 bp, synthetic construct
  misc_feature 1..2562: note = Description of Artificial Sequence: Synthetic coding sequence
  source 1..2562: mol_type = other DNA
atgctgccaagaagccctccgttgcccagaggtaatctgtggtggcgcgaagaattcggttcattcagggccggagtggaatcgtcatgggaaccacctcgggactttggagggggtagtagtttagctgctggaatggccggcaccgtagtgcttgacgatgtggaactgagagaagcgcagcgcgactacctggactttctcgatgacgaagaagatcagggtatttatcagtcaaaggttagagaactgatttcagataatcagtacaggctgattgtcaatgtcaatgacctccggaggaaaaatgagaaaagggcgaacaggctgctgaacaacgctttcgaggagcttgtcgccttccagcgtgctctaaaagattttgtggcttccattgatgcaacatatgcaaagcaatacgaggaattctatgtaggtcttgaaggctcctttggaagcaagcacgtgagcccccgcacccttacctcttgcttcctgtcctgcgtcgtgtgtgtggagggcatagtgaccaagtgctcgctcgttcgtcctaaggttgtgagatcagtgcactactgtccagccactaagaagactatcgagcggcggtactcagatctcaccactcttgttgcctttccttcctcttcagtataccccaccaaagacgaggagaacaatccactggaaacagaatacggtttgtccgtgtataaggaccatcagaccattacaatccaagagatgcccgagaaggccccggccgggcagctgcctcgctcagtggacgtcatcctggatgacgatctggtggacaaggcgaagccaggcgatcgcgtccaggttgtggggacgtatcgatgtttgccgggaaaaaaaggggggtatacaagtggcaccttccgaactgtcctgatagcatgcaacgtgaagcagatgagtaaagacgctcaaccgtccttttcagctgaagatatagccaagataaaaaagttttctaagacccgctctaaagacatcttcgaccagctggccaagagcttagcccctagcatccacggacacgattacgttaaaaaggcaatcctgtgtctgctgctgggcggggtggagagagacctcgaaaacgggtcacatatacgtggtgacataaacatattgttgataggcgacccctcagtcgccaaatctcagttattgcgctacgtcttatgcacagctccccgggctattcccactaccgggcgcgggagttcgggggtggggctcacagccgctgttacaaccgatcaggagaccggagaaagacgcctcgaagccggagctatggtcctggccgacaggggcgtggtgtgcatcgacgagtttgataaaatgagcgatatggatcgcaccgccatacatgaggtaatggagcagggacgcgtgaccatcgctaaagccggcatccacgcccgattgaacgcacgttgcagcgtattggctgctgccaaccctgtgtacggccgctacgatcagtacaaaacacccatggaaaatatcggtctgcaggacagccttctcagcagattcgatctccttttcattatgctggaccagatggaccccgagcaggaccgggaaatatctgatcacgttttaaggatgcatcgttaccgggccccaggtgaacaggatggagatgctatgcccctgggatctgctgttgacattttagctacagatgatccaaatttctctcaggaggatcaacaggacacgcagatctacgaaaagcacgacaacctgttacacggaacaaagaagaagaaagaaaagatggttagtgccgcatttatgaaaaagtatattcacgtagccaaaatcataaagcctgtactgactcaagagtccgcaacctacatcgccgaagaatattcacggctgcggagccaggacagcatgtcgtcggacactgctcgcactagtcccgtaacggctagaaccctcgaaaccctgataaggttggcaactgctcacgccaaggcacggatgtctaaaactgtggatctgcaagacgccgaagaagcagtcgagctagtccagtacgcttattttaaaaaagtcctggaaaaagagaaaaagagaaagaaacggtccgaagatgagtccgagacagaagacgaagaggagaaatcgcaggaggatcaggagcaaaaacgcaagagacggaagacgaggcagccagatgctaaggatggagattcttacgacccgtatgatttctctgacacggaagaggagatgcctcaggtgcacactcccaaaaccgccgattcccaagagaccaaggagtcccaaaaagtcgagctgagtgagtctaggcttaaagcgttcaaagtcgccttgcttgacgtgtttcgcgaggcccacgctcagtcaatcggcatgaatcgcctgacagaatctattaaccgagactcagaagagcccttctcaagcgtagagatccaggccgccctgtcaaaaatgcaggacgataaccaagtcatggtgagcgagggtataattttcctgatctag

SEQ ID NO: 16000 - DNA, 2592 bp, synthetic construct
  misc_feature 1..2592: note = Description of Artificial Sequence: Synthetic coding sequence
  source 1..2592: mol_type = other DNA
atgtccagtcctgcgtctactccttcaaggcgcggctcaaggcggggtagagcaactccagctcagactccgagatctgaagacgccagatccagtcctagtcagaggcgacgtggagaagacagcacctctacaggcgaactacagcccatgcccacttccccaggagtcgatcttcaatctccggccgcccaggatgtactgttttccagccctcctcaaatgcactctagcgctattcccctagacttcgatgtatcctcgcctcttacgtatgggacgcccagttcccgggtggaaggaactccccggagtggggtgcggggaacacccgtccgccagcgtcctgatctcggatccgcccaaaaaggcctccaggtggatttacagagcgatggcgccgctgccgaggatattgttgcttcagaacagtcactggggcagaaactcgtcatctgggggaccgatgtaaacgttgcagcatgcaaagaaaactttcaacgttttctacagcgttttatagaccctctagccaaggaggaggaaaatgtcggcatagatatcactgagcctctgtacatgcaaagattgggcgaaatcaatgtaattggagaaccttttctcaacgtgaattgtgagcatattaagagcttcgacaagaatctgtaccggcagctcataagctatccccaagaggtaatccccaccttcgatatggccgtcaatgaaattttcttcgataggtaccctgactccatcctggagcaccagattcaggtcaggccctttaacgccctgaaaacgaagaacatgcgcaatttaaatcctgaggacatagaccaactgattacaatttcgggaatggtgattaggactagtcagctaattccggagatgcaggaagccttcttccaatgccaggtatgcgcccacaccaccagggtggagatggaccgcggacgaatcgccgagcctagcgtgtgtggccggtgtcacaccactcacagcatggcactcattcataataggtccctgttttcagacaagcaaatgattaagctgcaagagagccctgaggatatgcccgcaggtcagacccctcataccgtgattttgttcgctcacaatgatcttgttgataaagtccaacctggagacagagtcaacgtgaccggcatctatcgagccgtccctatccgagtcaatccccgggtgagtaacgttaaatcagtgtataagacccatatcgacgtcatccattacaggaagactgacgcgaaacgacttcatggactcgacgaagaagctgagcagaagctgttctccgagaaaagggtggagttgctgaaagagctgtccagaaaacctgatatctacgaacgtctagctagcgctttagcccccagcatttatgaacacgaggatatcaagaaggggatattgctgcaactatttggcggaacacgcaaggacttcagccacacgggcaggggcaaattcagagccgagataaacattctgttgtgcggcgaccccggaaccagcaagtcacagttactccagtatgtttataacctggtgccccgcggacagtatacgagtggaaagggaagcagtgccgtcggtcttactgcatatgtaatgaaggaccccgaaacaaggcagctggtacttcaaactggggctctagttctctcagataatggtatttgctgcatcgacgaatttgataagatgaacgagtctactcggtcagtcctccacgaggtcatggagcagcagacactgtccatcgccaaagcaggtatcatctgccagctgaacgccaggactagcgtgttagccgcggctaatccgatagagagccagtggaatcctaagaagaccaccatcgagaacatccaactaccccatacccttctcagcagatttgacctcatctttctgctgcttgacccacaagacgaggcttacgatcgcaggctcgcacaccaccttgtggccctgtattaccagtcagaggagcaggccgaagaggagttactcgacatggctgtactcaaagactacatcgcctacgctcactccacaataatgccgagattaagcgaggaagcatctcaggccctgattgaagcatacgtggatatgcgaaagatcggatctagcagaggaatggtctcggcttaccctcggcagctcgagtctctgattcgcctggcagaggctcacgcaaaggtcaggctgtccaacaaagtggaagctattgatgtcgaggaagcaaaaagactccatcgagaggctctgaagcaatccgccaccgatccacggactggtattgtcgacatctccatattgacaaccggaatgagcgccacgtcccgcaagagaaaggaggagttagccgaggctctgaaaaagctaatactgtccaaaggaaagacaccggcattgaagtaccagcagctctttgaagacataagagggcagagcgatatcgctattaccaaggacatgtttgaggaagctctgagagctctggcagacgatgattttctcactgttactggcaagaccgtgaggctcctgtag

SEQ ID NO: 16001 - DNA, 2472 bp, synthetic construct
  misc_feature 1..2472: note = Description of Artificial Sequence: Synthetic coding sequence
  source 1..2472: mol_type = other DNA
atgcctggccacctgcctctgcgcgatgtcgaggcacgtattccccccccacgtgggagttgttcgaggtgccagcccagactggaatggacctgtagggccctgttaaggagaacatgttgcttccccgcactcccgaagtgcatactgcagttatctctcctgaccctcatgctagaaggtacgcctcgatctggcgtaagggggacccctgtaagacagcgtcctgacctgggcagcgcccagaagggtctgcaagtggacctccagtctgacggagccgcagcagaagacatcgtggcttcggaacagtctctgggacagaagttagtcatatggggtaccgatgtcaacgtcgcggcttgtaaagaaaactttcaacgcttcctccagcggtttatcgatcccctggctaaagaggaggaaaacgtgggcatcgatatcacagaaccactgtacatgcagaggctaggcgagattaacgttattggcgaacctttcctgaatgtgaactgtgagcacatcaagagtttcgacaagaacctttatcggcaattgatctcatacccccaggaggtgatccctactttcgatatggccgtcaacgaaatcttcttcgatcgctacccagacagtatcttggagcaccaaatccaggtgcgccctttcaatgcattgaaaacaaagaacatgagaaatctcaaccctgaagacattgaccagctgatcactatatccggcatggttatccgaacttcgcaacttatcccggagatgcaggaggcgttctttcagtgccaagtatgcgcgcacactaccagagtggaaatggatcgaggacggattgcagaaccatcagtttgcgggaggtgccacaccacccactcaatggccctgattcataaccgatcactattcagcgacaagcaaatgattaaattgcaagagtctcccgaagacatgccagctggccagactccacataccgtgatcttgttcgcccataacgacctagtggataaagttcagccaggcgaccgcgtcaacgtcactggcatttacagagctgtgcctattagggtgaacccgagagtatccaacgtgaagtctgtgtacaagacgcacattgacgttatacattatagaaagacagacgccaaacggctgcatggcctcgatgaggaagccgagcaaaagctgtttagtgaaaaacgtgttgagctcttaaaagagctcagtcgcaagccagacatctatgagagattagcgtccgcactggctccctccatttacgagcatgaggatattaaaaagggcatcctgttgcaactgttcggtgggacacgcaaggatttctcccacactgggcgaggtaaattcagagcagagattaacattctgctttgtggagacccaggaacgtccaagtcacagctgctgcagtatgtttacaacctcgtgccacgtggtcaatatacttccggtaaaggtagtagtgcagtgggcctaactgcctatgtcatgaaagaccccgagacgcgccagctcgtgctacagactggggcccttgtcctctcagacaatggcatatgttgcatagatgaattcgacaaaatgaacgaatctactcgatccgtgctccacgaagttatggagcagcaaacattaagcattgccaaagctggaattatttgtcagctcaatgctcggacatccgtcctggctgccgctaatccgatcgagtcgcagtggaaccccaagaaaacgaccattgaaaatatccagttgccacacacattgctgtcgagattcgacctgatcttcctgctccttgatccccaggatgaagcatatgacagaaggctggcccaccaccttgtggctctgtattaccagagcgaagagcaggcagaggaggaactcttggacatggctgtcctgaaggactacattgcctacgcacacagcactattatgcctaggctgagcgaggaggcctcccaggccctcattgaagcctacgtcgacatgcgtaagattgggtcctcacgcggcatggtttcagcgtatcctcgtcagctcgaatctctgattcggctggcagaggctcacgcgaaggtgagactctcgaacaaagttgaggcgattgatgtcgaggaggcgaagcgccttcacagggaagccctgaaacaatccgctaccgacccaagaactggcatagtggatatatccatcctaaccacaggcatgtctgcaacttccaggaagcggaaagaagagctggccgaggccctcaagaaactgatcttgtccaagggcaaaactcccgcactgaagtaccaacagttattcgaggatattcgtggccaatctgacatcgccattaccaaggatatgttcgaggaggcacttcgggctcttgcagatgacgacttcctgactgttaccgggaaaacagttcgtttactttag

SEQ ID NO: 16002 - DNA, 2592 bp, synthetic construct
  misc_feature 1..2592: note = Description of Artificial Sequence: Synthetic coding sequence
  source 1..2592: mol_type = other DNA
atgagctcaccagcctctacgccgagcaggcggggcagcagacgagggagagcgactccagcacaaactcctcgcagtgaggacgccagatcatccccatctcagcgacgtcggggcgaagatagcaccagcacgggagagttgcagccaatgccgacaagtcccggcgtagacctacaaagcccagctgcacaggacgtgttgttcagctccccaccgcagatgcactcttctgctatcccactggacttcgacgtgagttcgcctttgacctacggcaccccatcatcgcgagtggagggcacgccccgaagcggcgtgcggggaactccagtgcgccagcggccagacctggggtcggctcagaaggggctccaggtcgatctccagtccgacggcgctgcggcagaggatattgtggcttcggagcagtctttgggtcagaaactcgtgatctggggaacagatgtcaacgttgcagcgtgtaaggagaacttccagcgatttctgcaaagatttattgatcctctggcaaaggaagaggagaatgtcggcattgatattaccgaaccattgtacatgcaaagactgggcgaaattaatgtgattggtgaaccgtttttgaatgtcaattgtgaacacattaagtcctttgataagaatctgtataggcaattgatcagctacccgcaggaagtgataccaactttcgatatggcagtgaatgagatcttttttgatcgttatcccgactccatcttggagcaccagattcaggtgcgcccattcaacgccctgaagacaaagaacatgcgcaacttgaatcccgaggacattgatcaactgattacgataagtggcatggtgatcaggaccagccaactcattcccgagatgcaagaggcattcttccaatgtcaggtatgcgcccacaccactcgcgtggagatggatcggggtaggatcgcagaaccatcggtctgtggccggtgtcataccacacattcaatggcactgattcataaccggtctctgttcagtgacaagcaaatgatcaaactacaagagtcccccgaggatatgccagccgggcagacacctcacactgttattttattcgcccataatgacctggtcgacaaagtacagcctggcgaccgtgtgaacgtgaccggcatctaccgcgccgtgcctattcgcgtaaacccaagagtgtccaacgtaaagtccgtgtacaaaacacacatcgatgtcatccactaccgaaagaccgacgccaaacggttacatgggctcgatgaggaggccgaacagaaactgttctcggaaaaacgggtggagctgctgaaagagctgagtcgaaaacctgacatttacgaacgtctcgcttccgccctggcacccagcatttatgagcatgaagatataaagaaaggaatactccttcagctgtttggaggaaccagaaaagacttttcacacaccggacgtgggaaatttcgggccgaaataaatatcctgctgtgcggggacccaggaactagcaaatctcagctgctccaatatgtgtataatctggtaccccgaggccagtatacctccggtaaagggagtagcgcggtaggactgactgcttacgtcatgaaggacccggagacaaggcaactggtgttacagaccggcgctttggtcctctcagataatggaatctgctgcatagacgagttcgacaaaatgaacgagagtacaaggagcgtcctacatgaagtaatggagcagcaaacactttccattgccaaagccggcattatctgccaacttaacgccagaacctctgtgctggctgccgcaaacccaattgaaagtcagtggaatccaaaaaaaacaacaattgagaatattcaactgcctcacacgctgttaagccgtttcgatctgatctttctccttttagacccccaagatgaagcgtacgaccgccggctggcccaccacctcgtggccctatattaccagtcagaggagcaagccgaagaggaactcctcgacatggccgtacttaaggactacatcgcatacgctcatagcactataatgcctcggctgagtgaagaggccagtcaagcactgatcgaggcgtatgtggacatgagaaagatcggctcgagtagaggcatggtgtccgcgtatcctcgtcaactggaaagtttaatcaggctcgcagaagctcatgcaaaagtgcggctcagcaataaagttgaggccatcgacgtcgaggaagccaaacgccttcacagggaggctctgaagcagagcgccacagatcctaggacagggatcgtggacatttccatactgaccacaggcatgtctgccacttcaaggaagagaaaggaggaactggctgaagccttgaaaaaactcattctgtcgaaaggtaaaactcccgctctgaaataccagcaactcttcgaggatatcagaggacagtcagatatcgctatcactaaggacatgtttgaggaagctctacgtgctctcgccgacgacgacttcctgacagtgacaggaaaaactgtgagactcttgtag

SEQ ID NO: 16003 - DNA, 855 bp, synthetic construct
  misc_feature 1..855: note = Description of Artificial Sequence: Synthetic coding sequence
  source 1..855: mol_type = other DNA
atggcaccacgtctgtgctcgatctcagtcacagcgcgtagactcctggggggccctggacccagagcaggcgacgtggcgagtgcagctgctgctagattttactcgaaggacaatgaaggcagttggttccgaagcctgttcgtgcacaaggtggacccaagaaaggacgcccattctacactcctcagtaaaaaagagacgtcgaacctatataagatacagttccacaacgtgaagccggaatatctggatgcatacaacagtcttaccgaagctgtcctgcccaagctgcatctggacgaggattacccatgctcactggtgggcaactggaacacgtggtatggagaacaggaccaggcggtgcacctgtggagattttccgggggttatccagcactgatggactgcatgaataaactgaaaaacaataaggaatatctggagttcagacgtgagcggagccagatgctcttgagcagaagaaatcagctgttgttagagtttagcttttggaatgaaccgcagccgcggatgggtccaaacatttacgaactgcgcacatataagttgaaacccggtacgatgattgagtgggggaacaactgggctagggccatcaagtatcgacaagaaaatcaggaggccgtaggcggatttttttctcagatcggcgaattgtatgtagtccatcatttgtgggcctacaaggacttgcagtcccgtgaagaaaccaggaatgcggcatggcgaaaacggggctgggatgagaatgtgtattacacagtcccgctggtcaggcacatggagagtcgcatcatgattcccctcaagatctcccctcttcagtag

SEQ ID NO: 16004 - DNA, 2076 bp, synthetic construct
  misc_feature 1..2076: note = Description of Artificial Sequence: Synthetic coding sequence
  source 1..2076: mol_type = other DNA
atgagtgggtttgatgaccctggaatcttctactctgacagcttcggaggagatgcccaggctgatgaagggcaggcaagaaaatcccaactgcagcgccggttcaaggagttcctccggcaataccgcgtgggaacggatcggaccgggttcacatttaagtacagggatgaattaaaacggcactataacctcggagaatactggattgaagtggaaatggaggatttggccagcttcgacgaggatctggcagattacctctacaaacagcctgcggagcatttacagctctccgacatgatgtcccaccttgtgaagatccccgggataatcatcgctgccagcgctgtaagggccaaggctactagaattagcatccagtgcaggtcatgtcggaatacacttactaacattgccatgaggcccggactcgaaggctacgccctgccccgcaaatgtaatacagatcaagccggccgacccaaatgtcctctggatccctactttatcatgcccgataagtgtaaatgtgtggattttcaaaccctcaaactacaggaactgcctgacgcagtcccccacggggagatgccccggcacatgcaactgtactgtgatcgttacctttgcgataaagtggtgcccggtaaccgcgtgacaattatggggatatacagtattaagaaatttggcttgactactagtagagggcgggacagagtcggcgtgggaatccgcagtagctatattcgcgtactcggaatccaggtcgatacagacggcagcggcagaagttttgctggcgccgtgagccctcaggaggaagaagagttccgccgtcttgcagccctccccaatgtgtacgaagtaataagcaagagcatcgcaccctccattttcggcgggaccgatatgaagaaagcaatagcctgtctgctctttggtggctcccggaagcgcctgccagacggactgactaggcggggcgatattaatctgctgatgctgggtgacccgggaaccgccaaatcccagttgttgaaatttgtggaaaaatgtagtccaatcggagtctacacgtcaggtaaaggctcatctgctgccgggctgacagcgagcgtcatgcgcgatccatccagccgaaactttataatggaaggaggcgccatggtactggctgatggaggggttgtttgcatcgacgaatttgataaaatgcgggaagatgacagggttgcgatccacgaggccatggagcagcagactattagcatcgccaaggccggcataacgaccaccctgaactcccggtgcagcgtcctcgccgcagccaatagcgtatttggacgatgggacgaaaccaagggagaagataacatcgactttatgcctacaattttatctcggttcgatatgatattcatcgtcaaggacgagcacaacgaggaacgtgacgtaatgctggcaaagcatgtaattacattacacgtttcagccctgactcaaacgcaggccgttgagggagagattgatttagcaaagctgaaaaaattcatcgcgtactgtcgcgtcaagtgtgggccccggctgagcgcagaggccgccgagaaattgaagaacaggtacatcattatgcgctctggcgctcgtcaacacgaacgagattccgacagacgatcatccatccccatcacggtccggcagctggaggccatcgtacgtatcgcagaggccctgagtaagatgaaactgcagccttttgccaccgaagccgacgtggaggaggccctgcgtttatttcaagtgagtacgttagacgctgcattatctggaacactttcaggagtggaggggttcacttcccaggaggaccaagagatgttatcgcgcattgaaaagcagctcaagagacgttttgctatcggcagtcaggtctcagaacactcaattataaaggactttacaaaacaaaaatacccggaacacgctattcataaggtgctccagctcatgctgaggaggggagaaatccagcacagaatgcagagaaaagtactctatcgacttaaatag

SEQ ID NO: 16005 - DNA, 696 bp, synthetic construct
  misc_feature 1..696: note = Description of Artificial Sequence: Synthetic coding sequence
  source 1..696: mol_type = other DNA
atgagtgggttcgacgatcccggaattttttatagcgactccttcggtggcgatgcacaggccgacgagggccaggcaaggaagagccagctgcagcgtaggtttaaggagttcctgagacaataccgggttggcaccgaccgcacgggctttactttcaaatattcactcgcccctagtctgatcgagcatcttctgcccgcccggtattgcagcggctgctgggcagcagctctgaaactggacctggccccagcatcccgggacgaattgaaacggcactacaacctaggggaatattggatagaagttgaaatggaagatctggcttcctttgacgaagacctggcggactatctctataagcaacccgcggagcacctgcagctcctggaagaggcagccaaggaggtggccgatgaggtcacacgaccacggccttcgggcgaagaggtcctgcaggatattcaagtaatgctcaaaagcgatgcgtcaccgagttccatccgctccttgaagtccgatatgatgtcacatctggtgaagatacccggaattattatcgctgcttcggctgtgcgagcgaaagctacccgaatcagtatccagtgtagaagttgccggaatacgttaacgaacattgccatgcgtcctgggctggagggatatgccttaccccgtaagtgtaacacatag

SEQ ID NO: 16006 - DNA, 1125 bp, synthetic construct
  misc_feature 1..1125: note = Description of Artificial Sequence: Synthetic coding sequence
  source 1..1125: mol_type = other DNA
atgaattccagtggaatcacaacatggggaagtacaggacttcggtggcgctggaggacaaggcccagaccctctggcgaggaggttttacaggatattcaggtcatgctgaaatcagacgctagcccatctagcattaggtctctgaagagcgatatgatgtctcacttggtgaagattcctgggattataatcgccgcctccgccgtaagggctaaggcaacacgaattagtattcagtgccgctcgtgtcgcaacacactcactaatattgctatgagacccggactcgaaggctacgcgctgcctcgaaagtgtaacacagatcaggctggaagaccaaagtgcccgttagacccctatttcatcatgcccgacaagtgtaagtgcgtagatttccagaccctgaaactgcaggagctgcctgatgctgttccacacggggagatgccccgccacatgcagttatactgcgacaggtacttatgcgataaagtcgtcccaggaaatagggtcactataatgggcatttactccatcaaaaaattcgggctcacaacgagtcgtgggcgggatagggtgggtgtcgggatcaggagcagctatatccgggttttaggcatccaggtcgacacagacggcagtggccgaagcttcgctggggcagtttccccccaggaagaggaggagttccggaggcttgccgctctgccaaatgtctacgaagttatctctaaaagtattgccccttcaatcttcggtggcaccgacatgaaaaaggcaatagcatgtctgctgttcggggggagccgaaaacgccttccagatggcctcactagaagaggagatatcaatctgctaatgttgggtgaccctggcacagccaaatcccaactgttgaaattcgtggagaagtgtagtcctatcggggtctacacatcagggaagggctcatctgctgctggtcttactgcctccgttatgcgagacccatcgagtagaaattttatcatggagggaggtgccatggtccttgcagatggcggagttgtctgtatcgatgagttcgacaagcaccgggaggctgcacaagcacccttgtgccattggctgcctggagtgtag

SEQ ID NO: 16007 - DNA, 1788 bp, synthetic construct
  misc_feature 1..1788: note = Description of Artificial Sequence: Synthetic coding sequence
  source 1..1788: mol_type = other DNA
atgttctatttccgcggctgcgggcgctgggttgcggtttcctttacaaagcaacagttccctctggctcggctgagctcagacagtgcagctccacggacaccacattttgatgttatcgttataggtggtgggcatgctggtacagaggccgcgacagcagcagccaggtgtggaagcagaactttgcttctaactcaccgggtggacactataggacagatgagctgcaacccaagcttcggagggattggcaagggacacttgatgcgggaagtagacgcccttgatggcctgtgctctaggatttgtgaccagtccggcgtccattataaggtgctcaatcgcaggaaaggtccggccgtctggggcctgagggctcagattgatcggaaactttacaaacagaacatgcagaaggagatcttaaatacccctctgcttactgtgcaggaaggagccgtggaggacctgattctaactgagccagagcccgagcacactggtaagtgcagggtctcgggtgtggtgcttccagaggaccaactaccatgttatctcactcataccaatccccgagttgatgaaattgttctgaagaacttgcacctcaactctcatgtgaaggaaacgaccaggggacctcggtactgcccctcaatcgagagcaaggtgctgaggtttccgaacaggctgcaccaggtgtggctagaaccggaggggatggactctgatctgatttacccacagggattaagtatgacgcttcctgccgagctgcaggaaaaaatgattacctgcatacgtgggctcgagaaggccaaggtaatccaaccaggatatggtgtccagtacgattatctggatccgagacagattactcctagcctagaaacccacttagtccagcgattattcttcgctggccagattaatggaactactggctacgaggaggccgcggcccaaggcgtgatcgctggcatcaatgctagtctgcgagtgtctaggaagccgccttttgtggtcagccggactgagggctacatcggtgttctgatagatgacctcactaccttaggtacctctgagccttacaggatgttcacgtcgcgcgtggaattccggctgtcgctgaggccagacaacgccgactctcgactgactttgagaggctataaagatgcgggctgtgtgtcacaacagcgttatgagcgggcctgctggatgaaatcatctctcgaagaggggatttccgttttaaaatccatcgaatttctcagttccaaatggaaaaaactaattcccgaggcaagtatttcaacttctcgctcactgcctgtccgggccttagatgtgttgaagtatgaggaagtggacatggacagcctcgctaaagctgtcccagaacccctgaaaaaatacaccaaatgccgcgaactggcagagagattaaaaattgaggccacatacgagagcgttctttttcatcagctgcaggaaattaaaggcgtgcaacaggatgaggcgctgcagcttcccaaggaccttgactacctaacaattagggacgtgtctctgagccacgaagtccgggagaagctccacttctcccgccctcagacaataggcgccgcttcgagaattcccggagtcacccctgccgcgataatcaacttgctacgttttgtgaagacaactcaacgtagacaatctgccatgaacgagagttctaagaccgaccaatacctgtgtgatgccgatagactccaggagagagagttgtag

SEQ ID NO: 16008 - DNA, 2154 bp, synthetic construct
  misc_feature 1..2154: note = Description of Artificial Sequence: Synthetic coding sequence
  source 1..2154: mol_type = other DNA
atgttctatttcagaggatgtggaaggtgggttgcggtgagctttaccaagcagcagttccctcttgcccgcctgtcttccgactctgcagctccgcgcacccctcattttgatgtgattgtgattggcggagggcacgccggcacagaggctgccactgctgccgcccgttgtggaagcagaacgcttttgttaacccacagggtggacaccattggtcaaatgagttgcaatccatcattcggtgggattgggaaaggccacttaatgcgtgaagtcgacgctctcgatggcctctgctccaggatttgcgatcagagcggcgttcactacaaagtactgaatcgacggaagggccctgcggtgtggggacttcgcgctcagatagatcgaaagctgtacaaacaaaatatgcagaaagaaatccttaacacaccgctactaacagtgcaagaaggtgctgtggaagatttgattctaactgagccagaacccgaacacaccggaaagtgcagggtgtctggcgtggtgctggtggatggctcaacagtgtatgcggaatctgtcatcctgaccacaggaactttcctgaggggcatgattgtgatcggcctggaaacccaccccgcaggcagactaggcgatcagccttccattggcctggcacaaacgctcgaaaagctgggatttgtagtcggccggctgaagacgggaacaccacctcgaatagcaaaggaatcaatcaattttagcatcctgaacaagcatattcccgacaatccgagcatccccttttcctttactaatgaaacagtgtggatcaaacctgaggatcaactgccatgttatttgacccacactaatccgagagtcgacgagatcgtgttgaaaaatctgcaccttaactctcacgtgaaagagaccactcgcggccccagatattgcccaagcatcgaatccaaagtgttgcgattccccaataggctgcatcaggtgtggctggaacctgagggtatggactctgatctgatttacccacaaggactgagtatgacactgcccgccgaattacaggaaaagatgatcacatgtatccgcggattggagaaggccaaggtaatccagcccgacggtgtcttgctcctgctgccgcgcatggagtgtaacggagccatatctgcacaccacaacctgcccttacctgggtatggcgtgcagtacgactacctcgatccaaggcagataaccccatctctagagacccacctcgtgcaaagattgttctttgcaggtcagattaatggcaccactggctacgaagaggctgcggcgcagggggtgattgccggcatcaatgcgtccctgagagtctctaggaagccaccgttcgtggtgagcagaacggaaggatacataggtgttttaatcgacgacttgacaacactcggaacttcggagccctataggatgtttaccagtcgggttgaattccggttaagtctacggccagataatgcagattctcgcctgaccctcaggggatacaaggatgctggctgtgtttctcagcagagatatgaaagggcctgttggatgaaatcgagtctggaagagggcatctccgtgctgaaatctattgagttcctatcatcgaaatggaagaagctgatccctgaagcttccatatccacatctaggagtttaccggttagagctctggatgttctaaagtatgaggaagtagatatggatagcttggcaaaggcagttccagagcccctcaagaagtacacaaaatgtcgagaactggctgaaagactcaaaatcgaggctacgtatgagtcagtgctctttcatcagctgcaggagataaagggggtgcagcaagacgaagccttgcaactgcctaaggaccttgattacctcaccatacgcgacgtatccctcagccacgaggttagagaaaagctgcacttttcccggccccaaaccatcggagcagcttcccggattcccggcgtcacacctgcggccatcataaacttactgaggtttgtgaagacaacacagcggagacaatctgcaatgaacgagagctcaaaaaccgatcagtacctctgtgacgccgataggctgcaggagcgggaattgtag

SEQ ID NO: 16009 - DNA, 1932 bp, synthetic construct
  misc_feature 1..1932: note = Description of Artificial Sequence: Synthetic coding sequence
  source 1..1932: mol_type = other DNA
atgtcctgtaatccttctttcggggggattggcaaaggccacctgatgagggaagtggatgcactcgacggcctgtgttcgcgcatatgtgatcaaagtggagtccactataaagtcctgaacaggaggaaaggccccgccgtttggggactcagagcccaaattgatcgaaagctctacaagcagaatatgcaaaaggaaattctgaatactcccctccttaccgtgcaagagggagctgtcgaggacctgatactcaccgagccggagcccgagcatacaggcaaatgccgggtatcaggcgttgtcctggttgacggtagcaccgtgtacgccgagtccgtcatccttactaccggaacttttctcagaggaatgattgtgatcggccttgaaactcaccccgcggggcgcctcggcgatcagcccagcattggacttgctcagacgcttgagaaacttgggttcgttgttgggcgcctaaagactggaacacctccccgcatagctaaagagtcgatcaacttctctattctgaacaagcacattccggataatccatccattcccttcagctttacaaacgaaacagtttggataaaacctgaggatcagctcccttgctacctcacacataccaacccaagagttgatgaaatagtgctaaaaaacctccacctgaatagtcatgtcaaagagacaacccggggtccgcggtattgtccatccatcgagagtaaagtgctgcgttttcctaatcgacttcaccaggtgtggctggagcctgaagggatggactccgatctgatttaccctcaaggactgagtatgacactccctgctgaactgcaggaaaagatgatcacgtgcattagaggtttggaaaaggcaaaggtcatacagccagatggcgtgctgcttctgttgcctaggatggaatgtaacggcgcaatcagcgcacatcacaatctgccactcccagggtatggtgtgcagtatgattatctggatccccgccagatcactccttcactggagactcacctggtgcagaggctgtttttcgccggccaaatcaacggcacaactgggtatgaggaagctgcagcacagggcgtaatagcgggaataaacgcgtccctgcgcgtctcccgaaagcctcctttcgtcgtgagccggacagagggatacatcggcgttctgatagacgatttgacgacactcggcacatccgagccttataggatgttcacctctagggtggagtttagactgagcctgagaccggacaatgctgactctcgactgaccctgagagggtataaggacgcagggtgcgtgagccagcagcggtatgaaagggcatgttggatgaaatcatcactggaagaggggatcagcgttctgaagtctattgaatttttaagttcaaagtggaagaaactgattcccgaggcctcaatctccactagcaggagtctcccagtgcgagcacttgatgtgctgaaatatgaggaggtcgacatggacagtcttgctaaagccgtcccagagcccctcaagaagtataccaagtgtcgagaattggccgaaagactcaagattgaggccacatacgaaagcgtactgtttcatcagctacaagagataaaaggggtgcaacaggacgaagctttgcagttgccgaaggatcttgactacctcaccatacgggatgtatcactttctcacgaggtccgcgaaaagctgcactttagtcggcctcagacgattggagcagccagccgaatcccaggtgtcactccagccgcaattataaatctgctgcggttcgtgaaaacaacccaaagaagacaaagcgctatgaacgaaagctccaaaaccgatcagtacctatgcgacgcagaccggcttcaggaacgcgaactgtag

SEQ ID NO: 16010 - DNA, 2199 bp, synthetic construct
  misc_feature 1..2199: note = Description of Artificial Sequence: Synthetic coding sequence
  source 1..2199: mol_type = other DNA
atgttttacttcaggggatgcggcagatgggttgcagtgagcttcactaaacagcagtttcctttagcacgactgagcagcgattctgccgctccccggacgcctcactttgatgtgatcgtgattggggggggacacgcaggaacggaagcagccaccgctgcagccaggtgtggctcaaggaccctattattaacccaccgagtcgatactataggccaaatgagctgtaacccctctttcggtgggattggcaaaggtcacctgatgagagaggtggacgcactggatggcctttgttcccgcatctgcgatcaaagcggagtgcattacaaagttctgaacagacgcaaaggcccggctgtttggggcctcagggcacaaatagatcggaaactctataaacagaacatgcaaaaagaaatattgaacacgcctctgctcactgtccaagagggggctgtggaagatctgattctgacagagcccgagccagaacacaccggaaagtgtagagtgtccggcgtggtcttagtggatggatcaacagtgtatgccgagtcagtaatactaaccacaggcacgttcctccgcggcatgattgtcatcgggcttgagactcaccctgctggacgtctgggagatcaacccagtattggactcgcccagactctggaaaagctcggttttgtcgtcggcagactgaaaaccggaacacccccccgtattgcgaaggagtcaatcaatttctccatactaaataaacatatcccggataatccgagcattcccttttcgttcacaaatgagacagtgtggattaagcccgaggaccagctgccttgttatcttactcacaccaatccccgagtcgacgagatcgtcctgaaaaatctgcacctaaacagccatgtgaaggagaccacacgaggaccccggtactgtccgagtatcgagtccaaggtcttaaggttcccaaatcggctgcaccaagtgtggctggaacctgaaggtatggactccgacctcatttatccccagggtctctcgatgactctcccggctgaactccaggaaaagatgatcacctgcatcaggggattggagaaggctaaagtgattcagcccgggtatggggtgcaatatgattatcttgacccacgtcagatcacccctagcctcgaaacccacctggtccagaggctgttcttcgctggccaaataaatggtactacaggctatgaggaggctgccgcacagactgagtgttgttcggtggcccgattggagtgttccgatatgatctcccagctgcaagcaatcttactccctcaaccatccctggtagccggcactgccggaatgcatcacaatacccagggagtcatcgctgggattaacgcttcactgcgcgttagccgcaagcccccgtttgtggtctcacgaacagaagggtatatcggtgtgctcatcgacgatctgactacactcgggacatccgagccataccggatgttcacatcccgggtggagtttcgattaagtctgagaccagataatgctgactccaggttgaccctgagaggctacaaggatgccggctgcgtttcccagcagagatatgaacgcgcttgctggatgaagagctcgttggaagaggggattagtgttctgaaatccatagagttcctgagtagtaaatggaaaaagcttatccctgaagcctccatatcaacatccagaagtctgcctgtcagagctctggatgttcttaaatatgaggaagtcgacatggacagtttggccaaggctgtaccagagcccctgaagaagtataccaagtgtcgagaattggccgaacggctgaagatcgaggctacttacgaatccgtcctatttcatcagctacaagaaatcaagggcgtgcagcaggacgaggcactgcagttgccgaaagatttggattacctgacaatcagagacgtatctctgagtcacgaagtgcgagagaaactgcatttttcccgcccccaaactataggtgccgccagccgcatcccaggtgtgacacccgctgctataatcaatctgctgaggtttgtcaagactactcagaggcgccagtctgctatgaacgagagttctaagacagaccagtacctgtgtgacgcagatagattacaggagagggagctttag

SEQ ID NO: 16011 - DNA, 2079 bp, synthetic construct
  misc_feature 1..2079: note = Description of Artificial Sequence: Synthetic coding sequence
  source 1..2079: mol_type = other DNA
atgttttattttagaggctgcggcaggtgggtagctgtgagtttcacaaagcagcagttcccgttggcccggctttcaagcgattccgccgcacctaggaccccgcactttgacgttatcgtgattggagggggtcacgcaggcactgaggctgcgaccgcggcagcaaggtgtggaagccgtaccctcctcctgactcatagggtcgacaccatcggccagatgtcatgtaatcctagcttcggcggaatcggcaaaggccatcttatgcgggaggtggatgcattggatggattgtgttctagaatctgcgaccagagcggagtgcattacaaagtcttgaaccgtagaaagggccctgccgtgtggggtctgcgcgctcagatcgaccgcaaattgtacaaacagaacatgcaaaaagagatcttaaatacccccttgctgaccgtccaggagggggccgtggaggatctgatcctcacagagcccgagccagagcatacagggaagtgcagagtctcaggcgtcgtgctcgtggacggcagcacagtgtacgccgaaagcgtgattttaaccactggtacatttctgcgtgggatgattgtgattggcctagaaactcaccctgcaggacgactgggtgatcagccttcaataggactcgcacagactttggagaaactaggattcgtcgtgggcaggcttaagactgggaccccaccccgaattgccaaggagagcattaatttctccatactcaacaagcatatccctgacaacccatccattccgttttcctttacaaatgaaacagtctggattaagcctgaggaccagttgccatgctacttgacacacaccaatccccgagtggacgaaatcgtgttaaaaaatctccacctgaacagtcacgtgaaggagacgacccgtggcccgaggtactgtccaagcattgagagcaaggtactgagattcccgaatcggttgcaccaggtttggctagagcccgaggggatggattcggacctcatataccctcaaggcctctccatgactttgcccgccgagctccaggaaaaaatgatcacctgtatacggggtctggaaaaggcaaaggtgatacaacccggttacggcgtacagtatgactacctggatccaaggcagattactccctctctggagacacatctggtgcagaggctcttctttgccggtcagatcaacggcactacaggatacgaagaggccgccgcccagggtgtgattgccggcataaatgcctctctgagggtcagtcgaaaaccgccctttgtagtttcccgcaccgaagggtacatcggcgtgctgatagacgaccttactaccctgggcaccagtgagccatacaggatgttcacttctagggtggagttcagacttagcctgcggcccgacaacgccgactcaagacttactctgagggggtataaagacgcaggatgcgtaagccaacagcggtacgaaagagcttgctggatgaagagcagtctggaagagggcatctcagtgttgaagtccatcgagtttctcagttccaaatggaagaagctgatccctgaagcaagcattagcacctctcgatcattgccggtccgcgcccttgatgttctgaagtacgaagaggttgatatggacagtctggccaaagctgttcccgagccattgaaaaagtacaccaagtgtcgggagttggccgaaagactcaaaatagaggctacctatgaatcggtgcttttccaccagctgcaggaaataaaaggagtacaacaggatgaagcgctgcagctccctaaggatctagactatctaaccatccgagatgtgagcctgtctcacgaggtcagggagaaactacacttttctaggccgcagaccattggcgccgcctccaggatcccaggtgttactcccgccgctataatcaaccttctgcggttcgtgaagacaacacaaagacggcagagtgctatgaacgaatcgtcaaaaacagaccagtacctgtgtgacgcagaccgcttgcaggagcgggaactgtag

SEQ ID NO: 16012 - DNA, 381 bp, synthetic construct
  misc_feature 1..381: note = Description of Artificial Sequence: Synthetic coding sequence
  source 1..381: mol_type = other DNA
atgtcaatcggggttcctatcaaagtacttcacgaggccgagggccacattgtgacttgtgagaccaatacaggggaagtgtatcgaggcaagctgattgaggcggaggataatatgaattgccagatgagtaatatcactgttacgtaccgcgacggtagggtggcccaactggagcaggtctatattcggggatctaaaattcgattccttatactgcccgacatgctcaagaatgcccccatgctcaagtctatgaaaaacaagaaccagggctcaggggccggcaggggtaaagccgctatactaaaggctcaggtggcggctcggggcagaggacgaggtatgggtagaggcaatatcttccagaagagacggtag

SEQ ID NO: 16013 - DNA, 1083 bp, synthetic construct
  misc_feature 1..1083: note = Description of Artificial Sequence: Synthetic coding sequence
  source 1..1083: mol_type = other DNA
atggccgctgccgcagcagccggcgctggtcccgaaatggttcgcgggcaggtgtttgatgttggaccaaggtacactaatctctcatatataggagagggagcttacgggatggtctgttcagcatacgacaacgtgaacaaggtgagagtcgccataaagaaaatctctccctttgagcaccagacatactgccagcgcaccctgagggagataaagatactcctccggttccggcacgagaacattatcggtattaacgacataataagggctcctaccattgaacagatgaaggatgtgtacatcgtgcaggatctcatggagactgatctttacaagctactaaaaacacagcatctcagtaacgatcacatctgctacttcctgtatcagatactgagggggctgaagtacattcactctgccaacgtgttacatcgagacctgaaaccaagtaatctacttctcaacaccacctgcgatttaaaaatttgtgactttgggctcgcccgagtggccgatcctgaccacgatcacacaggattcctgacagagtatgtggctactaggtggtacagggcgccagagatcatgctgaatagtaagggttacaccaagtcaatagatatatggtccgttgggtgtatcttggcagaaatgctctcaaacaggcctatcttccccggcaagcactatctggaccagttaaatcatatcctcggcatcctggggagccccagccaagaggatctgaattgtattatcaacctgaaagcgagaaactacctgctctctctaccccacaagaacaaagtaccctggaaccgcttatttcccaacgcagacagcaaggctctggacctactggataaaatgctgacatttaacccccataaacgaattgaagtcgagcaagctctggcccacccctatctcgagcagtattatgatccttctgacgaacctatagctgaggccccctttaaattcgatatggaattagacgatctgcccaaagagaaactaaaagagcttatctttgaagagaccgcccgattccagcctgggtatagaagctag

SEQ ID NO: 16014 - DNA, 1047 bp, synthetic construct
  misc_feature 1..1047: note = Description of Artificial Sequence: Synthetic coding sequence
  source 1..1047: mol_type = other DNA
atggttcgaggacaggtctttgacgtggggcctaggtacaccaacttgtcctacattggtgagggcgcctacggaatggtatgctccgcttacgacaatgtgaataaagtcagggtagctataaagaagattagcccgtttgagcaccagacgtactgccaacgcacattgagagagataaagatacttctgagatttagacacgagaacatcattggaataaacgatatcatcagggcccccaccatagagcagatgaaggatgtatatattgtccaagatttgatggaaaccgatttatataagttgctaaagactcagcacctctcgaatgaccacatctgctacttcctctatcaaatcctccgcggattaaagtatatacactccgccaatgtgctacacagggacctcaagccctccaacttgttactcaatacgacatgtgaccttaagatctgtgacttcggactggctcgcgtggctgatccagaccatgaccacaccggcttcctgactgagtacgtggcaacacgatggtacagggctcctgaaataatgttaaacagcaaagggtacacgaaatcaatcgacatctggtctgtcggttgtattctggctgagatgctcagtaatagaccaatttttcccggaaagcattaccttgaccagcttaaccatattctcggcattctaggatcaccatcgcaggaggacctcaactgcatcattaaccttaaagctaggaactacctactctctttaccccacaagaataaagtgccctggaaccggttgttccccaatgccgattccaaggcactcgacttattagataagatgctaacattcaatccacacaagaggatcgaagtcgagcaggctctcgcgcacccctaccttgaacaatattacgacccctccgatgagccaatagccgaagctccgttcaagtttgacatggagctagacgatctccctaaagaaaagctcaaagagctgatctttgaggagaccgcgcggtttcagcccggttatcgtagttag

SEQ ID NO: 16015 - DNA, 951 bp, synthetic construct
  misc_feature 1..951: note = Description of Artificial Sequence: Synthetic coding sequence
  source 1..951: mol_type = other DNA
atggcagccgctgcagcggcgggagcagggcccgagatggtgcgcggacaggtctttgatgtgggcccccgatacacaaatcttagctacattggagagggcgcgtacggcatggtgtgctctgcctacgacaacgtgaataaagtaagagtggccataaagaagatcagtcccttcgaacaccaaacctactgtcagagaacacttagggagataaagatactcctcaggttccggcacgagaatatcattggcatcaacgatattatcagggcgcccacaattgagcagatgaaagatgtgtatattgtccaggatcttatggagacagatctgtacaaactcctgaagacgcagcaccttagtaacgaccatatttgctactttctttaccaaatcttacggggactgaagtacattcattccgctaacgttctgcacagagatctgaagccatcgaatctcctgctgaataccacctgcgatctaaaaatttgcgattttggcctggcccgtgtcgctgaccccgaccacgaccacaccggattcctgaccgagtatgtagctaccagatggtatcgcgcacccgaaattatgctcaatagcaagggatatactaaatcaattgacatttggagtgtgggctgcatacttgcggagatgctgtcaaatcggcccatcttcccagggaagcattatctcgatcaactcaatcacatcctggccctggatctgttggacaagatgctcacgttcaacccacacaaaaggattgaggttgaacaagctctcgcccacccatatttagaacagtattatgacccttccgacgaaccaatcgccgaagcaccattcaagttcgacatggaacttgatgatctgccgaaagaaaagctcaaggaactgatatttgaggaaaccgctcgcttccagcctggctatcgcagctag

SEQ ID NO: 16016 - DNA, 1095 bp, synthetic construct
  misc_feature 1..1095: note = Description of Artificial Sequence: Synthetic coding sequence
  source 1..1095: mol_type = other DNA
atgagcggaccaagggcgggattttacagacaggaactgaacaagacagtgtgggaggtgccccagcgtctgcaaggtctcaggccggtagggtctggagcatatggctctgtgtgttcagcttacgacgctcggctcaggcaaaaggtagccgtgaagaagctgagcagaccatttcagagtctgatacacgctagacgtacttatcgcgaactgcgtctcctgaagcacctcaagcacgagaatgttatcggcctcctagacgtgtttaccccagcgacctccattgaagacttctccgaggtttacttagtcacaacactgatgggcgcggatctaaacaacattgttaaatgtcaggcactgtctgatgaacacgtacagttcctggtttatcagcttctgcgtggtttgaaatatatccatagtgccggcatcattcatagagacctgaagccgagcaacgttgcagttaatgaggactgcgagttacgcatcctggactttggcctcgctcggcaggcggacgaggaaatgactggctacgttgccacacggtggtatcgcgccccagagatcatgctgaactggatgcactataaccaaacagtggatatttggagcgttggttgtatcatggccgaattactgcaagggaaggccctgtttccaggatccgactatatcgaccagctgaagagaattatggaagtcgtcggtaccccttcccccgaagtgctggccaaaatatcttctgaacacgcccgcacttatattcaatctctgccgccgatgccccagaaggacctgtccagtattttcaggggggcaaatccacttgcaatagacttgctcgggcgtatgctagtgttggactcagatcagagggtttctgccgcagaagcccttgcccatgcctatttctcccagtaccatgatcccgaagatgaaccagaggcagaaccgtatgatgaatcagtggaagccaaggagcgcacactggaggaatggaaggagctaacatatcaagaagtacttagctttaagccacccgagccacccaaaccacccggctctttagaaatcgaacagtag

SEQ ID NO: 16017 - DNA, 1095 bp, synthetic construct
  misc_feature 1..1095: note = Description of Artificial Sequence: Synthetic coding sequence
  source 1..1095: mol_type = other DNA
atgagcggtccacgcgctggcttctacaggcaggagctaaataagactgtgtgggaagtgccgcaacgcctgcagggtctcaggccagtgggcagcggggcttacggcagcgtttgtagcgcctatgacgcacggcttagacagaaagttgcggtgaagaagctgtctcgaccattccagtccctcatccacgcacggcggacataccgggaattgaggctgctgaaacatctgaaacacgagaatgttattggattgctggacgtgtttacacctgcaacttcaatcgaggacttcagcgaagtgtatcttgtgaccacactgatgggagcagacctgaacaatatcgtgaagtgtcaggcccttagtgacgagcatgtgcagtttctggtgtatcagcttcttcggggactgaaatacatccattctgctggaatcattcaccgtgacctaaagccctctaatgtcgcagtgaacgaagattgcgagcttagaattttggatttcggtcttgccaggcaagccgacgaggaaatgactggttatgtagctactaggtggtatagggcccctgagatcatgctgaactggatgcactacaatcaaaccgtggacatttggtccgtgggatgtattatggccgagctgctgcaaggcaaagctctgtttccaggctccgactatattgaccagctgaaacgcattatggaagtagtgggaacacctagccctgaggtgctggcgaaaatatccagcgaacacgcacgcacctatatccagtctttaccacctatgccacagaaggatctttctagtatttttcggggtgccaacccccttgccatagacctcctgggcaggatgctcgtcttggattctgaccagagggtgtccgccgcggaggccctggcacacgcctatttctcacagtaccatgatccagaggacgagcctgaagccgagccctatgatgagtctgtcgaggccaaagagaggaccttagaggagtggaaagaactgacctatcaggaagttctgtcctttaaaccgcctgagccccctaaaccaccaggaagcctggagattgagcaatag

SEQ ID NO: 16018 - DNA, 642 bp, synthetic construct
  misc_feature 1..642: note = Description of Artificial Sequence: Synthetic coding sequence
  source 1..642: mol_type = other DNA
atgggggccgacctcaacaacattgttaagtgccaagccctgtcagacgagcatgtccagttcctcgtttaccaactgctgagaggattgaagtacatccattcggcaggaattatccacagagatctgaagccatccaatgtggcagtgaacgaggattgcgaactccgtatcctggatttcggtctggcgcgccaagcagacgaggaaatgacaggctatgtggccacccggtggtatagggccccggagatcatgcttaattggatgcactacaatcaaaccggcgccggcggcaggccgtggggggatgaagggcaaggcccccgattagctctggattggctttgcatgcctgggctgagaggccaggctcgatctccgcgaatgtgggatccccactccaaagtagcactgcagcgccccctagagcacgacgggtgttggccgcctttagcggttcagctttggacaagtccttgtctgggtgggctcgggatggcagaggagggagtgtgtccttcatgggggttagacgtgactgtcggccttctggaggagggtagaggagtgggaaccctaatggaagtgcctagcccttctcatagcggctacctggttagaggcttacaccatggttag

SEQ ID NO: 16019 - DNA, 1149 bp, synthetic construct
  misc_feature 1..1149: note = Description of Artificial Sequence: Synthetic coding sequence
  source 1..1149: mol_type = other DNA
atggactttgggttagcccttttattggctggattattaggcctgcttctgggccagtcactgcaagtgaagccgctgcaggtagagcctcccgaacctgtagttgcagtcgcactcggcgcctcacgtcaactgacatgccggctggcctgcgcagaccggggagcaagtgtccagtggcgcggactggacaccagcctgggtgcagtccagtccgatacaggccgaagcgtgctaacagtgaggaatgcatcacttagcgcggctgggaccagagtatgcgtgggctcttgcgggggccggactttccaacacaccgtccaattacttgtgtatgccttcccagaccagctaacggtgtccccagcggccttggtccccggggatcccgaggtcgcatgcacagcccacaaagtgactcccgtcgaccctaacgctttatctttttcattgctggtcggcggacaggaactcgagggcgcacaggccctgggaccggaagtgcaagaagaggaggaagaaccacagggggacgaagatgtgcttttcagagtgacagaacgttggagacttcccccactagggacaccagtcccgcccgccctctattgtcaggccacgatgagactgccgggattggagctctcccacaggcaagctataccggtgctgcacagcccaacctcccctgagccccccgacacaacctcacccgaatcccccgacaccacctctcccgagtctcctgatacgacatcccaagaaccccctgataccaccagtccagagccaccagataagacatccccagaacctgccccacagcaagggagcacacacaccccgcgctctccaggcagcacgaggactcggcgccctgagattagccaggcagggccaacccagggtgaagtcattccaaccggaagctccaaaccagcaggggatcaactgcctgctgccctctggacctctagtgccgtactgggtttactgctgctcgcactgccaacatatcacctttggaagcgctgtaggcatttagccgaggacgatacccatccacctgctagcctacgactgctgccacaggtgtctgcctgggctggcttgcgggggactggacaggttgggattagtccatcatag

SEQ ID NO: 16020 - DNA, 1074 bp, synthetic construct
  misc_feature 1..1074: note = Description of Artificial Sequence: Synthetic coding sequence
  source 1..1074: mol_type = other DNA
atgtcttcccccccccccgctagatccggcttttatcgacaggaagtgacaaagacagcctgggaggttcgggctgtgtatagagatctgcagcctgtaggctccggggcctacggcgcagtgtgctccgcggtggatggacggaccggggccaaggtggccattaagaagctgtatcggccattccagagcgagctgttcgccaagcgggcgtatcgggagctgaggttgttgaagcacatgaggcatgaaaacgtcatcgggctgctcgacgtgtttacaccagatgagactctcgacgatttcaccgacttttatctggtgatgcctttcatgggcacagacttgggcaagctgatgaagcatgagaagctcggcgaggaccggatccagtttcttgtgtatcagatgctaaaagggttacgtgatttgaaaccgggcaacctggcggtcaatgaggactgcgagttaaagatcttggattttggtttggcccggcaggccgatagtgagatgaccggctatgtagttactaggtggtacagagccccagaggtgatcctgaactggatgaggtacacacaaaccgtggacatctggagcgtcggctgcatcatggctgagatgatcaccgggaaaacactgttcaaggggtctgatcatctagaccagttaaaggagatcatgaaggttactggtaccccccccgccgagtttgtgcaacgcctccagtctgacgaggccaagaattatatgaaaggcctcccagaactcgaaaagaaagacttcgccagcatcctaaccaacgcttcccctttggctgtcaacctgttggaaaagatgctggtactggacgcggagcaacgtgtaaccgccggcgaagcgttggctcacccgtatttcgagtccttgcatgacacagaggatgaacctcaagtccagaagtatgacgactcttttgatgatgtcgatagaactctcgacgagtggaagcgagtaacgtacaaggaagtcttatctttcaagcccccaagacaactgggagcccgtgtgtctaaggaaacaccactgtag

SEQ ID NO: 16021 - DNA, 837 bp, synthetic construct
  misc_feature 1..837: note = Description of Artificial Sequence: Synthetic coding sequence
  source 1..837: mol_type = other DNA
atggccctgctgcctgtgctgtttctggtgactgttctactgcccagtctccccgcagaaggaaaggaccctgctttcacagcccttctcactacccagctgcaagtccagcgggagatagtgaacaagcacaacgagctcaggaaggccgtgagtccaccagcctccaatatgctcaagatggaatggagtcgcgaagtcacaacgaatgcacaacggtgggccaataaatgtaccctgcagcactccgaccccgaggacaggaaaacatcaacccgatgtggcgaaaatctctacatgtcgagcgaccccacttcatggagtagtgctatacagtcatggtacgatgagattctggatttcgtgtacggcgtgggcccgaagtcacctaatgccgtggtcgggcattatacccagctagtgtggtatagtacataccaggtcggttgtggcatagcctactgtccaaatcaggattccttgaagtactactacgtgtgccaatactgccccgcaatgaaaacctatctcaataaacgagagggcattaacgtgtggaaatgtttcctccggttgcgacatttccaactgctacgcggggagcagttattaacattttccggaaataacatgaacaggaagaacaccccgtaccagcaaggtactccttgcgcaggatgtcctgacgactgtgacaaaggactctgtaccaactcctgccagtatcaggacctgctttccaactgcgactcactgaaaaatactgctggatgtgagcatgagttactgaaggaaaaatgcaaggccacttgcttgtgcgaaaacaagatctactag

SEQ ID NO: 16022 - DNA, 459 bp, synthetic construct
  misc_feature 1..459: note = Description of Artificial Sequence: Synthetic coding sequence
  source 1..459: mol_type = other DNA
atgcagcacgaaaacgtgatcgggctgctggacgtgtttacacctgccagttcactccgcaacttctacgacttctacctggtgatgccttttatgcaaactgatctccagaagatcatgggaatggaatttagtgaggaaaaaatacagtacttggtttatcagatgttgaaaggattgaaatatatacattctgccggagtggtccaccgggacttgaaacctggcaatctggcagtgaatgaggattgcgagctgaagatcctggatttcggattagcaaggcacgctgacgccgagatgaccggctatgtggtgactagatggtatcgggcccccgaggtcatcctgagttggatgcactacaatcagacgggacagatcttacaccccgtacctgccaccgacccacaggaagggttccatagcgccgtcccaaccggccagccacccggctag

SEQ ID NO: 16023 - DNA, 1068 bp, synthetic construct
  misc_feature 1..1068: note = Description of Artificial Sequence: Synthetic coding sequence
  source 1..1068: mol_type = other DNA
atgtccctcattcggaaaaagggcttctataagcaggacgtgaataaaactgcatgggaactacctaagacgtatgtgagcccaactcatgtaggctctggggcctatgggagcgtttgttccgccattgataagcgaagtggcgagaaggtggccatcaagaagcttagtaggccctttcagagtgaaattttcgcaaagagagcttacagggaactgctattactgaagcacatgcagcacgagaacgtcataggcctgctggatgttttcacacctgcgtcatcactaaggaacttttacgatttctacctagtgatgcccttcatgcaaaccgacctccagaaaatcatgggtatggagttcagtgaagaaaagatacaatatctagtgtatcaaatgctgaagggtctgaaggacctgaagcctggcaacctggctgtaaatgaggattgcgaactcaaaatccttgattttggtctggcacgacacgcagacgccgagatgacaggatacgtggttacaagatggtaccgcgccccagaagtgatcttgtcatggatgcactacaaccaaaccgtggatatatggagcgtcggatgcatcatggccgagatgcttacagggaaaacactgtttaaaggtaaggattatctggatcagcttactcagatcctgaaagttaccggcgttcccggtaccgaattcgtgcagaagctgaacgataaagcggcaaagagctatattcaatcccttccgcagacaccccggaaggattttactcagctgtttccacgcgctagcccccaggctgccgacctgcttgagaagatgctcgagctggacgttgacaagagactcaccgccgcccaagcgcttacccacccatttttcgaaccctttagggatcccgaagaggagacagaagcccaacagcccttcgatgactccctggaacacgaaaagctgaccgtggatgagtggaagcagcacatctataaggagattgtcaatttttctcctatcgcaaggaaggactctaggcggcgcagcgggatgaagttgtag

SEQ ID NO: 16024 - DNA, 774 bp, synthetic construct
  misc_feature 1..774: note = Description of Artificial Sequence: Synthetic coding sequence
  source 1..774: mol_type = other DNA
atgtcactgatcaggaagaaaggcttctacaaacaggatgtcaataagacagcatgggaattgcctaaaacctatgtaagtcctactcacgtgggctccggagcctatggaagcgtatgttccgcaatcgacaaaagatccggcgagaaagttgccatcaagaagctgtccagaccttttcaatctgagatctttgccaagagagcgtatcgagagctcctgcttctgaaacacatgcagcacgagaatgtgatcgggctcctagacgtattcacgcccgcttcatcgctgcgaaacttttacgatttttatttagtaatgccttttatgcagacagatctgcaaaagatcatgggcatggaattttccgaggagaagattcagtatcttgtgtaccagatgctgaagggactcaaatatattcacagcgctggggtggtgcatcgagacctgaagccaggcaacctggccgtgaatgaagattgtgagctgaagatattggactttggactggcccggcatgccgacgccgagatgactggatatgtagtcaccagatggtaccgagctcctgaggttatcctgagttggatgcactataatcagacaggccagattctacaccccgtcccggccactgatccccaggaaggctttcattcagccgtccctacgggtcaaccgccagggtgtgggcctgcgggcgaggatgcgggcgctcggcgaggacaggcccccgacggccgggctggccctcacccctccttgctgtag

SEQ ID NO: 16025 - DNA, 933 bp, synthetic construct
  misc_feature 1..933: note = Description of Artificial Sequence: Synthetic coding sequence
  source 1..933: mol_type = other DNA
atgtctctaatacggaaaaaggggttttacaagcaggacgtgaacaagactgcttgggagctgccaaaaacatacgtctcccctacacacgtagggtccggggcttacggctctgtgtgctcagccatcgataagaggtcaggcgagaaagttgcaataaagaagctgtccagaccctttcaaagcgaaatatttgctaagagggcctacagagaactcctgcttctgaagcatatgcagcatgaaaatgtgatcggcctattggatgtattcacacccgcctctagtcttcgtaatttttatgacttctatttagtgatgccttttatgcaaactgacctccaaaaaatcatgggtatggagttttcggaggagaagattcagtatcttgtataccagatgctgaagggtctgaaatacattcactccgcgggagtggtccaccgcgatcttaaaccgggaaatcttgcagtcaatgaagactgtgagctaaagattctcgacttcggccttgctcggcacgccgacgcagagatgaccggatatgtcgtgacccgctggtatcgagcccctgaggttatcctgagctggatgcattacaaccaaaccgtggatatttggagcgtaggctgtataatggcagaaatgctgactgggaagactcttttcaaaggaaaagattatcttttggaaaagatgttggagctggacgtggataagcggctaactgctgcgcaagcactgactcatccctttttcgagcccttcagagaccctgaggaagaaactgaagcgcagcagccattcgatgattctctggagcatgagaagctcactgtggacgaatggaaacagcatatttataaagaaatagtcaatttctcccctatcgcgcgcaaggattccaggcgcaggtctgggatgaaactttag

SEQ ID NO: 16026 - DNA, 1629 bp, synthetic construct
  misc_feature 1..1629: note = Description of Artificial Sequence: Synthetic coding sequence
  source 1..1629: mol_type = other DNA
atgccactgcgggatgaaaccctgagggaggtgtgggcgtccgatagcggacatgaagaagaaagcttatcaccagaagcccccagacgccccaagcagaggcccgctccagcgcagcgcttgagaaaaaagcggacagaagcacccgagtccccctgtccaacaggcagcaaaccgagaaaacccggggcgggtagaacaggcaggccgcgagaggaaccctccccagatccggcccaagcccgtgccccacaaactgtctacgcaaggttcctcagggatccagaggccaaaaagagagaccccagggagacatttctggtggcccgggcacctgatgcggaggacgaggaggaggaagaggaggaggatgaggaggacgaggaagaggaggccgaggagaaaaaggaaaaaatactgctgccacctaagaaaccactgcgagagaagtcatcagccgatctgaaggagaggagggccaaagcccaaggacccagaggggatctaggctctcctgatcctccaccaaaaccacttcgcgtccgtaacaaagaggcgcctgccggggaagggacaaagatgagaaagacaaagaagaagggcagtggcgaagcagacaaggatcctagcggctcccccgcctccgctagaaaatcacctgctgccatgtttctggtcggcgaaggctctccagataagaaagctctgaaaaaaaagggaacccccaagggagcacgcaaagaggaagaagaagaggaggaagctgcgacagtcattaagaaatcgaaccagaaaggcaaagccaagggaaaaggcaaaaaaaaggctaaagaggagagagcacccagtcctcctgtggaggtcgacgagcccagagaatttgtcctgagacccgctccccagggtcgcaccgtccgctgtagactgactcgcgataaaaagggcatggaccgcggcatgtacccatcttacttcctgcacttggacactgaaaagaaagtatttctgcttgctggtcgtaagagaaaaaggtcaaaaactgcaaactatctgatctccatcgacccaacaaacctctctagggggggcgaaaacttcatcggaaagctgcgttcgaatcttctgggtaaccgcttcacagtatttgacaacgggcagaatcctcagaggggatactctaccaatgttgcgagcctgcggcaagagctcgctgccgttatttacgaaaccaacgttctggggttccggggtccaaggagaatgactgtgatcattccaggtatgtcggctgagaatgagagggtgccaatcagacctagaaacgcatccgacggactcttagttagatggcagaataaaacattggagtctcttattgagctgcataacaaaccccccgtatggaacgatgacagtggtagttataccctgaacttccaagggcgtgtcactcaggcctccgtgaagaactttcagatagtccatgccgacgaccctgactacattgtactgcagtttggtcgagtcgcagaagacgcctttacattggactacaggtacccgctctgtgccctccaggcgttcgcaattgccctgagctcatttgatgggaagttagcatgtgagtag

SEQ ID NO: 16027 - DNA, 1083 bp, synthetic construct
  misc_feature 1..1083: note = Description of Artificial Sequence: Synthetic coding sequence
  source 1..1083: mol_type = other DNA
atgtcacaggaacggccaactttttatcgccaggagctgaataagacaatctgggaagtaccggagagataccagaatttatcaccagttggctccggtgcttacgggtcagtgtgtgctgctttcgacactaagactggcttgcgtgttgccgtcaagaaactcagtaggccgttccagagcattatccacgctaagcggacataccgagagctgaggctgctgaaacacatgaagcatgaaaatgtgattggcctattagacgtgtttacgccggcccgcagcctggaggagttcaacgatgtttaccttgttacccacctgatgggagccgacttgaataacatcgtgaagtgccagaaactcacagacgaccatgtgcaattcctgatctaccagatactgaggggcttaaaatatattcattctgctgatatcatccaccgggatttaaagccatcaaacctggctgtcaacgaagactgcgaactcaagatcctcgatttcggactggcacgacatactgatgatgaaatgaccggctatgtggcgacgcgttggtaccgggctcctgagattatgctcaattggatgcattacaaccagactgtcgatatttggagcgtcggttgtatcatggccgaacttctgacaggaagaacactcttcccgggcaccgatcatattgaccagctgaaattgattcttcgcctggttggtaccccaggcgctgaactattgaagaaaatctcttctgagagcgcgagaaattatattcagtccctcacacagatgccgaagatgaacttcgctaacgtgttcatcggcgcgaaccccctagccgtggacttactggaaaaaatgctagtacttgactcagacaagagaatcacagccgctcaagctctggcacatgcctactttgcgcagtaccatgatcccgacgacgagcccgtggcagatccttatgatcagtcattcgaatctagggacttgcttattgatgaatggaagagcctcacttacgacgaagtcatttcttttgttcctcctccactggaccaggaggaaatggaaagctag

SEQ ID NO: 16028 - DNA, 924 bp, synthetic construct
  misc_feature 1..924: note = Description of Artificial Sequence: Synthetic coding sequence
  source 1..924: mol_type = other DNA
atgtctcaggagaggcccaccttttaccggcaagaactgaacaagacgatctgggaagtcccagagcgttaccagaacttgagtcctgtgggatcgggcgcctatggcagcgtgtgcgctgcctttgacactaagacggggttaagggtagcagtcaagaaactgtcaagaccgttccagtccatcattcatgccaagagaacctacagagagctccgcctcctgaagcacatgaagcatgagaacgttatcggcctcctggatgtgttcacgccagcccgatccttagaggagtttaacgatgtgtacttggtaacacacctgatgggagccgatttgaacaatatcgtaaagtgccagaaactcactgacgatcatgtgcagtttttgatttatcaaatcttacgaggccttaagtatatccacagtgctgatatcatccatagagatctgaagcctagcaatctcgccgtaaatgaggactgtgaacttaaaattctggatttcggactggcacgtcatactgatgatgaaatgacggggtacgtggctacacgctggtaccgtgctcccgagatcatgcttaactggatgcactataaccaaacggtggacatctggtctgtggggtgtattatggctgagttactaacaggccggacccttttccccggcactgatcatatcgaccaacttaagctgatcctgaggctcgtgggaacccctggagcggaactgctcaagaaaataagttctgagtcacttagcacctgctggcggcggtgcctctattggacgcagatccgcgagctgcagcggccaaagcccctgcatatgccgacactgctgtcaacaaccatccttatgatgaaccagtggcctatcttaatgatcagccccctgaaggctgggacatccctctag

SEQ ID NO: 16029 - DNA, 852 bp, synthetic construct
  misc_feature 1..852: note = Description of Artificial Sequence: Synthetic coding sequence
  source 1..852: mol_type = other DNA
atgaagcacgagaacgtgattggactgttagacgttttcactccagctcgctcgttagaggaattcaacgacgtttatctggttacgcatctgatgggcgcggaccttaataacatcgttaagtgccagaaactgaccgacgatcatgtgcagttcctgatttaccaaatactccgtggactgaaatatattcattctgccgatataattcatcgtgatcttaagccaagcaatctagccgtcaacgaggattgcgaactgaagatcctggattttggcctcgcgagacataccgatgatgaaatgacggggtatgtagctactcggtggtaccgcgcacccgaaattatgctgaattggatgcattataaccagacggtggatatctggtccgtcgggtgtatcatggccgagctgctcaccgggagaactctgttcccggggacagatcacattgatcagttgaagttgattttaaggctggtcggaactcccggcgccgaactcttgaagaagatcagcagtgagtcagcccgcaattacattcaaagcttaacccagatgccgaagatgaattttgcaaacgtttttattggtgcaaatcccttagccgtggacctgcttgaaaagatgctcgtgctggattccgacaagcgcattactgcagcgcaggctcttgcacacgcttacttcgcccagtaccacgacccagatgacgagcccgtggcagatccgtatgaccaaagttttgagtctagagatttgttaatcgacgagtggaagagtctgacatatgacgaggttatcagctttgtccccccccccctcgaccaggaagagatggaatcttag

SEQ ID NO: 16030 - DNA, 1140 bp, synthetic construct
  misc_feature 1..1140: note = Description of Artificial Sequence: Synthetic coding sequence
  source 1..1140: mol_type = other DNA
atggccgccgccgccgcacagggaggtggcggaggagaaccaaggcggacagagggagtggggccaggtgtgcccggggaagtggagatggtcaaaggacagcctttcgatgtcggacctcggtacacacaactacaatatataggtgagggcgcttatggaatggtgtccagcgcatatgaccacgtacggaagactagagtggcgataaagaaaatcagtcccttcgagcaccagacctattgtcagcggactttgcgcgagatccagatcctcctgcggttccgccacgagaacgttattgggatcagggacatcctgcgggccagtaccctggaggccatgcgcgatgtctatatcgtccaggatttaatggagacagacttgtacaagctgctgaaaagccagcagctctccaacgatcatatctgttactttttgtatcaaattctgcgcggattgaagtacattcacagcgctaatgttctgcacagggacctcaagcccagtaacctgctcataaacaccacttgtgacctgaagatctgcgactttggactggctcggatcgctgatccagaacacgaccacactgggttcctcacagagtatgtggctacgagatggtaccgagcccctgaaattatgctaaatagtaagggctacaccaagtcaatcgatatatggagtgtcggatgtattcttgcggagatgctctcaaacaggcccattttcccaggcaagcactatcttgaccaactgaaccacattcttgggattctggggtccccatctcaagaagaccttaattgtattatcaatatgaaggctcgaaactacctgcaatccctgccaagcaagactaaggtggcctgggcaaagctcttccccaagtcagatagtaaggctctggatctgcttgaccgaatgctcacatttaaccccaataagagaattaccgtggaagaagcgctggcccatccatatcttgagcagtactatgatcccactgacgagcccgttgccgaagagccatttactttcgctatggagttagatgatttacctaaagagagactcaaggaattaatttttcaagagactgctcggtttcaaccaggcgtactggaggccccttag

SEQ ID NO: 16031 - DNA, 1008 bp, synthetic construct
  misc_feature 1..1008: note = Description of Artificial Sequence: Synthetic coding sequence
  source 1..1008: mol_type = other DNA
atggctgcagctgccgctcagggcggaggaggcggcgaaccgcgccggacagagggcgtgggtccgggagttccaggcgaagttgagatggtgaagggtcagccattcgacgtgggtccgagatatacccaacttcagtatatcggagagggagcctacggcatggtaagtagtgcctacgatcacgtgaggaaaacgcgcgtggccatcaagaagattagccctttcgagcatcagacttactgccagcgaacattgagagaaattcagatcttactgcggttccgccatgagaacgtgatcggcatcagagatattcttagggcctctaccctggaggcgatgcgagatgtttatatcgttcaggatttgatggagaccgacctttataaattgctcaagtcacagcagctgagtaacgatcatatctgctactttttataccagatcttgagaggcttgaagtacatccatagcgcaaatgtcctccaccgagatctcaaaccttctaatctgctcattaataccacgtgcgatctgaaaatctgcgattttgggttggccaggattgctgatcctgaacacgaccacacgggcttcttaactgaatacgtggcaacgcgatggtacagggcccccgagattatgctcaacagcaaggggtataccaaaagtatagatatctggtccgttgggtgcattttggccgaaatgctgtcaaataggccaatttttcccggtaagcactacctggatcagctgaatcacatcctcgctttagacctgcttgaccggatgctgactttcaatccaaacaagcgtatcactgtggaggaagcccttgcacacccgtaccttgagcagtactacgaccctacagatgagccagtggcagaggagcctttcacattcgcaatggaattggacgacctgccaaaagaacgcttgaaagagctgatatttcaggagactgcacggtttcagccgggtgtgctggaggccccctag

SEQ ID NO: 16032 - DNA, 936 bp, synthetic construct
  misc_feature 1..936: note = Description of Artificial Sequence: Synthetic coding sequence
  source 1..936: mol_type = other DNA
atggtgaaggggcagcccttcgatgtcggacccaggtacacccaactgcagtatattggcgaaggagcttatggaatggtcagttccgcatatgatcacgtcaggaaaacccgcgtcgctataaagaagatttcccccttcgagcatcagacatattgccagagaaccttaagagagattcaaatcctgctcaggtttcgacacgagaatgtgattggaatcagagacattctcagagcctcgaccctcgaagccatgagggatgtgtatatcgtgcaggatctgatggagaccgatctctataagctgctgaagagccaacagctgagtaacgaccacatctgctacttcctgtatcagatcctgcgaggcctgaaatacatccatagcgccaatgtactccaccgagatctgaagcctagcaatctgctgatcaacacaacttgtgatcttaaaggatacacaaagtccatcgacatttggagcgtgggatgtatactcgctgaaatgctttccaataggccaatcttccctggcaaacactatttggatcagctcaaccacatactcggcattctgggaagtccctctcaagaagatctaaactgtattataaatatgaaggccaggaactacctgcaatctctgccatccaagactaaagttgcctgggccaaattgttcccaaagagtgatagcaaagcactcgatctgctggaccgcatgctcacgtttaaccccaacaaacggatcacggttgaagaggctttggctcatccatacctggaacagtactatgaccctacagacgaaccagtggcagaggaaccttttacattcgccatggaactggacgatctgccaaaggaacgacttaaggaactgatattccaagagaccgcaagattccaacccggtgtcctcgaggctccctag

SEQ ID NO: 16033 - DNA, 1008 bp, synthetic construct
  misc_feature 1..1008: note = Description of Artificial Sequence: Synthetic coding sequence
  source 1..1008: mol_type = other DNA
atggctgcagcagcggcccagggtggtggcgggggagagcctcgaagaaccgaaggtgtgggccctggggttcctggcgaggtggagatggtaaaggggcagccttttgatgtaggacccaggtatacacagctgcagtacataggcgaaggcgcttatgggatggtgagttccgcttatgaccacgttcgaaaaacccgcgtcgcaatcaagaagattagcccttttgagcaccagacatactgtcaaaggaccctcagagaaatccagattttgctgcgattcaggcatgagaatgttatcggcatccgggacatcctgcgggcctctactttggaggctatgcgggacgtctatatcgtccaggacctgatggaaaccgacctctacaagctgctgaaatctcaacaactgtccaacgaccacatctgttacttcctataccagattctccgcggcctcaagtatatacatagcgcaaatgtactccacagggaccttaaacctagtaacctgcttatcaacaccacatgcgacctaaaaatttgcgacttcgggctggcccggattgcagatcctgagcacgaccatacaggattcctgactgaatatgtggctaccaggtggtatcgtgcccctgaaattatgttaaacagcaaagggtacaccaaaagtatcgacatctggtcagtggggtgcatcctggcagaaatgctgtctaaccggccgatctttccagggaagcactacctcgaccagctcaaccacattttagccctcgatttgctggaccgaatgctgacatttaaccctaacaagcgaattactgtggaggaagccttggcacacccttacctggaacagtattatgatcctactgacgagcccgtcgcggaggaacccttcacctttgccatggagctcgatgacctgcctaaagagagactgaaggagttgattttccaggaaacagctcgcttccagcctggcgtgctggaggctccctag

SEQ ID NO: 16034 - DNA, 1074 bp, synthetic construct
  misc_feature 1..1074: note = Description of Artificial Sequence: Synthetic coding sequence
  source 1..1074: mol_type = other DNA
atggccgccgccgctgctcagggaggtggaggaggagaaccccgccgtacagagggggtcgggcctggagtgccaggagaagtggagatggttaaaggacagccgttcgacgtcggcccccggtacacccagctccagtacatcggtgagggcgcatatggaatggtgagctcagcttatgaccatgtgcgaaagacaagagtggcaattaagaagatctcacccttcgagcatcagacatattgtcagcggacactgagagagattcaaatccttttgcgcttcagacatgagaacgtgattgggattcgagatattctgcgggctagcactctagaggcgatgcgggatgtctacatagtacaggatctcatggaaactgacttatacaagctacttaagagccagcagctgtccaatgatcacatctgttattttctgtatcagatactccgcggactaaaatacatccattctgccaatgttctccatcgcgacctgaagccatctaatttgctcatcaatactacatgcgatctgaagatctgcgacttcggactggctcgtatcgctgaccctgagcacgaccacacaggcttccttacagagtatgtcgctacgcgctggtatcgcgccccggagattatgctgaactctaaaggatataccaaatctatcgacatctggtccgtcgggtgtattctcgcagagatgctgagcaataggcccatttttcctggaaaacactacttggatcagctgaaccatattctgggtatcttgggcagcccctctcaggaggatttaaactgtattattaatatgaaggcacgcaattacttgcagtcgttgccatctaagacgaaagtggcttgggctaagttattcccaaagagcgatagtaaggctctagacttgctggacaggatgctcacttttaatcccaacaagagaattactgtggaagaggctctggcccacccctacttagagcagtattacgatccaaccgatgaggtgggccaaagtcccgctgccgtagggctgggagccggtgagcagggtggtacctag

SEQ ID NO: 16035 - DNA, 798 bp, synthetic construct
  misc_feature 1..798: note = Description of Artificial Sequence: Synthetic coding sequence
  source 1..798: mol_type = other DNA
atgcgtgatgtgtacatcgtgcaggatctgatggagacggacctgtataagttgcttaagagtcagcagctaagcaacgatcatatctgctacttcctttaccagattctgagaggcctgaaatatattcattcagccaatgtcctgcaccgggatctgaaaccatctaatctcctgatcaatacaacatgcgacctgaaaatctgtgattttggcctggctaggatcgccgaccccgaacatgaccataccggctttctgacagaatacgtcgcaacccgctggtatagagccccagaaattatgctcaatagtaaggggtatacaaaatcaatagatatttggtctgtggggtgcatcctggctgagatgcttagcaacagacccatattccctggcaaacactacctggaccaactgaaccacatactgggaatattaggctcaccttctcaagaagatctgaactgcattatcaatatgaaagcaaggaactacctccaatcattaccgtctaaaacaaaagttgcatgggcgaaactgttccccaaatctgactctaaagccctggatttgctcgaccgaatgctcacatttaatcccaacaagcgaatcacagtggaggaggccttggctcatccgtacctggaacaatactatgacccaactgatgagcctgtcgccgaggagccttttacattcgcgatggagctggacgatctgcctaaggagaggctgaaagaactcatcttccaggagacagctagattccaacccggtgttctggaggctccctag

SEQ ID NO: 16036 - DNA, 1284 bp, synthetic construct
  misc_feature 1..1284: note = Description of Artificial Sequence: Synthetic coding sequence
  source 1..1284: mol_type = other DNA
atgtcccgttccaaacgcgacaataacttctattccgtagaaatcggagacagcacctttaccgtactgaagcgctatcaaaacctgaagcctatcggatccggcgcccagggcatcgtgtgcgcagcatacgatgccattctcgaacgcaatgtggcaataaaaaagctgtctagacctttccagaaccagactcatgcaaagcgtgcctaccgagagctcgtattaatgaaatgcgtgaaccacaagaacattattgggctgctgaacgtgtttacaccacagaagtctctggaagaattccaggacgtttatatcgttatggagttaatggacgccaacctgtgccaggtgatccagatggaactggatcatgagcgcatgagctacttactctatcaaatgctttgcggtattaagcaccttcactctgcaggtatcatacaccgggatttaaagccctcaaacattgtggtaaagtcagactgtaccctaaaaatcctcgacttcggattagcccgaacagccgggacttcatttatgatgaccccatacgtcgtgaccagatactacagagctccagaggtgatcctcggaatgggatacaaggaaaatgtagacctctggtctgttggatgtataatgggtgagatggtttgccataagatcctgttcccaggacgagactacatagatcagtggaacaaagtgatcgagcaactcggcacaccatgccccgaatttatgaagaagctacaacccactgttagaacatacgttgagaatcggcctaaatatgccgggtattcatttgagaaattgtttccggatgtcctattccccgctgattcagagcacaacaaactgaaagcctctcaggctcgggatctcctgtcgaagatgctggtcattgacgccagcaaaagaatctcggtggacgaggcactccaacatccctatatcaacgtctggtatgacccctccgaagcggaggcaccaccacctaagattccagataaacagctggatgagagggaacatacaatagaagagtggaaagagttgatttataaagaggtgatggaccttgaggaacggactaagaatggcgtgatccgcggccaaccctcaccactgggcgcagcagtaatcaacggttcccagcacccttcaagcagttctagcgtcaacgatgtatccagtatgagtacagaccccaccctggcttccgacacggatagcagtttggaggcggccgccggacctctcggctgttgtcggtag

SEQ ID NO: 16037 - DNA, 657 bp, synthetic construct
  misc_feature 1..657: note = Description of Artificial Sequence: Synthetic coding sequence
  source 1..657: mol_type = other DNA
atgtcgagaagcaaacgcgataacaatttctactcggtcgagatcggtgacagcacatttacagtgctgaaaagataccagaacttgaagcccatcggatctggagcccagggcattgtgtgtgctgcttacgatgctattctggaacgtaacgtggcaattaagaagctgagccggccattccaaaaccagacacacgcgaagcgcgcataccgggaacttgttctcatgaagtgcgtgaatcacaagaacatcattggtcttcttaatgtcttcacacctcagaaatcactcgaagaattccaggatgtgtatatcgtcatggagctcatggacgccaatctgtgtcaagtcatccagatggaactggatcacgaacgcatgagctacctgctttatcagatgctgtgtggcattaaacacctgcatagtgcagggattatccacagggatctgaagcccagcaatatcgttgtgaagtctgactgtactctcaaaattctggattttgggctagccaggaccgccgggacctcttttatgatgacaccttacgttgtcacccggtattatcgtgcaccggaggtgatcctcggaatgggatacaaggaaaatggaggtcgtatgggtaaaggcattttcactagactccaatag

SEQ ID NO: 16038 - DNA, 1284 bp, synthetic construct
  misc_feature 1..1284: note = Description of Artificial Sequence: Synthetic coding sequence
  source 1..1284: mol_type = other DNA
atgtcccggtctaagcgggataacaacttctactccgtcgagatcggagatagcactttcaccgtgcttaaacggtaccagaacctgaaacccataggctctggtgcccaaggcatagtgtgcgccgcctacgatgccatcctggagaggaacgttgccattaaaaaattatctcgccccttccagaaccaaacccacgccaagcgagcctatcgggaactggtgttaatgaaatgcgtgaaccacaaaaacattatcggcctgctcaatgtgttcacaccacagaaatcactggaagaatttcaggacgtgtacattgtgatggagcttatggacgcaaatctctgtcaggtaattcagatggagctcgatcacgagcgtatgtcgtatctgctgtaccagatgttatgtggaataaagcacctccatagcgctgggataatccatcgtgatctgaaaccttcaaacatagtggttaagtctgattgtacattgaaaattcttgattttggtctggcccggaccgctggcacaagcttcatgatgactccttacgttgtgaccaggtactatagagcccctgaagtcatcctcggcatgggctacaaggagaatgtagacatttggtccgtggggtgcattatgggggaaatgatcaagggcggggttcttttccctggtactgatcacattgatcagtggaataaggtcatcgaacaactgggtactccttgccccgaattcatgaaaaagcttcagcctacagtgagaacttatgtggagaaccggccaaaatatgcggggtactctttcgagaagttgttccctgatgtcttgttcccagccgattccgagcacaacaaactcaaagcgtcgcaagcgcgggatctcctttcaaagatgctcgtaatcgacgcgagcaaacgcattagcgtggacgaggctcttcagcacccctacatcaacgtgtggtacgacccgtctgaagccgaggcccctcctccaaagattccagataagcagctcgacgagagggagcacacgattgaagaatggaaggaactgatatacaaggaggtcatggacctggaggagcggacaaaaaacggagtgattagggggcaaccctctccactgggggccgcagtgatcaatggaagccaacacccttcctcatcttctagcgtcaacgacgtttccagtatgtctactgacccaactctggcctctgatactgacagttcattggaggcagcagccgggcccctgggctgttgtaggtag

SEQ ID NO: 16039 - DNA, 1155 bp, synthetic construct
  misc_feature 1..1155: note = Description of Artificial Sequence: Synthetic coding sequence
  source 1..1155: mol_type = other DNA
atgtcacgctccaagcgagacaacaacttttactccgtagaaattggggattctacatttacagtcctaaaaagataccaaaacctaaagcctatcgggagcggggcacagggcatcgtatgtgcggcctatgatgccatcctggaaaggaacgtcgctattaaaaaactcagcagaccattccagaaccagacacatgcgaaacgtgcctatcgcgaactggtcctcatgaaatgcgtaaatcataagaacatcatcggactgttaaatgtttttacaccacagaaatcactggaggagttccaggatgtgtacatcgtgatggaactaatggatgctaacctctgccaggtgatccagatggagttggaccatgaaaggatgtcatatctgctctaccaaatgctttgtggcattaaacacttacactcagccggcatcattcaccgggatttgaagccttccaatatcgtggttaaaagcgactgtaccctgaagatactcgactttgggttggcccgtactgcaggaacctccttcatgatgacgccctatgtggtgacaaggtactaccgggcgcccgaggtgatcctcggcatgggatacaaggagaatgttgatatatggtctgtgggatgcataatgggtgagatgataaaggggggagtgttgtttccagggaccgatcacatcgatcagtggaacaaagtgattgagcagctggggacaccgtgccccgaattcatgaaaaagctgcaaccaacagtgaggacgtacgtggaaaatcggccaaaatatgctggctacagtttcgagaagctgtttcctgacgtcttgttccccgccgatagcgagcataataaactcaaggcatcccaggcacgcgacctgctgagcaagatgctggtgatcgacgcaagcaaaagaatctcagtcgacgaggccttgcaacacccctacatcaacgtttggtatgacccttcagaggccgaggcacctcccccgaaaatcccggataagcagctcgatgaaagagaacacaccattgaagaatggaaggagctcatatacaaagaggtcatggacctagaagaaaggacgaagaatggagtcatccggggccagccctcacccctggcccaggtgcagcagtag

SEQ ID NO: 16040 - DNA, 1155 bp, synthetic construct
  misc_feature 1..1155: note = Description of Artificial Sequence: Synthetic coding sequence
  source 1..1155: mol_type = other DNA
atgtcccggtccaaaagagacaataacttctactccgttgagatcggcgactcaacatttaccgttctcaaacgatatcagaacctaaagcccattggaagcggcgctcaaggaatcgtctgtgctgcctacgacgccatcctggagcggaacgtcgcaattaagaagttgagccgcccttttcagaatcagacacatgcaaagcgagcatatcgagagctcgtgttaatgaagtgtgttaaccataagaatatcatagggcttttaaacgtctttactcctcagaaatccttggaggaattccaagatgtttacatcgttatggagctgatggacgcgaatttgtgccaagttatacagatggaactggaccacgaacggatgagctacctcctgtatcaaatgctgtgcggtataaagcatctgcactcagcgggaattatccaccgagatcttaagccaagtaacattgtcgtaaaatctgactgcacactaaaaatactcgacttcgggctggcgcgaaccgccgggacatctttcatgatgaccccgtatgtggttaccaggtattaccgagcacctgaagtgattttggggatgggttataaggaaaacgtagatttgtggagcgtaggatgtattatgggcgaaatggtgtgtcataagatcctgtttccagggagggattacatcgatcaatggaacaaggtgatagagcagcttggcaccccctgtcccgaattcatgaaaaagctccagcctaccgtacgaacttatgtggagaatcggccaaagtacgccggttacagctttgagaagctgtttcccgatgtcctgtttcctgccgactcagaacacaataagctaaaggccagtcaagcaagagatctcttgagcaagatgctagtcatcgacgcctcaaaacgcatctcggtggatgaggcgcttcagcacccctacattaatgtgtggtatgacccctccgaagctgaagcaccccctcctaagatccctgataagcagctggacgagcgggagcatacgattgaggagtggaaggagctgatctacaaggaggtgatggacctggaagagcgcacaaagaatggcgtaattagaggccaaccctctccgctagcccaggttcagcagtag

SEQ ID NO: 16041 - DNA, 1284 bp, synthetic construct
  misc_feature 1..1284: note = Description of Artificial Sequence: Synthetic coding sequence
  source 1..1284: mol_type = other DNA
atgtcccgaagcaagcgcgataataatttttatagcgtagagattggcgacagcactttcactgtgctgaaaaggtatcagaatctgaagcccattggaagcggagctcagggaattgtttgtgctgcctacgacgcaattctggaacgcaacgtggccattaaaaaattaagtcgaccattccagaaccagacccacgccaaaagagcctatcgggaactagtgttgatgaagtgcgtcaaccataaaaatatcatcggactgctcaacgtgttcaccccccagaagagtcttgaggagtttcaggatgtttatatcgtcatggagcttatggacgccaatctgtgtcaggtgattcaaatggagcttgaccacgaaagaatgagctacctcttatatcagatgctgtgtggaattaagcatctgcatagcgcggggattattcaccgcgacctgaaaccaagtaacattgtggtgaagtccgactgcaccctaaagattctggactttggccttgcacgcactgcgggcacctcctttatgatgacgccttacgtggtgactcggtactaccgagcgcccgaggttattctgggaatgggctataaggaaaacgtggatctctggtccgtggggtgtatcatgggcgaaatggtctgtcacaagatcttatttcctggcagagactacatcgatcagtggaataaggtgattgagcagctgggtaccccatgccctgagttcatgaaaaaattacaaccaacagtgaggacctatgttgaaaaccggcccaagtatgcaggctactcatttgaaaaattgttccccgatgttctgtttcccgcagattcagaacacaataaactgaaggcctcccaggccagagacttactgtccaagatgctcgtcattgacgcatctaagcgcatttctgtcgacgaggccctgcagcacccctatattaatgtttggtacgacccgtccgaagccgaggcgccccccccgaagattccagataaacagctggacgagcgggaacataccattgaggaatggaaggagttaatctataaggaggttatggacctcgaagagagaaccaaaaacggcgtgatccgcgggcagcccagtcctctcggggccgccgtgatcaacgggtcccaacacccttcatcttcaagtagcgtgaacgacgttagttctatgtcaaccgaccctacattggctagtgatactgacagtagtctcgaggcagccgcgggacccctgggatgttgtcgctag

SEQ ID NO: 16042 - DNA, 927 bp, synthetic construct
  misc_feature 1..927: note = Description of Artificial Sequence: Synthetic coding sequence
  source 1..927: mol_type = other DNA
atgagccgaagcaagcgagacaacaatttttactcagtggagattggtgactctaccttcacagtcctgaagaggtaccagaatctcaagccaatcggaagtggcgcccaggggatcgtctgtgctgcctatgatgcgattctggaacgcaacgttgcaataaagaagctgtccaggccattccagaaccaaacccatgcgaaacgggcataccgcgagcttgtgctgatgaagtgtgtgaaccataagaacattattgggctcttgaacgttttcacaccacaaaaaagtcttgaagaatttcaggatgtttacatcgtaatggagcttatggatgccaatctctgccaggtgatccagatggagctggaccatgaacgcatgtcctacttgctgtaccaaatgctgtgcggaatcaagcatctccactccgctggaatcatccacagggatttgaagccctccaacatcgtggtgaagagcgactgcacactcaaaatcctggattttggtctggccaggacagccggaacctcgtttatgatgaccccctacgtggtgacccgttattatcgcgcacccgaggtgatcctgggcatggggtataaggagaatgccgatagcgagcataacaagttaaaggcgtcacaggcacgcgacctcctgagtaagatgctcgttatcgacgcctccaaaaggattagcgtcgacgaggccctgcagcacccctatatcaatgtgtggtacgatccttcagaggcagaggctccccctcctaagattccagataagcagcttgacgaacgcgaacacacaattgaggagtggaaggaactcatctacaaggaggtcatggacctggaggagaggacaaagaacggagtgattaggggccaaccatcgcccctggcccaggtgcaacagtag

SEQ ID NO: 16043 - DNA, 429 bp, synthetic construct
  misc_feature 1..429: note = Description of Artificial Sequence: Synthetic coding sequence
  source 1..429: mol_type = other DNA
atgtcccgttcaaaaagggataataatttctacagtgtggagattggtgattctacgtttacagttttaaagcggtaccagaacctgaagcccatcgggagtggagctcagggcattgtatgcgctgcctatgacgctatcttggaaagaaatgtggctattaaaaagctgtcgaggccgtttcagaatcagacccacgccaagcgggcttacagggagctggtgctcatgaaatgtgttaatcacaagaatattataggactgctgaatgtattcaccccccagaagagcctcgaggagttccaggatgtatatattgtcatggagctgatggacgctaatctatgccaggttattcagatggagctcgaccacgaaagaatgagttatctgctgtaccaaatgctgtgtggaattaagcatctgtag

SEQ ID NO: 16044 - DNA, 294 bp, synthetic construct
  misc_feature 1..294: note = Description of Artificial Sequence: Synthetic coding sequence
  source 1..294: mol_type = other DNA
atgatcatcggccttttaaatgtgtttacaccccaaaagtcgctggaggagtttcaggatgtgtacatagtgatggaacttatggatgcaaatctgtgtcaagtgatccagatggagcttgatcacgaacggatgtcatatctcctctatcaaatgctctgtgggattaaacacctgcactccgcggggatcatccacagagatctgaagccaagcaatatcgtcgtgaaaagtgactgcacgctgaagatcctggatttcggcctggctcgcaccgccgggacttcattctag

SEQ ID NO: 16045 - DNA, 429 bp, synthetic construct
  misc_feature 1..429: note = Description of Artificial Sequence: Synthetic coding sequence
  source 1..429: mol_type = other DNA
atgtccagatcaaagagagataacaatttctattccgtggagataggggatagcacctttaccgtcctgaaacggtaccagaacctaaagcctatcggtagtggggcccagggaattgtctgtgcagcatatgacgcaatacttgaacgcaatgtggccataaagaaactgagtcggccgtttcaaaaccagacccatgctaagcgggcgtacagagaactggtgctgatgaagtgtgtgaatcacaagaatatcattggactccttaacgtcttcaccccacagaagtctctggaagagttccaagacgtgtatattgtcatggaactcatggacgccaatctttgtcaggttatccaaatggagctggaccacgaacgcatgtcctatctgctatatcaaatgttgtgcggaataaagcacctgtag

SEQ ID NO: 16046 - DNA, 1182 bp, synthetic construct
  misc_feature 1..1182: note = Description of Artificial Sequence: Synthetic coding sequence
  source 1..1182: mol_type = other DNA
atgcctaaaaagaagcccacacctatccagctgaacccagctccagatggaagtgctgtgaacggtactagttccgcagaaactaacctagaagccctgcagaagaagctggaagagcttgagctggacgagcagcaacggaaacgcctggaggcattcttgacccagaaacaaaaagtgggggaacttaaagatgatgacttcgagaagatctctgagctcggggcggggaacggcggcgtcgtattcaaagttagtcacaagcccagcggactggtcatggcgcgtaaattgatacacctggaaatcaagcccgccatacggaatcagatcatccgagaattgcaggttcttcacgaatgtaatagtccctatattgtgggattttatggagctttttacagcgatggcgaaatttccatctgcatggaacacatggacggtggttctctggatcaggtgcttaagaaagccgggagaattcccgagcagatactgggcaaagtgtcaattgcagtgataaaggggcttacgtatctcagggagaaacataagattatgcaccgcgatgttaagcctagcaacatcctggtaaactcccggggcgaaattaaactttgcgatttcggcgtgtccggtcaacttatcgattctatggccaactcatttgtcgggacccgctcatatatgtcgcctgagagactccaggggacccactacagcgtccagtctgacatttggtccatgggcctgagtctggtcgaaatggcggttggaagataccccatccctccaccggatgccaaggaactggagctgatgtttgggtgtcaagtggaaggggatgcagcagagactcctcctagaccaagaacccccggacgacctttgagtagttacggcatggactctaggcctcccatggcgattttcgagctccttgactatatcgtcaatgagcctccacctaaactgccgagtggggtgttctccctggagttccaagactttgtgaataagtgccttattaagaatccagctgagcgggccgacctgaaacagctcatggtgcatgcattcatcaagagatctgatgcggaagaggtggactttgccggatggctgtgtagcacaataggcctgaaccaaccttccaccccgacacacgccgctggggtgtag

SEQ ID NO: 16047 - DNA, 1203 bp, synthetic construct
  misc_feature 1..1203: note = Description of Artificial Sequence: Synthetic coding sequence
  source 1..1203: mol_type = other DNA
atgctcgcaagacgtaagcccgtacttccagccttaactattaaccctacaatagctgaggggccctcccctacttctgagggagcgtccgaggccaatttggttgatttacaaaagaagctggaagagctggagctggatgagcagcaaaaaaaaagattagaggcattcctgactcagaaggccaaagtaggtgaactgaaagatgacgactttgagcggatctcagagcttggggctggcaacggcggtgttgtgaccaaggtgcagcataggccatcaggactgatcatggcacgaaagttaattcacctggaaatcaaaccagcaatcaggaaccagataattcgcgagctccaggtgttacacgaatgcaacagcccatacattgttggtttttacggcgccttctattccgacggagaaatctccatttgtatggaacacatggacggtggtagcctcgatcaagtgctgaaagaggccaagcgtattcctgaagagattctgggaaaggtctccatcgctgtcctaagaggccttgcttatttaagagagaagcaccagattatgcacagggatgtgaagcctagtaatattttggtgaatagcaggggagagatcaaactctgtgattttggagtttcgggacagctaattgattctatggccaactcctttgtaggaacgaggagctatatggctcccgaacggctccagggaacacactatagtgtgcaatccgacatctggagcatggggttgagcctggtggagctggcagtgggccggtaccccattccacccccggacgctaaagagcttgaagccatcttcggacgacccgtggtcgatggcgaggaaggcgagccccacagcatcagtccaaggccaaggccacctggcaggccagtgagtggacatggcatggactcacgaccagccatggcaatcttcgagctgctggattacatcgtcaatgagccaccccccaagctgccgaatggggttttcactccagatttccaagagttcgtaaacaagtgtctgatcaaaaaccctgccgaacgcgcggacctgaaaatgctgactaatcataccttcatcaagcgctccgaggtggaagaggtagattttgcaggctggttatgcaaaacccttcgtttaaaccagcccggtacgcccacacggacagcagtttag

SEQ ID NO: 16048 - DNA, 1056 bp, synthetic construct
  misc_feature 1..1056: note = Description of Artificial Sequence: Synthetic coding sequence
  source 1..1056: mol_type = other DNA
atgggagttcaggggacactgatgagccgagatcagaccccgcacctgctgtccatccttggaaagtcaaaaaggaagaaagacctgagaatcagttgtatgtctaagccccccgctcccaacccaacaccgcctcgcaatttggatagccgcacattcattacgattggagatcgtaactttgaggtggaggcagacgatctggtgacaatttcagaactaggccgaggcgcatatggggttgtcgagaaggtgagacacgctcaatcaggaacaattatggccgtgaagaggatccgcgcaactgtaaactcgcaggagcagaaacgtcttttaatggacctcgacatcaacatgagaacggtggattgcttttacactgtcactttctatggggcgctttttagggagggagacgtttggatatgcatggagctgatggacacttctctggacaaattctaccggaaagtactggacaaaaacatgaccattccagaggacatcctaggggagatagcggtgtccatcgttagagcacttgagcatttgcattctaagctcagtgtcatccaccgtgacgttaagccctctaacgtgcttatcaacaaagaaggtcatgtgaagatgtgtgattttggcatctccggctacctggtggactccgttgccaaaaccatggacgctgggtgcaaaccatacatggcgcctgagaggatcaatcccgagctcaaccaaaaggggtataatgttaaatccgacgtctggtcattgggaatcactatgattgaaatggctattctgcgttttccatacgagtcctggggcaccccttttcagcaacttaaacaggttgttgaagaaccctcaccccagctccccgccgaccggttctcccctgagttcgttgattttacagcgcagtgcctgagaaagaacccagccgagcgtatgtcttatctggagctgatggaacatccctttttcactctccataagaccaaaaagacagacatagctgcctttgtgaaggaaatcctgggagaggattcttag

SEQ ID NO: 16049 - DNA, 1044 bp, synthetic construct
  misc_feature 1..1044: note = Description of Artificial Sequence: Synthetic coding sequence
  source 1..1044: mol_type = other DNA
atggaatcacctgcaagctctcaacctgcctccatgccacagagcaaaggcaagtctaagcggaagaaagatttgaggatatcttgtatgtctaagcccccagcgcccaatcccactcctccaagaaacctggatagcaggaccttcatcaccattggagataggaactttgaagtggaagcagatgatctggtgacgatctctgagctcggacgaggagcctacggagtggtcgagaaggtaagacatgcccagtccggaactatcatggccgtgaagcgcatcagagctaccgtaaacagccaggaacagaaacgcctgctcatggacctcgatattaatatgcgcaccgtggactgcttttacacagtcaccttctacggggcgcttttccgtgagggtgacgtgtggatctgtatggagctcatggatacgagcttggataagttctaccgcaaagtgctggacaagaacatgaccatccctgaagacatactgggcgagattgcggtgagcattgtgcgagcacttgaacacctgcacagcaagctgagcgtaatccatcgagacgtgaagcctagtaatgtgctcataaacaaggaaggacacgtcaagatgtgtgatttcggcatctcaggctatctggtggattccgtcgcaaagacaatggacgcggggtgcaagccctatatggccccagagagaatcaaccccgaactaaaccagaaagggtataatgtcaaaagcgatgtgtggagcttagggatcacaatgattgagatggctattctgcgatttccctatgagtcttgggggacgcctttccagcaattaaagcaggtggtggaggagccttctcctcagctgcctgcagacaggttcagcccggaatttgttgactttacggcacaatgtctgagaaagaaccccgctgagagaatgtcttacctggagctgatggagcatcctttctttacactccacaaaacaaaaaagactgacatagccgcatttgtgaaggagattctgggcgaggattcttag

SEQ ID NO: 16050 - DNA, 957 bp, synthetic construct
  misc_feature 1..957: note = Description of Artificial Sequence: Synthetic coding sequence
  source 1..957: mol_type = other DNA
atgtcaaagccacccgcccccaacccaaccccaccacgtaacctggactcacggacatttattaccataggagacaggaacttcgaggtggaggctgatgaccttgtcaccatctccgaacttggcagaggtgcttacggggtcgtggagaaggtgcgccacgctcagtctgggacgatcatggcagttaaaaggattcgggccactgtcaattcccaggagcagaaacgcctactgatggaccttgacattaacatgagaaccgttgactgcttttataccgtaacattttacggtgctcttttccgggagggcgatgtctggatttgtatggagctgatggatacctcactggataaattctacagaaaggtgcttgacaagaacatgacgatccccgaggacattctcggagagattgccgtgagcatcgtcagagcactcgagcatcttcactctaaactctccgtaattcatcgcgacgtgaagccctccaacgtgctgattaataaggagggacacgtgaaaatgtgtgacttcgggatttccggatacctggtggacagtgtcgctaagactatggacgctggctgcaagccctatatggccccagaacggatcaatcctgagctaaaccaaaaagggtataacgtgaagagcgatgtgtggtcattggggataacaatgattgaaatggccatcctgcgatttccctacgagtcatggggaacacctttccagcagctgaagcaggtggtggaggagcccagcccccagctccccgctgatcggttctcccctgagttcgtggacttcacagcccagtgcctacgtaaaaaccctgcagagaggatgtcttaccttgaattaatggagcatccctttttcactctacacaaaacaaagaagacagatatcgctgccttcgtgaaagagatacttggcgaggattcctag

SEQ ID NO: 16051 - DNA, 1113 bp, synthetic construct
  misc_feature 1..1113: note = Description of Artificial Sequence: Synthetic coding sequence
  source 1..1113: mol_type = other DNA
atgctgtcaaacagccagggccagtctccgccagtcccgttccctgcccccgccccccctccgcaacccccgaccccagcattaccccacccaccggctcaaccccctcccccccccccacagcaatttcctcaatttcacgttaagtccgggttgcagattaaaaaaaacgcaatcattgacgactacaaagtgacatcccaggtgttgggactgggcattaatggtaaggtactacagatttttaataaaagaacccaagaaaagttcgcattaaaaatgctgcaggactgccctaaagccaggagggaggtagaactgcattggcgggcctcacaatgtccgcacatagtgcgcatcgtcgatgtgtacgagaatctctacgcaggtagaaaatgtctgctgatcgttatggagtgcctcgacgggggagaactctttagccgaatacaggacagaggagatcaggcatttaccgaaagggaggcctcagaaattatgaagtccattggggaggccatacagtacctgcactctattaacatcgcacatagagacgttaagcctgagaatttgctctacacctccaagcgcccaaacgccattcttaaactgactgactttggattcgccaaggaaacgacctcccacaactcacttactacaccttgttacacgccttattacgtggcaccagaggtgctcgggcctgaaaagtacgataagtcttgtgatatgtggtccttgggagtcattatgtacattctcctgtgtggatacccccctttttattctaatcacgggctggctatttcaccagggatgaagacgcgcatccgcatgggccaatacgaatttccaaatccggagtggagtgaggtgtcagaggaagttaagatgttaataaggaacttgcttaagactgaacctacgcagcgaatgacgatcacagagttcatgaaccacccctggattatgcaaagtaccaaggtgccacagactcctttacacactagtcgagtgctgaaggaggataaagaacgatgggaagatgttaaaggttgtcttcatgataaaaatagcgatcaggctacttggctcactcggctctag

SEQ ID NO: 16052 - DNA, 1203 bp, synthetic construct
  misc_feature 1..1203: note = Description of Artificial Sequence: Synthetic coding sequence
  source 1..1203: mol_type = other DNA
atgttgagcaactctcagggtcagtcacccccggtgccattcccagcccctgcaccacctccccaaccgcccacaccggcactgcctcaccctcccgctcagcctccgcctccaccaccccagcagtttccccagtttcacgtgaaatcagggctgcaaatcaaaaaaaatgctatcattgacgactataaagtgacatcccaagtgctaggcctaggaataaacggaaaggtgcttcaaatttttaataagcgcacccaggaaaagttcgccctgaaaatgctccaggattgccccaaagctcggagagaagtggagttgcattggagggcctcacagtgccctcacattgtaaggatagtggacgtatacgagaatctgtatgctggtcgcaagtgccttctgatagtcatggagtgtttggatggtggggagttgtttagccgaatacaagatagaggcgatcaggccttcactgagagggaggcaagtgagatcatgaagagcatcggtgaggccatccagtatctccattcaattaacatcgcccatcgggacgtcaagccggagaatcttctgtacactagcaaacgacccaatgccatcctgaaattgactgatttcgggtttgctaaggagacaactagtcacaattccctgactacgccctgttatactccatactatgttgcgcccgaggtactcggtccagaaaagtacgataagtcatgcgatatgtggagcctaggcgtaataatgtacatcttgttgtgcgggtatccgcctttttactcaaaccatggcctggccatcagtcctggcatgaagaccaggatccgaatggggcagtatgagttcccaaaccctgagtggtctgaagtctcggaggaggtcaaaatgctaattaggaaccttcttaagaccgaaccgactcaaaggatgacaattactgagttcatgaaccacccgtggatcatgcaatctaccaaggtccctcagactccattacacacaagcagagtcctgaaggaagacaaagaaagatgggaggacgtgaaggaagaaatgacaagcgccctggcgacgatgcgcgtcgattacgagcagatcaaaatcaaaaaaatcgaggatgcctctaatccactgctcttgaagcggcgcaaaaaagctcgggccctggaggccgccgccctggcccactag

SEQ ID NO: 16053 - DNA, 1149 bp, synthetic construct
  misc_feature 1..1149: note = Description of Artificial Sequence: Synthetic coding sequence
  source 1..1149: mol_type = other DNA
atggatggagaaactgccgaagagcagggtggacctgtgcctccacccgtggcaccaggcggtccaggcctgggcggagcccctgggggcaggagagagcctaaaaaatacgccgtgaccgacgattaccaactaagcaagcaggttttgggcttgggagtgaatggaaaagtgcttgagtgctttcaccggcgaaccggtcagaagtgcgccctgaagcttctgtatgacagcccaaaggctcgtcaggaggtggatcatcattggcaggcatcaggggggccccacatagtctgcatcctcgacgtgtatgagaacatgcaccatggcaagaggtgcttgttgatcattatggaatgcatggaggggggggagctgttctcacggatccaagagcgaggcgaccaggctttcactgaaagggaagccgcggagatcatgagagacataggaactgctatacaatttctgcacagtcacaatatagcccaccgcgacgtgaaaccagagaacctcctttacacctctaaagaaaaggacgccgtcctgaaactgaccgacttcggatttgcgaaagaaaccacccagaacgcactacagacaccatgctacactccatactacgtagcacctgaggtgctgggccccgaaaaatatgataaatcatgcgacatgtggagcctgggcgtgatcatgtacatcctgctgtgcgggttccctcccttctattcgaacacaggtcaggcaattagccccggaatgaaaaggaggatccgtctgggccagtatggcttcccgaatcctgaatggagcgaggtctctgaggatgctaagcaactcattcgtctgctgctgaaaactgatccgacagagcgcttgaccatcacacaatttatgaatcatccttggatcaaccaatccatggtggtgccccagactccacttcatacagcacgggtgctacaagaggacaaggaccactgggacgaggtgaaagaggagatgacttctgctctcgccaccatgcgggtcgactacgaccaggtgaaaattaaggatctaaagacaagtaataatcgactccttaacaagcggcgcaaaaaacaagctgggtcttcaagtgcttcccagggttgcaacaaccagtag

SEQ ID NO: 16054 - DNA, 999 bp, synthetic construct
  misc_feature 1..999: note = Description of Artificial Sequence: Synthetic coding sequence
  source 1..999: mol_type = other DNA
atggatggcgagactgccgaggagcagggggggcccgtgcccccacccgtggcgccaggaggtccaggcctgggtggggcgccaggcggaagaagggaaccgaaaaagtatgccgtgacagatgactatcaattatctaagcaggttcttggactgggcgttaatggcaaggtcctggaatgttttcacagaagaaccggacagaaatgtgccctgaagctactgtacgatagcccaaaggctcgccaagaagtcgatcatcactggcaagccagcggagggcctcacattgtgtgtattctcgatgtgtacgaaaatatgcaccatgggaagaggtgtctgcttatcatcatggaatgcatggaggggggagaactgttcagccgcatccaagaaagaggtgaccaagccttcacagaaagggaggccgcagagataatgagggacataggtacagcaattcagttcctgcatagccacaatattgcccatagggacgtgaaacccgaaaatctgctgtacactagtaaggagaaggacgctgtcctcaagctgacagatttcggcttcgccaaggagacgacgcagaatgccctgcaaacaccttgttataccccttattacgtggccccagaggtcttaggcccagagaaatatgataagtcgtgcgacatgtggtctttaggtgtgattatgtatattttattatgtgggtttccgcctttttactcaaatactggacaggccattagtcccggcatgaaaagaagaattagactgggccagtatggttttcctaatccagagtggtccgaggtgtctgaggacgccaaacagctcattaggctactgctcaagacagatccgaccgagcggctgactatcacacagttcatgaatcacccctggatcaatcaatcaatggtagtcccccagaccccactacacactgcgcgcgtcctccaggaggataaggatcattgggacgaagtcaaatag

SEQ ID NO: 16055 - DNA, 1149 bp, synthetic construct
  misc_feature 1..1149: note = Description of Artificial Sequence: Synthetic coding sequence
  source 1..1149: mol_type = other DNA
atggacggggagacagccgaggagcaaggaggtcctgtgccgcccccagtcgcccccggcggaccagggctgggaggcgccccgggtgggcgacgcgaaccaaaaaagtacgcagtgacagacgattatcagttgagcaagcaggtcctcggtcttggagtcaacggcaaggtgctggaatgctttcatcgacgcaccggacagaaatgcgcactgaagcttctttatgatagcccaaaggccagacaggaagtcgaccaccactggcaggcctcaggtggtcctcatatcgtttgcatccttgatgtgtacgagaatatgcatcatggaaagagatgtctgctcataatcatggagtgcatggaagggggagagctgttctcccgtatacaggagcgaggagaccaggcatttactgagcgggaggcagcggagataatgcgcgatattggaacagctatacagtttcttcactcacataacatcgcccaccgggatgtgaaacccgagaacctgctttatacaagcaaggagaaagacgcggtcctgaagttgactgacttcgggtttgccaaagagaccactcagaacgcactgcagacaccttgctacacaccttactatgtggctcctgaagtcctgggccctgaaaaatacgataagagctgcgatatgtggtctctcggagtgatcatgtatatcttgctctgcggcttcccgcctttttattccaataccggacaggctatttcaccaggcatgaagaggcggatccgccttggccagtatgggtttccaaaccccgagtggtctgaggtttcagaggacgcgaaacaactgatccgtttgttattaaagacggacccaaccgaaagactcaccataacacaatttatgaaccatccttggatcaaccagtcaatggtcgtgccacagactcccctgcataccgcccgcgtgctacaggaggacaaggatcattgggatgaggttaaagaggagatgaccagcgcattggccaccatgcgcgtcgactatgatcaggtgaaaatcaaagatcttaaaacgagcaacaaccggctgctaaacaaaagacggaagaagcaggcagggtcaagctctgcctcgcagggatgcaacaatcaatag

SEQ ID NO: 16056 - DNA, 360 bp, synthetic construct
  misc_feature 1..360: note = Description of Artificial Sequence: Synthetic coding sequence
  source 1..360: mol_type = other DNA
atggatggtgaaacagccgaagagcaaggaggacctgtccctccccctgttgccccaggaggcccaggcctcggcggtgcccctggaggacgaagagaacccaaaaagtacgctgttactgatgactaccagctgtccaagcaggtgttgggcctcggggtgaatggtaaggtgcttgagtgtttccatcgtcgcaccggacagaaatgcgctctgaagcttctctatgacagccccaaagcacggcaggaggtggaccatcactggcaggcctccggcgggccccatatcgtctgcatcctggacgtctacgagaacatgcaccacggaaaacgttgcctgctaattataatggagtag

SEQ ID NO: 16057 - DNA, 1422 bp, synthetic construct
  misc_feature 1..1422: note = Description of Artificial Sequence: Synthetic coding sequence
  source 1..1422: mol_type = other DNA
atgagcgaggagtccgatatggacaaagcaatcaaggaaacttctattcttgaagagtactctattaactggactcagaagctgggtgccggcatttctggacctgtccgagtgtgcgttaaaaaatctacacaggaaaggttcgctctcaagatcctgctggacaggccgaaggcacggaacgaagtgaggcttcatatgatgtgtgccactcatcctaatattgtgcagatcattgaggtgttcgccaattctgttcaatttccacatgagagtagccctcgcgcccgactgctgatcgttatggagatgatggaggggggcgaactattccatagaatttctcagcacaggcattttacagagaaacaggccagccaggtcaccaagcagatagcactggccttacggcattgccacttgctgaatatcgctcaccgcgatctgaaacctgagaacctcctgtttaaggacaatagtttggatgctcctgttaagctttgtgacttcgggttcgcaaaaatagaccagggggatctcatgaccccacagttcaccccctactatgttgcgccccaagtactggaagcacaacgtagacaccagaaggagaagagcggcatcatccccacaagcccaaccccttacacatataataagtcttgtgatctctggagtctgggagtcattatctatgtcatgctgtgtggctacccccccttttactctaaacaccattcacgaaccatccctaaggacatgcgcaggaagatcatgactggctctttcgagttcccagaggaggaatggtcacagatctcggaaatggctaaggacgtcgttcggaagttgctaaaagttaaacctgaagagcgcctgacgatcgagggggttcttgaccatccctggcttaacagcactgaggctctggataatgtgttaccttccgcacagctgatgatggataaggccgtggtggcgggcattcaacaggcacatgctgaacagctcgcgaatatgcgaatccaggatctgaaggtatcgttaaagccactgcactcagtaaataaccccattttgcggaagaggaaactcctgggcaccaagcccaaggattctgtgtatatacacgaccatgaaaatggcgcagaagattctaatgttgcgctggagaagctaagagacgtcatcgcacagtgtattctcccccaggcgggcaagggcgagaacgaggatgaaaagttaaacgaagttatgcaggaggcttggaaatataatagagagtgtaaactgcttcgcgatactctccagtccttttcatggaacggcagaggcttcacagataaagtggacagactcaagcttgcggagattgtgaagcaggtgatcgaggagcagaccacctctcatgagtcgcagtag

SEQ ID NO: 16058 - DNA, 1416 bp, synthetic construct
  misc_feature 1..1416: note = Description of Artificial Sequence: Synthetic coding sequence
  source 1..1416: mol_type = other DNA
atgagtgaggagagcgatatggataaagcgattaaggaaacatcaatcctcgaagaatactctattaactggacacaaaaattgggggccggcatctccggccccgtgagggtgtgtgtgaaaaagagtactcaggagagattcgctcttaaaattttgctggatcgccccaaggcacgaaacgaagtgaggctgcacatgatgtgcgccacacaccccaatatcgtgcagattatcgaagtttttgctaactctgtccagtttccgcacgaatcctctcctcgcgcacgactcttgatcgtgatggagatgatggaaggtggcgaactgttccataggatcagtcagcatcgtcacttcacagagaaacaagcctcccaagtcactaaacaaatcgcactggcactgcgacattgccacctgctgaatatcgctcatcgtgatttaaagcctgaaaacctcctcttcaaggataatagccttgatgcaccagtgaagctctgcgactttggtttcgcgaaaatagaccaaggcgatctgatgaccccacagttcacaccctattacgtggcccctcaagtactggaagcacagcgacgtcaccagaaagagaagtctgggataattcccactagccctactccatacacttataacaaatcatgcgatctgtggagtctaggcgtgattatctacgttatgctgtgcggctacccacccttttactccaaacatcattcccgtactatccctaaggatatgaggagaaagatcatgaccggatccttcgaatttcccgaggaggagtggtctcaaatcagcgaaatggctaaagacgtcgttaggaagttgctcaaagtgaaaccggaggagcgcttgacaatcgaaggcgtcctcgaccacccttggctgaattcgacagaggccctggataatgtactgccctcagctcagctcatgatggacaaagccgtggtggccggcatccagcaggcacacgccgagcagctggcgaacatgcgaatccaggatctgaaagtaagcctgaaaccactgcactctgtaaacaatccgattctcaggaagcggaagctcctggggacaaaacccaaggattctgtgtatattcatgaccacgagaacggggccgaggactcaaacgtcgccctggagaagctccgtgacgttattgcccagtgtatactccctcaggcaggggagaacgaggacgagaagctcaacgaggttatgcaggaggcttggaaatacaaccgggagtgtaagctgctgagggatacattacagtccttttcttggaacgggcgagggttcactgacaaggtggacagacttaagctggccgaaattgtgaaacaagtcattgaggagcaaacaacatctcacgagagtcaatag

SEQ ID NO: 16059 - DNA, 1416 bp, synthetic construct
  misc_feature 1..1416: note = Description of Artificial Sequence: Synthetic coding sequence
  source 1..1416: mol_type = other DNA
atgtccgaagaatctgatatggacaaggcaataaaagaaacaagtatcctggaggagtattccattaattggacccagaagctgggagccggaatttctggaccagttagggtgtgtgtcaaaaaatctacccaggagaggtttgctctgaagattctcctggatcggcctaaagcccggaacgaggtgcgtctccatatgatgtgtgctactcacccaaacattgtgcagatcatcgaggtgttcgcaaacagcgtacagttcccccacgagagcagtccaagggccagactgctgatcgtgatggagatgatggagggcggtgaactgtttcataggatctcccagcatagacacttcaccgagaaacaagctagccaagtgacaaagcaggctacactggcccttcgtcattgtcacctgctgaacatagctcacagagatttaaagccggagaatctgcttttcaaagacaactcactggatgcaccggtgaaattgtgtgatttcggcttcgccaagatcgatcaaggggacctgatgacacctcagtttaccccatactacgtagccccacaagttctggaagctcagcgacggcaccaaaaagagaagtcaggcatcattccaacctcaccaactccatacacctacaacaaatcttgcgatctctggagcctaggcgtcattatctatgttatgttgtgtggatatcctccattctatagcaaacaccacagtaggacaataccgaaagacatgcgccgtaaaatcatgacggggtctttcgagttccctgaggaggagtggagccagatatcagaaatggcgaaagatgtggtgcggaaactactcaaggtgaaacccgaggagagacttactattgaaggggtcctagatcacccttggctcaattctacggaagcactcgacaatgtcctgccgagcgcccagctcatgatggacaaggctgtcgttgctggaatccagcaggcccatgccgagcaactggcgaatatgcgcatccaagatttaaaggtgtctctgaagcccctccattctgtaaacaacccaatccttcgaaagcgtaaattgctggggacaaaacctaaagattctgtttatattcacgaccatgagaacggagcagaagattccaatgtggcacttgagaaactcagagacgtgattgcacagtgtatactgcctcaggcaggagagaatgaagatgagaagttgaatgaggttatgcaggaggcctggaagtataaccgcgagtgcaagctgttaagagacacactgcagtccttttcttggaacggaagggggttcaccgataaggtggatcggctgaagttagcggaaattgtgaagcaggtgattgaggaacagacaacctcccacgaaagtcagtag

SEQ ID NO: 16060 - DNA, 1422 bp, synthetic construct
  misc_feature 1..1422: note = Description of Artificial Sequence: Synthetic coding sequence
  source 1..1422: mol_type = other DNA
atgtcagaggaatctgacatggataaggctatcaaagagacctcaattctggaggaatactccataaattggactcaaaagctgggagccgggataagcggtccggtacgcgtgtgcgtgaagaagtctacccaggagcggttcgctctgaagatcttgctggaccggccaaaggcccggaacgaagtcagactccacatgatgtgcgccacacatccaaacatcgtgcaaattattgaagtgtttgccaacagtgttcaattcccacacgaatcaagccctcgggctaggctcctcatagtcatggagatgatggaagggggggagctgttccatcgaatcagtcaacacaggcatttcactgagaaacaggcctcccaggtaaccaagcaagccactttagccctccggcactgtcatctcctgaacatagcccacagagacttgaagccggaaaatctcctgtttaaggataattccctcgacgcccccgtcaagctgtgcgatttcggtttcgccaagattgaccaaggcgatcttatgaccccgcagtttaccccatactatgtcgctccccaggtacttgaggcacaacggcggcaccagaaagaaaaatctggaatcatcccaacgtcccccaccccctatacttacaataagagttgtgatctgtggagcctcggggtaatcatatatgtcatgttgtgcggctatccaccattctattcaaagcaccactcccgcacaatcccaaaagacatgcgccgaaaaatcatgaccggcagtttcgagtttcctgaagaggaatggagtcagatctcagaaatggccaaggacgtggtccgaaagcttctaaaggtgaagccagaggagagattgactattgagggtgtgctggaccatccgtggctgaactccaccgaagccctcgacaatgtcctcccaagcgctcagctcatgatggataaagcagttgttgccgggatccagcaggcacacgctgagcagcttgcgaatatgcgcatacaagacctgaaggtgagcctgaaaccgctgcatagcgttaacaacccaatcctcagaaagcgcaagctactgggcacgaagcctaaagatagtgtctatatccatgatcacgaaaatggagccgaagactccaatgttgcccttgaaaaactgcgggacgtgatcgcccaatgtattttaccccaggcaggcaagggcgagaacgaggacgagaaattgaacgaagtcatgcaagaagcatggaaatacaacagggaatgtaagctgctcagggacaccctgcaatccttttcctggaacggtcgcggcttcacagacaaggtggataggctgaaattggccgaaattgtcaagcaggtcatcgaggagcagactacttcgcacgaatcacagtag

SEQ ID NO: 16061 - DNA, 2799 bp, synthetic construct
  misc_feature 1..2799: note = Description of Artificial Sequence: Synthetic coding sequence
  source 1..2799: mol_type = other DNA
atggccgcagctgccgccgtcgaggccgctgcccccatgggcgccttgtggggactagtacacgacttcgtagtcgggcagcaggagggtcctgcagaccaggtggcagccgacgtcaagtccggcaattacacagtgctgcaggttgtagaggctctagggagctctctggagaacccagagcctcgcaccagggctcgcgcaatacagctgttatcacaggtactcctccactgccacactctgctgttggaaaaagaggtcgtacatctcattcttttttacgaaaaccggttgaaagaccaccacctagtcatcccctcagtcctacaaggcttaaaggccctgtcactgtgtgtggccttgccaccaggactggctgtctccgtccttaaggcgattttccaggaggtgcacgtccagtcgttgccacaggttgacaggcacactgtctacaacatcattacaaattttatgagaacacgagaggaggagctcaagagtctcggggccgactttaccttcggctttattcaggtcatggatggcgagaaagacccacggaatttgctggttgcattccgtattgtgcacgatctgatctcccgcgactacagtcttggccctttcgtggaggagctttttgaggttacctcctgttatttcccaattgatttcacgccaccccctaacgatccccacggtattcagcgtgaggatctcatcctcagcctgagggcagtcctggctagcacacctcggtttgccgaatttctgctcccactcctcatcgagaaggtggactctgaggtgttaagtgccaagttggacagcctgcaaacactcaatgcctgttgtgccgtctacggtcaaaaggagctcaaagattttctgccaagcctctgggccagcataagaagggaaagctctcagagacgcaccatactggagatgctgctcggtttcctgaagttacagcagaaatggagttacgaggacaaagaccaaaggcccttaaatggttttaaagaccagctgtgttctctagtgtttatggctctcacagacccttccacccagttacaattggtcggaattcggactctgacagttctgggagcccagcctgacctccttagctatgaggatctggaactggcagtaggccatttgtatcgactatcgtttttgaaggaagacagccagagctgtcgggtggccgctttggaggcgtctggaactcttgcggccctttacccagtggccttctcaagccatttggtccctaagctggccgaggagttgcgcgttggagaatctaatctcactaatggggacgagcctacacagtgttcacgccacctatgctgcctacaagccctttccgccgtgtccacccatccttccatagtaaaagaaaccttacctctcctcttgcaacacctttggcaggttaaccgcggaaacatggttgctcagagcagcgatgtcatcgccgtgtgtcaaagcctgcggcagatggcggagaagtgccaacaggaccccgagtcttgctggtattttcaccaaactgccatcccttgtctcctggctctggcagtgcaagcctcgatgccagagaaggaaccttctgttctgcgcaaagtgttattggaggatgaagtccttgcagccatggtctcagtgattgggactgctaccacccacctgtcaccagagttagcagctcagtccgtcacgcatattgttcctctgtttctggacggcaacgtgtcatttcttcctgagaatagctttccttctcgtttccagccttttcaggatggatcttcaggtcagcgcaggcttattgccctcctgatggcctttgtatgttcattgccccgaaacgttgaaatccctcagctcaatcagctgatgcgggagttattggagttatcatgttgtcacagctgccccttttcatccacagctgccgctaaatgctttgcaggcctgctgaataagcaccccgctggacaacagctagacgagttcctgcagttagccgtcgataaagttgaggccggccttggcagcggaccctgtaggagtcaggcattcacactgctactgtgggtgacaaaagcactagtcttacgttatcatccgctgtcaagctgcctgactgctcgattgatgggattacttagcgatccagagttgggccccgcagctgcagatgggttctcactgcttatgtcagattgcaccgacgtgctcacgcgagcgggccatgcagaggtccgaattatgttccgccagaggtttttcaccgataatgtccccgccttggtgcaaggcttccatgccgccccccaggacgtcaagccaaactatctgaaagggcttagccacgtattaaaccgtctgcctaaacccgttctgctgcccgaactgccaactctgctgtcactgctgctagaagccctgagctgcccggactgtgtggttcagctgagcaccttgtcttgcctccagccgttactgctggaggctccacaagttatgtcattacatgtcgacactctggtgacaaagtttctaaacctgtcctctagtccatccatggcagttcgcatagcggctctgcagtgtatgcacgcactgactagactcccaacacctgtgttgttgccatataagccacaggttattcgcgctctggccaaaccccttgacgacaagaaaagacttgtcagaaaagaggcagtgtctgctcgaggtgagtggtttctgctgggatcaccgggatcctag

SEQ ID NO: 16062 - DNA, 1092 bp, synthetic construct
  misc_feature 1..1092: note = Description of Artificial Sequence: Synthetic coding sequence
  source 1..1092: mol_type = other DNA
atgctgctgggttttctgaagctccagcagaaatggagttacgaggataaagaccagcgtcctctaaatggctttaaggatcagctgtgctccctggtcttcatggctttgacagatccgtccacacaactgcaacttgtgggtatacgcacattgaccgttttgggggcccagcccgacttgcttagttatgaagatctggagctggcagtgggccacctctatcggctctccttcttaaaagaggatagccagtcgtgtcgtgtcgcagccctagaggctagcggaaccctggctgccctgtatcctgtcgcgttctcgtcccatcttgtgccaaagctcgccgaagaactccgcgtcggggagagtaatcttacaaacggagatgagcctacccaatgtagcaggcacctttgctgtttgcaggctctatcagctgtgagcacacacccatccattgtgaaggaaaccctccctctgctgctacagcacctctggcaggtcaatagaggtaatatggtggcccagtctagcgacgtgattgccgtatgtcaaagcctgcgccagatggccgagaagtgccagcaggaccccgagagttgctggtacttccatcagactgctattccctgtctgctagctctagctgtgcaggcgtcgatgcctgaaaaggagccctctgtcctgaggaaagtgctgttggaggatgaggtcctggcggccatggtatcagtgatcggcaccgcaacgactcatctcagtcctgagttggctgcgcaatcggtaacccacatcgtgcctctgttcctggacggaaacgtgtctttcctgccagagaattcattcccgtcccgatttcagcctttccaagatgggtcatcaggtcaaagacggttgattgccctcctgatggctttcgtctgctccctcccaagaaacgtcgagatcccccagctcaaccagctcatgagggagctgcttgaattgagttgtactgctgcaccgttccttcccccgctcctgccatccgctctacaggattcgtctacttcaactcttcaaggttcatcgtggatgaatagttacagctag

SEQ ID NO: 16063 - DNA, 1128 bp, synthetic construct
  misc_feature 1..1128: note = Description of Artificial Sequence: Synthetic coding sequence
  source 1..1128: mol_type = other DNA
atgaaacttgtgtggccatcagccaagcttctgcaggctgccgctggggcatctgccagagcctgcgattccgttacttccaacgtgctgccacttcttctggaacagttccataagcacagccagtcatctcagcgtcgcactatcctcgagatgctgctgggttttctcaagctgcagcagaaatggtcctatgaagataaggatcagagacccctgaacggttttaaggaccagctttgtagcctggttttcatggccctgacagacccatcaactcagttgcagctggtcggaatccggaccctcactgtgctcggtgcacagcctgatctcctctcctacgaagatttggaactcgccgtcggccatttgtaccggctttcattcctgaaggaggactcccagtcctgcagggttgctgcgctggaagcctcaggaactctagcagccctgtaccctgtggccttcagctcccaccttgtgcccaagctggccgaagagcttcgggtgggggagtctaaccttaccaacggtgatgagcctacccagtgctccagacacctgtgctgtctacaagcactcagcgctgtatcgacacacccgagcatcgtgaaggagactctcccactcctgcttcagcacctgtggcaggtgaatcggggcaacatggtcgcccaatcatcagacgtgatcgctgtgtgccagagcctccgccaaatggcagagaaatgtcaacaagatcctgagtcctgctggtatttccaccagactgcgattccatgcctgttagctttggccgtacaagcttctatgcctgagaaagagccaagtgtgcttcggaaagttctgcttgaggatgaagtgcttgccgccatggtgtctgttattggcacagctacaacccatttgtctcctgaattggccgcccagagtgtgacgcatattgtccctctttttctagacggcaatgtcagttttctgcccgagaatagcttcccaagcagatttcagccatttcaggtaactgacgggagtagtgggcagcgccggctcattgctctgctcatggcatttgtttgcagcttgccccggaacggctcatcctggatgaactcctattcatag

SEQ ID NO: 16064 - DNA, 1128 bp, synthetic construct
  misc_feature 1..1128: note = Description of Artificial Sequence: Synthetic coding sequence
  source 1..1128: mol_type = other DNA
atgaagctggtgtggccctcagcaaaattgctgcaagctgccgccggcgccagcgcaagggcttgtgactctgtgacgtccaatgtgctccccctgctgctcgaacagtttcacaaacactctcagtcaagtcagaggcgcactatcttggaaatgctgctggggtttcttaaactgcagcagaagtggagttatgaagacaaggatcagcgccccctgaatggattcaaggaccagctgtgcagcttagtgtttatggccctgaccgacccttccacgcagctgcagctggtgggcattcgcacacttaccgtcctcggcgctcagccggatctgctgtcttacgaggatctagagctcgcagtggggcatctgtaccgactcagttttctcaaggaggattctcaaagttgtcgcgtcgctgctctggaagctagtgggaccctggccgcattgtacccagtggcgttctctagtcacttggtcccaaagctcgctgaagagttgagagtgggcgaatctaatctgacaaatggcgacgaaccgacccagtgttcacgtcacttatgttgtctgcaggcactgtccgcggtctctacacacccatccatcgttaaggagacgctccccctgctccttcagcatctttggcaggttaaccgcggcaacatggtggcccagtcttcagacgtgattgctgtgtgccagtctcttcggcagatggctgaaaagtgccagcaggaccccgaatcctgctggtactttcaccagactgccataccatgtctgcttgcattggctgttcaggcctcgatgccagagaaagagccatcagtgttgagaaaagtcctgctggaagacgaagtccttgccgcaatggtgagcgtgattggtaccgctacgacacacctctcacccgaactggctgcacagtcagtcacccatatagtgcctctgttcttagacggaaatgtgtcttttctgccggagaattctttccccagcaggttccagcccttccaggtcaccgacggcagcagcggccagcgacggctgatcgcgttgctgatggcatttgtgtgcagtctcccgcgaaacggatcgagctggatgaattcctatagttag

SEQ ID NO: 16065 - DNA, 2964 bp, synthetic construct
  misc_feature 1..2964: note = Description of Artificial Sequence: Synthetic coding sequence
  source 1..2964: mol_type = other DNA
atggcagccgcggctgccgtggaagcagcggcccctatgggagccctttggggattagtgcacgattttgtggtcggtcaacaggaagggcctgctgatcaggtagctgctgacgtgaagagcggcaactatactgtgctccaggtcgtggaagcattaggtagctctttagaaaacccggagccccggactcgggcccgcgccattcaactactgtcccaagtgctcttgcactgtcacaccctgctcctcgaaaaagaagttgtccacctcatcttattttatgagaatcgcctcaaagatcaccatctcgtaatcccaagtgtcctacagggtcttaaggccctgtctctgtgcgtcgcactgcccccgggtctggcagtgtccgtgctcaaagccattttccaagaggtgcacgtgcagagcttgccccaggtggacagacatacagtgtacaacatcatcaccaatttcatgcgcacacgggaagaaggtcccttcgtggaggaactctttgaggtaacatcttgctattttcccattgactttacacccccgccgaatgatccacacggtatccaaagagaagatctgatactgagtctgcgggctgtgctcgcctccacccctcgatttgccgagttcctgctgccattactgattgagaaagtggattccgaagttctgtctgctaagctggatagcctgcagacactgaatgcgtgctgcgcggtctatggccaaaaagagcttaaggattttcttccatcgctatgggcatccatccggcgggaggtttttcagaccgccagtgaaagggtagaggctgagggactcgcagcacttcacagtttgaccgcctgtctgtcaaggagtgtcctgcgagcagacgcggaagatctgctggactccttccttagtaacattctgcaagactgtaggcaccacctgtgtgagcctgacatgaaattagtttggccaagtgctaaattacttcaggctgctgccggggctagtgcccgcgcttgcgactccgtcacctcaaacgttctccctctgctgctggaacagttccacaaacattcccagtcttcccagcgccgcacgattttggaaatgctgctcggatttctcaagttacagcagaagtggagctacgaggataaagaccagcgtcccttgaatggcttcaaggaccagttatgttctctggtcttcatggcactgacagacccctccactcagttacagctggtggggattcgcaccctgaccgtgttgggcgcgcagcctgacctcctgtcttatgaagatctggagctggcagtaggacatctctatcgtctttcatttctgaaggaggattcccagagttgtagagtggcagccctcgaggcgagtggaactctggcggctctttaccccgtagcattctctagccacctcgtgcccaaactggccgaagaactcagggttggtgaaagcaatttgacaaacggagacgagcctactcagtgctcgaggcacttatgctgtcttcaggccctaagcgcagtgagcactcatccgtccatcgtgaaggagacactaccgctgctgttgcagcatttgtggcaagtcaataggggcaacatggtcgcacagagttcagatgtgattgcagtgtgccaaagtctgcgccagatggcagaaaagtgccagcaggaccctgagtcctgttggtatttccatcagactgcgattccatgtttgctggcgctggcagtccaggctagtatgccagagaaggagccaagcgtgctccgcaaggttctgctggaagacgaggttctcgccgcgatggtgtccgtcatcggaacagcaacaacacatctgagccctgagctagccgcccagtccgtgacccacattgtgccgctcttcctggacggtaacgtgtcgtttctgccagaaaactcttttcctagtagatttcagcctttccaggacggttctagcggccagcgcaggctcatcgcgcttctgatggcttttgtgtgttcgcttccccgaaacgtagagatcccccagttaaaccagttaatgcgagaattactcgaactgtcttgttgccactcctgcccgttctcttcaacagccgccgctaagtgcttcgctggtcttttaaacaaacacccggcgggccagcagctggacgaattcctgcagctggcagtggacaaagtggaggctggcctgggatccgggccatgccgatcccaagccttcactctgctcttgtgggtgacgaaagctctcgttctacgctaccatcccctgtctagctgcctaactgcaaggctaatgggcctactgtctgacccagagctgggccccgccgcggcggatggcttttcccttcttatgtctgactgcacagatgtcttaaccagggccggccacgcagaagttaggataatgttcagacaaaggttcttcacggacaatgtccccgccttggtgcagggcttccatgctgcaccacaggacgtgaaaccaaactatcttaaaggtctttcccacgttctaaataggttgcccaagcccgtcttgctgccagaactgccaacactgcttagcttgctgctcgaggccctgtcttgtcccgattgtgtcgtgcaattaagtaccctcagttgtttgcagcccttactcttagaggccccccaggtgatgtctttgcatgtggacactttggtgaccaaatttctgaatctgagttcctctccctctatggccgtaaggattgctgcgctgcagtgtatgcatgctctgaccaggttgcctaccccagtcttactgccgtacaaaccacaagtgattcgggcactggcaaagccactcgatgataagaagcggttagtacgcaaggaggctgtttccgcaaggggcgaatggtttctcctgggatcaccaggcagctag

SEQ ID NO: 16066 - DNA, 3093 bp, synthetic construct
  misc_feature 1..3093: note = Description of Artificial Sequence: Synthetic coding sequence
  source 1..3093: mol_type = other DNA
atggccgctgcagccgccgtcgaggccgccgcacccatgggcgccctttggggcctcgtgcacgacttcgtcgtcggtcagcaggagggccccgcggaccaggtggcagctgatgtcaagtctggtaactatacggtattgcaggtggttgaagcgcttgggtcgagtttggaaaatcccgagccccggacccgggcacgagccatccagcttttatcgcaggtcctgctgcattgtcacacactgttgctcgagaaagaggttgtccacctgattcttttctatgagaataggctgaaggatcaccatctggtgatccccagcgttctgcagggtttgaaggcactgtcactctgcgtcgcactgcctcctggcctggctgtgtctgtactcaaagctatcttccaagaggtgcatgtgcaatctctgcctcaggtcgatcgccatactgtgtacaatatcatcactaactttatgcgcacaagggaggaagagctgaaaagtttgggcgctgatttcacctttggcttcatccaggtcatggatggggaaaaggacccccgtaacctactcgtcgctttccggatcgtccacgatctcatatctagagactatagcctgggcccatttgtggaggagctcttcgaagtgacatcttgttatttccccatcgattttaccccaccccccaatgatccacacggcattcaaagggaggacctgatcctttcgctgagggccgttctggctagcactccacgtttcgccgaattcctgttacccctgctgatagagaaggtggactccgaagtgctctcagccaagctggattccttgcaaactctgaacgcgtgctgcgctgtgtatggccagaaagagctcaaggatttcctcccctccctgtgggccagcatccgaagggaggtgtttcaaacagcatcagagagagttgaggcagagggactggctgccctgcactctctcactgcctgcctgtctcgctccgtgctgcgggcagatgcggaggatttactggacagcttcctgtccaacatccttcaagactgccggcatcatctgtgcgaacctgatatgaagcttgtgtggccctcagcaaagctcttacaggcagctgccggcgcgtccgccagagcatgtgactccgtgacaagcaatgtcctgcccctgttgttggaacagttccacaaacactcccagtcgagtcagagaaggacaatcttagaaatgctgctcggattcctcaaactgcaacagaagtggagctatgaggacaaagatcagaggcccttaaacggttttaaggaccagctttgctctctggtgtttatggctctaactgatccctccacacagctgcagttagtgggcataaggacactgactgtcttgggagcccagcccgaccttttgtcttacgaggaccttgagctggctgtgggccatctgtatcgactatcttttttaaaggaagactcccaatcatgtcgagttgccgccttagaagcttctggtaccctggcagccctttatcctgtcgcgttttcgtctcatctggttccaaaactcgccgaggaactgcgggttggagagtctaacctaacaaatggtgacgagcccacacaatgttcacgtcacttgtgctgtctgcaggcgctgtctgccgtgagcacccacccttcaatcgtgaaagagacacttccacttctgttgcaacatctgtggcaggtgaacaggggaaacatggtcgcacagtctagcgacgttatcgcagtgtgccagtccctgcgccagatggccgagaagtgtcagcaggaccctgaatcttgctggtactttcaccagaccgctatcccgtgtctcctggctctggccgtccaggcgtcaatgcccgagaaggagccgtcggtcttgcgaaaggtgttattggaggacgaagttttagcggccatggtgtctgtcattggtacggctacaacccacctgtcgcctgaactggccgcacagagcgtcacccacatagtccccttgttcctcgacggcaatgtgagcttcctgcctgagaactcttttccatcccggttccagcccttccaggacggctcctccggacaacgcagattaatcgcactgctgatggcttttgtctgctccttgccgaggaatgtggaaatcccccagctaaaccaattgatgagggaactcttggagctgtcatgctgtcacagttgcccgtttagctccacagcagcagctaagtgtttcgccggtctgctgaacaagcatcccgcgggtcagcagctggacgagttcctgcaactggcggtggataaagtcgaagccggcctcggttccgggccgtgcagatcacaagcttttaccctgttattatgggttacaaaagcactggtgctgaggtaccaccctctatcgtcttgcctgactgcccggcttatgggtctcctgagtgatcccgagttagggccagccgcagccgatggtttcagcctgttgatgagcgactgtacagatgtgctgactagagctgggcacgccgaggtgaggataatgttccggcagagattcttcactgacaacgtaccagcactggtgcagggcttccatgctgctccccaagacgtgaaacccaattaccttaaaggtctgagccatgtgctcaatagactgccaaaacccgtactcctcccagagctacccactctgctgagtctgctgctcgaagccctcagctgccctgattgcgtagtgcagctgagcactctctcctgccttcagcctctactgctagaggcgcctcaggttatgtccctccacgtggatacactggtgacgaagttcctgaatctgtcttccagccccagcatggccgtgagaatagctgcgctccagtgcatgcatgcccttacccggctccctacacctgtgttgttgccgtacaagcctcaggtgattcgggcgctcgctaaacctttggacgataagaaacgcctagtgcgaaaggaggccgtctcagcccgaggcgagtggttcctgctggggtcgccaggctcatag

SEQ ID NO: 16067 - DNA, 3030 bp, synthetic construct
  misc_feature 1..3030: note = Description of Artificial Sequence: Synthetic coding sequence
  source 1..3030: mol_type = other DNA
atggccgccgcagccgctgttgaggcagctgccccaatgggagctctgtgggggctggtccatgactttgtggtgggtcagcaggagggacctgcggaccaggtggcagcttcctccttagaaaaccccgaacccaggactagggcccgtgctattcagctcttgagtcaggtactgcttcactgtcacacactactgcttgaaaaggaagtggtgcatctgatcctgttttatgaaaacaggctgaaggatcaccatctggttatcccctcagtgctgcaaggactgaaggcactctcgttgtgtgtggctcttcctcctgggttagccgtgagcgtgttgaaggctatcttccaggaggtgcacgtccaggtcgacagacatacggtctacaatattatcaccaactttatgaggactcgcgaggaagagctgaagtcactgggtgccgacttcaccttcggcttcatccaggtgatggatggcgagaaagatcctagaaatcttctggttgctttccgaatagtgcacgatctcatctcgagagattactccctcggaccatttgtggaggagttatttgaggtgacctcctgttacttccctattgacttcacaccacccccgaatgatccccacggtatacagcgcgaagatctcattttgtccttgagggccgtactcgcctcaaccccccgattcgcggaattcctgctcccactgctgatcgagaaagtggatagcgaagtgctcagcgcaaaattagactccttgcagaccttaaacgcctgttgtgcagtttatggacagaaagagctcaaagattttcttccaagcctctgggcttccatcagacgcgaagtgttccagacagcttctgagcgcgtggaagccgaagggctggccgccctgcactccctgactgcctgtctgagccgtagcgtgcttagggccgatgctgaggatctgctggattcattcctcagtaacatccttcaggactgcaggcaccacctgtgcgaacctgacatgaagctcgtgtggccatccgctaagctactgcaagctgctgctggggccagcgccagagcgtgcgacagcgtcacctccaatgtcttaccactactcctggaacagttccataagcatagtcagtcttctcaaagaaggacgatacttgaaatgctgttgggcttcttgaagttgcagcagaagtggagctacgaggacaaggaccagcggccccttaatgggtttaaggaccagctgtgcagcctggtttttatggcgctgactgaccccagcacacagttgcagctcgtgggcatacggacacttacggtgctgggggcccagcctgacctcctcagctacgaggatcttgagctggctgtcgggcatctctaccgcctctctttcttaaaagaagattcccagagttgtagggttgcagctctggaggcgagcggcacgctggcggctctctatccagtggccttcagctcccatctagtccccaagttggccgaagagctgagagtcggggaatcaaacttgaccaatggagacgagcccacccagtgcagccggcatttgtgttgtctgcaggctctgagtgctgtgagcacccatccatctatcgtgaaggagacactgcctctgttattgcagcacttatggcaggtcaatagaggtaatatggtggctcagtcatcagacgtaatcgctgtctgccagtcgctgagacaaatggctgagaagtgccagcaagatcccgaatcttgctggtactttcatcagaccgctatcccctgcttactcgcactggcagtccaagctagcatgcccgaaaaagagccgagtgtgttgcgcaaagtgctgctcgaggatgaagtgttagctgccatggtgagtgttataggaactgccaccacccacctgagtcctgaactcgccgcacagtctgtcacacatatcgtgcccctgttcctggacggcaacgtgtctttcctgcccgaaaacagcttcccgtcgagatttcagccattccaggacggatcctccggacaacgacggctaatagcccttcttatggccttcgtatgcagtctccctcggaacgtggagattccccagctgaaccaactcatgagggaactactggagctctcatgctgtcattcttgtcctttctcttccaccgccgccgcaaaatgcttcgcagggcttttaaacaaacatcccgctggccagcagctggacgagttcctgcaactcgccgtcgacaaagtggaggcaggcctgggttctggtccctgcagatcacaagcgtttactctgttgctctgggtgacaaaggccttggtgctgagataccacccattgagcagttgtctcacagccaggttgatgggcttgctctctgatcccgagttggggcctgccgccgccgatggcttcagtcttctgatgtccgattgtacggacgttctgacaagggctggacatgcggaggtcagaattatgttcagacagcgtttcttcactgataatgtgccagctttagttcagggttttcacgccgctccccaagatgtgaagcctaactacttgaagggattaagtcacgtccttaatcgcctgcccaaaccggtcctactgcccgaattgcccacccttctgtcgctgttactagaagctttgagttgtccggattgtgtggtgcaactgagcaccctgtcctgtctccagcccctgctgctggaggcaccacaggttatgtctctgcacgtggacacactggttacaaaattcctgaatctgtcaagcagtccaagtatggcagtgcgaatcgcggcactacagtgcatgcacgctcttacaagactccctacgcctgtgctcttgccttacaaacctcaagtgattcgggcactcgccaaacctcttgacgacaaaaaacggttagttcggaaggaagccgtgtccgcccgcggagagtggttcctgctgggctccccaggatcatag

SEQ ID NO: 16068 - DNA, 3093 bp, synthetic construct
  misc_feature 1..3093: note = Description of Artificial Sequence: Synthetic coding sequence
  source 1..3093: mol_type = other DNA
atggccgcagctgcagcagtggaagccgctgcccctatgggcgcattatggggcctagtacatgacttcgtggtaggacaacaggagggtcctgccgatcaggtagcggcagacgttaagagcgggaattacaccgttcttcaagtggttgaagccctaggaagtagcctagaaaaccctgagccccgcacccgtgctcgagccatacaactgctgagtcaggtccttctgcactgtcatacactgcttctagagaaagaggtggtgcatctgatcctgttctacgagaacagactgaaggaccaccatctggtgattccttccgtcctgcagggactgaaggcattgtccttatgtgtcgcgctcccgcccggtctggcagtgtcagttctgaaggcgatctttcaggaagtgcacgtgcagagtttacctcaagtcgacaggcacaccgtgtacaacattatcactaattttatgcggacaagggaggaagagctgaagagtttgggggctgacttcacctttggctttatacaggttatggatggggaaaaagatcctcggaacctccttgtagcctttcgtattgttcacgatttgatctcccgcgattatagtttgggcccctttgtggaggaactgtttgaagtcaccagttgctattttcccatcgatttcacaccgccccctaacgacccccatgggatccagagagaagacttgatcttatcactaagagccgtgctcgcgtcgacacctcggtttgcggaatttctcctccctcttctgattgaaaaggttgactcggaagtgctgagtgccaagctggactccctgcagaccctcaacgcctgttgtgcggtctacggacagaaagaactgaaggactttctgccgtctctgtgggcgtccatcagaagagaggtttttcagacagcttctgagagggtggaagccgaagggttggccgccctgcactcccttacagcgtgcctgagcaggtcggtcctaagggctgacgccgaagatcttctggactcttttctttccaatatccttcaggattgccgccatcacttatgtgagcccgatatgaaacttgtgtggccctctgccaaactgcttcaggctgcagctggggcttcagccagagcctgtgattcggtcacctccaatgtcctgccactgctcctggagcagttccataaacactctcagtcgagccagcgacgaaccatactcgagatgctcttgggtttcctgaagcttcagcagaaatggagctacgaggacaaggaccaaaggcccctgaacggatttaaggatcagttgtgctcgctcgtgtttatggccctgaccgatcctagtacccagctccagttggtaggtatacggacactaacggttctgggggctcaacctgacctcctcagctatgaggatctggagctggctgtgggccatctgtatcggctgtccttcctgaaggaggacagtcaaagttgtcgcgtcgcagctctcgaggcctccgggacactggccgcgctttaccctgttgctttctcttcacacctggtacccaagcttgccgaggaactcagggtcggtgagagtaacctcacaaatggcgatgagccaactcaatgcagtcggcacctgtgttgtcttcaagcattaagtgcggtgtcgacacacccttccatcgtgaaagagaccctacccttactcctccagcatttgtggcaggtcaacagagggaatatggtggcacaaagctctgacgtgattgcagtgtgccagtcactacggcagatggccgaaaagtgtcaacaagatccagagagttgctggtattttcaccagactgcgattccgtgtctactggcgctggcggttcaagcatctatgcctgaaaaagagcccagcgtgcttaggaaggttctgctcgaggatgaagtgcttgcagccatggtgtccgttatcggcacagcgacgactcatctgtcccccgaattggccgcccagtctgtgactcatatagtgcctctttttctcgatggtaatgtgagctttctcccagagaactctttcccaagcagatttcagccatttcaggacggctcgtcaggccagcgccgattaatcgcactgttgatggcctttgtatgtagcctgccaaggaacgtcgagatcccacagctaaatcagctgatgagggagttactggaacttagttgctgccacagttgtccttttagcagtaccgcggccgcaaagtgcttcgccggactgcttaacaaacacccggccggtcagcagcttgatgaattcttgcaactggctgtcgataaggtggaagcaggcctggggtctgggccctgtcgcagtcaggccttcaccttactcctctgggttactaaagccctggtcctgaggtatcaccccttgtcctcatgtctgaccgcccgactgatgggcttactttctgacccagaattgggacccgcagccgccgatggctttagtttgctgatgtcagactgtactgatgtgctgacaagggccgggcatgcggaggttcgcattatgtttaggcagagattctttaccgataatgtgccagccctggttcagggcttccacgccgcaccgcaggacgtcaagccaaactatttaaaaggtctgtcccacgtgttgaatcggctacccaagcctgtgctcctgccggaacttcctacacttctgtcacttctgttggaggctctgagttgtcccgattgcgtcgtgcaactgtcaaccttatcctgcctgcagccattattgctggaagcgcctcaggtaatgtccctccatgtggatacactagtgaccaaattcttgaacctgagttcctcacccagtatggcagtgagaattgccgccctgcagtgcatgcatgctctgacacggctgccaacccccgtgcttttgccatataagccacaggttatccgggcactggcgaagccactggacgacaagaagcgtctggtcaggaaagaggctgtttccgccagaggcgagtggttcctcctcggaagcccgggcagctag

SEQ ID NO: 16069 - DNA, 1734 bp, synthetic construct
  misc_feature 1..1734: note = Description of Artificial Sequence: Synthetic coding sequence
  source 1..1734: mol_type = other DNA
atgcctaaaacaattagtgttagagtgactactatggatgccgaactagaatttgctatacaacccaacacaacaggaaaacagctctttgaccaggtggttaaaaccatcggcttaagggaagtctggttcttcggtttgcaataccaggacacaaaaggcttttctacctggctgaaactcaacaagaaagtgacagctcaggacgttcgcaaggagtcaccgctgctgtttaagtttcgggccaagttctatcccgaagatgtgtccgaagagcttatccaagacatcacccagcggctgtttttcctccaagtgaaagagggtatcctgaacgacgacatctattgtccccctgagacagccgtgctgctggcctcctacgccgtccagtcgaagtatggagattttaataaagaggtgcacaaatcgggataccttgccggcgataagctcctacctcagagggtgctcgaacagcataaactgaacaaggaccagtgggaagagcggatacaggtgtggcacgaagaacacagaggcatgctccgggaggatgctgttctggagtatctgaaaatcgcccaagacctcgagatgtatggggtgaattatttctcaatcaagaataagaagggatcagagctgtggttaggagtcgacgcactcggattgaacatatacgagcagaacgaccgacttacgcccaagattgggttcccttggagtgaaatcagaaatatctcgttcaacgataagaaattcgtgatcaagcccattgacaagaaagccccggatttcgtattttatgccccccgcctgcgaatcaataagaggattcttgccctatgcatgggaaatcacgaattatacatgcggagaaggaaacccgataccattgaggtacagcaaatgaaggcccaagcgagagaggaaaaacaccagaagcaaatggagagagcaatgttggagaatgaaaagaaaaaaagggaaatggcggagaaagagaaagagaagatcgagcgggagaaagaagagctgatggagcgtttgaaacagatcgaagaacagacaaaaaaggcacagcaggaactggaggagcagacccgccgagccttggagctcgagcaggagagaaagagggcccaaagtgaggctgagaaattggcaaaggaacgtcaggaggcagaggaagcgaaggaggctctgctacaggcatcacgcgaccagaagaagacccaggagcaactggctctggagatggctgagctgacagcccggatctctcagctggaaatggcccgacaaaaaaaagagtccgaggcagtcgaatggcagcagaaagcacaaatggtacaggaggatctggagaaaacccgcgcagagttgaaaaccgcaatgtctactccccacgttgctgagccagccgagaatgaacaggatgaacaggacgagaatggggcagaggcaagcgctgacctgcgagccgatgccatggccaaggataggtctgaagaggaacgcacaaccgaagctgaaaagaatgagagagtgcagaagcatctgaaagccctcacctcagagctggctaatgccagggacgagtctaagaagaccgctaatgacatgatccatgccgagaacatgcgtctcggacgcgataaatacaagactcttcgtcagatcagacagggtaatactaaacaacgcatcgacgagttcgagtctatgtag

SEQ ID NO: 16070 - DNA, 717 bp, synthetic construct
  misc_feature 1..717: note = Description of Artificial Sequence: Synthetic coding sequence
  source 1..717: mol_type = other DNA
atgcgctttaaaaaccgatttcagaggttcatgaatcacagggcaccagcaaacggccgctataagccaacttgctacgagcacgccgctaattgttacacacatgcatttcttatcgtccctgccatagttgggtccgccctgctgcaccggctctctgacgattgttgggaaaaaatcactgcctggatttacggaatgggactgtgcgccctttttatcgtctctaccgtgttccatatagtgagctggaagaagtcccatttacgcacagtggaacattgtttccacatgtgtgatcgcatggtaatatacttcttcatcgccgcttcatatgccccttggctgaatctgcgcgaattgggccctctcgcttcacacatgagatggtttatatggctgatggcagccggtggcacgatctacgtcttcttgtaccacgagaaatataaggtggtggaactgttcttttatctcacaatgggattctccccggccctggtggtgacctccatgaataatacagatgggctgcaggaactggcctgcggaggcttaatctactgcctcggtgtggttttctttaaaagtgatggcattattcccttcgcccatgccatctggcaccttttcgtggccacggcagctgcggtgcactactacgcgatttggaagtacctgtacaggagtcccacagacttcatgcggcacttatag

SEQ ID NO: 16071 - DNA, 2127 bp, synthetic construct
  misc_feature 1..2127: note = Description of Artificial Sequence: Synthetic coding sequence
  source 1..2127: mol_type = other DNA
atgtctacagccgacgcccttgacgatgagaacaccttcaagatcttggttgcaaccgatattcacctaggattcatggaaaaagacgccgtcagaggtaatgatacctttgtcacgctggatgagattctccgccttgcccaagaaaatgaagtggattttattttgttgggaggtgatttatttcacgaaaataagcctagtcggaagactctccacacctgccttgagttactacgaaagtattgcatgggagaccggcctgttcagtttgaaatactgtccgaccaaagtgttaacttcgggttctccaaattcccttgggtcaactatcaggacggaaatctcaacatttccatcccagtttttagtattcatggcaaccatgacgaccccaccggcgccgatgcactgtgtgctttggatattctctcctgcgccgggttcgtgaatcacttcggaagatcaatgtctgttgaaaaaatcgacatctctccagtcctccttcagaaagggtcaactaagatcgccttgtacggtctgggctcaattcccgacgaaagactctatagaatgtttgtgaacaagaaggttaccatgctgagacccaaggaagacgagaattcctggttcaacctgttcgtgatacatcagaaccggagtaaacatgggtccactaacttcatccctgaacagttcttagacgactttattgacctggtgatatggggacatgagcacgaatgcaagatcgcccctactaagaacgagcagcagctcttttacatctcacagccaggttcgagcgtcgtgacatctctgagtcctggcgaagctgttaaaaaacatgttgggctgctgcgtattaagggacggaagatgaacatgcacaaaatccctctgcacactgtccggcagttctttatggaggacattgttctcgccaatcatccggatattttcaaccctgacaatcccaaggtgacccaggctatccaatccttttgcctggaaaagatcgaagagatgctcgagaatgccgagcgcgagaggcttggaaactcacaccagcccgagaaaccgcttgtgcgcttgagagtggattacagtggcggatttgaacccttcagcgtgctccgattttcccagaagttcgtcgaccgcgtggctaaccccaaggatattattcacttctttcgacaccgagagcaaaaggaaaagactggtgaagagattaatttcggcaagctcatcaccaagccctccgaagggactacactgcgggtggaagacttggtcaagcaatactttcaaaccgccgaaaagaacgtgcagctgtccttgctcaccgaacgcggcatgggggaggctgtacaggagttcgtggacaaagaagaaaaagatgccatcgaggagttggtaaagtatcaactggagaagacgcagcggtttctgaaagagcgacacatcgatgctctcgaagacaagatcgacgaagaggttagacgcttcagagaaacccggcagaaaaacacaaatgaagaggatgacgaggttcgggaggctatgactagagcgcgcgccctgagatctcagtctgaggagagcgcttctgcctttagcgccgacgacctgatgtctattgatctagcggagcagatggcaaacgactcggacgatagtatttctgccgccaccaacaaaggaagaggtcgcggccggggcagacgcgggggaagggggcagaactccgcatctcgtggcggcagccagagaggaagagccgacacaggacttgagacatctacaagatcacgcaactcgaagaccgcagtttctgcctcgcgtaacatgtccattatagacgcttttaaaagtacaagacaacagcctagccggaacgtcaccactaagaactactctgaggtcatcgaggtagatgagagtgacgtggaggaagatatattcccaaccacatccaaaaccgaccagcgctggtcaagcacttcctctagtaagatcatgtcacagtcgcaagtcagcaaaggtgtagattttgagagctccgaagatgacgacgatgaccccttcatgaatacatccagcttgagacggaataggcggtag

SEQ ID NO: 16072 - DNA, 2043 bp, synthetic construct
  misc_feature 1..2043: note = Description of Artificial Sequence: Synthetic coding sequence
  source 1..2043: mol_type = other DNA
atgtcgaccgccgatgcactggacgacgagaacacatttaaaatacttgtagctactgacatccatctgggatttatggagaaagacgcagttaggggaaatgatacgttcgtcaccttggacgaaatcctgagactggcccaggaaaatgaagttgatttcatccttctggggggagaccttttccatgaaaataagccttcccgcaagaccttgcacacttgcttagagttgttgagaaaatactgtatgggcgaccgacccgtacagttcgagattctatccgatcagagcgtcaattttgggttttctaaatttccttgggttaactatcaggatggaaatttaaacatttctatcccagtgttctctatccacgggaatcacgacgaccccactggagcagacgctctgtgcgctcttgatattctgagctgcgcaggcttcgttaaccactttggccgatccatgagtgtggaaaagattgatatatcgcccgtccttcttcagaagggatccaccaagattgctctctatggcctaggcagcatacctgacgagagactgtaccgaatgtttgtgaataagaaggttaccatgctgaggcccaaggaagatgagaacagctggttcaacctatttgttatccaccagaatagatctaagcatggtagcactaacttcatcccagagcagtttctcgacgattttattgatctggtaatctggggtcacgagcatgaatgtaagatcgcaccgactaagaatgaacaacagctcttttatattagccagcctggatcttctgtggtgacttcactcagccccggggaagccgtcaaaaagcatgtcgggctattacggatcaaaggtcgcaagatgaacatgcataaaattcctctgcacactgtgagacagttctttatggaggacatcgtacttgccaatcacccagacatcttcaacccggataatcctaaagttacacaggctatccaatccttttgtctggagaagatagaagaaatgctcgagaatgctgagcgcgaaagactcggaaattcccaccagccagagaaaccactggtgcgcctacgggtggactacagcggcggcttcgaaccgtttagtgtacttcgcttttcgcagaagtttgttgatagagtagccaaccctaaggacattatccatttctttaggcatagagaacagaaagaaaagacgggcgaggagatcaattttggaaagctcatcacaaaaccgagtgaaggcaccactttgagggtggaggacctcgtgaaacaatactttcaaactgccgagaagaatgtccagctttcacttctgacagaaagagggatgggcgaggcagtgcaggagttcgtcgacaaggaagagaaggatgctattgaagagctggtgaaatatcagctcgagaaaacacagcggtttctgaaagagcgtcatatagatgccctggaggacaagatcgatgaggaggttcggcgtttccgtgagactaggcagaagaacaccaatgaagaagatgatgaggtgcgagaagcgatgactcgcgcccgggcattgcgctctcagagtgaggaatccgccagtgccttcagcgcagatgacctaatgagcatcgatttggccgagcagatggcaaacgacagcgacgattccattagcgccgccacaaataaaggaaggggcagaggtagaggccgtaggggcgggaggggccagaattccgcctcccggggggggtcacagcgaggtcgcgctttcaaaagcacccgacagcaaccaagccggaacgttacaaccaaaaactactccgaggtaattgaggttgacgaatctgatgtagaggaggacatttttccaaccacgagtaagacagaccaaaggtggagtagcacttcctccagtaagataatgagtcagagtcaggttagtaagggcgtggattttgagagtagcgaggatgatgatgacgacccatttatgaatacctcttctctccggcgcaaccgccgctag

SEQ ID NO: 16073 - DNA, 2124 bp, synthetic construct
  misc_feature 1..2124: note = Description of Artificial Sequence: Synthetic coding sequence
  source 1..2124: mol_type = other DNA
atgtccacagccgacgctttggatgatgaaaatacctttaaaattcttgtggccaccgatatccacctagggtttatggaaaaagacgctgtgaggggaaatgacacctttgttactctggatgaaatccttagattggctcaggaaaacgaggtggatttcattctacttggaggggatctgttccacgagaataaaccctctaggaagacgctgcatacctgtctggagctgctcagaaaatattgtatgggggaccggcccgtgcaattcgagattttatctgatcagagtgttaacttcggatttagcaagtttccttgggttaactaccaggacggcaatctgaatatcagtattccggtttttagcatacatggcaaccatgatgatcctaccggagccgacgcactgtgcgccttggacatcttgtcctgtgcaggctttgtaaaccatttcggccgaagtatgtccgtcgagaaaattgacataagtccagtgctactccagaaggggtcaacgaagatcgccttatacggcttggggtccatccctgacgaacggctctacaggatgtttgtgaacaaaaaggtcacaatgctccgacctaaagaagatgagaattcctggtttaatctcttcgtaatacaccagaataggagcaagcatggttcaactaatttcatccctgagcagttcttggatgactttattgacctcgtcatctggggacatgaacatgagtgtaaaatcgcaccgaccaaaaatgaacaacagctcttctacatttcccagcccgggtcaagcgtggtaacaagtctgtccccaggagaggcagtgaagaagcatgttgggctgctgaggataaagggccggaaaatgaacatgcacaagattccactgcacacggttcgccagttcttcatggaagacatcgtcctggccaatcacccagacatctttaaccccgacaatcccaaagttacgcaagctattcagagtttctgtctcgagaagattgaagagatgctcgagaacgcagagagggaacgcctcggaaattcacatcagccagaaaaaccactggtgagattgagagtggactactcaggtggatttgagccattctcagtgcttagattttcgcaaaagttcgtggatagagtcgccaatccaaaggacatcattcacttctttcgccatcgggagcaaaaggaaaagactggagaagagataaactttgggaaacttataaccaagccctcagaaggcacgacccttcgcgtggaagatctcgtgaagcagtacttccagacagcagagaagaatgtgcagctgagtctgctcaccgaaagggggatgggcgaggccgtccaggaattcgtggataaagaggaaaaggatgcgattgaggagttagtgaagtaccagctggagaagacgcaacggtttctgaaagagcgtcatatcgacgcccttgaggataagattgatgaggaagtgcggcgttttagagaaactaggcaaaagaataccaacgaagaggatgacgaagttcgggaagcaatgacaagggcccgcgccctgagaagccagtctgaggaatccgcatcagcattttccgctgatgacctcatgagtatcgatctggctgagcagatggcgaacgactccgatgactccatttctgccgccactaataagggtcgcggcagaggcaggggtagaaggggaggaagaggacagaactctgcttcacgaggcggctcacagcgggggcgagacacaggcctggagaccagtaccagatcccgtaacagtaagaccgccgtgtcagccagccgaaatatgtccatcattgatgcctttaaatccacaagacagcaaccttctcgcaatgtaaccactaaaaactactccgaggtgatagaggtcgatgagagcgatgtcgaagaagatatatttcccactacctccaagacagatcagcgctggtctagcacgtcttcaagcaagatcatgtcgcaatcccaggttagtaagggggtcgactttgaatcctcggaagacgacgacgatgacccattcatgaatacatcgtcactgagacgaaatcgtcgttag

SEQ ID NO: 16074 - DNA, 2136 bp, synthetic construct
  misc_feature 1..2136: note = Description of Artificial Sequence: Synthetic coding sequence
  source 1..2136: mol_type = other DNA
atgaatcgcaacatcagtcatcaaaaaggcgacgatgaaaatacttttaaaattctggtcgccaccgatatccacttaggttttatggagaaggatgcagtaaggggtaatgacaccttcgtcacactggacgagatcttaagactggcgcaggaaaatgaagttgattttattcttctgggtggggacctctttcatgaaaacaagccctcgagaaaaactctccatacctgtctcgaattgttgaggaagtactgcatgggtgacagaccagtccagttcgagattctgtccgaccagagcgtcaatttcggatttagcaaattcccgtgggtcaactatcaggacggcaacctgaacatctcaatccccgtgttctccattcatggcaaccacgacgaccctaccggagctgacgccctctgcgctttggatatactgtcatgtgcgggtttcgtgaaccacttcggacgttccatgtccgtggagaagatcgatatttctccggtactcctgcagaagggatccaccaaaattgctctctatggtctcgggagcatcccggatgaaaggctttaccgaatgtttgttaacaagaaggtcacaatgctacggccaaaggaggacgagaattcatggtttaacctcttcgtgattcaccagaatagaagcaaacacgggtctactaatttcattcctgaacagtttctggacgacttcatcgatttggtgatctgggggcacgaacacgaatgtaagatagcgcccacaaaaaacgaacaacagctgttttatattagtcagccgggcagcagtgtggttacatccctgtcaccaggtgaggctgtgaaaaaacacgtggggctgctccgtataaaggggcgcaaaatgaacatgcacaaaattcccctgcacaccgtgcggcagtttttcatggaggatatcgtgctcgcaaaccatcctgacatattcaacccagacaatcctaaggtgacacaggcgattcaatccttctgtctggagaagatagaggagatgctggagaacgccgaaagagagcgccttggcaattcacatcaacccgaaaagccactggtgaggctgagggtcgactactcgggagggtttgaaccgttctctgtgctgaggttcagccagaagttcgtcgaccgggtggctaaccccaaggacattatccatttttttaggcatcgggagcagaaagaaaaaacaggtgaagaaatcaactttggcaagctgattacaaaaccaagcgagggtaccaccttacgggttgaagaccttgtgaagcaatacttccagactgccgaaaagaacgtacagctatcactgttaacagaaagaggaatgggggaggccgtgcaggaattcgttgacaaagaggagaaagacgcaattgaggagctcgtgaagtaccagttagagaagactcagaggttcctgaaggagcgtcatattgacgccttagaagacaagatagacgaagaggtgaggagatttcgcgagaccagacaaaaaaatactaacgaagaggatgatgaagtacgcgaggcaatgacaagagcccgtgccctaaggtctcagtctgaggaatcagccagtgcattctcagcggacgaccttatgagtattgatctcgcagaacagatggcaaatgattcagatgattcaatttctgctgcaactaacaaggggcggggtagaggtagaggacgccgcggtggtcgagggcagaactccgccagccgcggcgggtcacaacgcgggagggctgataccgggctggaaactagtaccaggagccgcaattccaagacagccgtctctgcctctcgaaacatgagtataatcgacgcttttaagagcacccggcaacagccctcccggaatgtgacgactaaaaactactcggaagtgatagaagtggatgaatccgatgtggaagaggatatctttcctactacatcgaaaactgaccagcgttggtcatccacctcttctagcaagattatgtctcagtcccaagtttccaaaggagttgacttcgaatcaagtgaggacgatgacgacgacccattcatgaataccagctcccttaggcgtaataggaggtag

SEQ ID NO: 16075 - DNA, 384 bp, synthetic construct
  misc_feature 1..384: note = Description of Artificial Sequence: Synthetic coding sequence
  source 1..384: mol_type = other DNA
atgtcaaccgctgacgccctggatgatgagaacaccttcaagatcctagtagcgaccgatatacacctaggcttcatggaaaaggacgccgtgagaggtaacgataccttcgtgaccttggacgagattctacggcttgctcaggagaacgaggtggatttcatcctcttaggcggtgacctgtttcatgaaaacaaacccagtaggaaaactctccatacatgcttggaactattacggaaatactgtatgggcgaccggccagtccagttcgagattctgtccgatcaatccgtgaacttcgggttctctaaatttccctgggttaactaccaggacgggaatctgaacattagcatccccgtttttagcatccatggttag

SEQ ID NO: 16076 - DNA, 336 bp, synthetic construct
  misc_feature 1..336: note = Description of Artificial Sequence: Synthetic coding sequence
  source 1..336: mol_type = other DNA
atgtccaccgcagatgctttagatgatgaaaacaccttcaagattcttgtggcaaccgatatccatctgggtttcatggagaaagacgcagtcaggggaaatgataccttcgtgacactggatgagatcctccggctagcgcaggagaacgaagttgattttattcttcttggaggtgacctgtttcacgagaataagccatcacgcaaaacactgcatacttgtttagaattgctgaggaagtactgcatgggcgatcgcccagtgcaatttgaaattctctctgatcaaagcgtgaattttgggttctcaaaattcccctgggtcaattactag

SEQ ID NO: 16077 - DNA, 666 bp, synthetic construct
  misc_feature 1..666: note = Description of Artificial Sequence: Synthetic coding sequence
  source 1..666: mol_type = other DNA
atgtctaccgcagatgctctagatgatgagaacaccttcaaaattctggtggccaccgacatccacttgggcttcatggaaaaagacgcggttagaggaaacgacaccttcgtgaccttagacgagattctgcgcctagcacaggaaaacgaggtggatttcatactccttggcggcgacctgttccacgagaacaagccctcacgcaagaccctgcatacgtgcttggaactcctgcgtaagtattgcatgggagatcgccctgtccaattcgagatcctgtcagaccaatccgtgaattttggtttcagtaaattcccatgggtgaattatcaggacggcaatctgaatatttctattcctgtcttctccatccatggtaaccacgacgaccccactggggccgatgcgctatgtgccttagatatccttagctgtgccggcttcgtcaaccacttcggtcgaagcatgtccgtagaaaagatagacattagtcccgttctgctgcagaaagggtctacgaagatcgcactgtacgggcttggatccatcccagacgagcgcctgtatagaatgtttgtcaataagaaggttacgatgctcagacctaaagaggatgaaaactcgtggtttaacctattcgtcattcaccagaacagggtgtag

SEQ ID NO: 16078 - DNA, 822 bp, synthetic construct
  misc_feature 1..822: note = Description of Artificial Sequence: Synthetic coding sequence
  source 1..822: mol_type = other DNA
atgacaccaggcactcaatctccgttcttcttattgctgctgttgacagtcttgaccgttgtgacagggtccggccatgcaagctcaactcctgggggggaaaaagaaaccagcgctactcagcgcagcagcgtcccctcctccaccgaaaagaatgccctgtctactggcgtgtctttctttttcctgagtttccacataagcaatttacaattcaattcaagcttagaggacccatccacagattattatcaggaattgcagcgcgacatctctgagatgtttctccagatatataagcaggggggctttttaggtctctcaaacatcaagttccgaccagggagtgtagtggtacaactcaccctggcatttcgtgaaggcacaatcaacgtgcacgacgttgaaacacagttcaaccagtataagaccgaggctgcttcacgctacaatctcacaatctctgacgtgtcggtgagcgacgttccattccccttcagcgctcaaagcggagccggtgttcctggctggggcattgcactgctagtcctagtctgtgtgcttgtggctctggccatcgtgtacctgatcgcgctcgctgtttgtcagtgcaggcgaaagaactacgggcagcttgatatattccctgcaagggatacataccatcccatgagcgagtatccaacttatcacacccacggcagatacgttcccccttcttccacagaccggtccccatatgaaaaggtgagcgccgggaatggaggctccagcctttcctataccaatcctgctgtggcagcaacttctgccaacctgtag

SEQ ID NO: 16079 - DNA, 675 bp, synthetic construct
  misc_feature 1..675: note = Description of Artificial Sequence: Synthetic coding sequence
  source 1..675: mol_type = other DNA
atgacacccggcacacagagtccattctttctgctgctcctactaacagtgcttaccgccaccacagctcctaaaccggctactgtggtgaccggtagtgggcacgcgtcaagtacaccaggcggagagaaagagacctccgcaacacaacgatcaagtgtgccgtccagtaccgagaagaacgcctttcggcctggaagcgttgtagtccagctcaccctggctttcagggagggcacaattaacgttcacgacgtggaaacacaattcaatcagtataaaacagaggccgcctcaagatacaacctcactatatctgatgtctcagtgagtgacgtaccctttccttttagcgcccagagtggagctggagttccgggctggggaatagccttacttgtgctcgtatgtgtgctcgttgccctggccatagtctacctgatagccttagctgtttgtcaatgccgaaggaagaattatgggcagctagacatttttcccgcgagggatacataccacccaatgtctgagtatcccacttatcatactcatggaagatatgtgccccccagttctaccgataggagcccatacgagaaagtcagtgcggggaatggcggttctagcttaagttatacgaaccccgcagtggccgccacctcagccaacctgtag

SEQ ID NO: 16080 - DNA, 501 bp, synthetic construct
  misc_feature 1..501: note = Description of Artificial Sequence: Synthetic coding sequence
  source 1..501: mol_type = other DNA
atgactcctggaactcagtcaccttttttccttttgttgctgctcactgtccttacagcgaccacagcaccgaagccagccacagtggtgacaggctccggccatgcatcttctacaccagggggagaaaaagagacgtccgcaacccaacggtcaagcgtgcccagttccactgaaaagaatgcaagcggagcgggtgttcccggatggggaatcgccttactggtgcttgtgtgcgtgctggtcgcactagctatcgtgtatctcatagctctggcagtgtgtcagtgcagaaggaagaattatggccagctggacatctttcccgccagagacacctaccaccccatgtctgagtaccccacctaccacactcatggtcgttatgtcccgccatctagcaccgaccgcagtccatacgaaaaagtgtctgctggcaatgggggtagctccctctcgtatacaaaccccgccgtggccgccacttctgctaacctgtag

SEQ ID NO: 16081 - DNA, 612 bp, synthetic construct
  misc_feature 1..612: note = Description of Artificial Sequence: Synthetic coding sequence
  source 1..612: mol_type = other DNA
atgactccaggaactcagagcccttttttcctgctgctgttgttgacagtgttgacagttgttactggttccggtcatgcttccagcacccccggcggcgaaaaggaaaccagcgcaacccagagatccagtgtaccctcatccactgagaagaacgctatccccgcgcctaccactactaagagctgcagagagacctttcttaaatgcttctgtagattcattaataaaggagttttctgggcatcacctatactttcatcagtatccgacgtgccttttcctttctcagcgcagagcggcgccggagtgcccggttggggtattgcccttctcgttctggtgtgcgtgcttgtggcgctcgccattgtgtatctcattgcgctcgccgtctgccagtgtagaaggaagaattatgggcaactggatatcttcccagccagggacacttaccaccctatgtcagagtatcctacatatcacacgcacgggagatatgtccccccatcctcaacagatcgctccccttacgaaaaagtcagtgcgggcaatgggggatcttcgctgagctacactaacccggccgtggcggccacaagcgccaatctgtag

SEQ ID NO: 16082 - DNA, 507 bp, synthetic construct
  misc_feature 1..507: note = Description of Artificial Sequence: Synthetic coding sequence
  source 1..507: mol_type = other DNA
atgacacccggcactcagagcccattcttcctccttctcctcttgaccgtactgacagtagtgacagggagtggacacgctagcagcacacccggcggagagaaggagacttccgcaacccagcgcagctcagtgccttccagcacagagaaaaacgcactgagcacaggggtgtctttctttttcctgagcttccacatttcaaacctgcaatttaactcatctctcgaagatccctcaacagattattatcaggagttgcagcgggacatttccgaaatggctgtgtgccaatgccggaggaagaactacggacagctggacattttccctgccagggacacctatcaccccatgtcagagtacccaacttaccatacccatggcaggtacgtacctccttcttccacagacaggtccccttacgagaaggtttcagctggcaacggagggagcagcctgtcttacacaaatccagctgtcgccgcgacttcagcaaacctgtag

SEQ ID NO: 16083 - DNA, 768 bp, synthetic construct
  misc_feature 1..768: note = Description of Artificial Sequence: Synthetic coding sequence
  source 1..768: mol_type = other DNA
atgacgccaggcactcagagccccttttttttgctgcttctcttgactgttctgactgtcgtcactgggtccggtcacgcctcctctacgccaggtggtgagaaggagactagtgccactcagcgcagctctgtgccctcatccacagaaaaaaacgcgttcaattcctccctcgaagaccctagtacggactattaccaagagcttcagcgtgatattagcgaaatgtttctgcagatttacaaacaggggggcttccttggactgtctaatatcaagttccgcccaggatcggtggtggtgcagctcacactcgccttccgagagggaacaatcaacgtgcatgacgtcgaaactcagtttaatcaatataaaacggaagctgcctccagatataatttgacaatctccgacgtgagcgtcagtgacgtgccctttcctttttcggcccagtccggcgctggggtgcccggatggggcatcgctctgttggtgctggtttgcgttctggtggccctggccatcgtctatcttatcgcactggcggtgtgccagtgtcgccgcaaaaattacggtcagctggatatcttcccagccagggatacatatcacccaatgagtgaatatccaacgtatcacacgcatggaagatatgtacctccctctagcacagacaggagtccctatgaaaaagtgtccgctggtaacggcggtagcagcctttcctatacaaatcctgcagtagcggcaacctctgccaatctgtag

SEQ ID NO: 16084 - DNA, 795 bp, synthetic construct
  misc_feature 1..795: note = Description of Artificial Sequence: Synthetic coding sequence
  source 1..795: mol_type = other DNA
atgacacccggaacacagagccccttttttctgctgttgctccttaccgtcttgaccgctaccaccgcccctaagcctgcaacagtagtgaccggaagtggccatgcgtcctcaaccccaggcggcgagaaggagacaagcgcgacacagagatcatccgtgccctcttcgactgagaagaacgcttttaatagctctttagaggatcctagcaccgattactaccaagagttgcagcgagacatctcggagatgttcctgcagatatacaaacaaggaggcttcctgggcttgtctaacattaaattccgccctgggtctgttgtggtgcaactgactctagcattcagagaggggaccattaacgtgcatgacgtcgaaacccagtttaaccaatataagacagaagcagcatcccggtataacctgaccataagtgatgtctcggtgtccgacgtgccgtttccctttagtgcccaaagcggagccggagtgcctgggtggggcatagctctgttggtgctggtatgtgttcttgtggcactcgctattgtgtacctcattgccttggcagtttgtcagtgccgccgaaagaactatgggcagcttgacatcttccccgcacgcgatacataccatcccatgagtgagtatccaacttatcacacacatggaaggtatgtccctcctagcagtaccgatcgatcaccctacgagaaggtcagtgccggaaatggcgggtcgagcctctcctacacaaacccagctgtcgctgccactagtgccaatttgtag

SEQ ID NO: 16085 - DNA, 597 bp, synthetic construct
  misc_feature 1..597: note = Description of Artificial Sequence: Synthetic coding sequence
  source 1..597: mol_type = other DNA
atgacccctggtactcagtccccatttttcttactccttctgctgaccgtgttgacagtggtcaccggcagcggccacgcaagttccacgcccggcggcgaaaaggaaacgagtgcgacccaaaggagttctgttccaagctctacggaaaagaacgctttgagcactggcgtcagttttttcttcctgtcttttcacatcagcaacctgcagtttaattcctctctggaagatcccagtactgattactatcaggaacttcaaagggatatttctgagatgttccttcaaatttataagcagggcggctttctggggctcagtaatatcaagtttagacccggctccgttgtggtacagttgactctcgccttcagagaagggacgattaatgtgcatgatgttgagacgcagttcaatcaatacaagacagaggcagctagtagatacaacttaacgatttcggatgtgagcggttgcctgtctgtcccaccgaaagagctgcgggccgctggccatctgtcctccccgggctacttgccctcctacgaaagggtcccgcacctgccccatccctgggctctgtgtgcgccctag

SEQ ID NO: 16086 - DNA, 1428 bp, synthetic construct
  misc_feature 1..1428: note = Description of Artificial Sequence: Synthetic coding sequence
  source 1..1428: mol_type = other DNA
atgaccccgggcacccaatctccctttttccttctgttgctcctgaccgtgttgaccgtggtgacgggctctggacatgcgagttccacaccgggaggcgaaaaggagaccagcgcgactcagagaagcagcgtcccttctagtacagagaagaatgccgtgtccatgacttcctcagttctgtcgagccactccccagggtccggctcctctacgacccaggggcaagatgtgactctcgcgcccgcaactgagcctgccagcggaagtgcagccacatggggtcaggacgttaccagtgttcccgttactaggcctgcattgggatcaaccactccacctgcccacgatgtcacctctgcgccagacaataaaccggctccaggatctactgcccctccggctcatggggtaacctctgcccccgacacccggcccgcacctggaagcacagccccccctgcacacggtgttacatccgccccggataatagaccggccctgggctccactgctcccccggtacataatgtcacatcagcatcaggtagtgcttccggctcagcctcgacactggtgcacaatggaacatctgctagggccactaccacacctgcttctaaatcaacaccattttctattccatctcatcattccgacaccccgacaacactcgcctcgcactccaccaagaccgacgcctcttcaacgcaccactcaactgtgcccccacttaccagttctaaccatagcactagccctcagctctccaccggtgtgtcgttcttttttctctcattccacatttctaacctgcaatttaacagttctctggaagatccgtccacggactattaccaagaactgcaacgggacatcagcgaaatgtttctccaaatctataagcagggtggttttttgggcctcagcaatattaaattccggccgggctctgttgttgtgcagttaacactcgcatttcgggaaggaactattaacgtgcatgacgtggaaacacaatttaaccagtacaaaacagaggcggcttcccgttataatctgaccatctctgatgtgagtgtctctgatgtgccattcccttttagcgcacaatctggtgctggggttccaggttgggggattgccttactggtcttggtctgcgtgcttgtggccctggctatagtatacctcatcgcactcgcagtttgccagtgtcgccggaaaaattatggtcaactggacattttcccggcccgcgacacttatcacccgatgagtgagtacccgacttaccacacacacgggagatacgtgcccccatcctctacagacagaagtccttatgagaaagtgtccgctggtaatggcggttccagtctcagttatacgaatcctgccgtcgctgctaccagcgcaaatctatag

SEQ ID NO: 16087 - DNA, 480 bp, synthetic construct
  misc_feature 1..480: note = Description of Artificial Sequence: Synthetic coding sequence
  source 1..480: mol_type = other DNA
atgacgcctgggacccaatcccctttcttcttattactgctgcttacagtgctgactgcaaccacggcacccaagcctgccactgtggtgaccggctctggccatgcgtcaagtactccgggcggggagaaagagacatccgccacacaaagatcttcagtgccgtcctccacggagaagaatgcctttaactcaagcctcgaggacccatctactgattattatcaagaattacagcgcgacatttccgaaatggctgtctgccaatgtagacgcaagaattacggccagctggacatctttccggccagagatacatatcatccaatgtccgaataccccacctatcacactcatggccgctatgtcccccctagctccacggaccggtctccttatgaaaaggtgtctgcaggaaacggcgggtcttctttgtcctacacgaaccctgcagtggccgctacaagcgcgaacctttag

SEQ ID NO: 16088 - DNA, 693 bp, synthetic construct
  misc_feature 1..693: note = Description of Artificial Sequence: Synthetic coding sequence
  source 1..693: mol_type = other DNA
atgactccgggtactcaaagcccatttttcctcctcctcctgcttacggttttgacagtcgtgactggcagcggccatgcctcctccactcctggtggcgagaaggaaacctcagctacccagcggtccagcgttcctagttcaaccgaaaaaaatgccattccagcacctacgactacaaaaagttgccgagaaacatttctcaagtggcccggcagcgtggtggtgcagttgactctagctttccgcgagggcacaattaacgtgcatgacgtagagacgcagttcaatcagtacaagaccgaggccgcatcccgctacaatctgactatatcagatgtgagcgtgagtgacgttccgttcccctttagcgcgcagagcggggccggcgtgcctgggtggggaatagcattacttgtacttgtatgcgtgcttgtcgctctggcaatcgtctacctgatcgcgctggcagtatgccagtgcaggcgaaagaattacggtcaactggatatcttccccgccagagatacttaccacccgatgtcggaataccccacttatcacacacacggacgctatgtcccaccttcatctactgaccgatccccgtatgagaaggtgtctgcaggaaacggtggttcttcactctcctatacaaaccctgccgtggccgcgactagcgccaacctatag

SEQ ID NO: 16089 - DNA, 1686 bp, synthetic construct
  misc_feature 1..1686: note = Description of Artificial Sequence: Synthetic coding sequence
  source 1..1686: mol_type = other DNA
atgaccccgggaacgcagagtcctttcttccttctcctgcttctgacggtgctgacagtagttaccgggagtggccatgctagcagcacacctggcggcgagaaagagacaagtgcaacacagcggagctctgtacccagcagcaccgaaaaaaatgccgtgtccatgaccagtagcgtgctgagctctcacagccctggcagcggatctagcactactcaagggcaggatgttaccctggctcccgcgaccgagcccgcctctggtagcgccgctacctggggacaggacgtcacgtccgtcccagtgacgcgacccgccctgggcagcacaactcctcccgctcatgatgtaacgagtgcccctgatacacggcctgcgccggggagtaccgcccccccagcccatggggtcacctctgcacctgatacgcgccctgcgcccgggtccactgcccctcctgcacacggagtgacgtctgccccagatacacgaccagctcccggatccactgccccacctgcccatggcgttacatctgcaccagatacccggccagctccgggaagcactgcccctcccgcacacggggttacatcagcaccagataccaggcgcgctccaggttcaactcccgcccctgggagcactgccccgccagcccatggggttacctctgcaccggacacccgccccgccccagggtctacagctccccccgcgcatggggtgacgtcggccccagacaacagaccagccctgggatcgacggcaccgcccgtgcataatgtgaccagtgcaagcggctcggcctccggttctgcctctacactggtgcataacggcacctccgcacgcgctaccacgactcccgcgtcaaaaagcacaccattctcgatcccctcccatcactcggacacccccaccactctggcctcacacagcactaagaccgacgcctcctcaacacaccatagcaccgtgcctcctcttactagttctaatcattcaacctccccgcaactctccaccggggtgagctttttcttcctaagctttcacatctccaacttgcagtttaacagctctttggaggatccctcaacagattactaccaggaacttcagagagatattagtgaaatgttcctccagatctataaacaggggggcttcttgggcctctctaacattaagtttaggcccgggtccgtggtggtacagctgacattggctttcagggagggtactattaatgtgcatgatgtcgagactcaatttaaccagtacaaaaccgaggccgccagtcggtataatttgaccatctcagacgtgtcagtaagcgatgtgccgtttcccttttctgcacagagtggcgcaggagttcccggctggggcattgctctgcttgtgcttgtttgcgtcctggtcgcgcttgctattgtgtatctcattgcgctggctgtgtgtcagtgcaggagaaagaattatgggcagctcgatatattccctgctagagatacgtaccaccccatgtcagaatatccaacctatcatacccacgggcgatacgtgcctccaagttccaccgaccggagcccgtatgagaaggtgagcgctgggaacgggggctcatcgctcagctacacgaaccctgcagtagcagccacctccgccaatttatag

SEQ ID NO: 16090 - DNA, 690 bp, synthetic construct
  misc_feature 1..690: note = Description of Artificial Sequence: Synthetic coding sequence
  source 1..690: mol_type = other DNA
atgacacctggaactcagtcccctttcttccttttgctattactcaccgtcctgaccgtggttaccgggtccgggcatgcgagcagcaccccaggtggggagaaggagacgagcgcgactcaaaggtctagtgttcctagtagcactgagaaaaacgctatttacaaacagggaggatttctgggtctcagtaacatcaaattcagacccggcagtgtggtagtgcagctgaccttagccttcagggaggggacaatcaacgtgcacgacgtggagacacaattcaatcagtacaagacagaggcagctagtagatacaatctaactatctccgatgtgtcagtgagtgatgtgccctttccctttagcgcccaaagcggagcgggcgtacccggttggggaatcgccctgctggtcctggtgtgcgtcctcgtggctcttgcgattgtgtatttaattgcactcgccgtctgccagtgccggcggaaaaattatggccagcttgacatcttcccagcaagggacacgtaccaccctatgagcgagtacccaacgtaccatacgcacggccggtacgtgcccccatccagcaccgaccgtagcccatacgagaaggtgagcgccggcaacgggggcagtagtctcagctacacgaaccccgccgtggccgcaacctcggcgaacctgtag

SEQ ID NO: 16091 - DNA, 780 bp, synthetic construct
  misc_feature 1..780: note = Description of Artificial Sequence: Synthetic coding sequence
  source 1..780: mol_type = other DNA
atgacgcctggcactcagagtccttttttcctcctgctccttcttacagtcctgaccgccacgactgccccaaaacctgctactgtagtgaccggaagcggccacgcaagcagtacacccgggggtgaaaaggaaacctccgcaacacagaggagttccgtgccaagctcaaccgagaagaatgccttcaatagctccttggaagacccgagcacggattactatcaggaacttcaaagagacattagtgaaatgttcctgcagatatacaaacagggaggcttcttaggcctatctaacattaagtttaggcccggcagcgttgtggtacaactcacactggcgtttcgggaggggacaatcaatgtgcatgacgttgagacacagttcaatcagtataagacagaggcagcctccagatataatttgaccatcagcgacgttagcgtttcagacgtaccctttccttttagcgctcagtccggtgcaggggtacccgggtggggcattgccctgctggtgttagtatgtgtcctggtggccctggcaattgtttatttgattgctctagccgtgtgccaatgtcggcgcaagaactacgggcaattagacatcttcccagcgcgggacacttaccaccccatgagcgaataccctacctaccacacacacggcaggtacgttcccccctcatccactgatcgatccccgtacgagaagagacagaatggatggagtactatgccccggggggcgctccctgaggaatctcagggatag

SEQ ID NO: 16092 - DNA, 1833 bp, synthetic construct
  misc_feature 1..1833: note = Description of Artificial Sequence: Synthetic coding sequence
  source 1..1833: mol_type = other DNA
atggggctgaaagctgcacaaaaaacgctatttccactgcggagcatcgacgacgtggtgagactctttgcagcggaactggggagggaagaacctgacctggtattgttgagccttgtattggggttcgttgagcatttcctggctgtaaatagagtaatccccacgaacgtccctgagctcacctttcagccaagtcccgctccagatcctcctggcggcctgacttactttcccgtggcggatctctccatcatcgccgcactctacgcgagatttaccgcacagatcaggggagccgtcgacctgtcactctacccccgggaggggggggtctcatcgcgtgaattggttaaaaaagtgagcgacgtcatctggaacagcttaagcaggtcttattttaaggatcgtgctcacatccaatccctgttctcgttcatcactggcaccaagctcgattctagtggagtagcgtttgcagtcgtgggggcctgtcaggcactgggactccgtgatgtgcatcttgccctgtctgaggatcacgcctgggtggtcttcggtcccaatggggaacaaaccgccgaggtgacctggcacggtaaaggaaacgaagaccgtcggggccagaccgtgaacgctggtgtcgcagagagaagttggctatacttaaagggctcttatatgaggtgtgatagaaagatggaggttgctttcatggtctgcgctataaacccttccattgacttgcacaccgatagcctggaactgctgcaactgcaacaaaagctgctctggctcctttacgacttgggccatctcgagcggtatcctatggcccttggcaacctggctgacctggaggaactggaaccaacccccgggagacctgacccactcaccctttaccataagggaatcgctagcgctaagacatactaccgggatgagcacatttacccatatatgtaccttgctggataccactgtagaaaccgcaatgttcgagaagcgcttcaagcttgggcagacactgctaccgtgattcaggactataactactgccgggaggacgaagaaatatataaagagttctttgaagtggccaacgacgtgattcccaatttgttaaaagaggccgcaagcttattggaagcaggggaggaacgcccaggagaacaaagccagggaactcaaagccaaggttcagccctgcaggaccctgagtgcttcgctcacctgctaagattctacgatggtatatgcaaatgggaagaggggagcccaactccggtcctgcatgttggttgggcaaccttcctggtgcagagtctgggtcggttcgaaggccaggtgaggcagaaggtccggatcgtctccagagaagcagaggccgctgaggctgaggagccttggggagaggaagccagggagggcagaaggcggggacctagaagggagtccaaaccagaggaacctccaccacccaaaaaacccgctctggataaaggtctaggcaccggacagggcgccgtgtcagggcctccgcgaaagccaccgggcacagttgccggaacggccagaggccctgagggaggcagcactgcccaggtcccggcccctacggcttctcctcccccggaagggccagtgctgaccttccagtccgaaaagatgaagggcatgaaggagctgttggtggctactaagatcaactccagcgctatcaaactgcagctcaccgcccagtcacaggttcagatgaaaaagcaaaaggtaagcacaccttctgattataccctgtcgtttctcaaaagacagcggaagggtctttag

SEQ ID NO: 16093 - DNA, 1833 bp, synthetic construct
  misc_feature 1..1833: note = Description of Artificial Sequence: Synthetic coding sequence
  source 1..1833: mol_type = other DNA
atggggctaaaggccgcccaaaagaccctgtttcccctaagaagcatagatgatgtcgttcggctgttcgccgccgaacttggccgagaagaaccagacctagtactcctctcgttagttttgggatttgtggaacacttcctcgctgtgaatcgcgtgattcctacaaacgtccccgagttgaccttccagcccagcccagccccagacccgccaggcggcctgacatattttccagtagctgacctgtccattattgccgcactctatgctaggttcactgctcaaatacgaggggccgtggatctgtcactgtacccgagagaagggggagtgtcatcgcgcgagctcgtcaagaaggtgagcgacgttatctggaacagcttgtcaagatcatacttcaaagatcgcgcccacatccagagcctgtttagctttattaccggaacaaaactggacagtagcggcgtggctttcgctgtggttggcgcctgtcaggcgctggggctcagagacgtgcacttggcattaagcgaggaccacgcctgggtcgtttttgggcccaatggggagcagaccgcagaggttacgtggcatggcaagggcaacgaagaccggaggggtcagactgtcaatgccggcgtcgctgagcgcagctggctttatctcaagggtagttatatgcgatgcgacaggaaaatggaggtggcatttatggtttgcgctatcaacccatctatcgatctccatactgatagcctggagctcctccaacttcagcagaagcttctgtggttattgtacgatctcgggcacctagagaggtatccaatggcgctcgggaacctggctgatctggaggaattggagccaacaccaggtagacccgacccacttaccctgtaccacaagggaatcgcatctgcgaaaacctattatcgggacgaacacatatacccctatatgtatctggcaggctaccactgccgcaacaggaacgtccgcgaggctctgcaggcctgggcggacaccgcaacagtgatccaggactacaattattgtcgggaggacgaggagatctacaaagaatttttcgaggtcgcaaacgatgtaataccaaacctgctcaaggaagcggcttcacttctcgaagcgggtgaagagaggccaggagaacagtcccagggtacgcaatcacaaggaagcgcattacaagatccagagtgtttcgctcacttacttaggttttatgacggcatctgcaaatgggaagaaggaagtccgacaccagtgttacatgtgggatgggctacctttttagttcaatctctgggccgctttgagggtcaggtgcgacaaaaggtgagaatagtgtcccgggaggcagaagcagctgaggccgaggagccttggggcgaggaggcccgcgaaggccgccgccgaggcccccggcgagagtccaagccagaagagccaccacctcctaagaaaccggctctggacaagggtcttggaacagggcaaggcgcagtttccgggccacccagaaagccgccaggcactgtagcgggaactgcacgcggaccagagggaggctctaccgcacaggtccctgcccctaccgcctcacccccaccagaaggaccggtcctcaccttccagtccgagaagatgaaagggatgaaggaacttctggtcgccactaaaattaactcgtccgctataaaactgcaactgacagctcagtcccaagtccagatgaaaaagcagaaagtgtcaacacctagcgattacacgctcagcttcctcaagcgacaacgcaaaggcctgtag

SEQ ID NO: 16094 - DNA, 1848 bp, synthetic construct
  misc_feature 1..1848: note = Description of Artificial Sequence: Synthetic coding sequence
  source 1..1848: mol_type = other DNA
atgggtctcaaagcggcccagaaaacacttttccccttaaggagcatagacgacgtggtgcggctgtttgcggctgaattgggccgggaagaacccgaccttgtcttactgtcgctggtgttgggcttcgttgaacactttctggctgtaaaccgtgtgatccctaccaacgtaccagagcttacattccagccttcccccgcccccgatcctcctggcgggctaacctatttccccgtcgcagatctgtcaatcatagcggccctgtatgcaagattcaccgcccaaattcggggtgctgtggacctgagcctatatccaagagaaggaggtgtaagttcccgagagctagtcaagaaagtgagcgatgttatctggaatagcctaagcaggtcctacttcaaggaccgtgcacatatacaaagtcttttttccttcattaccggctggtcacccgtgggtactaaactcgattcctcgggcgtcgcctttgccgttgttggcgcatgtcaagcgctcggactgcgtgatgtgcacctggctctaagcgaggatcatgcttgggtcgtcttcggccccaatggtgagcagacagctgaagtgacctggcatggaaagggcaatgaagaccgcaggggtcagaccgtgaatgcaggcgtggcagaaagaagttggctatatttgaagggctcctacatgaggtgcgatcgaaaaatggaagtagctttcatggtttgtgctataaacccttctatcgatttacatacagattccttggaacttctgcaacttcagcagaaactgctgtggctgctgtatgatctcggacacctggaaagataccccatggcgctgggcaatctcgcagatttggaagagctggaacctacacccggccgccctgatcccctgaccctgtatcacaaaggaatcgcctcagccaagacctattatagagatgaacatatctatccctacatgtacctcgccggatatcactgtcgtaatcggaatgtgagggaggcactgcaggcctgggcggacactgccaccgtgattcaagactacaactattgtagagaggacgaagagatctataaggaattttttgaggtcgcaaacgacgtaattcccaacctgctgaaggaagcagcatctctccttgaagctggtgaagagcgcccaggcgagcagagccagggcacccagtcacaaggcagtgcactgcaggatcccgaatgtttcgcccacctcctccgcttctacgacggaatctgcaagtgggaggagggcagccctacacccgtcttacatgtgggttgggctacctttctggttcagagcctaggcaggtttgagggacaggtgagacagaaagtgaggattgtgagccgtgaggccgaggcagctgaggccgaagaaccatggggcgaggaggcccgcgaggggagacgtcggggtcctaggcgtgagtcaaaacctgaggagcctcccccacctaagaagccggcacttgacaagggactggggaccggacagggagccgtaagcgggcccccacggaaacctccaggcaccgttgccgggacggcgcgaggccccgaaggtggctccaccgcccaagtgccagcccccactgcgagccctccacctgagggaccagtgctgacttttcagagtgaaaagatgaaaggtatgaaagaattgctggtcgcaacgaagattaactccagtgccataaagctgcagttaacagcacagagtcaggtccagatgaagaagcagaaggtcagcaccccatcagattacacccttagctttttgaagaggcaaaggaaggggctctag

SEQ ID NO: 16095 - DNA, 1848 bp, synthetic construct
  misc_feature 1..1848: note = Description of Artificial Sequence: Synthetic coding sequence
  source 1..1848: mol_type = other DNA
atggggttgaaggcagcccagaagaccctcttccctctgcggagcatcgatgacgtggtacggctctttgctgccgaactggggagggaagaaccggatctggtgttgctgtctctggtgttggggttcgtcgagcacttcctagccgttaacagagttattccaaccaatgttcccgaattgaccttccagccgtcacccgccccggatccaccaggcggcctgacatacttccccgtcgccgatttatcaatcatcgcagctctgtacgccagatttacagctcagatacggggagccgtagacctttccctctatccgcgagagggcggcgttagtagtcgggaacttgtgaagaaagtatcggacgttatttggaacagcttatcaagatcatatttcaaggatcgggcccatattcagtctctgttcagctttatcactggctggtcccccgtgggcaccaagcttgacagttccggtgtagcctttgccgtggtgggagcatgccaagcactggggctgagggacgtccacttagctttgagcgaagaccacgcttgggtggtgttcggcccaaacggcgaacagacggccgaggttacctggcacgggaaaggaaatgaagatcgaagaggtcagactgtgaatgccggagtagccgaacgaagctggctgtaccttaaaggcagctatatgcggtgcgatcgaaaaatggaggtagcctttatggtgtgtgccatcaatccctcaattgatcttcacactgatagtctagagctgctccaactccagcagaaactgctatggttactgtatgacctggggcacctggagcgctatccgatggctctgggcaacctggccgatctagaagagctggaacctacccctggaagacctgatcccctgactctgtaccataagggcattgctagcgcgaaaacttactacagggatgaacatatctacccttacatgtatctagcgggatatcactgcagaaacagaaatgtgcgggaagcgctgcaagcctgggctgacaccgccacagtgatacaggattacaattattgccgggaagatgaggagatctacaaagagtttttcgaggtggccaacgacgttattccaaacttactgaaagaggctgcctccctactcgaggccggtgaggaacgtcctggcgaacagtcccagggtacacagagtcagggctctgccctgcaagatccagaatgctttgcccatctgctcagattttacgacggaatctgcaagtgggaagagggctcccctacaccagtcctgcacgtcgggtgggcgacgtttcttgttcagtctctgggtcgctttgaggggcaggtgaggcagaaagtgcgcattgtcagcagagaagcagaggctgccgaagcggaggagccctggggtgaggaagcccgggagggccgccgccgcgggccccgtagagaaagcaagcctgaagagcctccacctccgaagaagcccgctctggacaaaggcctggggactgggcaaggggcagtttcaggccccccccgcaaacccccgggtactgtggccggaactgcccggggtccggaaggaggaagtacggcccaggtcccagcacccaccgcgtccccaccccctgagggtccagttctgactttccaaagtgagaaaatgaaaggcatgaaggagttgctggtggcaacaaagattaattcatccgcaattaaactccagctcacggcccagtcccaagttcaaatgaagaaacaaaaggtgtcaaccccttccgattacactctgagttttttaaagcgtcagagaaagggactctag

SEQ ID NO: 16096 - DNA, 1668 bp, synthetic construct
  misc_feature 1..1668: note = Description of Artificial Sequence: Synthetic coding sequence
  source 1..1668: mol_type = other DNA
atggggttgaaagcagctcaaaagactctctttccactccgcagcatagacgacgtggtgcgcctcttcgccgctgagcttggtagagaagagcctgacttggttctcttatccctcgtgctgggattcgtggaacatttcctcgctgtgaatagggtcataccaaccaatgtgccggagctgacttttcaaccttcacccgcgcctgaccctccagggggtctcacatatttcccagtagcagacctcagcatcattgcagcactctatgctcggtttacggcccagatcagaggcgcagtcgacctcagtctatatcccagggaagggggcgtctctagtcgggagctagtcaagaaggtgagcgatgtgatttggaactctttgagccggagctatttcaaggatagagcacatatacagtcactgttctccttcatcaccgggaccaaactggacagttctggtgtggcatttgcagtggtcggggcttgccaggccctcggcctgcgggatgtacacttggcattaagtgaggatcacgcctgggttgtctttgggccaaatggcgaacagactgccgaagtgacttggcacggcaaaggcaacgaagatcgcaggggccagaccgtgaacgccggcgttgccgaaaggagctggctctatctgaaggggtcatacatgcggtgtgatcgaaaaatggaggtggcattcatggtgtgcgccattaacccaagcatcgacctgcacacagacagtcttgagctgctgcagctgcagcagaaattgttatggctgctgtacgacttgggacacttggagaggtatcctatggcattggggaatttggctgatctggaagagctggaacccacccctggtcggccagacccccttactctttaccacaaaggtatcgcgtccgcaaagacttactaccgggatgagcacatctacccttatatgtacctcgctggctaccactgtagaaatagaaatgtccgcgaagccctccaagcttgggctgatacagccacagtgattcaagattataactactgccgcgaagatgaggaaatctacaaagagttcttcgaagtggctaacgatgtgattccgaatctgctgaaagaggcagcaagcctgctggaggcgggtgaggaaaggcccggagagcagtctcaggtgcgccagaaggtcaggattgtttcaagggaagcagaggctgcggaggcagaggagccttggggtgaagaagcccgtgagggaaggcggagaggcccgcgaagggagtccaaaccggaggaaccaccacctcccaaaaaaccggccctggacaaaggcctcgggactggacagggcgccgtgtctggacccccacgaaaaccaccaggcaccgtcgccggcactgctagaggacccgagggtgggagtactgcacaggttccggcccccacagcctcaccaccccccgagggaccagtactgacgttccaatctgagaaaatgaaaggaatgaaagaactgcttgttgccaccaaaatcaattcatcggctatcaaattacaattaactgctcagtctcaggtccagatgaagaaacagaaggttagcacaccaagcgattacaccctgtccttcctcaaaaggcaacgcaaaggactctag

SEQ ID NO: 16097 - DNA, 1728 bp, synthetic construct
  misc_feature 1..1728: note = Description of Artificial Sequence: Synthetic coding sequence
  source 1..1728: mol_type = other DNA
atggggctgaaagcagcccaaaagactctatttcccctgcggagcatcgacgatgtggtccgactattcgccgcagaactgggccgcgaggaacccgatctggtgcttctatctctggttcttggttttgttgagcatttcctcgccgtaaatagagtcatcccgaccaacgtcccggagctgacctttcagccctctcccgcccctgatccacctggcggcctgacctacttcccagtggcagacctgagtatcattgccgcactgtatgcacgctttactgctcagatacggggcgccgtggatctgtcactgtatccccgtgagggaggcgtgagttcaagagaactggtgaaaaaggttagcgacgtcatttggaatagtctttcacggagttacttcaaggatagagcccacattcaaagcctcttttcattcatcaccggcacaaaactggactcttctggagtggctttcgctgtggtgggtgcctgccaagccctgggcctgcgggacgttcatctcgctctcagcgaagatcatgcctggtcctggctgtatttgaaagggtcatacatgagatgtgatcgtaaaatggaggttgcgttcatggtctgcgctataaaccccagcatagacttgcatacagattctctggagctgctgcagctgcaacaaaaactcctttggctcctgtatgacctgggacacctcgagcgataccccatggccctggggaacctggccgacctagaagaactcgagccaacgcctgggcggccagatccgttgaccctttaccacaaagggatcgcaagtgccaaaacatactacagagacgaacatatttatccctacatgtacttggccgggtatcactgtcgtaaccgcaacgtgcgagaggccctgcaggcctgggccgatactgccaccgtgattcaagactacaactactgccgggaagatgaagaaatctataaagagttctttgaagtcgctaacgatgtcatacccaaccttttgaaggaggccgcctccctgttagaagccggggaggaacggcctggagaacagtcacagggtacccagtctcagggaagtgccctgcaggaccccgagtgttttgcacacctgctccgcttttatgatggaatatgcaagtgggaagaaggatcgcctactccagtcctgcacgtgggatgggcaacatttctcgtacagtctctcggaaggttcgaagggcaagtgcggcaaaaggtgaggatcgttagcagggaagccgaggcggcggaggccgaggaaccgtggggagaggaggcaagggagggtcggaggagaggcccacgccgagagtcaaagcccgaggaacctcccccacccaagaaacctgctctggataaaggtttagggactggtcagggcgccgtgagtggtcccccccgcaagccacccggaacagtcgcaggtaccgcaagggggcctgagggtggatctactgcccaagtgccagctccgactgccagcccgccccctgaagggccagtgcttacctttcagtccgagaagatgaaagggatgaaggaactcctcgttgccactaagatcaactcatccgcaattaaactgcagctgaccgcacagtctcaagtgcagatgaaaaaacaaaaagtgtctaccccgtccgattacacactgtctttcttgaagcgacagcgtaagggtctctag

SEQ ID NO: 16098 - DNA, 1833 bp, synthetic construct
  misc_feature 1..1833: note = Description of Artificial Sequence: Synthetic coding sequence
  source 1..1833: mol_type = other DNA
atgggccttaaggctgcacagaagactctgttcccgctcagaagcatcgatgatgtggtgagactttttgcggcagaactcggcagggaggagcctgatctggtgttgctgagtctcgtactggggtttgtcgaacacttcctggccgtgaatcgagtcatcccaacaaacgtaccagaactgacatttcagccttctcccgcacccgatccaccgggaggcctaacctacttccctgttgcagatttgagcatcattgccgcactctatgctagatttacggcgcagatccgcggagccgtggacctctcgctgtatcctcgggagggtggggtgtccagtcgcgaactagtcaaaaaggttagcgatgtcatatggaattccctgtcgcgtagctatttcaaggatcgcgctcacatccaaagcctgttctcattcataacaggtaccaagttggattccagcggcgtcgcctttgcagtggtaggggcttgccaagcattaggcctgcgcgacgttcatttggcgctgagtgaggaccatgcgtgggtggtctttggcccaaacggcgaacaaaccgccgaggtgacgtggcacggcaagggcaacgaggaccgccggggtcagaccgtgaatgccggcgtggcagagagatcctggctttatctcaaaggaagctacatgcgttgtgaccggaagatggaagtcgctttcatggtgtgcgcaatcaaccccagtattgacctgcacacagattcactcgaactgctgcagctgcagcagaaactgctgtggctgctgtacgacctcggacacctcgaaagatacccgatggctctgggaaacctcgcggacctggaggagctggagcccaccccgggacgcccagaccctctgacactgtatcataaaggaattgcaagtgccaaaacatactatagagatgagcacatttacccgtatatgtacctggccggctaccattgccggaaccgaaacgttcgagaggccttgcaggcatgggctgataccgccaccgtgatccaggattataactattgccgggaggacgaggagatctacaaggagtttttcgaggtagcaaacgatgtaatccccaatctgcttaaagaagcggccagtctgctggaggccggagaggagagaccgggcgaacagagccaaggcacccagagtcaaggctccgcgctgcaggatccagagtgtttcgcgcatttactgaggttttacgacggcatctgtaaatgggaagaggggagtcctacgcctgtcctgcacgtgggatgggccactttccttgtccagagccttggtcgctttgaagggcaggtgcgacaaaaggtgaggatagtgagccgcgaagcagaggctgcagaagccgaagaaccctggggcgaggaggctagggagggacgtcggcgtggacccaggagggaatccaaacctgaagagccccccccgcccaagaagcccgctctggacaagggactcgggactggccaaggagctgttagcggcccccctaggaaaccccccggcaccgtggctggaacagcccggggtcccgagggtggttccacagcccaagttcccgcacccacagcgtcccccccgccggaaggtcctgtcttgaccttccagtccgagaaaatgaagggaatgaaagaattgctggtggcaaccaagatcaactccagcgctatcaaactgcagctgaccgctcaatcccaggtccagatgaagaagcagaaggtgagcacacctagtgattacacccttagcttcctgaaacggcagaggaaggggctttag

SEQ ID NO: 16099 - DNA, 1848 bp, synthetic construct
  misc_feature 1..1848: note = Description of Artificial Sequence: Synthetic coding sequence
  source 1..1848: mol_type = other DNA
atggggcttaaagctgcccagaaaacactcttccctttgaggagtatagatgacgttgtccgtctgtttgccgcggaacttggacgggaagaacccgacctcgtgcttctgtctttggtgttagggttcgttgaacatttcttggcagtgaatcgcgtcatacctaccaatgtgccagagctgacctttcagcctagccccgctccagaccccccaggcggcttgacatacttcccagtggccgatctgtccataatcgccgccctttacgccaggttcactgcacaaatcaggggggccgtggacctctcactgtatccacgggaaggtggagtatcctctcgggaactggtgaaaaaagtctctgacgttatctggaattccttatcacgttcatattttaaggatagagctcacatacagtccctgtttagcttcatcacaggctggtccccagtggggactaaactcgacagttcgggtgttgcatttgccgttgttggagcgtgtcaagctctgggcctgagggacgtccatctggctcttagcgaagaccatgcatgggtagtgtttgggcccaacggcgaacagacggcagaagtgacttggcacggaaaggggaatgaggatagacgggggcaaaccgtgaacgccggggtggccgagaggagctggctttatctcaagggttcctacatgagatgtgacagaaagatggaggtggcctttatggtgtgtgcaattaatcctagcatcgatttacacaccgatagtttagaattgctgcaactgcagcagaaactgctgtggctcctctacgacctgggccatctcgaacggtacccaatggcccttggaaacctggccgacctcgaggagctggagcccacacctgggaggccagatcccctcactctctatcacaagggcatagcgtcggccaaaacctactatagggacgagcacatttacccatacatgtacctagccggataccattgccgaaaccgaaacgtgcgcgaggccctgcaagcctgggccgacactgccacggtcatacaagattacaattattgtcgggaggatgaggaaatctacaaggaattcttcgaggtggccaatgacgtcatcccaaatctactgaaagaagcggctagtcttctagaagcgggggaggagaggccaggcgaacagagccagggaacccagtcacagggctctgccctccaggatcctgagtgtttcgctcacctgctcaggttctatgacgggatctgcaagtgggaggagggaagtcccacccccgtcttacatgtgggctgggctaccttcctcgtgcagagtctgggtcggttcgagggccaggtgaggcagaaggttagaattgtgagtcgtgaagccgaggccgctgaggctgaggagccatggggagaggaagcgcgagagggccgacgcaggggtcccagacgcgagtcgaaacctgaggaaccccctcctcctaagaagccagctctggacaagggcctcggcacagggcagggagccgtcagcgggccacctaggaagcctcccggcaccgtagccggcacggcaaggggccccgaaggtgggtcaacagctcaggtccccgcaccaaccgcctcgccccctccagaaggtccagtgttaacgttccaatctgagaagatgaaaggcatgaaagaactccttgtcgccaccaagatcaatagttccgccatcaaattgcagctgaccgctcagagccaggttcaaatgaagaaacaaaaggtcagtactccttccgactatactctgagttttctgaaacgccagaggaagggcctgtag

SEQ ID NO: 16100 - DNA, 1848 bp, synthetic construct
  misc_feature 1..1848: note = Description of Artificial Sequence: Synthetic coding sequence
  source 1..1848: mol_type = other DNA
atgggtttgaaggcggctcagaaaaccctgtttcccctgcgatcgattgatgatgtggtccggttatttgcagctgagttgggccgagaggaacctgatctggtattgctgtccctggtgctcggcttcgtcgaacacttcttggcagtgaatcgcgtcatacctacgaatgtccctgagcttactttccagccatctcccgcccctgacccccccggcgggctgacttactttccagtggcagatcttagtattatcgccgcactttatgcgaggtttacagcccagattcgcggtgccgtggatctctctctttaccctcgggagggaggcgtgtcctctcgagagctggtgaagaaagtttcagatgtgatctggaacagtctatctagaagttattttaaagatcgcgcccacattcagtcgctcttttcctttatcacgggatggagcccagtggggacaaaactcgattcttcgggtgtcgcttttgccgtcgtgggcgcatgccaggccctgggtcttcgtgacgtccatctagcactgagcgaagatcacgcctgggtggtattcgggccaaacggagaacagaccgccgaggttacctggcatgggaaaggtaacgaggatcggcggggtcagaccgtcaacgctggagtagctgagcgctcttggctgtatctgaaagggtcttatatgcggtgcgatcgcaagatggaggtggccttcatggtgtgcgctattaatccgagcatcgatctgcacaccgattcgctggagctcctgcaactgcaacagaaactcttgtggctgctctatgatctgggacatttggaaagatacccaatggccctggggaacctagccgacctcgaggagttggagcccaccccaggtcggcctgatccactcaccctgtatcacaaggggattgcgagcgccaagacctattaccgggatgaacatatctacccttacatgtacctcgcagggtatcactgtcgcaacagaaacgtgagagaggctctgcaggcctgggctgacaccgccacagtcatccaggattacaactattgccgcgaggacgaggaaatatacaaagagttcttcgaggtagcaaacgacgttataccaaatcttcttaaggaggccgctagcctgctagaagccggagaagagaggccgggcgaacaaagtcaggggacccagtcacaagggtctgcactgcaagacccagaatgcttcgcccaccttttacgcttctacgacgggatttgtaaatgggaagagggctccccaacccctgtgctgcacgttggctgggcgacttttctcgtgcaaagccttggtaggtttgagggacaggtacggcaaaaagtgcgtatcgtatctcgcgaagcggaagctgcggaggcagaggagccatggggtgaggaggcgagagagggcagaagaagaggaccacggcgcgagagcaagccggaggagccaccgccacccaagaagccagcactggataagggcctgggtactggccagggagccgtgtcaggtcccccccggaaaccacctgggacggtcgcggggacggcccgggggccagaaggcggctctactgcccaggtgcccgcgcccaccgctagtccaccccctgaaggtcccgtgctgacatttcaaagcgagaaaatgaaaggaatgaaggaactgttagtggctaccaagattaattcttccgccataaaactccagttgacagctcagtctcaagtgcagatgaagaagcagaaggtttcaaccccgtcagattataccctgtcatttcttaagcgccagaggaaaggtttgtag

SEQ ID NO: 16101 - DNA, 786 bp, synthetic construct
  misc_feature 1..786: note = Description of Artificial Sequence: Synthetic coding sequence
  source 1..786: mol_type = other DNA
atggggctgaaagctgcccagaagacactgttccccctccgatcgatagacgacgtggttagactgttcgcagctgaactgggtcgcgaagaaccggacttggtactgctctccctcgtgctgggtttcgtggagcacttcttggcagtgaaccgggtgataccaacaaacgtacctgaactgacgttccagccttcccccgctcccgaccctcctgggggactgacttacttccctgttgcagacttgagtatcatcgctgccctgtacgctaggtttactgctcaaatccggggagcagtcgacctgtctctataccctcgggaagggggagtgagtagccgcgagctggtgaagaaagtctccgacgttatttggaactccctgtcccggtcttattttaaagatcgagctcatatacagagtctcttctccttcataaccggcactaaactggacagctctggtgtggcctttgccgtggttggggcttgtcaggcactggggctgagggacgttcatttggctctttccgaggatcatgcctgggtggttttcggtccaaatggagaacagacagcggaggtcacgtggcacgggaaaggaaatgaggataggcgtggccaaactgtaaacgcgggagtggcagagcgttcttggctgtatctaaagggaagctatatgagatgtgaccggaaaatggaggtggcctttatggtctgtgcgattaacccttcaatagatctgcacaccgactctcttgagctgttacagttacagcagtag

SEQ ID NO: 16102 - DNA, 441 bp, synthetic construct
  misc_feature 1..441: note = Description of Artificial Sequence: Synthetic coding sequence
  source 1..441: mol_type = other DNA
atgggcctcaaagccgcccagaaaactcttttccctctgcgaagtatcgacgatgtggtgagactgttcgccgcagaactgggtagagaggaaccggacctcgtactcctatcattggtgctagggttcgttgagcatttccttgcagtgaacagggtgatccccaccaatgtgccagagctgacatttcaaccctcccctgcacccgatccccccggaggactcacctactttcccgtggctgatctgtctatcatcgcagccctgtacgctcgattcactgcccagattaggggagctgtggatctgtcactctacccgcgggaggggggcgtgtctagtagggaactagtgaaaaaggtaagtgatgtgatatggaattctttatcccgctcatattttaaggatagggcccacattcagtccttatttagtttttag

SEQ ID NO: 16103 - DNA, 441 bp, synthetic construct
  misc_feature 1..441: note = Description of Artificial Sequence: Synthetic coding sequence
  source 1..441: mol_type = other DNA
atgggtttgaaggctgcccagaagactctatttcctctccgctccatcgacgacgtcgtgcggctgtttgccgccgagctcggcagggaggaaccagacttggtccttctctccctggtactggggttcgtggaacactttctcgcagtgaatcgagtgatcccaacaaacgtgcctgaactcacatttcagcctagccccgctccagatcctccgggcggcctcacctacttcccagtcgctgacctgtctatcatcgcagcactgtatgccaggttcaccgcccagatcaggggtgccgttgacctgtccctctatcccagggaggggggagtatcttcgagagagctggtgaaaaaggtgagtgatgtgatttggaatagtttgtctaggagttattttaaagatcgggcacatatccaaagcttgttcagcttttag

SEQ ID NO: 16104 - DNA, 1041 bp, synthetic construct
  misc_feature 1..1041: note = Description of Artificial Sequence: Synthetic coding sequence
  source 1..1041: mol_type = other DNA
atggggctgaaagccgcccagaaaacgctgtttccattacgctcaatcgacgacgttgtgaggctattcgctgcggaactgggcagagaagagcctgatttagtcctcctgagcttagttctggggttcgtggaacactttctggcggtcaatcgagttataccgactaacgtgccagaacttacatttcagccatcccccgcgccagacccaccaggtggtcttacctatttcccagttgctgacctatcaatcatcgcagctctctacgcccgcttcaccgcccaaattcgcggcgccgtggacctgtcactttatccacgtgaaggcggcgtctctagtcgggaactcgttaaaaaagtctccgatgtgatctggaattctttgagtagatcatactttaaagacagagcccacatacagtctcttttcagctttataaccggcactaaactagatagctctggcgtggctttcgcagtcgtgggtgcgtgtcaggccttgggcctgcgggacgttcacctcgcgctaagtgaggaccatgcctgggtggtttttggcccgaatggcgaacagacagctgaagttacttggcacggcaaaggcaacgaagacaggcgtggccagactgtgaacgccggagtcgccgaacgaagctggctttaccttaaagggtcatacatgcgatgcgaccgcaaaatggaggtggcgttcatggtgtgcgccataaacccctctattgatctacatactgattcactcgagctcctgcagttgcagcagaaactcctttggctgctgtacgacctgggacaccttgagaggtaccctatggccctggggaacctggccgacctggaggagctggagcccacgcccggaaggccagatcccctcaccctctaccacaaaggcatagcatcagccaaaacatactacagagacgaacacatctacccatacatgtatttagcgggctatcattgcagaaatagaaatgttagagaggccctgcaagcctgggccgatacggccacttag

SEQ ID NO: 16105 - DNA, 1848 bp, synthetic construct
  misc_feature 1..1848: note = Description of Artificial Sequence: Synthetic coding sequence
  source 1..1848: mol_type = other DNA
atgggtctgaaagcagcgcagaagaccttgttccccctgagatcgatcgacgacgtagtgcggttgttcgccgcagagttaggaagggaggaacctgatctggtccttctttctctagtcctgggttttgttgaacacttcctagccgttaatagagtgattccgactaacgtcccagagctcactttccaaccatccccagcccctgacccccccggaggactaacctatttcccggtggcagacctttccatcattgccgcactctatgctagatttaccgctcagataaggggggccgtcgatctgagcctctacccacgggaagggggtgtaagctcccgggagcttgtgaaaaaagtaagtgacgtcatatggaatagtcttagccgttcatattttaaggatcgcgcgcatatccagtccttgttttcatttattactggatggtccccagtgggaaccaagttggatagttcaggcgtagcctttgccgtagtcggtgcatgccaagcgctcgggctgagagatgtccacttggccttgtccgaggaccatgcatgggtggtattcggacccaatggggagcagactgcagaggtaacgtggcacggcaaaggtaatgaggacagaagaggccaaactgtgaacgccggagtcgcagagaggagttggttatacttgaagggcagttacatgaggtgtgacagaaaaatggaggtggcatttatggtgtgcgcaataaatccttctattgatctccacacggacagcctggaattgctgcagctgcagcagaagttgctgtggctgctgtatgacctcggacatctcgaacggtatccgatggcccttggcaatctagcggacctcgaagagctggagcctactcccggccgtccagatccgctcactctgtaccacaagggaatcgcgtcagcaaagacgtactaccgggacgagcatatctacccctatatgtaccttgccggttaccactgtagaaatcgaaatgttcgggaagctctccaggcttgggcagacaccgctacggtgattcaggattacaattactgccgagaagatgaagagatctacaaagagttttttgaggtggccaacgacgttatccctaatctgttaaaggaggctgcgtctctgctggaggcaggagaggagcgacccggtgagcagagtcagggcacccagagtcagggatcggcgctgcaggatccagaatgtttcgcccacctgttgaggttctacgatggcatttgcaaatgggaggaggggagcccgacgcctgtgctgcacgtgggctgggccacgtttctggtgcagagcctaggacgttttgaaggacaggtgcggcaaaaagtccgcattgtgtctcgagaggctgaggccgcggaagccgaagaaccttggggtgaagaagcccgggagggcaggagacgaggcccaagaagagagagcaagcccgaggagcccccccctcctaaaaaaccagccttggacaagggtctgggcacaggtcagggggccgtgtccggaccaccccgaaagccacccggcaccgtggctggtacagcccgaggccctgagggggggtccaccgcccaagtccccgcgcccacagctagcccccctcctgaaggaccagtgctgacattccagagcgagaagatgaagggcatgaaggaactgctcgtggccaccaaaattaacagctctgccatcaagctgcagctgaccgctcagtcccaggtgcaaatgaaaaagcaaaaagtgtcgactccaagcgattacacactcagcttcctgaagcgacaaaggaaaggactgtag

SEQ ID NO: 16106 - DNA, 846 bp, synthetic construct
  misc_feature 1..846: note = Description of Artificial Sequence: Synthetic coding sequence
  source 1..846: mol_type = other DNA
atgggcctgaaagctgcacaaaagaccctctttccactgcgcagtatagacgacgtagtcagattgtttgcagcagaactgggccgcgaagagcccgatctcgtacttctcagcctcgttctaggattcgtagagcatttcctcgccgtgaatagggtcattccgaccaacgtgcccgagctgaccttccagccctcacctgccccagatccgcctggcggtctgacctacttccccgtggccgatctgtctatcattgcggctctatatgcgagatttacagcccagatccggggagctgtggatctctcactgtacccacgagaaggcggcgtgagctcgcgcgagctggtcaaaaaggtttctgatgttatatggaacagcttatcccgttcctatttcaaggacagggcacatatccagagcctgttctctttcataacaggcaccaagttggactcgagtggtgtggcatttgccgttgtcggggcgtgccaggctctgggattgcgagacgttcatctcgccctctcagaggaccatgcttgggtcgttttcggacctaatggggaacagactgcggaggtgacctggcatggcaaaggtaatgaagatagacggggtcagaccgtgaatgccggagtcgccgagagatcctggctatatctgaaaggcagttatatgcggtgcgaccgcaagatggaggtggccttcatggtttgcgccataaacccttccattgacctgcataccgactccttggaactgctgcagctgcagcagaaactcctgtggctcctgtatgatctaggccaccttgagcgctacccaatggccttgggatag

SEQ ID NO: 16107 - DNA, 1656 bp, synthetic construct
  misc_feature 1..1656: note = Description of Artificial Sequence: Synthetic coding sequence
  source 1..1656: mol_type = other DNA
atggccgctcctgtgcggcttggccgaaaaaggcctttgcctgcctgccccaacccacttttcgtccgctggctgaccgaatggagggacgaagctactcgcagtaggcggagaacacgctttgtgtttcaaaaagcccttaggtcgctgcgccggtatccacttcccctgcgaagcggcaaagaagccaagatcctgcagcactttggtgacggattgtgcaggatgttggacgagagattacagagacacaggacgtccggcggagaccacgcccctgattcccctagcggcgagaactctcctgccccacagggccgccttgctgaggtccaagactcaagtatgccggtgcctgcccagcctaaagccggcggttccggctcctattggccggcccggcactcaggtgctcgcgtgatattactggtgctttacagggaacacctgaaccccaacggccatcacttccttaccaaggaggagctgctgcaacggtgcgcacagaagtcacctcgcgtcgctccaggcagtgcccgcccgtggcctgctctaagaagcctgctgcataggaatctagtgctgaggacacaccaacctgcacgatacagccttactcccgagggtttagagctggcgcaaaagcttgcggagagcgaaggcctctcactgttaaacgttggtatcggccccaaggagccaccaggcgaagagacagccgtgcctggagccgcgtctgccgaattagccagtgaagctggcgtgcagcaacaaccattggaattgagaccaggtgagtatagagtcctcctgtgcgtggatattggtgaaacccgcggcggggggcatcgtcccgagttgctgagggaactacagaggcttcacgtaacgcatacagtgagaaagctgcacgtgggcgactttgtgtgggtggcacaagagacaaatccaagggatcctgccaacccaggagagctcgtgctggatcacatcgtcgagcggaaacggcttgacgatctttgcagctctatcattgatgggcgctttagggagcagaaattccggctcaaaaggtgtggcttagagaggcgggtttacctcgtcgaggaacacggtagtgtgcataatctatcgttgcccgaaagtacactgctacaagccgtcaccaatacacaggtgatcgatggcttcttcgttaagaggactgccgacatcaaggaaagtgccgcatacctcgctctgttgactcgcggcctgcagagactgtatcaaggtcataccctgagatcgaggccatggggcacccccggtaatcctgagtccggcgcgatgaccagccctaacccactgtgcagcctcctcaccttttctgattttaacgccggagccatcaaaaacaaggcccagagcgttcgagaggtgtttgcacggcagcttatgcaggtgcgtggcgtgtcgggggagaaagcagccgctctagtagatcggtatagcacccctgcatctctgttggccgcctatgacgcttgcgctactcctaaagagcaagagactctgctctcaacgataaagtgcggtaggcttcagagaaacctagggcctgccctgtctcgaacattgtctcagctgtactgtagttacgggcccctgacttag

SEQ ID NO: 16108 - DNA, 1656 bp, synthetic construct
  misc_feature 1..1656: note = Description of Artificial Sequence: Synthetic coding sequence
  source 1..1656: mol_type = other DNA
atggccgcgcccgtgcgtttggggcgcaaaagacctctacctgcatgcccaaatccattatttgtgcgatggttgaccgaatggcgagacgaggccacacgtagcagacgcaggacgaggttcgtgtttcaaaaagccctccggagcctgcggaggtacccacttcctctgcgttctggtaaggaagccaaaattcttcagcatttcggggatggactgtgccgtatgctagatgagaggctccagcggcataggaccagcggtggtgatcatgcgcccgactccccttcaggcgaaaactctccggcaccacagggtagactggctgaagtgcaagacagcagtatgccggtacccgctcagccaaaagccggcggatcgggatcttattggccggctcggcattccggggcccgcgtcattctacttgtattatacagagagcatcttaatccaaacgggcaccattttctgaccaaggaagaattacttcagaggtgcgcccaaaagtcccctcgcgtggccccaggtagcgcccgcccttggcctgctctgcgatctctgttacaccgcaacctggtgcttcgcactcaccagcctgctagatattctctgacccctgaggggcttgagctagcccaaaaattagccgagagcgaaggactttcgctgctgaacgtcggaatcggacccaaggagcctccgggagaggagaccgctgtgccaggggcagcttctgcagaactcgcctcagaggccggtgtgcagcagcagccactggaattgagaccaggcgaatatagagtactcctgtgcgtggatatcggcgagaccagagggggaggccatcgcccagaattgttgagggaacttcaacggctgcacgtcacacacactgtgagaaagctccatgtgggcgactttgtgtgggtagcacaggagactaatcctcgggacccagcaaatcccggcgagctggtccttgaccacatcgtggagcgcaagcggctggatgacctatgttcgagcattatcgacggcagattcagagaacagaagttccgcttgaagcgctgtgggctggagcgacgcgtgtatctagtggaggaacacgggtctgtgcacaacctgtccctgccggagagtacactcttgcaggccgtaactaatacacaggtcatcgacggcttcttcgtgaagcgcacagccgatatcaaggaatccgcggcatatttagccctgctgacccgggggctgcagcggctgtaccaaggtcataccctgcgctcgaggccttggggcacacctggcaatcccgagtcaggggctatgacatcaccaaacccactctgcagtcttctcacattttccgacttcaatgcaggagcaatcaagaataaggcccaaagcgtacgtgaagtgttcgcacggcaattaatgcaggtgcgaggagtctccggggaaaaagcagcggcgttagtcgatcgttactctactccagcttccctgctggctgcttacgatgcttgcgccacacccaaggagcaggaaacgctcttatcaactattaaatgtggacggctccagcgtaatctgggacccgccctgagtaggacactgtctcagttatactgtagttatgggcccctgacatag

SEQ ID NO: 16109 - DNA, 2490 bp, synthetic construct
  misc_feature 1..2490: note = Description of Artificial Sequence: Synthetic coding sequence
  source 1..2490: mol_type = other DNA
atgaacagcggcgtcgcaatgaagtacggaaatgatagctcagccgaactcagcgagctgcactcggccgcattggcatctttgaagggcgatatcgtggagctgaacaagcgcctgcaacagaccgaaagggagagagacctccttgagaagaagctggccaaagcccaatgtgagcagagccacctgatgcgagaacatgaggacgtgcaggagaggacgaccttgcgctatgaagagcggattaccgagctgcattctgtgattgctgagctgaacaagaagatcgacagactgcaaggcaccaccatccgggaggaagatgaatactctgaattacgcagtgagttgtcccagtctcagcacgaggtgaatgaggattctcgatcgatggatcaggaccagaccagtgtgtctatccctgagaaccagtcaacgatggtcaccgccgacatggataattgttcagacttgaattcagagcttcagcgggttcttaccgggttggaaaatgtggtatgcggtcggaaaaaatcttcttgctccttgagcgtggccgaggtggacaagcacattgagcagctgaccaccgctagcgaacattgcgacctcgccataaagacagtggaagaaatcgaaggcgtcttaggacgtgacttatacccaaacctggccgaggagcgcagccgttgggaaaaggaactcgccgggctccgcgaggagaatgagtccctcaccgctatgttatgttccaaagaggaggagttgaaccgcaccaaagcaactatgaacgcaatccgggaggagcgtgatcgtctgcgcaggcgcgtcagagagctgcagacgaggctgcaatccgtgcaggcgaccggcccatcatcaccaggccgcctgacttccacaaacaggccaatcaatcccagtactggcgagctgtcaacctcttcctctagtaatgatattccaattgcaaaaattgcagagagggttaagctctccaagacacggtctgaatcatcatcgtctgacaggccagtgctgggctcagaaattagtagcatcggcgtatcatcttcagtggccgagcatctcgcacacagcctgcaagattgctctaacatccaggagatcttccaaacactgtacagccacggctcagcaatatccgagtccaaaatacgcgagttcgaagtcgaaaccgaacgactgaactcacggatcgaacacctgaaatcccagaacgatcttctcaccattacactggaggagtgcaaatctaacgctgaacggatgagcatgctggttggaaagtacgagtccaatgccacagcactgagactcgcactccaatattccgagcaatgcatcgaagcctacgagctactcctggctctcgctgagagcgaacagtcactcatacttgggcagttccgagctgccggcgtgggcagttcaccaggcgatcaatccggggacgagaatatcacccaaatgctgaagagggcacatgattgtaggaagacagctgagaatgctgctaaagcactgctgatgaagctggatgggagttgtggcggtgcttttgccgtagcgggatgctcagtacaaccttgggagtctctgtcttcaaactctcacacgagcacgacaagctctacagcatcctcatgcgatacggagtttacaaaggaggacgagcaaagattgaaggattacatccagcaactgaagaacgatcgagctgctgtcaagctgacaatgctggaactggagtccattcacattgatccactgagctatgatgtgaaacctcgcggcgatagtcaaaggctagatctggaaaacgcggttctgatgcaagaattgatggcgatgaaagaagaaatggctgagttgaaggcacagctgtacctccttgagaaggagaaaaaagccttagagttgaaattgtctacgcgtgaggcgcaagagcaagcctacctagtgcacattgagcacctaaagagcgaggtggaggaacagaaggaacagcggatgcgttctctctccagcactagtagtggctctaaggacaaacccggaaaggaatgcgcagatgcggcctcacctgctctgtctctcgccgaattgcgaaccacttgttctgagaatgaattggcagccgaattcaccaacgctataaggagggaaaaaaagctcaaggctcgtgtgcaggagttagtttccgccttggagaggctcaccaaaagctcggagatacgacatcaacaatcagccgaattcgtgaacgacctgaaaagggctaacagcaacctggtggccgcgtacgaaaaggccaagaaaaaacaccagaacaaactaaaaaagctggaatcacagatgatggctatggtggaaagacacgagacacaagtgaggatgctgaaacagaggatcgccctgcttgaggaagagaacagccgccctcatactaacgagacaagcctctag

SEQ ID NO: 16110 - DNA, 2133 bp, synthetic construct
  misc_feature 1..2133: note = Description of Artificial Sequence: Synthetic coding sequence
  source 1..2133: mol_type = other DNA
atgaaactggtgttcctggtgttgctgttccttggagctctcggactttgtctggcagggagacgccggagcgttcaatggtgcgccgtgtcccagccagaagcaaccaaatgttttcagtggcagcgaaacatgaggaaagtccgcggtcccccagtgagctgtatcaagcgggatagtccaattcagtgtattcaggcgattgcggagaacagagccgacgccgtgacattagatggcggatttatttatgaagcaggattagcaccctacaaacttaggcccgtggccgccgaggtgtacgggacagagcggcagcccaggacacactattatgcggttgccgtggtgaagaagggtgggtctttccagctcaacgagctgcagggacttaagagttgtcacaccggccttcggaggactgccggttggaatgtgcccatcggaacattgagaccctttctgaattggaccggcccgcccgagccaatagaggctgccgtggcccggttcttctcggccagctgcgtgcccggagccgacaagggacagttcccaaatctatgccgcctttgcgctggcacgggggagaataagtgcgcttttagctcccaggaaccctacttttcctacagcggagccttcaagtgtctgcgagacggggctggagatgttgcgttcatacgggaatccactgtgtttgaggacctatccgatgaggccgagcgcgacgaatacgagctcttatgcccagacaataccaggaagccggttgacaaattcaaggattgtcacctagccagggtccccagccacgccgtggtcgctcgcagcgtgaacggcaaagaagacgctatttggaatctgctgcgacaggctcaggagaagttcggtaaggacaaatcacctaagttccagctgttcgggagtccatcgggccagaaagacctgttattcaaggactcggccattggcttcagccgggtgcctccaaggattgactcaggactgtacttgggctccgggtatttcactgccatacaaaatctaaggaagagtgaggaagaagtggcagctcgtcgtgctagagtggtctggtgtgctgtcggcgaacaagagctgcggaagtgcaatcagtggtctggattaagtgagggcagcgttacctgtagcagtgcaagcaccactgaggattgtatcgccctggtgttaaaaggcgaggccgacgcaatgagcttagatggcgggtatgtgtataccgcaggtaaatgtggtttggtgccggtgctggctgaaaattataagtcacagcagtcatcagatcctgatcccaattgcgtggatagacctgtcgagggctacctggcagtcgctgtggtgcgccgttccgacacttcacttacatggaactctgtgaagggtaagaaatcatgtcacaccgcagtggatcgaacggccgggtggaacataccaatgggtctcttatttaatcagacagggagttgcaaatttgatgaatacttctcccagtcatgtgccccaggttcagaccctcggagtaatttatgtgccctgtgtataggagacgagcagggggaaaataagtgtgtgccaaattcaaatgagaggtattacggatacactggggcgtttcggtgcctggccgagaacgcaggagacgtggcattcgtgaaagatgtcacagtcttgcagaacactgacggcaataataacgaggcatgggccaaagacctcaagttagctgatttcgccttgctttgcctggacggaaagcggaaaccagttacggaggcccgatcatgccacctagccatggcccccaaccacgctgtggtctctcgtatggacaaggtagaaagattgaagcaggttttactgcatcagcaggctaagtttggtagaaatggatcggattgtcccgacaagttttgcctgtttcaatccgagactaaaaatctgctgttcaatgataacacagaatgccttgcccgattgcacggtaagacaacctacgaaaaatacctcgggcctcagtacgtcgccggaattaccaatctgaagaaatgcagcacctccccacttctcgaggcgtgtgagttccttaggaagtag

SEQ ID NO: 16111 - DNA, 1656 bp, synthetic construct
  misc_feature 1..1656: note = Description of Artificial Sequence: Synthetic coding sequence
  source 1..1656: mol_type = other DNA
aagcccctgttgaatcacgttctcgcaataaagggaccaaggtcacgatggagaacattctacaatatagcgacccgcagaaaggccctcaagaatccgagcgaggagtacggtaaaattctggaggtggtgggaagatactccgtgcataatgctggtattagtttcagcgttaaaaagcaaggggaaactgttgccgacgtgcgcactctgccaaatgctagtacagtcgataatatacggagcattttcggcaatgccgtatcccgcgagttaattgaaatcggctgtgaagataagactctggcgtttaagatgaacggttatataagcaatgccaactactctgttaagaaatgtatcttcttactgttcatcaatcacaggctggtcgaatctacctcactgcggaaagctatagaaacagtttacgccgcttatttaccaaagaatacccacccattcttgtatctgtccctggagatctcgcctcaaaatgtcgatgtcaacgtccaccctaccaagcatgaggtccattttctgcatgaggagagcattttagagcgtgtacagcagcatatcgagagtaaattgctaggaagcaactcctcaaggatgtacttcacgcagaccctcctgcccggcctcgctggaccatcgggggagatggtgaagagcacaactagtctgactagttctagcacttctggtagttcggataaggtctatgcccatcagatggtgcggaccgattcaagagaacagaaactcgacgcgtttttgcagccactgtcaaagcctctgtctagtcagccacaagccattgttacagaagataagacagatatttcttcagggagggcccgccagcaggatgaagaaatgctggagttgcctgcccccgccgaagtggcggccaagaaccagagcttagagggcgacaccacaaaaggcaccagcgaaatgtccgagaagcgcggacccaccagctcaaacccacgtaaacgccatcgggaagactcggacgtggagatggtggaggacgattccaggaaagagatgacggcggcttgtacacctagacgcagaatcataaacctaacaagtgtcctgagtctccaggaggaaattaacgagcagggccacgaagtcttacgggagatgctgcataaccattccttcgtgggatgtgttaatccacagtgggccctggctcagcatcagacaaagctgtacctgctcaacactactaaactctccgaggaattgttttaccaaatactgatctatgattttgcaaattttggggtcctgagattgtctgagcctgctcctctgttcgatctagctatgcttgccttagacagcccggaatcaggctggaccgaagaggatggtccgaaagagggtctggctgaatacatcgtggaattcctgaagaagaaagctgagatgctggccgattatttctcactggaaatcgatgagtcagaggttcctggctctatccccaattcatggaagtggacagtcgaacacattgtttataaagccctgcgctcgcatatcctcccaccgaagcacttcaccgaggatggtaacatactgcagctggcaaatctgccagacctatacaaggtgttcgaacgctgttag

SEQ ID NO: 16112 - DNA, 351 bp, synthetic construct
  misc_feature 1..351: note = Description of Artificial Sequence: Synthetic coding sequence
  source 1..351: mol_type = other DNA
atgagcgagaagagaggaccaaccagctccaacccacgcaagaggcatagggaagacagtgacgtggagatggtcgaggacgattcaaggaaagagatgactgccgcctgcacccctcgaaggagaatcatcaatctaacatcagtgctttcactgcaagaggaaatcaatgaacaaggacacgaggtactccgggagatgttgcataaccacagctttgttggttgtgttaaccctcagtgggctctggcacagcatcagactaagctgtacctacttaataccaccaaacttagagtgaagtgcttggcgccattccagacaccaggctctgggctctggaatacctag

SEQ ID NO: 16113 - DNA, 525 bp, synthetic construct
  misc_feature 1..525: note = Description of Artificial Sequence: Synthetic coding sequence
  source 1..525: mol_type = other DNA
atgtcagagaagagagggcccacctcgtctaaccctcggaagaggcaccgagaggacagcgacgtagaaatggttgaggatgactccagaaaagaaatgacagctgcctgcactcctagacggaggatcattaacctgacgtctgtcctgagcctccaggaggaaatcaatgagcaggggcatgaggtcctacgcgagatgttacataatcactctttcgtgggatgcgtaaatccccagccgtggcacagcataaaacctagctatactttctccactcctccgtctttcagcgaggaactcttttatcagatcttgatctacgacttcgccaacttcggcgtgttacggctatcgtctgaagtcccagggtctatccctaacagctggaagtggacagtcgagcacatcgtttacaaggccctgcggagccacattctcccacccaagcatttcactgaggacggaaacatcctccagttggccaatctccccgatctctataaagtcttcgaacgctgctag
